United States Patent Application Publication US 2020/0095579 A1 - sequence listing, part 24

SEQ ID NO: 385077 - DNA, 20 bp, Artificial Sequence
  Description of Artificial Sequence: Synthetic oligonucleotide
  Target: LAMA2; (+) strand; PAM type: YTN; PAM sequence: TTT
aactcttatgacggagtggc

SEQ ID NO: 385078 - DNA, 20 bp, Artificial Sequence
  Description of Artificial Sequence: Synthetic oligonucleotide
  Target: LAMA2; (+) strand; PAM type: YTN; PAM sequence: TTA
actcttatgacggagtggca

SEQ ID NO: 385079 - DNA, 20 bp, Artificial Sequence
  Description of Artificial Sequence: Synthetic oligonucleotide
  Target: LAMA2; (+) strand; PAM type: YTN; PAM sequence: CTC
ttatgacggagtggcagtgc

SEQ ID NO: 385080 - DNA, 20 bp, Artificial Sequence
  Description of Artificial Sequence: Synthetic oligonucleotide
  Target: LAMA2; (+) strand; PAM type: YTN; PAM sequence: CTT
atgacggagtggcagtgctc

SEQ ID NO: 385081 - DNA, 20 bp, Artificial Sequence
  Description of Artificial Sequence: Synthetic oligonucleotide
  Target: LAMA2; (+) strand; PAM type: YTN; PAM sequence: TTA
tgacggagtggcagtgctca

SEQ ID NO: 385082 - DNA, 20 bp, Artificial Sequence
  Description of Artificial Sequence: Synthetic oligonucleotide
  Target: LAMA2; (+) strand; PAM type: YTN; PAM sequence: CTC
acacacccttagaagtttcc

SEQ ID NO: 385083 - DNA, 20 bp, Artificial Sequence
  Description of Artificial Sequence: Synthetic oligonucleotide
  Target: LAMA2; (+) strand; PAM type: YTN; PAM sequence: CTT
agaagtttccagtgccttcc

SEQ ID NO: 385084 - DNA, 20 bp, Artificial Sequence
  Description of Artificial Sequence: Synthetic oligonucleotide
  Target: LAMA2; (+) strand; PAM type: YTN; PAM sequence: TTA
gaagtttccagtgccttccc

SEQ ID NO: 385085 - DNA, 20 bp, Artificial Sequence
  Description of Artificial Sequence: Synthetic oligonucleotide
  Target: LAMA2; (+) strand; PAM type: YTN; PAM sequence: TTT
ccagtgccttcccaaggaaa

SEQ ID NO: 385086 - DNA, 20 bp, Artificial Sequence
  Description of Artificial Sequence: Synthetic oligonucleotide
  Target: LAMA2; (+) strand; PAM type: YTN; PAM sequence: TTC
cagtgccttcccaaggaaag

SEQ ID NO: 385087 - DNA, 20 bp, Artificial Sequence
  Description of Artificial Sequence: Synthetic oligonucleotide
  Target: LAMA2; (+) strand; PAM type: YTN; PAM sequence: CTT
cccaaggaaagatcagactc

SEQ ID NO: 385088 - DNA, 20 bp, Artificial Sequence
  Description of Artificial Sequence: Synthetic oligonucleotide
  Target: LAMA2; (+) strand; PAM type: YTN; PAM sequence: TTC
ccaaggaaagatcagactct

SEQ ID NO: 385089 - DNA, 20 bp, Artificial Sequence
  Description of Artificial Sequence: Synthetic oligonucleotide
  Target: LAMA2; (+) strand; PAM type: YTN; PAM sequence: CTC
tttgagcattagaaaccctc

SEQ ID NO: 385090 - DNA, 20 bp, Artificial Sequence
  Description of Artificial Sequence: Synthetic oligonucleotide
  Target: LAMA2; (+) strand; PAM type: YTN; PAM sequence: CTT
tgagcattagaaaccctctg

SEQ ID NO: 385091 - DNA, 20 bp, Artificial Sequence
  Description of Artificial Sequence: Synthetic oligonucleotide
  Target: LAMA2; (+) strand; PAM type: YTN; PAM sequence: TTT
gagcattagaaaccctctgt

SEQ ID NO: 385092 - DNA, 20 bp, Artificial Sequence
  Description of Artificial Sequence: Synthetic oligonucleotide
  Target: LAMA2; (+) strand; PAM type: YTN; PAM sequence: TTG
agcattagaaaccctctgta

SEQ ID NO: 385093 - DNA, 20 bp, Artificial Sequence
  Description of Artificial Sequence: Synthetic oligonucleotide
  Target: LAMA2; (+) strand; PAM type: YTN; PAM sequence: TTA
gaaaccctctgtaatctgac

SEQ ID NO: 385094 - DNA, 20 bp, Artificial Sequence
  Description of Artificial Sequence: Synthetic oligonucleotide
  Target: LAMA2; (+) strand; PAM type: YTN; PAM sequence: CTC
tgtaatctgactacctttcc

SEQ ID NO: 385095 - DNA, 20 bp, Artificial Sequence
  Description of Artificial Sequence: Synthetic oligonucleotide
  Target: LAMA2; (+) strand; PAM type: YTN; PAM sequence: CTG
taatctgactacctttccag

SEQ ID NO: 385096 - DNA, 20 bp, Artificial Sequence
  Description of Artificial Sequence: Synthetic oligonucleotide
  Target: LAMA2; (+) strand; PAM type: YTN; PAM sequence: CTG
actacctttccaggctccaa

SEQ ID NO: 385097 - DNA, 20 bp, Artificial Sequence
  Description of Artificial Sequence: Synthetic oligonucleotide
  Target: LAMA2; (+) strand; PAM type: YTN; PAM sequence: CTA
cctttccaggctccaagccc

SEQ ID NO: 385098 - DNA, 20 bp, Artificial Sequence
  Description of Artificial Sequence: Synthetic oligonucleotide
  Target: LAMA2; (+) strand; PAM type: YTN; PAM sequence: CTT
tccaggctccaagccctcaa

SEQ ID NO: 385099 - DNA, 20 bp, Artificial Sequence
  Description of Artificial Sequence: Synthetic oligonucleotide
  Target: LAMA2; (+) strand; PAM type: YTN; PAM sequence: TTT
ccaggctccaagccctcaac

SEQ ID NO: 385100 - DNA, 20 bp, Artificial Sequence
  Description of Artificial Sequence: Synthetic oligonucleotide
  Target: LAMA2; (+) strand; PAM type: YTN; PAM sequence: TTC
caggctccaagccctcaact

SEQ ID NO: 385101 - DNA, 20 bp, Artificial Sequence
  Description of Artificial Sequence: Synthetic oligonucleotide
  Target: LAMA2; (+) strand; PAM type: YTN; PAM sequence: CTC
caagccctcaactccattct

SEQ ID NO: 385102 - DNA, 20 bp, Artificial Sequence
  Description of Artificial Sequence: Synthetic oligonucleotide
  Target: LAMA2; (+) strand; PAM type: YTN; PAM sequence: CTC
aactccattctatataatgc

SEQ ID NO: 385103 - DNA, 20 bp, Artificial Sequence
  Description of Artificial Sequence: Synthetic oligonucleotide
  Target: LAMA2; (+) strand; PAM type: YTN; PAM sequence: CTC
cattctatataatgccaagt

SEQ ID NO: 385104 - DNA, 20 bp, Artificial Sequence
  Description of Artificial Sequence: Synthetic oligonucleotide
  Target: LAMA2; (+) strand; PAM type: YTN; PAM sequence: TTC
tatataatgccaagtttggc

SEQ ID NO: 385105 - DNA, 20 bp, Artificial Sequence
  Description of Artificial Sequence: Synthetic oligonucleotide
  Target: LAMA2; (+) strand; PAM type: YTN; PAM sequence: CTA
tataatgccaagtttggcat

SEQ ID NO: 385106 - DNA, 20 bp, Artificial Sequence
  Description of Artificial Sequence: Synthetic oligonucleotide
  Target: LAMA2; (+) strand; PAM type: YTN; PAM sequence: TTT
ggcatttcttgcacttatct

SEQ ID NO: 385107 - DNA, 20 bp, Artificial Sequence
  Description of Artificial Sequence: Synthetic oligonucleotide
  Target: LAMA2; (+) strand; PAM type: YTN; PAM sequence: TTG
gcatttcttgcacttatcta

SEQ ID NO: 385108 - DNA, 20 bp, Artificial Sequence
  Description of Artificial Sequence: Synthetic oligonucleotide
  Target: LAMA2; (+) strand; PAM type: YTN; PAM sequence: TTT
cttgcacttatctagacatc

SEQ ID NO: 385109 - DNA, 20 bp, Artificial Sequence
  Description of Artificial Sequence: Synthetic oligonucleotide
  Target: LAMA2; (+) strand; PAM type: YTN; PAM sequence: TTC
ttgcacttatctagacatca

SEQ ID NO: 385110 - DNA, 20 bp, Artificial Sequence
  Description of Artificial Sequence: Synthetic oligonucleotide
  Target: LAMA2; (+) strand; PAM type: YTN; PAM sequence: CTT
gcacttatctagacatcatt

SEQ ID NO: 385111 - DNA, 20 bp, Artificial Sequence
  Description of Artificial Sequence: Synthetic oligonucleotide
  Target: LAMA2; (+) strand; PAM type: YTN; PAM sequence: TTG
cacttatctagacatcatta

SEQ ID NO: 385112 - DNA, 20 bp, Artificial Sequence
  Description of Artificial Sequence: Synthetic oligonucleotide
  Target: LAMA2; (+) strand; PAM type: YTN; PAM sequence: CTT
atctagacatcattagcagt

SEQ ID NO: 385113 - DNA, 20 bp, Artificial Sequence
  Description of Artificial Sequence: Synthetic oligonucleotide
  Target: LAMA2; (+) strand; PAM type: YTN; PAM sequence: TTA
tctagacatcattagcagtc

SEQ ID NO: 385114 - DNA, 20 bp, Artificial Sequence
  Description of Artificial Sequence: Synthetic oligonucleotide
  Target: LAMA2; (+) strand; PAM type: YTN; PAM sequence: CTA
gacatcattagcagtctgct

SEQ ID NO: 385115 - DNA, 20 bp, Artificial Sequence
  Description of Artificial Sequence: Synthetic oligonucleotide
  Target: LAMA2; (+) strand; PAM type: YTN; PAM sequence: TTA
gcagtctgctcttgctattc

SEQ ID NO: 385116 - DNA, 20 bp, Artificial Sequence
  Description of Artificial Sequence: Synthetic oligonucleotide
  Target: LAMA2; (+) strand; PAM type: YTN; PAM sequence: CTG
ctcttgctattccctcagac

SEQ ID NO: 385117 - DNA, 20 bp, Artificial Sequence
  Description of Artificial Sequence: Synthetic oligonucleotide
  Target: LAMA2; (+) strand; PAM type: YTN; PAM sequence: CTC
ttgctattccctcagacaat

SEQ ID NO: 385118 - DNA, 20 bp, Artificial Sequence
  Description of Artificial Sequence: Synthetic oligonucleotide
  Target: LAMA2; (+) strand; PAM type: YTN; PAM sequence: CTT
gctattccctcagacaatcc

SEQ ID NO: 385119 - DNA, 20 bp, Artificial Sequence
  Description of Artificial Sequence: Synthetic oligonucleotide
  Target: LAMA2; (+) strand; PAM type: YTN; PAM sequence: TTG
ctattccctcagacaatccc

SEQ ID NO: 385120 - DNA, 20 bp, Artificial Sequence
  Description of Artificial Sequence: Synthetic oligonucleotide
  Target: LAMA2; (+) strand; PAM type: YTN; PAM sequence: CTA
ttccctcagacaatccctgt

SEQ ID NO: 385121 - DNA, 20 bp, Artificial Sequence
  Description of Artificial Sequence: Synthetic oligonucleotide
  Target: LAMA2; (+) strand; PAM type: YTN; PAM sequence: TTC
cctcagacaatccctgtgaa

SEQ ID NO: 385122 - DNA, 20 bp, Artificial Sequence
  Description of Artificial Sequence: Synthetic oligonucleotide
  Target: LAMA2; (+) strand; PAM type: YTN; PAM sequence: CTC
agacaatccctgtgaaatct

SEQ ID NO: 385123 - DNA, 20 bp, Artificial Sequence
  Description of Artificial Sequence: Synthetic oligonucleotide
  Target: LAMA2; (+) strand; PAM type: YTN; PAM sequence: CTG
tgaaatctaatttattttta

SEQ ID NO: 385124 - DNA, 20 bp, Artificial Sequence
  Description of Artificial Sequence: Synthetic oligonucleotide
  Target: LAMA2; (+) strand; PAM type: YTN; PAM sequence: CTA
atttatttttaaaggcattt

SEQ ID NO: 385125 - DNA, 20 bp, Artificial Sequence
  Description of Artificial Sequence: Synthetic oligonucleotide
  Target: LAMA2; (+) strand; PAM type: YTN; PAM sequence: TTT
atttttaaaggcatttttca

SEQ ID NO: 385126 - DNA, 20 bp, Artificial Sequence
  Description of Artificial Sequence: Synthetic oligonucleotide
  Target: LAMA2; (+) strand; PAM type: YTN; PAM sequence: TTA
tttttaaaggcatttttcaa

SEQ ID NO: 385127 - DNA, 20 bp, Artificial Sequence
  Description of Artificial Sequence: Synthetic oligonucleotide
  Target: LAMA2; (+) strand; PAM type: YTN; PAM sequence: TTT
ttaaaggcatttttcaaacc

SEQ ID NO: 385128 - DNA, 20 bp, Artificial Sequence
  Description of Artificial Sequence: Synthetic oligonucleotide
  Target: LAMA2; (+) strand; PAM type: YTN; PAM sequence: TTT
taaaggcatttttcaaaccc

SEQ ID NO: 385129 - DNA, 20 bp, Artificial Sequence
  Description of Artificial Sequence: Synthetic oligonucleotide
  Target: LAMA2; (+) strand; PAM type: YTN; PAM sequence: TTT
aaaggcatttttcaaaccct

SEQ ID NO: 385130 - DNA, 20 bp, Artificial Sequence
  Description of Artificial Sequence: Synthetic oligonucleotide
  Target: LAMA2; (+) strand; PAM type: YTN; PAM sequence: TTA
aaggcatttttcaaacccta

SEQ ID NO: 385131 - DNA, 20 bp, Artificial Sequence
  Description of Artificial Sequence: Synthetic oligonucleotide
  Target: LAMA2; (+) strand; PAM type: YTN; PAM sequence: TTT
ttcaaaccctacctctgcca

SEQ ID NO: 385132 - DNA, 20 bp, Artificial Sequence
  Description of Artificial Sequence: Synthetic oligonucleotide
  Target: LAMA2; (+) strand; PAM type: YTN; PAM sequence: TTT
tcaaaccctacctctgccac

SEQ ID NO: 385133 - DNA, 20 bp, Artificial Sequence
  Description of Artificial Sequence: Synthetic oligonucleotide
  Target: LAMA2; (+) strand; PAM type: YTN; PAM sequence: TTT
caaaccctacctctgccaca

SEQ ID NO: 385134 - DNA, 20 bp, Artificial Sequence
  Description of Artificial Sequence: Synthetic oligonucleotide
  Target: LAMA2; (+) strand; PAM type: YTN; PAM sequence: TTC
aaaccctacctctgccacaa

SEQ ID NO: 385135 - DNA, 20 bp, Artificial Sequence
  Description of Artificial Sequence: Synthetic oligonucleotide
  Target: LAMA2; (+) strand; PAM type: YTN; PAM sequence: CTA
cctctgccacaaaacctatc

SEQ ID NO: 385136 - DNA, 20 bp, Artificial Sequence
  Description of Artificial Sequence: Synthetic oligonucleotide
  Target: LAMA2; (+) strand; PAM type: YTN; PAM sequence: CTC
tgccacaaaacctatccata

SEQ ID NO: 385137 - DNA, 20 bp, Artificial Sequence
  Description of Artificial Sequence: Synthetic oligonucleotide
  Target: LAMA2; (+) strand; PAM type: YTN; PAM sequence: CTG
ccacaaaacctatccatagc

SEQ ID NO: 385138 - DNA, 20 bp, Artificial Sequence
  Description of Artificial Sequence: Synthetic oligonucleotide
  Target: LAMA2; (+) strand; PAM type: YTN; PAM sequence: CTA
tccatagcacagaatgtatt

SEQ ID NO: 385139 - DNA, 20 bp, Artificial Sequence
  Description of Artificial Sequence: Synthetic oligonucleotide
  Target: LAMA2; (+) strand; PAM type: YTN; PAM sequence: TTT
tgtacattttatatacaacg

SEQ ID NO: 385140 - DNA, 20 bp, Artificial Sequence
  Description of Artificial Sequence: Synthetic oligonucleotide
  Target: LAMA2; (+) strand; PAM type: YTN; PAM sequence: TTT
gtacattttatatacaacga

SEQ ID NO: 385141 - DNA, 20 bp, Artificial Sequence
  Description of Artificial Sequence: Synthetic oligonucleotide
  Target: LAMA2; (+) strand; PAM type: YTN; PAM sequence: TTG
tacattttatatacaacgaa

SEQ ID NO: 385142 - DNA, 20 bp, Artificial Sequence
  Description of Artificial Sequence: Synthetic oligonucleotide
  Target: LAMA2; (+) strand; PAM type: YTN; PAM sequence: TTT
tatatacaacgaacacattt

SEQ ID NO: 385143 - DNA, 20 bp, Artificial Sequence
  Description of Artificial Sequence: Synthetic oligonucleotide
  Target: LAMA2; (+) strand; PAM type: YTN; PAM sequence: TTT
atatacaacgaacacatttt

SEQ ID NO: 385144 - DNA, 20 bp, Artificial Sequence
  Description of Artificial Sequence: Synthetic oligonucleotide
  Target: LAMA2; (+) strand; PAM type: YTN; PAM sequence: TTA
tatacaacgaacacatttta

SEQ ID NO: 385145 - DNA, 20 bp, Artificial Sequence
  Description of Artificial Sequence: Synthetic oligonucleotide
  Target: LAMA2; (+) strand; PAM type: YTN; PAM sequence: TTT
tactatacagaattatttca

SEQ ID NO: 385146 - DNA, 20 bp, Artificial Sequence
  Description of Artificial Sequence: Synthetic oligonucleotide
  Target: LAMA2; (+) strand; PAM type: YTN; PAM sequence: TTT
actatacagaattatttcaa

SEQ ID NO: 385147 - DNA, 20 bp, Artificial Sequence
  Description of Artificial Sequence: Synthetic oligonucleotide
  Target: LAMA2; (+) strand; PAM type: YTN; PAM sequence: TTA
ctatacagaattatttcaat

SEQ ID NO: 385148 - DNA, 20 bp, Artificial Sequence
  Description of Artificial Sequence: Synthetic oligonucleotide
  Target: LAMA2; (+) strand; PAM type: YTN; PAM sequence: CTA
tacagaattatttcaatcat

SEQ ID NO: 385149 - DNA, 20 bp, Artificial Sequence
  Description of Artificial Sequence: Synthetic oligonucleotide
  Target: LAMA2; (+) strand; PAM type: YTN; PAM sequence: TTA
tttcaatcattctttcagga

SEQ ID NO: 385150 - DNA, 20 bp, Artificial Sequence
  Description of Artificial Sequence: Synthetic oligonucleotide
  Target: LAMA2; (+) strand; PAM type: YTN; PAM sequence: TTT
caatcattctttcaggagat

SEQ ID NO: 385151 - DNA, 20 bp, Artificial Sequence
  Description of Artificial Sequence: Synthetic oligonucleotide
  Target: LAMA2; (+) strand; PAM type: YTN; PAM sequence: TTC
aatcattctttcaggagatg

SEQ ID NO: 385152 - DNA, 20 bp, Artificial Sequence
  Description of Artificial Sequence: Synthetic oligonucleotide
  Target: LAMA2; (+) strand; PAM type: YTN; PAM sequence: TTC
tttcaggagatgaacattta

SEQ ID NO: 385153 - DNA, 20 bp, Artificial Sequence
  Description of Artificial Sequence: Synthetic oligonucleotide
  Target: LAMA2; (+) strand; PAM type: YTN; PAM sequence: CTT
tcaggagatgaacatttact

SEQ ID NO: 385154 - DNA, 20 bp, Artificial Sequence
  Description of Artificial Sequence: Synthetic oligonucleotide
  Target: LAMA2; (+) strand; PAM type: YTN; PAM sequence: TTT
caggagatgaacatttacta

SEQ ID NO: 385155 - DNA, 20 bp, Artificial Sequence
  Description of Artificial Sequence: Synthetic oligonucleotide
  Target: LAMA2; (+) strand; PAM type: YTN; PAM sequence: TTC
aggagatgaacatttactaa

SEQ ID NO: 385156 - DNA, 20 bp, Artificial Sequence
  Description of Artificial Sequence: Synthetic oligonucleotide
  Target: LAMA2; (+) strand; PAM type: YTN; PAM sequence: TTT
actaagcatatacttcatcc

SEQ ID NO: 385157 - DNA, 20 bp, Artificial Sequence
  Description of Artificial Sequence: Synthetic oligonucleotide
  Target: LAMA2; (+) strand; PAM type: YTN; PAM sequence: TTA
ctaagcatatacttcatccc

SEQ ID NO: 385158 - DNA, 20 bp, Artificial Sequence
  Description of Artificial Sequence: Synthetic oligonucleotide
  Target: LAMA2; (+) strand; PAM type: YTN; PAM sequence: CTA
agcatatacttcatcccaac

SEQ ID NO: 385159 - DNA, 20 bp, Artificial Sequence
  Description of Artificial Sequence: Synthetic oligonucleotide
  Target: LAMA2; (+) strand; PAM type: YTN; PAM sequence: CTT
catcccaacactatgaataa

SEQ ID NO: 385160 - DNA, 20 bp, Artificial Sequence
  Description of Artificial Sequence: Synthetic oligonucleotide
  Target: LAMA2; (+) strand; PAM type: YTN; PAM sequence: TTC
atcccaacactatgaataaa

SEQ ID NO: 385161 - DNA, 20 bp, Artificial Sequence
  Description of Artificial Sequence: Synthetic oligonucleotide
  Target: LAMA2; (+) strand; PAM type: YTN; PAM sequence: CTA
tgaataaaagataaaagata

SEQ ID NO: 385162 - DNA, 20 bp, Artificial Sequence
  Description of Artificial Sequence: Synthetic oligonucleotide
  Target: LAMA2; (+) strand; PAM type: YTN; PAM sequence: CTG
tcctgtatgtgtacatatct

SEQ ID NO: 385163 - DNA, 20 bp, Artificial Sequence
  Description of Artificial Sequence: Synthetic oligonucleotide
  Target: LAMA2; (+) strand; PAM type: YTN; PAM sequence: CTG
tatgtgtacatatctgtgtc

SEQ ID NO: 385164 - DNA, 20 bp, Artificial Sequence
  Description of Artificial Sequence: Synthetic oligonucleotide
  Target: LAMA2; (+) strand; PAM type: YTN; PAM sequence: CTG
tgtctcacacagaattgtaa

SEQ ID NO: 385165 - DNA, 20 bp, Artificial Sequence
  Description of Artificial Sequence: Synthetic oligonucleotide
  Target: LAMA2; (+) strand; PAM type: YTN; PAM sequence: CTC
acacagaattgtaaattctt

SEQ ID NO: 385166 - DNA, 20 bp, Artificial Sequence
  Description of Artificial Sequence: Synthetic oligonucleotide
  Target: LAMA2; (+) strand; PAM type: YTN; PAM sequence: TTG
taaattctttgaaggtaaac

SEQ ID NO: 385167 - DNA, 20 bp, Artificial Sequence
  Description of Artificial Sequence: Synthetic oligonucleotide
  Target: LAMA2; (+) strand; PAM type: YTN; PAM sequence: TTC
tttgaaggtaaacataatgt

SEQ ID NO: 385168 - DNA, 20 bp, Artificial Sequence
  Description of Artificial Sequence: Synthetic oligonucleotide
  Target: LAMA2; (+) strand; PAM type: YTN; PAM sequence: CTT
tgaaggtaaacataatgtct

SEQ ID NO: 385169 - DNA, 20 bp, Artificial Sequence
  Description of Artificial Sequence: Synthetic oligonucleotide
  Target: LAMA2; (+) strand; PAM type: YTN; PAM sequence: TTT
gaaggtaaacataatgtctt

SEQ ID NO: 385170 - DNA, 20 bp, Artificial Sequence
  Description of Artificial Sequence: Synthetic oligonucleotide
  Target: LAMA2; (+) strand; PAM type: YTN; PAM sequence: TTG
aaggtaaacataatgtctta

SEQ ID NO: 385171 - DNA, 20 bp, Artificial Sequence
  Description of Artificial Sequence: Synthetic oligonucleotide
  Target: LAMA2; (+) strand; PAM type: YTN; PAM sequence: CTT
atttctttctttattcaaga

SEQ ID NO: 385172 - DNA, 20 bp, Artificial Sequence
  Description of Artificial Sequence: Synthetic oligonucleotide
  Target: LAMA2; (+) strand; PAM type: YTN; PAM sequence: TTA
tttctttctttattcaagaa

SEQ ID NO: 385173 - DNA, 20 bp, Artificial Sequence
  Description of Artificial Sequence: Synthetic oligonucleotide
  Target: LAMA2; (+) strand; PAM type: YTN; PAM sequence: TTT
ctttctttattcaagaaaaa

SEQ ID NO: 385174 - DNA, 20 bp, Artificial Sequence
  Description of Artificial Sequence: Synthetic oligonucleotide
  Target: LAMA2; (+) strand; PAM type: YTN; PAM sequence: TTC
tttctttattcaagaaaaag

SEQ ID NO: 385175 - DNA, 20 bp, Artificial Sequence
  Description of Artificial Sequence: Synthetic oligonucleotide
  Target: LAMA2; (+) strand; PAM type: YTN; PAM sequence: CTT
tctttattcaagaaaaagtt

SEQ ID NO: 385176 - DNA, 20 bp, Artificial Sequence
  Description of Artificial Sequence: Synthetic oligonucleotide
  Target: LAMA2; (+) strand; PAM type: YTN; PAM sequence: TTT
ctttattcaagaaaaagtta

SEQ ID NO: 385177 - DNA, 20 bp, Artificial Sequence
  Description of Artificial Sequence: Synthetic oligonucleotide
  Target: LAMA2; (+) strand; PAM type: YTN; PAM sequence: TTC
tttattcaagaaaaagttaa

SEQ ID NO: 385178 - DNA, 20 bp, Artificial Sequence
  Description of Artificial Sequence: Synthetic oligonucleotide
  Target: LAMA2; (+) strand; PAM type: YTN; PAM sequence: CTT
tattcaagaaaaagttaatg

SEQ ID NO: 385179 - DNA, 20 bp, Artificial Sequence
  Description of Artificial Sequence: Synthetic oligonucleotide
  Target: LAMA2; (+) strand; PAM type: YTN; PAM sequence: TTT
attcaagaaaaagttaatga

SEQ ID NO: 385180 - DNA, 20 bp, Artificial Sequence
  Description of Artificial Sequence: Synthetic oligonucleotide
  Target: LAMA2; (+) strand; PAM type: YTN; PAM sequence: TTA
ttcaagaaaaagttaatgag

SEQ ID NO: 385181 - DNA, 20 bp, Artificial Sequence
  Description of Artificial Sequence: Synthetic oligonucleotide
  Target: LAMA2; (+) strand; PAM type: YTN; PAM sequence: TTC
aagaaaaagttaatgagggc

SEQ ID NO: 385182 - DNA, 20 bp, Artificial Sequence
  Description of Artificial Sequence: Synthetic oligonucleotide
  Target: LAMA2; (+) strand; PAM type: YTN; PAM sequence: TTA
atgagggcccaactcaatgc

SEQ ID NO: 385183 - DNA, 20 bp, Artificial Sequence
  Description of Artificial Sequence: Synthetic oligonucleotide
  Target: LAMA2; (+) strand; PAM type: YTN; PAM sequence: CTC
aatgctaggcatggctcttc

SEQ ID NO: 385184 - DNA, 20 bp, Artificial Sequence
  Description of Artificial Sequence: Synthetic oligonucleotide
  Target: LAMA2; (+) strand; PAM type: YTN; PAM sequence: CTA
ggcatggctcttcgtactgg

SEQ ID NO: 385185 - DNA, 20 bp, Artificial Sequence
  Description of Artificial Sequence: Synthetic oligonucleotide
  Target: LAMA2; (+) strand; PAM type: YTN; PAM sequence: CTC
ttcgtactgggaatatataa

SEQ ID NO: 385186 - DNA, 20 bp, Artificial Sequence
  Description of Artificial Sequence: Synthetic oligonucleotide
  Target: LAMA2; (+) strand; PAM type: YTN; PAM sequence: CTT
cgtactgggaatatataagt

SEQ ID NO: 385187 - DNA, 20 bp, Artificial Sequence
  Description of Artificial Sequence: Synthetic oligonucleotide
  Target: LAMA2; (+) strand; PAM type: YTN; PAM sequence: TTC
gtactgggaatatataagtg

SEQ ID NO: 385188 - DNA, 20 bp, Artificial Sequence
  Description of Artificial Sequence: Synthetic oligonucleotide
  Target: LAMA2; (+) strand; PAM type: YTN; PAM sequence: CTG
ggaatatataagtgaacaaa

SEQ ID NO: 385189 - DNA, 20 bp, Artificial Sequence
  Description of Artificial Sequence: Synthetic oligonucleotide
  Target: LAMA2; (+) strand; PAM type: YTN; PAM sequence: CTG
tgtttcctagccttctggag

SEQ ID NO: 385190 - DNA, 20 bp, Artificial Sequence
  Description of Artificial Sequence: Synthetic oligonucleotide
  Target: LAMA2; (+) strand; PAM type: YTN; PAM sequence: TTT
cctagccttctggagcttgt

SEQ ID NO: 385191 - DNA, 20 bp, Artificial Sequence
  Description of Artificial Sequence: Synthetic oligonucleotide
  Target: LAMA2; (+) strand; PAM type: YTN; PAM sequence: TTC
ctagccttctggagcttgta

SEQ ID NO: 385192 - DNA, 20 bp, Artificial Sequence
  Description of Artificial Sequence: Synthetic oligonucleotide
  Target: LAMA2; (+) strand; PAM type: YTN; PAM sequence: CTA
gccttctggagcttgtattt

SEQ ID NO: 385193 - DNA, 20 bp, Artificial Sequence
  Description of Artificial Sequence: Synthetic oligonucleotide
  Target: LAMA2; (+) strand; PAM type: YTN; PAM sequence: CTT
ctggagcttgtattttttat

SEQ ID NO: 385194 - DNA, 20 bp, Artificial Sequence
  Description of Artificial Sequence: Synthetic oligonucleotide
  Target: LAMA2; (+) strand; PAM type: YTN; PAM sequence: TTC
tggagcttgtattttttata

SEQ ID NO: 385195 - DNA, 20 bp, Artificial Sequence
  Description of Artificial Sequence: Synthetic oligonucleotide
  Target: LAMA2; (+) strand; PAM type: YTN; PAM sequence: CTG
gagcttgtattttttataag

SEQ ID NO: 385196 - DNA, 20 bp, Artificial Sequence
  Description of Artificial Sequence: Synthetic oligonucleotide
  Target: LAMA2; (+) strand; PAM type: YTN; PAM sequence: CTT
gtattttttataagagagta

SEQ ID NO: 385197 - DNA, 20 bp, Artificial Sequence
  Description of Artificial Sequence: Synthetic oligonucleotide
  Target: LAMA2; (+) strand; PAM type: YTN; PAM sequence: TTG
tattttttataagagagtaa

SEQ ID NO: 385198 - DNA, 20 bp, Artificial Sequence
  Description of Artificial Sequence: Synthetic oligonucleotide
  Target: LAMA2; (+) strand; PAM type: YTN; PAM sequence: TTT
tttataagagagtaagataa

SEQ ID NO: 385199 - DNA, 20 bp, Artificial Sequence
  Description of Artificial Sequence: Synthetic oligonucleotide
  Target: LAMA2; (+) strand; PAM type: YTN; PAM sequence: TTT
ttataagagagtaagataaa

SEQ ID NO: 385200 - DNA, 20 bp, Artificial Sequence
  Description of Artificial Sequence: Synthetic oligonucleotide
  Target: LAMA2; (+) strand; PAM type: YTN; PAM sequence: TTT
tataagagagtaagataaag

SEQ ID NO: 385201 - DNA, 20 bp, Artificial Sequence
  Description of Artificial Sequence: Synthetic oligonucleotide
  Target: LAMA2; (+) strand; PAM type: YTN; PAM sequence: TTT
ataagagagtaagataaaga

SEQ ID NO: 385202 - DNA, 20 bp, Artificial Sequence
  Description of Artificial Sequence: Synthetic oligonucleotide
  Target: LAMA2; (+) strand; PAM type: YTN; PAM sequence: TTA
taagagagtaagataaagaa

SEQ ID NO: 385203 - DNA, 20 bp, Artificial Sequence
  Description of Artificial Sequence: Synthetic oligonucleotide
  Target: LAMA2; (+) strand; PAM type: YTN; PAM sequence: CTA
ccaggagaaataaaggagac

SEQ ID NO: 385204 - DNA, 20 bp, Artificial Sequence
  Description of Artificial Sequence: Synthetic oligonucleotide
  Target: LAMA2; (+) strand; PAM type: YTN; PAM sequence: CTC
aaggaacttagagtgatgaa

SEQ ID NO: 385205 - DNA, 20 bp, Artificial Sequence
  Description of Artificial Sequence: Synthetic oligonucleotide
  Target: LAMA2; (+) strand; PAM type: YTN; PAM sequence: CTT
agagtgatgaaggtatgatt

SEQ ID NO: 385206 - DNA, 20 bp, Artificial Sequence
  Description of Artificial Sequence: Synthetic oligonucleotide
  Target: LAMA2; (+) strand; PAM type: YTN; PAM sequence: TTA
gagtgatgaaggtatgattt

SEQ ID NO: 385207 - DNA, 20 bp, Artificial Sequence
  Description of Artificial Sequence: Synthetic oligonucleotide
  Target: LAMA2; (+) strand; PAM type: YTN; PAM sequence: TTT
tagatgaggtggtccatgat

SEQ ID NO: 385208 - DNA, 20 bp, Artificial Sequence
  Description of Artificial Sequence: Synthetic oligonucleotide
  Target: LAMA2; (+) strand; PAM type: YTN; PAM sequence: TTT
agatgaggtggtccatgatc

SEQ ID NO: 385209 - DNA, 20 bp, Artificial Sequence
  Description of Artificial Sequence: Synthetic oligonucleotide
  Target: LAMA2; (+) strand; PAM type: YTN; PAM sequence: TTA
gatgaggtggtccatgatct

SEQ ID NO: 385210 - DNA, 20 bp, Artificial Sequence
  Description of Artificial Sequence: Synthetic oligonucleotide
  Target: LAMA2; (+) strand; PAM type: YTN; PAM sequence: CTT
cacaaacagatgagacttgt

SEQ ID NO: 385211 - DNA, 20 bp, Artificial Sequence
  Description of Artificial Sequence: Synthetic oligonucleotide
  Target: LAMA2; (+) strand; PAM type: YTN; PAM sequence: TTC
acaaacagatgagacttgtg

SEQ ID NO: 385212 - DNA, 20 bp, Artificial Sequence
  Description of Artificial Sequence: Synthetic oligonucleotide
  Target: LAMA2; (+) strand; PAM type: YTN; PAM sequence: CTT
gtgcagaaatgtgaatggtg

SEQ ID NO: 385213 - DNA, 20 bp, Artificial Sequence
  Description of Artificial Sequence: Synthetic oligonucleotide
  Target: LAMA2; (+) strand; PAM type: YTN; PAM sequence: TTG
tgcagaaatgtgaatggtgt

SEQ ID NO: 385214 - DNA, 20 bp, Artificial Sequence
  Description of Artificial Sequence: Synthetic oligonucleotide
  Target: LAMA2; (+) strand; PAM type: YTN; PAM sequence: CTG
caggaagaacagtcccctca

SEQ ID NO: 385215 - DNA, 20 bp, Artificial Sequence
  Description of Artificial Sequence: Synthetic oligonucleotide
  Target: LAMA2; (+) strand; PAM type: YTN; PAM sequence: CTC
agagaaaaaagtcactgcac

SEQ ID NO: 385216 - DNA, 20 bp, Artificial Sequence
  Description of Artificial Sequence: Synthetic oligonucleotide
  Target: LAMA2; (+) strand; PAM type: YTN; PAM sequence: CTG
cactggccctgagacagacc

SEQ ID NO: 385217 - DNA, 20 bp, Artificial Sequence
  Description of Artificial Sequence: Synthetic oligonucleotide
  Target: LAMA2; (+) strand; PAM type: YTN; PAM sequence: CTG
gccctgagacagacccatgc

SEQ ID NO: 385218 - DNA, 20 bp, Artificial Sequence
  Description of Artificial Sequence: Synthetic oligonucleotide
  Target: LAMA2; (+) strand; PAM type: YTN; PAM sequence: CTG
agacagacccatgcttggca

SEQ ID NO: 385219 - DNA, 20 bp, Artificial Sequence
  Description of Artificial Sequence: Synthetic oligonucleotide
  Target: LAMA2; (+) strand; PAM type: YTN; PAM sequence: CTT
ggcagataacaggaggccag

SEQ ID NO: 385220 - DNA, 20 bp, Artificial Sequence
  Description of Artificial Sequence: Synthetic oligonucleotide
  Target: LAMA2; (+) strand; PAM type: YTN; PAM sequence: TTG
gcagataacaggaggccagg

SEQ ID NO: 385221 - DNA, 20 bp, Artificial Sequence
  Description of Artificial Sequence: Synthetic oligonucleotide
  Target: LAMA2; (+) strand; PAM type: YTN; PAM sequence: TTG
gaacagagtgaatgagaaga

SEQ ID NO: 385222 - DNA, 20 bp, Artificial Sequence
  Description of Artificial Sequence: Synthetic oligonucleotide
  Target: LAMA2; (+) strand; PAM type: YTN; PAM sequence: CTA
ggagatgaagtcagcaaagc

SEQ ID NO: 385223 - DNA, 20 bp, Artificial Sequence
  Description of Artificial Sequence: Synthetic oligonucleotide
  Target: LAMA2; (+) strand; PAM type: YTN; PAM sequence: CTC
taatgaatatctaactctcc

SEQ ID NO: 385224 - DNA, 20 bp, Artificial Sequence
  Description of Artificial Sequence: Synthetic oligonucleotide
  Target: LAMA2; (+) strand; PAM type: YTN; PAM sequence: CTA
atgaatatctaactctcctg

SEQ ID NO: 385225 - DNA, 20 bp, Artificial Sequence
  Description of Artificial Sequence: Synthetic oligonucleotide
  Target: LAMA2; (+) strand; PAM type: YTN; PAM sequence: CTA
actctcctgagggctaaaaa

SEQ ID NO: 385226 - DNA, 20 bp, Artificial Sequence
  Description of Artificial Sequence: Synthetic oligonucleotide
  Target: LAMA2; (+) strand; PAM type: YTN; PAM sequence: CTC
tcctgagggctaaaaatctt

SEQ ID NO: 385227 - DNA, 20 bp, Artificial Sequence
  Description of Artificial Sequence: Synthetic oligonucleotide
  Target: LAMA2; (+) strand; PAM type: YTN; PAM sequence: CTC
ctgagggctaaaaatcttcc

SEQ ID NO: 385228 - DNA, 20 bp, Artificial Sequence
  Description of Artificial Sequence: Synthetic oligonucleotide
  Target: LAMA2; (+) strand; PAM type: YTN; PAM sequence: CTG
agggctaaaaatcttccagt

SEQ ID NO: 385229 - DNA, 20 bp, Artificial Sequence
  Description of Artificial Sequence: Synthetic oligonucleotide
  Target: LAMA2; (+) strand; PAM type: YTN; PAM sequence: CTA
aaaatcttccagtggcaaga

SEQ ID NO: 385230 - DNA, 20 bp, Artificial Sequence
  Description of Artificial Sequence: Synthetic oligonucleotide
  Target: LAMA2; (+) strand; PAM type: YTN; PAM sequence: CTT
ccagtggcaagaggtggctt

SEQ ID NO: 385231 - DNA, 20 bp, Artificial Sequence
  Description of Artificial Sequence: Synthetic oligonucleotide
  Target: LAMA2; (+) strand; PAM type: YTN; PAM sequence: TTC
cagtggcaagaggtggcttg

SEQ ID NO: 385232 - DNA, 20 bp, Artificial Sequence
  Description of Artificial Sequence: Synthetic oligonucleotide
  Target: LAMA2; (+) strand; PAM type: YTN; PAM sequence: CTT
ggtacaggataatccagtgg

SEQ ID NO: 385233 - DNA, 20 bp, Artificial Sequence
  Description of Artificial Sequence: Synthetic oligonucleotide
  Target: LAMA2; (+) strand; PAM type: YTN; PAM sequence: TTG
gtacaggataatccagtggt

SEQ ID NO: 385234 - DNA, 20 bp, Artificial Sequence
  Description of Artificial Sequence: Synthetic oligonucleotide
  Target: LAMA2; (+) strand; PAM type: YTN; PAM sequence: TTA
ttgatggaagcaccagcagc

SEQ ID NO: 385235 - DNA, 20 bp, Artificial Sequence
  Description of Artificial Sequence: Synthetic oligonucleotide
  Target: LAMA2; (+) strand; PAM type: YTN; PAM sequence: TTG
atggaagcaccagcagcatt

SEQ ID NO: 385236 - DNA, 20 bp, Artificial Sequence
  Description of Artificial Sequence: Synthetic oligonucleotide
  Target: LAMA2; (+) strand; PAM type: YTN; PAM sequence: TTT
gcagataggagataagtgga

SEQ ID NO: 385237 - DNA, 20 bp, Artificial Sequence
  Description of Artificial Sequence: Synthetic oligonucleotide
  Target: LAMA2; (+) strand; PAM type: YTN; PAM sequence: TTG
cagataggagataagtggag

SEQ ID NO: 385238 - DNA, 20 bp, Artificial Sequence
  Description of Artificial Sequence: Synthetic oligonucleotide
  Target: LAMA2; (+) strand; PAM type: YTN; PAM sequence: TTG
acaccatggtttttggcaga

SEQ ID NO: 385239 - DNA, 20 bp, Artificial Sequence
  Description of Artificial Sequence: Synthetic oligonucleotide
  Target: LAMA2; (+) strand; PAM type: YTN; PAM sequence: TTT
ttggcagagcaaatggaaac

SEQ ID NO: 385240 - DNA, 20 bp, Artificial Sequence
  Description of Artificial Sequence: Synthetic oligonucleotide
  Target: LAMA2; (+) strand; PAM type: YTN; PAM sequence: TTT
tggcagagcaaatggaaaca

SEQ ID NO: 385241 - DNA, 20 bp, Artificial Sequence
  Description of Artificial Sequence: Synthetic oligonucleotide
  Target: LAMA2; (+) strand; PAM type: YTN; PAM sequence: TTT
ggcagagcaaatggaaacat

SEQ ID NO: 385242 - DNA, 20 bp, Artificial Sequence
  Description of Artificial Sequence: Synthetic oligonucleotide
  Target: LAMA2; (+) strand; PAM type: YTN; PAM sequence: TTG
gcagagcaaatggaaacatg

SEQ ID NO: 385243 - DNA, 20 bp, Artificial Sequence
  Description of Artificial Sequence: Synthetic oligonucleotide
  Target: LAMA2; (+) strand; PAM type: YTN; PAM sequence: CTG
ttgactgggatggggaaaat

SEQ ID NO: 385244 - DNA, 20 bp, Artificial Sequence
  Description of Artificial Sequence: Synthetic oligonucleotide
  Target: LAMA2; (+) strand; PAM type: YTN; PAM sequence: TTG
actgggatggggaaaattag

SEQ ID NO: 385245 - DNA, 20 bp, Artificial Sequence
  Description of Artificial Sequence: Synthetic oligonucleotide
  Target: LAMA2; (+) strand; PAM type: YTN; PAM sequence: CTG
ggatggggaaaattagggaa

SEQ ID NO: 385246 - DNA, 20 bp, Artificial Sequence
  Description of Artificial Sequence: Synthetic oligonucleotide
  Target: LAMA2; (+) strand; PAM type: YTN; PAM sequence: TTA
gggaaaggtctggtgtattt

SEQ ID NO: 385247 - DNA, 20 bp, Artificial Sequence
  Description of Artificial Sequence: Synthetic oligonucleotide
  Target: LAMA2; (+) strand; PAM type: YTN; PAM sequence: CTG
gtgtatttttggagggggag

SEQ ID NO: 385248 - DNA, 20 bp, Artificial Sequence
  Description of Artificial Sequence: Synthetic oligonucleotide
  Target: LAMA2; (+) strand; PAM type: YTN; PAM sequence: TTT
ttggagggggagaaacttac

SEQ ID NO: 385249 - DNA, 20 bp, Artificial Sequence
  Description of Artificial Sequence: Synthetic oligonucleotide
  Target: LAMA2; (+) strand; PAM type: YTN; PAM sequence: TTT
tggagggggagaaacttact

SEQ ID NO: 385250 - DNA, 20 bp, Artificial Sequence
  Description of Artificial Sequence: Synthetic oligonucleotide
  Target: LAMA2; (+) strand; PAM type: YTN; PAM sequence: TTT
ggagggggagaaacttactt

SEQ ID NO: 385251 - DNA, 20 bp, Artificial Sequence
  Description of Artificial Sequence: Synthetic oligonucleotide
  Target: LAMA2; (+) strand; PAM type: YTN; PAM sequence: TTG
gagggggagaaacttacttt

SEQ ID NO: 385252 - DNA, 20 bp, Artificial Sequence
  Description of Artificial Sequence: Synthetic oligonucleotide
  Target: LAMA2; (+) strand; PAM type: YTN; PAM sequence: CTT
acttttagatctgcgaaggt

SEQ ID NO: 385253 - DNA, 20 bp, Artificial Sequence
  Description of Artificial Sequence: Synthetic oligonucleotide
  Target: LAMA2; (+) strand; PAM type: YTN; PAM sequence: TTA
cttttagatctgcgaaggta

SEQ ID NO: 385254 - DNA, 20 bp, Artificial Sequence
  Description of Artificial Sequence: Synthetic oligonucleotide
  Target: LAMA2; (+) strand; PAM type: YTN; PAM sequence: CTT
ttagatctgcgaaggtaggc

SEQ ID NO: 385255 - DNA, 20 bp, Artificial Sequence
  Description of Artificial Sequence: Synthetic oligonucleotide
  Target: LAMA2; (+) strand; PAM type: YTN; PAM sequence: TTT
tagatctgcgaaggtaggca

SEQ ID NO: 385256 - DNA, 20 bp, Artificial Sequence
  Description of Artificial Sequence: Synthetic oligonucleotide
  Target: LAMA2; (+) strand; PAM type: YTN; PAM sequence: TTT
agatctgcgaaggtaggcac

SEQ ID NO: 385257 - DNA, 20 bp, Artificial Sequence
  Description of Artificial Sequence: Synthetic oligonucleotide
  Target: LAMA2; (+) strand; PAM type: YTN; PAM sequence: TTA
gatctgcgaaggtaggcaca

SEQ ID NO: 385258 - DNA, 20 bp, Artificial Sequence
  Description of Artificial Sequence: Synthetic oligonucleotide
  Target: LAMA2; (+) strand; PAM type: YTN; PAM sequence: CTG
cgaaggtaggcacaatattt

SEQ ID NO: 385259 - DNA, 20 bp, Artificial Sequence
  Description of Artificial Sequence: Synthetic oligonucleotide
  Target: LAMA2; (+) strand; PAM type: YTN; PAM sequence: TTT
aaatcccttaggactaagtg

SEQ ID NO: 385260 - DNA, 20 bp, Artificial Sequence
  Description of Artificial Sequence: Synthetic oligonucleotide
  Target: LAMA2; (+) strand; PAM type: YTN; PAM sequence: TTA
aatcccttaggactaagtga

SEQ ID NO: 385261 - DNA, 20 bp, Artificial Sequence
  Description of Artificial Sequence: Synthetic oligonucleotide
  Target: LAMA2; (+) strand; PAM type: YTN; PAM sequence: CTT
aggactaagtgagatcattc

SEQ ID NO: 385262 - DNA, 20 bp, Artificial Sequence
  Description of Artificial Sequence: Synthetic oligonucleotide
  Target: LAMA2; (+) strand; PAM type: YTN; PAM sequence: TTA
ggactaagtgagatcattca

SEQ ID NO: 385263 - DNA, 20 bp, Artificial Sequence
  Description of Artificial Sequence: Synthetic oligonucleotide
  Target: LAMA2; (+) strand; PAM type: YTN; PAM sequence: CTA
agtgagatcattcagaggag

SEQ ID NO: 385264 - DNA, 20 bp, Artificial Sequence
  Description of Artificial Sequence: Synthetic oligonucleotide
  Target: LAMA2; (+) strand; PAM type: YTN; PAM sequence: TTC
agaggagagaggagaaggga

SEQ ID NO: 385265 - DNA, 20 bp, Artificial Sequence
  Description of Artificial Sequence: Synthetic oligonucleotide
  Target: LAMA2; (+) strand; PAM type: YTN; PAM sequence: CTG
aattgtgaagcacgttaaga

SEQ ID NO: 385266 - DNA, 20 bp, Artificial Sequence
  Description of Artificial Sequence: Synthetic oligonucleotide
  Target: LAMA2; (+) strand; PAM type: YTN; PAM sequence: TTG
tgaagcacgttaagagatca

SEQ ID NO: 385267 - DNA, 20 bp, Artificial Sequence
  Description of Artificial Sequence: Synthetic oligonucleotide
  Target: LAMA2; (+) strand; PAM type: YTN; PAM sequence: TTA
agagatcaaggacatgccat

SEQ ID NO: 385268 - DNA, 20 bp, Artificial Sequence
  Description of Artificial Sequence: Synthetic oligonucleotide
  Target: LAMA2; (+) strand; PAM type: YTN; PAM sequence: CTG
aaaaggaacaaccaatgaac

SEQ ID NO: 385269 - DNA, 20 bp, Artificial Sequence
  Description of Artificial Sequence: Synthetic oligonucleotide
  Target: LAMA2; (+) strand; PAM type: YTN; PAM sequence: CTG
ggataaaaaccagaaggaaa

SEQ ID NO: 385270 - DNA, 20 bp, Artificial Sequence
  Description of Artificial Sequence: Synthetic oligonucleotide
  Target: LAMA2; (+) strand; PAM type: YTN; PAM sequence: TTT
ccaggaagcccatttatctc

SEQ ID NO: 385271 - DNA, 20 bp, Artificial Sequence
  Description of Artificial Sequence: Synthetic oligonucleotide
  Target: LAMA2; (+) strand; PAM type: YTN; PAM sequence: TTC
caggaagcccatttatctct

SEQ ID NO: 385272 - DNA, 20 bp, Artificial Sequence
  Description of Artificial Sequence: Synthetic oligonucleotide
  Target: LAMA2; (+) strand; PAM type: YTN; PAM sequence: TTT
atctctgcagtgtccatagg

SEQ ID NO: 385273 - DNA, 20 bp, Artificial Sequence
  Description of Artificial Sequence: Synthetic oligonucleotide
  Target: LAMA2; (+) strand; PAM type: YTN; PAM sequence: TTA
tctctgcagtgtccatagga

SEQ ID NO: 385274 - DNA, 20 bp, Artificial Sequence
  Description of Artificial Sequence: Synthetic oligonucleotide
  Target: LAMA2; (+) strand; PAM type: YTN; PAM sequence: CTC
tgcagtgtccataggagatg

SEQ ID NO: 385275 - DNA, 20 bp, Artificial Sequence
  Description of Artificial Sequence: Synthetic oligonucleotide
  Target: LAMA2; (+) strand; PAM type: YTN; PAM sequence: CTG
cagtgtccataggagatgac

SEQ ID NO: 385276 - DNA, 20 bp, Artificial Sequence
  Description of Artificial Sequence: Synthetic oligonucleotide
  Target: LAMA2; (+) strand; PAM type: YTN; PAM sequence: CTC
tgtaaattttaaaaattctg

SEQ ID NO: 385277 - DNA, 20 bp, Artificial Sequence
  Description of Artificial Sequence: Synthetic oligonucleotide
  Target: LAMA2; (+) strand; PAM type: YTN; PAM sequence: CTG
taaattttaaaaattctgtt

SEQ ID NO: 385278 - DNA, 20 bp, Artificial Sequence
  Description of Artificial Sequence: Synthetic oligonucleotide
  Target: LAMA2; (+) strand; PAM type: YTN; PAM sequence: TTT
taaaaattctgttgagggga

SEQ ID NO: 385279 - DNA, 20 bp, Artificial Sequence
  Description of Artificial Sequence: Synthetic oligonucleotide
  Target: LAMA2; (+) strand; PAM type: YTN; PAM sequence: TTT
aaaaattctgttgaggggag

SEQ ID NO: 385280 - DNA, 20 bp, Artificial Sequence
  Description of Artificial Sequence: Synthetic oligonucleotide
  Target: LAMA2; (+) strand; PAM type: YTN; PAM sequence: TTA
aaaattctgttgaggggagt

SEQ ID NO: 385281 - DNA, 20 bp, Artificial Sequence
  Description of Artificial Sequence: Synthetic oligonucleotide
  Target: LAMA2; (+) strand; PAM type: YTN; PAM sequence: TTC
tgttgaggggagtttggaat

SEQ ID NO: 385282 - DNA, 20 bp, Artificial Sequence
  Description of Artificial Sequence: Synthetic oligonucleotide
  Target: LAMA2; (+) strand; PAM type: YTN; PAM sequence: CTG
ttgaggggagtttggaatta

SEQ ID NO: 385283 - DNA, 20 bp, Artificial Sequence
  Description of Artificial Sequence: Synthetic oligonucleotide
  Target: LAMA2; (+) strand; PAM type: YTN; PAM sequence: TTG
aggggagtttggaattagca

SEQ ID NO: 385284 - DNA, 20 bp, Artificial Sequence
  Description of Artificial Sequence: Synthetic oligonucleotide
  Target: LAMA2; (+) strand; PAM type: YTN; PAM sequence: TTT
ggaattagcagccataggga

SEQ ID NO: 385285 - DNA, 20 bp, Artificial Sequence
  Description of Artificial Sequence: Synthetic oligonucleotide
  Target: LAMA2; (+) strand; PAM type: YTN; PAM sequence: TTG
gaattagcagccatagggaa

SEQ ID NO: 385286 - DNA, 20 bp, Artificial Sequence
  Description of Artificial Sequence: Synthetic oligonucleotide
  Target: LAMA2; (+) strand; PAM type: YTN; PAM sequence: TTA
gcagccatagggaaatgtaa

SEQ ID NO: 385287 - DNA, 20 bp, Artificial Sequence
  Description of Artificial Sequence: Synthetic oligonucleotide
  Target: LAMA2; (+) strand; PAM type: YTN; PAM sequence: TTT
ctgagtagccctgcagacaa

SEQ ID NO: 385288 - DNA, 20 bp, Artificial Sequence
  Description of Artificial Sequence: Synthetic oligonucleotide
  Target: LAMA2; (+) strand; PAM type: YTN; PAM sequence: TTC
tgagtagccctgcagacaaa

SEQ ID NO: 385289 - DNA, 20 bp, Artificial Sequence
  Description of Artificial Sequence: Synthetic oligonucleotide
  Target: LAMA2; (+) strand; PAM type: YTN; PAM sequence: CTG
agtagccctgcagacaaaat

SEQ ID NO: 385290 - DNA, 20 bp, Artificial Sequence
  Description of Artificial Sequence: Synthetic oligonucleotide
  Target: LAMA2; (+) strand; PAM type: YTN; PAM sequence: CTG
cagacaaaatgataattgag

SEQ ID NO: 385291 - DNA, 20 bp, Artificial Sequence
  Description of Artificial Sequence: Synthetic oligonucleotide
  Target: LAMA2; (+) strand; PAM type: YTN; PAM sequence: TTG
agagaagattagggagttgt

SEQ ID NO: 385292 - DNA, 20 bp, Artificial Sequence
  Description of Artificial Sequence: Synthetic oligonucleotide
  Target: LAMA2; (+) strand; PAM type: YTN; PAM sequence: TTA
gggagttgtgaacagaaaga

SEQ ID NO: 385293 - DNA, 20 bp, Artificial Sequence
  Description of Artificial Sequence: Synthetic oligonucleotide
  Target: LAMA2; (+) strand; PAM type: YTN; PAM sequence: TTG
tgaacagaaagaataaactc

SEQ ID NO: 385294 - DNA, 20 bp, Artificial Sequence
  Description of Artificial Sequence: Synthetic oligonucleotide
  Target: LAMA2; (+) strand; PAM type: YTN; PAM sequence: CTC
aagcttcaagtgagatggaa

SEQ ID NO: 385295 - DNA, 20 bp, Artificial Sequence
  Description of Artificial Sequence: Synthetic oligonucleotide
  Target: LAMA2; (+) strand; PAM type: YTN; PAM sequence: CTT
caagtgagatggaatcccta

SEQ ID NO: 385296 - DNA, 20 bp, Artificial Sequence
  Description of Artificial Sequence: Synthetic oligonucleotide
  Target: LAMA2; (+) strand; PAM type: YTN; PAM sequence: TTC
aagtgagatggaatccctac

SEQ ID NO: 385297 - DNA, 20 bp, Artificial Sequence
  Description of Artificial Sequence: Synthetic oligonucleotide
  Target: LAMA2; (+) strand; PAM type: YTN; PAM sequence: CTA
ctccctccagaagacctttt

SEQ ID NO: 385298 - DNA, 20 bp, Artificial Sequence
  Description of Artificial Sequence: Synthetic oligonucleotide
  Target: LAMA2; (+) strand; PAM type: YTN; PAM sequence: CTC
cctccagaagaccttttatg

SEQ ID NO: 385299 - DNA, 20 bp, Artificial Sequence
  Description of Artificial Sequence: Synthetic oligonucleotide
  Target: LAMA2; (+) strand; PAM type: YTN; PAM sequence: CTC
cagaagaccttttatgtgat

SEQ ID NO: 385300 - DNA, 20 bp, Artificial Sequence
  Description of Artificial Sequence: Synthetic oligonucleotide
  Target: LAMA2; (+) strand; PAM type: YTN; PAM sequence: CTT
ttatgtgatataaggaaaca

SEQ ID NO: 385301 - DNA, 20 bp, Artificial Sequence
  Description of Artificial Sequence: Synthetic oligonucleotide
  Target: LAMA2; (+) strand; PAM type: YTN; PAM sequence: TTT
tatgtgatataaggaaacag

SEQ ID NO: 385302 - DNA, 20 bp, Artificial Sequence
  Description of Artificial Sequence: Synthetic oligonucleotide
  Target: LAMA2; (+) strand; PAM type: YTN; PAM sequence: TTT
atgtgatataaggaaacagt

SEQ ID NO: 385303 - DNA, 20 bp, Artificial Sequence
  Description of Artificial Sequence: Synthetic oligonucleotide
  Target: LAMA2; (+) strand; PAM type: YTN; PAM sequence: TTA
tgtgatataaggaaacagtg

SEQ ID NO: 385304 - DNA, 20 bp, Artificial Sequence
  Description of Artificial Sequence: Synthetic oligonucleotide
  Target: LAMA2; (+) strand; PAM type: YTN; PAM sequence: TTT
gaaaaaaattgtatcaacta

SEQ ID NO: 385305 - DNA, 20 bp, Artificial Sequence
  Description of Artificial Sequence: Synthetic oligonucleotide
  Target: LAMA2; (+) strand; PAM type: YTN; PAM sequence: TTG
aaaaaaattgtatcaactat

SEQ ID NO: 385306 - DNA, 20 bp, Artificial Sequence
  Description of Artificial Sequence: Synthetic oligonucleotide
  Target: LAMA2; (+) strand; PAM type: YTN; PAM sequence: TTG
tatcaactattcaagaatta

SEQ ID NO: 385307 - DNA, 20 bp, Artificial Sequence
  Description of Artificial Sequence: Synthetic oligonucleotide
  Target: LAMA2; (+) strand; PAM type: YTN; PAM sequence: CTA
ttcaagaattactacattcc

SEQ ID NO: 385308 - DNA, 20 bp, Artificial Sequence
  Description of Artificial Sequence: Synthetic oligonucleotide
  Target: LAMA2; (+) strand; PAM type: YTN; PAM sequence: TTC
aagaattactacattcctat

SEQ ID NO: 385309 - DNA, 20 bp, Artificial Sequence
  Description of Artificial Sequence: Synthetic oligonucleotide
  Target: LAMA2; (+) strand; PAM type: YTN; PAM sequence: TTA
ctacattcctatacagtaaa

SEQ ID NO: 385310 - DNA, 20 bp, Artificial Sequence
  Description of Artificial Sequence: Synthetic oligonucleotide
  Target: LAMA2; (+) strand; PAM type: YTN; PAM sequence: CTA
cattcctatacagtaaacac

SEQ ID NO: 385311 - DNA, 20 bp, Artificial Sequence
  Description of Artificial Sequence: Synthetic oligonucleotide
  Target: LAMA2; (+) strand; PAM type: YTN; PAM sequence: TTC
ctatacagtaaacactttat

SEQ ID NO: 385312 - DNA, 20 bp, Artificial Sequence
  Description of Artificial Sequence: Synthetic oligonucleotide
  Target: LAMA2; (+) strand; PAM type: YTN; PAM sequence: CTA
tacagtaaacactttattat

SEQ ID NO: 385313 - DNA, 20 bp, Artificial Sequence
  Description of Artificial Sequence: Synthetic oligonucleotide
  Target: LAMA2; (+) strand; PAM type: YTN; PAM sequence: CTT
tattatttttttattgacat

SEQ ID NO: 385314 - DNA, 20 bp, Artificial Sequence
  Description of Artificial Sequence: Synthetic oligonucleotide
  Target: LAMA2; (+) strand; PAM type: YTN; PAM sequence: TTT
attatttttttattgacatt

SEQ ID NO: 385315 - DNA, 20 bp, Artificial Sequence
  Description of Artificial Sequence: Synthetic oligonucleotide
  Target: LAMA2; (+) strand; PAM type: YTN; PAM sequence: TTA
ttatttttttattgacattt

SEQ ID NO: 385316 - DNA, 20 bp, Artificial Sequence
  Description of Artificial Sequence: Synthetic oligonucleotide
  Target: LAMA2; (+) strand; PAM type: YTN; PAM sequence: TTA
tttttttattgacatttcat

SEQ ID NO: 385317 - DNA, 20 bp, Artificial Sequence
  Description of Artificial Sequence: Synthetic oligonucleotide
  Target: LAMA2; (+) strand; PAM type: YTN; PAM sequence: TTT
ttttattgacatttcattat

SEQ ID NO: 385318 - DNA, 20 bp, Artificial Sequence
  Description of Artificial Sequence: Synthetic oligonucleotide
  Target: LAMA2; (+) strand; PAM type: YTN; PAM sequence: TTT
tttattgacatttcattatt

SEQ ID NO: 385319 - DNA, 20 bp, Artificial Sequence
  Description of Artificial Sequence: Synthetic oligonucleotide
  Target: LAMA2; (+) strand; PAM type: YTN; PAM sequence: TTT
ttattgacatttcattattt

SEQ ID NO: 385320 - DNA, 20 bp, Artificial Sequence
  Description of Artificial Sequence: Synthetic oligonucleotide
  Target: LAMA2; (+) strand; PAM type: YTN; PAM sequence: TTT
tattgacatttcattatttt

SEQ ID NO: 385321 - DNA, 20 bp, Artificial Sequence
  Description of Artificial Sequence: Synthetic oligonucleotide
  Target: LAMA2; (+) strand; PAM type: YTN; PAM sequence: TTT
attgacatttcattatttta

SEQ ID NO: 385322 - DNA, 20 bp, Artificial Sequence
  Description of Artificial Sequence: Synthetic oligonucleotide
  Target: LAMA2; (+) strand; PAM type: YTN; PAM sequence: TTA
ttgacatttcattattttac

SEQ ID NO: 385323 - DNA, 20 bp, Artificial Sequence
  Description of Artificial Sequence: Synthetic oligonucleotide
  Target: LAMA2; (+) strand; PAM type: YTN; PAM sequence: TTG
acatttcattattttactat

SEQ ID NO: 385324 - DNA, 20 bp, Artificial Sequence
  Description of Artificial Sequence: Synthetic oligonucleotide
  Target: LAMA2; (+) strand; PAM type: YTN; PAM sequence: TTT
cattattttactataacgaa

SEQ ID NO: 385325 - DNA, 20 bp, Artificial Sequence
  Description of Artificial Sequence: Synthetic oligonucleotide
  Target: LAMA2; (+) strand; PAM type: YTN; PAM sequence: TTC
attattttactataacgaaa

SEQ ID NO: 385326 - DNA, 20 bp, Artificial Sequence
  Description of Artificial Sequence: Synthetic oligonucleotide
  Target: LAMA2; (+) strand; PAM type: YTN; PAM sequence: TTA
ttttactataacgaaatgta

SEQ ID NO: 385327 - DNA, 20 bp, Artificial Sequence
  Description of Artificial Sequence: Synthetic oligonucleotide
  Target: LAMA2; (+) strand; PAM type: YTN; PAM sequence: TTT
tactataacgaaatgtaatt

SEQ ID NO: 385328 - DNA, 20 bp, Artificial Sequence
  Description of Artificial Sequence: Synthetic oligonucleotide
  Target: LAMA2; (+) strand; PAM type: YTN; PAM sequence: TTT
actataacgaaatgtaattt

SEQ ID NO: 385329 - DNA, 20 bp, Artificial Sequence
  Description of Artificial Sequence: Synthetic oligonucleotide
  Target: LAMA2; (+) strand; PAM type: YTN; PAM sequence: TTA
ctataacgaaatgtaattta

SEQ ID NO: 385330 - DNA, 20 bp, Artificial Sequence
  Description of Artificial Sequence: Synthetic oligonucleotide
  Target: LAMA2; (+) strand; PAM type: YTN; PAM sequence: CTA
taacgaaatgtaatttaatc

SEQ ID NO: 385331 - DNA, 20 bp, Artificial Sequence
  Description of Artificial Sequence: Synthetic oligonucleotide
  Target: LAMA2; (+) strand; PAM type: YTN; PAM sequence: TTT
aatcatactggctctttaga

SEQ ID NO: 385332 - DNA, 20 bp, Artificial Sequence
  Description of Artificial Sequence: Synthetic oligonucleotide
  Target: LAMA2; (+) strand; PAM type: YTN; PAM sequence: TTA
atcatactggctctttagag

SEQ ID NO: 385333 - DNA, 20 bp, Artificial Sequence
  Description of Artificial Sequence: Synthetic oligonucleotide
  Target: LAMA2; (+) strand; PAM type: YTN; PAM sequence: CTG
gctctttagagtttctcttg

SEQ ID NO: 385334 - DNA, 20 bp, Artificial Sequence
  Description of Artificial Sequence: Synthetic oligonucleotide
  Target: LAMA2; (+) strand; PAM type: YTN; PAM sequence: CTC
tttagagtttctcttgaaat

SEQ ID NO: 385335 - DNA, 20 bp, Artificial Sequence
  Description of Artificial Sequence: Synthetic oligonucleotide
  Target: LAMA2; (+) strand; PAM type: YTN; PAM sequence: CTT
tagagtttctcttgaaatgt

SEQ ID NO: 385336 - DNA, 20 bp, Artificial Sequence
  Description of Artificial Sequence: Synthetic oligonucleotide
  Target: LAMA2; (+) strand; PAM type: YTN; PAM sequence: TTT
agagtttctcttgaaatgtc

SEQ ID NO: 385337 - DNA, 20 bp, Artificial Sequence
  Description of Artificial Sequence: Synthetic oligonucleotide
  Target: LAMA2; (+) strand; PAM type: YTN; PAM sequence: TTA
gagtttctcttgaaatgtct

SEQ ID NO: 385338 - DNA, 20 bp, Artificial Sequence
  Description of Artificial Sequence: Synthetic oligonucleotide
  Target: LAMA2; (+) strand; PAM type: YTN; PAM sequence: TTT
ctcttgaaatgtctaaaatc

SEQ ID NO: 385339 - DNA, 20 bp, Artificial Sequence
  Description of Artificial Sequence: Synthetic oligonucleotide
  Target: LAMA2; (+) strand; PAM type: YTN; PAM sequence: TTC
tcttgaaatgtctaaaatct

SEQ ID NO: 385340 - DNA, 20 bp, Artificial Sequence
  Description of Artificial Sequence: Synthetic oligonucleotide
  Target: LAMA2; (+) strand; PAM type: YTN; PAM sequence: CTC
ttgaaatgtctaaaatctgt

SEQ ID NO: 385341 - DNA, 20 bp, Artificial Sequence
  Description of Artificial Sequence: Synthetic oligonucleotide
  Target: LAMA2; (+) strand; PAM type: YTN; PAM sequence: CTT
gaaatgtctaaaatctgttt

SEQ ID NO: 385342 - DNA, 20 bp, Artificial Sequence
  Description of Artificial Sequence: Synthetic oligonucleotide
  Target: LAMA2; (+) strand; PAM type: YTN; PAM sequence: TTG
aaatgtctaaaatctgtttc

SEQ ID NO: 385343 - DNA, 20 bp, Artificial Sequence
  Description of Artificial Sequence: Synthetic oligonucleotide
  Target: LAMA2; (+) strand; PAM type: YTN; PAM sequence: CTA
aaatctgtttcttagagccc

SEQ ID NO: 385344 - DNA, 20 bp, Artificial Sequence
  Description of Artificial Sequence: Synthetic oligonucleotide
  Target: LAMA2; (+) strand; PAM type: YTN; PAM sequence: CTG
tttcttagagcccatatatg

SEQ ID NO: 385345 - DNA, 20 bp, Artificial Sequence
  Description of Artificial Sequence: Synthetic oligonucleotide
  Target: LAMA2; (+) strand; PAM type: YTN; PAM sequence: TTT
cttagagcccatatatgtat

SEQ ID NO: 385346 - DNA, 20 bp, Artificial Sequence
  Description of Artificial Sequence: Synthetic oligonucleotide
  Target: LAMA2; (+) strand; PAM type: YTN; PAM sequence: TTC
ttagagcccatatatgtata

SEQ ID NO: 385347 - DNA, 20 bp, Artificial Sequence
  Description of Artificial Sequence: Synthetic oligonucleotide
  Target: LAMA2; (+) strand; PAM type: YTN; PAM sequence: CTT
agagcccatatatgtataag

SEQ ID NO: 385348 - DNA, 20 bp, Artificial Sequence
  Description of Artificial Sequence: Synthetic oligonucleotide
  Target: LAMA2; (+) strand; PAM type: YTN; PAM sequence: TTA
gagcccatatatgtataaga

SEQ ID NO: 385349 - DNA, 20 bp, Artificial Sequence
  Description of Artificial Sequence: Synthetic oligonucleotide
  Target: LAMA2; (+) strand; PAM type: YTN; PAM sequence: TTC
gcgtatgcgtgcatgtgcgt

SEQ ID NO: 385350 - DNA, 20 bp, Artificial Sequence
  Description of Artificial Sequence: Synthetic oligonucleotide
  Target: LAMA2; (+) strand; PAM type: YTN; PAM sequence: CTT
taaatgaatgagctaaaaat

SEQ ID NO: 385351 - DNA, 20 bp, Artificial Sequence
  Description of Artificial Sequence: Synthetic oligonucleotide
  Target: LAMA2; (+) strand; PAM type: YTN; PAM sequence: TTT
aaatgaatgagctaaaaatt

SEQ ID NO: 385352 - DNA, 20 bp, Artificial Sequence
  Description of Artificial Sequence: Synthetic oligonucleotide
  Target: LAMA2; (+) strand; PAM type: YTN; PAM sequence: TTA
aatgaatgagctaaaaattt

SEQ ID NO: 385353 - DNA, 20 bp, Artificial Sequence
  Description of Artificial Sequence: Synthetic oligonucleotide
  Target: LAMA2; (+) strand; PAM type: YTN; PAM sequence: CTA
aaaatttggcagagtgtgtc

SEQ ID NO: 385354 - DNA, 20 bp, Artificial Sequence
  Description of Artificial Sequence: Synthetic oligonucleotide
  Target: LAMA2; (+) strand; PAM type: YTN; PAM sequence: TTT
ggcagagtgtgtcagttata

SEQ ID NO: 385355 - DNA, 20 bp, Artificial Sequence
  Description of Artificial Sequence: Synthetic oligonucleotide
  Target: LAMA2; (+) strand; PAM type: YTN; PAM sequence: TTG
gcagagtgtgtcagttataa

SEQ ID NO: 385356 - DNA, 20 bp, Artificial Sequence
  Description of Artificial Sequence: Synthetic oligonucleotide
  Target: LAMA2; (+) strand; PAM type: YTN; PAM sequence: TTA
taagtttattttttgtgaag

SEQ ID NO: 385357 - DNA, 20 bp, Artificial Sequence
  Description of Artificial Sequence: Synthetic oligonucleotide
  Target: LAMA2; (+) strand; PAM type: YTN; PAM sequence: TTT
attttttgtgaaggcaaaaa

SEQ ID NO: 385358 - DNA, 20 bp, Artificial Sequence
  Description of Artificial Sequence: Synthetic oligonucleotide
  Target: LAMA2; (+) strand; PAM type: YTN; PAM sequence: TTA
ttttttgtgaaggcaaaaat

SEQ ID NO: 385359 - DNA, 20 bp, Artificial Sequence
  Description of Artificial Sequence: Synthetic oligonucleotide
  Target: LAMA2; (+) strand; PAM type: YTN; PAM sequence: TTT
tttgtgaaggcaaaaataaa

SEQ ID NO: 385360 - DNA, 20 bp, Artificial Sequence
  Description of Artificial Sequence: Synthetic oligonucleotide
  Target: LAMA2; (+) strand; PAM type: YTN; PAM sequence: TTT
ttgtgaaggcaaaaataaat

SEQ ID NO: 385361 - DNA, 20 bp, Artificial Sequence
  Description of Artificial Sequence: Synthetic oligonucleotide
  Target: LAMA2; (+) strand; PAM type: YTN; PAM sequence: TTT
tgtgaaggcaaaaataaatt

SEQ ID NO: 385362 - DNA, 20 bp, Artificial Sequence
  Description of Artificial Sequence: Synthetic oligonucleotide
  Target: LAMA2; (+) strand; PAM type: YTN; PAM sequence: TTT
gtgaaggcaaaaataaattt

SEQ ID NO: 385363 - DNA, 20 bp, Artificial Sequence
  Description of Artificial Sequence: Synthetic oligonucleotide
  Target: LAMA2; (+) strand; PAM type: YTN; PAM sequence: TTG
tgaaggcaaaaataaatttg

SEQ ID NO: 385364 - DNA, 20 bp, Artificial Sequence
  Description of Artificial Sequence: Synthetic oligonucleotide
  Target: LAMA2; (+) strand; PAM type: YTN; PAM sequence: TTT
gttggataatgcgtttgtga

SEQ ID NO: 385365 - DNA, 20 bp, Artificial Sequence
  Description of Artificial Sequence: Synthetic oligonucleotide
  Target: LAMA2; (+) strand; PAM type: YTN; PAM sequence: TTG
ttggataatgcgtttgtgag

SEQ ID NO: 385366 - DNA, 20 bp, Artificial Sequence
  Description of Artificial Sequence: Synthetic oligonucleotide
  Target: LAMA2; (+) strand; PAM type: YTN; PAM sequence: TTG
gataatgcgtttgtgagtag

SEQ ID NO: 385367 - DNA, 20 bp, Artificial Sequence
  Description of Artificial Sequence: Synthetic oligonucleotide
  Target: LAMA2; (+) strand; PAM type: YTN; PAM sequence: TTT
gtgagtagtagatcaatttg

SEQ ID NO: 385368 - DNA, 20 bp, Artificial Sequence
  Description of Artificial Sequence: Synthetic oligonucleotide
  Target: LAMA2; (+) strand; PAM type: YTN; PAM sequence: TTG
tgagtagtagatcaatttgt

SEQ ID NO: 385369 - DNA, 20 bp, Artificial Sequence
  Description of Artificial Sequence: Synthetic oligonucleotide
  Target: LAMA2; (+) strand; PAM type: YTN; PAM sequence: TTT
gttcacatattttgcaaaag

SEQ ID NO: 385370 - DNA, 20 bp, Artificial Sequence
  Description of Artificial Sequence: Synthetic oligonucleotide
  Target: LAMA2; (+) strand; PAM type: YTN; PAM sequence: TTG
ttcacatattttgcaaaagt

SEQ ID NO: 385371 - DNA, 20 bp, Artificial Sequence
  Description of Artificial Sequence: Synthetic oligonucleotide
  Target: LAMA2; (+) strand; PAM type: YTN; PAM sequence: TTC
acatattttgcaaaagttag

SEQ ID NO: 385372 - DNA, 20 bp, Artificial Sequence
  Description of Artificial Sequence: Synthetic oligonucleotide
  Target: LAMA2; (+) strand; PAM type: YTN; PAM sequence: TTT
tgcaaaagttagagcttatt

SEQ ID NO: 385373 - DNA, 20 bp, Artificial Sequence
  Description of Artificial Sequence: Synthetic oligonucleotide
  Target: LAMA2; (+) strand; PAM type: YTN; PAM sequence: TTT
gcaaaagttagagcttatta

SEQ ID NO: 385374 - DNA, 20 bp, Artificial Sequence
  Description of Artificial Sequence: Synthetic oligonucleotide
  Target: LAMA2; (+) strand; PAM type: YTN; PAM sequence: TTG
caaaagttagagcttattac

SEQ ID NO: 385375 - DNA, 20 bp, Artificial Sequence
  Description of Artificial Sequence: Synthetic oligonucleotide
  Target: LAMA2; (+) strand; PAM type: YTN; PAM sequence: TTA
gagcttattactcattcatg

SEQ ID NO: 385376 - DNA, 20 bp, Artificial Sequence
  Description of Artificial Sequence: Synthetic oligonucleotide
  Target: LAMA2; (+) strand; PAM type: YTN; PAM sequence: CTT
attactcattcatgtactat

SEQ ID NO: 385377 - DNA, 20 bp, Artificial Sequence
  Description of Artificial Sequence: Synthetic oligonucleotide
  Target: LAMA2; (+) strand; PAM type: YTN; PAM sequence: TTA
ttactcattcatgtactatt

SEQ ID NO: 385378 - DNA, 20 bp, Artificial Sequence
  Description of Artificial Sequence: Synthetic oligonucleotide
  Target: LAMA2; (+) strand; PAM type: YTN; PAM sequence: TTA
ctcattcatgtactattgat

SEQ ID NO: 385379 - DNA, 20 bp, Artificial Sequence
  Description of Artificial Sequence: Synthetic oligonucleotide
  Target: LAMA2; (+) strand; PAM type: YTN; PAM sequence: CTC
attcatgtactattgatgta

SEQ ID NO: 385380 - DNA, 20 bp, Artificial Sequence
  Description of Artificial Sequence: Synthetic oligonucleotide
  Target: LAMA2; (+) strand; PAM type: YTN; PAM sequence: TTC
atgtactattgatgtaacgc

SEQ ID NO: 385381 - DNA, 20 bp, Artificial Sequence
  Description of Artificial Sequence: Synthetic oligonucleotide
  Target: LAMA2; (+) strand; PAM type: YTN; PAM sequence: CTA
ttgatgtaacgcattagaag

SEQ ID NO: 385382 - DNA, 20 bp, Artificial Sequence
  Description of Artificial Sequence: Synthetic oligonucleotide
  Target: LAMA2; (+) strand; PAM type: YTN; PAM sequence: TTG
atgtaacgcattagaagaca

SEQ ID NO: 385383 - DNA, 20 bp, Artificial Sequence
  Description of Artificial Sequence: Synthetic oligonucleotide
  Target: LAMA2; (+) strand; PAM type: YTN; PAM sequence: TTA
gaagacagttaacattaggt

SEQ ID NO: 385384 - DNA, 20 bp, Artificial Sequence
  Description of Artificial Sequence: Synthetic oligonucleotide
  Target: LAMA2; (+) strand; PAM type: YTN; PAM sequence: TTA
acattaggtcctaatggcac

SEQ ID NO: 385385 - DNA, 20 bp, Artificial Sequence
  Description of Artificial Sequence: Synthetic oligonucleotide
  Target: LAMA2; (+) strand; PAM type: YTN; PAM sequence: TTA
ggtcctaatggcacctgacc

SEQ ID NO: 385386 - DNA, 20 bp, Artificial Sequence
  Description of Artificial Sequence: Synthetic oligonucleotide
  Target: LAMA2; (+) strand; PAM type: YTN; PAM sequence: CTA
atggcacctgaccaaaagga

SEQ ID NO: 385387 - DNA, 20 bp, Artificial Sequence
  Description of Artificial Sequence: Synthetic oligonucleotide
  Target: LAMA2; (+) strand; PAM type: YTN; PAM sequence: CTG
accaaaaggagctgtgggcc

SEQ ID NO: 385388 - DNA, 20 bp, Artificial Sequence
  Description of Artificial Sequence: Synthetic oligonucleotide
  Target: LAMA2; (+) strand; PAM type: YTN; PAM sequence: CTG
tgggcctggcctatacacct

SEQ ID NO: 385389 - DNA, 20 bp, Artificial Sequence
  Description of Artificial Sequence: Synthetic oligonucleotide
  Target: LAMA2; (+) strand; PAM type: YTN; PAM sequence: CTG
gcctatacaccttattgcct

SEQ ID NO: 385390 - DNA, 20 bp, Artificial Sequence
  Description of Artificial Sequence: Synthetic oligonucleotide
  Target: LAMA2; (+) strand; PAM type: YTN; PAM sequence: CTA
tacaccttattgcctgtttt

SEQ ID NO: 385391 - DNA, 20 bp, Artificial Sequence
  Description of Artificial Sequence: Synthetic oligonucleotide
  Target: LAMA2; (+) strand; PAM type: YTN; PAM sequence: CTT
attgcctgttttcagcatca

SEQ ID NO: 385392 - DNA, 20 bp, Artificial Sequence
  Description of Artificial Sequence: Synthetic oligonucleotide
  Target: LAMA2; (+) strand; PAM type: YTN; PAM sequence: TTA
ttgcctgttttcagcatcaa

SEQ ID NO: 385393 - DNA, 20 bp, Artificial Sequence
  Description of Artificial Sequence: Synthetic oligonucleotide
  Target: LAMA2; (+) strand; PAM type: YTN; PAM sequence: TTG
cctgttttcagcatcaactg

SEQ ID NO: 385394 - DNA, 20 bp, Artificial Sequence
  Description of Artificial Sequence: Synthetic oligonucleotide
  Target: LAMA2; (+) strand; PAM type: YTN; PAM sequence: CTG
ttttcagcatcaactgattt

SEQ ID NO: 385395 - DNA, 20 bp, Artificial Sequence
  Description of Artificial Sequence: Synthetic oligonucleotide
  Target: LAMA2; (+) strand; PAM type: YTN; PAM sequence: TTT
tcagcatcaactgatttagt

SEQ ID NO: 385396 - DNA, 20 bp, Artificial Sequence
  Description of Artificial Sequence: Synthetic oligonucleotide
  Target: LAMA2; (+) strand; PAM type: YTN; PAM sequence: TTT
cagcatcaactgatttagtg

SEQ ID NO: 385397 - DNA, 20 bp, Artificial Sequence
  Description of Artificial Sequence: Synthetic oligonucleotide
  Target: LAMA2; (+) strand; PAM type: YTN; PAM sequence: TTC
agcatcaactgatttagtga

SEQ ID NO: 385398 - DNA, 20 bp, Artificial Sequence
  Description of Artificial Sequence: Synthetic oligonucleotide
  Target: LAMA2; (+) strand; PAM type: YTN; PAM sequence: CTG
atttagtgaagcagcaaaaa

SEQ ID NO: 385399 - DNA, 20 bp, Artificial Sequence
  Description of Artificial Sequence: Synthetic oligonucleotide
  Target: LAMA2; (+) strand; PAM type: YTN; PAM sequence: TTT
agtgaagcagcaaaaagaaa

SEQ ID NO: 385400 - DNA, 20 bp, Artificial Sequence
  Description of Artificial Sequence: Synthetic oligonucleotide
  Target: LAMA2; (+) strand; PAM type: YTN; PAM sequence: TTA
gtgaagcagcaaaaagaaaa

SEQ ID NO: 385401 - DNA, 20 bp, Artificial Sequence
  Description of Artificial Sequence: Synthetic oligonucleotide
  Target: LAMA2; (+) strand; PAM type: YTN; PAM sequence: TTA
tctttctgccacagatacat

SEQ ID NO: 385402 - DNA, 20 bp, Artificial Sequence
  Description of Artificial Sequence: Synthetic oligonucleotide
  Target: LAMA2; (+) strand; PAM type: YTN; PAM sequence: CTT
tctgccacagatacatgttt

SEQ ID NO: 385403 - DNA, 20 bp, Artificial Sequence
  Description of Artificial Sequence: Synthetic oligonucleotide
  Target: LAMA2; (+) strand; PAM type: YTN; PAM sequence: TTT
ctgccacagatacatgtttt

SEQ ID NO: 385404 - DNA, 20 bp, Artificial Sequence
  Description of Artificial Sequence: Synthetic oligonucleotide
  Target: LAMA2; (+) strand; PAM type: YTN; PAM sequence: TTC
tgccacagatacatgttttt

SEQ ID NO: 385405 - DNA, 20 bp, Artificial Sequence
  Description of Artificial Sequence: Synthetic oligonucleotide
  Target: LAMA2; (+) strand; PAM type: YTN; PAM sequence: CTG
ccacagatacatgtttttaa

SEQ ID NO: 385406 - DNA, 20 bp, Artificial Sequence
  Description of Artificial Sequence: Synthetic oligonucleotide
  Target: LAMA2; (+) strand; PAM type: YTN; PAM sequence: TTT
ttaatttccaagtttccaat

SEQ ID NO: 385407 - DNA, 20 bp, Artificial Sequence
  Description of Artificial Sequence: Synthetic oligonucleotide
  Target: LAMA2; (+) strand; PAM type: YTN; PAM sequence: TTT
taatttccaagtttccaatg

SEQ ID NO: 385408 - DNA, 20 bp, Artificial Sequence
  Description of Artificial Sequence: Synthetic oligonucleotide
  Target: LAMA2; (+) strand; PAM type: YTN; PAM sequence: TTT
aatttccaagtttccaatgc

SEQ ID NO: 385409 - DNA, 20 bp, Artificial Sequence
  Description of Artificial Sequence: Synthetic oligonucleotide
  Target: LAMA2; (+) strand; PAM type: YTN; PAM sequence: TTA
atttccaagtttccaatgca

SEQ ID NO: 385410 - DNA, 20 bp, Artificial Sequence
  Description of Artificial Sequence: Synthetic oligonucleotide
  Target: LAMA2; (+) strand; PAM type: YTN; PAM sequence: TTT
ccaagtttccaatgcatcat

SEQ ID NO: 385411 - DNA, 20 bp, Artificial Sequence
  Description of Artificial Sequence: Synthetic oligonucleotide
  Target: LAMA2; (+) strand; PAM type: YTN; PAM sequence: TTC
caagtttccaatgcatcatt

SEQ ID NO: 385412 - DNA, 20 bp, Artificial Sequence
  Description of Artificial Sequence: Synthetic oligonucleotide
  Target: LAMA2; (+) strand; PAM type: YTN; PAM sequence: TTT
ccaatgcatcattcagtttt

SEQ ID NO: 385413 - DNA, 20 bp, Artificial Sequence
  Description of Artificial Sequence: Synthetic oligonucleotide
  Target: LAMA2; (+) strand; PAM type: YTN; PAM sequence: TTC
caatgcatcattcagtttta

SEQ ID NO: 385414 - DNA, 20 bp, Artificial Sequence
  Description of Artificial Sequence: Synthetic oligonucleotide
  Target: LAMA2; (+) strand; PAM type: YTN; PAM sequence: TTC
agttttatctaacgggaatg

SEQ ID NO: 385415 - DNA, 20 bp, Artificial Sequence
  Description of Artificial Sequence: Synthetic oligonucleotide
  Target: LAMA2; (+) strand; PAM type: YTN; PAM sequence: TTT
tatctaacgggaatgcagct

SEQ ID NO: 385416 - DNA, 20 bp, Artificial Sequence
  Description of Artificial Sequence: Synthetic oligonucleotide
  Target: LAMA2; (+) strand; PAM type: YTN; PAM sequence: TTT
atctaacgggaatgcagctg

SEQ ID NO: 385417 - DNA, 20 bp, Artificial Sequence
  Description of Artificial Sequence: Synthetic oligonucleotide
  Target: LAMA2; (+) strand; PAM type: YTN; PAM sequence: TTA
tctaacgggaatgcagctga

SEQ ID NO: 385418 - DNA, 20 bp, Artificial Sequence
  Description of Artificial Sequence: Synthetic oligonucleotide
  Target: LAMA2; (+) strand; PAM type: YTN; PAM sequence: CTA
acgggaatgcagctgagaga

SEQ ID NO: 385419 - DNA, 20 bp, Artificial Sequence
  Description of Artificial Sequence: Synthetic oligonucleotide
  Target: LAMA2; (+) strand; PAM type: YTN; PAM sequence: CTG
agagaagtttgtaacaaccc

SEQ ID NO: 385420 - DNA, 20 bp, Artificial Sequence
  Description of Artificial Sequence: Synthetic oligonucleotide
  Target: LAMA2; (+) strand; PAM type: YTN; PAM sequence: TTT
gtaacaacccaaaactacat

SEQ ID NO: 385421 - DNA, 20 bp, Artificial Sequence
  Description of Artificial Sequence: Synthetic oligonucleotide
  Target: LAMA2; (+) strand; PAM type: YTN; PAM sequence: TTG
taacaacccaaaactacatg

SEQ ID NO: 385422 - DNA, 20 bp, Artificial Sequence
  Description of Artificial Sequence: Synthetic oligonucleotide
  Target: LAMA2; (+) strand; PAM type: YTN; PAM sequence: CTA
catgctaatatagtttagtt

SEQ ID NO: 385423 - DNA, 20 bp, Artificial Sequence
  Description of Artificial Sequence: Synthetic oligonucleotide
  Target: LAMA2; (+) strand; PAM type: YTN; PAM sequence: CTA
atatagtttagttttcaagt

SEQ ID NO: 385424 - DNA, 20 bp, Artificial Sequence
  Description of Artificial Sequence: Synthetic oligonucleotide
  Target: LAMA2; (+) strand; PAM type: YTN; PAM sequence: TTT
agttttcaagtcttgtggag

SEQ ID NO: 385425 - DNA, 20 bp, Artificial Sequence
  Description of Artificial Sequence: Synthetic oligonucleotide
  Target: LAMA2; (+) strand; PAM type: YTN; PAM sequence: TTA
gttttcaagtcttgtggagt

SEQ ID NO: 385426 - DNA, 20 bp, Artificial Sequence
  Description of Artificial Sequence: Synthetic oligonucleotide
  Target: LAMA2; (+) strand; PAM type: YTN; PAM sequence: TTT
tcaagtcttgtggagtcttt

SEQ ID NO: 385427 - DNA, 20 bp, Artificial Sequence
  Description of Artificial Sequence: Synthetic oligonucleotide
  Target: LAMA2; (+) strand; PAM type: YTN; PAM sequence: TTT
caagtcttgtggagtctttt

SEQ ID NO: 385428 - DNA, 20 bp, Artificial Sequence
  Description of Artificial Sequence: Synthetic oligonucleotide
  Target: LAMA2; (+) strand; PAM type: YTN; PAM sequence: TTC
aagtcttgtggagtcttttt

SEQ ID NO: 385429 - DNA, 20 bp, Artificial Sequence
  Description of Artificial Sequence: Synthetic oligonucleotide
  Target: LAMA2; (+) strand; PAM type: YTN; PAM sequence: CTT
gtggagtcttttttttttta

SEQ ID NO: 385430 - DNA, 20 bp, Artificial Sequence
  Description of Artificial Sequence: Synthetic oligonucleotide
  Target: LAMA2; (+) strand; PAM type: YTN; PAM sequence: TTG
tggagtctttttttttttaa

SEQ ID NO: 385431 - DNA, 20 bp, Artificial Sequence
  Description of Artificial Sequence: Synthetic oligonucleotide
  Target: LAMA2; (+) strand; PAM type: YTN; PAM sequence: CTT
tttttttttaatggaataag

SEQ ID NO: 385432 - DNA, 20 bp, Artificial Sequence
  Description of Artificial Sequence: Synthetic oligonucleotide
  Target: LAMA2; (+) strand; PAM type: YTN; PAM sequence: TTT
ttttttttaatggaataaga

SEQ ID NO: 385433 - DNA, 20 bp, Artificial Sequence
  Description of Artificial Sequence: Synthetic oligonucleotide
  Target: LAMA2; (+) strand; PAM type: YTN; PAM sequence: TTT
tttttttaatggaataagat

SEQ ID NO: 385434 - DNA, 20 bp, Artificial Sequence
  Description of Artificial Sequence: Synthetic oligonucleotide
  Target: LAMA2; (+) strand; PAM type: YTN; PAM sequence: TTT
ttttttaatggaataagatc

SEQ ID NO: 385435 - DNA, 20 bp, Artificial Sequence
  Description of Artificial Sequence: Synthetic oligonucleotide
  Target: LAMA2; (+) strand; PAM type: YTN; PAM sequence: TTT
tttttaatggaataagatca

SEQ ID NO: 385436 - DNA, 20 bp, Artificial Sequence
  Description of Artificial Sequence: Synthetic oligonucleotide
  Target: LAMA2; (+) strand; PAM type: YTN; PAM sequence: TTT
ttttaatggaataagatcat

SEQ ID NO: 385437 - DNA, 20 bp, Artificial Sequence
  Description of Artificial Sequence: Synthetic oligonucleotide
  Target: LAMA2; (+) strand; PAM type: YTN; PAM sequence: TTT
tttaatggaataagatcatc

SEQ ID NO: 385438 - DNA, 20 bp, Artificial Sequence
  Description of Artificial Sequence: Synthetic oligonucleotide
  Target: LAMA2; (+) strand; PAM type: YTN; PAM sequence: TTT
ttaatggaataagatcatca

SEQ ID NO: 385439 - DNA, 20 bp, Artificial Sequence
  Description of Artificial Sequence: Synthetic oligonucleotide
  Target: LAMA2; (+) strand; PAM type: YTN; PAM sequence: TTT
taatggaataagatcatcag

SEQ ID NO: 385440 - DNA, 20 bp, Artificial Sequence
  Description of Artificial Sequence: Synthetic oligonucleotide
  Target: LAMA2; (+) strand; PAM type: YTN; PAM sequence: TTT
aatggaataagatcatcaga

SEQ ID NO: 385441 - DNA, 20 bp, Artificial Sequence
  Description of Artificial Sequence: Synthetic oligonucleotide
  Target: LAMA2; (+) strand; PAM type: YTN; PAM sequence: TTA
atggaataagatcatcagaa

SEQ ID NO: 385442 - DNA, 20 bp, Artificial Sequence
  Description of Artificial Sequence: Synthetic oligonucleotide
  Target: LAMA2; (+) strand; PAM type: YTN; PAM sequence: CTG
gctgtggtctaccagcattg

SEQ ID NO: 385443 - DNA, 20 bp, Artificial Sequence
  Description of Artificial Sequence: Synthetic oligonucleotide
  Target: LAMA2; (+) strand; PAM type: YTN; PAM sequence: CTG
tggtctaccagcattgtagt

SEQ ID NO: 385444 - DNA, 20 bp, Artificial Sequence
  Description of Artificial Sequence: Synthetic oligonucleotide
  Target: LAMA2; (+) strand; PAM type: YTN; PAM sequence: CTA
ccagcattgtagtaaaaaca

SEQ ID NO: 385445 - DNA, 20 bp, Artificial Sequence
  Description of Artificial Sequence: Synthetic oligonucleotide
  Target: LAMA2; (+) strand; PAM type: YTN; PAM sequence: TTG
tagtaaaaacattggggaag

SEQ ID NO: 385446 - DNA, 20 bp, Artificial Sequence
  Description of Artificial Sequence: Synthetic oligonucleotide
  Target: LAMA2; (+) strand; PAM type: YTN; PAM sequence: TTG
gggaagttttataagaccta

SEQ ID NO: 385447 - DNA, 20 bp, Artificial Sequence
  Description of Artificial Sequence: Synthetic oligonucleotide
  Target: LAMA2; (+) strand; PAM type: YTN; PAM sequence: TTT
tataagacctaattattaga

SEQ ID NO: 385448 - DNA, 20 bp, Artificial Sequence
  Description of Artificial Sequence: Synthetic oligonucleotide
  Target: LAMA2; (+) strand; PAM type: YTN; PAM sequence: TTT
ataagacctaattattagaa

SEQ ID NO: 385449 - DNA, 20 bp, Artificial Sequence
  Description of Artificial Sequence: Synthetic oligonucleotide
  Target: LAMA2; (+) strand; PAM type: YTN; PAM sequence: TTA
taagacctaattattagaaa

SEQ ID NO: 385450 - DNA, 20 bp, Artificial Sequence
  Description of Artificial Sequence: Synthetic oligonucleotide
  Target: LAMA2; (+) strand; PAM type: YTN; PAM sequence: CTA
attattagaaaataccataa

SEQ ID NO: 385451 - DNA, 20 bp, Artificial Sequence
  Description of Artificial Sequence: Synthetic oligonucleotide
  Target: LAMA2; (+) strand; PAM type: YTN; PAM sequence: TTA
ttagaaaataccataaaata

SEQ ID NO: 385452 - DNA, 20 bp, Artificial Sequence
  Description of Artificial Sequence: Synthetic oligonucleotide
  Target: LAMA2; (+) strand; PAM type: YTN; PAM sequence: TTA
gaaaataccataaaatagtc

SEQ ID NO: 385453 - DNA, 20 bp, Artificial Sequence
  Description of Artificial Sequence: Synthetic oligonucleotide
  Target: LAMA2; (+) strand; PAM type: YTN; PAM sequence: TTT
tcatagaaaaagctttccct

SEQ ID NO: 385454 - DNA, 20 bp, Artificial Sequence
  Description of Artificial Sequence: Synthetic oligonucleotide
  Target: LAMA2; (+) strand; PAM type: YTN; PAM sequence: TTT
catagaaaaagctttccctt

SEQ ID NO: 385455 - DNA, 20 bp, Artificial Sequence
  Description of Artificial Sequence: Synthetic oligonucleotide
  Target: LAMA2; (+) strand; PAM type: YTN; PAM sequence: TTC
atagaaaaagctttcccttt

SEQ ID NO: 385456 - DNA, 20 bp, Artificial Sequence
  Description of Artificial Sequence: Synthetic oligonucleotide
  Target: LAMA2; (+) strand; PAM type: YTN; PAM sequence: CTT
tccctttcctcacactgaat

SEQ ID NO: 385457 - DNA, 20 bp, Artificial Sequence
  Description of Artificial Sequence: Synthetic oligonucleotide
  Target: LAMA2; (+) strand; PAM type: YTN; PAM sequence: TTT
ccctttcctcacactgaatc

SEQ ID NO: 385458 - DNA, 20 bp, Artificial Sequence
  Description of Artificial Sequence: Synthetic oligonucleotide
  Target: LAMA2; (+) strand; PAM type: YTN; PAM sequence: TTC
cctttcctcacactgaatca

SEQ ID NO: 385459 - DNA, 20 bp, Artificial Sequence
  Description of Artificial Sequence: Synthetic oligonucleotide
  Target: LAMA2; (+) strand; PAM type: YTN; PAM sequence: CTT
tcctcacactgaatcacatt

SEQ ID NO: 385460 - DNA, 20 bp, Artificial Sequence
  Description of Artificial Sequence: Synthetic oligonucleotide
  Target: LAMA2; (+) strand; PAM type: YTN; PAM sequence: TTT
cctcacactgaatcacatta

SEQ ID NO: 385461 - DNA, 20 bp, Artificial Sequence
  Description of Artificial Sequence: Synthetic oligonucleotide
  Target: LAMA2; (+) strand; PAM type: YTN; PAM sequence: TTC
ctcacactgaatcacattac

SEQ ID NO: 385462 - DNA, 20 bp, Artificial Sequence
  Description of Artificial Sequence: Synthetic oligonucleotide
  Target: LAMA2; (+) strand; PAM type: YTN; PAM sequence: CTC
acactgaatcacattacttt

SEQ ID NO: 385463 - DNA, 20 bp, Artificial Sequence
  Description of Artificial Sequence: Synthetic oligonucleotide
  Target: LAMA2; (+) strand; PAM type: YTN; PAM sequence: CTG
aatcacattactttgtgttc

SEQ ID NO: 385464 - DNA, 20 bp, Artificial Sequence
  Description of Artificial Sequence: Synthetic oligonucleotide
  Target: LAMA2; (+) strand; PAM type: YTN; PAM sequence: TTA
ctttgtgttcaaggtaaaat

SEQ ID NO: 385465 - DNA, 20 bp, Artificial Sequence
  Description of Artificial Sequence: Synthetic oligonucleotide
  Target: LAMA2; (+) strand; PAM type: YTN; PAM sequence: CTT
tgtgttcaaggtaaaatgta

SEQ ID NO: 385466 - DNA, 20 bp, Artificial Sequence
  Description of Artificial Sequence: Synthetic oligonucleotide
  Target: LAMA2; (+) strand; PAM type: YTN; PAM sequence: TTT
gtgttcaaggtaaaatgtag

SEQ ID NO: 385467 - DNA, 20 bp, Artificial Sequence
  Description of Artificial Sequence: Synthetic oligonucleotide
  Target: LAMA2; (+) strand; PAM type: YTN; PAM sequence: TTG
tgttcaaggtaaaatgtagt

SEQ ID NO: 385468 - DNA, 20 bp, Artificial Sequence
  Description of Artificial Sequence: Synthetic oligonucleotide
  Target: LAMA2; (+) strand; PAM type: YTN; PAM sequence: TTC
aaggtaaaatgtagtttgaa

SEQ ID NO: 385469 - DNA, 20 bp, Artificial Sequence
  Description of Artificial Sequence: Synthetic oligonucleotide
  Target: LAMA2; (+) strand; PAM type: YTN; PAM sequence: TTT
gaaatctggatgtaaattag

SEQ ID NO: 385470 - DNA, 20 bp, Artificial Sequence
  Description of Artificial Sequence: Synthetic oligonucleotide
  Target: LAMA2; (+) strand; PAM type: YTN; PAM sequence: TTG
aaatctggatgtaaattaga

SEQ ID NO: 385471 - DNA, 20 bp, Artificial Sequence
  Description of Artificial Sequence: Synthetic oligonucleotide
  Target: LAMA2; (+) strand; PAM type: YTN; PAM sequence: CTG
gatgtaaattagaaaagata

SEQ ID NO: 385472 - DNA, 20 bp, Artificial Sequence
  Description of Artificial Sequence: Synthetic oligonucleotide
  Target: LAMA2; (+) strand; PAM type: YTN; PAM sequence: TTA
gaaaagatattattttattc

SEQ ID NO: 385473 - DNA, 20 bp, Artificial Sequence
  Description of Artificial Sequence: Synthetic oligonucleotide
  Target: LAMA2; (+) strand; PAM type: YTN; PAM sequence: TTA
ttttattccaagtgaaacat

SEQ ID NO: 385474 - DNA, 20 bp, Artificial Sequence
  Description of Artificial Sequence: Synthetic oligonucleotide
  Target: LAMA2; (+) strand; PAM type: YTN; PAM sequence: TTT
tattccaagtgaaacatgta

SEQ ID NO: 385475 - DNA, 20 bp, Artificial Sequence
  Description of Artificial Sequence: Synthetic oligonucleotide
  Target: LAMA2; (+) strand; PAM type: YTN; PAM sequence: TTT
attccaagtgaaacatgtat

SEQ ID NO: 385476 - DNA, 20 bp, Artificial Sequence
  Description of Artificial Sequence: Synthetic oligonucleotide
  Target: LAMA2; (+) strand; PAM type: YTN; PAM sequence: TTA
ttccaagtgaaacatgtatt

SEQ ID NO: 385477 - DNA, 20 bp, Artificial Sequence
  Description of Artificial Sequence: Synthetic oligonucleotide
  Target: LAMA2; (+) strand; PAM type: YTN; PAM sequence: TTC
caagtgaaacatgtattcac

SEQ ID NO: 385478 - DNA, 20 bp, Artificial Sequence
  Description of Artificial Sequence: Synthetic oligonucleotide
  Target: LAMA2; (+) strand; PAM type: YTN; PAM sequence: TTC
acacttcacgtcttgaagca

SEQ ID NO: 385479 - DNA, 20 bp, Artificial Sequence
  Description of Artificial Sequence: Synthetic oligonucleotide
  Target: LAMA2; (+) strand; PAM type: YTN; PAM sequence: CTT
cacgtcttgaagcaccagtg

SEQ ID NO: 385480 - DNA, 20 bp, Artificial Sequence
  Description of Artificial Sequence: Synthetic oligonucleotide
  Target: LAMA2; (+) strand; PAM type: YTN; PAM sequence: TTC
acgtcttgaagcaccagtgg

SEQ ID NO: 385481 - DNA, 20 bp, Artificial Sequence
  Description of Artificial Sequence: Synthetic oligonucleotide
  Target: LAMA2; (+) strand; PAM type: YTN; PAM sequence: CTT
gaagcaccagtggccatttg

SEQ ID NO: 385482 - DNA, 20 bp, Artificial Sequence
  Description of Artificial Sequence: Synthetic oligonucleotide
  Target: LAMA2; (+) strand; PAM type: YTN; PAM sequence: TTG
aagcaccagtggccatttgg

SEQ ID NO: 385483 - DNA, 20 bp, Artificial Sequence
  Description of Artificial Sequence: Synthetic oligonucleotide
  Target: LAMA2; (+) strand; PAM type: YTN; PAM sequence: TTT
gggctgagttttcaagaaaa

SEQ ID NO: 385484 - DNA, 20 bp, Artificial Sequence
  Description of Artificial Sequence: Synthetic oligonucleotide
  Target: LAMA2; (+) strand; PAM type: YTN; PAM sequence: TTG
ggctgagttttcaagaaaaa

SEQ ID NO: 385485 - DNA, 20 bp, Artificial Sequence
  Description of Artificial Sequence: Synthetic oligonucleotide
  Target: LAMA2; (+) strand; PAM type: YTN; PAM sequence: CTG
agttttcaagaaaaaaaatt

SEQ ID NO: 385486 - DNA, 20 bp, Artificial Sequence
  Description of Artificial Sequence: Synthetic oligonucleotide
  Target: LAMA2; (+) strand; PAM type: YTN; PAM sequence: TTT
tcaagaaaaaaaatttatat

SEQ ID NO: 385487 - DNA, 20 bp, Artificial Sequence
  Description of Artificial Sequence: Synthetic oligonucleotide
  Target: LAMA2; (+) strand; PAM type: YTN; PAM sequence: TTT
caagaaaaaaaatttatata

SEQ ID NO: 385488 - DNA, 20 bp, Artificial Sequence
  Description of Artificial Sequence: Synthetic oligonucleotide
  Target: LAMA2; (+) strand; PAM type: YTN; PAM sequence: TTC
aagaaaaaaaatttatatag

SEQ ID NO: 385489 - DNA, 20 bp, Artificial Sequence
  Description of Artificial Sequence: Synthetic oligonucleotide
  Target: LAMA2; (+) strand; PAM type: YTN; PAM sequence: TTT
atatagattttatgcccttt

SEQ ID NO: 385490 - DNA, 20 bp, Artificial Sequence
  Description of Artificial Sequence: Synthetic oligonucleotide
  Target: LAMA2; (+) strand; PAM type: YTN; PAM sequence: TTA
tatagattttatgccctttt

SEQ ID NO: 385491 - DNA, 20 bp, Artificial Sequence
  Description of Artificial Sequence: Synthetic oligonucleotide
  Target: LAMA2; (+) strand; PAM type: YTN; PAM sequence: TTT
tatgccctttttttaaccta

SEQ ID NO: 385492 - DNA, 20 bp, Artificial Sequence
  Description of Artificial Sequence: Synthetic oligonucleotide
  Target: LAMA2; (+) strand; PAM type: YTN; PAM sequence: TTT
atgccctttttttaacctaa

SEQ ID NO: 385493 - DNA, 20 bp, Artificial Sequence
  Description of Artificial Sequence: Synthetic oligonucleotide
  Target: LAMA2; (+) strand; PAM type: YTN; PAM sequence: TTA
tgccctttttttaacctaag

SEQ ID NO: 385494 - DNA, 20 bp, Artificial Sequence
  Description of Artificial Sequence: Synthetic oligonucleotide
  Target: LAMA2; (+) strand; PAM type: YTN; PAM sequence: CTT
tttttaacctaagagatatt

SEQ ID NO: 385495 - DNA, 20 bp, Artificial Sequence
  Description of Artificial Sequence: Synthetic oligonucleotide
  Target: LAMA2; (+) strand; PAM type: YTN; PAM sequence: TTT
ttttaacctaagagatatta

SEQ ID NO: 385496 - DNA, 20 bp, Artificial Sequence
  Description of Artificial Sequence: Synthetic oligonucleotide
  Target: LAMA2; (+) strand; PAM type: YTN; PAM sequence: TTT
tttaacctaagagatattaa

SEQ ID NO: 385497 - DNA, 20 bp, Artificial Sequence
  Description of Artificial Sequence: Synthetic oligonucleotide
  Target: LAMA2; (+) strand; PAM type: YTN; PAM sequence: TTT
ttaacctaagagatattaag

SEQ ID NO: 385498 - DNA, 20 bp, Artificial Sequence
  Description of Artificial Sequence: Synthetic oligonucleotide
  Target: LAMA2; (+) strand; PAM type: YTN; PAM sequence: TTT
taacctaagagatattaagt

SEQ ID NO: 385499 - DNA, 20 bp, Artificial Sequence
  Description of Artificial Sequence: Synthetic oligonucleotide
  Target: LAMA2; (+) strand; PAM type: YTN; PAM sequence: TTT
aacctaagagatattaagta

SEQ ID NO: 385500 - DNA, 20 bp, Artificial Sequence
  Description of Artificial Sequence: Synthetic oligonucleotide
  Target: LAMA2; (+) strand; PAM type: YTN; PAM sequence: TTA
acctaagagatattaagtaa

SEQ ID NO: 385501 - DNA, 20 bp, Artificial Sequence
  Description of Artificial Sequence: Synthetic oligonucleotide
  Target: LAMA2; (+) strand; PAM type: YTN; PAM sequence: CTA
agagatattaagtaatagct

SEQ ID NO: 385502 - DNA, 20 bp, Artificial Sequence
  Description of Artificial Sequence: Synthetic oligonucleotide
  Target: LAMA2; (+) strand; PAM type: YTN; PAM sequence: TTA
agtaatagctattccactat

SEQ ID NO: 385503 - DNA, 20 bp, Artificial Sequence
  Description of Artificial Sequence: Synthetic oligonucleotide
  Target: LAMA2; (+) strand; PAM type: YTN; PAM sequence: CTA
ttccactatcagacaatgtg

SEQ ID NO: 385504 - DNA, 20 bp, Artificial Sequence
  Description of Artificial Sequence: Synthetic oligonucleotide
  Target: LAMA2; (+) strand; PAM type: YTN; PAM sequence: TTC
cactatcagacaatgtgcat

SEQ ID NO: 385505 - DNA, 20 bp, Artificial Sequence
  Description of Artificial Sequence: Synthetic oligonucleotide
  Target: LAMA2; (+) strand; PAM type: YTN; PAM sequence: CTA
tcagacaatgtgcataaatt

SEQ ID NO: 385506 - DNA, 20 bp, Artificial Sequence
  Description of Artificial Sequence: Synthetic oligonucleotide
  Target: LAMA2; (+) strand; PAM type: YTN; PAM sequence: TTC
tagtcagatttttcttttga

SEQ ID NO: 385507 - DNA, 20 bp, Artificial Sequence
  Description of Artificial Sequence: Synthetic oligonucleotide
  Target: LAMA2; (+) strand; PAM type: YTN; PAM sequence: CTA
gtcagatttttcttttgatt

SEQ ID NO: 385508 - DNA, 20 bp, Artificial Sequence
  Description of Artificial Sequence: Synthetic oligonucleotide
  Target: LAMA2; (+) strand; PAM type: YTN; PAM sequence: TTT
ttcttttgattagtgaacaa

SEQ ID NO: 385509 - DNA, 20 bp, Artificial Sequence
  Description of Artificial Sequence: Synthetic oligonucleotide
  Target: LAMA2; (+) strand; PAM type: YTN; PAM sequence: TTT
tcttttgattagtgaacaat

SEQ ID NO: 385510 - DNA, 20 bp, Artificial Sequence
  Description of Artificial Sequence: Synthetic oligonucleotide
  Target: LAMA2; (+) strand; PAM type: YTN; PAM sequence: TTT
cttttgattagtgaacaata

SEQ ID NO: 385511 - DNA, 20 bp, Artificial Sequence
  Description of Artificial Sequence: Synthetic oligonucleotide
  Target: LAMA2; (+) strand; PAM type: YTN; PAM sequence: TTC
ttttgattagtgaacaatag

SEQ ID NO: 385512 - DNA, 20 bp, Artificial Sequence
  Description of Artificial Sequence: Synthetic oligonucleotide
  Target: LAMA2; (+) strand; PAM type: YTN; PAM sequence: CTT
ttgattagtgaacaatagga

SEQ ID NO: 385513 - DNA, 20 bp, Artificial Sequence
  Description of Artificial Sequence: Synthetic oligonucleotide
  Target: LAMA2; (+) strand; PAM type: YTN; PAM sequence: TTT
tgattagtgaacaataggac

SEQ ID NO: 385514 - DNA, 20 bp, Artificial Sequence
  Description of Artificial Sequence: Synthetic oligonucleotide
  Target: LAMA2; (+) strand; PAM type: YTN; PAM sequence: TTT
gattagtgaacaataggaca

SEQ ID NO: 385515 - DNA, 20 bp, Artificial Sequence
  Description of Artificial Sequence: Synthetic oligonucleotide
  Target: LAMA2; (+) strand; PAM type: YTN; PAM sequence: TTG
attagtgaacaataggacaa

SEQ ID NO: 385516 - DNA, 20 bp, Artificial Sequence
  Description of Artificial Sequence: Synthetic oligonucleotide
  Target: LAMA2; (+) strand; PAM type: YTN; PAM sequence: TTA
gtgaacaataggacaatttt

SEQ ID NO: 385517 - DNA, 20 bp, Artificial Sequence
  Description of Artificial Sequence: Synthetic oligonucleotide
  Target: LAMA2; (+) strand; PAM type: YTN; PAM sequence: TTT
tgctggatgtttagtatatt

SEQ ID NO: 385518 - DNA, 20 bp, Artificial Sequence
  Description of Artificial Sequence: Synthetic oligonucleotide
  Target: LAMA2; (+) strand; PAM type: YTN; PAM sequence: TTT
gctggatgtttagtatattc

SEQ ID NO: 385519 - DNA, 20 bp, Artificial Sequence
  Description of Artificial Sequence: Synthetic oligonucleotide
  Target: LAMA2; (+) strand; PAM type: YTN; PAM sequence: TTG
ctggatgtttagtatattca

SEQ ID NO: 385520 - DNA, 20 bp, Artificial Sequence
  Description of Artificial Sequence: Synthetic oligonucleotide
  Target: LAMA2; (+) strand; PAM type: YTN; PAM sequence: CTG
gatgtttagtatattcatgg

SEQ ID NO: 385521 - DNA, 20 bp, Artificial Sequence
  Description of Artificial Sequence: Synthetic oligonucleotide
  Target: LAMA2; (+) strand; PAM type: YTN; PAM sequence: TTT
agtatattcatggctgtcac

SEQ ID NO: 385522 - DNA, 20 bp, Artificial Sequence
  Description of Artificial Sequence: Synthetic oligonucleotide
  Target: LAMA2; (+) strand; PAM type: YTN; PAM sequence: TTA
gtatattcatggctgtcaca

SEQ ID NO: 385523 - DNA, 20 bp, Artificial Sequence
  Description of Artificial Sequence: Synthetic oligonucleotide
  Target: LAMA2; (+) strand; PAM type: YTN; PAM sequence: TTC
atggctgtcacatcattatt

SEQ ID NO: 385524 - DNA, 20 bp, Artificial Sequence
  Description of Artificial Sequence: Synthetic oligonucleotide
  Target: LAMA2; (+) strand; PAM type: YTN; PAM sequence: CTG
tcacatcattattaaattcc

SEQ ID NO: 385525 - DNA, 20 bp, Artificial Sequence
  Description of Artificial Sequence: Synthetic oligonucleotide
  Target: LAMA2; (+) strand; PAM type: YTN; PAM sequence: TTA
ttaaattccagaatattaac

SEQ ID NO: 385526 - DNA, 20 bp, Artificial Sequence
  Description of Artificial Sequence: Synthetic oligonucleotide
  Target: LAMA2; (+) strand; PAM type: YTN; PAM sequence: TTA
aattccagaatattaacatg

SEQ ID NO: 385527 - DNA, 20 bp, Artificial Sequence
  Description of Artificial Sequence: Synthetic oligonucleotide
  Target: LAMA2; (+) strand; PAM type: YTN; PAM sequence: TTC
cagaatattaacatgctttg

SEQ ID NO: 385528 - DNA, 20 bp, Artificial Sequence
  Description of Artificial Sequence: Synthetic oligonucleotide
  Target: LAMA2; (+) strand; PAM type: YTN; PAM sequence: TTA
acatgctttgtgtgatgcat

SEQ ID NO: 385529 - DNA, 20 bp, Artificial Sequence
  Description of Artificial Sequence: Synthetic oligonucleotide
  Target: LAMA2; (+) strand; PAM type: YTN; PAM sequence: CTT
tgtgtgatgcatttttaatc

SEQ ID NO: 385530 - DNA, 20 bp, Artificial Sequence
  Description of Artificial Sequence: Synthetic oligonucleotide
  Target: LAMA2; (+) strand; PAM type: YTN; PAM sequence: TTT
gtgtgatgcatttttaatcc

SEQ ID NO: 385531 - DNA, 20 bp, Artificial Sequence
  Description of Artificial Sequence: Synthetic oligonucleotide
  Target: LAMA2; (+) strand; PAM type: YTN; PAM sequence: TTG
tgtgatgcatttttaatcca

SEQ ID NO: 385532 - DNA, 20 bp, Artificial Sequence
  Description of Artificial Sequence: Synthetic oligonucleotide
  Target: LAMA2; (+) strand; PAM type: YTN; PAM sequence: TTT
ttaatccatcataaaccaaa

SEQ ID NO: 385533 - DNA, 20 bp, Artificial Sequence
  Description of Artificial Sequence: Synthetic oligonucleotide
  Target: LAMA2; (+) strand; PAM type: YTN; PAM sequence: TTT
taatccatcataaaccaaac

SEQ ID NO: 385534 - DNA, 20 bp, Artificial Sequence
  Description of Artificial Sequence: Synthetic oligonucleotide
  Target: LAMA2; (+) strand; PAM type: YTN; PAM sequence: TTT
aatccatcataaaccaaaca

SEQ ID NO: 385535 - DNA, 20 bp, Artificial Sequence
  Description of Artificial Sequence: Synthetic oligonucleotide
  Target: LAMA2; (+) strand; PAM type: YTN; PAM sequence: TTA
atccatcataaaccaaacaa

SEQ ID NO: 385536 - DNA, 20 bp, Artificial Sequence
  Description of Artificial Sequence: Synthetic oligonucleotide
  Target: LAMA2; (+) strand; PAM type: YTN; PAM sequence: TTT
gtttactgttattaatggtt

SEQ ID NO: 385537 - DNA, 20 bp, Artificial Sequence
  Description of Artificial Sequence: Synthetic oligonucleotide
  Target: LAMA2; (+) strand; PAM type: YTN; PAM sequence: TTG
tttactgttattaatggttt

SEQ ID NO: 385538 - DNA, 20 bp, Artificial Sequence
  Description of Artificial Sequence: Synthetic oligonucleotide
  Target: LAMA2; (+) strand; PAM type: YTN; PAM sequence: TTT
actgttattaatggtttttc

SEQ ID NO: 385539 - DNA, 20 bp, Artificial Sequence
  Description of Artificial Sequence: Synthetic oligonucleotide
  Target: LAMA2; (+) strand; PAM type: YTN; PAM sequence: TTA
ctgttattaatggtttttca

SEQ ID NO: 385540 - DNA, 20 bp, Artificial Sequence
  Description of Artificial Sequence: Synthetic oligonucleotide
  Target: LAMA2; (+) strand; PAM type: YTN; PAM sequence: CTG
ttattaatggtttttcattg

SEQ ID NO: 385541 - DNA, 20 bp, Artificial Sequence
  Description of Artificial Sequence: Synthetic oligonucleotide
  Target: LAMA2; (+) strand; PAM type: YTN; PAM sequence: TTA
ttaatggtttttcattgtga

SEQ ID NO: 385542 - DNA, 20 bp, Artificial Sequence
  Description of Artificial Sequence: Synthetic oligonucleotide
  Target: LAMA2; (+) strand; PAM type: YTN; PAM sequence: TTA
atggtttttcattgtgacgt

SEQ ID NO: 385543 - DNA, 20 bp, Artificial Sequence
  Description of Artificial Sequence: Synthetic oligonucleotide
  Target: LAMA2; (+) strand; PAM type: YTN; PAM sequence: TTT
ttcattgtgacgtcctagcc

SEQ ID NO: 385544 - DNA, 20 bp, Artificial Sequence
  Description of Artificial Sequence: Synthetic oligonucleotide
  Target: LAMA2; (+) strand; PAM type: YTN; PAM sequence: TTT
tcattgtgacgtcctagcct

SEQ ID NO: 385545 - DNA, 20 bp, Artificial Sequence
  Description of Artificial Sequence: Synthetic oligonucleotide
  Target: LAMA2; (+) strand; PAM type: YTN; PAM sequence: TTT
cattgtgacgtcctagcctt

SEQ ID NO: 385546 - DNA, 20 bp, Artificial Sequence
  Description of Artificial Sequence: Synthetic oligonucleotide
  Target: LAMA2; (+) strand; PAM type: YTN; PAM sequence: TTC
attgtgacgtcctagcctta

SEQ ID NO: 385547 - DNA, 20 bp, Artificial Sequence
  Description of Artificial Sequence: Synthetic oligonucleotide
  Target: LAMA2; (+) strand; PAM type: YTN; PAM sequence: TTG
tgacgtcctagccttaaata

SEQ ID NO: 385548 - DNA, 20 bp, Artificial Sequence
  Description of Artificial Sequence: Synthetic oligonucleotide
  Target: LAMA2; (+) strand; PAM type: YTN; PAM sequence: CTA
gccttaaataagaacttcag

SEQ ID NO: 385549 - DNA, 20 bp, Artificial Sequence
  Description of Artificial Sequence: Synthetic oligonucleotide
  Target: LAMA2; (+) strand; PAM type: YTN; PAM sequence: CTT
aaataagaacttcagcaata

SEQ ID NO: 385550 - DNA, 20 bp, Artificial Sequence
  Description of Artificial Sequence: Synthetic oligonucleotide
  Target: LAMA2; (+) strand; PAM type: YTN; PAM sequence: TTA
aataagaacttcagcaataa

SEQ ID NO: 385551 - DNA, 20 bp, Artificial Sequence
  Description of Artificial Sequence: Synthetic oligonucleotide
  Target: LAMA2; (+) strand; PAM type: YTN; PAM sequence: CTT
cagcaataattataaagatg

SEQ ID NO: 385552 - DNA, 20 bp, Artificial Sequence
  Description of Artificial Sequence: Synthetic oligonucleotide
  Target: LAMA2; (+) strand; PAM type: YTN; PAM sequence: TTC
agcaataattataaagatgg

SEQ ID NO: 385553 - DNA, 20 bp, Artificial Sequence
  Description of Artificial Sequence: Synthetic oligonucleotide
  Target: LAMA2; (+) strand; PAM type: YTN; PAM sequence: TTA
taaagatggcatttattact

SEQ ID NO: 385554 - DNA, 20 bp, Artificial Sequence
  Description of Artificial Sequence: Synthetic oligonucleotide
  Target: LAMA2; (+) strand; PAM type: YTN; PAM sequence: TTT
attactacctaaaagtatgt

SEQ ID NO: 385555 - DNA, 20 bp, Artificial Sequence
  Description of Artificial Sequence: Synthetic oligonucleotide
  Target: LAMA2; (+) strand; PAM type: YTN; PAM sequence: TTA
ttactacctaaaagtatgtc

SEQ ID NO: 385556 - DNA, 20 bp, Artificial Sequence
  Description of Artificial Sequence: Synthetic oligonucleotide
  Target: LAMA2; (+) strand; PAM type: YTN; PAM sequence: TTA
ctacctaaaagtatgtccca

SEQ ID NO: 385557 - DNA, 20 bp, Artificial Sequence
  Description of Artificial Sequence: Synthetic oligonucleotide
  Target: LAMA2; (+) strand; PAM type: YTN; PAM sequence: CTA
cctaaaagtatgtcccaata

SEQ ID NO: 385558 - DNA, 20 bp, Artificial Sequence
  Description of Artificial Sequence: Synthetic oligonucleotide
  Target: LAMA2; (+) strand; PAM type: YTN; PAM sequence: CTA
aaagtatgtcccaataacct

SEQ ID NO: 385559 - DNA, 20 bp, Artificial Sequence
  Description of Artificial Sequence: Synthetic oligonucleotide
  Target: LAMA2; (+) strand; PAM type: YTN; PAM sequence: CTT
gatcatggataggaatacta

SEQ ID NO: 385560 - DNA, 20 bp, Artificial Sequence
  Description of Artificial Sequence: Synthetic oligonucleotide
  Target: LAMA2; (+) strand; PAM type: YTN; PAM sequence: TTG
atcatggataggaatactat

SEQ ID NO: 385561 - DNA, 20 bp, Artificial Sequence
  Description of Artificial Sequence: Synthetic oligonucleotide
  Target: LAMA2; (+) strand; PAM type: YTN; PAM sequence: CTA
ttttataaaataaatggatt

SEQ ID NO: 385562 - DNA, 20 bp, Artificial Sequence
  Description of Artificial Sequence: Synthetic oligonucleotide
  Target: LAMA2; (+) strand; PAM type: YTN; PAM sequence: TTT
tataaaataaatggattaaa

SEQ ID NO: 385563 - DNA, 20 bp, Artificial Sequence
  Description of Artificial Sequence: Synthetic oligonucleotide
  Target: LAMA2; (+) strand; PAM type: YTN; PAM sequence: TTT
ataaaataaatggattaaac

SEQ ID NO: 385564 - DNA, 20 bp, Artificial Sequence
  Description of Artificial Sequence: Synthetic oligonucleotide
  Target: LAMA2; (+) strand; PAM type: YTN; PAM sequence: TTA
taaaataaatggattaaact

SEQ ID NO: 385565 - DNA, 20 bp, Artificial Sequence
  Description of Artificial Sequence: Synthetic oligonucleotide
  Target: LAMA2; (+) strand; PAM type: YTN; PAM sequence: TTA
aactttttttgcaatccttt

SEQ ID NO: 385566 - DNA, 20 bp, Artificial Sequence
  Description of Artificial Sequence: Synthetic oligonucleotide
  Target: LAMA2; (+) strand; PAM type: YTN; PAM sequence: CTT
tttttgcaatccttttcttt

SEQ ID NO: 385567 - DNA, 20 bp, Artificial Sequence
  Description of Artificial Sequence: Synthetic oligonucleotide
  Target: LAMA2; (+) strand; PAM type: YTN; PAM sequence: TTT
ttttgcaatccttttctttc

SEQ ID NO: 385568 - DNA, 20 bp, Artificial Sequence
  Description of Artificial Sequence: Synthetic oligonucleotide
  Target: LAMA2; (+) strand; PAM type: YTN; PAM sequence: TTT
tttgcaatccttttctttct

SEQ ID NO: 385569 - DNA, 20 bp, Artificial Sequence
  Description of Artificial Sequence: Synthetic oligonucleotide
  Target: LAMA2; (+) strand; PAM type: YTN; PAM sequence: TTT
ttgcaatccttttctttctg

SEQ ID NO: 385570 - DNA, 20 bp, Artificial Sequence
  Description of Artificial Sequence: Synthetic oligonucleotide
  Target: LAMA2; (+) strand; PAM type: YTN; PAM sequence: TTT
tgcaatccttttctttctga

SEQ ID NO: 385571 - DNA, 20 bp, Artificial Sequence
  Description of Artificial Sequence: Synthetic oligonucleotide
  Target: LAMA2; (+) strand; PAM type: YTN; PAM sequence: TTT
gcaatccttttctttctgat

SEQ ID NO: 385572 - DNA, 20 bp, Artificial Sequence
  Description of Artificial Sequence: Synthetic oligonucleotide
  Target: LAMA2; (+) strand; PAM type: YTN; PAM sequence: TTG
caatccttttctttctgatt

SEQ ID NO: 385573 - DNA, 20 bp, Artificial Sequence
  Description of Artificial Sequence: Synthetic oligonucleotide
  Target: LAMA2; (+) strand; PAM type: YTN; PAM sequence: CTT
ttctttctgattcagtttca

SEQ ID NO: 385574 - DNA, 20 bp, Artificial Sequence
  Description of Artificial Sequence: Synthetic oligonucleotide
  Target: LAMA2; (+) strand; PAM type: YTN; PAM sequence: TTT
tctttctgattcagtttcag

SEQ ID NO: 385575 - DNA, 20 bp, Artificial Sequence
  Description of Artificial Sequence: Synthetic oligonucleotide
  Target: LAMA2; (+) strand; PAM type: YTN; PAM sequence: TTT
ctttctgattcagtttcagc

SEQ ID NO: 385576 - DNA, 20 bp, Artificial Sequence
  Description of Artificial Sequence: Synthetic oligonucleotide
  Target: LAMA2; (+) strand; PAM type: YTN; PAM sequence: TTC
tttctgattcagtttcagcc

SEQ ID NO: 385577 - DNA, 20 bp, Artificial Sequence
  Description of Artificial Sequence: Synthetic oligonucleotide
  Target: LAMA2; (+) strand; PAM type: YTN; PAM sequence: CTT
tctgattcagtttcagcccc

SEQ ID NO: 385578 - DNA, 20 bp, Artificial Sequence
  Description of Artificial Sequence: Synthetic oligonucleotide
  Target: LAMA2; (+) strand; PAM type: YTN; PAM sequence: TTT
ctgattcagtttcagcccct

SEQ ID NO: 385579 - DNA, 20 bp, Artificial Sequence
  Description of Artificial Sequence: Synthetic oligonucleotide
  Target: LAMA2; (+) strand; PAM type: YTN; PAM sequence: TTC
tgattcagtttcagcccctc

SEQ ID NO: 385580 - DNA, 20 bp, Artificial Sequence
  Description of Artificial Sequence: Synthetic oligonucleotide
  Target: LAMA2; (+) strand; PAM type: YTN; PAM sequence: CTG
attcagtttcagcccctctt

SEQ ID NO: 385581 - DNA, 20 bp, Artificial Sequence
  Description of Artificial Sequence: Synthetic oligonucleotide
  Target: LAMA2; (+) strand; PAM type: YTN; PAM sequence: TTC
agtttcagcccctcttgtgt

SEQ ID NO: 385582 - DNA, 20 bp, Artificial Sequence
  Description of Artificial Sequence: Synthetic oligonucleotide
  Target: LAMA2; (+) strand; PAM type: YTN; PAM sequence: TTT
cagcccctcttgtgtcgcag

SEQ ID NO: 385583 - DNA, 20 bp, Artificial Sequence
  Description of Artificial Sequence: Synthetic oligonucleotide
  Target: LAMA2; (+) strand; PAM type: YTN; PAM sequence: TTC
agcccctcttgtgtcgcaga

SEQ ID NO: 385584 - DNA, 20 bp, Artificial Sequence
  Description of Artificial Sequence: Synthetic oligonucleotide
  Target: LAMA2; (+) strand; PAM type: YTN; PAM sequence: CTC
ttgtgtcgcagaaggacttg

SEQ ID NO: 385585 - DNA, 20 bp, Artificial Sequence
  Description of Artificial Sequence: Synthetic oligonucleotide
  Target: LAMA2; (+) strand; PAM type: YTN; PAM sequence: CTT
gtgtcgcagaaggacttgac

SEQ ID NO: 385586 - DNA, 20 bp, Artificial Sequence
  Description of Artificial Sequence: Synthetic oligonucleotide
  Target: LAMA2; (+) strand; PAM type: YTN; PAM sequence: TTG
tgtcgcagaaggacttgacg

SEQ ID NO: 385587 - DNA, 20 bp, Artificial Sequence
  Description of Artificial Sequence: Synthetic oligonucleotide
  Target: LAMA2; (+) strand; PAM type: YTN; PAM sequence: CTT
gacgactaccgctgcacggc

SEQ ID NO: 385588 - DNA, 20 bp, Artificial Sequence
  Description of Artificial Sequence: Synthetic oligonucleotide
  Target: LAMA2; (+) strand; PAM type: YTN; PAM sequence: TTG
acgactaccgctgcacggct

SEQ ID NO: 385589 - DNA, 20 bp, Artificial Sequence
  Description of Artificial Sequence: Synthetic oligonucleotide
  Target: LAMA2; (+) strand; PAM type: YTN; PAM sequence: CTA
ccgctgcacggcttgtccac

SEQ ID NO: 385590 - DNA, 20 bp, Artificial Sequence
  Description of Artificial Sequence: Synthetic oligonucleotide
  Target: LAMA2; (+) strand; PAM type: YTN; PAM sequence: CTG
cacggcttgtccacggggat

SEQ ID NO: 385591 - DNA, 20 bp, Artificial Sequence
  Description of Artificial Sequence: Synthetic oligonucleotide
  Target: LAMA2; (+) strand; PAM type: YTN; PAM sequence: CTT
gtccacggggatatgaaggc

SEQ ID NO: 385592 - DNA, 20 bp, Artificial Sequence
  Description of Artificial Sequence: Synthetic oligonucleotide
  Target: LAMA2; (+) strand; PAM type: YTN; PAM sequence: TTG
tccacggggatatgaaggcc

SEQ ID NO: 385593 - DNA, 20 bp, Artificial Sequence
  Description of Artificial Sequence: Synthetic oligonucleotide
  Target: LAMA2; (+) strand; PAM type: YTN; PAM sequence: CTG
tgaaaggtaccaacagccat

SEQ ID NO: 385594 - DNA, 20 bp, Artificial Sequence
  Description of Artificial Sequence: Synthetic oligonucleotide
  Target: LAMA2; (+) strand; PAM type: YTN; PAM sequence: CTA
tatggtaaagggtcacaata

SEQ ID NO: 385595 - DNA, 20 bp, Artificial Sequence
  Description of Artificial Sequence: Synthetic oligonucleotide
  Target: LAMA2; (+) strand; PAM type: YTN; PAM sequence: TTC
attatttgaagaacttcaat

SEQ ID NO: 385596 - DNA, 20 bp, Artificial Sequence
  Description of Artificial Sequence: Synthetic oligonucleotide
  Target: LAMA2; (+) strand; PAM type: YTN; PAM sequence: TTA
tttgaagaacttcaatattt

SEQ ID NO: 385597 - DNA, 20 bp, Artificial Sequence
  Description of Artificial Sequence: Synthetic oligonucleotide
  Target: LAMA2; (+) strand; PAM type: YTN; PAM sequence: TTT
gaagaacttcaatatttgca

SEQ ID NO: 385598 - DNA, 20 bp, Artificial Sequence
  Description of Artificial Sequence: Synthetic oligonucleotide
  Target: LAMA2; (+) strand; PAM type: YTN; PAM sequence: TTG
aagaacttcaatatttgcat

SEQ ID NO: 385599 - DNA, 20 bp, Artificial Sequence
  Description of Artificial Sequence: Synthetic oligonucleotide
  Target: LAMA2; (+) strand; PAM type: YTN; PAM sequence: CTT
caatatttgcatatccttta

SEQ ID NO: 385600 - DNA, 20 bp, Artificial Sequence
  Description of Artificial Sequence: Synthetic oligonucleotide
  Target: LAMA2; (+) strand; PAM type: YTN; PAM sequence: TTC
aatatttgcatatcctttag

SEQ ID NO: 385601 - DNA, 20 bp, Artificial Sequence
  Description of Artificial Sequence: Synthetic oligonucleotide
  Target: LAMA2; (+) strand; PAM type: YTN; PAM sequence: TTT
gcatatcctttagaagttta

SEQ ID NO: 385602 - DNA, 20 bp, Artificial Sequence
  Description of Artificial Sequence: Synthetic oligonucleotide
  Target: LAMA2; (+) strand; PAM type: YTN; PAM sequence: TTG
catatcctttagaagtttaa

SEQ ID NO: 385603 - DNA, 20 bp, Artificial Sequence
  Description of Artificial Sequence: Synthetic oligonucleotide
  Target: LAMA2; (+) strand; PAM type: YTN; PAM sequence: CTT
tagaagtttaaattacaatg

SEQ ID NO: 385604 - DNA, 20 bp, Artificial Sequence
  Description of Artificial Sequence: Synthetic oligonucleotide
  Target: LAMA2; (+) strand; PAM type: YTN; PAM sequence: TTT
agaagtttaaattacaatgc

SEQ ID NO: 385605 - DNA, 20 bp, Artificial Sequence
  Description of Artificial Sequence: Synthetic oligonucleotide
  Target: LAMA2; (+) strand; PAM type: YTN; PAM sequence: TTA
gaagtttaaattacaatgct

SEQ ID NO: 385606 - DNA, 20 bp, Artificial Sequence
  Description of Artificial Sequence: Synthetic oligonucleotide
  Target: LAMA2; (+) strand; PAM type: YTN; PAM sequence: TTT
aaattacaatgctttcaaaa

SEQ ID NO: 385607 - DNA, 20 bp, Artificial Sequence
  Description of Artificial Sequence: Synthetic oligonucleotide
  Target: LAMA2; (+) strand; PAM type: YTN; PAM sequence: TTA
aattacaatgctttcaaaac

SEQ ID NO: 385608 - DNA, 20 bp, Artificial Sequence
  Description of Artificial Sequence: Synthetic oligonucleotide
  Target: LAMA2; (+) strand; PAM type: YTN; PAM sequence: TTA
caatgctttcaaaaccactt

SEQ ID NO: 385609 - DNA, 20 bp, Artificial Sequence
  Description of Artificial Sequence: Synthetic oligonucleotide
  Target: LAMA2; (+) strand; PAM type: YTN; PAM sequence: CTT
tcaaaaccacttgtgtatct

SEQ ID NO: 385610 - DNA, 20 bp, Artificial Sequence
  Description of Artificial Sequence: Synthetic oligonucleotide
  Target: LAMA2; (+) strand; PAM type: YTN; PAM sequence: TTT
caaaaccacttgtgtatctt

SEQ ID NO: 385611 - DNA, 20 bp, Artificial Sequence
  Description of Artificial Sequence: Synthetic oligonucleotide
  Target: LAMA2; (+) strand; PAM type: YTN; PAM sequence: TTC
aaaaccacttgtgtatctta

SEQ ID NO: 385612 - DNA, 20 bp, Artificial Sequence
  Description of Artificial Sequence: Synthetic oligonucleotide
  Target: LAMA2; (+) strand; PAM type: YTN; PAM sequence: CTT
gtgtatcttagaatttgtcc

SEQ ID NO: 385613 - DNA, 20 bp, Artificial Sequence
  Description of Artificial Sequence: Synthetic oligonucleotide
  Target: LAMA2; (+) strand; PAM type: YTN; PAM sequence: TTG
tgtatcttagaatttgtcca

SEQ ID NO: 385614 - DNA, 20 bp, Artificial Sequence
  Description of Artificial Sequence: Synthetic oligonucleotide
  Target: LAMA2; (+) strand; PAM type: YTN; PAM sequence: CTT
agaatttgtccaaagaaagt

SEQ ID NO: 385615 - DNA, 20 bp, Artificial Sequence
  Description of Artificial Sequence: Synthetic oligonucleotide
  Target: LAMA2; (+) strand; PAM type: YTN; PAM sequence: TTA
gaatttgtccaaagaaagtt

SEQ ID NO: 385616 - DNA, 20 bp, Artificial Sequence
  Description of Artificial Sequence: Synthetic oligonucleotide
  Target: LAMA2; (+) strand; PAM type: YTN; PAM sequence: TTT
gtccaaagaaagttgtttat

SEQ ID NO: 385617 - DNA, 20 bp, Artificial Sequence
  Description of Artificial Sequence: Synthetic oligonucleotide
  Target: LAMA2; (+) strand; PAM type: YTN; PAM sequence: TTG
tccaaagaaagttgtttatt

SEQ ID NO: 385618 - DNA, 20 bp, Artificial Sequence
  Description of Artificial Sequence: Synthetic oligonucleotide
  Target: LAMA2; (+) strand; PAM type: YTN; PAM sequence: TTG
tttatttccaccgtatgttt

SEQ ID NO: 385619 - DNA, 20 bp, Artificial Sequence
  Description of Artificial Sequence: Synthetic oligonucleotide
  Target: LAMA2; (+) strand; PAM type: YTN; PAM sequence: TTT
atttccaccgtatgtttaga

SEQ ID NO: 385620 - DNA, 20 bp, Artificial Sequence
  Description of Artificial Sequence: Synthetic oligonucleotide
  Target: LAMA2; (+) strand; PAM type: YTN; PAM sequence: TTA
tttccaccgtatgtttagac

SEQ ID NO: 385621 - DNA, 20 bp, Artificial Sequence
  Description of Artificial Sequence: Synthetic oligonucleotide
  Target: LAMA2; (+) strand; PAM type: YTN; PAM sequence: TTT
ccaccgtatgtttagacttt

SEQ ID NO: 385622 - DNA, 20 bp, Artificial Sequence
  Description of Artificial Sequence: Synthetic oligonucleotide
  Target: LAMA2; (+) strand; PAM type: YTN; PAM sequence: TTC
caccgtatgtttagacttta

SEQ ID NO: 385623 - DNA, 20 bp, Artificial Sequence
  Description of Artificial Sequence: Synthetic oligonucleotide
  Target: LAMA2; (+) strand; PAM type: YTN; PAM sequence: TTT
agactttatcaaagattcca

SEQ ID NO: 385624 - DNA, 20 bp, Artificial Sequence
  Description of Artificial Sequence: Synthetic oligonucleotide
  Target: LAMA2; (+) strand; PAM type: YTN; PAM sequence: TTA
gactttatcaaagattccaa

SEQ ID NO: 385625 - DNA, 20 bp, Artificial Sequence
  Description of Artificial Sequence: Synthetic oligonucleotide
  Target: LAMA2; (+) strand; PAM type: YTN; PAM sequence: CTT
tatcaaagattccaaactat

SEQ ID NO: 385626 - DNA, 20 bp, Artificial Sequence
  Description of Artificial Sequence: Synthetic oligonucleotide
  Target: LAMA2; (+) strand; PAM type: YTN; PAM sequence: TTT
atcaaagattccaaactatt

SEQ ID NO: 385627 - DNA, 20 bp, Artificial Sequence
  Description of Artificial Sequence: Synthetic oligonucleotide
  Target: LAMA2; (+) strand; PAM type: YTN; PAM sequence: TTA
tcaaagattccaaactattt

SEQ ID NO: 385628 - DNA, 20 bp, Artificial Sequence
  Description of Artificial Sequence: Synthetic oligonucleotide
  Target: LAMA2; (+) strand; PAM type: YTN; PAM sequence: TTC
caaactatttacaattatct

SEQ ID NO: 385629 - DNA, 20 bp, Artificial Sequence
  Description of Artificial Sequence: Synthetic oligonucleotide
  Target: LAMA2; (+) strand; PAM type: YTN; PAM sequence: CTA
tttacaattatctaacttat

SEQ ID NO: 385630 - DNA, 20 bp, Artificial Sequence
  Description of Artificial Sequence: Synthetic oligonucleotide
  Target: LAMA2; (+) strand; PAM type: YTN; PAM sequence: TTT
acaattatctaacttatgct

SEQ ID NO: 385631 - DNA, 20 bp, Artificial Sequence
  Description of Artificial Sequence: Synthetic oligonucleotide
  Target: LAMA2; (+) strand; PAM type: YTN; PAM sequence: TTA
caattatctaacttatgctt

SEQ ID NO: 385632 - DNA, 20 bp, Artificial Sequence
  Description of Artificial Sequence: Synthetic oligonucleotide
  Target: LAMA2; (+) strand; PAM type: YTN; PAM sequence: TTA
tctaacttatgctttagtat

SEQ ID NO: 385633 - DNA, 20 bp, Artificial Sequence
  Description of Artificial Sequence: Synthetic oligonucleotide
  Target: LAMA2; (+) strand; PAM type: YTN; PAM sequence: CTA
acttatgctttagtatatat

SEQ ID NO: 385634 - DNA, 20 bp, Artificial Sequence
  Description of Artificial Sequence: Synthetic oligonucleotide
  Target: LAMA2; (+) strand; PAM type: YTN; PAM sequence: CTT
atgctttagtatatatatat

SEQ ID NO: 385635 - DNA, 20 bp, Artificial Sequence
  Description of Artificial Sequence: Synthetic oligonucleotide
  Target: LAMA2; (+) strand; PAM type: YTN; PAM sequence: TTA
tgctttagtatatatatata

SEQ ID NO: 385636 - DNA, 20 bp, Artificial Sequence
  Description of Artificial Sequence: Synthetic oligonucleotide
  Target: LAMA2; (+) strand; PAM type: YTN; PAM sequence: CTT
tagtatatatatatatataa

SEQ ID NO: 385637 - DNA, 20 bp, Artificial Sequence
  Description of Artificial Sequence: Synthetic oligonucleotide
  Target: LAMA2; (+) strand; PAM type: YTN; PAM sequence: TTT
agtatatatatatatataat

SEQ ID NO: 385638 - DNA, 20 bp, Artificial Sequence
  Description of Artificial Sequence: Synthetic oligonucleotide
  Target: LAMA2; (+) strand; PAM type: YTN; PAM sequence: TTA
gtatatatatatatataatt

SEQ ID NO: 385639 - DNA, 20 bp, Artificial Sequence
  Description of Artificial Sequence: Synthetic oligonucleotide
  Target: LAMA2; (+) strand; PAM type: YTN; PAM sequence: TTT
tatatgtaaatataacattt

SEQ ID NO: 385640 - DNA, 20 bp, Artificial Sequence
  Description of Artificial Sequence: Synthetic oligonucleotide
  Target: LAMA2; (+) strand; PAM type: YTN; PAM sequence: TTT
atatgtaaatataacatttc

SEQ ID NO: 385641 - DNA, 20 bp, Artificial Sequence
  Description of Artificial Sequence: Synthetic oligonucleotide
  Target: LAMA2; (+) strand; PAM type: YTN; PAM sequence: TTA
tatgtaaatataacatttca

SEQ ID NO: 385642 - DNA, 20 bp, Artificial Sequence
  Description of Artificial Sequence: Synthetic oligonucleotide
  Target: LAMA2; (+) strand; PAM type: YTN; PAM sequence: TTT
cataagaataaatcaatttt

SEQ ID NO: 385643 - DNA, 20 bp, Artificial Sequence
  Description of Artificial Sequence: Synthetic oligonucleotide
  Target: LAMA2; (+) strand; PAM type: YTN; PAM sequence: TTC
ataagaataaatcaattttc

SEQ ID NO: 385644 - DNA, 20 bp, Artificial Sequence
  Description of Artificial Sequence: Synthetic oligonucleotide
  Target: LAMA2; (+) strand; PAM type: YTN; PAM sequence: TTT
tcaaaagcttagcagtagtt

SEQ ID NO: 385645 - DNA, 20 bp, Artificial Sequence
  Description of Artificial Sequence: Synthetic oligonucleotide
  Target: LAMA2; (+) strand; PAM type: YTN; PAM sequence: TTT
caaaagcttagcagtagtta

SEQ ID NO: 385646 - DNA, 20 bp, Artificial Sequence
  Description of Artificial Sequence: Synthetic oligonucleotide
  Target: LAMA2; (+) strand; PAM type: YTN; PAM sequence: TTC
aaaagcttagcagtagttac

SEQ ID NO: 385647 - DNA, 20 bp, Artificial Sequence
  Description of Artificial Sequence: Synthetic oligonucleotide
  Target: LAMA2; (+) strand; PAM type: YTN; PAM sequence: CTT
agcagtagttactactaata

SEQ ID NO: 385648 - DNA, 20 bp, Artificial Sequence
  Description of Artificial Sequence: Synthetic oligonucleotide
  Target: LAMA2; (+) strand; PAM type: YTN; PAM sequence: TTA
gcagtagttactactaataa

SEQ ID NO: 385649 - DNA, 20 bp, Artificial Sequence
  Description of Artificial Sequence: Synthetic oligonucleotide
  Target: LAMA2; (+) strand; PAM type: YTN; PAM sequence: TTA
ctactaataagaaactggct

SEQ ID NO: 385650 - DNA, 20 bp, Artificial Sequence
  Description of Artificial Sequence: Synthetic oligonucleotide
  Target: LAMA2; (+) strand; PAM type: YTN; PAM sequence: CTA
ctaataagaaactggctaca

SEQ ID NO: 385651 - DNA, 20 bp, Artificial Sequence
  Description of Artificial Sequence: Synthetic oligonucleotide
  Target: LAMA2; (+) strand; PAM type: YTN; PAM sequence: CTA
ataagaaactggctacactt

SEQ ID NO: 385652 - DNA, 20 bp, Artificial Sequence
  Description of Artificial Sequence: Synthetic oligonucleotide
  Target: LAMA2; (+) strand; PAM type: YTN; PAM sequence: CTG
gctacacttttcttatttta

SEQ ID NO: 385653 - DNA, 20 bp, Artificial Sequence
  Description of Artificial Sequence: Synthetic oligonucleotide
  Target: LAMA2; (+) strand; PAM type: YTN; PAM sequence: CTA
cacttttcttattttaatgc

SEQ ID NO: 385654 - DNA, 20 bp, Artificial Sequence
  Description of Artificial Sequence: Synthetic oligonucleotide
  Target: LAMA2; (+) strand; PAM type: YTN; PAM sequence: CTT
ttcttattttaatgcactgg

SEQ ID NO: 385655 - DNA, 20 bp, Artificial Sequence
  Description of Artificial Sequence: Synthetic oligonucleotide
  Target: LAMA2; (+) strand; PAM type: YTN; PAM sequence: TTT
tcttattttaatgcactgga

SEQ ID NO: 385656 - DNA, 20 bp, Artificial Sequence
  Description of Artificial Sequence: Synthetic oligonucleotide
  Target: LAMA2; (+) strand; PAM type: YTN; PAM sequence: TTT
cttattttaatgcactggaa

SEQ ID NO: 385657 - DNA, 20 bp, Artificial Sequence
  Description of Artificial Sequence: Synthetic oligonucleotide
  Target: LAMA2; (+) strand; PAM type: YTN; PAM sequence: TTC
ttattttaatgcactggaaa

SEQ ID NO: 385658 - DNA, 20 bp, Artificial Sequence
  Description of Artificial Sequence: Synthetic oligonucleotide
  Target: LAMA2; (+) strand; PAM type: YTN; PAM sequence: CTT
attttaatgcactggaaaat

SEQ ID NO: 385659 - DNA, 20 bp, Artificial Sequence
  Description of Artificial Sequence: Synthetic oligonucleotide
  Target: LAMA2; (+) strand; PAM type: YTN; PAM sequence: TTA
ttttaatgcactggaaaata

SEQ ID NO: 385660 - DNA, 20 bp, Artificial Sequence
  Description of Artificial Sequence: Synthetic oligonucleotide
  Target: LAMA2; (+) strand; PAM type: YTN; PAM sequence: TTT
taatgcactggaaaatattg

SEQ ID NO: 385661 - DNA, 20 bp, Artificial Sequence
  Description of Artificial Sequence: Synthetic oligonucleotide
  Target: LAMA2; (+) strand; PAM type: YTN; PAM sequence: TTT
aatgcactggaaaatattgt

SEQ ID NO: 385662 - DNA, 20 bp, Artificial Sequence
  Description of Artificial Sequence: Synthetic oligonucleotide
  Target: LAMA2; (+) strand; PAM type: YTN; PAM sequence: TTA
atgcactggaaaatattgtc

SEQ ID NO: 385663 - DNA, 20 bp, Artificial Sequence
  Description of Artificial Sequence: Synthetic oligonucleotide
  Target: LAMA2; (+) strand; PAM type: YTN; PAM sequence: CTG
gaaaatattgtctggaagta

SEQ ID NO: 385664 - DNA, 20 bp, Artificial Sequence
  Description of Artificial Sequence: Synthetic oligonucleotide
  Target: LAMA2; (+) strand; PAM type: YTN; PAM sequence: TTG
tctggaagtaactgaattca

SEQ ID NO: 385665 - DNA, 20 bp, Artificial Sequence
  Description of Artificial Sequence: Synthetic oligonucleotide
  Target: LAMA2; (+) strand; PAM type: YTN; PAM sequence: CTG
gaagtaactgaattcacgtc

SEQ ID NO: 385666 - DNA, 20 bp, Artificial Sequence
  Description of Artificial Sequence: Synthetic oligonucleotide
  Target: LAMA2; (+) strand; PAM type: YTN; PAM sequence: CTG
aattcacgtcattgttctga

SEQ ID NO: 385667 - DNA, 20 bp, Artificial Sequence
  Description of Artificial Sequence: Synthetic oligonucleotide
  Target: LAMA2; (+) strand; PAM type: YTN; PAM sequence: TTC
acgtcattgttctgaacact

SEQ ID NO: 385668 - DNA, 20 bp, Artificial Sequence
  Description of Artificial Sequence: Synthetic oligonucleotide
  Target: LAMA2; (+) strand; PAM type: YTN; PAM sequence: TTG
ttctgaacactatgactaca

SEQ ID NO: 385669 - DNA, 20 bp, Artificial Sequence
  Description of Artificial Sequence: Synthetic oligonucleotide
  Target: LAMA2; (+) strand; PAM type: YTN; PAM sequence: TTC
tgaacactatgactacacca

SEQ ID NO: 385670 - DNA, 20 bp, Artificial Sequence
  Description of Artificial Sequence: Synthetic oligonucleotide
  Target: LAMA2; (+) strand; PAM type: YTN; PAM sequence: CTG
aacactatgactacaccagc

SEQ ID NO: 385671 - DNA, 20 bp, Artificial Sequence
  Description of Artificial Sequence: Synthetic oligonucleotide
  Target: LAMA2; (+) strand; PAM type: YTN; PAM sequence: CTA
tgactacaccagcaagtgta

SEQ ID NO: 385672 - DNA, 20 bp, Artificial Sequence
  Description of Artificial Sequence: Synthetic oligonucleotide
  Target: LAMA2; (+) strand; PAM type: YTN; PAM sequence: CTA
caccagcaagtgtatacata

SEQ ID NO: 385673 - DNA, 20 bp, Artificial Sequence
  Description of Artificial Sequence: Synthetic oligonucleotide
  Target: LAMA2; (+) strand; PAM type: YTN; PAM sequence: CTC
aaaatataaatagtatcaag

SEQ ID NO: 385674 - DNA, 20 bp, Artificial Sequence
  Description of Artificial Sequence: Synthetic oligonucleotide
  Target: LAMA2; (+) strand; PAM type: YTN; PAM sequence: TTT
ttaattagtacccagacaat

SEQ ID NO: 385675 - DNA, 20 bp, Artificial Sequence
  Description of Artificial Sequence: Synthetic oligonucleotide
  Target: LAMA2; (+) strand; PAM type: YTN; PAM sequence: TTT
taattagtacccagacaata

SEQ ID NO: 385676 - DNA, 20 bp, Artificial Sequence
  Description of Artificial Sequence: Synthetic oligonucleotide
  Target: LAMA2; (+) strand; PAM type: YTN; PAM sequence: TTT
aattagtacccagacaataa

SEQ ID NO: 385677 - DNA, 20 bp, Artificial Sequence
  Description of Artificial Sequence: Synthetic oligonucleotide
  Target: LAMA2; (+) strand; PAM type: YTN; PAM sequence: TTA
attagtacccagacaataaa

SEQ ID NO: 385678 - DNA, 20 bp, Artificial Sequence
  Description of Artificial Sequence: Synthetic oligonucleotide
  Target: LAMA2; (+) strand; PAM type: YTN; PAM sequence: TTA
gtacccagacaataaagtat

SEQ ID NO: 385679 - DNA, 20 bp, Artificial Sequence
  Description of Artificial Sequence: Synthetic oligonucleotide
  Target: LAMA2; (+) strand; PAM type: YTN; PAM sequence: TTT
gttattcagttttccttttc

SEQ ID NO: 385680 - DNA, 20 bp, Artificial Sequence
  Description of Artificial Sequence: Synthetic oligonucleotide
  Target: LAMA2; (+) strand; PAM type: YTN; PAM sequence: TTG
ttattcagttttccttttca

SEQ ID NO: 385681 - DNA, 20 bp, Artificial Sequence
  Description of Artificial Sequence: Synthetic oligonucleotide
  Target: LAMA2; (+) strand; PAM type: YTN; PAM sequence: TTA
ttcagttttccttttcaata

SEQ ID NO: 385682 - DNA, 20 bp, Artificial Sequence
  Description of Artificial Sequence: Synthetic oligonucleotide
  Target: LAMA2; (+) strand; PAM type: YTN; PAM sequence: TTC
agttttccttttcaataggc

SEQ ID NO: 385683 - DNA, 20 bp, Artificial Sequence
  Description of Artificial Sequence: Synthetic oligonucleotide
  Target: LAMA2; (+) strand; PAM type: YTN; PAM sequence: TTT
tccttttcaataggcaaaca

SEQ ID NO: 385684 - DNA, 20 bp, Artificial Sequence
  Description of Artificial Sequence: Synthetic oligonucleotide
  Target: LAMA2; (+) strand; PAM type: YTN; PAM sequence: TTT
ccttttcaataggcaaacaa

SEQ ID NO: 385685 - DNA, 20 bp, Artificial Sequence
  Description of Artificial Sequence: Synthetic oligonucleotide
  Target: LAMA2; (+) strand; PAM type: YTN; PAM sequence: TTC
cttttcaataggcaaacaat

SEQ ID NO: 385686 - DNA, 20 bp, Artificial Sequence
  Description of Artificial Sequence: Synthetic oligonucleotide
  Target: LAMA2; (+) strand; PAM type: YTN; PAM sequence: CTT
ttcaataggcaaacaatatt

SEQ ID NO: 385687 - DNA, 20 bp, Artificial Sequence
  Description of Artificial Sequence: Synthetic oligonucleotide
  Target: LAMA2; (+) strand; PAM type: YTN; PAM sequence: TTT
tcaataggcaaacaatatta

SEQ ID NO: 385688 - DNA, 20 bp, Artificial Sequence
  Description of Artificial Sequence: Synthetic oligonucleotide
  Target: LAMA2; (+) strand; PAM type: YTN; PAM sequence: TTT
caataggcaaacaatattat

SEQ ID NO: 385689 - DNA, 20 bp, Artificial Sequence
  Description of Artificial Sequence: Synthetic oligonucleotide
  Target: LAMA2; (+) strand; PAM type: YTN; PAM sequence: TTC
aataggcaaacaatattatt

SEQ ID NO: 385690 - DNA, 20 bp, Artificial Sequence
  Description of Artificial Sequence: Synthetic oligonucleotide
  Target: LAMA2; (+) strand; PAM type: YTN; PAM sequence: TTA
tttaaatgttttctcttacc

SEQ ID NO: 385691 - DNA, 20 bp, Artificial Sequence
  Description of Artificial Sequence: Synthetic oligonucleotide
  Target: LAMA2; (+) strand; PAM type: YTN; PAM sequence: TTT
aaatgttttctcttaccata

SEQ ID NO: 385692 - DNA, 20 bp, Artificial Sequence
  Description of Artificial Sequence: Synthetic oligonucleotide
  Target: LAMA2; (+) strand; PAM type: YTN; PAM sequence: TTA
aatgttttctcttaccatat

SEQ ID NO: 385693 - DNA, 20 bp, Artificial Sequence
  Description of Artificial Sequence: Synthetic oligonucleotide
  Target: LAMA2; (+) strand; PAM type: YTN; PAM sequence: TTT
tctcttaccatattgcttat

SEQ ID NO: 385694 - DNA, 20 bp, Artificial Sequence
  Description of Artificial Sequence: Synthetic oligonucleotide
  Target: LAMA2; (+) strand; PAM type: YTN; PAM sequence: TTT
ctcttaccatattgcttatg

SEQ ID NO: 385695 - DNA, 20 bp, Artificial Sequence
  Description of Artificial Sequence: Synthetic oligonucleotide
  Target: LAMA2; (+) strand; PAM type: YTN; PAM sequence: TTC
tcttaccatattgcttatga

SEQ ID NO: 385696 - DNA, 20 bp, Artificial Sequence
  Description of Artificial Sequence: Synthetic oligonucleotide
  Target: LAMA2; (+) strand; PAM type: YTN; PAM sequence: CTC
ttaccatattgcttatgaaa

SEQ ID NO: 385697 - DNA, 20 bp, Artificial Sequence
  Description of Artificial Sequence: Synthetic oligonucleotide
  Target: LAMA2; (+) strand; PAM type: YTN; PAM sequence: CTT
accatattgcttatgaaatc

SEQ ID NO: 385698 - DNA, 20 bp, Artificial Sequence
  Description of Artificial Sequence: Synthetic oligonucleotide
  Target: LAMA2; (+) strand; PAM type: YTN; PAM sequence: TTA
ccatattgcttatgaaatct

SEQ ID NO: 385699 - DNA, 20 bp, Artificial Sequence
  Description of Artificial Sequence: Synthetic oligonucleotide
  Target: LAMA2; (+) strand; PAM type: YTN; PAM sequence: TTG
cttatgaaatctcataatgc

SEQ ID NO: 385700 - DNA, 20 bp, Artificial Sequence
  Description of Artificial Sequence: Synthetic oligonucleotide
  Target: LAMA2; (+) strand; PAM type: YTN; PAM sequence: CTT
atgaaatctcataatgcatg

SEQ ID NO: 385701 - DNA, 20 bp, Artificial Sequence
  Description of Artificial Sequence: Synthetic oligonucleotide
  Target: LAMA2; (+) strand; PAM type: YTN; PAM sequence: TTA
tgaaatctcataatgcatgt

SEQ ID NO: 385702 - DNA, 20 bp, Artificial Sequence
  Description of Artificial Sequence: Synthetic oligonucleotide
  Target: LAMA2; (+) strand; PAM type: YTN; PAM sequence: CTC
ataatgcatgtatacagctg

SEQ ID NO: 385703 - DNA, 20 bp, Artificial Sequence
  Description of Artificial Sequence: Synthetic oligonucleotide
  Target: LAMA2; (+) strand; PAM type: YTN; PAM sequence: CTG
ttaaattgaattctcagtgt

SEQ ID NO: 385704 - DNA, 20 bp, Artificial Sequence
  Description of Artificial Sequence: Synthetic oligonucleotide
  Target: LAMA2; (+) strand; PAM type: YTN; PAM sequence: TTA
aattgaattctcagtgtaat

SEQ ID NO: 385705 - DNA, 20 bp, Artificial Sequence
  Description of Artificial Sequence: Synthetic oligonucleotide
  Target: LAMA2; (+) strand; PAM type: YTN; PAM sequence: TTG
aattctcagtgtaatccaaa

SEQ ID NO: 385706 - DNA, 20 bp, Artificial Sequence
  Description of Artificial Sequence: Synthetic oligonucleotide
  Target: LAMA2; (+) strand; PAM type: YTN; PAM sequence: TTC
tcagtgtaatccaaatggta

SEQ ID NO: 385707 - DNA, 20 bp, Artificial Sequence
  Description of Artificial Sequence: Synthetic oligonucleotide
  Target: LAMA2; (+) strand; PAM type: YTN; PAM sequence: CTC
agtgtaatccaaatggtaaa

SEQ ID NO: 385708 - DNA, 20 bp, Artificial Sequence
  Description of Artificial Sequence: Synthetic oligonucleotide
  Target: LAMA2; (+) strand; PAM type: YTN; PAM sequence: TTA
aggagtacagttccaaactg

SEQ ID NO: 385709 - DNA, 20 bp, Artificial Sequence
  Description of Artificial Sequence: Synthetic oligonucleotide
  Target: LAMA2; (+) strand; PAM type: YTN; PAM sequence: TTC
caaactgattgtctagaaaa

SEQ ID NO: 385710 - DNA, 20 bp, Artificial Sequence
  Description of Artificial Sequence: Synthetic oligonucleotide
  Target: LAMA2; (+) strand; PAM type: YTN; PAM sequence: CTG
attgtctagaaaagttgcaa

SEQ ID NO: 385711 - DNA, 20 bp, Artificial Sequence
  Description of Artificial Sequence: Synthetic oligonucleotide
  Target: LAMA2; (+) strand; PAM type: YTN; PAM sequence: TTG
tctagaaaagttgcaattaa

SEQ ID NO: 385712 - DNA, 20 bp, Artificial Sequence
  Description of Artificial Sequence: Synthetic oligonucleotide
  Target: LAMA2; (+) strand; PAM type: YTN; PAM sequence: CTA
gaaaagttgcaattaatatc

SEQ ID NO: 385713 - DNA, 20 bp, Artificial Sequence
  Description of Artificial Sequence: Synthetic oligonucleotide
  Target: LAMA2; (+) strand; PAM type: YTN; PAM sequence: TTG
caattaatatcttccagata

SEQ ID NO: 385714 - DNA, 20 bp, Artificial Sequence
  Description of Artificial Sequence: Synthetic oligonucleotide
  Target: LAMA2; (+) strand; PAM type: YTN; PAM sequence: TTA
atatcttccagatatatatt

SEQ ID NO: 385715 - DNA, 20 bp, Artificial Sequence
  Description of Artificial Sequence: Synthetic oligonucleotide
  Target: LAMA2; (+) strand; PAM type: YTN; PAM sequence: CTT
ccagatatatattttctgta

SEQ ID NO: 385716 - DNA, 20 bp, Artificial Sequence
  Description of Artificial Sequence: Synthetic oligonucleotide
  Target: LAMA2; (+) strand; PAM type: YTN; PAM sequence: TTC
cagatatatattttctgtaa

SEQ ID NO: 385717 - DNA, 20 bp, Artificial Sequence
  Description of Artificial Sequence: Synthetic oligonucleotide
  Target: LAMA2; (+) strand; PAM type: YTN; PAM sequence: TTT
tctgtaagatcagtatcctg

SEQ ID NO: 385718 - DNA, 20 bp, Artificial Sequence
  Description of Artificial Sequence: Synthetic oligonucleotide
  Target: LAMA2; (+) strand; PAM type: YTN; PAM sequence: TTT
ctgtaagatcagtatcctgg

SEQ ID NO: 385719 - DNA, 20 bp, Artificial Sequence
  Description of Artificial Sequence: Synthetic oligonucleotide
  Target: LAMA2; (+) strand; PAM type: YTN; PAM sequence: TTC
tgtaagatcagtatcctgga

SEQ ID NO: 385720 - DNA, 20 bp, Artificial Sequence
  Description of Artificial Sequence: Synthetic oligonucleotide
  Target: LAMA2; (+) strand; PAM type: YTN; PAM sequence: CTG
taagatcagtatcctggata

SEQ ID NO: 385721 - DNA, 20 bp, Artificial Sequence
  Description of Artificial Sequence: Synthetic oligonucleotide
  Target: LAMA2; (+) strand; PAM type: YTN; PAM sequence: CTG
gatattcaaacttgtcacca

SEQ ID NO: 385722 - DNA, 20 bp, Artificial Sequence
  Description of Artificial Sequence: Synthetic oligonucleotide
  Target: LAMA2; (+) strand; PAM type: YTN; PAM sequence: TTC
aaacttgtcaccaccacttt

SEQ ID NO: 385723 - DNA, 20 bp, Artificial Sequence
  Description of Artificial Sequence: Synthetic oligonucleotide
  Target: LAMA2; (+) strand; PAM type: YTN; PAM sequence: CTT
gtcaccaccacttttggtat

SEQ ID NO: 385724 - DNA, 20 bp, Artificial Sequence
  Description of Artificial Sequence: Synthetic oligonucleotide
  Target: LAMA2; (+) strand; PAM type: YTN; PAM sequence: TTG
tcaccaccacttttggtata

SEQ ID NO: 385725 - DNA, 20 bp, Artificial Sequence
  Description of Artificial Sequence: Synthetic oligonucleotide
  Target: LAMA2; (+) strand; PAM type: YTN; PAM sequence: CTT
ttggtatattttagatatta

SEQ ID NO: 385726 - DNA, 20 bp, Artificial Sequence
  Description of Artificial Sequence: Synthetic oligonucleotide
  Target: LAMA2; (+) strand; PAM type: YTN; PAM sequence: TTT
tggtatattttagatattat

SEQ ID NO: 385727 - DNA, 20 bp, Artificial Sequence
  Description of Artificial Sequence: Synthetic oligonucleotide
  Target: LAMA2; (+) strand; PAM type: YTN; PAM sequence: TTT
ggtatattttagatattatc

SEQ ID NO: 385728 - DNA, 20 bp, Artificial Sequence
  Description of Artificial Sequence: Synthetic oligonucleotide
  Target: LAMA2; (+) strand; PAM type: YTN; PAM sequence: TTG
gtatattttagatattatct

SEQ ID NO: 385729 - DNA, 20 bp, Artificial Sequence
  Description of Artificial Sequence: Synthetic oligonucleotide
  Target: LAMA2; (+) strand; PAM type: YTN; PAM sequence: TTT
tagatattatctttaatgta

SEQ ID NO: 385730 - DNA, 20 bp, Artificial Sequence
  Description of Artificial Sequence: Synthetic oligonucleotide
  Target: LAMA2; (+) strand; PAM type: YTN; PAM sequence: TTT
agatattatctttaatgtaa

SEQ ID NO: 385731 - DNA, 20 bp, Artificial Sequence
  Description of Artificial Sequence: Synthetic oligonucleotide
  Target: LAMA2; (+) strand; PAM type: YTN; PAM sequence: TTA
gatattatctttaatgtaac

SEQ ID NO: 385732 - DNA, 20 bp, Artificial Sequence
  Description of Artificial Sequence: Synthetic oligonucleotide
  Target: LAMA2; (+) strand; PAM type: YTN; PAM sequence: TTA
tctttaatgtaacagagagt

SEQ ID NO: 385733 - DNA, 20 bp, Artificial Sequence
  Description of Artificial Sequence: Synthetic oligonucleotide
  Target: LAMA2; (+) strand; PAM type: YTN; PAM sequence: CTT
taatgtaacagagagttact

SEQ ID NO: 385734 - DNA, 20 bp, Artificial Sequence
  Description of Artificial Sequence: Synthetic oligonucleotide
  Target: LAMA2; (+) strand; PAM type: YTN; PAM sequence: TTT
aatgtaacagagagttacta

SEQ ID NO: 385735 - DNA, 20 bp, Artificial Sequence
  Description of Artificial Sequence: Synthetic oligonucleotide
  Target: LAMA2; (+) strand; PAM type: YTN; PAM sequence: TTA
atgtaacagagagttactaa

SEQ ID NO: 385736 - DNA, 20 bp, Artificial Sequence
  Description of Artificial Sequence: Synthetic oligonucleotide
  Target: LAMA2; (+) strand; PAM type: YTN; PAM sequence: TTA
ctaatgttaactactaacat

SEQ ID NO: 385737 - DNA, 20 bp, Artificial Sequence
  Description of Artificial Sequence: Synthetic oligonucleotide
  Target: LAMA2; (+) strand; PAM type: YTN; PAM sequence: CTA
atgttaactactaacattat

SEQ ID NO: 385738 - DNA, 20 bp, Artificial Sequence
  Description of Artificial Sequence: Synthetic oligonucleotide
  Target: LAMA2; (+) strand; PAM type: YTN; PAM sequence: TTA
actactaacattatacacac

SEQ ID NO: 385739 - DNA, 20 bp, Artificial Sequence
  Description of Artificial Sequence: Synthetic oligonucleotide
  Target: LAMA2; (+) strand; PAM type: YTN; PAM sequence: CTA
ctaacattatacacacatga

SEQ ID NO: 385740 - DNA, 20 bp, Artificial Sequence
  Description of Artificial Sequence: Synthetic oligonucleotide
  Target: LAMA2; (+) strand; PAM type: YTN; PAM sequence: CTA
acattatacacacatgatag

SEQ ID NO: 385741 - DNA, 20 bp, Artificial Sequence
  Description of Artificial Sequence: Synthetic oligonucleotide
  Target: LAMA2; (+) strand; PAM type: YTN; PAM sequence: TTA
tacacacatgatagttttag

SEQ ID NO: 385742 - DNA, 20 bp, Artificial Sequence
  Description of Artificial Sequence: Synthetic oligonucleotide
  Target: LAMA2; (+) strand; PAM type: YTN; PAM sequence: TTT
tagcataattgatagcagta

SEQ ID NO: 385743 - DNA, 20 bp, Artificial Sequence
  Description of Artificial Sequence: Synthetic oligonucleotide
  Target: LAMA2; (+) strand; PAM type: YTN; PAM sequence: TTT
agcataattgatagcagtat

SEQ ID NO: 385744 - DNA, 20 bp, Artificial Sequence
  Description of Artificial Sequence: Synthetic oligonucleotide
  Target: LAMA2; (+) strand; PAM type: YTN; PAM sequence: TTA
gcataattgatagcagtata

SEQ ID NO: 385745 - DNA, 20 bp, Artificial Sequence
  Description of Artificial Sequence: Synthetic oligonucleotide
  Target: LAMA2; (+) strand; PAM type: YTN; PAM sequence: TTG
atagcagtataaaagtttta

SEQ ID NO: 385746 - DNA, 20 bp, Artificial Sequence
  Description of Artificial Sequence: Synthetic oligonucleotide
  Target: LAMA2; (+) strand; PAM type: YTN; PAM sequence: TTT
tagaaagatccatagacttc

SEQ ID NO: 385747 - DNA, 20 bp, Artificial Sequence
  Description of Artificial Sequence: Synthetic oligonucleotide
  Target: LAMA2; (+) strand; PAM type: YTN; PAM sequence: TTT
agaaagatccatagacttcg

SEQ ID NO: 385748 - DNA, 20 bp, Artificial Sequence
  Description of Artificial Sequence: Synthetic oligonucleotide
  Target: LAMA2; (+) strand; PAM type: YTN; PAM sequence: TTA
gaaagatccatagacttcgc

SEQ ID NO: 385749 - DNA, 20 bp, Artificial Sequence
  Description of Artificial Sequence: Synthetic oligonucleotide
  Target: LAMA2; (+) strand; PAM type: YTN; PAM sequence: CTT
cgctcaattccaacagttca

SEQ ID NO: 385750 - DNA, 20 bp, Artificial Sequence
  Description of Artificial Sequence: Synthetic oligonucleotide
  Target: LAMA2; (+) strand; PAM type: YTN; PAM sequence: TTC
gctcaattccaacagttcag

SEQ ID NO: 385751 - DNA, 20 bp, Artificial Sequence
  Description of Artificial Sequence: Synthetic oligonucleotide
  Target: LAMA2; (+) strand; PAM type: YTN; PAM sequence: CTC
aattccaacagttcagctac

SEQ ID NO: 385752 - DNA, 20 bp, Artificial Sequence
  Description of Artificial Sequence: Synthetic oligonucleotide
  Target: LAMA2; (+) strand; PAM type: YTN; PAM sequence: TTC
caacagttcagctacattcc

SEQ ID NO: 385753 - DNA, 20 bp, Artificial Sequence
  Description of Artificial Sequence: Synthetic oligonucleotide
  Target: LAMA2; (+) strand; PAM type: YTN; PAM sequence: TTC
agctacattccattttcctc

SEQ ID NO: 385754 - DNA, 20 bp, Artificial Sequence
  Description of Artificial Sequence: Synthetic oligonucleotide
  Target: LAMA2; (+) strand; PAM type: YTN; PAM sequence: CTA
cattccattttcctcatcta

SEQ ID NO: 385755 - DNA, 20 bp, Artificial Sequence
  Description of Artificial Sequence: Synthetic oligonucleotide
  Target: LAMA2; (+) strand; PAM type: YTN; PAM sequence: TTC
cattttcctcatctataatc

SEQ ID NO: 385756 - DNA, 20 bp, Artificial Sequence
  Description of Artificial Sequence: Synthetic oligonucleotide
  Target: LAMA2; (+) strand; PAM type: YTN; PAM sequence: TTT
tcctcatctataatctcagg

SEQ ID NO: 385757 - DNA, 20 bp, Artificial Sequence
  Description of Artificial Sequence: Synthetic oligonucleotide
  Target: LAMA2; (+) strand; PAM type: YTN; PAM sequence: TTT
cctcatctataatctcagga

SEQ ID NO: 385758 - DNA, 20 bp, Artificial Sequence
  Description of Artificial Sequence: Synthetic oligonucleotide
  Target: LAMA2; (+) strand; PAM type: YTN; PAM sequence: TTC
ctcatctataatctcaggaa

SEQ ID NO: 385759 - DNA, 20 bp, Artificial Sequence
  Description of Artificial Sequence: Synthetic oligonucleotide
  Target: LAMA2; (+) strand; PAM type: YTN; PAM sequence: CTC
atctataatctcaggaatca

SEQ ID NO: 385760 - DNA, 20 bp, Artificial Sequence
  Description of Artificial Sequence: Synthetic oligonucleotide
  Target: LAMA2; (+) strand; PAM type: YTN; PAM sequence: CTA
taatctcaggaatcattgat

SEQ ID NO: 385761 - DNA, 20 bp, Artificial Sequence
  Description of Artificial Sequence: Synthetic oligonucleotide
  Target: LAMA2; (+) strand; PAM type: YTN; PAM sequence: CTC
aggaatcattgataggccac

SEQ ID NO: 385762 - DNA, 20 bp, Artificial Sequence
  Description of Artificial Sequence: Synthetic oligonucleotide
  Target: LAMA2; (+) strand; PAM type: YTN; PAM sequence: TTG
ataggccacctactttacac

SEQ ID NO: 385763 - DNA, 20 bp, Artificial Sequence
  Description of Artificial Sequence: Synthetic oligonucleotide
  Target: LAMA2; (+) strand; PAM type: YTN; PAM sequence: CTA
ctttacactaatattgtgac

SEQ ID NO: 385764 - DNA, 20 bp, Artificial Sequence
  Description of Artificial Sequence: Synthetic oligonucleotide
  Target: LAMA2; (+) strand; PAM type: YTN; PAM sequence: CTT
tacactaatattgtgacaat

SEQ ID NO: 385765 - DNA, 20 bp, Artificial Sequence
  Description of Artificial Sequence: Synthetic oligonucleotide
  Target: LAMA2; (+) strand; PAM type: YTN; PAM sequence: TTT
acactaatattgtgacaata

SEQ ID NO: 385766 - DNA, 20 bp, Artificial Sequence
  Description of Artificial Sequence: Synthetic oligonucleotide
  Target: LAMA2; (+) strand; PAM type: YTN; PAM sequence: TTA
cactaatattgtgacaataa

SEQ ID NO: 385767 - DNA, 20 bp, Artificial Sequence
  Description of Artificial Sequence: Synthetic oligonucleotide
  Target: LAMA2; (+) strand; PAM type: YTN; PAM sequence: CTA
atattgtgacaataagtgtg

SEQ ID NO: 385768 - DNA, 20 bp, Artificial Sequence
  Description of Artificial Sequence: Synthetic oligonucleotide
  Target: LAMA2; (+) strand; PAM type: YTN; PAM sequence: TTG
tgacaataagtgtgtaaagg

SEQ ID NO: 385769 - DNA, 20 bp, Artificial Sequence
  Description of Artificial Sequence: Synthetic oligonucleotide
  Target: LAMA2; (+) strand; PAM type: YTN; PAM sequence: CTG
ttggtgccctgcctaggcac

SEQ ID NO: 385770 - DNA, 20 bp, Artificial Sequence
  Description of Artificial Sequence: Synthetic oligonucleotide
  Target: LAMA2; (+) strand; PAM type: YTN; PAM sequence: TTG
gtgccctgcctaggcaccta

SEQ ID NO: 385771 - DNA, 20 bp, Artificial Sequence
  Description of Artificial Sequence: Synthetic oligonucleotide
  Target: LAMA2; (+) strand; PAM type: YTN; PAM sequence: CTG
cctaggcacctacactgaag

SEQ ID NO: 385772 - DNA, 20 bp, Artificial Sequence
  Description of Artificial Sequence: Synthetic oligonucleotide
  Target: LAMA2; (+) strand; PAM type: YTN; PAM sequence: CTA
ggcacctacactgaagcctt

SEQ ID NO: 385773 - DNA, 20 bp, Artificial Sequence
  Description of Artificial Sequence: Synthetic oligonucleotide
  Target: LAMA2; (+) strand; PAM type: YTN; PAM sequence: CTA
cactgaagccttctctccaa

SEQ ID NO: 385774 - DNA, 20 bp, Artificial Sequence
  Description of Artificial Sequence: Synthetic oligonucleotide
  Target: LAMA2; (+) strand; PAM type: YTN; PAM sequence: CTG
aagccttctctccaacagaa

SEQ ID NO: 385775 - DNA, 20 bp, Artificial Sequence
  Description of Artificial Sequence: Synthetic oligonucleotide
  Target: LAMA2; (+) strand; PAM type: YTN; PAM sequence: CTT
ctctccaacagaagaggcag

SEQ ID NO: 385776 - DNA, 20 bp, Artificial Sequence
  Description of Artificial Sequence: Synthetic oligonucleotide
  Target: LAMA2; (+) strand; PAM type: YTN; PAM sequence: TTC
tctccaacagaagaggcaga

SEQ ID NO: 385777 - DNA, 20 bp, Artificial Sequence
  Description of Artificial Sequence: Synthetic oligonucleotide
  Target: LAMA2; (+) strand; PAM type: YTN; PAM sequence: CTC
tccaacagaagaggcagaaa

SEQ ID NO: 385778 - DNA, 20 bp, Artificial Sequence
  Description of Artificial Sequence: Synthetic oligonucleotide
  Target: LAMA2; (+) strand; PAM type: YTN; PAM sequence: CTC
caacagaagaggcagaaagg

SEQ ID NO: 385779 - DNA, 20 bp, Artificial Sequence
  Description of Artificial Sequence: Synthetic oligonucleotide
  Target: LAMA2; (+) strand; PAM type: YTN; PAM sequence: CTG
aatgtttacccgcccttcct

SEQ ID NO: 385780 - DNA, 20 bp, Artificial Sequence
  Description of Artificial Sequence: Synthetic oligonucleotide
  Target: LAMA2; (+) strand; PAM type: YTN; PAM sequence: TTT
acccgcccttcctgcagtgg

SEQ ID NO: 385781 - DNA, 20 bp, Artificial Sequence
  Description of Artificial Sequence: Synthetic oligonucleotide
  Target: LAMA2; (+) strand; PAM type: YTN; PAM sequence: TTA
cccgcccttcctgcagtggc

SEQ ID NO: 385782 - DNA, 20 bp, Artificial Sequence
  Description of Artificial Sequence: Synthetic oligonucleotide
  Target: LAMA2; (+) strand; PAM type: YTN; PAM sequence: CTT
cctgcagtggcccatgacta

SEQ ID NO: 385783 - DNA, 20 bp, Artificial Sequence
  Description of Artificial Sequence: Synthetic oligonucleotide
  Target: LAMA2; (+) strand; PAM type: YTN; PAM sequence: TTC
ctgcagtggcccatgactaa

SEQ ID NO: 385784 - DNA, 20 bp, Artificial Sequence
  Description of Artificial Sequence: Synthetic oligonucleotide
  Target: LAMA2; (+) strand; PAM type: YTN; PAM sequence: CTG
cagtggcccatgactaacca

SEQ ID NO: 385785 - DNA, 20 bp, Artificial Sequence
  Description of Artificial Sequence: Synthetic oligonucleotide
  Target: LAMA2; (+) strand; PAM type: YTN; PAM sequence: CTA
accagcgtgagagtacaaaa

SEQ ID NO: 385786 - DNA, 20 bp, Artificial Sequence
  Description of Artificial Sequence: Synthetic oligonucleotide
  Target: LAMA2; (+) strand; PAM type: YTN; PAM sequence: CTC
tttggcccctaagtggaaca

SEQ ID NO: 385787 - DNA, 20 bp, Artificial Sequence
  Description of Artificial Sequence: Synthetic oligonucleotide
  Target: LAMA2; (+) strand; PAM type: YTN; PAM sequence: CTT
tggcccctaagtggaacaag

SEQ ID NO: 385788 - DNA, 20 bp, Artificial Sequence
  Description of Artificial Sequence: Synthetic oligonucleotide
  Target: LAMA2; (+) strand; PAM type: YTN; PAM sequence: TTT
ggcccctaagtggaacaagt

SEQ ID NO: 385789 - DNA, 20 bp, Artificial Sequence
  Description of Artificial Sequence: Synthetic oligonucleotide
  Target: LAMA2; (+) strand; PAM type: YTN; PAM sequence: TTG
gcccctaagtggaacaagtt

SEQ ID NO: 385790 - DNA, 20 bp, Artificial Sequence
  Description of Artificial Sequence: Synthetic oligonucleotide
  Target: LAMA2; (+) strand; PAM type: YTN; PAM sequence: CTA
agtggaacaagttttgagat

SEQ ID NO: 385791 - DNA, 20 bp, Artificial Sequence
  Description of Artificial Sequence: Synthetic oligonucleotide
  Target: LAMA2; (+) strand; PAM type: YTN; PAM sequence: TTT
tgagatcttattttatgctc

SEQ ID NO: 385792 - DNA, 20 bp, Artificial Sequence
  Description of Artificial Sequence: Synthetic oligonucleotide
  Target: LAMA2; (+) strand; PAM type: YTN; PAM sequence: TTT
gagatcttattttatgctcc

SEQ ID NO: 385793 - DNA, 20 bp, Artificial Sequence
  Description of Artificial Sequence: Synthetic oligonucleotide
  Target: LAMA2; (+) strand; PAM type: YTN; PAM sequence: TTG
agatcttattttatgctcca

SEQ ID NO: 385794 - DNA, 20 bp, Artificial Sequence
  Description of Artificial Sequence: Synthetic oligonucleotide
  Target: LAMA2; (+) strand; PAM type: YTN; PAM sequence: CTT
attttatgctccagagcact

SEQ ID NO: 385795 - DNA, 20 bp, Artificial Sequence
  Description of Artificial Sequence: Synthetic oligonucleotide
  Target: LAMA2; (+) strand; PAM type: YTN; PAM sequence: TTA
ttttatgctccagagcactc

SEQ ID NO: 385796 - DNA, 20 bp, Artificial Sequence
  Description of Artificial Sequence: Synthetic oligonucleotide
  Target: LAMA2; (+) strand; PAM type: YTN; PAM sequence: TTT
tatgctccagagcactccat

SEQ ID NO: 385797 - DNA, 20 bp, Artificial Sequence
  Description of Artificial Sequence: Synthetic oligonucleotide
  Target: LAMA2; (+) strand; PAM type: YTN; PAM sequence: TTT
atgctccagagcactccatg

SEQ ID NO: 385798 - DNA, 20 bp, Artificial Sequence
  Description of Artificial Sequence: Synthetic oligonucleotide
  Target: LAMA2; (+) strand; PAM type: YTN; PAM sequence: TTA
tgctccagagcactccatgg

SEQ ID NO: 385799 - DNA, 20 bp, Artificial Sequence
  Description of Artificial Sequence: Synthetic oligonucleotide
  Target: LAMA2; (+) strand; PAM type: YTN; PAM sequence: CTC
cagagcactccatggaatca

SEQ ID NO: 385800 - DNA, 20 bp, Artificial Sequence
  Description of Artificial Sequence: Synthetic oligonucleotide
  Target: LAMA2; (+) strand; PAM type: YTN; PAM sequence: CTC
catggaatcaggctaagact

SEQ ID NO: 385801 - DNA, 20 bp, Artificial Sequence
  Description of Artificial Sequence: Synthetic oligonucleotide
  Target: LAMA2; (+) strand; PAM type: YTN; PAM sequence: CTA
agactgggacatcacctgaa

SEQ ID NO: 385802 - DNA, 20 bp, Artificial Sequence
  Description of Artificial Sequence: Synthetic oligonucleotide
  Target: LAMA2; (+) strand; PAM type: YTN; PAM sequence: CTG
ggacatcacctgaaatcata

SEQ ID NO: 385803 - DNA, 20 bp, Artificial Sequence
  Description of Artificial Sequence: Synthetic oligonucleotide
  Target: LAMA2; (+) strand; PAM type: YTN; PAM sequence: CTG
aaatcatacccttgattaga

SEQ ID NO: 385804 - DNA, 20 bp, Artificial Sequence
  Description of Artificial Sequence: Synthetic oligonucleotide
  Target: LAMA2; (+) strand; PAM type: YTN; PAM sequence: CTT
gattagagcttttcttttcc

SEQ ID NO: 385805 - DNA, 20 bp, Artificial Sequence
  Description of Artificial Sequence: Synthetic oligonucleotide
  Target: LAMA2; (+) strand; PAM type: YTN; PAM sequence: TTG
attagagcttttcttttcca

SEQ ID NO: 385806 - DNA, 20 bp, Artificial Sequence
  Description of Artificial Sequence: Synthetic oligonucleotide
  Target: LAMA2; (+) strand; PAM type: YTN; PAM sequence: TTA
gagcttttcttttccatgtc

SEQ ID NO: 385807 - DNA, 20 bp, Artificial Sequence
  Description of Artificial Sequence: Synthetic oligonucleotide
  Target: LAMA2; (+) strand; PAM type: YTN; PAM sequence: CTT
ttcttttccatgtcctgctt

SEQ ID NO: 385808 - DNA, 20 bp, Artificial Sequence
  Description of Artificial Sequence: Synthetic oligonucleotide
  Target: LAMA2; (+) strand; PAM type: YTN; PAM sequence: TTT
tcttttccatgtcctgcttc

SEQ ID NO: 385809 - DNA, 20 bp, Artificial Sequence
  Description of Artificial Sequence: Synthetic oligonucleotide
  Target: LAMA2; (+) strand; PAM type: YTN; PAM sequence: TTT
cttttccatgtcctgcttca

SEQ ID NO: 385810 - DNA, 20 bp, Artificial Sequence
  Description of Artificial Sequence: Synthetic oligonucleotide
  Target: LAMA2; (+) strand; PAM type: YTN; PAM sequence: TTC
ttttccatgtcctgcttcac

SEQ ID NO: 385811 - DNA, 20 bp, Artificial Sequence
  Description of Artificial Sequence: Synthetic oligonucleotide
  Target: LAMA2; (+) strand; PAM type: YTN; PAM sequence: CTT
ttccatgtcctgcttcaccc

SEQ ID NO: 385812 - DNA, 20 bp, Artificial Sequence
  Description of Artificial Sequence: Synthetic oligonucleotide
  Target: LAMA2; (+) strand; PAM type: YTN; PAM sequence: TTT
tccatgtcctgcttcaccca

SEQ ID NO: 385813 - DNA, 20 bp, Artificial Sequence
  Description of Artificial Sequence: Synthetic oligonucleotide
  Target: LAMA2; (+) strand; PAM type: YTN; PAM sequence: TTT
ccatgtcctgcttcacccac

SEQ ID NO: 385814 - DNA, 20 bp, Artificial Sequence
  Description of Artificial Sequence: Synthetic oligonucleotide
  Target: LAMA2; (+) strand; PAM type: YTN; PAM sequence: TTC
catgtcctgcttcacccact

SEQ ID NO: 385815 - DNA, 20 bp, Artificial Sequence
  Description of Artificial Sequence: Synthetic oligonucleotide
  Target: LAMA2; (+) strand; PAM type: YTN; PAM sequence: CTG
cttcacccactcctttgcta

SEQ ID NO: 385816 - DNA, 20 bp, Artificial Sequence
  Description of Artificial Sequence: Synthetic oligonucleotide
  Target: LAMA2; (+) strand; PAM type: YTN; PAM sequence: CTT
cacccactcctttgctagat

SEQ ID NO: 385817 - DNA, 20 bp, Artificial Sequence
  Description of Artificial Sequence: Synthetic oligonucleotide
  Target: LAMA2; (+) strand; PAM type: YTN; PAM sequence: TTC
acccactcctttgctagatt

SEQ ID NO: 385818 - DNA, 20 bp, Artificial Sequence
  Description of Artificial Sequence: Synthetic oligonucleotide
  Target: LAMA2; (+) strand; PAM type: YTN; PAM sequence: CTC
ctttgctagattctcctagg

SEQ ID NO: 385819 - DNA, 20 bp, Artificial Sequence
  Description of Artificial Sequence: Synthetic oligonucleotide
  Target: LAMA2; (+) strand; PAM type: YTN; PAM sequence: CTT
tgctagattctcctaggaac

SEQ ID NO: 385820 - DNA, 20 bp, Artificial Sequence
  Description of Artificial Sequence: Synthetic oligonucleotide
  Target: LAMA2; (+) strand; PAM type: YTN; PAM sequence: TTT
gctagattctcctaggaaca

SEQ ID NO: 385821 - DNA, 20 bp, Artificial Sequence
  Description of Artificial Sequence: Synthetic oligonucleotide
  Target: LAMA2; (+) strand; PAM type: YTN; PAM sequence: TTG
ctagattctcctaggaacac

SEQ ID NO: 385822 - DNA, 20 bp, Artificial Sequence
  Description of Artificial Sequence: Synthetic oligonucleotide
  Target: LAMA2; (+) strand; PAM type: YTN; PAM sequence: CTA
gattctcctaggaacactta

SEQ ID NO: 385823 - DNA, 20 bp, Artificial Sequence
  Description of Artificial Sequence: Synthetic oligonucleotide
  Target: LAMA2; (+) strand; PAM type: YTN; PAM sequence: TTC
tcctaggaacacttaaatgg

SEQ ID NO: 385824 - DNA, 20 bp, Artificial Sequence
  Description of Artificial Sequence: Synthetic oligonucleotide
  Target: LAMA2; (+) strand; PAM type: YTN; PAM sequence: CTC
ctaggaacacttaaatggta

SEQ ID NO: 385825 - DNA, 20 bp, Artificial Sequence
  Description of Artificial Sequence: Synthetic oligonucleotide
  Target: LAMA2; (+) strand; PAM type: YTN; PAM sequence: CTA
ggaacacttaaatggtaagc

SEQ ID NO: 385826 - DNA, 20 bp, Artificial Sequence
  Description of Artificial Sequence: Synthetic oligonucleotide
  Target: LAMA2; (+) strand; PAM type: YTN; PAM sequence: CTT
aaatggtaagcttctttgta

SEQ ID NO: 385827 - DNA, 20 bp, Artificial Sequence
  Description of Artificial Sequence: Synthetic oligonucleotide
  Target: LAMA2; (+) strand; PAM type: YTN; PAM sequence: TTA
aatggtaagcttctttgtaa

SEQ ID NO: 385828 - DNA, 20 bp, Artificial Sequence
  Description of Artificial Sequence: Synthetic oligonucleotide
  Target: LAMA2; (+) strand; PAM type: YTN; PAM sequence: CTT
ctttgtaaatataaactaat

SEQ ID NO: 385829 - DNA, 20 bp, Artificial Sequence
  Description of Artificial Sequence: Synthetic oligonucleotide
  Target: LAMA2; (+) strand; PAM type: YTN; PAM sequence: TTC
tttgtaaatataaactaata

SEQ ID NO: 385830 - DNA, 20 bp, Artificial Sequence
  Description of Artificial Sequence: Synthetic oligonucleotide
  Target: LAMA2; (+) strand; PAM type: YTN; PAM sequence: CTT
tgtaaatataaactaatact

SEQ ID NO: 385831 - DNA, 20 bp, Artificial Sequence
  Description of Artificial Sequence: Synthetic oligonucleotide
  Target: LAMA2; (+) strand; PAM type: YTN; PAM sequence: TTT
gtaaatataaactaatacta

SEQ ID NO: 385832 - DNA, 20 bp, Artificial Sequence
  Description of Artificial Sequence: Synthetic oligonucleotide
  Target: LAMA2; (+) strand; PAM type: YTN; PAM sequence: TTG
taaatataaactaatactaa

SEQ ID NO: 385833 - DNA, 20 bp, Artificial Sequence
  Description of Artificial Sequence: Synthetic oligonucleotide
  Target: LAMA2; (+) strand; PAM type: YTN; PAM sequence: CTA
atactaattatcagcatcca

SEQ ID NO: 385834 - DNA, 20 bp, Artificial Sequence
  Description of Artificial Sequence: Synthetic oligonucleotide
  Target: LAMA2; (+) strand; PAM type: YTN; PAM sequence: CTA
attatcagcatccacttaag

SEQ ID NO: 385835 - DNA, 20 bp, Artificial Sequence
  Description of Artificial Sequence: Synthetic oligonucleotide
  Target: LAMA2; (+) strand; PAM type: YTN; PAM sequence: TTA
tcagcatccacttaagagtc

SEQ ID NO: 385836 - DNA, 20 bp, Artificial Sequence
  Description of Artificial Sequence: Synthetic oligonucleotide
  Target: LAMA2; (+) strand; PAM type: YTN; PAM sequence: CTT
aagagtcttgttttatataa

SEQ ID NO: 385837 - DNA, 20 bp, Artificial Sequence
  Description of Artificial Sequence: Synthetic oligonucleotide
  Target: LAMA2; (+) strand; PAM type: YTN; PAM sequence: TTA
agagtcttgttttatataac

SEQ ID NO: 385838 - DNA, 20 bp, Artificial Sequence
  Description of Artificial Sequence: Synthetic oligonucleotide
  Target: LAMA2; (+) strand; PAM type: YTN; PAM sequence: CTT
gttttatataaccagcaaca

SEQ ID NO: 385839 - DNA, 20 bp, Artificial Sequence
  Description of Artificial Sequence: Synthetic oligonucleotide
  Target: LAMA2; (+) strand; PAM type: YTN; PAM sequence: TTG
ttttatataaccagcaacag

SEQ ID NO: 385840 - DNA, 20 bp, Artificial Sequence
  Description of Artificial Sequence: Synthetic oligonucleotide
  Target: LAMA2; (+) strand; PAM type: YTN; PAM sequence: TTT
tatataaccagcaacagctg

SEQ ID NO: 385841 - DNA, 20 bp, Artificial Sequence
  Description of Artificial Sequence: Synthetic oligonucleotide
  Target: LAMA2; (+) strand; PAM type: YTN; PAM sequence: TTT
atataaccagcaacagctgt

SEQ ID NO: 385842 - DNA, 20 bp, Artificial Sequence
  Description of Artificial Sequence: Synthetic oligonucleotide
  Target: LAMA2; (+) strand; PAM type: YTN; PAM sequence: TTA
tataaccagcaacagctgta

SEQ ID NO: 385843 - DNA, 20 bp, Artificial Sequence
  Description of Artificial Sequence: Synthetic oligonucleotide
  Target: LAMA2; (+) strand; PAM type: YTN; PAM sequence: CTG
tattaatcatggcaataagt

SEQ ID NO: 385844 - DNA, 20 bp, Artificial Sequence
  Description of Artificial Sequence: Synthetic oligonucleotide
  Target: LAMA2; (+) strand; PAM type: YTN; PAM sequence: TTA
atcatggcaataagtaacta

SEQ ID NO: 385845 - DNA, 20 bp, Artificial Sequence
  Description of Artificial Sequence: Synthetic oligonucleotide
  Target: LAMA2; (+) strand; PAM type: YTN; PAM sequence: CTA
aataattagggttaagcttt

SEQ ID NO: 385846 - DNA, 20 bp, Artificial Sequence
  Description of Artificial Sequence: Synthetic oligonucleotide
  Target: LAMA2; (+) strand; PAM type: YTN; PAM sequence: TTA
gggttaagctttataaatcc

SEQ ID NO: 385847 - DNA, 20 bp, Artificial Sequence
  Description of Artificial Sequence: Synthetic oligonucleotide
  Target: LAMA2; (+) strand; PAM type: YTN; PAM sequence: TTA
agctttataaatcccaatgc

SEQ ID NO: 385848 - DNA, 20 bp, Artificial Sequence
  Description of Artificial Sequence: Synthetic oligonucleotide
  Target: LAMA2; (+) strand; PAM type: YTN; PAM sequence: CTT
tataaatcccaatgcaattt

SEQ ID NO: 385849 - DNA, 20 bp, Artificial Sequence
  Description of Artificial Sequence: Synthetic oligonucleotide
  Target: LAMA2; (+) strand; PAM type: YTN; PAM sequence: TTT
ataaatcccaatgcaatttt

SEQ ID NO: 385850 - DNA, 20 bp, Artificial Sequence
  Description of Artificial Sequence: Synthetic oligonucleotide
  Target: LAMA2; (+) strand; PAM type: YTN; PAM sequence: TTA
taaatcccaatgcaattttt

SEQ ID NO: 385851 - DNA, 20 bp, Artificial Sequence
  Description of Artificial Sequence: Synthetic oligonucleotide
  Target: LAMA2; (+) strand; PAM type: YTN; PAM sequence: TTT
ttatacatttgtaaaatata

SEQ ID NO: 385852 - DNA, 20 bp, Artificial Sequence
  Description of Artificial Sequence: Synthetic oligonucleotide
  Target: LAMA2; (+) strand; PAM type: YTN; PAM sequence: TTT
tatacatttgtaaaatatat

SEQ ID NO: 385853 - DNA, 20 bp, Artificial Sequence
  Description of Artificial Sequence: Synthetic oligonucleotide
  Target: LAMA2; (+) strand; PAM type: YTN; PAM sequence: TTT
atacatttgtaaaatatatt

SEQ ID NO: 385854 - DNA, 20 bp, Artificial Sequence
  Description of Artificial Sequence: Synthetic oligonucleotide
  Target: LAMA2; (+) strand; PAM type: YTN; PAM sequence: TTA
tacatttgtaaaatatattt

SEQ ID NO: 385855 - DNA, 20 bp, Artificial Sequence
  Description of Artificial Sequence: Synthetic oligonucleotide
  Target: LAMA2; (+) strand; PAM type: YTN; PAM sequence: TTT
gtaaaatatatttctaaata

SEQ ID NO: 385856 - DNA, 20 bp, Artificial Sequence
  Description of Artificial Sequence: Synthetic oligonucleotide
  Target: LAMA2; (+) strand; PAM type: YTN; PAM sequence: TTG
taaaatatatttctaaataa

SEQ ID NO: 385857 - DNA, 20 bp, Artificial Sequence
  Description of Artificial Sequence: Synthetic oligonucleotide
  Target: LAMA2; (+) strand; PAM type: YTN; PAM sequence: TTT
ctaaataaatccgtatgtgg

SEQ ID NO: 385858 - DNA, 20 bp, Artificial Sequence
  Description of Artificial Sequence: Synthetic oligonucleotide
  Target: LAMA2; (+) strand; PAM type: YTN; PAM sequence: TTC
taaataaatccgtatgtggt

SEQ ID NO: 385859 - DNA, 20 bp, Artificial Sequence
  Description of Artificial Sequence: Synthetic oligonucleotide
  Target: LAMA2; (+) strand; PAM type: YTN; PAM sequence: CTA
aataaatccgtatgtggtaa

SEQ ID NO: 385860 - DNA, 20 bp, Artificial Sequence
  Description of Artificial Sequence: Synthetic oligonucleotide
  Target: LAMA2; (+) strand; PAM type: YTN; PAM sequence: CTC
taaacacagtatccaatatt

SEQ ID NO: 385861 - DNA, 20 bp, Artificial Sequence
  Description of Artificial Sequence: Synthetic oligonucleotide
  Target: LAMA2; (+) strand; PAM type: YTN; PAM sequence: CTA
aacacagtatccaatatttg

SEQ ID NO: 385862 - DNA, 20 bp, Artificial Sequence
  Description of Artificial Sequence: Synthetic oligonucleotide
  Target: LAMA2; (+) strand; PAM type: YTN; PAM sequence: TTT
gcatatatataaaacagtgg

SEQ ID NO: 385863 - DNA, 20 bp, Artificial Sequence
  Description of Artificial Sequence: Synthetic oligonucleotide
  Target: LAMA2; (+) strand; PAM type: YTN; PAM sequence: TTG
catatatataaaacagtgga

SEQ ID NO: 385864 - DNA, 20 bp, Artificial Sequence
  Description of Artificial Sequence: Synthetic oligonucleotide
  Target: LAMA2; (+) strand; PAM type: YTN; PAM sequence: TTC
acaatttccataccaacaga

SEQ ID NO: 385865 - DNA, 20 bp, Artificial Sequence
  Description of Artificial Sequence: Synthetic oligonucleotide
  Target: LAMA2; (+) strand; PAM type: YTN; PAM sequence: TTT
ccataccaacagaaattagc

SEQ ID NO: 385866 - DNA, 20 bp, Artificial Sequence
  Description of Artificial Sequence: Synthetic oligonucleotide
  Target: LAMA2; (+) strand; PAM type: YTN; PAM sequence: TTC
cataccaacagaaattagca

SEQ ID NO: 385867 - DNA, 20 bp, Artificial Sequence
  Description of Artificial Sequence: Synthetic oligonucleotide
  Target: LAMA2; (+) strand; PAM type: YTN; PAM sequence: TTA
gcagcaattaaataactcat

SEQ ID NO: 385868 - DNA, 20 bp, Artificial Sequence
  Description of Artificial Sequence: Synthetic oligonucleotide
  Target: LAMA2; (+) strand; PAM type: YTN; PAM sequence: TTA
aataactcatagcaacacca

SEQ ID NO: 385869 - DNA, 20 bp, Artificial Sequence
  Description of Artificial Sequence: Synthetic oligonucleotide
  Target: LAMA2; (+) strand; PAM type: YTN; PAM sequence: CTC
atagcaacaccaaatctaaa

SEQ ID NO: 385870 - DNA, 20 bp, Artificial Sequence
  Description of Artificial Sequence: Synthetic oligonucleotide
  Target: LAMA2; (+) strand; PAM type: YTN; PAM sequence: CTA
aaaatatttccatttgttct

SEQ ID NO: 385871 - DNA, 20 bp, Artificial Sequence
  Description of Artificial Sequence: Synthetic oligonucleotide
  Target: LAMA2; (+) strand; PAM type: YTN; PAM sequence: TTT
ccatttgttctgaagatata

SEQ ID NO: 385872 - DNA, 20 bp, Artificial Sequence
  Description of Artificial Sequence: Synthetic oligonucleotide
  Target: LAMA2; (+) strand; PAM type: YTN; PAM sequence: TTC
catttgttctgaagatatat

SEQ ID NO: 385873 - DNA, 20 bp, Artificial Sequence
  Description of Artificial Sequence: Synthetic oligonucleotide
  Target: LAMA2; (+) strand; PAM type: YTN; PAM sequence: TTT
gttctgaagatatatacatc

SEQ ID NO: 385874 - DNA, 20 bp, Artificial Sequence
  Description of Artificial Sequence: Synthetic oligonucleotide
  Target: LAMA2; (+) strand; PAM type: YTN; PAM sequence: TTG
ttctgaagatatatacatct

SEQ ID NO: 385875 - DNA, 20 bp, Artificial Sequence
  Description of Artificial Sequence: Synthetic oligonucleotide
  Target: LAMA2; (+) strand; PAM type: YTN; PAM sequence: TTC
tgaagatatatacatctttt

SEQ ID NO: 385876 - DNA, 20 bp, Artificial Sequence
  Description of Artificial Sequence: Synthetic oligonucleotide
  Target: LAMA2; (+) strand; PAM type: YTN; PAM sequence: CTG
aagatatatacatcttttgg

SEQ ID NO: 385877 - DNA, 20 bp, Artificial Sequence
  Description of Artificial Sequence: Synthetic oligonucleotide
  Target: LAMA2; (+) strand; PAM type: YTN; PAM sequence: CTT
ttggatatagatataggtga

SEQ ID NO: 385878 - DNA, 20 bp, Artificial Sequence
  Description of Artificial Sequence: Synthetic oligonucleotide
  Target: LAMA2; (+) strand; PAM type: YTN; PAM sequence: TTT
tggatatagatataggtgat

SEQ ID NO: 385879 - DNA, 20 bp, Artificial Sequence
  Description of Artificial Sequence: Synthetic oligonucleotide
  Target: LAMA2; (+) strand; PAM type: YTN; PAM sequence: TTT
ggatatagatataggtgata

SEQ ID NO: 385880 - DNA, 20 bp, Artificial Sequence
  Description of Artificial Sequence: Synthetic oligonucleotide
  Target: LAMA2; (+) strand; PAM type: YTN; PAM sequence: TTG
gatatagatataggtgatac

SEQ ID NO: 385881 - DNA, 20 bp, Artificial Sequence
  Description of Artificial Sequence: Synthetic oligonucleotide
  Target: LAMA2; (+) strand; PAM type: YTN; PAM sequence: CTT
gttaatacccaccagtgagc

SEQ ID NO: 385882 - DNA, 20 bp, Artificial Sequence
  Description of Artificial Sequence: Synthetic oligonucleotide
  Target: LAMA2; (+) strand; PAM type: YTN; PAM sequence: TTG
ttaatacccaccagtgagct

SEQ ID NO: 385883 - DNA, 20 bp, Artificial Sequence
  Description of Artificial Sequence: Synthetic oligonucleotide
  Target: LAMA2; (+) strand; PAM type: YTN; PAM sequence: TTA
atacccaccagtgagctttg

SEQ ID NO: 385884 - DNA, 20 bp, Artificial Sequence
  Description of Artificial Sequence: Synthetic oligonucleotide
  Target: LAMA2; (+) strand; PAM type: YTN; PAM sequence: CTT
tggtattcatggttagacta

SEQ ID NO: 385885 - DNA, 20 bp, Artificial Sequence
  Description of Artificial Sequence: Synthetic oligonucleotide
  Target: LAMA2; (+) strand; PAM type: YTN; PAM sequence: TTT
ggtattcatggttagactaa

SEQ ID NO: 385886 - DNA, 20 bp, Artificial Sequence
  Description of Artificial Sequence: Synthetic oligonucleotide
  Target: LAMA2; (+) strand; PAM type: YTN; PAM sequence: TTG
gtattcatggttagactaat

SEQ ID NO: 385887 - DNA, 20 bp, Artificial Sequence
  Description of Artificial Sequence: Synthetic oligonucleotide
  Target: LAMA2; (+) strand; PAM type: YTN; PAM sequence: TTC
atggttagactaatatttat

SEQ ID NO: 385888 - DNA, 20 bp, Artificial Sequence
  Description of Artificial Sequence: Synthetic oligonucleotide
  Target: LAMA2; (+) strand; PAM type: YTN; PAM sequence: TTA
gactaatatttatttcctgt

SEQ ID NO: 385889 - DNA, 20 bp, Artificial Sequence
  Description of Artificial Sequence: Synthetic oligonucleotide
  Target: LAMA2; (+) strand; PAM type: YTN; PAM sequence: CTA
atatttatttcctgtacctt

SEQ ID NO: 385890 - DNA, 20 bp, Artificial Sequence
  Description of Artificial Sequence: Synthetic oligonucleotide
  Target: LAMA2; (+) strand; PAM type: YTN; PAM sequence: TTT
atttcctgtacctttaaaca

SEQ ID NO: 385891 - DNA, 20 bp, Artificial Sequence
  Description of Artificial Sequence: Synthetic oligonucleotide
  Target: LAMA2; (+) strand; PAM type: YTN; PAM sequence: TTA
tttcctgtacctttaaacac

SEQ ID NO: 385892 - DNA, 20 bp, Artificial Sequence
  Description of Artificial Sequence: Synthetic oligonucleotide
  Target: LAMA2; (+) strand; PAM type: YTN; PAM sequence: TTT
cctgtacctttaaacaccag

SEQ ID NO: 385893 - DNA, 20 bp, Artificial Sequence
  Description of Artificial Sequence: Synthetic oligonucleotide
  Target: LAMA2; (+) strand; PAM type: YTN; PAM sequence: TTC
ctgtacctttaaacaccagt

SEQ ID NO: 385894 - DNA, 20 bp, Artificial Sequence
  Description of Artificial Sequence: Synthetic oligonucleotide
  Target: LAMA2; (+) strand; PAM type: YTN; PAM sequence: CTG
tacctttaaacaccagtagg

SEQ ID NO: 385895 - DNA, 20 bp, Artificial Sequence
  Description of Artificial Sequence: Synthetic oligonucleotide
  Target: LAMA2; (+) strand; PAM type: YTN; PAM sequence: CTT
taaacaccagtaggatggtg

SEQ ID NO: 385896 - DNA, 20 bp, Artificial Sequence
  Description of Artificial Sequence: Synthetic oligonucleotide
  Target: LAMA2; (+) strand; PAM type: YTN; PAM sequence: TTT
aaacaccagtaggatggtga

SEQ ID NO: 385897 - DNA, 20 bp, Artificial Sequence
  Description of Artificial Sequence: Synthetic oligonucleotide
  Target: LAMA2; (+) strand; PAM type: YTN; PAM sequence: TTA
aacaccagtaggatggtgac

SEQ ID NO: 385898 - DNA, 20 bp, Artificial Sequence
  Description of Artificial Sequence: Synthetic oligonucleotide
  Target: LAMA2; (+) strand; PAM type: YTN; PAM sequence: CTA
aaagcatcgctggacaccaa

SEQ ID NO: 385899 - DNA, 20 bp, Artificial Sequence
  Description of Artificial Sequence: Synthetic oligonucleotide
  Target: LAMA2; (+) strand; PAM type: YTN; PAM sequence: CTG
gacaccaaaaagattatcta

SEQ ID NO: 385900 - DNA, 20 bp, Artificial Sequence
  Description of Artificial Sequence: Synthetic oligonucleotide
  Target: LAMA2; (+) strand; PAM type: YTN; PAM sequence: TTA
tctacagtaattcatgaaaa

SEQ ID NO: 385901 - DNA, 20 bp, Artificial Sequence
  Description of Artificial Sequence: Synthetic oligonucleotide
  Target: LAMA2; (+) strand; PAM type: YTN; PAM sequence: CTA
cagtaattcatgaaaaaaaa

SEQ ID NO: 385902 - DNA, 20 bp, Artificial Sequence
  Description of Artificial Sequence: Synthetic oligonucleotide
  Target: LAMA2; (+) strand; PAM type: YTN; PAM sequence: TTC
atgaaaaaaaaattatgata

SEQ ID NO: 385903 - DNA, 20 bp, Artificial Sequence
  Description of Artificial Sequence: Synthetic oligonucleotide
  Target: LAMA2; (+) strand; PAM type: YTN; PAM sequence: TTA
tgatatagctacatttatac

SEQ ID NO: 385904 - DNA, 20 bp, Artificial Sequence
  Description of Artificial Sequence: Synthetic oligonucleotide
  Target: LAMA2; (+) strand; PAM type: YTN; PAM sequence: CTA
catttatacactgtagttac

SEQ ID NO: 385905 - DNA, 20 bp, Artificial Sequence
  Description of Artificial Sequence: Synthetic oligonucleotide
  Target: LAMA2; (+) strand; PAM type: YTN; PAM sequence: TTT
atacactgtagttaccattt

SEQ ID NO: 385906 - DNA, 20 bp, Artificial Sequence
  Description of Artificial Sequence: Synthetic oligonucleotide
  Target: LAMA2; (+) strand; PAM type: YTN; PAM sequence: TTA
tacactgtagttaccatttt

SEQ ID NO: 385907 - DNA, 20 bp, Artificial Sequence
  Description of Artificial Sequence: Synthetic oligonucleotide
  Target: LAMA2; (+) strand; PAM type: YTN; PAM sequence: CTG
tagttaccattttctacaaa

SEQ ID NO: 385908 - DNA, 20 bp, Artificial Sequence
  Description of Artificial Sequence: Synthetic oligonucleotide
  Target: LAMA2; (+) strand; PAM type: YTN; PAM sequence: TTA
ccattttctacaaaagcatg

SEQ ID NO: 385909 - DNA, 20 bp, Artificial Sequence
  Description of Artificial Sequence: Synthetic oligonucleotide
  Target: LAMA2; (+) strand; PAM type: YTN; PAM sequence: TTT
tctacaaaagcatgtgtata

SEQ ID NO: 385910 - DNA, 20 bp, Artificial Sequence
  Description of Artificial Sequence: Synthetic oligonucleotide
  Target: LAMA2; (+) strand; PAM type: YTN; PAM sequence: TTT
ctacaaaagcatgtgtatag

SEQ ID NO: 385911 - DNA, 20 bp, Artificial Sequence
  Description of Artificial Sequence: Synthetic oligonucleotide
  Target: LAMA2; (+) strand; PAM type: YTN; PAM sequence: TTC
tacaaaagcatgtgtataga

SEQ ID NO: 385912 - DNA, 20 bp, Artificial Sequence
  Description of Artificial Sequence: Synthetic oligonucleotide
  Target: LAMA2; (+) strand; PAM type: YTN; PAM sequence: CTA
caaaagcatgtgtatagaat

SEQ ID NO: 385913 - DNA, 20 bp, Artificial Sequence
  Description of Artificial Sequence: Synthetic oligonucleotide
  Target: LAMA2; (+) strand; PAM type: YTN; PAM sequence: CTA
gaagggtacactaaaataac

SEQ ID NO: 385914 - DNA, 20 bp, Artificial Sequence
  Description of Artificial Sequence: Synthetic oligonucleotide
  Target: LAMA2; (+) strand; PAM type: YTN; PAM sequence: CTA
aaataacaattattgtgtta

SEQ ID NO: 385915 - DNA, 20 bp, Artificial Sequence
  Description of Artificial Sequence: Synthetic oligonucleotide
  Target: LAMA2; (+) strand; PAM type: YTN; PAM sequence: TTA
ttgtgttaaagcagaatgat

SEQ ID NO: 385916 - DNA, 20 bp, Artificial Sequence
  Description of Artificial Sequence: Synthetic oligonucleotide
  Target: LAMA2; (+) strand; PAM type: YTN; PAM sequence: TTG
tgttaaagcagaatgattac

SEQ ID NO: 385917 - DNA, 20 bp, Artificial Sequence
  Description of Artificial Sequence: Synthetic oligonucleotide
  Target: LAMA2; (+) strand; PAM type: YTN; PAM sequence: TTA
aagcagaatgattacagaaa

SEQ ID NO: 385918 - DNA, 20 bp, Artificial Sequence
  Description of Artificial Sequence: Synthetic oligonucleotide
  Target: LAMA2; (+) strand; PAM type: YTN; PAM sequence: TTA
cagaaaatttatttgttaat

SEQ ID NO: 385919 - DNA, 20 bp, Artificial Sequence
  Description of Artificial Sequence: Synthetic oligonucleotide
  Target: LAMA2; (+) strand; PAM type: YTN; PAM sequence: TTT
atttgttaatatccagtagt

SEQ ID NO: 385920 - DNA, 20 bp, Artificial Sequence
  Description of Artificial Sequence: Synthetic oligonucleotide
  Target: LAMA2; (+) strand; PAM type: YTN; PAM sequence: TTA
tttgttaatatccagtagta

SEQ ID NO: 385921 - DNA, 20 bp, Artificial Sequence
  Description of Artificial Sequence: Synthetic oligonucleotide
  Target: LAMA2; (+) strand; PAM type: YTN; PAM sequence: TTT
gttaatatccagtagtattt

SEQ ID NO: 385922 - DNA, 20 bp, Artificial Sequence
  Description of Artificial Sequence: Synthetic oligonucleotide
  Target: LAMA2; (+) strand; PAM type: YTN; PAM sequence: TTG
ttaatatccagtagtattta

SEQ ID NO: 385923 - DNA, 20 bp, Artificial Sequence
  Description of Artificial Sequence: Synthetic oligonucleotide
  Target: LAMA2; (+) strand; PAM type: YTN; PAM sequence: TTA
atatccagtagtatttaatc

SEQ ID NO: 385924 - DNA, 20 bp, Artificial Sequence
  Description of Artificial Sequence: Synthetic oligonucleotide
  Target: LAMA2; (+) strand; PAM type: YTN; PAM sequence: TTT
aatcgataaaagctgtcagt

SEQ ID NO: 385925 - DNA, 20 bp, Artificial Sequence
  Description of Artificial Sequence: Synthetic oligonucleotide
  Target: LAMA2; (+) strand; PAM type: YTN; PAM sequence: TTA
atcgataaaagctgtcagtt

SEQ ID NO: 385926 - DNA, 20 bp, Artificial Sequence
  Description of Artificial Sequence: Synthetic oligonucleotide
  Target: LAMA2; (+) strand; PAM type: YTN; PAM sequence: CTG
tcagtttgtgtagcatagag

SEQ ID NO: 385927 - DNA, 20 bp, Artificial Sequence
  Description of Artificial Sequence: Synthetic oligonucleotide
  Target: LAMA2; (+) strand; PAM type: YTN; PAM sequence: TTT
gtgtagcatagagatgagca

SEQ ID NO: 385928 - DNA, 20 bp, Artificial Sequence
  Description of Artificial Sequence: Synthetic oligonucleotide
  Target: LAMA2; (+) strand; PAM type: YTN; PAM sequence: TTG
tgtagcatagagatgagcag

SEQ ID NO: 385929 - DNA, 20 bp, Artificial Sequence
  Description of Artificial Sequence: Synthetic oligonucleotide
  Target: LAMA2; (+) strand; PAM type: YTN; PAM sequence: CTT
aaagtgtttttccagtcctc

SEQ ID NO: 385930 - DNA, 20 bp, Artificial Sequence
  Description of Artificial Sequence: Synthetic oligonucleotide
  Target: LAMA2; (+) strand; PAM type: YTN; PAM sequence: TTA
aagtgtttttccagtcctca

SEQ ID NO: 385931 - DNA, 20 bp, Artificial Sequence
  Description of Artificial Sequence: Synthetic oligonucleotide
  Target: LAMA2; (+) strand; PAM type: YTN; PAM sequence: TTT
ttccagtcctcaaacattgt

SEQ ID NO: 385932 - DNA, 20 bp, Artificial Sequence
  Description of Artificial Sequence: Synthetic oligonucleotide
  Target: LAMA2; (+) strand; PAM type: YTN; PAM sequence: TTT
tccagtcctcaaacattgtt

SEQ ID NO: 385933 - DNA, 20 bp, Artificial Sequence
  Description of Artificial Sequence: Synthetic oligonucleotide
  Target: LAMA2; (+) strand; PAM type: YTN; PAM sequence: TTT
ccagtcctcaaacattgtta

SEQ ID NO: 385934 - DNA, 20 bp, Artificial Sequence
  Description of Artificial Sequence: Synthetic oligonucleotide
  Target: LAMA2; (+) strand; PAM type: YTN; PAM sequence: TTC
cagtcctcaaacattgttat

SEQ ID NO: 385935 - DNA, 20 bp, Artificial Sequence
  Description of Artificial Sequence: Synthetic oligonucleotide
  Target: LAMA2; (+) strand; PAM type: YTN; PAM sequence: CTC
aaacattgttatagctttgc

SEQ ID NO: 385936 - DNA, 20 bp, Artificial Sequence
  Description of Artificial Sequence: Synthetic oligonucleotide
  Target: LAMA2; (+) strand; PAM type: YTN; PAM sequence: TTG
ttatagctttgcattcatca

SEQ ID NO: 385937 - DNA, 20 bp, Artificial Sequence
  Description of Artificial Sequence: Synthetic oligonucleotide
  Target: LAMA2; (+) strand; PAM type: YTN; PAM sequence: TTA
tagctttgcattcatcatct

SEQ ID NO: 385938 - DNA, 20 bp, Artificial Sequence
  Description of Artificial Sequence: Synthetic oligonucleotide
  Target: LAMA2; (+) strand; PAM type: YTN; PAM sequence: CTT
tgcattcatcatctctaaca

SEQ ID NO: 385939 - DNA, 20 bp, Artificial Sequence
  Description of Artificial Sequence: Synthetic oligonucleotide
  Target: LAMA2; (+) strand; PAM type: YTN; PAM sequence: TTT
gcattcatcatctctaacat

SEQ ID NO: 385940 - DNA, 20 bp, Artificial Sequence
  Description of Artificial Sequence: Synthetic oligonucleotide
  Target: LAMA2; (+) strand; PAM type: YTN; PAM sequence: TTG
cattcatcatctctaacata

SEQ ID NO: 385941 - DNA, 20 bp, Artificial Sequence
  Description of Artificial Sequence: Synthetic oligonucleotide
  Target: LAMA2; (+) strand; PAM type: YTN; PAM sequence: TTC
atcatctctaacatataaat

SEQ ID NO: 385942 - DNA, 20 bp, Artificial Sequence
  Description of Artificial Sequence: Synthetic oligonucleotide
  Target: LAMA2; (+) strand; PAM type: YTN; PAM sequence: CTC
taacatataaatgatcaggt

SEQ ID NO: 385943 - DNA, 20 bp, Artificial Sequence
  Description of Artificial Sequence: Synthetic oligonucleotide
  Target: LAMA2; (+) strand; PAM type: YTN; PAM sequence: CTA
acatataaatgatcaggtta

SEQ ID NO: 385944 - DNA, 20 bp, Artificial Sequence
  Description of Artificial Sequence: Synthetic oligonucleotide
  Target: LAMA2; (+) strand; PAM type: YTN; PAM sequence: TTA
tatttctctgaaaaattgct

SEQ ID NO: 385945 - DNA, 20 bp, Artificial Sequence
  Description of Artificial Sequence: Synthetic oligonucleotide
  Target: LAMA2; (+) strand; PAM type: YTN; PAM sequence: TTT
ctctgaaaaattgctttatt

SEQ ID NO: 385946 - DNA, 20 bp, Artificial Sequence
  Description of Artificial Sequence: Synthetic oligonucleotide
  Target: LAMA2; (+) strand; PAM type: YTN; PAM sequence: TTC
tctgaaaaattgctttattc

SEQ ID NO: 385947 - DNA, 20 bp, Artificial Sequence
  Description of Artificial Sequence: Synthetic oligonucleotide
  Target: LAMA2; (+) strand; PAM type: YTN; PAM sequence: CTC
tgaaaaattgctttattcag

SEQ ID NO: 385948 - DNA, 20 bp, Artificial Sequence
  Description of Artificial Sequence: Synthetic oligonucleotide
  Target: LAMA2; (+) strand; PAM type: YTN; PAM sequence: CTG
aaaaattgctttattcagct

SEQ ID NO: 385949 - DNA, 20 bp, Artificial Sequence
  Description of Artificial Sequence: Synthetic oligonucleotide
  Target: LAMA2; (+) strand; PAM type: YTN; PAM sequence: TTG
ctttattcagctatattaaa

SEQ ID NO: 385950 - DNA, 20 bp, Artificial Sequence
  Description of Artificial Sequence: Synthetic oligonucleotide
  Target: LAMA2; (+) strand; PAM type: YTN; PAM sequence: CTT
tattcagctatattaaacca

SEQ ID NO: 385951 - DNA, 20 bp, Artificial Sequence
  Description of Artificial Sequence: Synthetic oligonucleotide
  Target: LAMA2; (+) strand; PAM type: YTN; PAM sequence: TTT
attcagctatattaaaccaa

SEQ ID NO: 385952 - DNA, 20 bp, Artificial Sequence
  Description of Artificial Sequence: Synthetic oligonucleotide
  Target: LAMA2; (+) strand; PAM type: YTN; PAM sequence: TTA
ttcagctatattaaaccaaa

SEQ ID NO: 385953 - DNA, 20 bp, Artificial Sequence
  Description of Artificial Sequence: Synthetic oligonucleotide
  Target: LAMA2; (+) strand; PAM type: YTN; PAM sequence: TTC
agctatattaaaccaaagtt

SEQ ID NO: 385954 - DNA, 20 bp, Artificial Sequence
  Description of Artificial Sequence: Synthetic oligonucleotide
  Target: LAMA2; (+) strand; PAM type: YTN; PAM sequence: CTA
tattaaaccaaagttcttgg

SEQ ID NO: 385955 - DNA, 20 bp, Artificial Sequence
  Description of Artificial Sequence: Synthetic oligonucleotide
  Target: LAMA2; (+) strand; PAM type: YTN; PAM sequence: TTA
aaccaaagttcttggttaaa

SEQ ID NO: 385956 - DNA, 20 bp, Artificial Sequence
  Description of Artificial Sequence: Synthetic oligonucleotide
  Target: LAMA2; (+) strand; PAM type: YTN; PAM sequence: TTC
ttggttaaatttttattgta

SEQ ID NO: 385957 - DNA, 20 bp, Artificial Sequence
  Description of Artificial Sequence: Synthetic oligonucleotide
  Target: LAMA2; (+) strand; PAM type: YTN; PAM sequence: CTT
ggttaaatttttattgtaac

SEQ ID NO: 385958 - DNA, 20 bp, Artificial Sequence
  Description of Artificial Sequence: Synthetic oligonucleotide
  Target: LAMA2; (+) strand; PAM type: YTN; PAM sequence: TTG
gttaaatttttattgtaacc

SEQ ID NO: 385959 - DNA, 20 bp, Artificial Sequence
  Description of Artificial Sequence: Synthetic oligonucleotide
  Target: LAMA2; (+) strand; PAM type: YTN; PAM sequence: TTA
aatttttattgtaaccttcc

SEQ ID NO: 385960 - DNA, 20 bp, Artificial Sequence
  Description of Artificial Sequence: Synthetic oligonucleotide
  Target: LAMA2; (+) strand; PAM type: YTN; PAM sequence: TTT
ttattgtaaccttccaaata

SEQ ID NO: 385961 - DNA, 20 bp, Artificial Sequence
  Description of Artificial Sequence: Synthetic oligonucleotide
  Target: LAMA2; (+) strand; PAM type: YTN; PAM sequence: TTT
tattgtaaccttccaaataa

SEQ ID NO: 385962 - DNA, 20 bp, Artificial Sequence
  Description of Artificial Sequence: Synthetic oligonucleotide
  Target: LAMA2; (+) strand; PAM type: YTN; PAM sequence: TTT
attgtaaccttccaaataaa

SEQ ID NO: 385963 - DNA, 20 bp, Artificial Sequence
  Description of Artificial Sequence: Synthetic oligonucleotide
  Target: LAMA2; (+) strand; PAM type: YTN; PAM sequence: TTA
ttgtaaccttccaaataaat

SEQ ID NO: 385964 - DNA, 20 bp, Artificial Sequence
  Description of Artificial Sequence: Synthetic oligonucleotide
  Target: LAMA2; (+) strand; PAM type: YTN; PAM sequence: TTG
taaccttccaaataaatttg

SEQ ID NO: 385965 - DNA, 20 bp, Artificial Sequence
  Description of Artificial Sequence: Synthetic oligonucleotide
  Target: LAMA2; (+) strand; PAM type: YTN; PAM sequence: CTT
ccaaataaatttgttccagt

SEQ ID NO: 385966 - DNA, 20 bp, Artificial Sequence
  Description of Artificial Sequence: Synthetic oligonucleotide
  Target: LAMA2; (+) strand; PAM type: YTN; PAM sequence: TTC
caaataaatttgttccagtg

SEQ ID NO: 385967 - DNA, 20 bp, Artificial Sequence
  Description of Artificial Sequence: Synthetic oligonucleotide
  Target: LAMA2; (+) strand; PAM type: YTN; PAM sequence: TTT
gttccagtgctgagagcttc

SEQ ID NO: 385968 - DNA, 20 bp, Artificial Sequence
  Description of Artificial Sequence: Synthetic oligonucleotide
  Target: LAMA2; (+) strand; PAM type: YTN; PAM sequence: TTG
ttccagtgctgagagcttct

SEQ ID NO: 385969 - DNA, 20 bp, Artificial Sequence
  Description of Artificial Sequence: Synthetic oligonucleotide
  Target: LAMA2; (+) strand; PAM type: YTN; PAM sequence: TTC
cagtgctgagagcttcttaa

SEQ ID NO: 385970 - DNA, 20 bp, Artificial Sequence
  Description of Artificial Sequence: Synthetic oligonucleotide
  Target: LAMA2; (+) strand; PAM type: YTN; PAM sequence: CTG
agagcttcttaaatcattta

SEQ ID NO: 385971 - DNA, 20 bp, Artificial Sequence
  Description of Artificial Sequence: Synthetic oligonucleotide
  Target: LAMA2; (+) strand; PAM type: YTN; PAM sequence: CTT
cttaaatcatttaaatcatc

SEQ ID NO: 385972 - DNA, 20 bp, Artificial Sequence
  Description of Artificial Sequence: Synthetic oligonucleotide
  Target: LAMA2; (+) strand; PAM type: YTN; PAM sequence: TTC
ttaaatcatttaaatcatct

SEQ ID NO: 385973 - DNA, 20 bp, Artificial Sequence
  Description of Artificial Sequence: Synthetic oligonucleotide
  Target: LAMA2; (+) strand; PAM type: YTN; PAM sequence: CTT
aaatcatttaaatcatcttt

SEQ ID NO: 385974 - DNA, 20 bp, Artificial Sequence
  Description of Artificial Sequence: Synthetic oligonucleotide
  Target: LAMA2; (+) strand; PAM type: YTN; PAM sequence: TTA
aatcatttaaatcatctttc

SEQ ID NO: 385975 - DNA, 20 bp, Artificial Sequence
  Description of Artificial Sequence: Synthetic oligonucleotide
  Target: LAMA2; (+) strand; PAM type: YTN; PAM sequence: TTT
aaatcatctttcgacctgct

SEQ ID NO: 385976 - DNA, 20 bp, Artificial Sequence
  Description of Artificial Sequence: Synthetic oligonucleotide
  Target: LAMA2; (+) strand; PAM type: YTN; PAM sequence: TTA
aatcatctttcgacctgctc

SEQ ID NO: 385977 - DNA, 20 bp, Artificial Sequence
  Description of Artificial Sequence: Synthetic oligonucleotide
  Target: LAMA2; (+) strand; PAM type: YTN; PAM sequence: CTT
tcgacctgctcagactgatc

SEQ ID NO: 385978 - DNA, 20 bp, Artificial Sequence
  Description of Artificial Sequence: Synthetic oligonucleotide
  Target: LAMA2; (+) strand; PAM type: YTN; PAM sequence: TTT
cgacctgctcagactgatca

SEQ ID NO: 385979 - DNA, 20 bp, Artificial Sequence
  Description of Artificial Sequence: Synthetic oligonucleotide
  Target: LAMA2; (+) strand; PAM type: YTN; PAM sequence: TTC
gacctgctcagactgatcag

SEQ ID NO: 385980 - DNA, 20 bp, Artificial Sequence
  Description of Artificial Sequence: Synthetic oligonucleotide
  Target: LAMA2; (+) strand; PAM type: YTN; PAM sequence: CTG
ctcagactgatcaggttagg

SEQ ID NO: 385981 - DNA, 20 bp, Artificial Sequence
  Description of Artificial Sequence: Synthetic oligonucleotide
  Target: LAMA2; (+) strand; PAM type: YTN; PAM sequence: CTC
agactgatcaggttaggtct

SEQ ID NO: 385982 - DNA, 20 bp, Artificial Sequence
  Description of Artificial Sequence: Synthetic oligonucleotide
  Target: LAMA2; (+) strand; PAM type: YTN; PAM sequence: CTG
atcaggttaggtctaaaact

SEQ ID NO: 385983 - DNA, 20 bp, Artificial Sequence
  Description of Artificial Sequence: Synthetic oligonucleotide
  Target: LAMA2; (+) strand; PAM type: YTN; PAM sequence: TTA
ggtctaaaactgcttaaatt

SEQ ID NO: 385984 - DNA, 20 bp, Artificial Sequence
  Description of Artificial Sequence: Synthetic oligonucleotide
  Target: LAMA2; (+) strand; PAM type: YTN; PAM sequence: CTA
aaactgcttaaatttcttga

SEQ ID NO: 385985 - DNA, 20 bp, Artificial Sequence
  Description of Artificial Sequence: Synthetic oligonucleotide
  Target: LAMA2; (+) strand; PAM type: YTN; PAM sequence: CTG
cttaaatttcttgagtatcc

SEQ ID NO: 385986 - DNA, 20 bp, Artificial Sequence
  Description of Artificial Sequence: Synthetic oligonucleotide
  Target: LAMA2; (+) strand; PAM type: YTN; PAM sequence: CTT
aaatttcttgagtatccctg

SEQ ID NO: 385987 - DNA, 20 bp, Artificial Sequence
  Description of Artificial Sequence: Synthetic oligonucleotide
  Target: LAMA2; (+) strand; PAM type: YTN; PAM sequence: TTA
aatttcttgagtatccctgt

SEQ ID NO: 385988 - DNA, 20 bp, Artificial Sequence
  Description of Artificial Sequence: Synthetic oligonucleotide
  Target: LAMA2; (+) strand; PAM type: YTN; PAM sequence: TTT
cttgagtatccctgtaatat

SEQ ID NO: 385989 - DNA, 20 bp, Artificial Sequence
  Description of Artificial Sequence: Synthetic oligonucleotide
  Target: LAMA2; (+) strand; PAM type: YTN; PAM sequence: TTC
ttgagtatccctgtaatata

SEQ ID NO: 385990 - DNA, 20 bp, Artificial Sequence
  Description of Artificial Sequence: Synthetic oligonucleotide
  Target: LAMA2; (+) strand; PAM type: YTN; PAM sequence: CTT
gagtatccctgtaatataga

SEQ ID NO: 385991 - DNA, 20 bp, Artificial Sequence
  Description of Artificial Sequence: Synthetic oligonucleotide
  Target: LAMA2; (+) strand; PAM type: YTN; PAM sequence: TTG
agtatccctgtaatatagaa

SEQ ID NO: 385992 - DNA, 20 bp, Artificial Sequence
  Description of Artificial Sequence: Synthetic oligonucleotide
  Target: LAMA2; (+) strand; PAM type: YTN; PAM sequence: CTG
taatatagaaacctctcctc

SEQ ID NO: 385993 - DNA, 20 bp, Artificial Sequence
  Description of Artificial Sequence: Synthetic oligonucleotide
  Target: LAMA2; (+) strand; PAM type: YTN; PAM sequence: CTC
tcctcatactttattttcaa

SEQ ID NO: 385994 - DNA, 20 bp, Artificial Sequence
  Description of Artificial Sequence: Synthetic oligonucleotide
  Target: LAMA2; (+) strand; PAM type: YTN; PAM sequence: CTC
ctcatactttattttcaata

SEQ ID NO: 385995 - DNA, 20 bp, Artificial Sequence
  Description of Artificial Sequence: Synthetic oligonucleotide
  Target: LAMA2; (+) strand; PAM type: YTN; PAM sequence: CTC
atactttattttcaatactc

SEQ ID NO: 385996 - DNA, 20 bp, Artificial Sequence
  Description of Artificial Sequence: Synthetic oligonucleotide
  Target: LAMA2; (+) strand; PAM type: YTN; PAM sequence: CTT
tattttcaatactcttgtaa

SEQ ID NO: 385997 - DNA, 20 bp, Artificial Sequence
  Description of Artificial Sequence: Synthetic oligonucleotide
  Target: LAMA2; (+) strand; PAM type: YTN; PAM sequence: TTT
attttcaatactcttgtaat

SEQ ID NO: 385998 - DNA, 20 bp, Artificial Sequence
  Description of Artificial Sequence: Synthetic oligonucleotide
  Target: LAMA2; (+) strand; PAM type: YTN; PAM sequence: TTA
ttttcaatactcttgtaata

SEQ ID NO: 385999 - DNA, 20 bp, Artificial Sequence
  Description of Artificial Sequence: Synthetic oligonucleotide
  Target: LAMA2; (+) strand; PAM type: YTN; PAM sequence: TTT
tcaatactcttgtaataaac

SEQ ID NO: 386000 - DNA, 20 bp, Artificial Sequence
  Description of Artificial Sequence: Synthetic oligonucleotide
  Target: LAMA2; (+) strand; PAM type: YTN; PAM sequence: TTT
caatactcttgtaataaact

SEQ ID NO: 386001 - DNA, 20 bp, Artificial Sequence
  Description of Artificial Sequence: Synthetic oligonucleotide
  Target: LAMA2; (+) strand; PAM type: YTN; PAM sequence: TTC
aatactcttgtaataaactc

SEQ ID NO: 386002 - DNA, 20 bp, Artificial Sequence
  Description of Artificial Sequence: Synthetic oligonucleotide
  Target: LAMA2; (+) strand; PAM type: YTN; PAM sequence: CTC
ttgtaataaactctttgaac

SEQ ID NO: 386003 - DNA, 20 bp, Artificial Sequence
  Description of Artificial Sequence: Synthetic oligonucleotide
  Target: LAMA2; (+) strand; PAM type: YTN; PAM sequence: CTT
gtaataaactctttgaacat

SEQ ID NO: 386004 - DNA, 20 bp, Artificial Sequence
  Description of Artificial Sequence: Synthetic oligonucleotide
  Target: LAMA2; (+) strand; PAM type: YTN; PAM sequence: TTG
taataaactctttgaacatt

SEQ ID NO: 386005 - DNA, 20 bp, Artificial Sequence
  Description of Artificial Sequence: Synthetic oligonucleotide
  Target: LAMA2; (+) strand; PAM type: YTN; PAM sequence: CTC
tttgaacatttaatcaatct

SEQ ID NO: 386006 - DNA, 20 bp, Artificial Sequence
  Description of Artificial Sequence: Synthetic oligonucleotide
  Target: LAMA2; (+) strand; PAM type: YTN; PAM sequence: CTT
tgaacatttaatcaatctga

SEQ ID NO: 386007 - DNA, 20 bp, Artificial Sequence
  Description of Artificial Sequence: Synthetic oligonucleotide
  Target: LAMA2; (+) strand; PAM type: YTN; PAM sequence: TTT
gaacatttaatcaatctgaa

SEQ ID NO: 386008 - DNA, 20 bp, Artificial Sequence
  Description of Artificial Sequence: Synthetic oligonucleotide
  Target: LAMA2; (+) strand; PAM type: YTN; PAM sequence: TTG
aacatttaatcaatctgaat

SEQ ID NO: 386009 - DNA, 20 bp, Artificial Sequence
  Description of Artificial Sequence: Synthetic oligonucleotide
  Target: LAMA2; (+) strand; PAM type: YTN; PAM sequence: TTT
aatcaatctgaatctgctta

SEQ ID NO: 386010 - DNA, 20 bp, Artificial Sequence
  Description of Artificial Sequence: Synthetic oligonucleotide
  Target: LAMA2; (+) strand; PAM type: YTN; PAM sequence: TTA
atcaatctgaatctgcttag

SEQ ID NO: 386011 - DNA, 20 bp, Artificial Sequence
  Description of Artificial Sequence: Synthetic oligonucleotide
  Target: LAMA2; (+) strand; PAM type: YTN; PAM sequence: CTG
aatctgcttagaatacaatt

SEQ ID NO: 386012 - DNA, 20 bp, Artificial Sequence
  Description of Artificial Sequence: Synthetic oligonucleotide
  Target: LAMA2; (+) strand; PAM type: YTN; PAM sequence: CTG
cttagaatacaattatttta

SEQ ID NO: 386013 - DNA, 20 bp, Artificial Sequence
  Description of Artificial Sequence: Synthetic oligonucleotide
  Target: LAMA2; (+) strand; PAM type: YTN; PAM sequence: CTT
agaatacaattattttacct

SEQ ID NO: 386014 - DNA, 20 bp, Artificial Sequence
  Description of Artificial Sequence: Synthetic oligonucleotide
  Target: LAMA2; (+) strand; PAM type: YTN; PAM sequence: TTA
gaatacaattattttaccta

SEQ ID NO: 386015 - DNA, 20 bp, Artificial Sequence
  Description of Artificial Sequence: Synthetic oligonucleotide
  Target: LAMA2; (+) strand; PAM type: YTN; PAM sequence: TTA
ttttacctataaatgttaag

SEQ ID NO: 386016 - DNA, 20 bp, Artificial Sequence
  Description of Artificial Sequence: Synthetic oligonucleotide
  Target: LAMA2; (+) strand; PAM type: YTN; PAM sequence: TTT
tacctataaatgttaagaag

SEQ ID NO: 386017 - DNA, 20 bp, Artificial Sequence
  Description of Artificial Sequence: Synthetic oligonucleotide
  Target: LAMA2; (+) strand; PAM type: YTN; PAM sequence: TTT
acctataaatgttaagaagc

SEQ ID NO: 386018 - DNA, 20 bp, Artificial Sequence
  Description of Artificial Sequence: Synthetic oligonucleotide
  Target: LAMA2; (+) strand; PAM type: YTN; PAM sequence: TTA
cctataaatgttaagaagcc

SEQ ID NO: 386019 - DNA, 20 bp, Artificial Sequence
  Description of Artificial Sequence: Synthetic oligonucleotide
  Target: LAMA2; (+) strand; PAM type: YTN; PAM sequence: CTA
taaatgttaagaagccattt

SEQ ID NO: 386020 - DNA, 20 bp, Artificial Sequence
  Description of Artificial Sequence: Synthetic oligonucleotide
  Target: LAMA2; (+) strand; PAM type: YTN; PAM sequence: TTA
agaagccatttaagtggact

SEQ ID NO: 386021 - DNA, 20 bp, Artificial Sequence
  Description of Artificial Sequence: Synthetic oligonucleotide
  Target: LAMA2; (+) strand; PAM type: YTN; PAM sequence: TTT
aagtggacttacttaaatgc

SEQ ID NO: 386022 - DNA, 20 bp, Artificial Sequence
  Description of Artificial Sequence: Synthetic oligonucleotide
  Target: LAMA2; (+) strand; PAM type: YTN; PAM sequence: TTA
agtggacttacttaaatgct

SEQ ID NO: 386023 - DNA, 20 bp, Artificial Sequence
  Description of Artificial Sequence: Synthetic oligonucleotide
  Target: LAMA2; (+) strand; PAM type: YTN; PAM sequence: CTT
acttaaatgctactttcagt

SEQ ID NO: 386024 - DNA, 20 bp, Artificial Sequence
  Description of Artificial Sequence: Synthetic oligonucleotide
  Target: LAMA2; (+) strand; PAM type: YTN; PAM sequence: TTA
cttaaatgctactttcagta

SEQ ID NO: 386025 - DNA, 20 bp, Artificial Sequence
  Description of Artificial Sequence: Synthetic oligonucleotide
  Target: LAMA2; (+) strand; PAM type: YTN; PAM sequence: CTT
aaatgctactttcagtattt

SEQ ID NO: 386026 - DNA, 20 bp, Artificial Sequence
  Description of Artificial Sequence: Synthetic oligonucleotide
  Target: LAMA2; (+) strand; PAM type: YTN; PAM sequence: TTA
aatgctactttcagtatttg

SEQ ID NO: 386027 - DNA, 20 bp, Artificial Sequence
  Description of Artificial Sequence: Synthetic oligonucleotide
  Target: LAMA2; (+) strand; PAM type: YTN; PAM sequence: CTA
ctttcagtatttgtactctt

SEQ ID NO: 386028 - DNA, 20 bp, Artificial Sequence
  Description of Artificial Sequence: Synthetic oligonucleotide
  Target: LAMA2; (+) strand; PAM type: YTN; PAM sequence: CTT
tcagtatttgtactctttca

SEQ ID NO: 386029 - DNA, 20 bp, Artificial Sequence
  Description of Artificial Sequence: Synthetic oligonucleotide
  Target: LAMA2; (+) strand; PAM type: YTN; PAM sequence: TTT
cagtatttgtactctttcat

SEQ ID NO: 386030 - DNA, 20 bp, Artificial Sequence
  Description of Artificial Sequence: Synthetic oligonucleotide
  Target: LAMA2; (+) strand; PAM type: YTN; PAM sequence: TTC
agtatttgtactctttcatt

SEQ ID NO: 386031 - DNA, 20 bp, Artificial Sequence
  Description of Artificial Sequence: Synthetic oligonucleotide
  Target: LAMA2; (+) strand; PAM type: YTN; PAM sequence: TTT
gtactctttcattgaaaaaa

SEQ ID NO: 386032 - DNA, 20 bp, Artificial Sequence
  Description of Artificial Sequence: Synthetic oligonucleotide
  Target: LAMA2; (+) strand; PAM type: YTN; PAM sequence: TTG
tactctttcattgaaaaaaa

SEQ ID NO: 386033 - DNA, 20 bp, Artificial Sequence
  Description of Artificial Sequence: Synthetic oligonucleotide
  Target: LAMA2; (+) strand; PAM type: YTN; PAM sequence: CTC
tttcattgaaaaaaataatc

SEQ ID NO: 386034 - DNA, 20 bp, Artificial Sequence
  Description of Artificial Sequence: Synthetic oligonucleotide
  Target: LAMA2; (+) strand; PAM type: YTN; PAM sequence: CTT
tcattgaaaaaaataatcaa

SEQ ID NO: 386035 - DNA, 20 bp, Artificial Sequence
  Description of Artificial Sequence: Synthetic oligonucleotide
  Target: LAMA2; (+) strand; PAM type: YTN; PAM sequence: TTT
cattgaaaaaaataatcaaa

SEQ ID NO: 386036 - DNA, 20 bp, Artificial Sequence
  Description of Artificial Sequence: Synthetic oligonucleotide
  Target: LAMA2; (+) strand; PAM type: YTN; PAM sequence: TTC
attgaaaaaaataatcaaaa

SEQ ID NO: 386037 - DNA, 20 bp, Artificial Sequence
  Description of Artificial Sequence: Synthetic oligonucleotide
  Target: LAMA2; (+) strand; PAM type: YTN; PAM sequence: TTG
aaaaaaataatcaaaaacat

SEQ ID NO: 386038 - DNA, 20 bp, Artificial Sequence
  Description of Artificial Sequence: Synthetic oligonucleotide
  Target: LAMA2; (+) strand; PAM type: YTN; PAM sequence: CTA
atgtcacaaatcgttttctt

SEQ ID NO: 386039 - DNA, 20 bp, Artificial Sequence
  Description of Artificial Sequence: Synthetic oligonucleotide
  Target: LAMA2; (+) strand; PAM type: YTN; PAM sequence: TTT
tcttcatgttttgccttttc

SEQ ID NO: 386040 - DNA, 20 bp, Artificial Sequence
  Description of Artificial Sequence: Synthetic oligonucleotide
  Target: LAMA2; (+) strand; PAM type: YTN; PAM sequence: TTT
cttcatgttttgccttttct

SEQ ID NO: 386041 - DNA, 20 bp, Artificial Sequence
  Description of Artificial Sequence: Synthetic oligonucleotide
  Target: LAMA2; (+) strand; PAM type: YTN; PAM sequence: TTC
ttcatgttttgccttttcta

SEQ ID NO: 386042 - DNA, 20 bp, Artificial Sequence
  Description of Artificial Sequence: Synthetic oligonucleotide
  Target: LAMA2; (+) strand; PAM type: YTN; PAM sequence: CTT
catgttttgccttttctaac

SEQ ID NO: 386043 - DNA, 20 bp, Artificial Sequence
  Description of Artificial Sequence: Synthetic oligonucleotide
  Target: LAMA2; (+) strand; PAM type: YTN; PAM sequence: TTC
atgttttgccttttctaacc

SEQ ID NO: 386044 - DNA, 20 bp, Artificial Sequence
  Description of Artificial Sequence: Synthetic oligonucleotide
  Target: LAMA2; (+) strand; PAM type: YTN; PAM sequence: TTT
tgccttttctaaccagcaca

SEQ ID NO: 386045 - DNA, 20 bp, Artificial Sequence
  Description of Artificial Sequence: Synthetic oligonucleotide
  Target: LAMA2; (+) strand; PAM type: YTN; PAM sequence: TTT
gccttttctaaccagcacag

SEQ ID NO: 386046 - DNA, 20 bp, Artificial Sequence
  Description of Artificial Sequence: Synthetic oligonucleotide
  Target: LAMA2; (+) strand; PAM type: YTN; PAM sequence: TTG
ccttttctaaccagcacagg

SEQ ID NO: 386047 - DNA, 20 bp, Artificial Sequence
  Description of Artificial Sequence: Synthetic oligonucleotide
  Target: LAMA2; (+) strand; PAM type: YTN; PAM sequence: CTT
ttctaaccagcacagggtga

SEQ ID NO: 386048 - DNA, 20 bp, Artificial Sequence
  Description of Artificial Sequence: Synthetic oligonucleotide
  Target: LAMA2; (+) strand; PAM type: YTN; PAM sequence: TTT
tctaaccagcacagggtgaa

SEQ ID NO: 386049 - DNA, 20 bp, Artificial Sequence
  Description of Artificial Sequence: Synthetic oligonucleotide
  Target: LAMA2; (+) strand; PAM type: YTN; PAM sequence: TTT
ctaaccagcacagggtgaat

SEQ ID NO: 386050 - DNA, 20 bp, Artificial Sequence
  Description of Artificial Sequence: Synthetic oligonucleotide
  Target: LAMA2; (+) strand; PAM type: YTN; PAM sequence: TTC
taaccagcacagggtgaatt

SEQ ID NO: 386051 - DNA, 20 bp, Artificial Sequence
  Description of Artificial Sequence: Synthetic oligonucleotide
  Target: LAMA2; (+) strand; PAM type: YTN; PAM sequence: CTA
accagcacagggtgaattaa

SEQ ID NO: 386052 - DNA, 20 bp, Artificial Sequence
  Description of Artificial Sequence: Synthetic oligonucleotide
  Target: LAMA2; (+) strand; PAM type: YTN; PAM sequence: TTA
actttcacagtcagccatgc

SEQ ID NO: 386053 - DNA, 20 bp, Artificial Sequence
  Description of Artificial Sequence: Synthetic oligonucleotide
  Target: LAMA2; (+) strand; PAM type: YTN; PAM sequence: CTT
tcacagtcagccatgcagat

SEQ ID NO: 386054 - DNA, 20 bp, Artificial Sequence
  Description of Artificial Sequence: Synthetic oligonucleotide
  Target: LAMA2; (+) strand; PAM type: YTN; PAM sequence: TTT
cacagtcagccatgcagatt

SEQ ID NO: 386055 - DNA, 20 bp, Artificial Sequence
  Description of Artificial Sequence: Synthetic oligonucleotide
  Target: LAMA2; (+) strand; PAM type: YTN; PAM sequence: TTC
acagtcagccatgcagattt

SEQ ID NO: 386056 - DNA, 20 bp, Artificial Sequence
  Description of Artificial Sequence: Synthetic oligonucleotide
  Target: LAMA2; (+) strand; PAM type: YTN; PAM sequence: TTT
cacagtctcaggcagctaaa

SEQ ID NO: 386057 - DNA, 20 bp, Artificial Sequence
  Description of Artificial Sequence: Synthetic oligonucleotide
  Target: LAMA2; (+) strand; PAM type: YTN; PAM sequence: TTC
acagtctcaggcagctaaag

SEQ ID NO: 386058 - DNA, 20 bp, Artificial Sequence
  Description of Artificial Sequence: Synthetic oligonucleotide
  Target: LAMA2; (+) strand; PAM type: YTN; PAM sequence: CTC
aggcagctaaagatggtcta

SEQ ID NO: 386059 - DNA, 20 bp, Artificial Sequence
  Description of Artificial Sequence: Synthetic oligonucleotide
  Target: LAMA2; (+) strand; PAM type: YTN; PAM sequence: CTA
aagatggtctatgattatct

SEQ ID NO: 386060 - DNA, 20 bp, Artificial Sequence
  Description of Artificial Sequence: Synthetic oligonucleotide
  Target: LAMA2; (+) strand; PAM type: YTN; PAM sequence: CTA
tgattatcttgccagtattt

SEQ ID NO: 386061 - DNA, 20 bp, Artificial Sequence
  Description of Artificial Sequence: Synthetic oligonucleotide
  Target: LAMA2; (+) strand; PAM type: YTN; PAM sequence: TTA
tcttgccagtatttatagct

SEQ ID NO: 386062 - DNA, 20 bp, Artificial Sequence
  Description of Artificial Sequence: Synthetic oligonucleotide
  Target: LAMA2; (+) strand; PAM type: YTN; PAM sequence: CTT
gccagtatttatagcttttg

SEQ ID NO: 386063 - DNA, 20 bp, Artificial Sequence
  Description of Artificial Sequence: Synthetic oligonucleotide
  Target: LAMA2; (+) strand; PAM type: YTN; PAM sequence: TTG
ccagtatttatagcttttgg

SEQ ID NO: 386064 - DNA, 20 bp, Artificial Sequence
  Description of Artificial Sequence: Synthetic oligonucleotide
  Target: LAMA2; (+) strand; PAM type: YTN; PAM sequence: TTT
atagcttttggctccaatcc

SEQ ID NO: 386065 - DNA, 20 bp, Artificial Sequence
  Description of Artificial Sequence: Synthetic oligonucleotide
  Target: LAMA2; (+) strand; PAM type: YTN; PAM sequence: TTA
tagcttttggctccaatccc

SEQ ID NO: 386066 - DNA, 20 bp, Artificial Sequence
  Description of Artificial Sequence: Synthetic oligonucleotide
  Target: LAMA2; (+) strand; PAM type: YTN; PAM sequence: CTT
ttggctccaatcccctactg

SEQ ID NO: 386067 - DNA, 20 bp, Artificial Sequence
  Description of Artificial Sequence: Synthetic oligonucleotide
  Target: LAMA2; (+) strand; PAM type: YTN; PAM sequence: TTT
tggctccaatcccctactgt

SEQ ID NO: 386068 - DNA, 20 bp, Artificial Sequence
  Description of Artificial Sequence: Synthetic oligonucleotide
  Target: LAMA2; (+) strand; PAM type: YTN; PAM sequence: TTT
ggctccaatcccctactgtc

SEQ ID NO: 386069 - DNA, 20 bp, Artificial Sequence
  Description of Artificial Sequence: Synthetic oligonucleotide
  Target: LAMA2; (+) strand; PAM type: YTN; PAM sequence: TTG
gctccaatcccctactgtct

SEQ ID NO: 386070 - DNA, 20 bp, Artificial Sequence
  Description of Artificial Sequence: Synthetic oligonucleotide
  Target: LAMA2; (+) strand; PAM type: YTN; PAM sequence: CTC
caatcccctactgtctctca

SEQ ID NO: 386071 - DNA, 20 bp, Artificial Sequence
  Description of Artificial Sequence: Synthetic oligonucleotide
  Target: LAMA2; (+) strand; PAM type: YTN; PAM sequence: CTA
ctgtctctcaacttcctcac

SEQ ID NO: 386072 - DNA, 20 bp, Artificial Sequence
  Description of Artificial Sequence: Synthetic oligonucleotide
  Target: LAMA2; (+) strand; PAM type: YTN; PAM sequence: CTG
tctctcaacttcctcacata

SEQ ID NO: 386073 - DNA, 20 bp, Artificial Sequence
  Description of Artificial Sequence: Synthetic oligonucleotide
  Target: LAMA2; (+) strand; PAM type: YTN; PAM sequence: CTC
tcaacttcctcacatacttg

SEQ ID NO: 386074 - DNA, 20 bp, Artificial Sequence
  Description of Artificial Sequence: Synthetic oligonucleotide
  Target: LAMA2; (+) strand; PAM type: YTN; PAM sequence: CTC
aacttcctcacatacttgcc

SEQ ID NO: 386075 - DNA, 20 bp, Artificial Sequence
  Description of Artificial Sequence: Synthetic oligonucleotide
  Target: LAMA2; (+) strand; PAM type: YTN; PAM sequence: CTT
cctcacatacttgcctgttg

SEQ ID NO: 386076 - DNA, 20 bp, Artificial Sequence
  Description of Artificial Sequence: Synthetic oligonucleotide
  Target: LAMA2; (+) strand; PAM type: YTN; PAM sequence: TTC
ctcacatacttgcctgttga

SEQ ID NO: 386077 - DNA, 20 bp, Artificial Sequence
  Description of Artificial Sequence: Synthetic oligonucleotide
  Target: LAMA2; (+) strand; PAM type: YTN; PAM sequence: CTC
acatacttgcctgttgaaca

SEQ ID NO: 386078 - DNA, 20 bp, Artificial Sequence
  Description of Artificial Sequence: Synthetic oligonucleotide
  Target: LAMA2; (+) strand; PAM type: YTN; PAM sequence: CTT
gcctgttgaacaaaaattct

SEQ ID NO: 386079 - DNA, 20 bp, Artificial Sequence
  Description of Artificial Sequence: Synthetic oligonucleotide
  Target: LAMA2; (+) strand; PAM type: YTN; PAM sequence: TTG
cctgttgaacaaaaattcta

SEQ ID NO: 386080 - DNA, 20 bp, Artificial Sequence
  Description of Artificial Sequence: Synthetic oligonucleotide
  Target: LAMA2; (+) strand; PAM type: YTN; PAM sequence: CTG
ttgaacaaaaattctaactg

SEQ ID NO: 386081 - DNA, 20 bp, Artificial Sequence
  Description of Artificial Sequence: Synthetic oligonucleotide
  Target: LAMA2; (+) strand; PAM type: YTN; PAM sequence: TTG
aacaaaaattctaactgttt

SEQ ID NO: 386082 - DNA, 20 bp, Artificial Sequence
  Description of Artificial Sequence: Synthetic oligonucleotide
  Target: LAMA2; (+) strand; PAM type: YTN; PAM sequence: TTC
taactgtttgttatatttac

SEQ ID NO: 386083 - DNA, 20 bp, Artificial Sequence
  Description of Artificial Sequence: Synthetic oligonucleotide
  Target: LAMA2; (+) strand; PAM type: YTN; PAM sequence: CTA
actgtttgttatatttacac

SEQ ID NO: 386084 - DNA, 20 bp, Artificial Sequence
  Description of Artificial Sequence: Synthetic oligonucleotide
  Target: LAMA2; (+) strand; PAM type: YTN; PAM sequence: CTG
tttgttatatttacactgac

SEQ ID NO: 386085 - DNA, 20 bp, Artificial Sequence
  Description of Artificial Sequence: Synthetic oligonucleotide
  Target: LAMA2; (+) strand; PAM type: YTN; PAM sequence: TTT
gttatatttacactgaccat

SEQ ID NO: 386086 - DNA, 20 bp, Artificial Sequence
  Description of Artificial Sequence: Synthetic oligonucleotide
  Target: LAMA2; (+) strand; PAM type: YTN; PAM sequence: TTG
ttatatttacactgaccata

SEQ ID NO: 386087 - DNA, 20 bp, Artificial Sequence
  Description of Artificial Sequence: Synthetic oligonucleotide
  Target: LAMA2; (+) strand; PAM type: YTN; PAM sequence: TTA
tatttacactgaccatatat

SEQ ID NO: 386088 - DNA, 20 bp, Artificial Sequence
  Description of Artificial Sequence: Synthetic oligonucleotide
  Target: LAMA2; (+) strand; PAM type: YTN; PAM sequence: TTT
acactgaccatatataaaac

SEQ ID NO: 386089 - DNA, 20 bp, Artificial Sequence
  Description of Artificial Sequence: Synthetic oligonucleotide
  Target: LAMA2; (+) strand; PAM type: YTN; PAM sequence: TTA
cactgaccatatataaaact

SEQ ID NO: 386090 - DNA, 20 bp, Artificial Sequence
  Description of Artificial Sequence: Synthetic oligonucleotide
  Target: LAMA2; (+) strand; PAM type: YTN; PAM sequence: CTG
accatatataaaacttgttg

SEQ ID NO: 386091 - DNA, 20 bp, Artificial Sequence
  Description of Artificial Sequence: Synthetic oligonucleotide
  Target: LAMA2; (+) strand; PAM type: YTN; PAM sequence: CTT
gttgtccaatctgggacact

SEQ ID NO: 386092 - DNA, 20 bp, Artificial Sequence
  Description of Artificial Sequence: Synthetic oligonucleotide
  Target: LAMA2; (+) strand; PAM type: YTN; PAM sequence: TTG
ttgtccaatctgggacacta

SEQ ID NO: 386093 - DNA, 20 bp, Artificial Sequence
  Description of Artificial Sequence: Synthetic oligonucleotide
  Target: LAMA2; (+) strand; PAM type: YTN; PAM sequence: TTG
tccaatctgggacactatat

SEQ ID NO: 386094 - DNA, 20 bp, Artificial Sequence
  Description of Artificial Sequence: Synthetic oligonucleotide
  Target: LAMA2; (+) strand; PAM type: YTN; PAM sequence: CTG
ggacactatattaaaaacag

SEQ ID NO: 386095 - DNA, 20 bp, Artificial Sequence
  Description of Artificial Sequence: Synthetic oligonucleotide
  Target: LAMA2; (+) strand; PAM type: YTN; PAM sequence: CTA
tattaaaaacaggcagtgtt

SEQ ID NO: 386096 - DNA, 20 bp, Artificial Sequence
  Description of Artificial Sequence: Synthetic oligonucleotide
  Target: LAMA2; (+) strand; PAM type: YTN; PAM sequence: TTA
aaaacaggcagtgtttttag

SEQ ID NO: 386097 - DNA, 20 bp, Artificial Sequence
  Description of Artificial Sequence: Synthetic oligonucleotide
  Target: LAMA2; (+) strand; PAM type: YTN; PAM sequence: TTT
ttagcaattaagccaaaaca

SEQ ID NO: 386098 - DNA, 20 bp, Artificial Sequence
  Description of Artificial Sequence: Synthetic oligonucleotide
  Target: LAMA2; (+) strand; PAM type: YTN; PAM sequence: TTT
tagcaattaagccaaaacaa

SEQ ID NO: 386099 - DNA, 20 bp, Artificial Sequence
  Description of Artificial Sequence: Synthetic oligonucleotide
  Target: LAMA2; (+) strand; PAM type: YTN; PAM sequence: TTT
agcaattaagccaaaacaac

SEQ ID NO: 386100 - DNA, 20 bp, Artificial Sequence
  Description of Artificial Sequence: Synthetic oligonucleotide
  Target: LAMA2; (+) strand; PAM type: YTN; PAM sequence: TTA
gcaattaagccaaaacaaca

SEQ ID NO: 386101 - DNA, 20 bp, Artificial Sequence
  Description of Artificial Sequence: Synthetic oligonucleotide
  Target: LAMA2; (+) strand; PAM type: YTN; PAM sequence: TTA
agccaaaacaacaggtaata

SEQ ID NO: 386102 - DNA, 20 bp, Artificial Sequence
  Description of Artificial Sequence: Synthetic oligonucleotide
  Target: LAMA2; (+) strand; PAM type: YTN; PAM sequence: TTG
tcctgggcaaaccagaatgt

SEQ ID NO: 386103 - DNA, 20 bp, Artificial Sequence
  Description of Artificial Sequence: Synthetic oligonucleotide
  Target: LAMA2; (+) strand; PAM type: YTN; PAM sequence: CTG
ggcaaaccagaatgtatggc

SEQ ID NO: 386104 - DNA, 20 bp, Artificial Sequence
  Description of Artificial Sequence: Synthetic oligonucleotide
  Target: LAMA2; (+) strand; PAM type: YTN; PAM sequence: CTG
ctagcattgtgtaaagttac

SEQ ID NO: 386105 - DNA, 20 bp, Artificial Sequence
  Description of Artificial Sequence: Synthetic oligonucleotide
  Target: LAMA2; (+) strand; PAM type: YTN; PAM sequence: CTA
gcattgtgtaaagttaccaa

SEQ ID NO: 386106 - DNA, 20 bp, Artificial Sequence
  Description of Artificial Sequence: Synthetic oligonucleotide
  Target: LAMA2; (+) strand; PAM type: YTN; PAM sequence: TTG
tgtaaagttaccaaacttcc

SEQ ID NO: 386107 - DNA, 20 bp, Artificial Sequence
  Description of Artificial Sequence: Synthetic oligonucleotide
  Target: LAMA2; (+) strand; PAM type: YTN; PAM sequence: TTA
ccaaacttccagtgtcataa

SEQ ID NO: 386108 - DNA, 20 bp, Artificial Sequence
  Description of Artificial Sequence: Synthetic oligonucleotide
  Target: LAMA2; (+) strand; PAM type: YTN; PAM sequence: CTT
ccagtgtcataacacggagt

SEQ ID NO: 386109 - DNA, 20 bp, Artificial Sequence
  Description of Artificial Sequence: Synthetic oligonucleotide
  Target: LAMA2; (+) strand; PAM type: YTN; PAM sequence: TTC
cagtgtcataacacggagtg

SEQ ID NO: 386110 - DNA, 20 bp, Artificial Sequence
  Description of Artificial Sequence: Synthetic oligonucleotide
  Target: LAMA2; (+) strand; PAM type: YTN; PAM sequence: CTT
aggtgaatggatgcatagat

SEQ ID NO: 386111 - DNA, 20 bp, Artificial Sequence
  Description of Artificial Sequence: Synthetic oligonucleotide
  Target: LAMA2; (+) strand; PAM type: YTN; PAM sequence: TTA
ggtgaatggatgcatagata

SEQ ID NO: 386112 - DNA, 20 bp, Artificial Sequence
  Description of Artificial Sequence: Synthetic oligonucleotide
  Target: LAMA2; (+) strand; PAM type: YTN; PAM sequence: TTA
atggactgcatttagggttc

SEQ ID NO: 386113 - DNA, 20 bp, Artificial Sequence
  Description of Artificial Sequence: Synthetic oligonucleotide
  Target: LAMA2; (+) strand; PAM type: YTN; PAM sequence: CTG
catttagggttcatccagtt

SEQ ID NO: 386114 - DNA, 20 bp, Artificial Sequence
  Description of Artificial Sequence: Synthetic oligonucleotide
  Target: LAMA2; (+) strand; PAM type: YTN; PAM sequence: TTT
agggttcatccagttggatt

SEQ ID NO: 386115 - DNA, 20 bp, Artificial Sequence
  Description of Artificial Sequence: Synthetic oligonucleotide
  Target: LAMA2; (+) strand; PAM type: YTN; PAM sequence: TTA
gggttcatccagttggattc

SEQ ID NO: 386116 - DNA, 20 bp, Artificial Sequence
  Description of Artificial Sequence: Synthetic oligonucleotide
  Target: LAMA2; (+) strand; PAM type: YTN; PAM sequence: TTC
atccagttggattctctttc

SEQ ID NO: 386117 - DNA, 20 bp, Artificial Sequence
  Description of Artificial Sequence: Synthetic oligonucleotide
  Target: LAMA2; (+) strand; PAM type: YTN; PAM sequence: TTG
gattctctttctacttttcc

SEQ ID NO: 386118 - DNA, 20 bp, Artificial Sequence
  Description of Artificial Sequence: Synthetic oligonucleotide
  Target: LAMA2; (+) strand; PAM type: YTN; PAM sequence: TTC
tctttctacttttccaaatc

SEQ ID NO: 386119 - DNA, 20 bp, Artificial Sequence
  Description of Artificial Sequence: Synthetic oligonucleotide
  Target: LAMA2; (+) strand; PAM type: YTN; PAM sequence: CTC
tttctacttttccaaatcag

SEQ ID NO: 386120 - DNA, 20 bp, Artificial Sequence
  Description of Artificial Sequence: Synthetic oligonucleotide
  Target: LAMA2; (+) strand; PAM type: YTN; PAM sequence: CTT
tctacttttccaaatcagtg

SEQ ID NO: 386121 - DNA, 20 bp, Artificial Sequence
  Description of Artificial Sequence: Synthetic oligonucleotide
  Target: LAMA2; (+) strand; PAM type: YTN; PAM sequence: TTT
ctacttttccaaatcagtgt

SEQ ID NO: 386122 - DNA, 20 bp, Artificial Sequence
  Description of Artificial Sequence: Synthetic oligonucleotide
  Target: LAMA2; (+) strand; PAM type: YTN; PAM sequence: TTC
tacttttccaaatcagtgtt

SEQ ID NO: 386123 - DNA, 20 bp, Artificial Sequence
  Description of Artificial Sequence: Synthetic oligonucleotide
  Target: LAMA2; (+) strand; PAM type: YTN; PAM sequence: CTA
cttttccaaatcagtgttat

SEQ ID NO: 386124 - DNA, 20 bp, Artificial Sequence
  Description of Artificial Sequence: Synthetic oligonucleotide
  Target: LAMA2; (+) strand; PAM type: YTN; PAM sequence: CTT
ttccaaatcagtgttatata

SEQ ID NO: 386125 - DNA, 20 bp, Artificial Sequence
  Description of Artificial Sequence: Synthetic oligonucleotide
  Target: LAMA2; (+) strand; PAM type: YTN; PAM sequence: TTT
tccaaatcagtgttatatat

SEQ ID NO: 386126 - DNA, 20 bp, Artificial Sequence
  Description of Artificial Sequence: Synthetic oligonucleotide
  Target: LAMA2; (+) strand; PAM type: YTN; PAM sequence: TTT
ccaaatcagtgttatatatt

SEQ ID NO: 386127 - DNA, 20 bp, Artificial Sequence
  Description of Artificial Sequence: Synthetic oligonucleotide
  Target: LAMA2; (+) strand; PAM type: YTN; PAM sequence: TTC
caaatcagtgttatatattt

SEQ ID NO: 386128 - DNA, 20 bp, Artificial Sequence
  Description of Artificial Sequence: Synthetic oligonucleotide
  Target: LAMA2; (+) strand; PAM type: YTN; PAM sequence: TTA
tatattttgtttgcatatca

SEQ ID NO: 386129 - DNA, 20 bp, Artificial Sequence
  Description of Artificial Sequence: Synthetic oligonucleotide
  Target: LAMA2; (+) strand; PAM type: YTN; PAM sequence: TTT
tgtttgcatatcattaaccc

SEQ ID NO: 386130 - DNA, 20 bp, Artificial Sequence
  Description of Artificial Sequence: Synthetic oligonucleotide
  Target: LAMA2; (+) strand; PAM type: YTN; PAM sequence: TTT
gtttgcatatcattaaccca

SEQ ID NO: 386131 - DNA, 20 bp, Artificial Sequence
  Description of Artificial Sequence: Synthetic oligonucleotide
  Target: LAMA2; (+) strand; PAM type: YTN; PAM sequence: TTG
tttgcatatcattaacccac

SEQ ID NO: 386132 - DNA, 20 bp, Artificial Sequence
  Description of Artificial Sequence: Synthetic oligonucleotide
  Target: LAMA2; (+) strand; PAM type: YTN; PAM sequence: TTT
gcatatcattaacccacttc

SEQ ID NO: 386133 - DNA, 20 bp, Artificial Sequence
  Description of Artificial Sequence: Synthetic oligonucleotide
  Target: LAMA2; (+) strand; PAM type: YTN; PAM sequence: TTG
catatcattaacccacttcc

SEQ ID NO: 386134 - DNA, 20 bp, Artificial Sequence
  Description of Artificial Sequence: Synthetic oligonucleotide
  Target: LAMA2; (+) strand; PAM type: YTN; PAM sequence: TTA
acccacttccacagatacac

SEQ ID NO: 386135 - DNA, 20 bp, Artificial Sequence
  Description of Artificial Sequence: Synthetic oligonucleotide
  Target: LAMA2; (+) strand; PAM type: YTN; PAM sequence: CTT
ccacagatacacatgaaaaa

SEQ ID NO: 386136 - DNA, 20 bp, Artificial Sequence
  Description of Artificial Sequence: Synthetic oligonucleotide
  Target: LAMA2; (+) strand; PAM type: YTN; PAM sequence: TTC
cacagatacacatgaaaaat

SEQ ID NO: 386137 - DNA, 20 bp, Artificial Sequence
  Description of Artificial Sequence: Synthetic oligonucleotide
  Target: LAMA2; (+) strand; PAM type: YTN; PAM sequence: CTT
gaggaagatatggcaaaaag

SEQ ID NO: 386138 - DNA, 20 bp, Artificial Sequence
  Description of Artificial Sequence: Synthetic oligonucleotide
  Target: LAMA2; (+) strand; PAM type: YTN; PAM sequence: TTG
aggaagatatggcaaaaaga

SEQ ID NO: 386139 - DNA, 20 bp, Artificial Sequence
  Description of Artificial Sequence: Synthetic oligonucleotide
  Target: LAMA2; (+) strand; PAM type: YTN; PAM sequence: CTG
agtagcctattgccacttaa

SEQ ID NO: 386140 - DNA, 20 bp, Artificial Sequence
  Description of Artificial Sequence: Synthetic oligonucleotide
  Target: LAMA2; (+) strand; PAM type: YTN; PAM sequence: CTA
ttgccacttaacttgcctct

SEQ ID NO: 386141 - DNA, 20 bp, Artificial Sequence
  Description of Artificial Sequence: Synthetic oligonucleotide
  Target: LAMA2; (+) strand; PAM type: YTN; PAM sequence: TTG
ccacttaacttgcctctttt

SEQ ID NO: 386142 - DNA, 20 bp, Artificial Sequence
  Description of Artificial Sequence: Synthetic oligonucleotide
  Target: LAMA2; (+) strand; PAM type: YTN; PAM sequence: CTT
aacttgcctcttttgcctca

SEQ ID NO: 386143 - DNA, 20 bp, Artificial Sequence
  Description of Artificial Sequence: Synthetic oligonucleotide
  Target: LAMA2; (+) strand; PAM type: YTN; PAM sequence: TTA
acttgcctcttttgcctcat

SEQ ID NO: 386144 - DNA, 20 bp, Artificial Sequence
  Description of Artificial Sequence: Synthetic oligonucleotide
  Target: LAMA2; (+) strand; PAM type: YTN; PAM sequence: CTT
gcctcttttgcctcattggt

SEQ ID NO: 386145 - DNA, 20 bp, Artificial Sequence
  Description of Artificial Sequence: Synthetic oligonucleotide
  Target: LAMA2; (+) strand; PAM type: YTN; PAM sequence: TTG
cctcttttgcctcattggta

SEQ ID NO: 386146 - DNA, 20 bp, Artificial Sequence
  Description of Artificial Sequence: Synthetic oligonucleotide
  Target: LAMA2; (+) strand; PAM type: YTN; PAM sequence: CTC
ttttgcctcattggtaaaat

SEQ ID NO: 386147 - DNA, 20 bp, Artificial Sequence
  Description of Artificial Sequence: Synthetic oligonucleotide
  Target: LAMA2; (+) strand; PAM type: YTN; PAM sequence: CTT
ttgcctcattggtaaaatta

SEQ ID NO: 386148 - DNA, 20 bp, Artificial Sequence
  Description of Artificial Sequence: Synthetic oligonucleotide
  Target: LAMA2; (+) strand; PAM type: YTN; PAM sequence: TTT
tgcctcattggtaaaattaa

SEQ ID NO: 386149 - DNA, 20 bp, Artificial Sequence
  Description of Artificial Sequence: Synthetic oligonucleotide
  Target: LAMA2; (+) strand; PAM type: YTN; PAM sequence: TTT
gcctcattggtaaaattaat

SEQ ID NO: 386150 - DNA, 20 bp, Artificial Sequence
  Description of Artificial Sequence: Synthetic oligonucleotide
  Target: LAMA2; (+) strand; PAM type: YTN; PAM sequence: TTG
cctcattggtaaaattaatg

SEQ ID NO: 386151 - DNA, 20 bp, Artificial Sequence
  Description of Artificial Sequence: Synthetic oligonucleotide
  Target: LAMA2; (+) strand; PAM type: YTN; PAM sequence: CTC
attggtaaaattaatgggtt

SEQ ID NO: 386152 - DNA, 20 bp, Artificial Sequence
  Description of Artificial Sequence: Synthetic oligonucleotide
  Target: LAMA2; (+) strand; PAM type: YTN; PAM sequence: TTG
gtaaaattaatgggttgtat

SEQ ID NO: 386153 - DNA, 20 bp, Artificial Sequence
  Description of Artificial Sequence: Synthetic oligonucleotide
  Target: LAMA2; (+) strand; PAM type: YTN; PAM sequence: TTA
atgggttgtattatttggtt

SEQ ID NO: 386154 - DNA, 20 bp, Artificial Sequence
  Description of Artificial Sequence: Synthetic oligonucleotide
  Target: LAMA2; (+) strand; PAM type: YTN; PAM sequence: TTG
tattatttggttattttgag

SEQ ID NO: 386155 - DNA, 20 bp, Artificial Sequence
  Description of Artificial Sequence: Synthetic oligonucleotide
  Target: LAMA2; (+) strand; PAM type: YTN; PAM sequence: TTA
tttggttattttgagatctg

SEQ ID NO: 386156 - DNA, 20 bp, Artificial Sequence
  Description of Artificial Sequence: Synthetic oligonucleotide
  Target: LAMA2; (+) strand; PAM type: YTN; PAM sequence: TTT
ggttattttgagatctgaaa

SEQ ID NO: 386157 - DNA, 20 bp, Artificial Sequence
  Description of Artificial Sequence: Synthetic oligonucleotide
  Target: LAMA2; (+) strand; PAM type: YTN; PAM sequence: TTG
gttattttgagatctgaaat

SEQ ID NO: 386158 - DNA, 20 bp, Artificial Sequence
  Description of Artificial Sequence: Synthetic oligonucleotide
  Target: LAMA2; (+) strand; PAM type: YTN; PAM sequence: TTA
ttttgagatctgaaattcat

SEQ ID NO: 386159 - DNA, 20 bp, Artificial Sequence
  Description of Artificial Sequence: Synthetic oligonucleotide
  Target: LAMA2; (+) strand; PAM type: YTN; PAM sequence: TTT
tgagatctgaaattcatgag

SEQ ID NO: 386160 - DNA, 20 bp, Artificial Sequence
  Description of Artificial Sequence: Synthetic oligonucleotide
  Target: LAMA2; (+) strand; PAM type: YTN; PAM sequence: TTT
gagatctgaaattcatgagt

SEQ ID NO: 386161 - DNA, 20 bp, Artificial Sequence
  Description of Artificial Sequence: Synthetic oligonucleotide
  Target: LAMA2; (+) strand; PAM type: YTN; PAM sequence: TTG
agatctgaaattcatgagta

SEQ ID NO: 386162 - DNA, 20 bp, Artificial Sequence
  Description of Artificial Sequence: Synthetic oligonucleotide
  Target: LAMA2; (+) strand; PAM type: YTN; PAM sequence: CTG
aaattcatgagtatagggaa

SEQ ID NO: 386163 - DNA, 20 bp, Artificial Sequence
  Description of Artificial Sequence: Synthetic oligonucleotide
  Target: LAMA2; (+) strand; PAM type: YTN; PAM sequence: TTC
atgagtatagggaagcccag

SEQ ID NO: 386164 - DNA, 20 bp, Artificial Sequence
  Description of Artificial Sequence: Synthetic oligonucleotide
  Target: LAMA2; (+) strand; PAM type: YTN; PAM sequence: TTG
cactcatctctaattataca

SEQ ID NO: 386165 - DNA, 20 bp, Artificial Sequence
  Description of Artificial Sequence: Synthetic oligonucleotide
  Target: LAMA2; (+) strand; PAM type: YTN; PAM sequence: CTC
atctctaattatacaagagg

SEQ ID NO: 386166 - DNA, 20 bp, Artificial Sequence
  Description of Artificial Sequence: Synthetic oligonucleotide
  Target: LAMA2; (+) strand; PAM type: YTN; PAM sequence: CTC
taattatacaagaggactta

SEQ ID NO: 386167 - DNA, 20 bp, Artificial Sequence
  Description of Artificial Sequence: Synthetic oligonucleotide
  Target: LAMA2; (+) strand; PAM type: YTN; PAM sequence: CTA
attatacaagaggacttaac

SEQ ID NO: 386168 - DNA, 20 bp, Artificial Sequence
  Description of Artificial Sequence: Synthetic oligonucleotide
  Target: LAMA2; (+) strand; PAM type: YTN; PAM sequence: TTA
tacaagaggacttaacaaaa

SEQ ID NO: 386169 - DNA, 20 bp, Artificial Sequence
  Description of Artificial Sequence: Synthetic oligonucleotide
  Target: LAMA2; (+) strand; PAM type: YTN; PAM sequence: CTT
aacaaaaaagtttatgatct

SEQ ID NO: 386170 - DNA, 20 bp, Artificial Sequence
  Description of Artificial Sequence: Synthetic oligonucleotide
  Target: LAMA2; (+) strand; PAM type: YTN; PAM sequence: TTA
acaaaaaagtttatgatcta

SEQ ID NO: 386171 - DNA, 20 bp, Artificial Sequence
  Description of Artificial Sequence: Synthetic oligonucleotide
  Target: LAMA2; (+) strand; PAM type: YTN; PAM sequence: TTT
atgatctagagcagtcacag

SEQ ID NO: 386172 - DNA, 20 bp, Artificial Sequence
  Description of Artificial Sequence: Synthetic oligonucleotide
  Target: LAMA2; (+) strand; PAM type: YTN; PAM sequence: TTA
tgatctagagcagtcacaga

SEQ ID NO: 386173 - DNA, 20 bp, Artificial Sequence
  Description of Artificial Sequence: Synthetic oligonucleotide
  Target: LAMA2; (+) strand; PAM type: YTN; PAM sequence: CTA
gagcagtcacagacaaacta

SEQ ID NO: 386174 - DNA, 20 bp, Artificial Sequence
  Description of Artificial Sequence: Synthetic oligonucleotide
  Target: LAMA2; (+) strand; PAM type: YTN; PAM sequence: CTA
tgacccacaggccaaatttg

SEQ ID NO: 386175 - DNA, 20 bp, Artificial Sequence
  Description of Artificial Sequence: Synthetic oligonucleotide
  Target: LAMA2; (+) strand; PAM type: YTN; PAM sequence: TTT
ggcccatttctgattctgta

SEQ ID NO: 386176 - DNA, 20 bp, Artificial Sequence
  Description of Artificial Sequence: Synthetic oligonucleotide
  Target: LAMA2; (+) strand; PAM type: YTN; PAM sequence: TTG
gcccatttctgattctgtat

SEQ ID NO: 386177 - DNA, 20 bp, Artificial Sequence
  Description of Artificial Sequence: Synthetic oligonucleotide
  Target: LAMA2; (+) strand; PAM type: YTN; PAM sequence: TTT
ctgattctgtatggcactca

SEQ ID NO: 386178 - DNA, 20 bp, Artificial Sequence
  Description of Artificial Sequence: Synthetic oligonucleotide
  Target: LAMA2; (+) strand; PAM type: YTN; PAM sequence: TTC
tgattctgtatggcactcaa

SEQ ID NO: 386179 - DNA, 20 bp, Artificial Sequence
  Description of Artificial Sequence: Synthetic oligonucleotide
  Target: LAMA2; (+) strand; PAM type: YTN; PAM sequence: CTG
attctgtatggcactcaatt

SEQ ID NO: 386180 - DNA, 20 bp, Artificial Sequence
  Description of Artificial Sequence: Synthetic oligonucleotide
  Target: LAMA2; (+) strand; PAM type: YTN; PAM sequence: TTC
tgtatggcactcaattaaga

SEQ ID NO: 386181 - DNA, 20 bp, Artificial Sequence
  Description of Artificial Sequence: Synthetic oligonucleotide
  Target: LAMA2; (+) strand; PAM type: YTN; PAM sequence: CTG
tatggcactcaattaagaac

SEQ ID NO: 386182 - DNA, 20 bp, Artificial Sequence
  Description of Artificial Sequence: Synthetic oligonucleotide
  Target: LAMA2; (+) strand; PAM type: YTN; PAM sequence: CTC
aattaagaactgttgttaca

SEQ ID NO: 386183 - DNA, 20 bp, Artificial Sequence
  Description of Artificial Sequence: Synthetic oligonucleotide
  Target: LAMA2; (+) strand; PAM type: YTN; PAM sequence: TTA
agaactgttgttacaggtca

SEQ ID NO: 386184 - DNA, 20 bp, Artificial Sequence
  Description of Artificial Sequence: Synthetic oligonucleotide
  Target: LAMA2; (+) strand; PAM type: YTN; PAM sequence: CTG
ttgttacaggtcagcattta

SEQ ID NO: 386185 - DNA, 20 bp, Artificial Sequence
  Description of Artificial Sequence: Synthetic oligonucleotide
  Target: LAMA2; (+) strand; PAM type: YTN; PAM sequence: TTG
ttacaggtcagcatttacaa

SEQ ID NO: 386186 - DNA, 20 bp, Artificial Sequence
  Description of Artificial Sequence: Synthetic oligonucleotide
  Target: LAMA2; (+) strand; PAM type: YTN; PAM sequence: TTA
caggtcagcatttacaatca

SEQ ID NO: 386187 - DNA, 20 bp, Artificial Sequence
  Description of Artificial Sequence: Synthetic oligonucleotide
  Target: LAMA2; (+) strand; PAM type: YTN; PAM sequence: TTT
acaatcaatttgatgacagg

SEQ ID NO: 386188 - DNA, 20 bp, Artificial Sequence
  Description of Artificial Sequence: Synthetic oligonucleotide
  Target: LAMA2; (+) strand; PAM type: YTN; PAM sequence: TTA
caatcaatttgatgacagga

SEQ ID NO: 386189 - DNA, 20 bp, Artificial Sequence
  Description of Artificial Sequence: Synthetic oligonucleotide
  Target: LAMA2; (+) strand; PAM type: YTN; PAM sequence: TTT
gatgacaggaggcactaagt

SEQ ID NO: 386190 - DNA, 20 bp, Artificial Sequence
  Description of Artificial Sequence: Synthetic oligonucleotide
  Target: LAMA2; (+) strand; PAM type: YTN; PAM sequence: TTG
atgacaggaggcactaagtt

SEQ ID NO: 386191 - DNA, 20 bp, Artificial Sequence
  Description of Artificial Sequence: Synthetic oligonucleotide
  Target: LAMA2; (+) strand; PAM type: YTN; PAM sequence: CTA
agttataacccaaatgaagg

SEQ ID NO: 386192 - DNA, 20 bp, Artificial Sequence
  Description of Artificial Sequence: Synthetic oligonucleotide
  Target: LAMA2; (+) strand; PAM type: YTN; PAM sequence: TTA
taacccaaatgaaggataat

SEQ ID NO: 386193 - DNA, 20 bp, Artificial Sequence
  Description of Artificial Sequence: Synthetic oligonucleotide
  Target: LAMA2; (+) strand; PAM type: YTN; PAM sequence: TTT
caaacctcaggaagaatcca

SEQ ID NO: 386194 - DNA, 20 bp, Artificial Sequence
  Description of Artificial Sequence: Synthetic oligonucleotide
  Target: LAMA2; (+) strand; PAM type: YTN; PAM sequence: TTC
aaacctcaggaagaatccaa

SEQ ID NO: 386195 - DNA, 20 bp, Artificial Sequence
  Description of Artificial Sequence: Synthetic oligonucleotide
  Target: LAMA2; (+) strand; PAM type: YTN; PAM sequence: CTC
aggaagaatccaattcttct

SEQ ID NO: 386196 - DNA, 20 bp, Artificial Sequence
  Description of Artificial Sequence: Synthetic oligonucleotide
  Target: LAMA2; (+) strand; PAM type: YTN; PAM sequence: TTC
ttctcattagtagcctgata

SEQ ID NO: 386197 - DNA, 20 bp, Artificial Sequence
  Description of Artificial Sequence: Synthetic oligonucleotide
  Target: LAMA2; (+) strand; PAM type: YTN; PAM sequence: CTT
ctcattagtagcctgatatt

SEQ ID NO: 386198 - DNA, 20 bp, Artificial Sequence
  Description of Artificial Sequence: Synthetic oligonucleotide
  Target: LAMA2; (+) strand; PAM type: YTN; PAM sequence: TTC
tcattagtagcctgatatta

SEQ ID NO: 386199 - DNA, 20 bp, Artificial Sequence
  Description of Artificial Sequence: Synthetic oligonucleotide
  Target: LAMA2; (+) strand; PAM type: YTN; PAM sequence: CTC
attagtagcctgatattaca

SEQ ID NO: 386200 - DNA, 20 bp, Artificial Sequence
  Description of Artificial Sequence: Synthetic oligonucleotide
  Target: LAMA2; (+) strand; PAM type: YTN; PAM sequence: TTA
gtagcctgatattacaaagt

SEQ ID NO: 386201 - DNA, 20 bp, Artificial Sequence
  Description of Artificial Sequence: Synthetic oligonucleotide
  Target: LAMA2; (+) strand; PAM type: YTN; PAM sequence: CTG
atattacaaagtaatttaac

SEQ ID NO: 386202 - DNA, 20 bp, Artificial Sequence
  Description of Artificial Sequence: Synthetic oligonucleotide
  Target: LAMA2; (+) strand; PAM type: YTN; PAM sequence: TTA
caaagtaatttaacattatt

SEQ ID NO: 386203 - DNA, 20 bp, Artificial Sequence
  Description of Artificial Sequence: Synthetic oligonucleotide
  Target: LAMA2; (+) strand; PAM type: YTN; PAM sequence: TTT
aacattattattattattat

SEQ ID NO: 386204 - DNA, 20 bp, Artificial Sequence
  Description of Artificial Sequence: Synthetic oligonucleotide
  Target: LAMA2; (+) strand; PAM type: YTN; PAM sequence: TTA
acattattattattattatt

SEQ ID NO: 386205 - DNA, 20 bp, Artificial Sequence
  Description of Artificial Sequence: Synthetic oligonucleotide
  Target: LAMA2; (+) strand; PAM type: YTN; PAM sequence: TTA
ttattattattattattaat

SEQ ID NO: 386206 - DNA, 20 bp, Artificial Sequence
  Description of Artificial Sequence: Synthetic oligonucleotide
  Target: LAMA2; (+) strand; PAM type: YTN; PAM sequence: TTA
ttattattattattaatgtt

SEQ ID NO: 386207 - DNA, 20 bp, Artificial Sequence
  Description of Artificial Sequence: Synthetic oligonucleotide
  Target: LAMA2; (+) strand; PAM type: YTN; PAM sequence: TTA
ttattattattaatgttttc

SEQ ID NO: 386208 - DNA, 20 bp, Artificial Sequence
  Description of Artificial Sequence: Synthetic oligonucleotide
  Target: LAMA2; (+) strand; PAM type: YTN; PAM sequence: TTA
ttattattaatgttttcaat

SEQ ID NO: 386209 - DNA, 20 bp, Artificial Sequence
  Description of Artificial Sequence: Synthetic oligonucleotide
  Target: LAMA2; (+) strand; PAM type: YTN; PAM sequence: TTA
ttattaatgttttcaattcc

SEQ ID NO: 386210 - DNA, 20 bp, Artificial Sequence
  Description of Artificial Sequence: Synthetic oligonucleotide
  Target: LAMA2; (+) strand; PAM type: YTN; PAM sequence: TTA
ttaatgttttcaattccatc

SEQ ID NO: 386211 - DNA, 20 bp, Artificial Sequence
  Description of Artificial Sequence: Synthetic oligonucleotide
  Target: LAMA2; (+) strand; PAM type: YTN; PAM sequence: TTA
atgttttcaattccatcaac

SEQ ID NO: 386212 - DNA, 20 bp, Artificial Sequence
  Description of Artificial Sequence: Synthetic oligonucleotide
  Target: LAMA2; (+) strand; PAM type: YTN; PAM sequence: TTT
tcaattccatcaacaacagc

SEQ ID NO: 386213 - DNA, 20 bp, Artificial Sequence
  Description of Artificial Sequence: Synthetic oligonucleotide
  Target: LAMA2; (+) strand; PAM type: YTN; PAM sequence: TTT
caattccatcaacaacagca

SEQ ID NO: 386214 - DNA, 20 bp, Artificial Sequence
  Description of Artificial Sequence: Synthetic oligonucleotide
  Target: LAMA2; (+) strand; PAM type: YTN; PAM sequence: TTC
aattccatcaacaacagcag

SEQ ID NO: 386215 - DNA, 20 bp, Artificial Sequence
  Description of Artificial Sequence: Synthetic oligonucleotide
  Target: LAMA2; (+) strand; PAM type: YTN; PAM sequence: TTC
catcaacaacagcagaatgc

SEQ ID NO: 386216 - DNA, 20 bp, Artificial Sequence
  Description of Artificial Sequence: Synthetic oligonucleotide
  Target: LAMA2; (+) strand; PAM type: YTN; PAM sequence: CTT
tagaattttatttctttttc

SEQ ID NO: 386217 - DNA, 20 bp, Artificial Sequence
  Description of Artificial Sequence: Synthetic oligonucleotide
  Target: LAMA2; (+) strand; PAM type: YTN; PAM sequence: TTT
agaattttatttctttttca

SEQ ID NO: 386218 - DNA, 20 bp, Artificial Sequence
  Description of Artificial Sequence: Synthetic oligonucleotide
  Target: LAMA2; (+) strand; PAM type: YTN; PAM sequence: TTA
gaattttatttctttttcac

SEQ ID NO: 386219 - DNA, 20 bp, Artificial Sequence
  Description of Artificial Sequence: Synthetic oligonucleotide
  Target: LAMA2; (+) strand; PAM type: YTN; PAM sequence: TTT
tatttctttttcacggcata

SEQ ID NO: 386220 - DNA, 20 bp, Artificial Sequence
  Description of Artificial Sequence: Synthetic oligonucleotide
  Target: LAMA2; (+) strand; PAM type: YTN; PAM sequence: TTT
atttctttttcacggcataa

SEQ ID NO: 386221 - DNA, 20 bp, Artificial Sequence
  Description of Artificial Sequence: Synthetic oligonucleotide
  Target: LAMA2; (+) strand; PAM type: YTN; PAM sequence: TTA
tttctttttcacggcataat

SEQ ID NO: 386222 - DNA, 20 bp, Artificial Sequence
  Description of Artificial Sequence: Synthetic oligonucleotide
  Target: LAMA2; (+) strand; PAM type: YTN; PAM sequence: TTT
ctttttcacggcataatctt

SEQ ID NO: 386223 - DNA, 20 bp, Artificial Sequence
  Description of Artificial Sequence: Synthetic oligonucleotide
  Target: LAMA2; (+) strand; PAM type: YTN; PAM sequence: TTC
tttttcacggcataatcttg

SEQ ID NO: 386224 - DNA, 20 bp, Artificial Sequence
  Description of Artificial Sequence: Synthetic oligonucleotide
  Target: LAMA2; (+) strand; PAM type: YTN; PAM sequence: CTT
tttcacggcataatcttgat

SEQ ID NO: 386225 - DNA, 20 bp, Artificial Sequence
  Description of Artificial Sequence: Synthetic oligonucleotide
  Target: LAMA2; (+) strand; PAM type: YTN; PAM sequence: TTT
ttcacggcataatcttgatt

SEQ ID NO: 386226 - DNA, 20 bp, Artificial Sequence
  Description of Artificial Sequence: Synthetic oligonucleotide
  Target: LAMA2; (+) strand; PAM type: YTN; PAM sequence: TTT
tcacggcataatcttgattt

SEQ ID NO: 386227 - DNA, 20 bp, Artificial Sequence
  Description of Artificial Sequence: Synthetic oligonucleotide
  Target: LAMA2; (+) strand; PAM type: YTN; PAM sequence: TTT
cacggcataatcttgatttt

SEQ ID NO: 386228 - DNA, 20 bp, Artificial Sequence
  Description of Artificial Sequence: Synthetic oligonucleotide
  Target: LAMA2; (+) strand; PAM type: YTN; PAM sequence: TTC
acggcataatcttgattttt

SEQ ID NO: 386229 - DNA, 20 bp, Artificial Sequence
  Description of Artificial Sequence: Synthetic oligonucleotide
  Target: LAMA2; (+) strand; PAM type: YTN; PAM sequence: CTT
gatttttcctatgtcctgca

SEQ ID NO: 386230 - DNA, 20 bp, Artificial Sequence
  Description of Artificial Sequence: Synthetic oligonucleotide
  Target: LAMA2; (+) strand; PAM type: YTN; PAM sequence: TTG
atttttcctatgtcctgcaa

SEQ ID NO: 386231 - DNA, 20 bp, Artificial Sequence
  Description of Artificial Sequence: Synthetic oligonucleotide
  Target: LAMA2; (+) strand; PAM type: YTN; PAM sequence: TTT
ttcctatgtcctgcaaagcc

SEQ ID NO: 386232 - DNA, 20 bp, Artificial Sequence
  Description of Artificial Sequence: Synthetic oligonucleotide
  Target: LAMA2; (+) strand; PAM type: YTN; PAM sequence: TTT
tcctatgtcctgcaaagcct

SEQ ID NO: 386233 - DNA, 20 bp, Artificial Sequence
  Description of Artificial Sequence: Synthetic oligonucleotide
  Target: LAMA2; (+) strand; PAM type: YTN; PAM sequence: TTT
cctatgtcctgcaaagccta

SEQ ID NO: 386234 - DNA, 20 bp, Artificial Sequence
  Description of Artificial Sequence: Synthetic oligonucleotide
  Target: LAMA2; (+) strand; PAM type: YTN; PAM sequence: TTC
ctatgtcctgcaaagcctac

SEQ ID NO: 386235 - DNA, 20 bp, Artificial Sequence
  Description of Artificial Sequence: Synthetic oligonucleotide
  Target: LAMA2; (+) strand; PAM type: YTN; PAM sequence: CTA
tgtcctgcaaagcctactgt

SEQ ID NO: 386236 - DNA, 20 bp, Artificial Sequence
  Description of Artificial Sequence: Synthetic oligonucleotide
  Target: LAMA2; (+) strand; PAM type: YTN; PAM sequence: CTG
caaagcctactgtttactat

SEQ ID NO: 386237 - DNA, 20 bp, Artificial Sequence
  Description of Artificial Sequence: Synthetic oligonucleotide
  Target: LAMA2; (+) strand; PAM type: YTN; PAM sequence: CTA
ctgtttactatctgaccctt

SEQ ID NO: 386238 - DNA, 20 bp, Artificial Sequence
  Description of Artificial Sequence: Synthetic oligonucleotide
  Target: LAMA2; (+) strand; PAM type: YTN; PAM sequence: CTG
tttactatctgaccctttac

SEQ ID NO: 386239 - DNA, 20 bp, Artificial Sequence
  Description of Artificial Sequence: Synthetic oligonucleotide
  Target: LAMA2; (+) strand; PAM type: YTN; PAM sequence: TTT
actatctgaccctttacagg

SEQ ID NO: 386240 - DNA, 20 bp, Artificial Sequence
  Description of Artificial Sequence: Synthetic oligonucleotide
  Target: LAMA2; (+) strand; PAM type: YTN; PAM sequence: TTA
ctatctgaccctttacagga

SEQ ID NO: 386241 - DNA, 20 bp, Artificial Sequence
  Description of Artificial Sequence: Synthetic oligonucleotide
  Target: LAMA2; (+) strand; PAM type: YTN; PAM sequence: CTA
tctgaccctttacaggaaaa

SEQ ID NO: 386242 - DNA, 20 bp, Artificial Sequence
  Description of Artificial Sequence: Synthetic oligonucleotide
  Target: LAMA2; (+) strand; PAM type: YTN; PAM sequence: CTG
accctttacaggaaaagtta

SEQ ID NO: 386243 - DNA, 20 bp, Artificial Sequence
  Description of Artificial Sequence: Synthetic oligonucleotide
  Target: LAMA2; (+) strand; PAM type: YTN; PAM sequence: CTT
tacaggaaaagttaactaat

SEQ ID NO: 386244 - DNA, 20 bp, Artificial Sequence
  Description of Artificial Sequence: Synthetic oligonucleotide
  Target: LAMA2; (+) strand; PAM type: YTN; PAM sequence: TTT
acaggaaaagttaactaatg

SEQ ID NO: 386245 - DNA, 20 bp, Artificial Sequence
  Description of Artificial Sequence: Synthetic oligonucleotide
  Target: LAMA2; (+) strand; PAM type: YTN; PAM sequence: TTA
caggaaaagttaactaatgt

SEQ ID NO: 386246 - DNA, 20 bp, Artificial Sequence
  Description of Artificial Sequence: Synthetic oligonucleotide
  Target: LAMA2; (+) strand; PAM type: YTN; PAM sequence: TTA
actaatgtatggactcttgc

SEQ ID NO: 386247 - DNA, 20 bp, Artificial Sequence
  Description of Artificial Sequence: Synthetic oligonucleotide
  Target: LAMA2; (+) strand; PAM type: YTN; PAM sequence: CTA
atgtatggactcttgctatc

SEQ ID NO: 386248 - DNA, 20 bp, Artificial Sequence
  Description of Artificial Sequence: Synthetic oligonucleotide
  Target: LAMA2; (+) strand; PAM type: YTN; PAM sequence: CTC
ttgctatcagttttgttgca

SEQ ID NO: 386249 - DNA, 20 bp, Artificial Sequence
  Description of Artificial Sequence: Synthetic oligonucleotide
  Target: LAMA2; (+) strand; PAM type: YTN; PAM sequence: CTT
gctatcagttttgttgcatc

SEQ ID NO: 386250 - DNA, 20 bp, Artificial Sequence
  Description of Artificial Sequence: Synthetic oligonucleotide
  Target: LAMA2; (+) strand; PAM type: YTN; PAM sequence: TTG
ctatcagttttgttgcatca

SEQ ID NO: 386251 - DNA, 20 bp, Artificial Sequence
  Description of Artificial Sequence: Synthetic oligonucleotide
  Target: LAMA2; (+) strand; PAM type: YTN; PAM sequence: CTA
tcagttttgttgcatcaaaa

SEQ ID NO: 386252 - DNA, 20 bp, Artificial Sequence
  Description of Artificial Sequence: Synthetic oligonucleotide
  Target: LAMA2; (+) strand; PAM type: YTN; PAM sequence: TTT
tgttgcatcaaaacaaaaga

SEQ ID NO: 386253 - DNA, 20 bp, Artificial Sequence
  Description of Artificial Sequence: Synthetic oligonucleotide
  Target: LAMA2; (+) strand; PAM type: YTN; PAM sequence: TTT
gttgcatcaaaacaaaagac

SEQ ID NO: 386254 - DNA, 20 bp, Artificial Sequence
  Description of Artificial Sequence: Synthetic oligonucleotide
  Target: LAMA2; (+) strand; PAM type: YTN; PAM sequence: TTG
ttgcatcaaaacaaaagacc

SEQ ID NO: 386255 - DNA, 20 bp, Artificial Sequence
  Description of Artificial Sequence: Synthetic oligonucleotide
  Target: LAMA2; (+) strand; PAM type: YTN; PAM sequence: TTG
catcaaaacaaaagaccaca

SEQ ID NO: 386256 - DNA, 20 bp, Artificial Sequence
  Description of Artificial Sequence: Synthetic oligonucleotide
  Target: LAMA2; (+) strand; PAM type: YTN; PAM sequence: CTT
gctattaacctcttttgctt

SEQ ID NO: 386257 - DNA, 20 bp, Artificial Sequence
  Description of Artificial Sequence: Synthetic oligonucleotide
  Target: LAMA2; (+) strand; PAM type: YTN; PAM sequence: TTG
ctattaacctcttttgcttt

SEQ ID NO: 386258 - DNA, 20 bp, Artificial Sequence
  Description of Artificial Sequence: Synthetic oligonucleotide
  Target: LAMA2; (+) strand; PAM type: YTN; PAM sequence: CTA
ttaacctcttttgctttgtc

SEQ ID NO: 386259 - DNA, 20 bp, Artificial Sequence
  Description of Artificial Sequence: Synthetic oligonucleotide
  Target: LAMA2; (+) strand; PAM type: YTN; PAM sequence: TTA
acctcttttgctttgtcact

SEQ ID NO: 386260 - DNA, 20 bp, Artificial Sequence
  Description of Artificial Sequence: Synthetic oligonucleotide
  Target: LAMA2; (+) strand; PAM type: YTN; PAM sequence: CTC
ttttgctttgtcactgtttc

SEQ ID NO: 386261 - DNA, 20 bp, Artificial Sequence
  Description of Artificial Sequence: Synthetic oligonucleotide
  Target: LAMA2; (+) strand; PAM type: YTN; PAM sequence: CTT
ttgctttgtcactgtttcaa

SEQ ID NO: 386262 - DNA, 20 bp, Artificial Sequence
  Description of Artificial Sequence: Synthetic oligonucleotide
  Target: LAMA2; (+) strand; PAM type: YTN; PAM sequence: TTT
tgctttgtcactgtttcaat

SEQ ID NO: 386263 - DNA, 20 bp, Artificial Sequence
  Description of Artificial Sequence: Synthetic oligonucleotide
  Target: LAMA2; (+) strand; PAM type: YTN; PAM sequence: TTT
gctttgtcactgtttcaatt

SEQ ID NO: 386264 - DNA, 20 bp, Artificial Sequence
  Description of Artificial Sequence: Synthetic oligonucleotide
  Target: LAMA2; (+) strand; PAM type: YTN; PAM sequence: TTG
ctttgtcactgtttcaattc

SEQ ID NO: 386265 - DNA, 20 bp, Artificial Sequence
  Description of Artificial Sequence: Synthetic oligonucleotide
  Target: LAMA2; (+) strand; PAM type: YTN; PAM sequence: CTT
tgtcactgtttcaattcagg

SEQ ID NO: 386266 - DNA, 20 bp, Artificial Sequence
  Description of Artificial Sequence: Synthetic oligonucleotide
  Target: LAMA2; (+) strand; PAM type: YTN; PAM sequence: TTT
gtcactgtttcaattcaggt

SEQ ID NO: 386267 - DNA, 20 bp, Artificial Sequence
  Description of Artificial Sequence: Synthetic oligonucleotide
  Target: LAMA2; (+) strand; PAM type: YTN; PAM sequence: TTG
tcactgtttcaattcaggtg

SEQ ID NO: 386268 - DNA, 20 bp, Artificial Sequence
  Description of Artificial Sequence: Synthetic oligonucleotide
  Target: LAMA2; (+) strand; PAM type: YTN; PAM sequence: CTG
tttcaattcaggtgtgcccc

SEQ ID NO: 386269 - DNA, 20 bp, Artificial Sequence
  Description of Artificial Sequence: Synthetic oligonucleotide
  Target: LAMA2; (+) strand; PAM type: YTN; PAM sequence: TTT
caattcaggtgtgcccctgg

SEQ ID NO: 386270 - DNA, 20 bp, Artificial Sequence
  Description of Artificial Sequence: Synthetic oligonucleotide
  Target: LAMA2; (+) strand; PAM type: YTN; PAM sequence: TTC
aattcaggtgtgcccctggc

SEQ ID NO: 386271 - DNA, 20 bp, Artificial Sequence
  Description of Artificial Sequence: Synthetic oligonucleotide
  Target: LAMA2; (+) strand; PAM type: YTN; PAM sequence: TTC
aggtgtgcccctggctatac

SEQ ID NO: 386272 - DNA, 20 bp, Artificial Sequence
  Description of Artificial Sequence: Synthetic oligonucleotide
  Target: LAMA2; (+) strand; PAM type: YTN; PAM sequence: CTG
gctatactggcagtccaggc

SEQ ID NO: 386273 - DNA, 20 bp, Artificial Sequence
  Description of Artificial Sequence: Synthetic oligonucleotide
  Target: LAMA2; (+) strand; PAM type: YTN; PAM sequence: CTA
tactggcagtccaggcaacc

SEQ ID NO: 386274 - DNA, 20 bp, Artificial Sequence
  Description of Artificial Sequence: Synthetic oligonucleotide
  Target: LAMA2; (+) strand; PAM type: YTN; PAM sequence: CTG
gcagtccaggcaaccctgga

SEQ ID NO: 386275 - DNA, 20 bp, Artificial Sequence
  Description of Artificial Sequence: Synthetic oligonucleotide
  Target: LAMA2; (+) strand; PAM type: YTN; PAM sequence: CTG
gaggctcctgccaagaatgt

SEQ ID NO: 386276 - DNA, 20 bp, Artificial Sequence
  Description of Artificial Sequence: Synthetic oligonucleotide
  Target: LAMA2; (+) strand; PAM type: YTN; PAM sequence: CTC
ctgccaagaatgtgagtgtg

SEQ ID NO: 386277 - DNA, 20 bp, Artificial Sequence
  Description of Artificial Sequence: Synthetic oligonucleotide
  Target: LAMA2; (+) strand; PAM type: YTN; PAM sequence: CTG
ccaagaatgtgagtgtgatc

SEQ ID NO: 386278 - DNA, 20 bp, Artificial Sequence
  Description of Artificial Sequence: Synthetic oligonucleotide
  Target: LAMA2; (+) strand; PAM type: YTN; PAM sequence: CTA
tggctcactgcctgtgccct

SEQ ID NO: 386279 - DNA, 20 bp, Artificial Sequence
  Description of Artificial Sequence: Synthetic oligonucleotide
  Target: LAMA2; (+) strand; PAM type: YTN; PAM sequence: CTC
actgcctgtgccctgtgacc

SEQ ID NO: 386280 - DNA, 20 bp, Artificial Sequence
  Description of Artificial Sequence: Synthetic oligonucleotide
  Target: LAMA2; (+) strand; PAM type: YTN; PAM sequence: CTG
cctgtgccctgtgaccctgt

SEQ ID NO: 386281 - DNA, 20 bp, Artificial Sequence
  Description of Artificial Sequence: Synthetic oligonucleotide
  Target: LAMA2; (+) strand; PAM type: YTN; PAM sequence: CTG
tgccctgtgaccctgtcaca

SEQ ID NO: 386282 - DNA, 20 bp, Artificial Sequence
  Description of Artificial Sequence: Synthetic oligonucleotide
  Target: LAMA2; (+) strand; PAM type: YTN; PAM sequence: CTG
tgaccctgtcacaggattct

SEQ ID NO: 386283 - DNA, 20 bp, Artificial Sequence
  Description of Artificial Sequence: Synthetic oligonucleotide
  Target: LAMA2; (+) strand; PAM type: YTN; PAM sequence: CTG
tcacaggattctgcacgtgc

SEQ ID NO: 386284 - DNA, 20 bp, Artificial Sequence
  Description of Artificial Sequence: Synthetic oligonucleotide
  Target: LAMA2; (+) strand; PAM type: YTN; PAM sequence: TTC
tgcacgtgccgacctggagc

SEQ ID NO: 386285 - DNA, 20 bp, Artificial Sequence
  Description of Artificial Sequence: Synthetic oligonucleotide
  Target: LAMA2; (+) strand; PAM type: YTN; PAM sequence: CTG
cacgtgccgacctggagcca

SEQ ID NO: 386286 - DNA, 20 bp, Artificial Sequence
  Description of Artificial Sequence: Synthetic oligonucleotide
  Target: LAMA2; (+) strand; PAM type: YTN; PAM sequence: CTG
gagccacgggaaggaagtgt

SEQ ID NO: 386287 - DNA, 20 bp, Artificial Sequence
  Description of Artificial Sequence: Synthetic oligonucleotide
  Target: LAMA2; (+) strand; PAM type: YTN; PAM sequence: CTG
caagcactggcatgcacgcg

SEQ ID NO: 386288 - DNA, 20 bp, Artificial Sequence
  Description of Artificial Sequence: Synthetic oligonucleotide
  Target: LAMA2; (+) strand; PAM type: YTN; PAM sequence: CTG
gcatgcacgcgagggctggg

SEQ ID NO: 386289 - DNA, 20 bp, Artificial Sequence
  Description of Artificial Sequence: Synthetic oligonucleotide
  Target: LAMA2; (+) strand; PAM type: YTN; PAM sequence: CTG
ggagtgtgtttgtacgtata

SEQ ID NO: 386290 - DNA, 20 bp, Artificial Sequence
  Description of Artificial Sequence: Synthetic oligonucleotide
  Target: LAMA2; (+) strand; PAM type: YTN; PAM sequence: TTT
gtacgtatactaactttgct

SEQ ID NO: 386291 - DNA, 20 bp, Artificial Sequence
  Description of Artificial Sequence: Synthetic oligonucleotide
  Target: LAMA2; (+) strand; PAM type: YTN; PAM sequence: TTG
tacgtatactaactttgctg

SEQ ID NO: 386292 - DNA, 20 bp, Artificial Sequence
  Description of Artificial Sequence: Synthetic oligonucleotide
  Target: LAMA2; (+) strand; PAM type: YTN; PAM sequence: CTA
actttgctgttagttttgga

SEQ ID NO: 386293 - DNA, 20 bp, Artificial Sequence
  Description of Artificial Sequence: Synthetic oligonucleotide
  Target: LAMA2; (+) strand; PAM type: YTN; PAM sequence: CTT
tgctgttagttttggaggcc

SEQ ID NO: 386294 - DNA, 20 bp, Artificial Sequence
  Description of Artificial Sequence: Synthetic oligonucleotide
  Target: LAMA2; (+) strand; PAM type: YTN; PAM sequence: TTT
gctgttagttttggaggcct

SEQ ID NO: 386295 - DNA, 20 bp, Artificial Sequence
  Description of Artificial Sequence: Synthetic oligonucleotide
  Target: LAMA2; (+) strand; PAM type: YTN; PAM sequence: TTG
ctgttagttttggaggcctt

SEQ ID NO: 386296 - DNA, 20 bp, Artificial Sequence
  Description of Artificial Sequence: Synthetic oligonucleotide
  Target: LAMA2; (+) strand; PAM type: YTN; PAM sequence: CTG
ttagttttggaggccttgat

SEQ ID NO: 386297 - DNA, 20 bp, Artificial Sequence
  Description of Artificial Sequence: Synthetic oligonucleotide
  Target: LAMA2; (+) strand; PAM type: YTN; PAM sequence: TTA
gttttggaggccttgattcc

SEQ ID NO: 386298 - DNA, 20 bp, Artificial Sequence
  Description of Artificial Sequence: Synthetic oligonucleotide
  Target: LAMA2; (+) strand; PAM type: YTN; PAM sequence: TTT
tggaggccttgattccagtt

SEQ ID NO: 386299 - DNA, 20 bp, Artificial Sequence
  Description of Artificial Sequence: Synthetic oligonucleotide
  Target: LAMA2; (+) strand; PAM type: YTN; PAM sequence: TTT
ggaggccttgattccagttc

SEQ ID NO: 386300 - DNA, 20 bp, Artificial Sequence
  Description of Artificial Sequence: Synthetic oligonucleotide
  Target: LAMA2; (+) strand; PAM type: YTN; PAM sequence: TTG
gaggccttgattccagttct

SEQ ID NO: 386301 - DNA, 20 bp, Artificial Sequence
  Description of Artificial Sequence: Synthetic oligonucleotide
  Target: LAMA2; (+) strand; PAM type: YTN; PAM sequence: CTT
gattccagttctgtctcatt

SEQ ID NO: 386302 - DNA, 20 bp, Artificial Sequence
  Description of Artificial Sequence: Synthetic oligonucleotide
  Target: LAMA2; (+) strand; PAM type: YTN; PAM sequence: TTG
attccagttctgtctcattt

SEQ ID NO: 386303 - DNA, 20 bp, Artificial Sequence
  Description of Artificial Sequence: Synthetic oligonucleotide
  Target: LAMA2; (+) strand; PAM type: YTN; PAM sequence: TTC
cagttctgtctcatttccaa

SEQ ID NO: 386304 - DNA, 20 bp, Artificial Sequence
  Description of Artificial Sequence: Synthetic oligonucleotide
  Target: LAMA2; (+) strand; PAM type: YTN; PAM sequence: TTC
tgtctcatttccaatgagaa

SEQ ID NO: 386305 - DNA, 20 bp, Artificial Sequence
  Description of Artificial Sequence: Synthetic oligonucleotide
  Target: LAMA2; (+) strand; PAM type: YTN; PAM sequence: CTG
tctcatttccaatgagaaag

SEQ ID NO: 386306 - DNA, 20 bp, Artificial Sequence
  Description of Artificial Sequence: Synthetic oligonucleotide
  Target: LAMA2; (+) strand; PAM type: YTN; PAM sequence: CTC
atttccaatgagaaagagtg

SEQ ID NO: 386307 - DNA, 20 bp, Artificial Sequence
  Description of Artificial Sequence: Synthetic oligonucleotide
  Target: LAMA2; (+) strand; PAM type: YTN; PAM sequence: TTT
ccaatgagaaagagtgactc

SEQ ID NO: 386308 - DNA, 20 bp, Artificial Sequence
  Description of Artificial Sequence: Synthetic oligonucleotide
  Target: LAMA2; (+) strand; PAM type: YTN; PAM sequence: TTC
caatgagaaagagtgactct

SEQ ID NO: 386309 - DNA, 20 bp, Artificial Sequence
  Description of Artificial Sequence: Synthetic oligonucleotide
  Target: LAMA2; (+) strand; PAM type: YTN; PAM sequence: CTC
tccccgcccgcctttttttt

SEQ ID NO: 386310 - DNA, 20 bp, Artificial Sequence
  Description of Artificial Sequence: Synthetic oligonucleotide
  Target: LAMA2; (+) strand; PAM type: YTN; PAM sequence: CTC
cccgcccgcctttttttttt

SEQ ID NO: 386311 - DNA, 20 bp, Artificial Sequence
  Description of Artificial Sequence: Synthetic oligonucleotide
  Target: LAMA2; (+) strand; PAM type: YTN; PAM sequence: CTT
tttttttttttttgcaatag

SEQ ID NO: 386312 - DNA, 20 bp, Artificial Sequence
  Description of Artificial Sequence: Synthetic oligonucleotide
  Target: LAMA2; (+) strand; PAM type: YTN; PAM sequence: TTT
ttttttttttttgcaatagt

SEQ ID NO: 386313 - DNA, 20 bp, Artificial Sequence
  Description of Artificial Sequence: Synthetic oligonucleotide
  Target: LAMA2; (+) strand; PAM type: YTN; PAM sequence: TTT
tttttttttttgcaatagtt

SEQ ID NO: 386314 - DNA, 20 bp, Artificial Sequence
  Description of Artificial Sequence: Synthetic oligonucleotide
  Target: LAMA2; (+) strand; PAM type: YTN; PAM sequence: TTT
ttttttttttgcaatagtta

SEQ ID NO: 386315 - DNA, 20 bp, Artificial Sequence
  Description of Artificial Sequence: Synthetic oligonucleotide
  Target: LAMA2; (+) strand; PAM type: YTN; PAM sequence: TTT
tttttttttgcaatagttat

SEQ ID NO: 386316 - DNA, 20 bp, Artificial Sequence
  Description of Artificial Sequence: Synthetic oligonucleotide
  Target: LAMA2; (+) strand; PAM type: YTN; PAM sequence: TTT
ttttttttgcaatagttata

SEQ ID NO: 386317 - DNA, 20 bp, Artificial Sequence
  Description of Artificial Sequence: Synthetic oligonucleotide
  Target: LAMA2; (+) strand; PAM type: YTN; PAM sequence: TTT
tttttttgcaatagttatac

SEQ ID NO: 386318 - DNA, 20 bp, Artificial Sequence
  Description of Artificial Sequence: Synthetic oligonucleotide
  Target: LAMA2; (+) strand; PAM type: YTN; PAM sequence: TTT
ttttttgcaatagttatact

SEQ ID NO: 386319 - DNA, 20 bp, Artificial Sequence
  Description of Artificial Sequence: Synthetic oligonucleotide
  Target: LAMA2; (+) strand; PAM type: YTN; PAM sequence: TTT
tttttgcaatagttatactc

SEQ ID NO: 386320 - DNA, 20 bp, Artificial Sequence
  Description of Artificial Sequence: Synthetic oligonucleotide
  Target: LAMA2; (+) strand; PAM type: YTN; PAM sequence: TTT
ttttgcaatagttatactct

SEQ ID NO: 386321 - DNA, 20 bp, Artificial Sequence
  Description of Artificial Sequence: Synthetic oligonucleotide
  Target: LAMA2; (+) strand; PAM type: YTN; PAM sequence: TTT
tttgcaatagttatactctt

SEQ ID NO: 386322 - DNA, 20 bp, Artificial Sequence
  Description of Artificial Sequence: Synthetic oligonucleotide
  Target: LAMA2; (+) strand; PAM type: YTN; PAM sequence: TTT
ttgcaatagttatactcttc

SEQ ID NO: 386323 - DNA, 20 bp, Artificial Sequence
  Description of Artificial Sequence: Synthetic oligonucleotide
  Target: LAMA2; (+) strand; PAM type: YTN; PAM sequence: TTT
tgcaatagttatactcttca

SEQ ID NO: 386324 - DNA, 20 bp, Artificial Sequence
  Description of Artificial Sequence: Synthetic oligonucleotide
  Target: LAMA2; (+) strand; PAM type: YTN; PAM sequence: TTT
gcaatagttatactcttcat

SEQ ID NO: 386325 - DNA, 20 bp, Artificial Sequence
  Description of Artificial Sequence: Synthetic oligonucleotide
  Target: LAMA2; (+) strand; PAM type: YTN; PAM sequence: TTG
caatagttatactcttcatt

SEQ ID NO: 386326 - DNA, 20 bp, Artificial Sequence
  Description of Artificial Sequence: Synthetic oligonucleotide
  Target: LAMA2; (+) strand; PAM type: YTN; PAM sequence: TTA
tactcttcattctttctgac

SEQ ID NO: 386327 - DNA, 20 bp, Artificial Sequence
  Description of Artificial Sequence: Synthetic oligonucleotide
  Target: LAMA2; (+) strand; PAM type: YTN; PAM sequence: CTC
ttcattctttctgacactat

SEQ ID NO: 386328 - DNA, 20 bp, Artificial Sequence
  Description of Artificial Sequence: Synthetic oligonucleotide
  Target: LAMA2; (+) strand; PAM type: YTN; PAM sequence: CTT
cattctttctgacactatct

SEQ ID NO: 386329 - DNA, 20 bp, Artificial Sequence
  Description of Artificial Sequence: Synthetic oligonucleotide
  Target: LAMA2; (+) strand; PAM type: YTN; PAM sequence: TTC
attctttctgacactatcta

SEQ ID NO: 386330 - DNA, 20 bp, Artificial Sequence
  Description of Artificial Sequence: Synthetic oligonucleotide
  Target: LAMA2; (+) strand; PAM type: YTN; PAM sequence: TTC
tttctgacactatctatcca

SEQ ID NO: 386331 - DNA, 20 bp, Artificial Sequence
  Description of Artificial Sequence: Synthetic oligonucleotide
  Target: LAMA2; (+) strand; PAM type: YTN; PAM sequence: CTT
tctgacactatctatccacc

SEQ ID NO: 386332 - DNA, 20 bp, Artificial Sequence
  Description of Artificial Sequence: Synthetic oligonucleotide
  Target: LAMA2; (+) strand; PAM type: YTN; PAM sequence: TTT
ctgacactatctatccacct

SEQ ID NO: 386333 - DNA, 20 bp, Artificial Sequence
  Description of Artificial Sequence: Synthetic oligonucleotide
  Target: LAMA2; (+) strand; PAM type: YTN; PAM sequence: TTC
tgacactatctatccacctt

SEQ ID NO: 386334 - DNA, 20 bp, Artificial Sequence
  Description of Artificial Sequence: Synthetic oligonucleotide
  Target: LAMA2; (+) strand; PAM type: YTN; PAM sequence: CTG
acactatctatccaccttct

SEQ ID NO: 386335 - DNA, 20 bp, Artificial Sequence
  Description of Artificial Sequence: Synthetic oligonucleotide
  Target: LAMA2; (+) strand; PAM type: YTN; PAM sequence: CTA
tctatccaccttctgctgtt

SEQ ID NO: 386336 - DNA, 20 bp, Artificial Sequence
  Description of Artificial Sequence: Synthetic oligonucleotide
  Target: LAMA2; (+) strand; PAM type: YTN; PAM sequence: CTA
tccaccttctgctgttcacc

SEQ ID NO: 386337 - DNA, 20 bp, Artificial Sequence
  Description of Artificial Sequence: Synthetic oligonucleotide
  Target: LAMA2; (+) strand; PAM type: YTN; PAM sequence: CTT
ctgctgttcacctgctgatt

SEQ ID NO: 386338 - DNA, 20 bp, Artificial Sequence
  Description of Artificial Sequence: Synthetic oligonucleotide
  Target: LAMA2; (+) strand; PAM type: YTN; PAM sequence: TTC
tgctgttcacctgctgattg

SEQ ID NO: 386339 - DNA, 20 bp, Artificial Sequence
  Description of Artificial Sequence: Synthetic oligonucleotide
  Target: LAMA2; (+) strand; PAM type: YTN; PAM sequence: CTG
ctgttcacctgctgattgcg

SEQ ID NO: 386340 - DNA, 20 bp, Artificial Sequence
  Description of Artificial Sequence: Synthetic oligonucleotide
  Target: LAMA2; (+) strand; PAM type: YTN; PAM sequence: CTG
ttcacctgctgattgcgtgt

SEQ ID NO: 386341 - DNA, 20 bp, Artificial Sequence
  Description of Artificial Sequence: Synthetic oligonucleotide
  Target: LAMA2; (+) strand; PAM type: YTN; PAM sequence: TTC
acctgctgattgcgtgtcca

SEQ ID NO: 386342 - DNA, 20 bp, Artificial Sequence
  Description of Artificial Sequence: Synthetic oligonucleotide
  Target: LAMA2; (+) strand; PAM type: YTN; PAM sequence: CTG
ctgattgcgtgtccatcctg

SEQ ID NO: 386343 - DNA, 20 bp, Artificial Sequence
  Description of Artificial Sequence: Synthetic oligonucleotide
  Target: LAMA2; (+) strand; PAM type: YTN; PAM sequence: CTG
attgcgtgtccatcctgctg

SEQ ID NO: 386344 - DNA, 20 bp, Artificial Sequence
  Description of Artificial Sequence: Synthetic oligonucleotide
  Target: LAMA2; (+) strand; PAM type: YTN; PAM sequence: TTG
cgtgtccatcctgctgagcc

SEQ ID NO: 386345 - DNA, 20 bp, Artificial Sequence
  Description of Artificial Sequence: Synthetic oligonucleotide
  Target: LAMA2; (+) strand; PAM type: YTN; PAM sequence: CTG
ctgagccaagaacagctgag

SEQ ID NO: 386346 - DNA, 20 bp, Artificial Sequence
  Description of Artificial Sequence: Synthetic oligonucleotide
  Target: LAMA2; (+) strand; PAM type: YTN; PAM sequence: CTG
agccaagaacagctgagaaa

SEQ ID NO: 386347 - DNA, 20 bp, Artificial Sequence
  Description of Artificial Sequence: Synthetic oligonucleotide
  Target: LAMA2; (+) strand; PAM type: YTN; PAM sequence: CTG
agaaaatcctcagtgtgctt

SEQ ID NO: 386348 - DNA, 20 bp, Artificial Sequence
  Description of Artificial Sequence: Synthetic oligonucleotide
  Target: LAMA2; (+) strand; PAM type: YTN; PAM sequence: CTC
agtgtgctttagtcagttca

SEQ ID NO: 386349 - DNA, 20 bp, Artificial Sequence
  Description of Artificial Sequence: Synthetic oligonucleotide
  Target: LAMA2; (+) strand; PAM type: YTN; PAM sequence: CTT
tagtcagttcattgaaagac

SEQ ID NO: 386350 - DNA, 20 bp, Artificial Sequence
  Description of Artificial Sequence: Synthetic oligonucleotide
  Target: LAMA2; (+) strand; PAM type: YTN; PAM sequence: TTT
agtcagttcattgaaagacc

SEQ ID NO: 386351 - DNA, 20 bp, Artificial Sequence
  Description of Artificial Sequence: Synthetic oligonucleotide
  Target: LAMA2; (+) strand; PAM type: YTN; PAM sequence: TTA
gtcagttcattgaaagacct

SEQ ID NO: 386352 - DNA, 20 bp, Artificial Sequence
  Description of Artificial Sequence: Synthetic oligonucleotide
  Target: LAMA2; (+) strand; PAM type: YTN; PAM sequence: TTC
attgaaagacctacaatgaa

SEQ ID NO: 386353 - DNA, 20 bp, Artificial Sequence
  Description of Artificial Sequence: Synthetic oligonucleotide
  Target: LAMA2; (+) strand; PAM type: YTN; PAM sequence: TTG
aaagacctacaatgaagctc

SEQ ID NO: 386354 - DNA, 20 bp, Artificial Sequence
  Description of Artificial Sequence: Synthetic oligonucleotide
  Target: LAMA2; (+) strand; PAM type: YTN; PAM sequence: CTA
caatgaagctcctggaggca

SEQ ID NO: 386355 - DNA, 20 bp, Artificial Sequence
  Description of Artificial Sequence: Synthetic oligonucleotide
  Target: LAMA2; (+) strand; PAM type: YTN; PAM sequence: CTC
ctggaggcattttatttgat

SEQ ID NO: 386356 - DNA, 20 bp, Artificial Sequence
  Description of Artificial Sequence: Synthetic oligonucleotide
  Target: LAMA2; (+) strand; PAM type: YTN; PAM sequence: CTG
gaggcattttatttgatttg

SEQ ID NO: 386357 - DNA, 20 bp, Artificial Sequence
  Description of Artificial Sequence: Synthetic oligonucleotide
  Target: LAMA2; (+) strand; PAM type: YTN; PAM sequence: TTT
tatttgatttgtccatctca

SEQ ID NO: 386358 - DNA, 20 bp, Artificial Sequence
  Description of Artificial Sequence: Synthetic oligonucleotide
  Target: LAMA2; (+) strand; PAM type: YTN; PAM sequence: TTT
atttgatttgtccatctcag

SEQ ID NO: 386359 - DNA, 20 bp, Artificial Sequence
  Description of Artificial Sequence: Synthetic oligonucleotide
  Target: LAMA2; (+) strand; PAM type: YTN; PAM sequence: TTA
tttgatttgtccatctcagg

SEQ ID NO: 386360 - DNA, 20 bp, Artificial Sequence
  Description of Artificial Sequence: Synthetic oligonucleotide
  Target: LAMA2; (+) strand; PAM type: YTN; PAM sequence: TTT
gatttgtccatctcagggtt

SEQ ID NO: 386361 - DNA, 20 bp, Artificial Sequence
  Description of Artificial Sequence: Synthetic oligonucleotide
  Target: LAMA2; (+) strand; PAM type: YTN; PAM sequence: TTG
atttgtccatctcagggttt

SEQ ID NO: 386362 - DNA, 20 bp, Artificial Sequence
  Description of Artificial Sequence: Synthetic oligonucleotide
  Target: LAMA2; (+) strand; PAM type: YTN; PAM sequence: TTT
gtccatctcagggtttacag

SEQ ID NO: 386363 - DNA, 20 bp, Artificial Sequence
  Description of Artificial Sequence: Synthetic oligonucleotide
  Target: LAMA2; (+) strand; PAM type: YTN; PAM sequence: TTG
tccatctcagggtttacagt

SEQ ID NO: 386364 - DNA, 20 bp, Artificial Sequence
  Description of Artificial Sequence: Synthetic oligonucleotide
  Target: LAMA2; (+) strand; PAM type: YTN; PAM sequence: CTC
agggtttacagttttgcctc

SEQ ID NO: 386365 - DNA, 20 bp, Artificial Sequence
  Description of Artificial Sequence: Synthetic oligonucleotide
  Target: LAMA2; (+) strand; PAM type: YTN; PAM sequence: TTT
acagttttgcctcaagttgg

SEQ ID NO: 386366 - DNA, 20 bp, Artificial Sequence
  Description of Artificial Sequence: Synthetic oligonucleotide
  Target: LAMA2; (+) strand; PAM type: YTN; PAM sequence: TTA
cagttttgcctcaagttggc

SEQ ID NO: 386367 - DNA, 20 bp, Artificial Sequence
  Description of Artificial Sequence: Synthetic oligonucleotide
  Target: LAMA2; (+) strand; PAM type: YTN; PAM sequence: TTT
tgcctcaagttggcattgcc

SEQ ID NO: 386368 - DNA, 20 bp, Artificial Sequence
  Description of Artificial Sequence: Synthetic oligonucleotide
  Target: LAMA2; (+) strand; PAM type: YTN; PAM sequence: TTT
gcctcaagttggcattgcct

SEQ ID NO: 386369 - DNA, 20 bp, Artificial Sequence
  Description of Artificial Sequence: Synthetic oligonucleotide
  Target: LAMA2; (+) strand; PAM type: YTN; PAM sequence: TTG
cctcaagttggcattgcctt

SEQ ID NO: 386370 - DNA, 20 bp, Artificial Sequence
  Description of Artificial Sequence: Synthetic oligonucleotide
  Target: LAMA2; (+) strand; PAM type: YTN; PAM sequence: CTC
aagttggcattgcctttgtg

SEQ ID NO: 386371 - DNA, 20 bp, Artificial Sequence
  Description of Artificial Sequence: Synthetic oligonucleotide
  Target: LAMA2; (+) strand; PAM type: YTN; PAM sequence: TTG
gcattgcctttgtgacagat

SEQ ID NO: 386372 - DNA, 20 bp, Artificial Sequence
  Description of Artificial Sequence: Synthetic oligonucleotide
  Target: LAMA2; (+) strand; PAM type: YTN; PAM sequence: TTG
cctttgtgacagattaaaga

SEQ ID NO: 386373 - DNA, 20 bp, Artificial Sequence
  Description of Artificial Sequence: Synthetic oligonucleotide
  Target: LAMA2; (+) strand; PAM type: YTN; PAM sequence: CTT
tgtgacagattaaagatgtg

SEQ ID NO: 386374 - DNA, 20 bp, Artificial Sequence
  Description of Artificial Sequence: Synthetic oligonucleotide
  Target: LAMA2; (+) strand; PAM type: YTN; PAM sequence: TTT
gtgacagattaaagatgtga

SEQ ID NO: 386375 - DNA, 20 bp, Artificial Sequence
  Description of Artificial Sequence: Synthetic oligonucleotide
  Target: LAMA2; (+) strand; PAM type: YTN; PAM sequence: TTG
tgacagattaaagatgtgag

SEQ ID NO: 386376 - DNA, 20 bp, Artificial Sequence
  Description of Artificial Sequence: Synthetic oligonucleotide
  Target: LAMA2; (+) strand; PAM type: YTN; PAM sequence: TTA
aagatgtgagtgtattaaaa

SEQ ID NO: 386377 - DNA, 20 bp, Artificial Sequence
  Description of Artificial Sequence: Synthetic oligonucleotide
  Target: LAMA2; (+) strand; PAM type: YTN; PAM sequence: TTA
aaaaatttagaatcctcctg

SEQ ID NO: 386378 - DNA, 20 bp, Artificial Sequence
  Description of Artificial Sequence: Synthetic oligonucleotide
  Target: LAMA2; (+) strand; PAM type: YTN; PAM sequence: TTT
agaatcctcctgaatttgta

SEQ ID NO: 386379 - DNA, 20 bp, Artificial Sequence
  Description of Artificial Sequence: Synthetic oligonucleotide
  Target: LAMA2; (+) strand; PAM type: YTN; PAM sequence: TTA
gaatcctcctgaatttgtaa

SEQ ID NO: 386380 - DNA, 20 bp, Artificial Sequence
  Description of Artificial Sequence: Synthetic oligonucleotide
  Target: LAMA2; (+) strand; PAM type: YTN; PAM sequence: CTC
ctgaatttgtaatcgactgg

SEQ ID NO: 386381 - DNA, 20 bp, Artificial Sequence
  Description of Artificial Sequence: Synthetic oligonucleotide
  Target: LAMA2; (+) strand; PAM type: YTN; PAM sequence: CTG
aatttgtaatcgactggaca

SEQ ID NO: 386382 - DNA, 20 bp, Artificial Sequence
  Description of Artificial Sequence: Synthetic oligonucleotide
  Target: LAMA2; (+) strand; PAM type: YTN; PAM sequence: TTT
gtaatcgactggacagatac

SEQ ID NO: 386383 - DNA, 20 bp, Artificial Sequence
  Description of Artificial Sequence: Synthetic oligonucleotide
  Target: LAMA2; (+) strand; PAM type: YTN; PAM sequence: TTG
taatcgactggacagatact

SEQ ID NO: 386384 - DNA, 20 bp, Artificial Sequence
  Description of Artificial Sequence: Synthetic oligonucleotide
  Target: LAMA2; (+) strand; PAM type: YTN; PAM sequence: CTG
gacagatactttaagccttg

SEQ ID NO: 386385 - DNA, 20 bp, Artificial Sequence
  Description of Artificial Sequence: Synthetic oligonucleotide
  Target: LAMA2; (+) strand; PAM type: YTN; PAM sequence: CTT
taagccttgaatgacaactg

SEQ ID NO: 386386 - DNA, 20 bp, Artificial Sequence
  Description of Artificial Sequence: Synthetic oligonucleotide
  Target: LAMA2; (+) strand; PAM type: YTN; PAM sequence: TTT
aagccttgaatgacaactga

SEQ ID NO: 386387 - DNA, 20 bp, Artificial Sequence
  Description of Artificial Sequence: Synthetic oligonucleotide
  Target: LAMA2; (+) strand; PAM type: YTN; PAM sequence: TTA
agccttgaatgacaactgat

SEQ ID NO: 386388 - DNA, 20 bp, Artificial Sequence
  Description of Artificial Sequence: Synthetic oligonucleotide
  Target: LAMA2; (+) strand; PAM type: YTN; PAM sequence: CTT
gaatgacaactgatgtttct

SEQ ID NO: 386389 - DNA, 20 bp, Artificial Sequence
  Description of Artificial Sequence: Synthetic oligonucleotide
  Target: LAMA2; (+) strand; PAM type: YTN; PAM sequence: TTG
aatgacaactgatgtttctt

SEQ ID NO: 386390 - DNA, 20 bp, Artificial Sequence
  Description of Artificial Sequence: Synthetic oligonucleotide
  Target: LAMA2; (+) strand; PAM type: YTN; PAM sequence: CTG
atgtttcttttcccagcttt

SEQ ID NO: 386391 - DNA, 20 bp, Artificial Sequence
  Description of Artificial Sequence: Synthetic oligonucleotide
  Target: LAMA2; (+) strand; PAM type: YTN; PAM sequence: TTT
cttttcccagcttttatgaa

SEQ ID NO: 386392 - DNA, 20 bp, Artificial Sequence
  Description of Artificial Sequence: Synthetic oligonucleotide
  Target: LAMA2; (+) strand; PAM type: YTN; PAM sequence: TTC
ttttcccagcttttatgaaa

SEQ ID NO: 386393 - DNA, 20 bp, Artificial Sequence
  Description of Artificial Sequence: Synthetic oligonucleotide
  Target: LAMA2; (+) strand; PAM type: YTN; PAM sequence: CTT
ttcccagcttttatgaaaat

SEQ ID NO: 386394 - DNA, 20 bp, Artificial Sequence
  Description of Artificial Sequence: Synthetic oligonucleotide
  Target: LAMA2; (+) strand; PAM type: YTN; PAM sequence: TTT
tcccagcttttatgaaaatc

SEQ ID NO: 386395 - DNA, 20 bp, Artificial Sequence
  Description of Artificial Sequence: Synthetic oligonucleotide
  Target: LAMA2; (+) strand; PAM type: YTN; PAM sequence: TTT
cccagcttttatgaaaatcc

SEQ ID NO: 386396 - DNA, 20 bp, Artificial Sequence
  Description of Artificial Sequence: Synthetic oligonucleotide
  Target: LAMA2; (+) strand; PAM type: YTN; PAM sequence: TTC
ccagcttttatgaaaatcca

SEQ ID NO: 386397 - DNA, 20 bp, Artificial Sequence
  Description of Artificial Sequence: Synthetic oligonucleotide
  Target: LAMA2; (+) strand; PAM type: YTN; PAM sequence: CTT
ttatgaaaatccatgggcat

SEQ ID NO: 386398 - DNA, 20 bp, Artificial Sequence
  Description of Artificial Sequence: Synthetic oligonucleotide
  Target: LAMA2; (+) strand; PAM type: YTN; PAM sequence: TTT
tatgaaaatccatgggcata

SEQ ID NO: 386399 - DNA, 20 bp, Artificial Sequence
  Description of Artificial Sequence: Synthetic oligonucleotide
  Target: LAMA2; (+) strand; PAM type: YTN; PAM sequence: TTT
atgaaaatccatgggcatac

SEQ ID NO: 386400 - DNA, 20 bp, Artificial Sequence
  Description of Artificial Sequence: Synthetic oligonucleotide
  Target: LAMA2; (+) strand; PAM type: YTN; PAM sequence: TTA
tgaaaatccatgggcatact

SEQ ID NO: 386401 - DNA, 20 bp, Artificial Sequence
  Description of Artificial Sequence: Synthetic oligonucleotide
  Target: LAMA2; (+) strand; PAM type: YTN; PAM sequence: CTG
cttcataattttctcttgaa

SEQ ID NO: 386402 - DNA, 20 bp, Artificial Sequence
  Description of Artificial Sequence: Synthetic oligonucleotide
  Target: LAMA2; (+) strand; PAM type: YTN; PAM sequence: CTT
cataattttctcttgaacta

SEQ ID NO: 386403 - DNA, 20 bp, Artificial Sequence
  Description of Artificial Sequence: Synthetic oligonucleotide
  Target: LAMA2; (+) strand; PAM type: YTN; PAM sequence: TTC
ataattttctcttgaactac

SEQ ID NO: 386404 - DNA, 20 bp, Artificial Sequence
  Description of Artificial Sequence: Synthetic oligonucleotide
  Target: LAMA2; (+) strand; PAM type: YTN; PAM sequence: TTT
tctcttgaactacaaaaccc

SEQ ID NO: 386405 - DNA, 20 bp, Artificial Sequence
  Description of Artificial Sequence: Synthetic oligonucleotide
  Target: LAMA2; (+) strand; PAM type: YTN; PAM sequence: TTT
ctcttgaactacaaaacccg

SEQ ID NO: 386406 - DNA, 20 bp, Artificial Sequence
  Description of Artificial Sequence: Synthetic oligonucleotide
  Target: LAMA2; (+) strand; PAM type: YTN; PAM sequence: TTC
tcttgaactacaaaacccgt

SEQ ID NO: 386407 - DNA, 20 bp, Artificial Sequence
  Description of Artificial Sequence: Synthetic oligonucleotide
  Target: LAMA2; (+) strand; PAM type: YTN; PAM sequence: CTC
ttgaactacaaaacccgtaa

SEQ ID NO: 386408 - DNA, 20 bp, Artificial Sequence
  Description of Artificial Sequence: Synthetic oligonucleotide
  Target: LAMA2; (+) strand; PAM type: YTN; PAM sequence: CTT
gaactacaaaacccgtaagc

SEQ ID NO: 386409 - DNA, 20 bp, Artificial Sequence
  Description of Artificial Sequence: Synthetic oligonucleotide
  Target: LAMA2; (+) strand; PAM type: YTN; PAM sequence: TTG
aactacaaaacccgtaagca

SEQ ID NO: 386410 - DNA, 20 bp, Artificial Sequence
  Description of Artificial Sequence: Synthetic oligonucleotide
  Target: LAMA2; (+) strand; PAM type: YTN; PAM sequence: CTA
caaaacccgtaagcagtaac

SEQ ID NO: 386411 - DNA, 20 bp, Artificial Sequence
  Description of Artificial Sequence: Synthetic oligonucleotide
  Target: LAMA2; (+) strand; PAM type: YTN; PAM sequence: TTT
ttactcacgtacagtaagtg

SEQ ID NO: 386412 - DNA, 20 bp, Artificial Sequence
  Description of Artificial Sequence: Synthetic oligonucleotide
  Target: LAMA2; (+) strand; PAM type: YTN; PAM sequence: TTT
tactcacgtacagtaagtgg

SEQ ID NO: 386413 - DNA, 20 bp, Artificial Sequence
  Description of Artificial Sequence: Synthetic oligonucleotide
  Target: LAMA2; (+) strand; PAM type: YTN; PAM sequence: TTT
actcacgtacagtaagtgga

SEQ ID NO: 386414 - DNA, 20 bp, Artificial Sequence
  Description of Artificial Sequence: Synthetic oligonucleotide
  Target: LAMA2; (+) strand; PAM type: YTN; PAM sequence: TTA
ctcacgtacagtaagtggag

SEQ ID NO: 386415 - DNA, 20 bp, Artificial Sequence
  Description of Artificial Sequence: Synthetic oligonucleotide
  Target: LAMA2; (+) strand; PAM type: YTN; PAM sequence: CTC
acgtacagtaagtggagagc

SEQ ID NO: 386416 - DNA, 20 bp, Artificial Sequence
  Description of Artificial Sequence: Synthetic oligonucleotide
  Target: LAMA2; (+) strand; PAM type: YTN; PAM sequence: TTT
gctctcttgctgtctctctt

SEQ ID NO: 386417 - DNA, 20 bp, Artificial Sequence
  Description of Artificial Sequence: Synthetic oligonucleotide
  Target: LAMA2; (+) strand; PAM type: YTN; PAM sequence: TTG
ctctcttgctgtctctcttt

SEQ ID NO: 386418 - DNA, 20 bp, Artificial Sequence
  Description of Artificial Sequence: Synthetic oligonucleotide
  Target: LAMA2; (+) strand; PAM type: YTN; PAM sequence: CTC
tcttgctgtctctctttttt

SEQ ID NO: 386419 - DNA, 20 bp, Artificial Sequence
  Description of Artificial Sequence: Synthetic oligonucleotide
  Target: LAMA2; (+) strand; PAM type: YTN; PAM sequence: CTC
ttgctgtctctcttttttct

SEQ ID NO: 386420 - DNA, 20 bp, Artificial Sequence
  Description of Artificial Sequence: Synthetic oligonucleotide
  Target: LAMA2; (+) strand; PAM type: YTN; PAM sequence: CTT
gctgtctctcttttttctta

SEQ ID NO: 386421 - DNA, 20 bp, Artificial Sequence
  Description of Artificial Sequence: Synthetic oligonucleotide
  Target: LAMA2; (+) strand; PAM type: YTN; PAM sequence: TTG
ctgtctctcttttttcttac

SEQ ID NO: 386422 - DNA, 20 bp, Artificial Sequence
  Description of Artificial Sequence: Synthetic oligonucleotide
  Target: LAMA2; (+) strand; PAM type: YTN; PAM sequence: CTG
tctctcttttttcttactga

SEQ ID NO: 386423 - DNA, 20 bp, Artificial Sequence
  Description of Artificial Sequence: Synthetic oligonucleotide
  Target: LAMA2; (+) strand; PAM type: YTN; PAM sequence: CTC
tcttttttcttactgattct

SEQ ID NO: 386424 - DNA, 20 bp, Artificial Sequence
  Description of Artificial Sequence: Synthetic oligonucleotide
  Target: LAMA2; (+) strand; PAM type: YTN; PAM sequence: CTC
ttttttcttactgattctgg

SEQ ID NO: 386425 - DNA, 20 bp, Artificial Sequence
  Description of Artificial Sequence: Synthetic oligonucleotide
  Target: LAMA2; (+) strand; PAM type: YTN; PAM sequence: CTT
ttttcttactgattctggat

SEQ ID NO: 386426 - DNA, 20 bp, Artificial Sequence
  Description of Artificial Sequence: Synthetic oligonucleotide
  Target: LAMA2; (+) strand; PAM type: YTN; PAM sequence: TTT
tttcttactgattctggatt

SEQ ID NO: 386427 - DNA, 20 bp, Artificial Sequence
  Description of Artificial Sequence: Synthetic oligonucleotide
  Target: LAMA2; (+) strand; PAM type: YTN; PAM sequence: TTT
ttcttactgattctggattc

SEQ ID NO: 386428 - DNA, 20 bp, Artificial Sequence
  Description of Artificial Sequence: Synthetic oligonucleotide
  Target: LAMA2; (+) strand; PAM type: YTN; PAM sequence: TTT
tcttactgattctggattcg

SEQ ID NO: 386429 - DNA, 20 bp, Artificial Sequence
  Description of Artificial Sequence: Synthetic oligonucleotide
  Target: LAMA2; (+) strand; PAM type: YTN; PAM sequence: TTT
cttactgattctggattcgc

SEQ ID NO: 386430 - DNA, 20 bp, Artificial Sequence
  Description of Artificial Sequence: Synthetic oligonucleotide
  Target: LAMA2; (+) strand; PAM type: YTN; PAM sequence: TTC
ttactgattctggattcgct

SEQ ID NO: 386431 - DNA, 20 bp, Artificial Sequence
  Description of Artificial Sequence: Synthetic oligonucleotide
  Target: LAMA2; (+) strand; PAM type: YTN; PAM sequence: CTT
actgattctggattcgctag

SEQ ID NO: 386432 - DNA, 20 bp, Artificial Sequence
  Description of Artificial Sequence: Synthetic oligonucleotide
  Target: LAMA2; (+) strand; PAM type: YTN; PAM sequence: TTA
ctgattctggattcgctagt

SEQ ID NO: 386433 - DNA, 20 bp, Artificial Sequence
  Description of Artificial Sequence: Synthetic oligonucleotide
  Target: LAMA2; (+) strand; PAM type: YTN; PAM sequence: CTG
attctggattcgctagtgcc

SEQ ID NO: 386434 - DNA, 20 bp, Artificial Sequence
  Description of Artificial Sequence: Synthetic oligonucleotide
  Target: LAMA2; (+) strand; PAM type: YTN; PAM sequence: TTC
tggattcgctagtgccatat

SEQ ID NO: 386435 - DNA, 20 bp, Artificial Sequence
  Description of Artificial Sequence: Synthetic oligonucleotide
  Target: LAMA2; (+) strand; PAM type: YTN; PAM sequence: CTG
gattcgctagtgccatattg

SEQ ID NO: 386436 - DNA, 20 bp, Artificial Sequence
  Description of Artificial Sequence: Synthetic oligonucleotide
  Target: LAMA2; (+) strand; PAM type: YTN; PAM sequence: TTC
gctagtgccatattgaaagt

SEQ ID NO: 386437 - DNA, 20 bp, Artificial Sequence
  Description of Artificial Sequence: Synthetic oligonucleotide
  Target: LAMA2; (+) strand; PAM type: YTN; PAM sequence: CTA
gtgccatattgaaagtacat

SEQ ID NO: 386438 - DNA, 20 bp, Artificial Sequence
  Description of Artificial Sequence: Synthetic oligonucleotide
  Target: LAMA2; (+) strand; PAM type: YTN; PAM sequence: TTG
aaagtacattgaaatcagta

SEQ ID NO: 386439 - DNA, 20 bp, Artificial Sequence
  Description of Artificial Sequence: Synthetic oligonucleotide
  Target: LAMA2; (+) strand; PAM type: YTN; PAM sequence: TTG
aaatcagtagctaaatataa

SEQ ID NO: 386440 - DNA, 20 bp, Artificial Sequence
  Description of Artificial Sequence: Synthetic oligonucleotide
  Target: LAMA2; (+) strand; PAM type: YTN; PAM sequence: CTA
aatataattcttggatcttg

SEQ ID NO: 386441 - DNA, 20 bp, Artificial Sequence
  Description of Artificial Sequence: Synthetic oligonucleotide
  Target: LAMA2; (+) strand; PAM type: YTN; PAM sequence: TTC
ttggatcttgcatacattca

SEQ ID NO: 386442 - DNA, 20 bp, Artificial Sequence
  Description of Artificial Sequence: Synthetic oligonucleotide
  Target: LAMA2; (+) strand; PAM type: YTN; PAM sequence: CTT
ggatcttgcatacattcaaa

SEQ ID NO: 386443 - DNA, 20 bp, Artificial Sequence
  Description of Artificial Sequence: Synthetic oligonucleotide
  Target: LAMA2; (+) strand; PAM type: YTN; PAM sequence: TTG
gatcttgcatacattcaaat

SEQ ID NO: 386444 - DNA, 20 bp, Artificial Sequence
  Description of Artificial Sequence: Synthetic oligonucleotide
  Target: LAMA2; (+) strand; PAM type: YTN; PAM sequence: CTT
gcatacattcaaatccaaaa

SEQ ID NO: 386445 - DNA, 20 bp, Artificial Sequence
  Description of Artificial Sequence: Synthetic oligonucleotide
  Target: LAMA2; (+) strand; PAM type: YTN; PAM sequence: TTG
catacattcaaatccaaaat

SEQ ID NO: 386446 - DNA, 20 bp, Artificial Sequence
  Description of Artificial Sequence: Synthetic oligonucleotide
  Target: LAMA2; (+) strand; PAM type: YTN; PAM sequence: TTC
aaatccaaaataggttattt

SEQ ID NO: 386447 - DNA, 20 bp, Artificial Sequence
  Description of Artificial Sequence: Synthetic oligonucleotide
  Target: LAMA2; (+) strand; PAM type: YTN; PAM sequence: TTA
tttataaatttaaggaagga

SEQ ID NO: 386448 - DNA, 20 bp, Artificial Sequence
  Description of Artificial Sequence: Synthetic oligonucleotide
  Target: LAMA2; (+) strand; PAM type: YTN; PAM sequence: TTT
ataaatttaaggaaggagtg

SEQ ID NO: 386449 - DNA, 20 bp, Artificial Sequence
  Description of Artificial Sequence: Synthetic oligonucleotide
  Target: LAMA2; (+) strand; PAM type: YTN; PAM sequence: TTA
taaatttaaggaaggagtgc

SEQ ID NO: 386450 - DNA, 20 bp, Artificial Sequence
  Description of Artificial Sequence: Synthetic oligonucleotide
  Target: LAMA2; (+) strand; PAM type: YTN; PAM sequence: TTT
aaggaaggagtgctcttcta

SEQ ID NO: 386451 - DNA, 20 bp, Artificial Sequence
  Description of Artificial Sequence: Synthetic oligonucleotide
  Target: LAMA2; (+) strand; PAM type: YTN; PAM sequence: TTA
aggaaggagtgctcttctat

SEQ ID NO: 386452 - DNA, 20 bp, Artificial Sequence
  Description of Artificial Sequence: Synthetic oligonucleotide
  Target: LAMA2; (+) strand; PAM type: YTN; PAM sequence: CTC
ttctatagtattcttttcct

SEQ ID NO: 386453 - DNA, 20 bp, Artificial Sequence
  Description of Artificial Sequence: Synthetic oligonucleotide
  Target: LAMA2; (+) strand; PAM type: YTN; PAM sequence: CTT
ctatagtattcttttcctca

SEQ ID NO: 386454 - DNA, 20 bp, Artificial Sequence
  Description of Artificial Sequence: Synthetic oligonucleotide
  Target: LAMA2; (+) strand; PAM type: YTN; PAM sequence: TTC
tatagtattcttttcctcaa

SEQ ID NO: 386455 - DNA, 20 bp, Artificial Sequence
  Description of Artificial Sequence: Synthetic oligonucleotide
  Target: LAMA2; (+) strand; PAM type: YTN; PAM sequence: CTA
tagtattcttttcctcaagg

SEQ ID NO: 386456 - DNA, 20 bp, Artificial Sequence
  Description of Artificial Sequence: Synthetic oligonucleotide
  Target: LAMA2; (+) strand; PAM type: YTN; PAM sequence: TTC
ttttcctcaaggaaatttat

SEQ ID NO: 386457 - DNA, 20 bp, Artificial Sequence
  Description of Artificial Sequence: Synthetic oligonucleotide
  Target: LAMA2; (+) strand; PAM type: YTN; PAM sequence: CTT
ttcctcaaggaaatttattt

SEQ ID NO: 386458 - DNA, 20 bp, Artificial Sequence
  Description of Artificial Sequence: Synthetic oligonucleotide
  Target: LAMA2; (+) strand; PAM type: YTN; PAM sequence: TTT
tcctcaaggaaatttatttt

SEQ ID NO: 386459 - DNA, 20 bp, Artificial Sequence
  Description of Artificial Sequence: Synthetic oligonucleotide
  Target: LAMA2; (+) strand; PAM type: YTN; PAM sequence: TTT
cctcaaggaaatttatttta

SEQ ID NO: 386460 - DNA, 20 bp, Artificial Sequence
  Description of Artificial Sequence: Synthetic oligonucleotide
  Target: LAMA2; (+) strand; PAM type: YTN; PAM sequence: TTC
ctcaaggaaatttattttag

SEQ ID NO: 386461 - DNA, 20 bp, Artificial Sequence
  Description of Artificial Sequence: Synthetic oligonucleotide
  Target: LAMA2; (+) strand; PAM type: YTN; PAM sequence: CTC
aaggaaatttattttagcac

SEQ ID NO: 386462 - DNA, 20 bp, Artificial Sequence
  Description of Artificial Sequence: Synthetic oligonucleotide
  Target: LAMA2; (+) strand; PAM type: YTN; PAM sequence: TTT
attttagcaccttttatttc

SEQ ID NO: 386463 - DNA, 20 bp, Artificial Sequence
  Description of Artificial Sequence: Synthetic oligonucleotide
  Target: LAMA2; (+) strand; PAM type: YTN; PAM sequence: TTA
ttttagcaccttttatttca

SEQ ID NO: 386464 - DNA, 20 bp, Artificial Sequence
  Description of Artificial Sequence: Synthetic oligonucleotide
  Target: LAMA2; (+) strand; PAM type: YTN; PAM sequence: TTT
tagcaccttttatttcaaca

SEQ ID NO: 386465 - DNA, 20 bp, Artificial Sequence
  Description of Artificial Sequence: Synthetic oligonucleotide
  Target: LAMA2; (+) strand; PAM type: YTN; PAM sequence: TTT
agcaccttttatttcaacat

SEQ ID NO: 386466 - DNA, 20 bp, Artificial Sequence
  Description of Artificial Sequence: Synthetic oligonucleotide
  Target: LAMA2; (+) strand; PAM type: YTN; PAM sequence: TTA
gcaccttttatttcaacatt

SEQ ID NO: 386467 - DNA, 20 bp, Artificial Sequence
  Description of Artificial Sequence: Synthetic oligonucleotide
  Target: LAMA2; (+) strand; PAM type: YTN; PAM sequence: CTT
ttatttcaacatttacctat

SEQ ID NO: 386468 - DNA, 20 bp, Artificial Sequence
  Description of Artificial Sequence: Synthetic oligonucleotide
  Target: LAMA2; (+) strand; PAM type: YTN; PAM sequence: TTT
tatttcaacatttacctatt

SEQ ID NO: 386469 - DNA, 20 bp, Artificial Sequence
  Description of Artificial Sequence: Synthetic oligonucleotide
  Target: LAMA2; (+) strand; PAM type: YTN; PAM sequence: TTT
atttcaacatttacctattg

SEQ ID NO: 386470 - DNA, 20 bp, Artificial Sequence
  Description of Artificial Sequence: Synthetic oligonucleotide
  Target: LAMA2; (+) strand; PAM type: YTN; PAM sequence: TTA
tttcaacatttacctattgt

SEQ ID NO: 386471 - DNA, 20 bp, Artificial Sequence
  Description of Artificial Sequence: Synthetic oligonucleotide
  Target: LAMA2; (+) strand; PAM type: YTN; PAM sequence: TTT
caacatttacctattgtaat

SEQ ID NO: 386472 - DNA, 20 bp, Artificial Sequence
  Description of Artificial Sequence: Synthetic oligonucleotide
  Target: LAMA2; (+) strand; PAM type: YTN; PAM sequence: TTC
aacatttacctattgtaata

SEQ ID NO: 386473 - DNA, 20 bp, Artificial Sequence
  Description of Artificial Sequence: Synthetic oligonucleotide
  Target: LAMA2; (+) strand; PAM type: YTN; PAM sequence: TTT
acctattgtaatagtatttg

SEQ ID NO: 386474 - DNA, 20 bp, Artificial Sequence
  Description of Artificial Sequence: Synthetic oligonucleotide
  Target: LAMA2; (+) strand; PAM type: YTN; PAM sequence: TTA
cctattgtaatagtatttgt

SEQ ID NO: 386475 - DNA, 20 bp, Artificial Sequence
  Description of Artificial Sequence: Synthetic oligonucleotide
  Target: LAMA2; (+) strand; PAM type: YTN; PAM sequence: CTA
ttgtaatagtatttgtgcat

SEQ ID NO: 386476 - DNA, 20 bp, Artificial Sequence
  Description of Artificial Sequence: Synthetic oligonucleotide
  Target: LAMA2; (+) strand; PAM type: YTN; PAM sequence: TTG
taatagtatttgtgcatgtc

SEQ ID NO: 386477 - DNA, 20 bp, Artificial Sequence
  Description of Artificial Sequence: Synthetic oligonucleotide
  Target: LAMA2; (+) strand; PAM type: YTN; PAM sequence: TTT
gtgcatgtcaacatttcttg

SEQ ID NO: 386478 - DNA, 20 bp, Artificial Sequence
  Description of Artificial Sequence: Synthetic oligonucleotide
  Target: LAMA2; (+) strand; PAM type: YTN; PAM sequence: TTG
tgcatgtcaacatttcttgt

SEQ ID NO: 386479 - DNA, 20 bp, Artificial Sequence
  Description of Artificial Sequence: Synthetic oligonucleotide
  Target: LAMA2; (+) strand; PAM type: YTN; PAM sequence: TTT
cttgttttagcatattgttt

SEQ ID NO: 386480 - DNA, 20 bp, Artificial Sequence
  Description of Artificial Sequence: Synthetic oligonucleotide
  Target: LAMA2; (+) strand; PAM type: YTN; PAM sequence: TTC
ttgttttagcatattgtttg

SEQ ID NO: 386481 - DNA, 20 bp, Artificial Sequence
  Description of Artificial Sequence: Synthetic oligonucleotide
  Target: LAMA2; (+) strand; PAM type: YTN; PAM sequence: CTT
gttttagcatattgtttgag

SEQ ID NO: 386482 - DNA, 20 bp, Artificial Sequence
  Description of Artificial Sequence: Synthetic oligonucleotide
  Target: LAMA2; (+) strand; PAM type: YTN; PAM sequence: TTG
ttttagcatattgtttgagt

SEQ ID NO: 386483 - DNA, 20 bp, Artificial Sequence
  Description of Artificial Sequence: Synthetic oligonucleotide
  Target: LAMA2; (+) strand; PAM type: YTN; PAM sequence: TTT
tagcatattgtttgagtcta

SEQ ID NO: 386484 - DNA, 20 bp, Artificial Sequence
  Description of Artificial Sequence: Synthetic oligonucleotide
  Target: LAMA2; (+) strand; PAM type: YTN; PAM sequence: TTT
agcatattgtttgagtctaa

SEQ ID NO: 386485 - DNA, 20 bp, Artificial Sequence
  Description of Artificial Sequence: Synthetic oligonucleotide
  Target: LAMA2; (+) strand; PAM type: YTN; PAM sequence: TTA
gcatattgtttgagtctaaa

SEQ ID NO: 386486 - DNA, 20 bp, Artificial Sequence
  Description of Artificial Sequence: Synthetic oligonucleotide
  Target: LAMA2; (+) strand; PAM type: YTN; PAM sequence: TTG
tttgagtctaaatcttaata

SEQ ID NO: 386487 - DNA, 20 bp, Artificial Sequence
  Description of Artificial Sequence: Synthetic oligonucleotide
  Target: LAMA2; (+) strand; PAM type: YTN; PAM sequence: TTT
gagtctaaatcttaatagta

SEQ ID NO: 386488 - DNA, 20 bp, Artificial Sequence
  Description of Artificial Sequence: Synthetic oligonucleotide
  Target: LAMA2; (+) strand; PAM type: YTN; PAM sequence: TTG
agtctaaatcttaatagtat

SEQ ID NO: 386489 - DNA, 20 bp, Artificial Sequence
  Description of Artificial Sequence: Synthetic oligonucleotide
  Target: LAMA2; (+) strand; PAM type: YTN; PAM sequence: CTA
aatcttaatagtatcttaaa

SEQ ID NO: 386490 - DNA, 20 bp, Artificial Sequence
  Description of Artificial Sequence: Synthetic oligonucleotide
  Target: LAMA2; (+) strand; PAM type: YTN; PAM sequence: CTT
aatagtatcttaaatagaag

SEQ ID NO: 386491 - DNA, 20 bp, Artificial Sequence
  Description of Artificial Sequence: Synthetic oligonucleotide
  Target: LAMA2; (+) strand; PAM type: YTN; PAM sequence: TTA
atagtatcttaaatagaaga

SEQ ID NO: 386492 - DNA, 20 bp, Artificial Sequence
  Description of Artificial Sequence: Synthetic oligonucleotide
  Target: LAMA2; (+) strand; PAM type: YTN; PAM sequence: CTT
aaatagaagaatttttgttt

SEQ ID NO: 386493 - DNA, 20 bp, Artificial Sequence
  Description of Artificial Sequence: Synthetic oligonucleotide
  Target: LAMA2; (+) strand; PAM type: YTN; PAM sequence: TTA
aatagaagaatttttgttta

SEQ ID NO: 386494 - DNA, 20 bp, Artificial Sequence
  Description of Artificial Sequence: Synthetic oligonucleotide
  Target: LAMA2; (+) strand; PAM type: YTN; PAM sequence: TTT
ttgtttatgttctagtttta

SEQ ID NO: 386495 - DNA, 20 bp, Artificial Sequence
  Description of Artificial Sequence: Synthetic oligonucleotide
  Target: LAMA2; (+) strand; PAM type: YTN; PAM sequence: TTT
tgtttatgttctagttttat

SEQ ID NO: 386496 - DNA, 20 bp, Artificial Sequence
  Description of Artificial Sequence: Synthetic oligonucleotide
  Target: LAMA2; (+) strand; PAM type: YTN; PAM sequence: TTT
gtttatgttctagttttata

SEQ ID NO: 386497 - DNA, 20 bp, Artificial Sequence
  Description of Artificial Sequence: Synthetic oligonucleotide
  Target: LAMA2; (+) strand; PAM type: YTN; PAM sequence: TTG
tttatgttctagttttataa

SEQ ID NO: 386498 - DNA, 20 bp, Artificial Sequence
  Description of Artificial Sequence: Synthetic oligonucleotide
  Target: LAMA2; (+) strand; PAM type: YTN; PAM sequence: TTT
atgttctagttttataagag

SEQ ID NO: 386499 - DNA, 20 bp, Artificial Sequence
  Description of Artificial Sequence: Synthetic oligonucleotide
  Target: LAMA2; (+) strand; PAM type: YTN; PAM sequence: TTA
tgttctagttttataagagt

SEQ ID NO: 386500 - DNA, 20 bp, Artificial Sequence
  Description of Artificial Sequence: Synthetic oligonucleotide
  Target: LAMA2; (+) strand; PAM type: YTN; PAM sequence: TTC
tagttttataagagttaacc

SEQ ID NO: 386501 - DNA, 20 bp, Artificial Sequence
  Description of Artificial Sequence: Synthetic oligonucleotide
  Target: LAMA2; (+) strand; PAM type: YTN; PAM sequence: CTA
gttttataagagttaacctc

SEQ ID NO: 386502 - DNA, 20 bp, Artificial Sequence
  Description of Artificial Sequence: Synthetic oligonucleotide
  Target: LAMA2; (+) strand; PAM type: YTN; PAM sequence: TTT
tataagagttaacctcagaa

SEQ ID NO: 386503 - DNA, 20 bp, Artificial Sequence
  Description of Artificial Sequence: Synthetic oligonucleotide
  Target: LAMA2; (+) strand; PAM type: YTN; PAM sequence: TTT
ataagagttaacctcagaag

SEQ ID NO: 386504 - DNA, 20 bp, Artificial Sequence
  Description of Artificial Sequence: Synthetic oligonucleotide
  Target: LAMA2; (+) strand; PAM type: YTN; PAM sequence: TTA
taagagttaacctcagaagc

SEQ ID NO: 386505 - DNA, 20 bp, Artificial Sequence
  Description of Artificial Sequence: Synthetic oligonucleotide
  Target: LAMA2; (+) strand; PAM type: YTN; PAM sequence: TTA
acctcagaagctaaagctgg

SEQ ID NO: 386506 - DNA, 20 bp, Artificial Sequence
  Description of Artificial Sequence: Synthetic oligonucleotide
  Target: LAMA2; (+) strand; PAM type: YTN; PAM sequence: CTC
agaagctaaagctggattaa

SEQ ID NO: 386507 - DNA, 20 bp, Artificial Sequence
  Description of Artificial Sequence: Synthetic oligonucleotide
  Target: LAMA2; (+) strand; PAM type: YTN; PAM sequence: CTA
aagctggattaaaaaataca

SEQ ID NO: 386508 - DNA, 20 bp, Artificial Sequence
  Description of Artificial Sequence: Synthetic oligonucleotide
  Target: LAMA2; (+) strand; PAM type: YTN; PAM sequence: CTG
gattaaaaaatacaccaaaa

SEQ ID NO: 386509 - DNA, 20 bp, Artificial Sequence
  Description of Artificial Sequence: Synthetic oligonucleotide
  Target: LAMA2; (+) strand; PAM type: YTN; PAM sequence: TTA
aaaaatacaccaaaaagtta

SEQ ID NO: 386510 - DNA, 20 bp, Artificial Sequence
  Description of Artificial Sequence: Synthetic oligonucleotide
  Target: LAMA2; (+) strand; PAM type: YTN; PAM sequence: TTA
agactgggtgttatttggga

SEQ ID NO: 386511 - DNA, 20 bp, Artificial Sequence
  Description of Artificial Sequence: Synthetic oligonucleotide
  Target: LAMA2; (+) strand; PAM type: YTN; PAM sequence: CTG
ggtgttatttgggaaaatag

SEQ ID NO: 386512 - DNA, 20 bp, Artificial Sequence
  Description of Artificial Sequence: Synthetic oligonucleotide
  Target: LAMA2; (+) strand; PAM type: YTN; PAM sequence: TTA
tttgggaaaatagattttaa

SEQ ID NO: 386513 - DNA, 20 bp, Artificial Sequence
  Description of Artificial Sequence: Synthetic oligonucleotide
  Target: LAMA2; (+) strand; PAM type: YTN; PAM sequence: TTT
gggaaaatagattttaaaat

SEQ ID NO: 386514 - DNA, 20 bp, Artificial Sequence
  Description of Artificial Sequence: Synthetic oligonucleotide
  Target: LAMA2; (+) strand; PAM type: YTN; PAM sequence: TTG
ggaaaatagattttaaaatc

SEQ ID NO: 386515 - DNA, 20 bp, Artificial Sequence
  Description of Artificial Sequence: Synthetic oligonucleotide
  Target: LAMA2; (+) strand; PAM type: YTN; PAM sequence: TTT
taaaatcattttttctttgt

SEQ ID NO: 386516 - DNA, 20 bp, Artificial Sequence
  Description of Artificial Sequence: Synthetic oligonucleotide
  Target: LAMA2; (+) strand; PAM type: YTN; PAM sequence: TTT
aaaatcattttttctttgta

SEQ ID NO: 386517 - DNA, 20 bp, Artificial Sequence
  Description of Artificial Sequence: Synthetic oligonucleotide
  Target: LAMA2; (+) strand; PAM type: YTN; PAM sequence: TTA
aaatcattttttctttgtat

SEQ ID NO: 386518 - DNA, 20 bp, Artificial Sequence
  Description of Artificial Sequence: Synthetic oligonucleotide
  Target: LAMA2; (+) strand; PAM type: YTN; PAM sequence: TTT
tttctttgtattttaaccat

SEQ ID NO: 386519 - DNA, 20 bp, Artificial Sequence
  Description of Artificial Sequence: Synthetic oligonucleotide
  Target: LAMA2; (+) strand; PAM type: YTN; PAM sequence: TTT
ttctttgtattttaaccatc

SEQ ID NO: 386520 - DNA, 20 bp, Artificial Sequence
  Description of Artificial Sequence: Synthetic oligonucleotide
  Target: LAMA2; (+) strand; PAM type: YTN; PAM sequence: TTT
tctttgtattttaaccatct

SEQ ID NO: 386521 - DNA, 20 bp, Artificial Sequence
  Description of Artificial Sequence: Synthetic oligonucleotide
  Target: LAMA2; (+) strand; PAM type: YTN; PAM sequence: TTT
ctttgtattttaaccatctt

SEQ ID NO: 386522 - DNA, 20 bp, Artificial Sequence
  Description of Artificial Sequence: Synthetic oligonucleotide
  Target: LAMA2; (+) strand; PAM type: YTN; PAM sequence: TTC
tttgtattttaaccatcttt

SEQ ID NO: 386523 - DNA, 20 bp, Artificial Sequence
  Description of Artificial Sequence: Synthetic oligonucleotide
  Target: LAMA2; (+) strand; PAM type: YTN; PAM sequence: CTT
tgtattttaaccatctttaa

SEQ ID NO: 386524 - DNA, 20 bp, Artificial Sequence
  Description of Artificial Sequence: Synthetic oligonucleotide
  Target: LAMA2; (+) strand; PAM type: YTN; PAM sequence: TTT
gtattttaaccatctttaat

SEQ ID NO: 386525 - DNA, 20 bp, Artificial Sequence
  Description of Artificial Sequence: Synthetic oligonucleotide
  Target: LAMA2; (+) strand; PAM type: YTN; PAM sequence: TTG
tattttaaccatctttaatg

SEQ ID NO: 386526 - DNA, 20 bp, Artificial Sequence
  Description of Artificial Sequence: Synthetic oligonucleotide
  Target: LAMA2; (+) strand; PAM type: YTN; PAM sequence: TTT
taaccatctttaatgaaaat

SEQ ID NO: 386527 - DNA, 20 bp, Artificial Sequence
  Description of Artificial Sequence: Synthetic oligonucleotide
  Target: LAMA2; (+) strand; PAM type: YTN; PAM sequence: TTT
aaccatctttaatgaaaatg

SEQ ID NO: 386528 - DNA, 20 bp, Artificial Sequence
  Description of Artificial Sequence: Synthetic oligonucleotide
  Target: LAMA2; (+) strand; PAM type: YTN; PAM sequence: TTA
accatctttaatgaaaatgt

SEQ ID NO: 386529 - DNA, 20 bp, Artificial Sequence
  Description of Artificial Sequence: Synthetic oligonucleotide
  Target: LAMA2; (+) strand; PAM type: YTN; PAM sequence: CTT
taatgaaaatgtattacact

SEQ ID NO: 386530 - DNA, 20 bp, Artificial Sequence
  Description of Artificial Sequence: Synthetic oligonucleotide
  Target: LAMA2; (+) strand; PAM type: YTN; PAM sequence: TTT
aatgaaaatgtattacactg

SEQ ID NO: 386531 - DNA, 20 bp, Artificial Sequence
  Description of Artificial Sequence: Synthetic oligonucleotide
  Target: LAMA2; (+) strand; PAM type: YTN; PAM sequence: TTA
atgaaaatgtattacactga

SEQ ID NO: 386532 - DNA, 20 bp, Artificial Sequence
  Description of Artificial Sequence: Synthetic oligonucleotide
  Target: LAMA2; (+) strand; PAM type: YTN; PAM sequence: TTA
cactgaaaataaatgtgaag

SEQ ID NO: 386533 - DNA, 20 bp, Artificial Sequence
  Description of Artificial Sequence: Synthetic oligonucleotide
  Target: LAMA2; (+) strand; PAM type: YTN; PAM sequence: CTG
aaaataaatgtgaaggtagg

SEQ ID NO: 386534 - DNA, 20 bp, Artificial Sequence
  Description of Artificial Sequence: Synthetic oligonucleotide
  Target: LAMA2; (+) strand; PAM type: YTN; PAM sequence: TTA
aatgtactgtcaaatacatt

SEQ ID NO: 386535 - DNA, 20 bp, Artificial Sequence
  Description of Artificial Sequence: Synthetic oligonucleotide
  Target: LAMA2; (+) strand; PAM type: YTN; PAM sequence: CTG
tcaaatacatttatattgtc

SEQ ID NO: 386536 - DNA, 20 bp, Artificial Sequence
  Description of Artificial Sequence: Synthetic oligonucleotide
  Target: LAMA2; (+) strand; PAM type: YTN; PAM sequence: TTT
atattgtcatatttagttga

SEQ ID NO: 386537 - DNA, 20 bp, Artificial Sequence
  Description of Artificial Sequence: Synthetic oligonucleotide
  Target: LAMA2; (+) strand; PAM type: YTN; PAM sequence: TTA
tattgtcatatttagttgat

SEQ ID NO: 386538 - DNA, 20 bp, Artificial Sequence
  Description of Artificial Sequence: Synthetic oligonucleotide
  Target: LAMA2; (+) strand; PAM type: YTN; PAM sequence: TTG
tcatatttagttgatagtat

SEQ ID NO: 386539 - DNA, 20 bp, Artificial Sequence
  Description of Artificial Sequence: Synthetic oligonucleotide
  Target: LAMA2; (+) strand; PAM type: YTN; PAM sequence: TTT
agttgatagtatatacacac

SEQ ID NO: 386540 - DNA, 20 bp, Artificial Sequence
  Description of Artificial Sequence: Synthetic oligonucleotide
  Target: LAMA2; (+) strand; PAM type: YTN; PAM sequence: TTA
gttgatagtatatacacact

SEQ ID NO: 386541 - DNA, 20 bp, Artificial Sequence
  Description of Artificial Sequence: Synthetic oligonucleotide
  Target: LAMA2; (+) strand; PAM type: YTN; PAM sequence: TTG
atagtatatacacactaatt

SEQ ID NO: 386542 - DNA, 20 bp, Artificial Sequence
  Description of Artificial Sequence: Synthetic oligonucleotide
  Target: LAMA2; (+) strand; PAM type: YTN; PAM sequence: CTA
attcttcccaagtataatga

SEQ ID NO: 386543 - DNA, 20 bp, Artificial Sequence
  Description of Artificial Sequence: Synthetic oligonucleotide
  Target: LAMA2; (+) strand; PAM type: YTN; PAM sequence: TTC
ttcccaagtataatgatata

SEQ ID NO: 386544 - DNA, 20 bp, Artificial Sequence
  Description of Artificial Sequence: Synthetic oligonucleotide
  Target: LAMA2; (+) strand; PAM type: YTN; PAM sequence: CTT
cccaagtataatgatatatt

SEQ ID NO: 386545 - DNA, 20 bp, Artificial Sequence
  Description of Artificial Sequence: Synthetic oligonucleotide
  Target: LAMA2; (+) strand; PAM type: YTN; PAM sequence: TTC
ccaagtataatgatatattt

SEQ ID NO: 386546 - DNA, 20 bp, Artificial Sequence
  Description of Artificial Sequence: Synthetic oligonucleotide
  Target: LAMA2; (+) strand; PAM type: YTN; PAM sequence: TTT
taatgataattaaagaagta

SEQ ID NO: 386547 - DNA, 20 bp, Artificial Sequence
  Description of Artificial Sequence: Synthetic oligonucleotide
  Target: LAMA2; (+) strand; PAM type: YTN; PAM sequence: TTT
aatgataattaaagaagtag

SEQ ID NO: 386548 - DNA, 20 bp, Artificial Sequence
  Description of Artificial Sequence: Synthetic oligonucleotide
  Target: LAMA2; (+) strand; PAM type: YTN; PAM sequence: TTA
atgataattaaagaagtaga

SEQ ID NO: 386549 - DNA, 20 bp, Artificial Sequence
  Description of Artificial Sequence: Synthetic oligonucleotide
  Target: LAMA2; (+) strand; PAM type: YTN; PAM sequence: TTA
aagaagtagactatcaaagt

SEQ ID NO: 386550 - DNA, 20 bp, Artificial Sequence
  Description of Artificial Sequence: Synthetic oligonucleotide
  Target: LAMA2; (+) strand; PAM type: YTN; PAM sequence: CTA
tcaaagtattttataatatt

SEQ ID NO: 386551 - DNA, 20 bp, Artificial Sequence
  Description of Artificial Sequence: Synthetic oligonucleotide
  Target: LAMA2; (+) strand; PAM type: YTN; PAM sequence: TTT
tataatattgctttcaagtc

SEQ ID NO: 386552 - DNA, 20 bp, Artificial Sequence
  Description of Artificial Sequence: Synthetic oligonucleotide
  Target: LAMA2; (+) strand; PAM type: YTN; PAM sequence: TTT
ataatattgctttcaagtca

SEQ ID NO: 386553 - DNA, 20 bp, Artificial Sequence
  Description of Artificial Sequence: Synthetic oligonucleotide
  Target: LAMA2; (+) strand; PAM type: YTN; PAM sequence: TTA
taatattgctttcaagtcaa

SEQ ID NO: 386554 - DNA, 20 bp, Artificial Sequence
  Description of Artificial Sequence: Synthetic oligonucleotide
  Target: LAMA2; (+) strand; PAM type: YTN; PAM sequence: TTG
ctttcaagtcaaataaatta

SEQ ID NO: 386555 - DNA, 20 bp, Artificial Sequence
  Description of Artificial Sequence: Synthetic oligonucleotide
  Target: LAMA2; (+) strand; PAM type: YTN; PAM sequence: CTT
tcaagtcaaataaattatta

SEQ ID NO: 386556 - DNA, 20 bp, Artificial Sequence
  Description of Artificial Sequence: Synthetic oligonucleotide
  Target: LAMA2; (+) strand; PAM type: YTN; PAM sequence: TTT
caagtcaaataaattattaa

SEQ ID NO: 386557 - DNA, 20 bp, Artificial Sequence
  Description of Artificial Sequence: Synthetic oligonucleotide
  Target: LAMA2; (+) strand; PAM type: YTN; PAM sequence: TTC
aagtcaaataaattattaac

SEQ ID NO: 386558 - DNA, 20 bp, Artificial Sequence
  Description of Artificial Sequence: Synthetic oligonucleotide
  Target: LAMA2; (+) strand; PAM type: YTN; PAM sequence: TTA
ttaacatgcacataattaac

SEQ ID NO: 386559 - DNA, 20 bp, Artificial Sequence
  Description of Artificial Sequence: Synthetic oligonucleotide
  Target: LAMA2; (+) strand; PAM type: YTN; PAM sequence: TTA
acatgcacataattaactag

SEQ ID NO: 386560 - DNA, 20 bp, Artificial Sequence
  Description of Artificial Sequence: Synthetic oligonucleotide
  Target: LAMA2; (+) strand; PAM type: YTN; PAM sequence: TTA
actagataatatatagatat

SEQ ID NO: 386561 - DNA, 20 bp, Artificial Sequence
  Description of Artificial Sequence: Synthetic oligonucleotide
  Target: LAMA2; (+) strand; PAM type: YTN; PAM sequence: CTA
gataatatatagatattctt

SEQ ID NO: 386562 - DNA, 20 bp, Artificial Sequence
  Description of Artificial Sequence: Synthetic oligonucleotide
  Target: LAMA2; (+) strand; PAM type: YTN; PAM sequence: TTC
ttaatgtaaacagtccttga

SEQ ID NO: 386563 - DNA, 20 bp, Artificial Sequence
  Description of Artificial Sequence: Synthetic oligonucleotide
  Target: LAMA2; (+) strand; PAM type: YTN; PAM sequence: CTT
aatgtaaacagtccttgaat

SEQ ID NO: 386564 - DNA, 20 bp, Artificial Sequence
  Description of Artificial Sequence: Synthetic oligonucleotide
  Target: LAMA2; (+) strand; PAM type: YTN; PAM sequence: TTA
atgtaaacagtccttgaatt

SEQ ID NO: 386565 - DNA, 20 bp, Artificial Sequence
  Description of Artificial Sequence: Synthetic oligonucleotide
  Target: LAMA2; (+) strand; PAM type: YTN; PAM sequence: CTT
gaattattaatcatcacttt

SEQ ID NO: 386566 - DNA, 20 bp, Artificial Sequence
  Description of Artificial Sequence: Synthetic oligonucleotide
  Target: LAMA2; (+) strand; PAM type: YTN; PAM sequence: TTG
aattattaatcatcactttt

SEQ ID NO: 386567 - DNA, 20 bp, Artificial Sequence
  Description of Artificial Sequence: Synthetic oligonucleotide
  Target: LAMA2; (+) strand; PAM type: YTN; PAM sequence: TTA
ttaatcatcacttttattaa

SEQ ID NO: 386568 - DNA, 20 bp, Artificial Sequence
  Description of Artificial Sequence: Synthetic oligonucleotide
  Target: LAMA2; (+) strand; PAM type: YTN; PAM sequence: TTA
atcatcacttttattaacta

SEQ ID NO: 386569 - DNA, 20 bp, Artificial Sequence
  Description of Artificial Sequence: Synthetic oligonucleotide
  Target: LAMA2; (+) strand; PAM type: YTN; PAM sequence: CTT
ttattaactatccagaagca

SEQ ID NO: 386570 - DNA, 20 bp, Artificial Sequence
  Description of Artificial Sequence: Synthetic oligonucleotide
  Target: LAMA2; (+) strand; PAM type: YTN; PAM sequence: TTT
tattaactatccagaagcaa

SEQ ID NO: 386571 - DNA, 20 bp, Artificial Sequence
  Description of Artificial Sequence: Synthetic oligonucleotide
  Target: LAMA2; (+) strand; PAM type: YTN; PAM sequence: TTT
attaactatccagaagcaaa

SEQ ID NO: 386572 - DNA, 20 bp, Artificial Sequence
  Description of Artificial Sequence: Synthetic oligonucleotide
  Target: LAMA2; (+) strand; PAM type: YTN; PAM sequence: TTA
ttaactatccagaagcaaac

SEQ ID NO: 386573 - DNA, 20 bp, Artificial Sequence
  Description of Artificial Sequence: Synthetic oligonucleotide
  Target: LAMA2; (+) strand; PAM type: YTN; PAM sequence: TTA
actatccagaagcaaacttg

SEQ ID NO: 386574 - DNA, 20 bp, Artificial Sequence
  Description of Artificial Sequence: Synthetic oligonucleotide
  Target: LAMA2; (+) strand; PAM type: YTN; PAM sequence: CTA
tccagaagcaaacttgaaat

SEQ ID NO: 386575 - DNA, 20 bp, Artificial Sequence
  Description of Artificial Sequence: Synthetic oligonucleotide
  Target: LAMA2; (+) strand; PAM type: YTN; PAM sequence: CTT
gaaataaaaagatcatatta

SEQ ID NO: 386576 - DNA, 20 bp, Artificial Sequence
  Description of Artificial Sequence: Synthetic oligonucleotide
  Target: LAMA2; (+) strand; PAM type: YTN; PAM sequence: TTG
aaataaaaagatcatattaa

SEQ ID NO: 386577 - DNA, 20 bp, Artificial Sequence
  Description of Artificial Sequence: Synthetic oligonucleotide
  Target: LAMA2; (+) strand; PAM type: YTN; PAM sequence: TTA
atgttaagcacaaaaattaa

SEQ ID NO: 386578 - DNA, 20 bp, Artificial Sequence
  Description of Artificial Sequence: Synthetic oligonucleotide
  Target: LAMA2; (+) strand; PAM type: YTN; PAM sequence: TTA
agcacaaaaattaaacaata

SEQ ID NO: 386579 - DNA, 20 bp, Artificial Sequence
  Description of Artificial Sequence: Synthetic oligonucleotide
  Target: LAMA2; (+) strand; PAM type: YTN; PAM sequence: TTA
aacaatagtacattaaaatc

SEQ ID NO: 386580 - DNA, 20 bp, Artificial Sequence
  Description of Artificial Sequence: Synthetic oligonucleotide
  Target: LAMA2; (+) strand; PAM type: YTN; PAM sequence: TTA
aaatctggggtagataatat

SEQ ID NO: 386581 - DNA, 20 bp, Artificial Sequence
  Description of Artificial Sequence: Synthetic oligonucleotide
  Target: LAMA2; (+) strand; PAM type: YTN; PAM sequence: CTG
gggtagataatataatggga

SEQ ID NO: 386582 - DNA, 20 bp, Artificial Sequence
  Description of Artificial Sequence: Synthetic oligonucleotide
  Target: LAMA2; (+) strand; PAM type: YTN; PAM sequence: TTA
tttggggaacatttctttta

SEQ ID NO: 386583 - DNA, 20 bp, Artificial Sequence
  Description of Artificial Sequence: Synthetic oligonucleotide
  Target: LAMA2; (+) strand; PAM type: YTN; PAM sequence: TTT
ggggaacatttcttttaaag

SEQ ID NO: 386584 - DNA, 20 bp, Artificial Sequence
  Description of Artificial Sequence: Synthetic oligonucleotide
  Target: LAMA2; (+) strand; PAM type: YTN; PAM sequence: TTG
gggaacatttcttttaaaga

SEQ ID NO: 386585 - DNA, 20 bp, Artificial Sequence
  Description of Artificial Sequence: Synthetic oligonucleotide
  Target: LAMA2; (+) strand; PAM type: YTN; PAM sequence: TTT
cttttaaagagaattggcat

SEQ ID NO: 386586 - DNA, 20 bp, Artificial Sequence
  Description of Artificial Sequence: Synthetic oligonucleotide
  Target: LAMA2; (+) strand; PAM type: YTN; PAM sequence: TTC
ttttaaagagaattggcatt

SEQ ID NO: 386587 - DNA, 20 bp, Artificial Sequence
  Description of Artificial Sequence: Synthetic oligonucleotide
  Target: LAMA2; (+) strand; PAM type: YTN; PAM sequence: CTT
ttaaagagaattggcattct

SEQ ID NO: 386588 - DNA, 20 bp, Artificial Sequence
  Description of Artificial Sequence: Synthetic oligonucleotide
  Target: LAMA2; (+) strand; PAM type: YTN; PAM sequence: TTT
taaagagaattggcattctg

SEQ ID NO: 386589 - DNA, 20 bp, Artificial Sequence
  Description of Artificial Sequence: Synthetic oligonucleotide
  Target: LAMA2; (+) strand; PAM type: YTN; PAM sequence: TTT
aaagagaattggcattctgc

SEQ ID NO: 386590 - DNA, 20 bp, Artificial Sequence
  Description of Artificial Sequence: Synthetic oligonucleotide
  Target: LAMA2; (+) strand; PAM type: YTN; PAM sequence: TTA
aagagaattggcattctgcc

SEQ ID NO: 386591 - DNA, 20 bp, Artificial Sequence
  Description of Artificial Sequence: Synthetic oligonucleotide
  Target: LAMA2; (+) strand; PAM type: YTN; PAM sequence: TTG
gcattctgcccatcaacaac

SEQ ID NO: 386592 - DNA, 20 bp, Artificial Sequence
  Description of Artificial Sequence: Synthetic oligonucleotide
  Target: LAMA2; (+) strand; PAM type: YTN; PAM sequence: TTC
tgcccatcaacaacaatggc

SEQ ID NO: 386593 - DNA, 20 bp, Artificial Sequence
  Description of Artificial Sequence: Synthetic oligonucleotide
  Target: LAMA2; (+) strand; PAM type: YTN; PAM sequence: CTG
cccatcaacaacaatggctt

SEQ ID NO: 386594 - DNA, 20 bp, Artificial Sequence
  Description of Artificial Sequence: Synthetic oligonucleotide
  Target: LAMA2; (+) strand; PAM type: YTN; PAM sequence: CTT
tttcatttattgttgatgat

SEQ ID NO: 386595 - DNA, 20 bp, Artificial Sequence
  Description of Artificial Sequence: Synthetic oligonucleotide
  Target: LAMA2; (+) strand; PAM type: YTN; PAM sequence: TTT
ttcatttattgttgatgatc

SEQ ID NO: 386596 - DNA, 20 bp, Artificial Sequence
  Description of Artificial Sequence: Synthetic oligonucleotide
  Target: LAMA2; (+) strand; PAM type: YTN; PAM sequence: TTT
tcatttattgttgatgatca

SEQ ID NO: 386597 - DNA, 20 bp, Artificial Sequence
  Description of Artificial Sequence: Synthetic oligonucleotide
  Target: LAMA2; (+) strand; PAM type: YTN; PAM sequence: TTT
catttattgttgatgatcaa

SEQ ID NO: 386598 - DNA, 20 bp, Artificial Sequence
  Description of Artificial Sequence: Synthetic oligonucleotide
  Target: LAMA2; (+) strand; PAM type: YTN; PAM sequence: TTC
atttattgttgatgatcaat

SEQ ID NO: 386599 - DNA, 20 bp, Artificial Sequence
  Description of Artificial Sequence: Synthetic oligonucleotide
  Target: LAMA2; (+) strand; PAM type: YTN; PAM sequence: TTT
attgttgatgatcaatactt

SEQ ID NO: 386600 - DNA, 20 bp, Artificial Sequence
  Description of Artificial Sequence: Synthetic oligonucleotide
  Target: LAMA2; (+) strand; PAM type: YTN; PAM sequence: TTA
ttgttgatgatcaatacttt

SEQ ID NO: 386601 - DNA, 20 bp, Artificial Sequence
  Description of Artificial Sequence: Synthetic oligonucleotide
  Target: LAMA2; (+) strand; PAM type: YTN; PAM sequence: TTG
ttgatgatcaatactttttt

SEQ ID NO: 386602 - DNA, 20 bp, Artificial Sequence
  Description of Artificial Sequence: Synthetic oligonucleotide
  Target: LAMA2; (+) strand; PAM type: YTN; PAM sequence: TTG
atgatcaatacttttttaac

SEQ ID NO: 386603 - DNA, 20 bp, Artificial Sequence
  Description of Artificial Sequence: Synthetic oligonucleotide
  Target: LAMA2; (+) strand; PAM type: YTN; PAM sequence: CTT
ttttaacattttgaatacat

SEQ ID NO: 386604 - DNA, 20 bp, Artificial Sequence
  Description of Artificial Sequence: Synthetic oligonucleotide
  Target: LAMA2; (+) strand; PAM type: YTN; PAM sequence: TTT
tttaacattttgaatacatt

SEQ ID NO: 386605 - DNA, 20 bp, Artificial Sequence
  Description of Artificial Sequence: Synthetic oligonucleotide
  Target: LAMA2; (+) strand; PAM type: YTN; PAM sequence: TTT
ttaacattttgaatacattt

SEQ ID NO: 386606 - DNA, 20 bp, Artificial Sequence
  Description of Artificial Sequence: Synthetic oligonucleotide
  Target: LAMA2; (+) strand; PAM type: YTN; PAM sequence: TTT
taacattttgaatacattta

SEQ ID NO: 386607 - DNA, 20 bp, Artificial Sequence
  Description of Artificial Sequence: Synthetic oligonucleotide
  Target: LAMA2; (+) strand; PAM type: YTN; PAM sequence: TTT
aacattttgaatacatttat

SEQ ID NO: 386608 - DNA, 20 bp, Artificial Sequence
  Description of Artificial Sequence: Synthetic oligonucleotide
  Target: LAMA2; (+) strand; PAM type: YTN; PAM sequence: TTA
acattttgaatacatttatc

SEQ ID NO: 386609 - DNA, 20 bp, Artificial Sequence
  Description of Artificial Sequence: Synthetic oligonucleotide
  Target: LAMA2; (+) strand; PAM type: YTN; PAM sequence: TTT
tgaatacatttatcattaga

SEQ ID NO: 386610 - DNA, 20 bp, Artificial Sequence
  Description of Artificial Sequence: Synthetic oligonucleotide
  Target: LAMA2; (+) strand; PAM type: YTN; PAM sequence: TTT
gaatacatttatcattagaa

SEQ ID NO: 386611 - DNA, 20 bp, Artificial Sequence
  Description of Artificial Sequence: Synthetic oligonucleotide
  Target: LAMA2; (+) strand; PAM type: YTN; PAM sequence: TTG
aatacatttatcattagaaa

SEQ ID NO: 386612 - DNA, 20 bp, Artificial Sequence
  Description of Artificial Sequence: Synthetic oligonucleotide
  Target: LAMA2; (+) strand; PAM type: YTN; PAM sequence: TTT
atcattagaaatcgtaattc

SEQ ID NO: 386613 - DNA, 20 bp, Artificial Sequence
  Description of Artificial Sequence: Synthetic oligonucleotide
  Target: LAMA2; (+) strand; PAM type: YTN; PAM sequence: TTA
tcattagaaatcgtaattca

SEQ ID NO: 386614 - DNA, 20 bp, Artificial Sequence
  Description of Artificial Sequence: Synthetic oligonucleotide
  Target: LAMA2; (+) strand; PAM type: YTN; PAM sequence: TTA
gaaatcgtaattcatctttt

SEQ ID NO: 386615 - DNA, 20 bp, Artificial Sequence
  Description of Artificial Sequence: Synthetic oligonucleotide
  Target: LAMA2; (+) strand; PAM type: YTN; PAM sequence: TTC
atcttttccctatcacatat

SEQ ID NO: 386616 - DNA, 20 bp, Artificial Sequence
  Description of Artificial Sequence: Synthetic oligonucleotide
  Target: LAMA2; (+) strand; PAM type: YTN; PAM sequence: CTT
ttccctatcacatatgtggg

SEQ ID NO: 386617 - DNA, 20 bp, Artificial Sequence
  Description of Artificial Sequence: Synthetic oligonucleotide
  Target: LAMA2; (+) strand; PAM type: YTN; PAM sequence: TTT
tccctatcacatatgtgggt

SEQ ID NO: 386618 - DNA, 20 bp, Artificial Sequence
  Description of Artificial Sequence: Synthetic oligonucleotide
  Target: LAMA2; (+) strand; PAM type: YTN; PAM sequence: TTT
ccctatcacatatgtgggtt

SEQ ID NO: 386619 - DNA, 20 bp, Artificial Sequence
  Description of Artificial Sequence: Synthetic oligonucleotide
  Target: LAMA2; (+) strand; PAM type: YTN; PAM sequence: TTC
cctatcacatatgtgggttt

SEQ ID NO: 386620 - DNA, 20 bp, Artificial Sequence
  Description of Artificial Sequence: Synthetic oligonucleotide
  Target: LAMA2; (+) strand; PAM type: YTN; PAM sequence: CTA
tcacatatgtgggtttctaa

SEQ ID NO: 386621 - DNA, 20 bp, Artificial Sequence
  Description of Artificial Sequence: Synthetic oligonucleotide
  Target: LAMA2; (+) strand; PAM type: YTN; PAM sequence: TTT
ctaatctccacttgtcccat

SEQ ID NO: 386622 - DNA, 20 bp, Artificial Sequence
  Description of Artificial Sequence: Synthetic oligonucleotide
  Target: LAMA2; (+) strand; PAM type: YTN; PAM sequence: TTC
taatctccacttgtcccatg

SEQ ID NO: 386623 - DNA, 20 bp, Artificial Sequence
  Description of Artificial Sequence: Synthetic oligonucleotide
  Target: LAMA2; (+) strand; PAM type: YTN; PAM sequence: CTA
atctccacttgtcccatgtg

SEQ ID NO: 386624 - DNA, 20 bp, Artificial Sequence
  Description of Artificial Sequence: Synthetic oligonucleotide
  Target: LAMA2; (+) strand; PAM type: YTN; PAM sequence: CTC
cacttgtcccatgtgatatt

SEQ ID NO: 386625 - DNA, 20 bp, Artificial Sequence
  Description of Artificial Sequence: Synthetic oligonucleotide
  Target: LAMA2; (+) strand; PAM type: YTN; PAM sequence: CTT
gtcccatgtgatattaagaa

SEQ ID NO: 386626 - DNA, 20 bp, Artificial Sequence
  Description of Artificial Sequence: Synthetic oligonucleotide
  Target: LAMA2; (+) strand; PAM type: YTN; PAM sequence: TTG
tcccatgtgatattaagaaa

SEQ ID NO: 386627 - DNA, 20 bp, Artificial Sequence
  Description of Artificial Sequence: Synthetic oligonucleotide
  Target: LAMA2; (+) strand; PAM type: YTN; PAM sequence: TTA
agaaaagggccaatcctcca

SEQ ID NO: 386628 - DNA, 20 bp, Artificial Sequence
  Description of Artificial Sequence: Synthetic oligonucleotide
  Target: LAMA2; (+) strand; PAM type: YTN; PAM sequence: CTC
cagttacaaagctacaccag

SEQ ID NO: 386629 - DNA, 20 bp, Artificial Sequence
  Description of Artificial Sequence: Synthetic oligonucleotide
  Target: LAMA2; (+) strand; PAM type: YTN; PAM sequence: TTA
caaagctacaccagttttat

SEQ ID NO: 386630 - DNA, 20 bp, Artificial Sequence
  Description of Artificial Sequence: Synthetic oligonucleotide
  Target: LAMA2; (+) strand; PAM type: YTN; PAM sequence: CTA
caccagttttataattctta

SEQ ID NO: 386631 - DNA, 20 bp, Artificial Sequence
  Description of Artificial Sequence: Synthetic oligonucleotide
  Target: LAMA2; (+) strand; PAM type: YTN; PAM sequence: TTT
tataattcttatttgcttta

SEQ ID NO: 386632 - DNA, 20 bp, Artificial Sequence
  Description of Artificial Sequence: Synthetic oligonucleotide
  Target: LAMA2; (+) strand; PAM type: YTN; PAM sequence: TTT
ataattcttatttgctttat

SEQ ID NO: 386633 - DNA, 20 bp, Artificial Sequence
  Description of Artificial Sequence: Synthetic oligonucleotide
  Target: LAMA2; (+) strand; PAM type: YTN; PAM sequence: TTA
taattcttatttgctttatt

SEQ ID NO: 386634 - DNA, 20 bp, Artificial Sequence
  Description of Artificial Sequence: Synthetic oligonucleotide
  Target: LAMA2; (+) strand; PAM type: YTN; PAM sequence: TTC
ttatttgctttattcttgcc

SEQ ID NO: 386635 - DNA, 20 bp, Artificial Sequence
  Description of Artificial Sequence: Synthetic oligonucleotide
  Target: LAMA2; (+) strand; PAM type: YTN; PAM sequence: CTT
atttgctttattcttgcccc

SEQ ID NO: 386636 - DNA, 20 bp, Artificial Sequence
  Description of Artificial Sequence: Synthetic oligonucleotide
  Target: LAMA2; (+) strand; PAM type: YTN; PAM sequence: TTA
tttgctttattcttgcccca

SEQ ID NO: 386637 - DNA, 20 bp, Artificial Sequence
  Description of Artificial Sequence: Synthetic oligonucleotide
  Target: LAMA2; (+) strand; PAM type: YTN; PAM sequence: TTT
gctttattcttgccccacaa

SEQ ID NO: 386638 - DNA, 20 bp, Artificial Sequence
  Description of Artificial Sequence: Synthetic oligonucleotide
  Target: LAMA2; (+) strand; PAM type: YTN; PAM sequence: TTG
ctttattcttgccccacaag

SEQ ID NO: 386639 - DNA, 20 bp, Artificial Sequence
  Description of Artificial Sequence: Synthetic oligonucleotide
  Target: LAMA2; (+) strand; PAM type: YTN; PAM sequence: CTT
tattcttgccccacaaggaa

SEQ ID NO: 386640 - DNA, 20 bp, Artificial Sequence
  Description of Artificial Sequence: Synthetic oligonucleotide
  Target: LAMA2; (+) strand; PAM type: YTN; PAM sequence: TTT
attcttgccccacaaggaaa

SEQ ID NO: 386641 - DNA, 20 bp, Artificial Sequence
  Description of Artificial Sequence: Synthetic oligonucleotide
  Target: LAMA2; (+) strand; PAM type: YTN; PAM sequence: TTA
ttcttgccccacaaggaaat

SEQ ID NO: 386642 - DNA, 20 bp, Artificial Sequence
  Description of Artificial Sequence: Synthetic oligonucleotide
  Target: LAMA2; (+) strand; PAM type: YTN; PAM sequence: TTC
ttgccccacaaggaaatgta

SEQ ID NO: 386643 - DNA, 20 bp, Artificial Sequence
  Description of Artificial Sequence: Synthetic oligonucleotide
  Target: LAMA2; (+) strand; PAM type: YTN; PAM sequence: CTT
gccccacaaggaaatgtatt

SEQ ID NO: 386644 - DNA, 20 bp, Artificial Sequence
  Description of Artificial Sequence: Synthetic oligonucleotide
  Target: LAMA2; (+) strand; PAM type: YTN; PAM sequence: TTG
ccccacaaggaaatgtattt

SEQ ID NO: 386645 - DNA, 20 bp, Artificial Sequence
  Description of Artificial Sequence: Synthetic oligonucleotide
  Target: LAMA2; (+) strand; PAM type: YTN; PAM sequence: TTT
acaggggttatacatggtat

SEQ ID NO: 386646 - DNA, 20 bp, Artificial Sequence
  Description of Artificial Sequence: Synthetic oligonucleotide
  Target: LAMA2; (+) strand; PAM type: YTN; PAM sequence: TTA
caggggttatacatggtatt

SEQ ID NO: 386647 - DNA, 20 bp, Artificial Sequence
  Description of Artificial Sequence: Synthetic oligonucleotide
  Target: LAMA2; (+) strand; PAM type: YTN; PAM sequence: TTA
tacatggtatttagttcagt

SEQ ID NO: 386648 - DNA, 20 bp, Artificial Sequence
  Description of Artificial Sequence: Synthetic oligonucleotide
  Target: LAMA2; (+) strand; PAM type: YTN; PAM sequence: TTT
agttcagttgctggactgga

SEQ ID NO: 386649 - DNA, 20 bp, Artificial Sequence
  Description of Artificial Sequence: Synthetic oligonucleotide
  Target: LAMA2; (+) strand; PAM type: YTN; PAM sequence: TTA
gttcagttgctggactggaa

SEQ ID NO: 386650 - DNA, 20 bp, Artificial Sequence
  Description of Artificial Sequence: Synthetic oligonucleotide
  Target: LAMA2; (+) strand; PAM type: YTN; PAM sequence: TTC
agttgctggactggaagtgt

SEQ ID NO: 386651 - DNA, 20 bp, Artificial Sequence
  Description of Artificial Sequence: Synthetic oligonucleotide
  Target: LAMA2; (+) strand; PAM type: YTN; PAM sequence: TTG
ctggactggaagtgtttata

SEQ ID NO: 386652 - DNA, 20 bp, Artificial Sequence
  Description of Artificial Sequence: Synthetic oligonucleotide
  Target: LAMA2; (+) strand; PAM type: YTN; PAM sequence: CTG
gactggaagtgtttatattc

SEQ ID NO: 386653 - DNA, 20 bp, Artificial Sequence
  Description of Artificial Sequence: Synthetic oligonucleotide
  Target: LAMA2; (+) strand; PAM type: YTN; PAM sequence: CTG
gaagtgtttatattcttttt

SEQ ID NO: 386654 - DNA, 20 bp, Artificial Sequence
  Description of Artificial Sequence: Synthetic oligonucleotide
  Target: LAMA2; (+) strand; PAM type: YTN; PAM sequence: TTT
atattctttttaaaagaata

SEQ ID NO: 386655 - DNA, 20 bp, Artificial Sequence
  Description of Artificial Sequence: Synthetic oligonucleotide
  Target: LAMA2; (+) strand; PAM type: YTN; PAM sequence: TTA
tattctttttaaaagaatag

SEQ ID NO: 386656 - DNA, 20 bp, Artificial Sequence
  Description of Artificial Sequence: Synthetic oligonucleotide
  Target: LAMA2; (+) strand; PAM type: YTN; PAM sequence: TTC
tttttaaaagaatagcagtt

SEQ ID NO: 386657 - DNA, 20 bp, Artificial Sequence
  Description of Artificial Sequence: Synthetic oligonucleotide
  Target: LAMA2; (+) strand; PAM type: YTN; PAM sequence: CTT
tttaaaagaatagcagtttt

SEQ ID NO: 386658 - DNA, 20 bp, Artificial Sequence
  Description of Artificial Sequence: Synthetic oligonucleotide
  Target: LAMA2; (+) strand; PAM type: YTN; PAM sequence: TTT
ttaaaagaatagcagttttt

SEQ ID NO: 386659 - DNA, 20 bp, Artificial Sequence
  Description of Artificial Sequence: Synthetic oligonucleotide
  Target: LAMA2; (+) strand; PAM type: YTN; PAM sequence: TTT
taaaagaatagcagttttta

SEQ ID NO: 386660 - DNA, 20 bp, Artificial Sequence
  Description of Artificial Sequence: Synthetic oligonucleotide
  Target: LAMA2; (+) strand; PAM type: YTN; PAM sequence: TTT
aaaagaatagcagtttttat

SEQ ID NO: 386661 - DNA, 20 bp, Artificial Sequence
  Description of Artificial Sequence: Synthetic oligonucleotide
  Target: LAMA2; (+) strand; PAM type: YTN; PAM sequence: TTA
aaagaatagcagtttttatt

SEQ ID NO: 386662 - DNA, 20 bp, Artificial Sequence
  Description of Artificial Sequence: Synthetic oligonucleotide
  Target: LAMA2; (+) strand; PAM type: YTN; PAM sequence: TTT
ttattccagaaaaaaatatt

SEQ ID NO: 386663 - DNA, 20 bp, Artificial Sequence
  Description of Artificial Sequence: Synthetic oligonucleotide
  Target: LAMA2; (+) strand; PAM type: YTN; PAM sequence: TTT
tattccagaaaaaaatatta

SEQ ID NO: 386664 - DNA, 20 bp, Artificial Sequence
  Description of Artificial Sequence: Synthetic oligonucleotide
  Target: LAMA2; (+) strand; PAM type: YTN; PAM sequence: TTT
attccagaaaaaaatattaa

SEQ ID NO: 386665 - DNA, 20 bp, Artificial Sequence
  Description of Artificial Sequence: Synthetic oligonucleotide
  Target: LAMA2; (+) strand; PAM type: YTN; PAM sequence: TTA
ttccagaaaaaaatattaaa

SEQ ID NO: 386666 - DNA, 20 bp, Artificial Sequence
  Description of Artificial Sequence: Synthetic oligonucleotide
  Target: LAMA2; (+) strand; PAM type: YTN; PAM sequence: TTC
cagaaaaaaatattaaatta

SEQ ID NO: 386667 - DNA, 20 bp, Artificial Sequence
  Description of Artificial Sequence: Synthetic oligonucleotide
  Target: LAMA2; (+) strand; PAM type: YTN; PAM sequence: TTA
aattataggattgtttttga

SEQ ID NO: 386668 - DNA, 20 bp, Artificial Sequence
  Description of Artificial Sequence: Synthetic oligonucleotide
  Target: LAMA2; (+) strand; PAM type: YTN; PAM sequence: TTA
taggattgtttttgatatct

SEQ ID NO: 386669 - DNA, 20 bp, Artificial Sequence
  Description of Artificial Sequence: Synthetic oligonucleotide
  Target: LAMA2; (+) strand; PAM type: YTN; PAM sequence: TTG
tttttgatatctagactctt

SEQ ID NO: 386670 - DNA, 20 bp, Artificial Sequence
  Description of Artificial Sequence: Synthetic oligonucleotide
  Target: LAMA2; (+) strand; PAM type: YTN; PAM sequence: TTT
ttgatatctagactcttttg

SEQ ID NO: 386671 - DNA, 20 bp, Artificial Sequence
  Description of Artificial Sequence: Synthetic oligonucleotide
  Target: LAMA2; (+) strand; PAM type: YTN; PAM sequence: TTT
tgatatctagactcttttgc

SEQ ID NO: 386672 - DNA, 20 bp, Artificial Sequence
  Description of Artificial Sequence: Synthetic oligonucleotide
  Target: LAMA2; (+) strand; PAM type: YTN; PAM sequence: TTT
gatatctagactcttttgct

SEQ ID NO: 386673 - DNA, 20 bp, Artificial Sequence
  Description of Artificial Sequence: Synthetic oligonucleotide
  Target: LAMA2; (+) strand; PAM type: YTN; PAM sequence: TTG
atatctagactcttttgcta

SEQ ID NO: 386674 - DNA, 20 bp, Artificial Sequence
  Description of Artificial Sequence: Synthetic oligonucleotide
  Target: LAMA2; (+) strand; PAM type: YTN; PAM sequence: CTA
gactcttttgctaaagcaca

SEQ ID NO: 386675 - DNA, 20 bp, Artificial Sequence
  Description of Artificial Sequence: Synthetic oligonucleotide
  Target: LAMA2; (+) strand; PAM type: YTN; PAM sequence: CTC
ttttgctaaagcacagttaa

SEQ ID NO: 386676 - DNA, 20 bp, Artificial Sequence
  Description of Artificial Sequence: Synthetic oligonucleotide
  Target: LAMA2; (+) strand; PAM type: YTN; PAM sequence: CTT
ttgctaaagcacagttaatt

SEQ ID NO: 386677 - DNA, 20 bp, Artificial Sequence
  Description of Artificial Sequence: Synthetic oligonucleotide
  Target: LAMA2; (+) strand; PAM type: YTN; PAM sequence: TTT
tgctaaagcacagttaatta

SEQ ID NO: 386678 - DNA, 20 bp, Artificial Sequence
  Description of Artificial Sequence: Synthetic oligonucleotide
  Target: LAMA2; (+) strand; PAM type: YTN; PAM sequence: TTT
gctaaagcacagttaattat

SEQ ID NO: 386679 - DNA, 20 bp, Artificial Sequence
  Description of Artificial Sequence: Synthetic oligonucleotide
  Target: LAMA2; (+) strand; PAM type: YTN; PAM sequence: TTG
ctaaagcacagttaattatc

SEQ ID NO: 386680 - DNA, 20 bp, Artificial Sequence
  Description of Artificial Sequence: Synthetic oligonucleotide
  Target: LAMA2; (+) strand; PAM type: YTN; PAM sequence: CTA
aagcacagttaattatctta

SEQ ID NO: 386681 - DNA, 20 bp, Artificial Sequence
  Description of Artificial Sequence: Synthetic oligonucleotide
  Target: LAMA2; (+) strand; PAM type: YTN; PAM sequence: TTA
attatcttataattatgctg

SEQ ID NO: 386682 - DNA, 20 bp, Artificial Sequence
  Description of Artificial Sequence: Synthetic oligonucleotide
  Target: LAMA2; (+) strand; PAM type: YTN; PAM sequence: TTA
tcttataattatgctgtata

SEQ ID NO: 386683 - DNA, 20 bp, Artificial Sequence
  Description of Artificial Sequence: Synthetic oligonucleotide
  Target: LAMA2; (+) strand; PAM type: YTN; PAM sequence: CTT
ataattatgctgtatagatt

SEQ ID NO: 386684 - DNA, 20 bp, Artificial Sequence
  Description of Artificial Sequence: Synthetic oligonucleotide
  Target: LAMA2; (+) strand; PAM type: YTN; PAM sequence: TTA
taattatgctgtatagattt

SEQ ID NO: 386685 - DNA, 20 bp, Artificial Sequence
  Description of Artificial Sequence: Synthetic oligonucleotide
  Target: LAMA2; (+) strand; PAM type: YTN; PAM sequence: TTA
tgctgtatagattttccata

SEQ ID NO: 386686 - DNA, 20 bp, Artificial Sequence
  Description of Artificial Sequence: Synthetic oligonucleotide
  Target: LAMA2; (+) strand; PAM type: YTN; PAM sequence: CTG
tatagattttccatatactg

SEQ ID NO: 386687 - DNA, 20 bp, Artificial Sequence
  Description of Artificial Sequence: Synthetic oligonucleotide
  Target: LAMA2; (+) strand; PAM type: YTN; PAM sequence: TTT
tccatatactgctcttaagc

SEQ ID NO: 386688 - DNA, 20 bp, Artificial Sequence
  Description of Artificial Sequence: Synthetic oligonucleotide
  Target: LAMA2; (+) strand; PAM type: YTN; PAM sequence: TTT
ccatatactgctcttaagca

SEQ ID NO: 386689 - DNA, 20 bp, Artificial Sequence
  Description of Artificial Sequence: Synthetic oligonucleotide
  Target: LAMA2; (+) strand; PAM type: YTN; PAM sequence: TTC
catatactgctcttaagcat

SEQ ID NO: 386690 - DNA, 20 bp, Artificial Sequence
  Description of Artificial Sequence: Synthetic oligonucleotide
  Target: LAMA2; (+) strand; PAM type: YTN; PAM sequence: CTG
ctcttaagcattagtgattt

SEQ ID NO: 386691 - DNA, 20 bp, Artificial Sequence
  Description of Artificial Sequence: Synthetic oligonucleotide
  Target: LAMA2; (+) strand; PAM type: YTN; PAM sequence: CTC
ttaagcattagtgatttcca

SEQ ID NO: 386692 - DNA, 20 bp, Artificial Sequence
  Description of Artificial Sequence: Synthetic oligonucleotide
  Target: LAMA2; (+) strand; PAM type: YTN; PAM sequence: CTT
aagcattagtgatttccact

SEQ ID NO: 386693 - DNA, 20 bp, Artificial Sequence
  Description of Artificial Sequence: Synthetic oligonucleotide
  Target: LAMA2; (+) strand; PAM type: YTN; PAM sequence: TTA
agcattagtgatttccactt

SEQ ID NO: 386694 - DNA, 20 bp, Artificial Sequence
  Description of Artificial Sequence: Synthetic oligonucleotide
  Target: LAMA2; (+) strand; PAM type: YTN; PAM sequence: TTA
gtgatttccacttacttcta

SEQ ID NO: 386695 - DNA, 20 bp, Artificial Sequence
  Description of Artificial Sequence: Synthetic oligonucleotide
  Target: LAMA2; (+) strand; PAM type: YTN; PAM sequence: TTT
ccacttacttctaggaatgt

SEQ ID NO: 386696 - DNA, 20 bp, Artificial Sequence
  Description of Artificial Sequence: Synthetic oligonucleotide
  Target: LAMA2; (+) strand; PAM type: YTN; PAM sequence: TTC
cacttacttctaggaatgtt

SEQ ID NO: 386697 - DNA, 20 bp, Artificial Sequence
  Description of Artificial Sequence: Synthetic oligonucleotide
  Target: LAMA2; (+) strand; PAM type: YTN; PAM sequence: CTT
acttctaggaatgttttctc

SEQ ID NO: 386698 - DNA, 20 bp, Artificial Sequence
  Description of Artificial Sequence: Synthetic oligonucleotide
  Target: LAMA2; (+) strand; PAM type: YTN; PAM sequence: TTA
cttctaggaatgttttctct

SEQ ID NO: 386699 - DNA, 20 bp, Artificial Sequence
  Description of Artificial Sequence: Synthetic oligonucleotide
  Target: LAMA2; (+) strand; PAM type: YTN; PAM sequence: CTT
ctaggaatgttttctcttca

SEQ ID NO: 386700 - DNA, 20 bp, Artificial Sequence
  Description of Artificial Sequence: Synthetic oligonucleotide
  Target: LAMA2; (+) strand; PAM type: YTN; PAM sequence: TTC
taggaatgttttctcttcac

SEQ ID NO: 386701 - DNA, 20 bp, Artificial Sequence
  Description of Artificial Sequence: Synthetic oligonucleotide
  Target: LAMA2; (+) strand; PAM type: YTN; PAM sequence: CTA
ggaatgttttctcttcacct

SEQ ID NO: 386702 - DNA, 20 bp, Artificial Sequence
  Description of Artificial Sequence: Synthetic oligonucleotide
  Target: LAMA2; (+) strand; PAM type: YTN; PAM sequence: TTT
tctcttcacctttcactaaa

SEQ ID NO: 386703 - DNA, 20 bp, Artificial Sequence
  Description of Artificial Sequence: Synthetic oligonucleotide
  Target: LAMA2; (+) strand; PAM type: YTN; PAM sequence: TTT
ctcttcacctttcactaaac

SEQ ID NO: 386704 - DNA, 20 bp, Artificial Sequence
  Description of Artificial Sequence: Synthetic oligonucleotide
  Target: LAMA2; (+) strand; PAM type: YTN; PAM sequence: TTC
tcttcacctttcactaaact

SEQ ID NO: 386705 - DNA, 20 bp, Artificial Sequence
  Description of Artificial Sequence: Synthetic oligonucleotide
  Target: LAMA2; (+) strand; PAM type: YTN; PAM sequence: CTC
ttcacctttcactaaactaa

SEQ ID NO: 386706 - DNA, 20 bp, Artificial Sequence
  Description of Artificial Sequence: Synthetic oligonucleotide
  Target: LAMA2; (+) strand; PAM type: YTN; PAM sequence: CTT
cacctttcactaaactaact

SEQ ID NO: 386707 - DNA, 20 bp, Artificial Sequence
  Description of Artificial Sequence: Synthetic oligonucleotide
  Target: LAMA2; (+) strand; PAM type: YTN; PAM sequence: TTC
acctttcactaaactaactc

SEQ ID NO: 386708 - DNA, 20 bp, Artificial Sequence
  Description of Artificial Sequence: Synthetic oligonucleotide
  Target: LAMA2; (+) strand; PAM type: YTN; PAM sequence: CTT
tcactaaactaactctaaga

SEQ ID NO: 386709 - DNA, 20 bp, Artificial Sequence
  Description of Artificial Sequence: Synthetic oligonucleotide
  Target: LAMA2; (+) strand; PAM type: YTN; PAM sequence: TTT
cactaaactaactctaagaa

SEQ ID NO: 386710 - DNA, 20 bp, Artificial Sequence
  Description of Artificial Sequence: Synthetic oligonucleotide
  Target: LAMA2; (+) strand; PAM type: YTN; PAM sequence: TTC
actaaactaactctaagaat

SEQ ID NO: 386711 - DNA, 20 bp, Artificial Sequence
  Description of Artificial Sequence: Synthetic oligonucleotide
  Target: LAMA2; (+) strand; PAM type: YTN; PAM sequence: CTA
aactaactctaagaattgtt

SEQ ID NO: 386712 - DNA, 20 bp, Artificial Sequence
  Description of Artificial Sequence: Synthetic oligonucleotide
  Target: LAMA2; (+) strand; PAM type: YTN; PAM sequence: CTA
actctaagaattgttacaca

SEQ ID NO: 386713 - DNA, 20 bp, Artificial Sequence
  Description of Artificial Sequence: Synthetic oligonucleotide
  Target: LAMA2; (+) strand; PAM type: YTN; PAM sequence: CTC
taagaattgttacacagagt

SEQ ID NO: 386714 - DNA, 20 bp, Artificial Sequence
  Description of Artificial Sequence: Synthetic oligonucleotide
  Target: LAMA2; (+) strand; PAM type: YTN; PAM sequence: CTA
agaattgttacacagagtat

SEQ ID NO: 386715 - DNA, 20 bp, Artificial Sequence
  Description of Artificial Sequence: Synthetic oligonucleotide
  Target: LAMA2; (+) strand; PAM type: YTN; PAM sequence: TTG
ttacacagagtatctttaga

SEQ ID NO: 386716 - DNA, 20 bp, Artificial Sequence
  Description of Artificial Sequence: Synthetic oligonucleotide
  Target: LAMA2; (+) strand; PAM type: YTN; PAM sequence: TTA
cacagagtatctttagactt

SEQ ID NO: 386717 - DNA, 20 bp, Artificial Sequence
  Description of Artificial Sequence: Synthetic oligonucleotide
  Target: LAMA2; (+) strand; PAM type: YTN; PAM sequence: CTT
tagacttttcatcttttctc

SEQ ID NO: 386718 - DNA, 20 bp, Artificial Sequence
  Description of Artificial Sequence: Synthetic oligonucleotide
  Target: LAMA2; (+) strand; PAM type: YTN; PAM sequence: TTT
agacttttcatcttttctct

SEQ ID NO: 386719 - DNA, 20 bp, Artificial Sequence
  Description of Artificial Sequence: Synthetic oligonucleotide
  Target: LAMA2; (+) strand; PAM type: YTN; PAM sequence: TTA
gacttttcatcttttctctt

SEQ ID NO: 386720 - DNA, 20 bp, Artificial Sequence
  Description of Artificial Sequence: Synthetic oligonucleotide
  Target: LAMA2; (+) strand; PAM type: YTN; PAM sequence: CTT
ttcatcttttctcttcttct

SEQ ID NO: 386721 - DNA, 20 bp, Artificial Sequence
  Description of Artificial Sequence: Synthetic oligonucleotide
  Target: LAMA2; (+) strand; PAM type: YTN; PAM sequence: TTT
tcatcttttctcttcttcta

SEQ ID NO: 386722 - DNA, 20 bp, Artificial Sequence
  Description of Artificial Sequence: Synthetic oligonucleotide
  Target: LAMA2; (+) strand; PAM type: YTN; PAM sequence: TTT
catcttttctcttcttctaa

SEQ ID NO: 386723 - DNA, 20 bp, Artificial Sequence
  Description of Artificial Sequence: Synthetic oligonucleotide
  Target: LAMA2; (+) strand; PAM type: YTN; PAM sequence: TTC
atcttttctcttcttctaaa

SEQ ID NO: 386724 - DNA, 20 bp, Artificial Sequence
  Description of Artificial Sequence: Synthetic oligonucleotide
  Target: LAMA2; (+) strand; PAM type: YTN; PAM sequence: CTT
ttctcttcttctaaaatttc

SEQ ID NO: 386725 - DNA, 20 bp, Artificial Sequence
  Description of Artificial Sequence: Synthetic oligonucleotide
  Target: LAMA2; (+) strand; PAM type: YTN; PAM sequence: TTT
tctcttcttctaaaatttct

SEQ ID NO: 386726 - DNA, 20 bp, Artificial Sequence
  Description of Artificial Sequence: Synthetic oligonucleotide
  Target: LAMA2; (+) strand; PAM type: YTN; PAM sequence: TTT
ctcttcttctaaaatttctc

SEQ ID NO: 386727 - DNA, 20 bp, Artificial Sequence
  Description of Artificial Sequence: Synthetic oligonucleotide
  Target: LAMA2; (+) strand; PAM type: YTN; PAM sequence: TTC
tcttcttctaaaatttctcc

SEQ ID NO: 386728 - DNA, 20 bp, Artificial Sequence
  Description of Artificial Sequence: Synthetic oligonucleotide
  Target: LAMA2; (+) strand; PAM type: YTN; PAM sequence: CTC
ttcttctaaaatttctcccg

SEQ ID NO: 386729 - DNA, 20 bp, Artificial Sequence
  Description of Artificial Sequence: Synthetic oligonucleotide
  Target: LAMA2; (+) strand; PAM type: YTN; PAM sequence: CTT
cttctaaaatttctcccgtt

SEQ ID NO: 386730 - DNA, 20 bp, Artificial Sequence
  Description of Artificial Sequence: Synthetic oligonucleotide
  Target: LAMA2; (+) strand; PAM type: YTN; PAM sequence: TTC
ttctaaaatttctcccgtta

SEQ ID NO: 386731 - DNA, 20 bp, Artificial Sequence
  Description of Artificial Sequence: Synthetic oligonucleotide
  Target: LAMA2; (+) strand; PAM type: YTN; PAM sequence: CTT
ctaaaatttctcccgttatg

SEQ ID NO: 386732 - DNA, 20 bp, Artificial Sequence
  Description of Artificial Sequence: Synthetic oligonucleotide
  Target: LAMA2; (+) strand; PAM type: YTN; PAM sequence: TTC
taaaatttctcccgttatgg

SEQ ID NO: 386733 - DNA, 20 bp, Artificial Sequence
  Description of Artificial Sequence: Synthetic oligonucleotide
  Target: LAMA2; (+) strand; PAM type: YTN; PAM sequence: CTA
aaatttctcccgttatggaa

SEQ ID NO: 386734 - DNA, 20 bp, Artificial Sequence
  Description of Artificial Sequence: Synthetic oligonucleotide
  Target: LAMA2; (+) strand; PAM type: YTN; PAM sequence: TTT
ctcccgttatggaaaaatat

SEQ ID NO: 386735 - DNA, 20 bp, Artificial Sequence
  Description of Artificial Sequence: Synthetic oligonucleotide
  Target: LAMA2; (+) strand; PAM type: YTN; PAM sequence: TTC
tcccgttatggaaaaatatg

SEQ ID NO: 386736 - DNA, 20 bp, Artificial Sequence
  Description of Artificial Sequence: Synthetic oligonucleotide
  Target: LAMA2; (+) strand; PAM type: YTN; PAM sequence: CTC
ccgttatggaaaaatatgcc

SEQ ID NO: 386737 - DNA, 20 bp, Artificial Sequence
  Description of Artificial Sequence: Synthetic oligonucleotide
  Target: LAMA2; (+) strand; PAM type: YTN; PAM sequence: TTA
tggaaaaatatgccatgatt

SEQ ID NO: 386738 - DNA, 20 bp, Artificial Sequence
  Description of Artificial Sequence: Synthetic oligonucleotide
  Target: LAMA2; (+) strand; PAM type: YTN; PAM sequence: TTC
tatgatcttggcctttccca

SEQ ID NO: 386739 - DNA, 20 bp, Artificial Sequence
  Description of Artificial Sequence: Synthetic oligonucleotide
  Target: LAMA2; (+) strand; PAM type: YTN; PAM sequence: CTA
tgatcttggcctttcccagg

SEQ ID NO: 386740 - DNA, 20 bp, Artificial Sequence
  Description of Artificial Sequence: Synthetic oligonucleotide
  Target: LAMA2; (+) strand; PAM type: YTN; PAM sequence: CTT
ggcctttcccaggattcggt

SEQ ID NO: 386741 - DNA, 20 bp, Artificial Sequence
  Description of Artificial Sequence: Synthetic oligonucleotide
  Target: LAMA2; (+) strand; PAM type: YTN; PAM sequence: TTG
gcctttcccaggattcggtt

SEQ ID NO: 386742 - DNA, 20 bp, Artificial Sequence
  Description of Artificial Sequence: Synthetic oligonucleotide
  Target: LAMA2; (+) strand; PAM type: YTN; PAM sequence: CTT
tcccaggattcggtttctac

SEQ ID NO: 386743 - DNA, 20 bp, Artificial Sequence
  Description of Artificial Sequence: Synthetic oligonucleotide
  Target: LAMA2; (+) strand; PAM type: YTN; PAM sequence: TTT
cccaggattcggtttctact

SEQ ID NO: 386744 - DNA, 20 bp, Artificial Sequence
  Description of Artificial Sequence: Synthetic oligonucleotide
  Target: LAMA2; (+) strand; PAM type: YTN; PAM sequence: TTC
ccaggattcggtttctactt

SEQ ID NO: 386745 - DNA, 20 bp, Artificial Sequence
  Description of Artificial Sequence: Synthetic oligonucleotide
  Target: LAMA2; (+) strand; PAM type: YTN; PAM sequence: TTC
ggtttctacttctactccta

SEQ ID NO: 386746 - DNA, 20 bp, Artificial Sequence
  Description of Artificial Sequence: Synthetic oligonucleotide
  Target: LAMA2; (+) strand; PAM type: YTN; PAM sequence: TTT
ctacttctactcctagtttt

SEQ ID NO: 386747 - DNA, 20 bp, Artificial Sequence
  Description of Artificial Sequence: Synthetic oligonucleotide
  Target: LAMA2; (+) strand; PAM type: YTN; PAM sequence: TTC
tacttctactcctagttttg

SEQ ID NO: 386748 - DNA, 20 bp, Artificial Sequence
  Description of Artificial Sequence: Synthetic oligonucleotide
  Target: LAMA2; (+) strand; PAM type: YTN; PAM sequence: CTA
cttctactcctagttttgaa

SEQ ID NO: 386749 - DNA, 20 bp, Artificial Sequence
  Description of Artificial Sequence: Synthetic oligonucleotide
  Target: LAMA2; (+) strand; PAM type: YTN; PAM sequence: CTT
ctactcctagttttgaaatc

SEQ ID NO: 386750 - DNA, 20 bp, Artificial Sequence
  Description of Artificial Sequence: Synthetic oligonucleotide
  Target: LAMA2; (+) strand; PAM type: YTN; PAM sequence: TTC
tactcctagttttgaaatca

SEQ ID NO: 386751 - DNA, 20 bp, Artificial Sequence
  Description of Artificial Sequence: Synthetic oligonucleotide
  Target: LAMA2; (+) strand; PAM type: YTN; PAM sequence: CTA
ctcctagttttgaaatcaga

SEQ ID NO: 386752 - DNA, 20 bp, Artificial Sequence
  Description of Artificial Sequence: Synthetic oligonucleotide
  Target: LAMA2; (+) strand; PAM type: YTN; PAM sequence: CTC
ctagttttgaaatcagataa

SEQ ID NO: 386753 - DNA, 20 bp, Artificial Sequence
  Description of Artificial Sequence: Synthetic oligonucleotide
  Target: LAMA2; (+) strand; PAM type: YTN; PAM sequence: CTA
gttttgaaatcagataaaat

SEQ ID NO: 386754 - DNA, 20 bp, Artificial Sequence
  Description of Artificial Sequence: Synthetic oligonucleotide
  Target: LAMA2; (+) strand; PAM type: YTN; PAM sequence: TTT
tgaaatcagataaaataaga

SEQ ID NO: 386755 - DNA, 20 bp, Artificial Sequence
  Description of Artificial Sequence: Synthetic oligonucleotide
  Target: LAMA2; (+) strand; PAM type: YTN; PAM sequence: TTT
gaaatcagataaaataagac

SEQ ID NO: 386756 - DNA, 20 bp, Artificial Sequence
  Description of Artificial Sequence: Synthetic oligonucleotide
  Target: LAMA2; (+) strand; PAM type: YTN; PAM sequence: TTG
aaatcagataaaataagaca

SEQ ID NO: 386757 - DNA, 20 bp, Artificial Sequence
  Description of Artificial Sequence: Synthetic oligonucleotide
  Target: LAMA2; (+) strand; PAM type: YTN; PAM sequence: TTC
tgacttattctcaattttcc

SEQ ID NO: 386758 - DNA, 20 bp, Artificial Sequence
  Description of Artificial Sequence: Synthetic oligonucleotide
  Target: LAMA2; (+) strand; PAM type: YTN; PAM sequence: CTG
acttattctcaattttcctt

SEQ ID NO: 386759 - DNA, 20 bp, Artificial Sequence
  Description of Artificial Sequence: Synthetic oligonucleotide
  Target: LAMA2; (+) strand; PAM type: YTN; PAM sequence: CTT
attctcaattttccttttaa

SEQ ID NO: 386760 - DNA, 20 bp, Artificial Sequence
  Description of Artificial Sequence: Synthetic oligonucleotide
  Target: LAMA2; (+) strand; PAM type: YTN; PAM sequence: TTA
ttctcaattttccttttaat

SEQ ID NO: 386761 - DNA, 20 bp, Artificial Sequence
  Description of Artificial Sequence: Synthetic oligonucleotide
  Target: LAMA2; (+) strand; PAM type: YTN; PAM sequence: TTC
tcaattttccttttaatata

SEQ ID NO: 386762 - DNA, 20 bp, Artificial Sequence
  Description of Artificial Sequence: Synthetic oligonucleotide
  Target: LAMA2; (+) strand; PAM type: YTN; PAM sequence: CTC
aattttccttttaatatatt

SEQ ID NO: 386763 - DNA, 20 bp, Artificial Sequence
  Description of Artificial Sequence: Synthetic oligonucleotide
  Target: LAMA2; (+) strand; PAM type: YTN; PAM sequence: TTT
tccttttaatatatttctgt

SEQ ID NO: 386764 - DNA, 20 bp, Artificial Sequence
  Description of Artificial Sequence: Synthetic oligonucleotide
  Target: LAMA2; (+) strand; PAM type: YTN; PAM sequence: TTT
ccttttaatatatttctgta

SEQ ID NO: 386765 - DNA, 20 bp, Artificial Sequence
  Description of Artificial Sequence: Synthetic oligonucleotide
  Target: LAMA2; (+) strand; PAM type: YTN; PAM sequence: TTC
cttttaatatatttctgtat

SEQ ID NO: 386766 - DNA, 20 bp, Artificial Sequence
  Description of Artificial Sequence: Synthetic oligonucleotide
  Target: LAMA2; (+) strand; PAM type: YTN; PAM sequence: CTT
ttaatatatttctgtatcct

SEQ ID NO: 386767 - DNA, 20 bp, Artificial Sequence
  Description of Artificial Sequence: Synthetic oligonucleotide
  Target: LAMA2; (+) strand; PAM type: YTN; PAM sequence: TTT
taatatatttctgtatcctt

SEQ ID NO: 386768 - DNA, 20 bp, Artificial Sequence
  Description of Artificial Sequence: Synthetic oligonucleotide
  Target: LAMA2; (+) strand; PAM type: YTN; PAM sequence: TTT
aatatatttctgtatcctta

SEQ ID NO: 386769 - DNA, 20 bp, Artificial Sequence
  Description of Artificial Sequence: Synthetic oligonucleotide
  Target: LAMA2; (+) strand; PAM type: YTN; PAM sequence: TTA
atatatttctgtatccttaa

SEQ ID NO: 386770 - DNA, 20 bp, Artificial Sequence
  Description of Artificial Sequence: Synthetic oligonucleotide
  Target: LAMA2; (+) strand; PAM type: YTN; PAM sequence: TTT
ctgtatccttaagctaaatt

SEQ ID NO: 386771 - DNA, 20 bp, Artificial Sequence
  Description of Artificial Sequence: Synthetic oligonucleotide
  Target: LAMA2; (+) strand; PAM type: YTN; PAM sequence: TTC
tgtatccttaagctaaatta

SEQ ID NO: 386772 - DNA, 20 bp, Artificial Sequence
  Description of Artificial Sequence: Synthetic oligonucleotide
  Target: LAMA2; (+) strand; PAM type: YTN; PAM sequence: CTG
tatccttaagctaaattagt

SEQ ID NO: 386773 - DNA, 20 bp, Artificial Sequence
  Description of Artificial Sequence: Synthetic oligonucleotide
  Target: LAMA2; (+) strand; PAM type: YTN; PAM sequence: CTT
aagctaaattagtgcaagag

SEQ ID NO: 386774 - DNA, 20 bp, Artificial Sequence
  Description of Artificial Sequence: Synthetic oligonucleotide
  Target: LAMA2; (+) strand; PAM type: YTN; PAM sequence: TTA
agctaaattagtgcaagaga

SEQ ID NO: 386775 - DNA, 20 bp, Artificial Sequence
  Description of Artificial Sequence: Synthetic oligonucleotide
  Target: LAMA2; (+) strand; PAM type: YTN; PAM sequence: CTA
aattagtgcaagagaccaaa

SEQ ID NO: 386776 - DNA, 20 bp, Artificial Sequence
  Description of Artificial Sequence: Synthetic oligonucleotide
  Target: LAMA2; (+) strand; PAM type: YTN; PAM sequence: TTA
gtgcaagagaccaaaaaatg

SEQ ID NO: 386777 - DNA, 20 bp, Artificial Sequence
  Description of Artificial Sequence: Synthetic oligonucleotide
  Target: LAMA2; (+) strand; PAM type: YTN; PAM sequence: TTC
acctggggtgtttgatctgc

SEQ ID NO: 386778 - DNA, 20 bp, Artificial Sequence
  Description of Artificial Sequence: Synthetic oligonucleotide
  Target: LAMA2; (+) strand; PAM type: YTN; PAM sequence: CTG
gggtgtttgatctgcaggac

SEQ ID NO: 386779 - DNA, 20 bp, Artificial Sequence
  Description of Artificial Sequence: Synthetic oligonucleotide
  Target: LAMA2; (+) strand; PAM type: YTN; PAM sequence: TTT
gatctgcaggacctgtttta

SEQ ID NO: 386780 - DNA, 20 bp, Artificial Sequence
  Description of Artificial Sequence: Synthetic oligonucleotide
  Target: LAMA2; (+) strand; PAM type: YTN; PAM sequence: TTG
atctgcaggacctgttttag

SEQ ID NO: 386781 - DNA, 20 bp, Artificial Sequence
  Description of Artificial Sequence: Synthetic oligonucleotide
  Target: LAMA2; (+) strand; PAM type: YTN; PAM sequence: CTG
caggacctgttttagcacat

SEQ ID NO: 386782 - DNA, 20 bp, Artificial Sequence
  Description of Artificial Sequence: Synthetic oligonucleotide
  Target: LAMA2; (+) strand; PAM type: YTN; PAM sequence: CTG
ttttagcacatgtaatcatg

SEQ ID NO: 386783 - DNA, 20 bp, Artificial Sequence
  Description of Artificial Sequence: Synthetic oligonucleotide
  Target: LAMA2; (+) strand; PAM type: YTN; PAM sequence: TTT
tagcacatgtaatcatggtg

SEQ ID NO: 386784 - DNA, 20 bp, Artificial Sequence
  Description of Artificial Sequence: Synthetic oligonucleotide
  Target: LAMA2; (+) strand; PAM type: YTN; PAM sequence: TTT
agcacatgtaatcatggtgg

SEQ ID NO: 386785 - DNA, 20 bp, Artificial Sequence
  Description of Artificial Sequence: Synthetic oligonucleotide
  Target: LAMA2; (+) strand; PAM type: YTN; PAM sequence: TTA
gcacatgtaatcatggtgga

SEQ ID NO: 386786 - DNA, 20 bp, Artificial Sequence
  Description of Artificial Sequence: Synthetic oligonucleotide
  Target: LAMA2; (+) strand; PAM type: YTN; PAM sequence: TTG
cataaggcctgggggtgaga

SEQ ID NO: 386787 - DNA, 20 bp, Artificial Sequence
  Description of Artificial Sequence: Synthetic oligonucleotide
  Target: LAMA2; (+) strand; PAM type: YTN; PAM sequence: CTG
ggggtgagagtaagggaggt

SEQ ID NO: 386788 - DNA, 20 bp, Artificial Sequence
  Description of Artificial Sequence: Synthetic oligonucleotide
  Target: LAMA2; (+) strand; PAM type: YTN; PAM sequence: CTT
ggctctagcaagagaattta

SEQ ID NO: 386789 - DNA, 20 bp, Artificial Sequence
  Description of Artificial Sequence: Synthetic oligonucleotide
  Target: LAMA2; (+) strand; PAM type: YTN; PAM sequence: TTG
gctctagcaagagaatttag

SEQ ID NO: 386790 - DNA, 20 bp, Artificial Sequence
  Description of Artificial Sequence: Synthetic oligonucleotide
  Target: LAMA2; (+) strand; PAM type: YTN; PAM sequence: CTC
tagcaagagaatttagatgt

SEQ ID NO: 386791 - DNA, 20 bp, Artificial Sequence
  Description of Artificial Sequence: Synthetic oligonucleotide
  Target: LAMA2; (+) strand; PAM type: YTN; PAM sequence: CTA
gcaagagaatttagatgtag

SEQ ID NO: 386792 - DNA, 20 bp, Artificial Sequence
  Description of Artificial Sequence: Synthetic oligonucleotide
  Target: LAMA2; (+) strand; PAM type: YTN; PAM sequence: TTT
agatgtagtaagagaaatgt

SEQ ID NO: 386793 - DNA, 20 bp, Artificial Sequence
  Description of Artificial Sequence: Synthetic oligonucleotide
  Target: LAMA2; (+) strand; PAM type: YTN; PAM sequence: TTA
gatgtagtaagagaaatgtc

SEQ ID NO: 386794 - DNA, 20 bp, Artificial Sequence
  Description of Artificial Sequence: Synthetic oligonucleotide
  Target: LAMA2; (+) strand; PAM type: YTN; PAM sequence: CTG
cagtgcttgttgttagtata

SEQ ID NO: 386795 - DNA, 20 bp, Artificial Sequence
  Description of Artificial Sequence: Synthetic oligonucleotide
  Target: LAMA2; (+) strand; PAM type: YTN; PAM sequence: CTT
gttgttagtatagtactgac

SEQ ID NO: 386796 - DNA, 20 bp, Artificial Sequence
  Description of Artificial Sequence: Synthetic oligonucleotide
  Target: LAMA2; (+) strand; PAM type: YTN; PAM sequence: TTG
ttgttagtatagtactgact

SEQ ID NO: 386797 - DNA, 20 bp, Artificial Sequence
  Description of Artificial Sequence: Synthetic oligonucleotide
  Target: LAMA2; (+) strand; PAM type: YTN; PAM sequence: TTG
ttagtatagtactgactaca

SEQ ID NO: 386798 - DNA, 20 bp, Artificial Sequence
  Description of Artificial Sequence: Synthetic oligonucleotide
  Target: LAMA2; (+) strand; PAM type: YTN; PAM sequence: TTA
gtatagtactgactacagga

SEQ ID NO: 386799 - DNA, 20 bp, Artificial Sequence
  Description of Artificial Sequence: Synthetic oligonucleotide
  Target: LAMA2; (+) strand; PAM type: YTN; PAM sequence: CTG
actacaggaaataaactttc

SEQ ID NO: 386800 - DNA, 20 bp, Artificial Sequence
  Description of Artificial Sequence: Synthetic oligonucleotide
  Target: LAMA2; (+) strand; PAM type: YTN; PAM sequence: CTA
caggaaataaactttctcct

SEQ ID NO: 386801 - DNA, 20 bp, Artificial Sequence
  Description of Artificial Sequence: Synthetic oligonucleotide
  Target: LAMA2; (+) strand; PAM type: YTN; PAM sequence: CTT
tctcctattgcttagaataa

SEQ ID NO: 386802 - DNA, 20 bp, Artificial Sequence
  Description of Artificial Sequence: Synthetic oligonucleotide
  Target: LAMA2; (+) strand; PAM type: YTN; PAM sequence: TTT
ctcctattgcttagaataag

SEQ ID NO: 386803 - DNA, 20 bp, Artificial Sequence
  Description of Artificial Sequence: Synthetic oligonucleotide
  Target: LAMA2; (+) strand; PAM type: YTN; PAM sequence: TTC
tcctattgcttagaataagt

SEQ ID NO: 386804 - DNA, 20 bp, Artificial Sequence
  Description of Artificial Sequence: Synthetic oligonucleotide
  Target: LAMA2; (+) strand; PAM type: YTN; PAM sequence: CTC
ctattgcttagaataagtaa

SEQ ID NO: 386805 - DNA, 20 bp, Artificial Sequence
  Description of Artificial Sequence: Synthetic oligonucleotide
  Target: LAMA2; (+) strand; PAM type: YTN; PAM sequence: CTA
ttgcttagaataagtaaaca

SEQ ID NO: 386806 - DNA, 20 bp, Artificial Sequence
  Description of Artificial Sequence: Synthetic oligonucleotide
  Target: LAMA2; (+) strand; PAM type: YTN; PAM sequence: TTG
cttagaataagtaaacactc

SEQ ID NO: 386807 - DNA, 20 bp, Artificial Sequence
  Description of Artificial Sequence: Synthetic oligonucleotide
  Target: LAMA2; (+) strand; PAM type: YTN; PAM sequence: CTT
agaataagtaaacactcagt

SEQ ID NO: 386808 - DNA, 20 bp, Artificial Sequence
  Description of Artificial Sequence: Synthetic oligonucleotide
  Target: LAMA2; (+) strand; PAM type: YTN; PAM sequence: TTA
gaataagtaaacactcagtt

SEQ ID NO: 386809 - DNA, 20 bp, Artificial Sequence
  Description of Artificial Sequence: Synthetic oligonucleotide
  Target: LAMA2; (+) strand; PAM type: YTN; PAM sequence: CTC
agtttagtagcatgtattgt

SEQ ID NO: 386810 - DNA, 20 bp, Artificial Sequence
  Description of Artificial Sequence: Synthetic oligonucleotide
  Target: LAMA2; (+) strand; PAM type: YTN; PAM sequence: TTT
agtagcatgtattgtacaag

SEQ ID NO: 386811 - DNA, 20 bp, Artificial Sequence
  Description of Artificial Sequence: Synthetic oligonucleotide
  Target: LAMA2; (+) strand; PAM type: YTN; PAM sequence: TTA
gtagcatgtattgtacaaga

SEQ ID NO: 386812 - DNA, 20 bp, Artificial Sequence
  Description of Artificial Sequence: Synthetic oligonucleotide
  Target: LAMA2; (+) strand; PAM type: YTN; PAM sequence: TTG
tacaagagttaattttgctt

SEQ ID NO: 386813 - DNA, 20 bp, Artificial Sequence
  Description of Artificial Sequence: Synthetic oligonucleotide
  Target: LAMA2; (+) strand; PAM type: YTN; PAM sequence: TTA
attttgcttcctttagttac

SEQ ID NO: 386814 - DNA, 20 bp, Artificial Sequence
  Description of Artificial Sequence: Synthetic oligonucleotide
  Target: LAMA2; (+) strand; PAM type: YTN; PAM sequence: TTT
tgcttcctttagttacttcc

SEQ ID NO: 386815 - DNA, 20 bp, Artificial Sequence
  Description of Artificial Sequence: Synthetic oligonucleotide
  Target: LAMA2; (+) strand; PAM type: YTN; PAM sequence: TTT
gcttcctttagttacttccc

SEQ ID NO: 386816 - DNA, 20 bp, Artificial Sequence
  Description of Artificial Sequence: Synthetic oligonucleotide
  Target: LAMA2; (+) strand; PAM type: YTN; PAM sequence: TTG
cttcctttagttacttccct

SEQ ID NO: 386817 - DNA, 20 bp, Artificial Sequence
  Description of Artificial Sequence: Synthetic oligonucleotide
  Target: LAMA2; (+) strand; PAM type: YTN; PAM sequence: CTT
cctttagttacttccctggg

SEQ ID NO: 386818 - DNA, 20 bp, Artificial Sequence
  Description of Artificial Sequence: Synthetic oligonucleotide
  Target: LAMA2; (+) strand; PAM type: YTN; PAM sequence: TTC
ctttagttacttccctggga

SEQ ID NO: 386819 - DNA, 20 bp, Artificial Sequence
  Description of Artificial Sequence: Synthetic oligonucleotide
  Target: LAMA2; (+) strand; PAM type: YTN; PAM sequence: CTT
tagttacttccctgggaaat

SEQ ID NO: 386820 - DNA, 20 bp, Artificial Sequence
  Description of Artificial Sequence: Synthetic oligonucleotide
  Target: LAMA2; (+) strand; PAM type: YTN; PAM sequence: TTT
agttacttccctgggaaata

SEQ ID NO: 386821 - DNA, 20 bp, Artificial Sequence
  Description of Artificial Sequence: Synthetic oligonucleotide
  Target: LAMA2; (+) strand; PAM type: YTN; PAM sequence: TTA
gttacttccctgggaaatat

SEQ ID NO: 386822 - DNA, 20 bp, Artificial Sequence
  Description of Artificial Sequence: Synthetic oligonucleotide
  Target: LAMA2; (+) strand; PAM type: YTN; PAM sequence: TTA
cttccctgggaaatataatt

SEQ ID NO: 386823 - DNA, 20 bp, Artificial Sequence
  Description of Artificial Sequence: Synthetic oligonucleotide
  Target: LAMA2; (+) strand; PAM type: YTN; PAM sequence: CTT
ccctgggaaatataatttag

SEQ ID NO: 386824 - DNA, 20 bp, Artificial Sequence
  Description of Artificial Sequence: Synthetic oligonucleotide
  Target: LAMA2; (+) strand; PAM type: YTN; PAM sequence: TTC
cctgggaaatataatttaga

SEQ ID NO: 386825 - DNA, 20 bp, Artificial Sequence
  Description of Artificial Sequence: Synthetic oligonucleotide
  Target: LAMA2; (+) strand; PAM type: YTN; PAM sequence: CTG
ggaaatataatttagactga

SEQ ID NO: 386826 - DNA, 20 bp, Artificial Sequence
  Description of Artificial Sequence: Synthetic oligonucleotide
  Target: LAMA2; (+) strand; PAM type: YTN; PAM sequence: TTT
agactgatccacatcatgga

SEQ ID NO: 386827 - DNA, 20 bp, Artificial Sequence
  Description of Artificial Sequence: Synthetic oligonucleotide
  Target: LAMA2; (+) strand; PAM type: YTN; PAM sequence: TTA
gactgatccacatcatggat

SEQ ID NO: 386828 - DNA, 20 bp, Artificial Sequence
  Description of Artificial Sequence: Synthetic oligonucleotide
  Target: LAMA2; (+) strand; PAM type: YTN; PAM sequence: CTG
atccacatcatggatttgtg

SEQ ID NO: 386829 - DNA, 20 bp, Artificial Sequence
  Description of Artificial Sequence: Synthetic oligonucleotide
  Target: LAMA2; (+) strand; PAM type: YTN; PAM sequence: TTT
gtgtatttcaaaaacagaaa

SEQ ID NO: 386830 - DNA, 20 bp, Artificial Sequence
  Description of Artificial Sequence: Synthetic oligonucleotide
  Target: LAMA2; (+) strand; PAM type: YTN; PAM sequence: TTG
tgtatttcaaaaacagaaaa

SEQ ID NO: 386831 - DNA, 20 bp, Artificial Sequence
  Description of Artificial Sequence: Synthetic oligonucleotide
  Target: LAMA2; (+) strand; PAM type: YTN; PAM sequence: TTT
caaaaacagaaaagaaaaga

SEQ ID NO: 386832 - DNA, 20 bp, Artificial Sequence
  Description of Artificial Sequence: Synthetic oligonucleotide
  Target: LAMA2; (+) strand; PAM type: YTN; PAM sequence: TTC
aaaaacagaaaagaaaagaa

SEQ ID NO: 386833 - DNA, 20 bp, Artificial Sequence
  Description of Artificial Sequence: Synthetic oligonucleotide
  Target: LAMA2; (+) strand; PAM type: YTN; PAM sequence: CTA
agcctgatcattgtgtgatc

SEQ ID NO: 386834 - DNA, 20 bp, Artificial Sequence
  Description of Artificial Sequence: Synthetic oligonucleotide
  Target: LAMA2; (+) strand; PAM type: YTN; PAM sequence: CTG
atcattgtgtgatctcaggt

SEQ ID NO: 386835 - DNA, 20 bp, Artificial Sequence
  Description of Artificial Sequence: Synthetic oligonucleotide
  Target: LAMA2; (+) strand; PAM type: YTN; PAM sequence: TTG
tgtgatctcaggtaatttgc

SEQ ID NO: 386836 - DNA, 20 bp, Artificial Sequence
  Description of Artificial Sequence: Synthetic oligonucleotide
  Target: LAMA2; (+) strand; PAM type: YTN; PAM sequence: CTC
aggtaatttgcatattggtg

SEQ ID NO: 386837 - DNA, 20 bp, Artificial Sequence
  Description of Artificial Sequence: Synthetic oligonucleotide
  Target: LAMA2; (+) strand; PAM type: YTN; PAM sequence: TTT
gcatattggtgaaaggaatc

SEQ ID NO: 386838 - DNA, 20 bp, Artificial Sequence
  Description of Artificial Sequence: Synthetic oligonucleotide
  Target: LAMA2; (+) strand; PAM type: YTN; PAM sequence: TTG
catattggtgaaaggaatct

SEQ ID NO: 386839 - DNA, 20 bp, Artificial Sequence
  Description of Artificial Sequence: Synthetic oligonucleotide
  Target: LAMA2; (+) strand; PAM type: YTN; PAM sequence: TTG
gtgaaaggaatctatacact

SEQ ID NO: 386840 - DNA, 20 bp, Artificial Sequence
  Description of Artificial Sequence: Synthetic oligonucleotide
  Target: LAMA2; (+) strand; PAM type: YTN; PAM sequence: CTA
tacactcactgtaaatttag

SEQ ID NO: 386841 - DNA, 20 bp, Artificial Sequence
  Description of Artificial Sequence: Synthetic oligonucleotide
  Target: LAMA2; (+) strand; PAM type: YTN; PAM sequence: CTC
actgtaaatttagtttaggc

SEQ ID NO: 386842 - DNA, 20 bp, Artificial Sequence
  Description of Artificial Sequence: Synthetic oligonucleotide
  Target: LAMA2; (+) strand; PAM type: YTN; PAM sequence: CTG
taaatttagtttaggctctt

SEQ ID NO: 386843 - DNA, 20 bp, Artificial Sequence
  Description of Artificial Sequence: Synthetic oligonucleotide
  Target: LAMA2; (+) strand; PAM type: YTN; PAM sequence: TTT
agtttaggctcttatttctc

SEQ ID NO: 386844 - DNA, 20 bp, Artificial Sequence
  Description of Artificial Sequence: Synthetic oligonucleotide
  Target: LAMA2; (+) strand; PAM type: YTN; PAM sequence: TTA
gtttaggctcttatttctca

SEQ ID NO: 386845 - DNA, 20 bp, Artificial Sequence
  Description of Artificial Sequence: Synthetic oligonucleotide
  Target: LAMA2; (+) strand; PAM type: YTN; PAM sequence: TTT
aggctcttatttctcaaagt

SEQ ID NO: 386846 - DNA, 20 bp, Artificial Sequence
  Description of Artificial Sequence: Synthetic oligonucleotide
  Target: LAMA2; (+) strand; PAM type: YTN; PAM sequence: TTA
ggctcttatttctcaaagta

SEQ ID NO: 386847 - DNA, 20 bp, Artificial Sequence
  Description of Artificial Sequence: Synthetic oligonucleotide
  Target: LAMA2; (+) strand; PAM type: YTN; PAM sequence: CTC
ttatttctcaaagtatataa

SEQ ID NO: 386848 - DNA, 20 bp, Artificial Sequence
  Description of Artificial Sequence: Synthetic oligonucleotide
  Target: LAMA2; (+) strand; PAM type: YTN; PAM sequence: CTT
atttctcaaagtatataaaa

SEQ ID NO: 386849 - DNA, 20 bp, Artificial Sequence
  Description of Artificial Sequence: Synthetic oligonucleotide
  Target: LAMA2; (+) strand; PAM type: YTN; PAM sequence: TTA
tttctcaaagtatataaaat

SEQ ID NO: 386850 - DNA, 20 bp, Artificial Sequence
  Description of Artificial Sequence: Synthetic oligonucleotide
  Target: LAMA2; (+) strand; PAM type: YTN; PAM sequence: TTT
ctcaaagtatataaaattct

SEQ ID NO: 386851 - DNA, 20 bp, Artificial Sequence
  Description of Artificial Sequence: Synthetic oligonucleotide
  Target: LAMA2; (+) strand; PAM type: YTN; PAM sequence: TTC
tcaaagtatataaaattctg

SEQ ID NO: 386852 - DNA, 20 bp, Artificial Sequence
  Description of Artificial Sequence: Synthetic oligonucleotide
  Target: LAMA2; (+) strand; PAM type: YTN; PAM sequence: CTC
aaagtatataaaattctgct

SEQ ID NO: 386853 - DNA, 20 bp, Artificial Sequence
  Description of Artificial Sequence: Synthetic oligonucleotide
  Target: LAMA2; (+) strand; PAM type: YTN; PAM sequence: TTC
tgctgaagagatcaggcaaa

SEQ ID NO: 386854 - DNA, 20 bp, Artificial Sequence
  Description of Artificial Sequence: Synthetic oligonucleotide
  Target: LAMA2; (+) strand; PAM type: YTN; PAM sequence: CTG
ctgaagagatcaggcaaaac

SEQ ID NO: 386855 - DNA, 20 bp, Artificial Sequence
  Description of Artificial Sequence: Synthetic oligonucleotide
  Target: LAMA2; (+) strand; PAM type: YTN; PAM sequence: CTG
aagagatcaggcaaaacaaa

SEQ ID NO: 386856 - DNA, 20 bp, Artificial Sequence
  Description of Artificial Sequence: Synthetic oligonucleotide
  Target: LAMA2; (+) strand; PAM type: YTN; PAM sequence: CTG
tgaaaggacttcccttggac

SEQ ID NO: 386857 - DNA, 20 bp, Artificial Sequence
  Description of Artificial Sequence: Synthetic oligonucleotide
  Target: LAMA2; (+) strand; PAM type: YTN; PAM sequence: CTT
cccttggacaccttggtccc

SEQ ID NO: 386858 - DNA, 20 bp, Artificial Sequence
  Description of Artificial Sequence: Synthetic oligonucleotide
  Target: LAMA2; (+) strand; PAM type: YTN; PAM sequence: TTC
ccttggacaccttggtccct

SEQ ID NO: 386859 - DNA, 20 bp, Artificial Sequence
  Description of Artificial Sequence: Synthetic oligonucleotide
  Target: LAMA2; (+) strand; PAM type: YTN; PAM sequence: CTT
ggacaccttggtccctaaaa

SEQ ID NO: 386860 - DNA, 20 bp, Artificial Sequence
  Description of Artificial Sequence: Synthetic oligonucleotide
  Target: LAMA2; (+) strand; PAM type: YTN; PAM sequence: TTG
gacaccttggtccctaaaag

SEQ ID NO: 386861 - DNA, 20 bp, Artificial Sequence
  Description of Artificial Sequence: Synthetic oligonucleotide
  Target: LAMA2; (+) strand; PAM type: YTN; PAM sequence: CTT
ggtccctaaaagatacttat

SEQ ID NO: 386862 - DNA, 20 bp, Artificial Sequence
  Description of Artificial Sequence: Synthetic oligonucleotide
  Target: LAMA2; (+) strand; PAM type: YTN; PAM sequence: TTG
gtccctaaaagatacttata

SEQ ID NO: 386863 - DNA, 20 bp, Artificial Sequence
  Description of Artificial Sequence: Synthetic oligonucleotide
  Target: LAMA2; (+) strand; PAM type: YTN; PAM sequence: CTA
aaagatacttatagcttcca

SEQ ID NO: 386864 - DNA, 20 bp, Artificial Sequence
  Description of Artificial Sequence: Synthetic oligonucleotide
  Target: LAMA2; (+) strand; PAM type: YTN; PAM sequence: CTT
atagcttccagggacagttg

SEQ ID NO: 386865 - DNA, 20 bp, Artificial Sequence
  Description of Artificial Sequence: Synthetic oligonucleotide
  Target: LAMA2; (+) strand; PAM type: YTN; PAM sequence: TTA
tagcttccagggacagttgc

SEQ ID NO: 386866 - DNA, 20 bp, Artificial Sequence
  Description of Artificial Sequence: Synthetic oligonucleotide
  Target: LAMA2; (+) strand; PAM type: YTN; PAM sequence: CTT
ccagggacagttgccagtga

SEQ ID NO: 386867 - DNA, 20 bp, Artificial Sequence
  Description of Artificial Sequence: Synthetic oligonucleotide
  Target: LAMA2; (+) strand; PAM type: YTN; PAM sequence: TTC
cagggacagttgccagtgac

SEQ ID NO: 386868 - DNA, 20 bp, Artificial Sequence
  Description of Artificial Sequence: Synthetic oligonucleotide
  Target: LAMA2; (+) strand; PAM type: YTN; PAM sequence: TTG
ccagtgacccctggatttta

SEQ ID NO: 386869 - DNA, 20 bp, Artificial Sequence
  Description of Artificial Sequence: Synthetic oligonucleotide
  Target: LAMA2; (+) strand; PAM type: YTN; PAM sequence: CTG
gattttactggatccaaaat

SEQ ID NO: 386870 - DNA, 20 bp, Artificial Sequence
  Description of Artificial Sequence: Synthetic oligonucleotide
  Target: LAMA2; (+) strand; PAM type: YTN; PAM sequence: TTT
tactggatccaaaatggaat

SEQ ID NO: 386871 - DNA, 20 bp, Artificial Sequence
  Description of Artificial Sequence: Synthetic oligonucleotide
  Target: LAMA2; (+) strand; PAM type: YTN; PAM sequence: TTT
actggatccaaaatggaatt

SEQ ID NO: 386872 - DNA, 20 bp, Artificial Sequence
  Description of Artificial Sequence: Synthetic oligonucleotide
  Target: LAMA2; (+) strand; PAM type: YTN; PAM sequence: TTA
ctggatccaaaatggaattt

SEQ ID NO: 386873 - DNA, 20 bp, Artificial Sequence
  Description of Artificial Sequence: Synthetic oligonucleotide
  Target: LAMA2; (+) strand; PAM type: YTN; PAM sequence: CTG
gatccaaaatggaatttttt

SEQ ID NO: 386874 - DNA, 20 bp, Artificial Sequence
  Description of Artificial Sequence: Synthetic oligonucleotide
  Target: LAMA2; (+) strand; PAM type: YTN; PAM sequence: TTT
tttgcagcacacaggccttt

SEQ ID NO: 386875 - DNA, 20 bp, Artificial Sequence
  Description of Artificial Sequence: Synthetic oligonucleotide
  Target: LAMA2; (+) strand; PAM type: YTN; PAM sequence: TTT
ttgcagcacacaggcctttt

SEQ ID NO: 386876 - DNA, 20 bp, Artificial Sequence
  Description of Artificial Sequence: Synthetic oligonucleotide
  Target: LAMA2; (+) strand; PAM type: YTN; PAM sequence: TTT
tgcagcacacaggcctttta

SEQ ID NO: 386877 - DNA, 20 bp, Artificial Sequence
  Description of Artificial Sequence: Synthetic oligonucleotide
  Target: LAMA2; (+) strand; PAM type: YTN; PAM sequence: TTT
gcagcacacaggccttttat

SEQ ID NO: 386878 - DNA, 20 bp, Artificial Sequence
  Description of Artificial Sequence: Synthetic oligonucleotide
  Target: LAMA2; (+) strand; PAM type: YTN; PAM sequence: TTG
cagcacacaggccttttata

SEQ ID NO: 386879 - DNA, 20 bp, Artificial Sequence
  Description of Artificial Sequence: Synthetic oligonucleotide
  Target: LAMA2; (+) strand; PAM type: YTN; PAM sequence: CTT
ttatatgtggattttcacta

SEQ ID NO: 386880 - DNA, 20 bp, Artificial Sequence
  Description of Artificial Sequence: Synthetic oligonucleotide
  Target: LAMA2; (+) strand; PAM type: YTN; PAM sequence: TTT
tatatgtggattttcactac

SEQ ID NO: 386881 - DNA, 20 bp, Artificial Sequence
  Description of Artificial Sequence: Synthetic oligonucleotide
  Target: LAMA2; (+) strand; PAM type: YTN; PAM sequence: TTT
atatgtggattttcactact

SEQ ID NO: 386882 - DNA, 20 bp, Artificial Sequence
  Description of Artificial Sequence: Synthetic oligonucleotide
  Target: LAMA2; (+) strand; PAM type: YTN; PAM sequence: TTA
tatgtggattttcactacta

SEQ ID NO: 386883 - DNA, 20 bp, Artificial Sequence
  Description of Artificial Sequence: Synthetic oligonucleotide
  Target: LAMA2; (+) strand; PAM type: YTN; PAM sequence: TTT
tcactactatcatgaagaat

SEQ ID NO: 386884 - DNA, 20 bp, Artificial Sequence
  Description of Artificial Sequence: Synthetic oligonucleotide
  Target: LAMA2; (+) strand; PAM type: YTN; PAM sequence: TTT
cactactatcatgaagaatg

SEQ ID NO: 386885 - DNA, 20 bp, Artificial Sequence
  Description of Artificial Sequence: Synthetic oligonucleotide
  Target: LAMA2; (+) strand; PAM type: YTN; PAM sequence: TTC
actactatcatgaagaatgt

SEQ ID NO: 386886 - DNA, 20 bp, Artificial Sequence
  Description of Artificial Sequence: Synthetic oligonucleotide
  Target: LAMA2; (+) strand; PAM type: YTN; PAM sequence: CTA
ctatcatgaagaatgtatac

SEQ ID NO: 386887 - DNA, 20 bp, Artificial Sequence
  Description of Artificial Sequence: Synthetic oligonucleotide
  Target: LAMA2; (+) strand; PAM type: YTN; PAM sequence: CTA
tcatgaagaatgtatacaaa

SEQ ID NO: 386888 - DNA, 20 bp, Artificial Sequence
  Description of Artificial Sequence: Synthetic oligonucleotide
  Target: LAMA2; (+) strand; PAM type: YTN; PAM sequence: CTG
tgtccacgttaggaacctat

SEQ ID NO: 386889 - DNA, 20 bp, Artificial Sequence
  Description of Artificial Sequence: Synthetic oligonucleotide
  Target: LAMA2; (+) strand; PAM type: YTN; PAM sequence: TTA
ggaacctatttagacatcac

SEQ ID NO: 386890 - DNA, 20 bp, Artificial Sequence
  Description of Artificial Sequence: Synthetic oligonucleotide
  Target: LAMA2; (+) strand; PAM type: YTN; PAM sequence: CTA
tttagacatcacagtctctc

SEQ ID NO: 386891 - DNA, 20 bp, Artificial Sequence
  Description of Artificial Sequence: Synthetic oligonucleotide
  Target: LAMA2; (+) strand; PAM type: YTN; PAM sequence: TTT
agacatcacagtctctcata

SEQ ID NO: 386892 - DNA, 20 bp, Artificial Sequence
  Description of Artificial Sequence: Synthetic oligonucleotide
  Target: LAMA2; (+) strand; PAM type: YTN; PAM sequence: TTA
gacatcacagtctctcatag

SEQ ID NO: 386893 - DNA, 20 bp, Artificial Sequence
  Description of Artificial Sequence: Synthetic oligonucleotide
  Target: LAMA2; (+) strand; PAM type: YTN; PAM sequence: CTC
tcatagttagtgacctaaat

SEQ ID NO: 386894 - DNA, 20 bp, Artificial Sequence
  Description of Artificial Sequence: Synthetic oligonucleotide
  Target: LAMA2; (+) strand; PAM type: YTN; PAM sequence: CTC
atagttagtgacctaaattc

SEQ ID NO: 386895 - DNA, 20 bp, Artificial Sequence
  Description of Artificial Sequence: Synthetic oligonucleotide
  Target: LAMA2; (+) strand; PAM type: YTN; PAM sequence: TTA
gtgacctaaattcagcccca

SEQ ID NO: 386896 - DNA, 20 bp, Artificial Sequence
  Description of Artificial Sequence: Synthetic oligonucleotide
  Target: LAMA2; (+) strand; PAM type: YTN; PAM sequence: CTA
aattcagccccaccatgcag

SEQ ID NO: 386897 - DNA, 20 bp, Artificial Sequence
  Description of Artificial Sequence: Synthetic oligonucleotide
  Target: LAMA2; (+) strand; PAM type: YTN; PAM sequence: TTC
agccccaccatgcagagtca

SEQ ID NO: 386898 - DNA, 20 bp, Artificial Sequence
  Description of Artificial Sequence: Synthetic oligonucleotide
  Target: LAMA2; (+) strand; PAM type: YTN; PAM sequence: TTC
ctgagcataactaagcaatt

SEQ ID NO: 386899 - DNA, 20 bp, Artificial Sequence
  Description of Artificial Sequence: Synthetic oligonucleotide
  Target: LAMA2; (+) strand; PAM type: YTN; PAM sequence: CTG
agcataactaagcaatttat

SEQ ID NO: 386900 - DNA, 20 bp, Artificial Sequence
  Description of Artificial Sequence: Synthetic oligonucleotide
  Target: LAMA2; (+) strand; PAM type: YTN; PAM sequence: CTA
agcaatttattcaccttcaa

SEQ ID NO: 386901 - DNA, 20 bp, Artificial Sequence
  Description of Artificial Sequence: Synthetic oligonucleotide
  Target: LAMA2; (+) strand; PAM type: YTN; PAM sequence: TTT
attcaccttcaaattccagg

SEQ ID NO: 386902 - DNA, 20 bp, Artificial Sequence
  Description of Artificial Sequence: Synthetic oligonucleotide
  Target: LAMA2; (+) strand; PAM type: YTN; PAM sequence: TTA
ttcaccttcaaattccaggc

SEQ ID NO: 386903 - DNA, 20 bp, Artificial Sequence
  Description of Artificial Sequence: Synthetic oligonucleotide
  Target: LAMA2; (+) strand; PAM type: YTN; PAM sequence: TTC
accttcaaattccaggcatt

SEQ ID NO: 386904 - DNA, 20 bp, Artificial Sequence
  Description of Artificial Sequence: Synthetic oligonucleotide
  Target: LAMA2; (+) strand; PAM type: YTN; PAM sequence: CTT
caaattccaggcattctcta

SEQ ID NO: 386905 - DNA, 20 bp, Artificial Sequence
  Description of Artificial Sequence: Synthetic oligonucleotide
  Target: LAMA2; (+) strand; PAM type: YTN; PAM sequence: TTC
aaattccaggcattctctaa

SEQ ID NO: 386906 - DNA, 20 bp, Artificial Sequence
  Description of Artificial Sequence: Synthetic oligonucleotide
  Target: LAMA2; (+) strand; PAM type: YTN; PAM sequence: TTC
caggcattctctaaagtccc

SEQ ID NO: 386907 - DNA, 20 bp, Artificial Sequence
  Description of Artificial Sequence: Synthetic oligonucleotide
  Target: LAMA2; (+) strand; PAM type: YTN; PAM sequence: TTC
tctaaagtcccttttaccac

SEQ ID NO: 386908 - DNA, 20 bp, Artificial Sequence
  Description of Artificial Sequence: Synthetic oligonucleotide
  Target: LAMA2; (+) strand; PAM type: YTN; PAM sequence: CTC
taaagtcccttttaccacac

SEQ ID NO: 386909 - DNA, 20 bp, Artificial Sequence
  Description of Artificial Sequence: Synthetic oligonucleotide
  Target: LAMA2; (+) strand; PAM type: YTN; PAM sequence: CTA
aagtcccttttaccacacag

SEQ ID NO: 386910 - DNA, 20 bp, Artificial Sequence
  Description of Artificial Sequence: Synthetic oligonucleotide
  Target: LAMA2; (+) strand; PAM type: YTN; PAM sequence: CTT
ttaccacacagggttcatca

SEQ ID NO: 386911 - DNA, 20 bp, Artificial Sequence
  Description of Artificial Sequence: Synthetic oligonucleotide
  Target: LAMA2; (+) strand; PAM type: YTN; PAM sequence: TTT
taccacacagggttcatcat

SEQ ID NO: 386912 - DNA, 20 bp, Artificial Sequence
  Description of Artificial Sequence: Synthetic oligonucleotide
  Target: LAMA2; (+) strand; PAM type: YTN; PAM sequence: TTT
accacacagggttcatcata

SEQ ID NO: 386913 - DNA, 20 bp, Artificial Sequence
  Description of Artificial Sequence: Synthetic oligonucleotide
  Target: LAMA2; (+) strand; PAM type: YTN; PAM sequence: TTA
ccacacagggttcatcataa

SEQ ID NO: 386914 - DNA, 20 bp, Artificial Sequence
  Description of Artificial Sequence: Synthetic oligonucleotide
  Target: LAMA2; (+) strand; PAM type: YTN; PAM sequence: TTC
atcataatagtaattttatt

SEQ ID NO: 386915 - DNA, 20 bp, Artificial Sequence
  Description of Artificial Sequence: Synthetic oligonucleotide
  Target: LAMA2; (+) strand; PAM type: YTN; PAM sequence: TTT
tatttaaaggctcaccttga

SEQ ID NO: 386916 - DNA, 20 bp, Artificial Sequence
  Description of Artificial Sequence: Synthetic oligonucleotide
  Target: LAMA2; (+) strand; PAM type: YTN; PAM sequence: TTT
atttaaaggctcaccttgac

SEQ ID NO: 386917 - DNA, 20 bp, Artificial Sequence
  Description of Artificial Sequence: Synthetic oligonucleotide
  Target: LAMA2; (+) strand; PAM type: YTN; PAM sequence: TTA
tttaaaggctcaccttgact

SEQ ID NO: 386918 - DNA, 20 bp, Artificial Sequence
  Description of Artificial Sequence: Synthetic oligonucleotide
  Target: LAMA2; (+) strand; PAM type: YTN; PAM sequence: TTT
aaaggctcaccttgactgag

SEQ ID NO: 386919 - DNA, 20 bp, Artificial Sequence
  Description of Artificial Sequence: Synthetic oligonucleotide
  Target: LAMA2; (+) strand; PAM type: YTN; PAM sequence: TTA
aaggctcaccttgactgaga

SEQ ID NO: 386920 - DNA, 20 bp, Artificial Sequence
  Description of Artificial Sequence: Synthetic oligonucleotide
  Target: LAMA2; (+) strand; PAM type: YTN; PAM sequence: CTC
accttgactgagaacttacc

SEQ ID NO: 386921 - DNA, 20 bp, Artificial Sequence
  Description of Artificial Sequence: Synthetic oligonucleotide
  Target: LAMA2; (+) strand; PAM type: YTN; PAM sequence: CTT
gactgagaacttaccatttg

SEQ ID NO: 386922 - DNA, 20 bp, Artificial Sequence
  Description of Artificial Sequence: Synthetic oligonucleotide
  Target: LAMA2; (+) strand; PAM type: YTN; PAM sequence: TTG
actgagaacttaccatttgc

SEQ ID NO: 386923 - DNA, 20 bp, Artificial Sequence
  Description of Artificial Sequence: Synthetic oligonucleotide
  Target: LAMA2; (+) strand; PAM type: YTN; PAM sequence: CTG
agaacttaccatttgccagg

SEQ ID NO: 386924 - DNA, 20 bp, Artificial Sequence
  Description of Artificial Sequence: Synthetic oligonucleotide
  Target: LAMA2; (+) strand; PAM type: YTN; PAM sequence: CTT
accatttgccaggcactata

SEQ ID NO: 386925 - DNA, 20 bp, Artificial Sequence
  Description of Artificial Sequence: Synthetic oligonucleotide
  Target: LAMA2; (+) strand; PAM type: YTN; PAM sequence: TTA
ccatttgccaggcactatat

SEQ ID NO: 386926 - DNA, 20 bp, Artificial Sequence
  Description of Artificial Sequence: Synthetic oligonucleotide
  Target: LAMA2; (+) strand; PAM type: YTN; PAM sequence: TTT
gccaggcactatattaagca

SEQ ID NO: 386927 - DNA, 20 bp, Artificial Sequence
  Description of Artificial Sequence: Synthetic oligonucleotide
  Target: LAMA2; (+) strand; PAM type: YTN; PAM sequence: TTG
ccaggcactatattaagcat

SEQ ID NO: 386928 - DNA, 20 bp, Artificial Sequence
  Description of Artificial Sequence: Synthetic oligonucleotide
  Target: LAMA2; (+) strand; PAM type: YTN; PAM sequence: CTA
tattaagcattttacacgtg

SEQ ID NO: 386929 - DNA, 20 bp, Artificial Sequence
  Description of Artificial Sequence: Synthetic oligonucleotide
  Target: LAMA2; (+) strand; PAM type: YTN; PAM sequence: TTA
agcattttacacgtggttct

SEQ ID NO: 386930 - DNA, 20 bp, Artificial Sequence
  Description of Artificial Sequence: Synthetic oligonucleotide
  Target: LAMA2; (+) strand; PAM type: YTN; PAM sequence: TTT
tacacgtggttctttcattc

SEQ ID NO: 386931 - DNA, 20 bp, Artificial Sequence
  Description of Artificial Sequence: Synthetic oligonucleotide
  Target: LAMA2; (+) strand; PAM type: YTN; PAM sequence: TTT
acacgtggttctttcattct

SEQ ID NO: 386932 - DNA, 20 bp, Artificial Sequence
  Description of Artificial Sequence: Synthetic oligonucleotide
  Target: LAMA2; (+) strand; PAM type: YTN; PAM sequence: TTA
cacgtggttctttcattctt

SEQ ID NO: 386933 - DNA, 20 bp, Artificial Sequence
  Description of Artificial Sequence: Synthetic oligonucleotide
  Target: LAMA2; (+) strand; PAM type: YTN; PAM sequence: TTC
tttcattcttgtaacattcc

SEQ ID NO: 386934 - DNA, 20 bp, Artificial Sequence
  Description of Artificial Sequence: Synthetic oligonucleotide
  Target: LAMA2; (+) strand; PAM type: YTN; PAM sequence: CTT
tcattcttgtaacattccca

SEQ ID NO: 386935 - DNA, 20 bp, Artificial Sequence
  Description of Artificial Sequence: Synthetic oligonucleotide
  Target: LAMA2; (+) strand; PAM type: YTN; PAM sequence: TTT
cattcttgtaacattcccat

SEQ ID NO: 386936 - DNA, 20 bp, Artificial Sequence
  Description of Artificial Sequence: Synthetic oligonucleotide
  Target: LAMA2; (+) strand; PAM type: YTN; PAM sequence: TTC
attcttgtaacattcccatt

SEQ ID NO: 386937 - DNA, 20 bp, Artificial Sequence
  Description of Artificial Sequence: Synthetic oligonucleotide
  Target: LAMA2; (+) strand; PAM type: YTN; PAM sequence: TTC
ttgtaacattcccattcctt

SEQ ID NO: 386938 - DNA, 20 bp, Artificial Sequence
  Description of Artificial Sequence: Synthetic oligonucleotide
  Target: LAMA2; (+) strand; PAM type: YTN; PAM sequence: CTT
gtaacattcccattccttat

SEQ ID NO: 386939 - DNA, 20 bp, Artificial Sequence
  Description of Artificial Sequence: Synthetic oligonucleotide
  Target: LAMA2; (+) strand; PAM type: YTN; PAM sequence: TTG
taacattcccattccttatc

SEQ ID NO: 386940 - DNA, 20 bp, Artificial Sequence
  Description of Artificial Sequence: Synthetic oligonucleotide
  Target: LAMA2; (+) strand; PAM type: YTN; PAM sequence: TTC
ccattccttatcatccccac

SEQ ID NO: 386941 - DNA, 20 bp, Artificial Sequence
  Description of Artificial Sequence: Synthetic oligonucleotide
  Target: LAMA2; (+) strand; PAM type: YTN; PAM sequence: TTC
cttatcatccccactgtgtg

SEQ ID NO: 386942 - DNA, 20 bp, Artificial Sequence
  Description of Artificial Sequence: Synthetic oligonucleotide
  Target: LAMA2; (+) strand; PAM type: YTN; PAM sequence: CTT
atcatccccactgtgtgata

SEQ ID NO: 386943 - DNA, 20 bp, Artificial Sequence
  Description of Artificial Sequence: Synthetic oligonucleotide
  Target: LAMA2; (+) strand; PAM type: YTN; PAM sequence: TTA
tcatccccactgtgtgataa

SEQ ID NO: 386944 - DNA, 20 bp, Artificial Sequence
  Description of Artificial Sequence: Synthetic oligonucleotide
  Target: LAMA2; (+) strand; PAM type: YTN; PAM sequence: CTG
tgtgataagagaactgaatt

SEQ ID NO: 386945 - DNA, 20 bp, Artificial Sequence
  Description of Artificial Sequence: Synthetic oligonucleotide
  Target: LAMA2; (+) strand; PAM type: YTN; PAM sequence: CTG
aatttaggtaggttaagtca

SEQ ID NO: 386946 - DNA, 20 bp, Artificial Sequence
  Description of Artificial Sequence: Synthetic oligonucleotide
  Target: LAMA2; (+) strand; PAM type: YTN; PAM sequence: TTT
aggtaggttaagtcattttc

SEQ ID NO: 386947 - DNA, 20 bp, Artificial Sequence
  Description of Artificial Sequence: Synthetic oligonucleotide
  Target: LAMA2; (+) strand; PAM type: YTN; PAM sequence: TTA
ggtaggttaagtcattttct

SEQ ID NO: 386948 - DNA, 20 bp, Artificial Sequence
  Description of Artificial Sequence: Synthetic oligonucleotide
  Target: LAMA2; (+) strand; PAM type: YTN; PAM sequence: TTA
agtcattttctcagtgactt

SEQ ID NO: 386949 - DNA, 20 bp, Artificial Sequence
  Description of Artificial Sequence: Synthetic oligonucleotide
  Target: LAMA2; (+) strand; PAM type: YTN; PAM sequence: TTT
tctcagtgacttttcagtag

SEQ ID NO: 386950 - DNA, 20 bp, Artificial Sequence
  Description of Artificial Sequence: Synthetic oligonucleotide
  Target: LAMA2; (+) strand; PAM type: YTN; PAM sequence: TTT
ctcagtgacttttcagtaga

SEQ ID NO: 386951 - DNA, 20 bp, Artificial Sequence
  Description of Artificial Sequence: Synthetic oligonucleotide
  Target: LAMA2; (+) strand; PAM type: YTN; PAM sequence: TTC
tcagtgacttttcagtagat

SEQ ID NO: 386952 - DNA, 20 bp, Artificial Sequence
  Description of Artificial Sequence: Synthetic oligonucleotide
  Target: LAMA2; (+) strand; PAM type: YTN; PAM sequence: CTC
agtgacttttcagtagatcc

SEQ ID NO: 386953 - DNA, 20 bp, Artificial Sequence
  Description of Artificial Sequence: Synthetic oligonucleotide
  Target: LAMA2; (+) strand; PAM type: YTN; PAM sequence: CTT
ttcagtagatccgtgatttg

SEQ ID NO: 386954 - DNA, 20 bp, Artificial Sequence
  Description of Artificial Sequence: Synthetic oligonucleotide
  Target: LAMA2; (+) strand; PAM type: YTN; PAM sequence: TTT
tcagtagatccgtgatttga

SEQ ID NO: 386955 - DNA, 20 bp, Artificial Sequence
  Description of Artificial Sequence: Synthetic oligonucleotide
  Target: LAMA2; (+) strand; PAM type: YTN; PAM sequence: TTT
cagtagatccgtgatttgag

SEQ ID NO: 386956 - DNA, 20 bp, Artificial Sequence
  Description of Artificial Sequence: Synthetic oligonucleotide
  Target: LAMA2; (+) strand; PAM type: YTN; PAM sequence: TTC
agtagatccgtgatttgagc

SEQ ID NO: 386957 - DNA, 20 bp, Artificial Sequence
  Description of Artificial Sequence: Synthetic oligonucleotide
  Target: LAMA2; (+) strand; PAM type: YTN; PAM sequence: TTT
gagcatgggtcagtcttaca

SEQ ID NO: 386958 - DNA, 20 bp, Artificial Sequence
  Description of Artificial Sequence: Synthetic oligonucleotide
  Target: LAMA2; (+) strand; PAM type: YTN; PAM sequence: TTG
agcatgggtcagtcttacaa

SEQ ID NO: 386959 - DNA, 20 bp, Artificial Sequence
  Description of Artificial Sequence: Synthetic oligonucleotide
  Target: LAMA2; (+) strand; PAM type: YTN; PAM sequence: CTT
acaaatcttattttcttaac

SEQ ID NO: 386960 - DNA, 20 bp, Artificial Sequence
  Description of Artificial Sequence: Synthetic oligonucleotide
  Target: LAMA2; (+) strand; PAM type: YTN; PAM sequence: TTA
caaatcttattttcttaacc

SEQ ID NO: 386961 - DNA, 20 bp, Artificial Sequence
  Description of Artificial Sequence: Synthetic oligonucleotide
  Target: LAMA2; (+) strand; PAM type: YTN; PAM sequence: CTT
attttcttaacctctatgct

SEQ ID NO: 386962 - DNA, 20 bp, Artificial Sequence
  Description of Artificial Sequence: Synthetic oligonucleotide
  Target: LAMA2; (+) strand; PAM type: YTN; PAM sequence: TTA
ttttcttaacctctatgctg

SEQ ID NO: 386963 - DNA, 20 bp, Artificial Sequence
  Description of Artificial Sequence: Synthetic oligonucleotide
  Target: LAMA2; (+) strand; PAM type: YTN; PAM sequence: TTT
tcttaacctctatgctggct

SEQ ID NO: 386964 - DNA, 20 bp, Artificial Sequence
  Description of Artificial Sequence: Synthetic oligonucleotide
  Target: LAMA2; (+) strand; PAM type: YTN; PAM sequence: TTT
cttaacctctatgctggcta

SEQ ID NO: 386965 - DNA, 20 bp, Artificial Sequence
  Description of Artificial Sequence: Synthetic oligonucleotide
  Target: LAMA2; (+) strand; PAM type: YTN; PAM sequence: TTC
ttaacctctatgctggctac

SEQ ID NO: 386966 - DNA, 20 bp, Artificial Sequence
  Description of Artificial Sequence: Synthetic oligonucleotide
  Target: LAMA2; (+) strand; PAM type: YTN; PAM sequence: CTT
aacctctatgctggctactg

SEQ ID NO: 386967 - DNA, 20 bp, Artificial Sequence
  Description of Artificial Sequence: Synthetic oligonucleotide
  Target: LAMA2; (+) strand; PAM type: YTN; PAM sequence: TTA
acctctatgctggctactga

SEQ ID NO: 386968 - DNA, 20 bp, Artificial Sequence
  Description of Artificial Sequence: Synthetic oligonucleotide
  Target: LAMA2; (+) strand; PAM type: YTN; PAM sequence: CTC
tatgctggctactgataaac

SEQ ID NO: 386969 - DNA, 20 bp, Artificial Sequence
  Description of Artificial Sequence: Synthetic oligonucleotide
  Target: LAMA2; (+) strand; PAM type: YTN; PAM sequence: CTA
tgctggctactgataaacag

SEQ ID NO: 386970 - DNA, 20 bp, Artificial Sequence
  Description of Artificial Sequence: Synthetic oligonucleotide
  Target: LAMA2; (+) strand; PAM type: YTN; PAM sequence: CTG
gctactgataaacagagaaa

SEQ ID NO: 386971 - DNA, 20 bp, Artificial Sequence
  Description of Artificial Sequence: Synthetic oligonucleotide
  Target: LAMA2; (+) strand; PAM type: YTN; PAM sequence: CTA
ctgataaacagagaaagcaa

SEQ ID NO: 386972 - DNA, 20 bp, Artificial Sequence
  Description of Artificial Sequence: Synthetic oligonucleotide
  Target: LAMA2; (+) strand; PAM type: YTN; PAM sequence: CTG
ataaacagagaaagcaaacg

SEQ ID NO: 386973 - DNA, 20 bp, Artificial Sequence
  Description of Artificial Sequence: Synthetic oligonucleotide
  Target: LAMA2; (+) strand; PAM type: YTN; PAM sequence: TTT
agccagtatattcaacatta

SEQ ID NO: 386974 - DNA, 20 bp, Artificial Sequence
  Description of Artificial Sequence: Synthetic oligonucleotide
  Target: LAMA2; (+) strand; PAM type: YTN; PAM sequence: TTA
gccagtatattcaacattaa

SEQ ID NO: 386975 - DNA, 20 bp, Artificial Sequence
  Description of Artificial Sequence: Synthetic oligonucleotide
  Target: LAMA2; (+) strand; PAM type: YTN; PAM sequence: TTC
aacattaatgaattcagccc

SEQ ID NO: 386976 - DNA, 20 bp, Artificial Sequence
  Description of Artificial Sequence: Synthetic oligonucleotide
  Target: LAMA2; (+) strand; PAM type: YTN; PAM sequence: TTA
atgaattcagccctttattc

SEQ ID NO: 386977 - DNA, 20 bp, Artificial Sequence
  Description of Artificial Sequence: Synthetic oligonucleotide
  Target: LAMA2; (+) strand; PAM type: YTN; PAM sequence: TTC
agccctttattcatttactg

SEQ ID NO: 386978 - DNA, 20 bp, Artificial Sequence
  Description of Artificial Sequence: Synthetic oligonucleotide
  Target: LAMA2; (+) strand; PAM type: YTN; PAM sequence: CTT
tattcatttactgcttccat

SEQ ID NO: 386979 - DNA, 20 bp, Artificial Sequence
  Description of Artificial Sequence: Synthetic oligonucleotide
  Target: LAMA2; (+) strand; PAM type: YTN; PAM sequence: TTT
attcatttactgcttccatg

SEQ ID NO: 386980 - DNA, 20 bp, Artificial Sequence
  Description of Artificial Sequence: Synthetic oligonucleotide
  Target: LAMA2; (+) strand; PAM type: YTN; PAM sequence: TTA
ttcatttactgcttccatgt

SEQ ID NO: 386981 - DNA, 20 bp, Artificial Sequence
  Description of Artificial Sequence: Synthetic oligonucleotide
  Target: LAMA2; (+) strand; PAM type: YTN; PAM sequence: TTC
atttactgcttccatgttta

SEQ ID NO: 386982 - DNA, 20 bp, Artificial Sequence
  Description of Artificial Sequence: Synthetic oligonucleotide
  Target: LAMA2; (+) strand; PAM type: YTN; PAM sequence: TTT
actgcttccatgtttagagc

SEQ ID NO: 386983 - DNA, 20 bp, Artificial Sequence
  Description of Artificial Sequence: Synthetic oligonucleotide
  Target: LAMA2; (+) strand; PAM type: YTN; PAM sequence: TTA
ctgcttccatgtttagagcc

SEQ ID NO: 386984 - DNA, 20 bp, Artificial Sequence
  Description of Artificial Sequence: Synthetic oligonucleotide
  Target: LAMA2; (+) strand; PAM type: YTN; PAM sequence: CTG
cttccatgtttagagcccat

SEQ ID NO: 386985 - DNA, 20 bp, Artificial Sequence
  Description of Artificial Sequence: Synthetic oligonucleotide
  Target: LAMA2; (+) strand; PAM type: YTN; PAM sequence: CTT
ccatgtttagagcccattct

SEQ ID NO: 386986 - DNA, 20 bp, Artificial Sequence
  Description of Artificial Sequence: Synthetic oligonucleotide
  Target: LAMA2; (+) strand; PAM type: YTN; PAM sequence: TTC
catgtttagagcccattcta

SEQ ID NO: 386987 - DNA, 20 bp, Artificial Sequence
  Description of Artificial Sequence: Synthetic oligonucleotide
  Target: LAMA2; (+) strand; PAM type: YTN; PAM sequence: TTT
agagcccattctacctcgat

SEQ ID NO: 386988 - DNA, 20 bp, Artificial Sequence
  Description of Artificial Sequence: Synthetic oligonucleotide
  Target: LAMA2; (+) strand; PAM type: YTN; PAM sequence: TTA
gagcccattctacctcgatt

SEQ ID NO: 386989 - DNA, 20 bp, Artificial Sequence
  Description of Artificial Sequence: Synthetic oligonucleotide
  Target: LAMA2; (+) strand; PAM type: YTN; PAM sequence: TTC
tacctcgattaaaaataaat

SEQ ID NO: 386990 - DNA, 20 bp, Artificial Sequence
  Description of Artificial Sequence: Synthetic oligonucleotide
  Target: LAMA2; (+) strand; PAM type: YTN; PAM sequence: CTA
cctcgattaaaaataaatat

SEQ ID NO: 386991 - DNA, 20 bp, Artificial Sequence
  Description of Artificial Sequence: Synthetic oligonucleotide
  Target: LAMA2; (+) strand; PAM type: YTN; PAM sequence: CTC
gattaaaaataaatataaaa

SEQ ID NO: 386992 - DNA, 20 bp, Artificial Sequence
  Description of Artificial Sequence: Synthetic oligonucleotide
  Target: LAMA2; (+) strand; PAM type: YTN; PAM sequence: TTA
aaaataaatataaaacgagc

SEQ ID NO: 386993 - DNA, 20 bp, Artificial Sequence
  Description of Artificial Sequence: Synthetic oligonucleotide
  Target: LAMA2; (+) strand; PAM type: YTN; PAM sequence: CTA
aaattacaaaatgagaaatt

SEQ ID NO: 386994 - DNA, 20 bp, Artificial Sequence
  Description of Artificial Sequence: Synthetic oligonucleotide
  Target: LAMA2; (+) strand; PAM type: YTN; PAM sequence: TTA
caaaatgagaaattttaagt

SEQ ID NO: 386995 - DNA, 20 bp, Artificial Sequence
  Description of Artificial Sequence: Synthetic oligonucleotide
  Target: LAMA2; (+) strand; PAM type: YTN; PAM sequence: TTT
taagtgtatgtaatctcagt

SEQ ID NO: 386996 - DNA, 20 bp, Artificial Sequence
  Description of Artificial Sequence: Synthetic oligonucleotide
  Target: LAMA2; (+) strand; PAM type: YTN; PAM sequence: TTT
aagtgtatgtaatctcagta

SEQ ID NO: 386997 - DNA, 20 bp, Artificial Sequence
  Description of Artificial Sequence: Synthetic oligonucleotide
  Target: LAMA2; (+) strand; PAM type: YTN; PAM sequence: TTA
agtgtatgtaatctcagtaa

SEQ ID NO: 386998 - DNA, 20 bp, Artificial Sequence
  Description of Artificial Sequence: Synthetic oligonucleotide
  Target: LAMA2; (+) strand; PAM type: YTN; PAM sequence: CTC
agtaatgacatttattttct

SEQ ID NO: 386999 - DNA, 20 bp, Artificial Sequence
  Description of Artificial Sequence: Synthetic oligonucleotide
  Target: LAMA2; (+) strand; PAM type: YTN; PAM sequence: TTT
attttctgctaatcattgag

SEQ ID NO: 387000 - DNA, 20 bp, Artificial Sequence
  Description of Artificial Sequence: Synthetic oligonucleotide
  Target: LAMA2; (+) strand; PAM type: YTN; PAM sequence: TTA
ttttctgctaatcattgaga

SEQ ID NO: 387001 - DNA, 20 bp, Artificial Sequence
  Description of Artificial Sequence: Synthetic oligonucleotide
  Target: LAMA2; (+) strand; PAM type: YTN; PAM sequence: TTT
tctgctaatcattgagactc

SEQ ID NO: 387002 - DNA, 20 bp, Artificial Sequence
  Description of Artificial Sequence: Synthetic oligonucleotide
  Target: LAMA2; (+) strand; PAM type: YTN; PAM sequence: TTT
ctgctaatcattgagactcc

SEQ ID NO: 387003 - DNA, 20 bp, Artificial Sequence
  Description of Artificial Sequence: Synthetic oligonucleotide
  Target: LAMA2; (+) strand; PAM type: YTN; PAM sequence: TTC
tgctaatcattgagactcct

SEQ ID NO: 387004 - DNA, 20 bp, Artificial Sequence
  Description of Artificial Sequence: Synthetic oligonucleotide
  Target: LAMA2; (+) strand; PAM type: YTN; PAM sequence: CTG
ctaatcattgagactcctct

SEQ ID NO: 387005 - DNA, 20 bp, Artificial Sequence
  Description of Artificial Sequence: Synthetic oligonucleotide
  Target: LAMA2; (+) strand; PAM type: YTN; PAM sequence: CTA
atcattgagactcctctaag

SEQ ID NO: 387006 - DNA, 20 bp, Artificial Sequence
  Description of Artificial Sequence: Synthetic oligonucleotide
  Target: LAMA2; (+) strand; PAM type: YTN; PAM sequence: TTG
agactcctctaagatttaaa

SEQ ID NO: 387007 - DNA, 20 bp, Artificial Sequence
  Description of Artificial Sequence: Synthetic oligonucleotide
  Target: LAMA2; (+) strand; PAM type: YTN; PAM sequence: CTC
ctctaagatttaaaacatta

SEQ ID NO: 387008 - DNA, 20 bp, Artificial Sequence
  Description of Artificial Sequence: Synthetic oligonucleotide
  Target: LAMA2; (+) strand; PAM type: YTN; PAM sequence: CTC
taagatttaaaacattatgg

SEQ ID NO: 387009 - DNA, 20 bp, Artificial Sequence
  Description of Artificial Sequence: Synthetic oligonucleotide
  Target: LAMA2; (+) strand; PAM type: YTN; PAM sequence: CTA
agatttaaaacattatggca

SEQ ID NO: 387010 - DNA, 20 bp, Artificial Sequence
  Description of Artificial Sequence: Synthetic oligonucleotide
  Target: LAMA2; (+) strand; PAM type: YTN; PAM sequence: TTT
aaaacattatggcatttatg

SEQ ID NO: 387011 - DNA, 20 bp, Artificial Sequence
  Description of Artificial Sequence: Synthetic oligonucleotide
  Target: LAMA2; (+) strand; PAM type: YTN; PAM sequence: TTA
aaacattatggcatttatgg

SEQ ID NO: 387012 - DNA, 20 bp, Artificial Sequence
  Description of Artificial Sequence: Synthetic oligonucleotide
  Target: LAMA2; (+) strand; PAM type: YTN; PAM sequence: TTA
tggcatttatggtagattcc

SEQ ID NO: 387013 - DNA, 20 bp, Artificial Sequence
  Description of Artificial Sequence: Synthetic oligonucleotide
  Target: LAMA2; (+) strand; PAM type: YTN; PAM sequence: TTT
atggtagattccttttcatc

SEQ ID NO: 387014 - DNA, 20 bp, Artificial Sequence
  Description of Artificial Sequence: Synthetic oligonucleotide
  Target: LAMA2; (+) strand; PAM type: YTN; PAM sequence: TTA
tggtagattccttttcatca

SEQ ID NO: 387015 - DNA, 20 bp, Artificial Sequence
  Description of Artificial Sequence: Synthetic oligonucleotide
  Target: LAMA2; (+) strand; PAM type: YTN; PAM sequence: TTC
cttttcatcagagattgtca

SEQ ID NO: 387016 - DNA, 20 bp, Artificial Sequence
  Description of Artificial Sequence: Synthetic oligonucleotide
  Target: LAMA2; (+) strand; PAM type: YTN; PAM sequence: CTT
ttcatcagagattgtcaagt

SEQ ID NO: 387017 - DNA, 20 bp, Artificial Sequence
  Description of Artificial Sequence: Synthetic oligonucleotide
  Target: LAMA2; (+) strand; PAM type: YTN; PAM sequence: TTT
tcatcagagattgtcaagta

SEQ ID NO: 387018 - DNA, 20 bp, Artificial Sequence
  Description of Artificial Sequence: Synthetic oligonucleotide
  Target: LAMA2; (+) strand; PAM type: YTN; PAM sequence: TTT
catcagagattgtcaagtag

SEQ ID NO: 387019 - DNA, 20 bp, Artificial Sequence
  Description of Artificial Sequence: Synthetic oligonucleotide
  Target: LAMA2; (+) strand; PAM type: YTN; PAM sequence: TTC
atcagagattgtcaagtaga

SEQ ID NO: 387020 - DNA, 20 bp, Artificial Sequence
  Description of Artificial Sequence: Synthetic oligonucleotide
  Target: LAMA2; (+) strand; PAM type: YTN; PAM sequence: TTG
tcaagtagagactgtcttct

SEQ ID NO: 387021 - DNA, 20 bp, Artificial Sequence
  Description of Artificial Sequence: Synthetic oligonucleotide
  Target: LAMA2; (+) strand; PAM type: YTN; PAM sequence: CTG
tcttctatgcagaagaaaag

SEQ ID NO: 387022 - DNA, 20 bp, Artificial Sequence
  Description of Artificial Sequence: Synthetic oligonucleotide
  Target: LAMA2; (+) strand; PAM type: YTN; PAM sequence: CTT
ctatgcagaagaaaagatac

SEQ ID NO: 387023 - DNA, 20 bp, Artificial Sequence
  Description of Artificial Sequence: Synthetic oligonucleotide
  Target: LAMA2; (+) strand; PAM type: YTN; PAM sequence: TTC
tatgcagaagaaaagatact

SEQ ID NO: 387024 - DNA, 20 bp, Artificial Sequence
  Description of Artificial Sequence: Synthetic oligonucleotide
  Target: LAMA2; (+) strand; PAM type: YTN; PAM sequence: CTA
tgcagaagaaaagatactag

SEQ ID NO: 387025 - DNA, 20 bp, Artificial Sequence
  Description of Artificial Sequence: Synthetic oligonucleotide
  Target: LAMA2; (+) strand; PAM type: YTN; PAM sequence: CTA
gctgggtgcccagattaact

SEQ ID NO: 387026 - DNA, 20 bp, Artificial Sequence
  Description of Artificial Sequence: Synthetic oligonucleotide
  Target: LAMA2; (+) strand; PAM type: YTN; PAM sequence: CTG
ggtgcccagattaacttcac

SEQ ID NO: 387027 - DNA, 20 bp, Artificial Sequence
  Description of Artificial Sequence: Synthetic oligonucleotide
  Target: LAMA2; (+) strand; PAM type: YTN; PAM sequence: TTA
acttcacagcctcttttttt

SEQ ID NO: 387028 - DNA, 20 bp, Artificial Sequence
  Description of Artificial Sequence: Synthetic oligonucleotide
  Target: LAMA2; (+) strand; PAM type: YTN; PAM sequence: CTT
cacagcctctttttttctaa

SEQ ID NO: 387029 - DNA, 20 bp, Artificial Sequence
  Description of Artificial Sequence: Synthetic oligonucleotide
  Target: LAMA2; (+) strand; PAM type: YTN; PAM sequence: TTC
acagcctctttttttctaaa

SEQ ID NO: 387030 - DNA, 20 bp, Artificial Sequence
  Description of Artificial Sequence: Synthetic oligonucleotide
  Target: LAMA2; (+) strand; PAM type: YTN; PAM sequence: CTC
tttttttctaaaaggaatta

SEQ ID NO: 387031 - DNA, 20 bp, Artificial Sequence
  Description of Artificial Sequence: Synthetic oligonucleotide
  Target: LAMA2; (+) strand; PAM type: YTN; PAM sequence: CTT
tttttctaaaaggaattatt

SEQ ID NO: 387032 - DNA, 20 bp, Artificial Sequence
  Description of Artificial Sequence: Synthetic oligonucleotide
  Target: LAMA2; (+) strand; PAM type: YTN; PAM sequence: TTT
ttttctaaaaggaattattt

SEQ ID NO: 387033 - DNA, 20 bp, Artificial Sequence
  Description of Artificial Sequence: Synthetic oligonucleotide
  Target: LAMA2; (+) strand; PAM type: YTN; PAM sequence: TTT
tttctaaaaggaattatttg

SEQ ID NO: 387034 - DNA, 20 bp, Artificial Sequence
  Description of Artificial Sequence: Synthetic oligonucleotide
  Target: LAMA2; (+) strand; PAM type: YTN; PAM sequence: TTT
ttctaaaaggaattatttgg

SEQ ID NO: 387035 - DNA, 20 bp, Artificial Sequence
  Description of Artificial Sequence: Synthetic oligonucleotide
  Target: LAMA2; (+) strand; PAM type: YTN; PAM sequence: TTT
tctaaaaggaattatttggg

SEQ ID NO: 387036 - DNA, 20 bp, Artificial Sequence
  Description of Artificial Sequence: Synthetic oligonucleotide
  Target: LAMA2; (+) strand; PAM type: YTN; PAM sequence: TTT
ctaaaaggaattatttggga

SEQ ID NO: 387037 - DNA, 20 bp, Artificial Sequence
  Description of Artificial Sequence: Synthetic oligonucleotide
  Target: LAMA2; (+) strand; PAM type: YTN; PAM sequence: TTC
taaaaggaattatttgggac

SEQ ID NO: 387038 - DNA, 20 bp, Artificial Sequence
  Description of Artificial Sequence: Synthetic oligonucleotide
  Target: LAMA2; (+) strand; PAM type: YTN; PAM sequence: CTA
aaaggaattatttgggacag

SEQ ID NO: 387039 - DNA, 20 bp, Artificial Sequence
  Description of Artificial Sequence: Synthetic oligonucleotide
  Target: LAMA2; (+) strand; PAM type: YTN; PAM sequence: TTA
tttgggacagctttacaatg

SEQ ID NO: 387040 - DNA, 20 bp, Artificial Sequence
  Description of Artificial Sequence: Synthetic oligonucleotide
  Target: LAMA2; (+) strand; PAM type: YTN; PAM sequence: TTT
gggacagctttacaatgtta

SEQ ID NO: 387041 - DNA, 20 bp, Artificial Sequence
  Description of Artificial Sequence: Synthetic oligonucleotide
  Target: LAMA2; (+) strand; PAM type: YTN; PAM sequence: TTG
ggacagctttacaatgttat

SEQ ID NO: 387042 - DNA, 20 bp, Artificial Sequence
  Description of Artificial Sequence: Synthetic oligonucleotide
  Target: LAMA2; (+) strand; PAM type: YTN; PAM sequence: CTT
tacaatgttatgtaagttgg

SEQ ID NO: 387043 - DNA, 20 bp, Artificial Sequence
  Description of Artificial Sequence: Synthetic oligonucleotide
  Target: LAMA2; (+) strand; PAM type: YTN; PAM sequence: TTT
acaatgttatgtaagttggt

SEQ ID NO: 387044 - DNA, 20 bp, Artificial Sequence
  Description of Artificial Sequence: Synthetic oligonucleotide
  Target: LAMA2; (+) strand; PAM type: YTN; PAM sequence: TTA
caatgttatgtaagttggtg

SEQ ID NO: 387045 - DNA, 20 bp, Artificial Sequence
  Description of Artificial Sequence: Synthetic oligonucleotide
  Target: LAMA2; (+) strand; PAM type: YTN; PAM sequence: TTA
tgtaagttggtgagttctga

SEQ ID NO: 387046 - DNA, 20 bp, Artificial Sequence
  Description of Artificial Sequence: Synthetic oligonucleotide
  Target: LAMA2; (+) strand; PAM type: YTN; PAM sequence: TTG
gtgagttctgaagagatatt

SEQ ID NO: 387047 - DNA, 20 bp, Artificial Sequence
  Description of Artificial Sequence: Synthetic oligonucleotide
  Target: LAMA2; (+) strand; PAM type: YTN; PAM sequence: TTC
tgaagagatattttattaat

SEQ ID NO: 387048 - DNA, 20 bp, Artificial Sequence
  Description of Artificial Sequence: Synthetic oligonucleotide
  Target: LAMA2; (+) strand; PAM type: YTN; PAM sequence: CTG
aagagatattttattaattt

SEQ ID NO: 387049 - DNA, 20 bp, Artificial Sequence
  Description of Artificial Sequence: Synthetic oligonucleotide
  Target: LAMA2; (+) strand; PAM type: YTN; PAM sequence: TTT
tattaatttcccaaattaag

SEQ ID NO: 387050 - DNA, 20 bp, Artificial Sequence
  Description of Artificial Sequence: Synthetic oligonucleotide
  Target: LAMA2; (+) strand; PAM type: YTN; PAM sequence: TTT
attaatttcccaaattaaga

SEQ ID NO: 387051 - DNA, 20 bp, Artificial Sequence
  Description of Artificial Sequence: Synthetic oligonucleotide
  Target: LAMA2; (+) strand; PAM type: YTN; PAM sequence: TTA
ttaatttcccaaattaagat

SEQ ID NO: 387052 - DNA, 20 bp, Artificial Sequence
  Description of Artificial Sequence: Synthetic oligonucleotide
  Target: LAMA2; (+) strand; PAM type: YTN; PAM sequence: TTA
atttcccaaattaagatttc

SEQ ID NO: 387053 - DNA, 20 bp, Artificial Sequence
  Description of Artificial Sequence: Synthetic oligonucleotide
  Target: LAMA2; (+) strand; PAM type: YTN; PAM sequence: TTT
cccaaattaagatttcttct

SEQ ID NO: 387054 - DNA, 20 bp, Artificial Sequence
  Description of Artificial Sequence: Synthetic oligonucleotide
  Target: LAMA2; (+) strand; PAM type: YTN; PAM sequence: TTC
ccaaattaagatttcttctt

SEQ ID NO: 387055 - DNA, 20 bp, Artificial Sequence
  Description of Artificial Sequence: Synthetic oligonucleotide
  Target: LAMA2; (+) strand; PAM type: YTN; PAM sequence: TTA
agatttcttcttgataagtt

SEQ ID NO: 387056 - DNA, 20 bp, Artificial Sequence
  Description of Artificial Sequence: Synthetic oligonucleotide
  Target: LAMA2; (+) strand; PAM type: YTN; PAM sequence: TTT
cttcttgataagttaataca

SEQ ID NO: 387057 - DNA, 20 bp, Artificial Sequence
  Description of Artificial Sequence: Synthetic oligonucleotide
  Target: LAMA2; (+) strand; PAM type: YTN; PAM sequence: TTC
ttcttgataagttaatacaa

SEQ ID NO: 387058 - DNA, 20 bp, Artificial Sequence
  Description of Artificial Sequence: Synthetic oligonucleotide
  Target: LAMA2; (+) strand; PAM type: YTN; PAM sequence: CTT
cttgataagttaatacaaat

SEQ ID NO: 387059 - DNA, 20 bp, Artificial Sequence
  Description of Artificial Sequence: Synthetic oligonucleotide
  Target: LAMA2; (+) strand; PAM type: YTN; PAM sequence: TTC
ttgataagttaatacaaatc

SEQ ID NO: 387060 - DNA, 20 bp, Artificial Sequence
  Description of Artificial Sequence: Synthetic oligonucleotide
  Target: LAMA2; (+) strand; PAM type: YTN; PAM sequence: CTT
gataagttaatacaaatcca

SEQ ID NO: 387061 - DNA, 20 bp, Artificial Sequence
  Description of Artificial Sequence: Synthetic oligonucleotide
  Target: LAMA2; (+) strand; PAM type: YTN; PAM sequence: TTG
ataagttaatacaaatccat

SEQ ID NO: 387062 - DNA, 20 bp, Artificial Sequence
  Description of Artificial Sequence: Synthetic oligonucleotide
  Target: LAMA2; (+) strand; PAM type: YTN; PAM sequence: TTA
atacaaatccatcctcctct

SEQ ID NO: 387063 - DNA, 20 bp, Artificial Sequence
  Description of Artificial Sequence: Synthetic oligonucleotide
  Target: LAMA2; (+) strand; PAM type: YTN; PAM sequence: CTC
ctctttcaactgtcattcat

SEQ ID NO: 387064 - DNA, 20 bp, Artificial Sequence
  Description of Artificial Sequence: Synthetic oligonucleotide
  Target: LAMA2; (+) strand; PAM type: YTN; PAM sequence: CTC
tttcaactgtcattcatagt

SEQ ID NO: 387065 - DNA, 20 bp, Artificial Sequence
  Description of Artificial Sequence: Synthetic oligonucleotide
  Target: LAMA2; (+) strand; PAM type: YTN; PAM sequence: CTT
tcaactgtcattcatagttc

SEQ ID NO: 387066 - DNA, 20 bp, Artificial Sequence
  Description of Artificial Sequence: Synthetic oligonucleotide
  Target: LAMA2; (+) strand; PAM type: YTN; PAM sequence: TTT
caactgtcattcatagttca

SEQ ID NO: 387067 - DNA, 20 bp, Artificial Sequence
  Description of Artificial Sequence: Synthetic oligonucleotide
  Target: LAMA2; (+) strand; PAM type: YTN; PAM sequence: TTC
aactgtcattcatagttcac

SEQ ID NO: 387068 - DNA, 20 bp, Artificial Sequence
  Description of Artificial Sequence: Synthetic oligonucleotide
  Target: LAMA2; (+) strand; PAM type: YTN; PAM sequence: CTG
tcattcatagttcacatgtc

SEQ ID NO: 387069 - DNA, 20 bp, Artificial Sequence
  Description of Artificial Sequence: Synthetic oligonucleotide
  Target: LAMA2; (+) strand; PAM type: YTN; PAM sequence: TTC
atagttcacatgtcatttta

SEQ ID NO: 387070 - DNA, 20 bp, Artificial Sequence
  Description of Artificial Sequence: Synthetic oligonucleotide
  Target: LAMA2; (+) strand; PAM type: YTN; PAM sequence: TTC
acatgtcattttataaaatg

SEQ ID NO: 387071 - DNA, 20 bp, Artificial Sequence
  Description of Artificial Sequence: Synthetic oligonucleotide
  Target: LAMA2; (+) strand; PAM type: YTN; PAM sequence: TTT
tataaaatgagaacaactaa

SEQ ID NO: 387072 - DNA, 20 bp, Artificial Sequence
  Description of Artificial Sequence: Synthetic oligonucleotide
  Target: LAMA2; (+) strand; PAM type: YTN; PAM sequence: TTT
ataaaatgagaacaactaac

SEQ ID NO: 387073 - DNA, 20 bp, Artificial Sequence
  Description of Artificial Sequence: Synthetic oligonucleotide
  Target: LAMA2; (+) strand; PAM type: YTN; PAM sequence: TTA
taaaatgagaacaactaacc

SEQ ID NO: 387074 - DNA, 20 bp, Artificial Sequence
  Description of Artificial Sequence: Synthetic oligonucleotide
  Target: LAMA2; (+) strand; PAM type: YTN; PAM sequence: CTA
acctgccttcaagaaactta

SEQ ID NO: 387075 - DNA, 20 bp, Artificial Sequence
  Description of Artificial Sequence: Synthetic oligonucleotide
  Target: LAMA2; (+) strand; PAM type: YTN; PAM sequence: CTG
ccttcaagaaacttaaaaat

SEQ ID NO: 387076 - DNA, 20 bp, Artificial Sequence
  Description of Artificial Sequence: Synthetic oligonucleotide
  Target: LAMA2; (+) strand; PAM type: YTN; PAM sequence: CTT
caagaaacttaaaaatgaac

SEQ ID NO: 387077 - DNA, 20 bp, Artificial Sequence
  Description of Artificial Sequence: Synthetic oligonucleotide
  Target: LAMA2; (+) strand; PAM type: YTN; PAM sequence: TTC
aagaaacttaaaaatgaaca

SEQ ID NO: 387078 - DNA, 20 bp, Artificial Sequence
  Description of Artificial Sequence: Synthetic oligonucleotide
  Target: LAMA2; (+) strand; PAM type: YTN; PAM sequence: CTT
aaaaatgaacaaagaagcca

SEQ ID NO: 387079 - DNA, 20 bp, Artificial Sequence
  Description of Artificial Sequence: Synthetic oligonucleotide
  Target: LAMA2; (+) strand; PAM type: YTN; PAM sequence: TTA
aaaatgaacaaagaagccat

SEQ ID NO: 387080 - DNA, 20 bp, Artificial Sequence
  Description of Artificial Sequence: Synthetic oligonucleotide
  Target: LAMA2; (+) strand; PAM type: YTN; PAM sequence: TTA
tttgcttaacagtaaagttt

SEQ ID NO: 387081 - DNA, 20 bp, Artificial Sequence
  Description of Artificial Sequence: Synthetic oligonucleotide
  Target: LAMA2; (+) strand; PAM type: YTN; PAM sequence: TTT
gcttaacagtaaagtttagt

SEQ ID NO: 387082 - DNA, 20 bp, Artificial Sequence
  Description of Artificial Sequence: Synthetic oligonucleotide
  Target: LAMA2; (+) strand; PAM type: YTN; PAM sequence: TTG
cttaacagtaaagtttagta

SEQ ID NO: 387083 - DNA, 20 bp, Artificial Sequence
  Description of Artificial Sequence: Synthetic oligonucleotide
  Target: LAMA2; (+) strand; PAM type: YTN; PAM sequence: CTT
aacagtaaagtttagtattt

SEQ ID NO: 387084 - DNA, 20 bp, Artificial Sequence
  Description of Artificial Sequence: Synthetic oligonucleotide
  Target: LAMA2; (+) strand; PAM type: YTN; PAM sequence: TTA
acagtaaagtttagtatttt

SEQ ID NO: 387085 - DNA, 20 bp, Artificial Sequence
  Description of Artificial Sequence: Synthetic oligonucleotide
  Target: LAMA2; (+) strand; PAM type: YTN; PAM sequence: TTT
agtattttgaaacacaaaac

SEQ ID NO: 387086 - DNA, 20 bp, Artificial Sequence
  Description of Artificial Sequence: Synthetic oligonucleotide
  Target: LAMA2; (+) strand; PAM type: YTN; PAM sequence: TTA
gtattttgaaacacaaaact

SEQ ID NO: 387087 - DNA, 20 bp, Artificial Sequence
  Description of Artificial Sequence: Synthetic oligonucleotide
  Target: LAMA2; (+) strand; PAM type: YTN; PAM sequence: TTT
tgaaacacaaaacttggatt

SEQ ID NO: 387088 - DNA, 20 bp, Artificial Sequence
  Description of Artificial Sequence: Synthetic oligonucleotide
  Target: LAMA2; (+) strand; PAM type: YTN; PAM sequence: TTT
gaaacacaaaacttggattt

SEQ ID NO: 387089 - DNA, 20 bp, Artificial Sequence
  Description of Artificial Sequence: Synthetic oligonucleotide
  Target: LAMA2; (+) strand; PAM type: YTN; PAM sequence: TTG
aaacacaaaacttggatttg

SEQ ID NO: 387090 - DNA, 20 bp, Artificial Sequence
  Description of Artificial Sequence: Synthetic oligonucleotide
  Target: LAMA2; (+) strand; PAM type: YTN; PAM sequence: CTT
ggatttgttcatatcctatt

SEQ ID NO: 387091 - DNA, 20 bp, Artificial Sequence
  Description of Artificial Sequence: Synthetic oligonucleotide
  Target: LAMA2; (+) strand; PAM type: YTN; PAM sequence: TTG
gatttgttcatatcctattt

SEQ ID NO: 387092 - DNA, 20 bp, Artificial Sequence
  Description of Artificial Sequence: Synthetic oligonucleotide
  Target: LAMA2; (+) strand; PAM type: YTN; PAM sequence: TTT
gttcatatcctattttctgt

SEQ ID NO: 387093 - DNA, 20 bp, Artificial Sequence
  Description of Artificial Sequence: Synthetic oligonucleotide
  Target: LAMA2; (+) strand; PAM type: YTN; PAM sequence: TTG
ttcatatcctattttctgta

SEQ ID NO: 387094 - DNA, 20 bp, Artificial Sequence
  Description of Artificial Sequence: Synthetic oligonucleotide
  Target: LAMA2; (+) strand; PAM type: YTN; PAM sequence: TTC
atatcctattttctgtaaac

SEQ ID NO: 387095 - DNA, 20 bp, Artificial Sequence
  Description of Artificial Sequence: Synthetic oligonucleotide
  Target: LAMA2; (+) strand; PAM type: YTN; PAM sequence: CTA
ttttctgtaaactcatatca

SEQ ID NO: 387096 - DNA, 20 bp, Artificial Sequence
  Description of Artificial Sequence: Synthetic oligonucleotide
  Target: LAMA2; (+) strand; PAM type: YTN; PAM sequence: TTT
tctgtaaactcatatcatta

SEQ ID NO: 387097 - DNA, 20 bp, Artificial Sequence
  Description of Artificial Sequence: Synthetic oligonucleotide
  Target: LAMA2; (+) strand; PAM type: YTN; PAM sequence: TTT
ctgtaaactcatatcattaa

SEQ ID NO: 387098 - DNA, 20 bp, Artificial Sequence
  Description of Artificial Sequence: Synthetic oligonucleotide
  Target: LAMA2; (+) strand; PAM type: YTN; PAM sequence: TTC
tgtaaactcatatcattaac

SEQ ID NO: 387099 - DNA, 20 bp, Artificial Sequence
  Description of Artificial Sequence: Synthetic oligonucleotide
  Target: LAMA2; (+) strand; PAM type: YTN; PAM sequence: CTG
taaactcatatcattaacac

SEQ ID NO: 387100 - DNA, 20 bp, Artificial Sequence
  Description of Artificial Sequence: Synthetic oligonucleotide
  Target: LAMA2; (+) strand; PAM type: YTN; PAM sequence: CTC
atatcattaacacagaataa

SEQ ID NO: 387101 - DNA, 20 bp, Artificial Sequence
  Description of Artificial Sequence: Synthetic oligonucleotide
  Target: LAMA2; (+) strand; PAM type: YTN; PAM sequence: TTA
acacagaataacccatgtga

SEQ ID NO: 387102 - DNA, 20 bp, Artificial Sequence
  Description of Artificial Sequence: Synthetic oligonucleotide
  Target: LAMA2; (+) strand; PAM type: YTN; PAM sequence: TTT
aaaatagattatgagtggca

SEQ ID NO: 387103 - DNA, 20 bp, Artificial Sequence
  Description of Artificial Sequence: Synthetic oligonucleotide
  Target: LAMA2; (+) strand; PAM type: YTN; PAM sequence: TTA
aaatagattatgagtggcat

SEQ ID NO: 387104 - DNA, 20 bp, Artificial Sequence
  Description of Artificial Sequence: Synthetic oligonucleotide
  Target: LAMA2; (+) strand; PAM type: YTN; PAM sequence: TTA
tgagtggcatagtaaaatgt

SEQ ID NO: 387105 - DNA, 20 bp, Artificial Sequence
  Description of Artificial Sequence: Synthetic oligonucleotide
  Target: LAMA2; (+) strand; PAM type: YTN; PAM sequence: TTA
ctctcctagagaacagaaat

SEQ ID NO: 387106 - DNA, 20 bp, Artificial Sequence
  Description of Artificial Sequence: Synthetic oligonucleotide
  Target: LAMA2; (+) strand; PAM type: YTN; PAM sequence: CTC
tcctagagaacagaaattaa

SEQ ID NO: 387107 - DNA, 20 bp, Artificial Sequence
  Description of Artificial Sequence: Synthetic oligonucleotide
  Target: LAMA2; (+) strand; PAM type: YTN; PAM sequence: CTC
ctagagaacagaaattaaaa

SEQ ID NO: 387108 - DNA, 20 bp, Artificial Sequence
  Description of Artificial Sequence: Synthetic oligonucleotide
  Target: LAMA2; (+) strand; PAM type: YTN; PAM sequence: CTA
gagaacagaaattaaaatta

SEQ ID NO: 387109 - DNA, 20 bp, Artificial Sequence
  Description of Artificial Sequence: Synthetic oligonucleotide
  Target: LAMA2; (+) strand; PAM type: YTN; PAM sequence: TTA
aaattagtatctgttggcaa

SEQ ID NO: 387110 - DNA, 20 bp, Artificial Sequence
  Description of Artificial Sequence: Synthetic oligonucleotide
  Target: LAMA2; (+) strand; PAM type: YTN; PAM sequence: TTA
gtatctgttggcaagatatt

SEQ ID NO: 387111 - DNA, 20 bp, Artificial Sequence
  Description of Artificial Sequence: Synthetic oligonucleotide
  Target: LAMA2; (+) strand; PAM type: YTN; PAM sequence: CTG
ttggcaagatattacttcat

SEQ ID NO: 387112 - DNA, 20 bp, Artificial Sequence
  Description of Artificial Sequence: Synthetic oligonucleotide
  Target: LAMA2; (+) strand; PAM type: YTN; PAM sequence: TTG
gcaagatattacttcataaa

SEQ ID NO: 387113 - DNA, 20 bp, Artificial Sequence
  Description of Artificial Sequence: Synthetic oligonucleotide
  Target: LAMA2; (+) strand; PAM type: YTN; PAM sequence: TTA
cttcataaaaattgcctgaa

SEQ ID NO: 387114 - DNA, 20 bp, Artificial Sequence
  Description of Artificial Sequence: Synthetic oligonucleotide
  Target: LAMA2; (+) strand; PAM type: YTN; PAM sequence: CTT
cataaaaattgcctgaaata

SEQ ID NO: 387115 - DNA, 20 bp, Artificial Sequence
  Description of Artificial Sequence: Synthetic oligonucleotide
  Target: LAMA2; (+) strand; PAM type: YTN; PAM sequence: TTC
ataaaaattgcctgaaatag

SEQ ID NO: 387116 - DNA, 20 bp, Artificial Sequence
  Description of Artificial Sequence: Synthetic oligonucleotide
  Target: LAMA2; (+) strand; PAM type: YTN; PAM sequence: TTG
cctgaaatagcattttataa

SEQ ID NO: 387117 - DNA, 20 bp, Artificial Sequence
  Description of Artificial Sequence: Synthetic oligonucleotide
  Target: LAMA2; (+) strand; PAM type: YTN; PAM sequence: CTG
aaatagcattttataaatat

SEQ ID NO: 387118 - DNA, 20 bp, Artificial Sequence
  Description of Artificial Sequence: Synthetic oligonucleotide
  Target: LAMA2; (+) strand; PAM type: YTN; PAM sequence: TTT
tataaatatcaaattggtgt

SEQ ID NO: 387119 - DNA, 20 bp, Artificial Sequence
  Description of Artificial Sequence: Synthetic oligonucleotide
  Target: LAMA2; (+) strand; PAM type: YTN; PAM sequence: TTT
ataaatatcaaattggtgtt

SEQ ID NO: 387120 - DNA, 20 bp, Artificial Sequence
  Description of Artificial Sequence: Synthetic oligonucleotide
  Target: LAMA2; (+) strand; PAM type: YTN; PAM sequence: TTA
taaatatcaaattggtgttg

SEQ ID NO: 387121 - DNA, 20 bp, Artificial Sequence
  Description of Artificial Sequence: Synthetic oligonucleotide
  Target: LAMA2; (+) strand; PAM type: YTN; PAM sequence: TTG
gtgttgcctatttttaatca

SEQ ID NO: 387122 - DNA, 20 bp, Artificial Sequence
  Description of Artificial Sequence: Synthetic oligonucleotide
  Target: LAMA2; (+) strand; PAM type: YTN; PAM sequence: TTG
cctatttttaatcactgcat

SEQ ID NO: 387123 - DNA, 20 bp, Artificial Sequence
  Description of Artificial Sequence: Synthetic oligonucleotide
  Target: LAMA2; (+) strand; PAM type: YTN; PAM sequence: CTA
tttttaatcactgcatagtg

SEQ ID NO: 387124 - DNA, 20 bp, Artificial Sequence
  Description of Artificial Sequence: Synthetic oligonucleotide
  Target: LAMA2; (+) strand; PAM type: YTN; PAM sequence: TTT
ttaatcactgcatagtgggg

SEQ ID NO: 387125 - DNA, 20 bp, Artificial Sequence
  Description of Artificial Sequence: Synthetic oligonucleotide
  Target: LAMA2; (+) strand; PAM type: YTN; PAM sequence: TTT
taatcactgcatagtggggt

SEQ ID NO: 387126 - DNA, 20 bp, Artificial Sequence
  Description of Artificial Sequence: Synthetic oligonucleotide
  Target: LAMA2; (+) strand; PAM type: YTN; PAM sequence: TTT
aatcactgcatagtggggtt

SEQ ID NO: 387127 - DNA, 20 bp, Artificial Sequence
  Description of Artificial Sequence: Synthetic oligonucleotide
  Target: LAMA2; (+) strand; PAM type: YTN; PAM sequence: TTA
atcactgcatagtggggttt

SEQ ID NO: 387128 - DNA, 20 bp, Artificial Sequence
  Description of Artificial Sequence: Synthetic oligonucleotide
  Target: LAMA2; (+) strand; PAM type: YTN; PAM sequence: CTG
catagtggggtttttgggat

SEQ ID NO: 387129 - DNA, 20 bp, Artificial Sequence
  Description of Artificial Sequence: Synthetic oligonucleotide
  Target: LAMA2; (+) strand; PAM type: YTN; PAM sequence: TTT
ttgggatatatcagctttta

SEQ ID NO: 387130 - DNA, 20 bp, Artificial Sequence
  Description of Artificial Sequence: Synthetic oligonucleotide
  Target: LAMA2; (+) strand; PAM type: YTN; PAM sequence: TTT
tgggatatatcagcttttat

SEQ ID NO: 387131 - DNA, 20 bp, Artificial Sequence
  Description of Artificial Sequence: Synthetic oligonucleotide
  Target: LAMA2; (+) strand; PAM type: YTN; PAM sequence: TTT
gggatatatcagcttttatt

SEQ ID NO: 387132 - DNA, 20 bp, Artificial Sequence
  Description of Artificial Sequence: Synthetic oligonucleotide
  Target: LAMA2; (+) strand; PAM type: YTN; PAM sequence: TTG
ggatatatcagcttttatta

SEQ ID NO: 387133 - DNA, 20 bp, Artificial Sequence
  Description of Artificial Sequence: Synthetic oligonucleotide
  Target: LAMA2; (+) strand; PAM type: YTN; PAM sequence: CTT
ttattatttatagtcacaat

SEQ ID NO: 387134 - DNA, 20 bp, Artificial Sequence
  Description of Artificial Sequence: Synthetic oligonucleotide
  Target: LAMA2; (+) strand; PAM type: YTN; PAM sequence: TTT
tattatttatagtcacaatt

SEQ ID NO: 387135 - DNA, 20 bp, Artificial Sequence
  Description of Artificial Sequence: Synthetic oligonucleotide
  Target: LAMA2; (+) strand; PAM type: YTN; PAM sequence: TTT
attatttatagtcacaattt

SEQ ID NO: 387136 - DNA, 20 bp, Artificial Sequence
  Description of Artificial Sequence: Synthetic oligonucleotide
  Target: LAMA2; (+) strand; PAM type: YTN; PAM sequence: TTA
ttatttatagtcacaattta

SEQ ID NO: 387137 - DNA, 20 bp, Artificial Sequence
  Description of Artificial Sequence: Synthetic oligonucleotide
  Target: LAMA2; (+) strand; PAM type: YTN; PAM sequence: TTA
tttatagtcacaatttactt

SEQ ID NO: 387138 - DNA, 20 bp, Artificial Sequence
  Description of Artificial Sequence: Synthetic oligonucleotide
  Target: LAMA2; (+) strand; PAM type: YTN; PAM sequence: TTT
atagtcacaatttacttaaa

SEQ ID NO: 387139 - DNA, 20 bp, Artificial Sequence
  Description of Artificial Sequence: Synthetic oligonucleotide
  Target: LAMA2; (+) strand; PAM type: YTN; PAM sequence: TTA
tagtcacaatttacttaaat

SEQ ID NO: 387140 - DNA, 20 bp, Artificial Sequence
  Description of Artificial Sequence: Synthetic oligonucleotide
  Target: LAMA2; (+) strand; PAM type: YTN; PAM sequence: TTT
acttaaattctaacatatat

SEQ ID NO: 387141 - DNA, 20 bp, Artificial Sequence
  Description of Artificial Sequence: Synthetic oligonucleotide
  Target: LAMA2; (+) strand; PAM type: YTN; PAM sequence: TTA
cttaaattctaacatatatt

SEQ ID NO: 387142 - DNA, 20 bp, Artificial Sequence
  Description of Artificial Sequence: Synthetic oligonucleotide
  Target: LAMA2; (+) strand; PAM type: YTN; PAM sequence: CTT
aaattctaacatatatttat

SEQ ID NO: 387143 - DNA, 20 bp, Artificial Sequence
  Description of Artificial Sequence: Synthetic oligonucleotide
  Target: LAMA2; (+) strand; PAM type: YTN; PAM sequence: TTA
aattctaacatatatttatt

SEQ ID NO: 387144 - DNA, 20 bp, Artificial Sequence
  Description of Artificial Sequence: Synthetic oligonucleotide
  Target: LAMA2; (+) strand; PAM type: YTN; PAM sequence: TTC
taacatatatttatttaaaa

SEQ ID NO: 387145 - DNA, 20 bp, Artificial Sequence
  Description of Artificial Sequence: Synthetic oligonucleotide
  Target: LAMA2; (+) strand; PAM type: YTN; PAM sequence: CTA
acatatatttatttaaaata

SEQ ID NO: 387146 - DNA, 20 bp, Artificial Sequence
  Description of Artificial Sequence: Synthetic oligonucleotide
  Target: LAMA2; (+) strand; PAM type: YTN; PAM sequence: TTT
atttaaaataaaacatacac

SEQ ID NO: 387147 - DNA, 20 bp, Artificial Sequence
  Description of Artificial Sequence: Synthetic oligonucleotide
  Target: LAMA2; (+) strand; PAM type: YTN; PAM sequence: TTA
tttaaaataaaacatacact

SEQ ID NO: 387148 - DNA, 20 bp, Artificial Sequence
  Description of Artificial Sequence: Synthetic oligonucleotide
  Target: LAMA2; (+) strand; PAM type: YTN; PAM sequence: TTT
aaaataaaacatacactttg

SEQ ID NO: 387149 - DNA, 20 bp, Artificial Sequence
  Description of Artificial Sequence: Synthetic oligonucleotide
  Target: LAMA2; (+) strand; PAM type: YTN; PAM sequence: TTA
aaataaaacatacactttgc

SEQ ID NO: 387150 - DNA, 20 bp, Artificial Sequence
  Description of Artificial Sequence: Synthetic oligonucleotide
  Target: LAMA2; (+) strand; PAM type: YTN; PAM sequence: CTT
tgcttgccaatttgcaaaag

SEQ ID NO: 387151 - DNA, 20 bp, Artificial Sequence
  Description of Artificial Sequence: Synthetic oligonucleotide
  Target: LAMA2; (+) strand; PAM type: YTN; PAM sequence: TTT
gcttgccaatttgcaaaagt

SEQ ID NO: 387152 - DNA, 20 bp, Artificial Sequence
  Description of Artificial Sequence: Synthetic oligonucleotide
  Target: LAMA2; (+) strand; PAM type: YTN; PAM sequence: TTG
cttgccaatttgcaaaagtg

SEQ ID NO: 387153 - DNA, 20 bp, Artificial Sequence
  Description of Artificial Sequence: Synthetic oligonucleotide
  Target: LAMA2; (+) strand; PAM type: YTN; PAM sequence: CTT
gccaatttgcaaaagtgatc

SEQ ID NO: 387154 - DNA, 20 bp, Artificial Sequence
  Description of Artificial Sequence: Synthetic oligonucleotide
  Target: LAMA2; (+) strand; PAM type: YTN; PAM sequence: TTG
ccaatttgcaaaagtgatca

SEQ ID NO: 387155 - DNA, 20 bp, Artificial Sequence
  Description of Artificial Sequence: Synthetic oligonucleotide
  Target: LAMA2; (+) strand; PAM type: YTN; PAM sequence: TTT
gcaaaagtgatcatgaacta

SEQ ID NO: 387156 - DNA, 20 bp, Artificial Sequence
  Description of Artificial Sequence: Synthetic oligonucleotide
  Target: LAMA2; (+) strand; PAM type: YTN; PAM sequence: TTG
caaaagtgatcatgaactat

SEQ ID NO: 387157 - DNA, 20 bp, Artificial Sequence
  Description of Artificial Sequence: Synthetic oligonucleotide
  Target: LAMA2; (+) strand; PAM type: YTN; PAM sequence: CTA
tgttttctacttgcaacctg

SEQ ID NO: 387158 - DNA, 20 bp, Artificial Sequence
  Description of Artificial Sequence: Synthetic oligonucleotide
  Target: LAMA2; (+) strand; PAM type: YTN; PAM sequence: TTT
tctacttgcaacctgagata

SEQ ID NO: 387159 - DNA, 20 bp, Artificial Sequence
  Description of Artificial Sequence: Synthetic oligonucleotide
  Target: LAMA2; (+) strand; PAM type: YTN; PAM sequence: TTT
ctacttgcaacctgagataa

SEQ ID NO: 387160 - DNA, 20 bp, Artificial Sequence
  Description of Artificial Sequence: Synthetic oligonucleotide
  Target: LAMA2; (+) strand; PAM type: YTN; PAM sequence: TTC
tacttgcaacctgagataag

SEQ ID NO: 387161 - DNA, 20 bp, Artificial Sequence
  Description of Artificial Sequence: Synthetic oligonucleotide
  Target: LAMA2; (+) strand; PAM type: YTN; PAM sequence: CTA
cttgcaacctgagataagcc

SEQ ID NO: 387162 - DNA, 20 bp, Artificial Sequence
  Description of Artificial Sequence: Synthetic oligonucleotide
  Target: LAMA2; (+) strand; PAM type: YTN; PAM sequence: CTT
gcaacctgagataagcctag

SEQ ID NO: 387163 - DNA, 20 bp, Artificial Sequence
  Description of Artificial Sequence: Synthetic oligonucleotide
  Target: LAMA2; (+) strand; PAM type: YTN; PAM sequence: TTG
caacctgagataagcctagc

SEQ ID NO: 387164 - DNA, 20 bp, Artificial Sequence
  Description of Artificial Sequence: Synthetic oligonucleotide
  Target: LAMA2; (+) strand; PAM type: YTN; PAM sequence: CTG
agataagcctagctaaatgt

SEQ ID NO: 387165 - DNA, 20 bp, Artificial Sequence
  Description of Artificial Sequence: Synthetic oligonucleotide
  Target: LAMA2; (+) strand; PAM type: YTN; PAM sequence: CTA
gctaaatgtggtaattttcc

SEQ ID NO: 387166 - DNA, 20 bp, Artificial Sequence
  Description of Artificial Sequence: Synthetic oligonucleotide
  Target: LAMA2; (+) strand; PAM type: YTN; PAM sequence: CTA
aatgtggtaattttccttaa

SEQ ID NO: 387167 - DNA, 20 bp, Artificial Sequence
  Description of Artificial Sequence: Synthetic oligonucleotide
  Target: LAMA2; (+) strand; PAM type: YTN; PAM sequence: TTT
tccttaactctgtaaaattg

SEQ ID NO: 387168 - DNA, 20 bp, Artificial Sequence
  Description of Artificial Sequence: Synthetic oligonucleotide
  Target: LAMA2; (+) strand; PAM type: YTN; PAM sequence: TTT
ccttaactctgtaaaattgg

SEQ ID NO: 387169 - DNA, 20 bp, Artificial Sequence
  Description of Artificial Sequence: Synthetic oligonucleotide
  Target: LAMA2; (+) strand; PAM type: YTN; PAM sequence: TTC
cttaactctgtaaaattggc

SEQ ID NO: 387170 - DNA, 20 bp, Artificial Sequence
  Description of Artificial Sequence: Synthetic oligonucleotide
  Target: LAMA2; (+) strand; PAM type: YTN; PAM sequence: CTT
aactctgtaaaattggcaac

SEQ ID NO: 387171 - DNA, 20 bp, Artificial Sequence
  Description of Artificial Sequence: Synthetic oligonucleotide
  Target: LAMA2; (+) strand; PAM type: YTN; PAM sequence: TTA
actctgtaaaattggcaact

SEQ ID NO: 387172 - DNA, 20 bp, Artificial Sequence
  Description of Artificial Sequence: Synthetic oligonucleotide
  Target: LAMA2; (+) strand; PAM type: YTN; PAM sequence: CTC
tgtaaaattggcaacttcca

SEQ ID NO: 387173 - DNA, 20 bp, Artificial Sequence
  Description of Artificial Sequence: Synthetic oligonucleotide
  Target: LAMA2; (+) strand; PAM type: YTN; PAM sequence: CTG
taaaattggcaacttccaac

SEQ ID NO: 387174 - DNA, 20 bp, Artificial Sequence
  Description of Artificial Sequence: Synthetic oligonucleotide
  Target: LAMA2; (+) strand; PAM type: YTN; PAM sequence: TTG
gcaacttccaaccacttggt

SEQ ID NO: 387175 - DNA, 20 bp, Artificial Sequence
  Description of Artificial Sequence: Synthetic oligonucleotide
  Target: LAMA2; (+) strand; PAM type: YTN; PAM sequence: CTT
ccaaccacttggtgaaaccg

SEQ ID NO: 387176 - DNA, 20 bp, Artificial Sequence
  Description of Artificial Sequence: Synthetic oligonucleotide
  Target: LAMA2; (+) strand; PAM type: YTN; PAM sequence: TTC
caaccacttggtgaaaccgg

SEQ ID NO: 387177 - DNA, 20 bp, Artificial Sequence
  Description of Artificial Sequence: Synthetic oligonucleotide
  Target: LAMA2; (+) strand; PAM type: YTN; PAM sequence: CTT
ggtgaaaccggaagtctgaa

SEQ ID NO: 387178 - DNA, 20 bp, Artificial Sequence
  Description of Artificial Sequence: Synthetic oligonucleotide
  Target: LAMA2; (+) strand; PAM type: YTN; PAM sequence: TTG
gtgaaaccggaagtctgaag

SEQ ID NO: 387179 - DNA, 20 bp, Artificial Sequence
  Description of Artificial Sequence: Synthetic oligonucleotide
  Target: LAMA2; (+) strand; PAM type: YTN; PAM sequence: CTG
aagttttatcctatcttgat

SEQ ID NO: 387180 - DNA, 20 bp, Artificial Sequence
  Description of Artificial Sequence: Synthetic oligonucleotide
  Target: LAMA2; (+) strand; PAM type: YTN; PAM sequence: TTT
tatcctatcttgatctacag

SEQ ID NO: 387181 - DNA, 20 bp, Artificial Sequence
  Description of Artificial Sequence: Synthetic oligonucleotide
  Target: LAMA2; (+) strand; PAM type: YTN; PAM sequence: TTT
atcctatcttgatctacaga

SEQ ID NO: 387182 - DNA, 20 bp, Artificial Sequence
  Description of Artificial Sequence: Synthetic oligonucleotide
  Target: LAMA2; (+) strand; PAM type: YTN; PAM sequence: TTA
tcctatcttgatctacagag

SEQ ID NO: 387183 - DNA, 20 bp, Artificial Sequence
  Description of Artificial Sequence: Synthetic oligonucleotide
  Target: LAMA2; (+) strand; PAM type: YTN; PAM sequence: CTA
tcttgatctacagagatata

SEQ ID NO: 387184 - DNA, 20 bp, Artificial Sequence
  Description of Artificial Sequence: Synthetic oligonucleotide
  Target: LAMA2; (+) strand; PAM type: YTN; PAM sequence: CTT
gatctacagagatataatca

SEQ ID NO: 387185 - DNA, 20 bp, Artificial Sequence
  Description of Artificial Sequence: Synthetic oligonucleotide
  Target: LAMA2; (+) strand; PAM type: YTN; PAM sequence: TTG
atctacagagatataatcaa

SEQ ID NO: 387186 - DNA, 20 bp, Artificial Sequence
  Description of Artificial Sequence: Synthetic oligonucleotide
  Target: LAMA2; (+) strand; PAM type: YTN; PAM sequence: CTA
cagagatataatcaacattg

SEQ ID NO: 387187 - DNA, 20 bp, Artificial Sequence
  Description of Artificial Sequence: Synthetic oligonucleotide
  Target: LAMA2; (+) strand; PAM type: YTN; PAM sequence: TTG
tcgtttttaatagccagttg

SEQ ID NO: 387188 - DNA, 20 bp, Artificial Sequence
  Description of Artificial Sequence: Synthetic oligonucleotide
  Target: LAMA2; (+) strand; PAM type: YTN; PAM sequence: TTT
ttaatagccagttgccacca

SEQ ID NO: 387189 - DNA, 20 bp, Artificial Sequence
  Description of Artificial Sequence: Synthetic oligonucleotide
  Target: LAMA2; (+) strand; PAM type: YTN; PAM sequence: TTT
taatagccagttgccaccaa

SEQ ID NO: 387190 - DNA, 20 bp, Artificial Sequence
  Description of Artificial Sequence: Synthetic oligonucleotide
  Target: LAMA2; (+) strand; PAM type: YTN; PAM sequence: TTT
aatagccagttgccaccaaa

SEQ ID NO: 387191 - DNA, 20 bp, Artificial Sequence
  Description of Artificial Sequence: Synthetic oligonucleotide
  Target: LAMA2; (+) strand; PAM type: YTN; PAM sequence: TTA
atagccagttgccaccaaag

SEQ ID NO: 387192 - DNA, 20 bp, Artificial Sequence
  Description of Artificial Sequence: Synthetic oligonucleotide
  Target: LAMA2; (+) strand; PAM type: YTN; PAM sequence: TTG
ccaccaaagatctgatcaca

SEQ ID NO: 387193 - DNA, 20 bp, Artificial Sequence
  Description of Artificial Sequence: Synthetic oligonucleotide
  Target: LAMA2; (+) strand; PAM type: YTN; PAM sequence: CTG
atcacaataatgcagagacc

SEQ ID NO: 387194 - DNA, 20 bp, Artificial Sequence
  Description of Artificial Sequence: Synthetic oligonucleotide
  Target: LAMA2; (+) strand; PAM type: YTN; PAM sequence: CTT
tatatattatcactagaaca

SEQ ID NO: 387195 - DNA, 20 bp, Artificial Sequence
  Description of Artificial Sequence: Synthetic oligonucleotide
  Target: LAMA2; (+) strand; PAM type: YTN; PAM sequence: TTT
atatattatcactagaacac

SEQ ID NO: 387196 - DNA, 20 bp, Artificial Sequence
  Description of Artificial Sequence: Synthetic oligonucleotide
  Target: LAMA2; (+) strand; PAM type: YTN; PAM sequence: TTA
tatattatcactagaacact

SEQ ID NO: 387197 - DNA, 20 bp, Artificial Sequence
  Description of Artificial Sequence: Synthetic oligonucleotide
  Target: LAMA2; (+) strand; PAM type: YTN; PAM sequence: TTA
tcactagaacactgttgtac

SEQ ID NO: 387198 - DNA, 20 bp, Artificial Sequence
  Description of Artificial Sequence: Synthetic oligonucleotide
  Target: LAMA2; (+) strand; PAM type: YTN; PAM sequence: CTA
gaacactgttgtacatttat

SEQ ID NO: 387199 - DNA, 20 bp, Artificial Sequence
  Description of Artificial Sequence: Synthetic oligonucleotide
  Target: LAMA2; (+) strand; PAM type: YTN; PAM sequence: CTG
ttgtacatttataatcaaaa

SEQ ID NO: 387200 - DNA, 20 bp, Artificial Sequence
  Description of Artificial Sequence: Synthetic oligonucleotide
  Target: LAMA2; (+) strand; PAM type: YTN; PAM sequence: TTG
tacatttataatcaaaaatg

SEQ ID NO: 387201 - DNA, 20 bp, Artificial Sequence
  Description of Artificial Sequence: Synthetic oligonucleotide
  Target: LAMA2; (+) strand; PAM type: YTN; PAM sequence: TTT
ataatcaaaaatgattaata

SEQ ID NO: 387202 - DNA, 20 bp, Artificial Sequence
  Description of Artificial Sequence: Synthetic oligonucleotide
  Target: LAMA2; (+) strand; PAM type: YTN; PAM sequence: TTA
taatcaaaaatgattaataa

SEQ ID NO: 387203 - DNA, 20 bp, Artificial Sequence
  Description of Artificial Sequence: Synthetic oligonucleotide
  Target: LAMA2; (+) strand; PAM type: YTN; PAM sequence: TTA
ataatggcagtgattgcccc

SEQ ID NO: 387204 - DNA, 20 bp, Artificial Sequence
  Description of Artificial Sequence: Synthetic oligonucleotide
  Target: LAMA2; (+) strand; PAM type: YTN; PAM sequence: TTG
ccccctatatatgggagcag

SEQ ID NO: 387205 - DNA, 20 bp, Artificial Sequence
  Description of Artificial Sequence: Synthetic oligonucleotide
  Target: LAMA2; (+) strand; PAM type: YTN; PAM sequence: CTA
tatatgggagcagaaacaaa

SEQ ID NO: 387206 - DNA, 20 bp, Artificial Sequence
  Description of Artificial Sequence: Synthetic oligonucleotide
  Target: LAMA2; (+) strand; PAM type: YTN; PAM sequence: TTA
tcactgtaatgaaaacagga

SEQ ID NO: 387207 - DNA, 20 bp, Artificial Sequence
  Description of Artificial Sequence: Synthetic oligonucleotide
  Target: LAMA2; (+) strand; PAM type: YTN; PAM sequence: CTG
taatgaaaacaggacttact

SEQ ID NO: 387208 - DNA, 20 bp, Artificial Sequence
  Description of Artificial Sequence: Synthetic oligonucleotide
  Target: LAMA2; (+) strand; PAM type: YTN; PAM sequence: CTT
actattctgaaaaatgatga

SEQ ID NO: 387209 - DNA, 20 bp, Artificial Sequence
  Description of Artificial Sequence: Synthetic oligonucleotide
  Target: LAMA2; (+) strand; PAM type: YTN; PAM sequence: TTA
ctattctgaaaaatgatgat

SEQ ID NO: 387210 - DNA, 20 bp, Artificial Sequence
  Description of Artificial Sequence: Synthetic oligonucleotide
  Target: LAMA2; (+) strand; PAM type: YTN; PAM sequence: CTA
ttctgaaaaatgatgataaa

SEQ ID NO: 387211 - DNA, 20 bp, Artificial Sequence
  Description of Artificial Sequence: Synthetic oligonucleotide
  Target: LAMA2; (+) strand; PAM type: YTN; PAM sequence: TTC
tgaaaaatgatgataaacat

SEQ ID NO: 387212 - DNA, 20 bp, Artificial Sequence
  Description of Artificial Sequence: Synthetic oligonucleotide
  Target: LAMA2; (+) strand; PAM type: YTN; PAM sequence: CTG
aaaaatgatgataaacatca

SEQ ID NO: 387213 - DNA, 20 bp, Artificial Sequence
  Description of Artificial Sequence: Synthetic oligonucleotide
  Target: LAMA2; (+) strand; PAM type: YTN; PAM sequence: TTG
atctccagatgctgattact

SEQ ID NO: 387214 - DNA, 20 bp, Artificial Sequence
  Description of Artificial Sequence: Synthetic oligonucleotide
  Target: LAMA2; (+) strand; PAM type: YTN; PAM sequence: CTC
cagatgctgattactgatct

SEQ ID NO: 387215 - DNA, 20 bp, Artificial Sequence
  Description of Artificial Sequence: Synthetic oligonucleotide
  Target: LAMA2; (+) strand; PAM type: YTN; PAM sequence: CTG
attactgatctaacactttg

SEQ ID NO: 387216 - DNA, 20 bp, Artificial Sequence
  Description of Artificial Sequence: Synthetic oligonucleotide
  Target: LAMA2; (+) strand; PAM type: YTN; PAM sequence: TTA
ctgatctaacactttgcttg

SEQ ID NO: 387217 - DNA, 20 bp, Artificial Sequence
  Description of Artificial Sequence: Synthetic oligonucleotide
  Target: LAMA2; (+) strand; PAM type: YTN; PAM sequence: CTG
atctaacactttgcttgttg

SEQ ID NO: 387218 - DNA, 20 bp, Artificial Sequence
  Description of Artificial Sequence: Synthetic oligonucleotide
  Target: LAMA2; (+) strand; PAM type: YTN; PAM sequence: CTA
acactttgcttgttgtaccc

SEQ ID NO: 387219 - DNA, 20 bp, Artificial Sequence
  Description of Artificial Sequence: Synthetic oligonucleotide
  Target: LAMA2; (+) strand; PAM type: YTN; PAM sequence: CTT
tgcttgttgtaccccctaaa

SEQ ID NO: 387220 - DNA, 20 bp, Artificial Sequence
  Description of Artificial Sequence: Synthetic oligonucleotide
  Target: LAMA2; (+) strand; PAM type: YTN; PAM sequence: TTT
gcttgttgtaccccctaaat

SEQ ID NO: 387221 - DNA, 20 bp, Artificial Sequence
  Description of Artificial Sequence: Synthetic oligonucleotide
  Target: LAMA2; (+) strand; PAM type: YTN; PAM sequence: TTG
cttgttgtaccccctaaatg

SEQ ID NO: 387222 - DNA, 20 bp, Artificial Sequence
  Description of Artificial Sequence: Synthetic oligonucleotide
  Target: LAMA2; (+) strand; PAM type: YTN; PAM sequence: CTT
gttgtaccccctaaatgtca

SEQ ID NO: 387223 - DNA, 20 bp, Artificial Sequence
  Description of Artificial Sequence: Synthetic oligonucleotide
  Target: LAMA2; (+) strand; PAM type: YTN; PAM sequence: TTG
ttgtaccccctaaatgtcat

SEQ ID NO: 387224 - DNA, 20 bp, Artificial Sequence
  Description of Artificial Sequence: Synthetic oligonucleotide
  Target: LAMA2; (+) strand; PAM type: YTN; PAM sequence: TTG
taccccctaaatgtcatcct

SEQ ID NO: 387225 - DNA, 20 bp, Artificial Sequence
  Description of Artificial Sequence: Synthetic oligonucleotide
  Target: LAMA2; (+) strand; PAM type: YTN; PAM sequence: CTA
aatgtcatcctctctctgct

SEQ ID NO: 387226 - DNA, 20 bp, Artificial Sequence
  Description of Artificial Sequence: Synthetic oligonucleotide
  Target: LAMA2; (+) strand; PAM type: YTN; PAM sequence: CTC
tctctgctcgtactcactgc

SEQ ID NO: 387227 - DNA, 20 bp, Artificial Sequence
  Description of Artificial Sequence: Synthetic oligonucleotide
  Target: LAMA2; (+) strand; PAM type: YTN; PAM sequence: CTC
tctgctcgtactcactgctc

SEQ ID NO: 387228 - DNA, 20 bp, Artificial Sequence
  Description of Artificial Sequence: Synthetic oligonucleotide
  Target: LAMA2; (+) strand; PAM type: YTN; PAM sequence: CTC
tgctcgtactcactgctcaa

SEQ ID NO: 387229 - DNA, 20 bp, Artificial Sequence
  Description of Artificial Sequence: Synthetic oligonucleotide
  Target: LAMA2; (+) strand; PAM type: YTN; PAM sequence: CTG
ctcgtactcactgctcaagt

SEQ ID NO: 387230 - DNA, 20 bp, Artificial Sequence
  Description of Artificial Sequence: Synthetic oligonucleotide
  Target: LAMA2; (+) strand; PAM type: YTN; PAM sequence: CTC
gtactcactgctcaagtaag

SEQ ID NO: 387231 - DNA, 20 bp, Artificial Sequence
  Description of Artificial Sequence: Synthetic oligonucleotide
  Target: LAMA2; (+) strand; PAM type: YTN; PAM sequence: CTC
actgctcaagtaagttctta

SEQ ID NO: 387232 - DNA, 20 bp, Artificial Sequence
  Description of Artificial Sequence: Synthetic oligonucleotide
  Target: LAMA2; (+) strand; PAM type: YTN; PAM sequence: CTG
ctcaagtaagttcttatttg

SEQ ID NO: 387233 - DNA, 20 bp, Artificial Sequence
  Description of Artificial Sequence: Synthetic oligonucleotide
  Target: LAMA2; (+) strand; PAM type: YTN; PAM sequence: CTC
aagtaagttcttatttgaaa

SEQ ID NO: 387234 - DNA, 20 bp, Artificial Sequence
  Description of Artificial Sequence: Synthetic oligonucleotide
  Target: LAMA2; (+) strand; PAM type: YTN; PAM sequence: TTC
ttatttgaaaggacagtaag

SEQ ID NO: 387235 - DNA, 20 bp, Artificial Sequence
  Description of Artificial Sequence: Synthetic oligonucleotide
  Target: LAMA2; (+) strand; PAM type: YTN; PAM sequence: CTT
atttgaaaggacagtaagta

SEQ ID NO: 387236 - DNA, 20 bp, Artificial Sequence
  Description of Artificial Sequence: Synthetic oligonucleotide
  Target: LAMA2; (+) strand; PAM type: YTN; PAM sequence: TTA
tttgaaaggacagtaagtat

SEQ ID NO: 387237 - DNA, 20 bp, Artificial Sequence
  Description of Artificial Sequence: Synthetic oligonucleotide
  Target: LAMA2; (+) strand; PAM type: YTN; PAM sequence: TTT
gaaaggacagtaagtatgtc

SEQ ID NO: 387238 - DNA, 20 bp, Artificial Sequence
  Description of Artificial Sequence: Synthetic oligonucleotide
  Target: LAMA2; (+) strand; PAM type: YTN; PAM sequence: TTG
aaaggacagtaagtatgtca

SEQ ID NO: 387239 - DNA, 20 bp, Artificial Sequence
  Description of Artificial Sequence: Synthetic oligonucleotide
  Target: LAMA2; (+) strand; PAM type: YTN; PAM sequence: TTT
tctgtagtctaagctgtgtc

SEQ ID NO: 387240 - DNA, 20 bp, Artificial Sequence
  Description of Artificial Sequence: Synthetic oligonucleotide
  Target: LAMA2; (+) strand; PAM type: YTN; PAM sequence: TTT
ctgtagtctaagctgtgtca

SEQ ID NO: 387241 - DNA, 20 bp, Artificial Sequence
  Description of Artificial Sequence: Synthetic oligonucleotide
  Target: LAMA2; (+) strand; PAM type: YTN; PAM sequence: TTC
tgtagtctaagctgtgtcat

SEQ ID NO: 387242 - DNA, 20 bp, Artificial Sequence
  Description of Artificial Sequence: Synthetic oligonucleotide
  Target: LAMA2; (+) strand; PAM type: YTN; PAM sequence: CTG
tagtctaagctgtgtcatgt

SEQ ID NO: 387243 - DNA, 20 bp, Artificial Sequence
  Description of Artificial Sequence: Synthetic oligonucleotide
  Target: LAMA2; (+) strand; PAM type: YTN; PAM sequence: CTA
agctgtgtcatgttgttcac

SEQ ID NO: 387244 - DNA, 20 bp, Artificial Sequence
  Description of Artificial Sequence: Synthetic oligonucleotide
  Target: LAMA2; (+) strand; PAM type: YTN; PAM sequence: CTG
tgtcatgttgttcacatcca

SEQ ID NO: 387245 - DNA, 20 bp, Artificial Sequence
  Description of Artificial Sequence: Synthetic oligonucleotide
  Target: LAMA2; (+) strand; PAM type: YTN; PAM sequence: TTG
ttcacatccaggtgttaggc

SEQ ID NO: 387246 - DNA, 20 bp, Artificial Sequence
  Description of Artificial Sequence: Synthetic oligonucleotide
  Target: LAMA2; (+) strand; PAM type: YTN; PAM sequence: TTC
acatccaggtgttaggcaat

SEQ ID NO: 387247 - DNA, 20 bp, Artificial Sequence
  Description of Artificial Sequence: Synthetic oligonucleotide
  Target: LAMA2; (+) strand; PAM type: YTN; PAM sequence: TTA
ggcaatctataaaacatctt

SEQ ID NO: 387248 - DNA, 20 bp, Artificial Sequence
  Description of Artificial Sequence: Synthetic oligonucleotide
  Target: LAMA2; (+) strand; PAM type: YTN; PAM sequence: CTA
taaaacatcttctgttcacc

SEQ ID NO: 387249 - DNA, 20 bp, Artificial Sequence
  Description of Artificial Sequence: Synthetic oligonucleotide
  Target: LAMA2; (+) strand; PAM type: YTN; PAM sequence: CTT
ctgttcaccttgtttgcacc

SEQ ID NO: 387250 - DNA, 20 bp, Artificial Sequence
  Description of Artificial Sequence: Synthetic oligonucleotide
  Target: LAMA2; (+) strand; PAM type: YTN; PAM sequence: TTC
tgttcaccttgtttgcacct

SEQ ID NO: 387251 - DNA, 20 bp, Artificial Sequence
  Description of Artificial Sequence: Synthetic oligonucleotide
  Target: LAMA2; (+) strand; PAM type: YTN; PAM sequence: CTG
ttcaccttgtttgcaccttc

SEQ ID NO: 387252 - DNA, 20 bp, Artificial Sequence
  Description of Artificial Sequence: Synthetic oligonucleotide
  Target: LAMA2; (+) strand; PAM type: YTN; PAM sequence: TTC
accttgtttgcaccttctac

SEQ ID NO: 387253 - DNA, 20 bp, Artificial Sequence
  Description of Artificial Sequence: Synthetic oligonucleotide
  Target: LAMA2; (+) strand; PAM type: YTN; PAM sequence: CTT
gtttgcaccttctactcatt

SEQ ID NO: 387254 - DNA, 20 bp, Artificial Sequence
  Description of Artificial Sequence: Synthetic oligonucleotide
  Target: LAMA2; (+) strand; PAM type: YTN; PAM sequence: TTG
tttgcaccttctactcattt

SEQ ID NO: 387255 - DNA, 20 bp, Artificial Sequence
  Description of Artificial Sequence: Synthetic oligonucleotide
  Target: LAMA2; (+) strand; PAM type: YTN; PAM sequence: TTT
gcaccttctactcatttgtt

SEQ ID NO: 387256 - DNA, 20 bp, Artificial Sequence
  Description of Artificial Sequence: Synthetic oligonucleotide
  Target: LAMA2; (+) strand; PAM type: YTN; PAM sequence: TTG
caccttctactcatttgttt

SEQ ID NO: 387257 - DNA, 20 bp, Artificial Sequence
  Description of Artificial Sequence: Synthetic oligonucleotide
  Target: LAMA2; (+) strand; PAM type: YTN; PAM sequence: CTT
ctactcatttgttttgttag

SEQ ID NO: 387258 - DNA, 20 bp, Artificial Sequence
  Description of Artificial Sequence: Synthetic oligonucleotide
  Target: LAMA2; (+) strand; PAM type: YTN; PAM sequence: TTC
tactcatttgttttgttagt

SEQ ID NO: 387259 - DNA, 20 bp, Artificial Sequence
  Description of Artificial Sequence: Synthetic oligonucleotide
  Target: LAMA2; (+) strand; PAM type: YTN; PAM sequence: CTA
ctcatttgttttgttagtaa

SEQ ID NO: 387260 - DNA, 20 bp, Artificial Sequence
  Description of Artificial Sequence: Synthetic oligonucleotide
  Target: LAMA2; (+) strand; PAM type: YTN; PAM sequence: CTC
atttgttttgttagtaaaag

SEQ ID NO: 387261 - DNA, 20 bp, Artificial Sequence
  Description of Artificial Sequence: Synthetic oligonucleotide
  Target: LAMA2; (+) strand; PAM type: YTN; PAM sequence: TTT
gttttgttagtaaaagatat

SEQ ID NO: 387262 - DNA, 20 bp, Artificial Sequence
  Description of Artificial Sequence: Synthetic oligonucleotide
  Target: LAMA2; (+) strand; PAM type: YTN; PAM sequence: TTG
ttttgttagtaaaagatatt

SEQ ID NO: 387263 - DNA, 20 bp, Artificial Sequence
  Description of Artificial Sequence: Synthetic oligonucleotide
  Target: LAMA2; (+) strand; PAM type: YTN; PAM sequence: TTT
tgttagtaaaagatatttga

SEQ ID NO: 387264 - DNA, 20 bp, Artificial Sequence
  Description of Artificial Sequence: Synthetic oligonucleotide
  Target: LAMA2; (+) strand; PAM type: YTN; PAM sequence: TTT
gttagtaaaagatatttgag

SEQ ID NO: 387265 - DNA, 20 bp, Artificial Sequence
  Description of Artificial Sequence: Synthetic oligonucleotide
  Target: LAMA2; (+) strand; PAM type: YTN; PAM sequence: TTG
ttagtaaaagatatttgagt

SEQ ID NO: 387266 - DNA, 20 bp, Artificial Sequence
  Description of Artificial Sequence: Synthetic oligonucleotide
  Target: LAMA2; (+) strand; PAM type: YTN; PAM sequence: TTA
gtaaaagatatttgagtttc

SEQ ID NO: 387267 - DNA, 20 bp, Artificial Sequence
  Description of Artificial Sequence: Synthetic oligonucleotide
  Target: LAMA2; (+) strand; PAM type: YTN; PAM sequence: TTT
gagtttcttgttgtcaacct

SEQ ID NO: 387268 - DNA, 20 bp, Artificial Sequence
  Description of Artificial Sequence: Synthetic oligonucleotide
  Target: LAMA2; (+) strand; PAM type: YTN; PAM sequence: TTG
agtttcttgttgtcaacctt

SEQ ID NO: 387269 - DNA, 20 bp, Artificial Sequence
  Description of Artificial Sequence: Synthetic oligonucleotide
  Target: LAMA2; (+) strand; PAM type: YTN; PAM sequence: TTT
cttgttgtcaaccttagcat

SEQ ID NO: 387270 - DNA, 20 bp, Artificial Sequence
  Description of Artificial Sequence: Synthetic oligonucleotide
  Target: LAMA2; (+) strand; PAM type: YTN; PAM sequence: TTC
ttgttgtcaaccttagcatt

SEQ ID NO: 387271 - DNA, 20 bp, Artificial Sequence
  Description of Artificial Sequence: Synthetic oligonucleotide
  Target: LAMA2; (+) strand; PAM type: YTN; PAM sequence: CTT
gttgtcaaccttagcattgg

SEQ ID NO: 387272 - DNA, 20 bp, Artificial Sequence
  Description of Artificial Sequence: Synthetic oligonucleotide
  Target: LAMA2; (+) strand; PAM type: YTN; PAM sequence: TTG
ttgtcaaccttagcattggt

SEQ ID NO: 387273 - DNA, 20 bp, Artificial Sequence
  Description of Artificial Sequence: Synthetic oligonucleotide
  Target: LAMA2; (+) strand; PAM type: YTN; PAM sequence: TTG
tcaaccttagcattggtcca

SEQ ID NO: 387274 - DNA, 20 bp, Artificial Sequence
  Description of Artificial Sequence: Synthetic oligonucleotide
  Target: LAMA2; (+) strand; PAM type: YTN; PAM sequence: CTT
agcattggtccaggctaaca

SEQ ID NO: 387275 - DNA, 20 bp, Artificial Sequence
  Description of Artificial Sequence: Synthetic oligonucleotide
  Target: LAMA2; (+) strand; PAM type: YTN; PAM sequence: TTA
gcattggtccaggctaacaa

SEQ ID NO: 387276 - DNA, 20 bp, Artificial Sequence
  Description of Artificial Sequence: Synthetic oligonucleotide
  Target: LAMA2; (+) strand; PAM type: YTN; PAM sequence: TTG
gtccaggctaacaatgtgtg

SEQ ID NO: 387277 - DNA, 20 bp, Artificial Sequence
  Description of Artificial Sequence: Synthetic oligonucleotide
  Target: LAMA2; (+) strand; PAM type: YTN; PAM sequence: CTA
acaatgtgtggaatggcaac

SEQ ID NO: 387278 - DNA, 20 bp, Artificial Sequence
  Description of Artificial Sequence: Synthetic oligonucleotide
  Target: LAMA2; (+) strand; PAM type: YTN; PAM sequence: CTA
tcaccgtgattctagatgat

SEQ ID NO: 387279 - DNA, 20 bp, Artificial Sequence
  Description of Artificial Sequence: Synthetic oligonucleotide
  Target: LAMA2; (+) strand; PAM type: YTN; PAM sequence: TTC
tagatgattttcctagttgt

SEQ ID NO: 387280 - DNA, 20 bp, Artificial Sequence
  Description of Artificial Sequence: Synthetic oligonucleotide
  Target: LAMA2; (+) strand; PAM type: YTN; PAM sequence: CTA
gatgattttcctagttgtta

SEQ ID NO: 387281 - DNA, 20 bp, Artificial Sequence
  Description of Artificial Sequence: Synthetic oligonucleotide
  Target: LAMA2; (+) strand; PAM type: YTN; PAM sequence: TTT
tcctagttgttagagatcag

SEQ ID NO: 387282 - DNA, 20 bp, Artificial Sequence
  Description of Artificial Sequence: Synthetic oligonucleotide
  Target: LAMA2; (+) strand; PAM type: YTN; PAM sequence: TTT
cctagttgttagagatcagt

SEQ ID NO: 387283 - DNA, 20 bp, Artificial Sequence
  Description of Artificial Sequence: Synthetic oligonucleotide
  Target: LAMA2; (+) strand; PAM type: YTN; PAM sequence: TTC
ctagttgttagagatcagtc

SEQ ID NO: 387284 - DNA, 20 bp, Artificial Sequence
  Description of Artificial Sequence: Synthetic oligonucleotide
  Target: LAMA2; (+) strand; PAM type: YTN; PAM sequence: CTA
gttgttagagatcagtctca

SEQ ID NO: 387285 - DNA, 20 bp, Artificial Sequence
  Description of Artificial Sequence: Synthetic oligonucleotide
  Target: LAMA2; (+) strand; PAM type: YTN; PAM sequence: TTG
ttagagatcagtctcagtgg

SEQ ID NO: 387286 - DNA, 20 bp, Artificial Sequence
  Description of Artificial Sequence: Synthetic oligonucleotide
  Target: LAMA2; (+) strand; PAM type: YTN; PAM sequence: TTA
gagatcagtctcagtggttt

SEQ ID NO: 387287 - DNA, 20 bp, Artificial Sequence
  Description of Artificial Sequence: Synthetic oligonucleotide
  Target: LAMA2; (+) strand; PAM type: YTN; PAM sequence: CTC
agtggtttgtatattattga

SEQ ID NO: 387288 - DNA, 20 bp, Artificial Sequence
  Description of Artificial Sequence: Synthetic oligonucleotide
  Target: LAMA2; (+) strand; PAM type: YTN; PAM sequence: TTT
gtatattattgaggaagctg

SEQ ID NO: 387289 - DNA, 20 bp, Artificial Sequence
  Description of Artificial Sequence: Synthetic oligonucleotide
  Target: LAMA2; (+) strand; PAM type: YTN; PAM sequence: TTG
tatattattgaggaagctgt

SEQ ID NO: 387290 - DNA, 20 bp, Artificial Sequence
  Description of Artificial Sequence: Synthetic oligonucleotide
  Target: LAMA2; (+) strand; PAM type: YTN; PAM sequence: TTA
ttgaggaagctgttctgcta

SEQ ID NO: 387291 - DNA, 20 bp, Artificial Sequence
  Description of Artificial Sequence: Synthetic oligonucleotide
  Target: LAMA2; (+) strand; PAM type: YTN; PAM sequence: TTG
aggaagctgttctgctagct

SEQ ID NO: 387292 - DNA, 20 bp, Artificial Sequence
  Description of Artificial Sequence: Synthetic oligonucleotide
  Target: LAMA2; (+) strand; PAM type: YTN; PAM sequence: CTG
ttctgctagctgattaagga

SEQ ID NO: 387293 - DNA, 20 bp, Artificial Sequence
  Description of Artificial Sequence: Synthetic oligonucleotide
  Target: LAMA2; (+) strand; PAM type: YTN; PAM sequence: TTC
tgctagctgattaaggagtt

SEQ ID NO: 387294 - DNA, 20 bp, Artificial Sequence
  Description of Artificial Sequence: Synthetic oligonucleotide
  Target: LAMA2; (+) strand; PAM type: YTN; PAM sequence: CTG
ctagctgattaaggagttgc

SEQ ID NO: 387295 - DNA, 20 bp, Artificial Sequence
  Description of Artificial Sequence: Synthetic oligonucleotide
  Target: LAMA2; (+) strand; PAM type: YTN; PAM sequence: CTA
gctgattaaggagttgcaca

SEQ ID NO: 387296 - DNA, 20 bp, Artificial Sequence
  Description of Artificial Sequence: Synthetic oligonucleotide
  Target: LAMA2; (+) strand; PAM type: YTN; PAM sequence: CTG
attaaggagttgcacagttg

SEQ ID NO: 387297 - DNA, 20 bp, Artificial Sequence
  Description of Artificial Sequence: Synthetic oligonucleotide
  Target: LAMA2; (+) strand; PAM type: YTN; PAM sequence: TTA
aggagttgcacagttgaatt

SEQ ID NO: 387298 - DNA, 20 bp, Artificial Sequence
  Description of Artificial Sequence: Synthetic oligonucleotide
  Target: LAMA2; (+) strand; PAM type: YTN; PAM sequence: TTG
cacagttgaattatcgtata

SEQ ID NO: 387299 - DNA, 20 bp, Artificial Sequence
  Description of Artificial Sequence: Synthetic oligonucleotide
  Target: LAMA2; (+) strand; PAM type: YTN; PAM sequence: TTG
aattatcgtatagagacagc

SEQ ID NO: 387300 - DNA, 20 bp, Artificial Sequence
  Description of Artificial Sequence: Synthetic oligonucleotide
  Target: LAMA2; (+) strand; PAM type: YTN; PAM sequence: TTA
tcgtatagagacagctgatc

SEQ ID NO: 387301 - DNA, 20 bp, Artificial Sequence
  Description of Artificial Sequence: Synthetic oligonucleotide
  Target: LAMA2; (+) strand; PAM type: YTN; PAM sequence: CTG
atcactgttgcctttgtttt

SEQ ID NO: 387302 - DNA, 20 bp, Artificial Sequence
  Description of Artificial Sequence: Synthetic oligonucleotide
  Target: LAMA2; (+) strand; PAM type: YTN; PAM sequence: CTG
ttgcctttgttttcagcaag

SEQ ID NO: 387303 - DNA, 20 bp, Artificial Sequence
  Description of Artificial Sequence: Synthetic oligonucleotide
  Target: LAMA2; (+) strand; PAM type: YTN; PAM sequence: TTG
cctttgttttcagcaagttt

SEQ ID NO: 387304 - DNA, 20 bp, Artificial Sequence
  Description of Artificial Sequence: Synthetic oligonucleotide
  Target: LAMA2; (+) strand; PAM type: YTN; PAM sequence: CTT
tgttttcagcaagttttatt

SEQ ID NO: 387305 - DNA, 20 bp, Artificial Sequence
  Description of Artificial Sequence: Synthetic oligonucleotide
  Target: LAMA2; (+) strand; PAM type: YTN; PAM sequence: TTT
gttttcagcaagttttattt

SEQ ID NO: 387306 - DNA, 20 bp, Artificial Sequence
  Description of Artificial Sequence: Synthetic oligonucleotide
  Target: LAMA2; (+) strand; PAM type: YTN; PAM sequence: TTG
ttttcagcaagttttatttg

SEQ ID NO: 387307 - DNA, 20 bp, Artificial Sequence
  Description of Artificial Sequence: Synthetic oligonucleotide
  Target: LAMA2; (+) strand; PAM type: YTN; PAM sequence: TTT
tcagcaagttttatttgaag

SEQ ID NO: 387308 - DNA, 20 bp, Artificial Sequence
  Description of Artificial Sequence: Synthetic oligonucleotide
  Target: LAMA2; (+) strand; PAM type: YTN; PAM sequence: TTT
cagcaagttttatttgaaga

SEQ ID NO: 387309 - DNA, 20 bp, Artificial Sequence
  Description of Artificial Sequence: Synthetic oligonucleotide
  Target: LAMA2; (+) strand; PAM type: YTN; PAM sequence: TTC
agcaagttttatttgaagag

SEQ ID NO: 387310 - DNA, 20 bp, Artificial Sequence
  Description of Artificial Sequence: Synthetic oligonucleotide
  Target: LAMA2; (+) strand; PAM type: YTN; PAM sequence: TTT
tatttgaagagtaaactaaa

SEQ ID NO: 387311 - DNA, 20 bp, Artificial Sequence
  Description of Artificial Sequence: Synthetic oligonucleotide
  Target: LAMA2; (+) strand; PAM type: YTN; PAM sequence: TTT
atttgaagagtaaactaaac

SEQ ID NO: 387312 - DNA, 20 bp, Artificial Sequence
  Description of Artificial Sequence: Synthetic oligonucleotide
  Target: LAMA2; (+) strand; PAM type: YTN; PAM sequence: TTA
tttgaagagtaaactaaact

SEQ ID NO: 387313 - DNA, 20 bp, Artificial Sequence
  Description of Artificial Sequence: Synthetic oligonucleotide
  Target: LAMA2; (+) strand; PAM type: YTN; PAM sequence: TTT
gaagagtaaactaaactcta

SEQ ID NO: 387314 - DNA, 20 bp, Artificial Sequence
  Description of Artificial Sequence: Synthetic oligonucleotide
  Target: LAMA2; (+) strand; PAM type: YTN; PAM sequence: TTG
aagagtaaactaaactctac

SEQ ID NO: 387315 - DNA, 20 bp, Artificial Sequence
  Description of Artificial Sequence: Synthetic oligonucleotide
  Target: LAMA2; (+) strand; PAM type: YTN; PAM sequence: CTA
aactctactttgattgcaat

SEQ ID NO: 387316 - DNA, 20 bp, Artificial Sequence
  Description of Artificial Sequence: Synthetic oligonucleotide
  Target: LAMA2; (+) strand; PAM type: YTN; PAM sequence: CTC
tactttgattgcaatttcta

SEQ ID NO: 387317 - DNA, 20 bp, Artificial Sequence
  Description of Artificial Sequence: Synthetic oligonucleotide
  Target: LAMA2; (+) strand; PAM type: YTN; PAM sequence: CTA
ctttgattgcaatttctact

SEQ ID NO: 387318 - DNA, 20 bp, Artificial Sequence
  Description of Artificial Sequence: Synthetic oligonucleotide
  Target: LAMA2; (+) strand; PAM type: YTN; PAM sequence: CTT
tgattgcaatttctactctg

SEQ ID NO: 387319 - DNA, 20 bp, Artificial Sequence
  Description of Artificial Sequence: Synthetic oligonucleotide
  Target: LAMA2; (+) strand; PAM type: YTN; PAM sequence: TTT
gattgcaatttctactctgg

SEQ ID NO: 387320 - DNA, 20 bp, Artificial Sequence
  Description of Artificial Sequence: Synthetic oligonucleotide
  Target: LAMA2; (+) strand; PAM type: YTN; PAM sequence: TTG
attgcaatttctactctggc

SEQ ID NO: 387321 - DNA, 20 bp, Artificial Sequence
  Description of Artificial Sequence: Synthetic oligonucleotide
  Target: LAMA2; (+) strand; PAM type: YTN; PAM sequence: TTG
caatttctactctggcaagg

SEQ ID NO: 387322 - DNA, 20 bp, Artificial Sequence
  Description of Artificial Sequence: Synthetic oligonucleotide
  Target: LAMA2; (+) strand; PAM type: YTN; PAM sequence: TTT
ctactctggcaaggctcagg

SEQ ID NO: 387323 - DNA, 20 bp, Artificial Sequence
  Description of Artificial Sequence: Synthetic oligonucleotide
  Target: LAMA2; (+) strand; PAM type: YTN; PAM sequence: TTC
tactctggcaaggctcagga

SEQ ID NO: 387324 - DNA, 20 bp, Artificial Sequence
  Description of Artificial Sequence: Synthetic oligonucleotide
  Target: LAMA2; (+) strand; PAM type: YTN; PAM sequence: CTA
ctctggcaaggctcaggagg

SEQ ID NO: 387325 - DNA, 20 bp, Artificial Sequence
  Description of Artificial Sequence: Synthetic oligonucleotide
  Target: LAMA2; (+) strand; PAM type: YTN; PAM sequence: CTC
tggcaaggctcaggaggttt

SEQ ID NO: 387326 - DNA, 20 bp, Artificial Sequence
  Description of Artificial Sequence: Synthetic oligonucleotide
  Target: LAMA2; (+) strand; PAM type: YTN; PAM sequence: CTG
gcaaggctcaggaggtttta

SEQ ID NO: 387327 - DNA, 20 bp, Artificial Sequence
  Description of Artificial Sequence: Synthetic oligonucleotide
  Target: LAMA2; (+) strand; PAM type: YTN; PAM sequence: CTC
aggaggttttattgaccttg

SEQ ID NO: 387328 - DNA, 20 bp, Artificial Sequence
  Description of Artificial Sequence: Synthetic oligonucleotide
  Target: LAMA2; (+) strand; PAM type: YTN; PAM sequence: TTT
tattgaccttgaaagacaaa

SEQ ID NO: 387329 - DNA, 20 bp, Artificial Sequence
  Description of Artificial Sequence: Synthetic oligonucleotide
  Target: LAMA2; (+) strand; PAM type: YTN; PAM sequence: TTT
attgaccttgaaagacaaac

SEQ ID NO: 387330 - DNA, 20 bp, Artificial Sequence
  Description of Artificial Sequence: Synthetic oligonucleotide
  Target: LAMA2; (+) strand; PAM type: YTN; PAM sequence: TTA
ttgaccttgaaagacaaact

SEQ ID NO: 387331 - DNA, 20 bp, Artificial Sequence
  Description of Artificial Sequence: Synthetic oligonucleotide
  Target: LAMA2; (+) strand; PAM type: YTN; PAM sequence: TTG
accttgaaagacaaactaaa

SEQ ID NO: 387332 - DNA, 20 bp, Artificial Sequence
  Description of Artificial Sequence: Synthetic oligonucleotide
  Target: LAMA2; (+) strand; PAM type: YTN; PAM sequence: CTT
gaaagacaaactaaaatcac

SEQ ID NO: 387333 - DNA, 20 bp, Artificial Sequence
  Description of Artificial Sequence: Synthetic oligonucleotide
  Target: LAMA2; (+) strand; PAM type: YTN; PAM sequence: TTG
aaagacaaactaaaatcaca

SEQ ID NO: 387334 - DNA, 20 bp, Artificial Sequence
  Description of Artificial Sequence: Synthetic oligonucleotide
  Target: LAMA2; (+) strand; PAM type: YTN; PAM sequence: CTA
aaatcacataatcttaaagt

SEQ ID NO: 387335 - DNA, 20 bp, Artificial Sequence
  Description of Artificial Sequence: Synthetic oligonucleotide
  Target: LAMA2; (+) strand; PAM type: YTN; PAM sequence: CTT
aaagttggaagaaataagta

SEQ ID NO: 387336 - DNA, 20 bp, Artificial Sequence
  Description of Artificial Sequence: Synthetic oligonucleotide
  Target: LAMA2; (+) strand; PAM type: YTN; PAM sequence: TTA
aagttggaagaaataagtaa

SEQ ID NO: 387337 - DNA, 20 bp, Artificial Sequence
  Description of Artificial Sequence: Synthetic oligonucleotide
  Target: LAMA2; (+) strand; PAM type: YTN; PAM sequence: TTG
gaagaaataagtaaactagc

SEQ ID NO: 387338 - DNA, 20 bp, Artificial Sequence
  Description of Artificial Sequence: Synthetic oligonucleotide
  Target: LAMA2; (+) strand; PAM type: YTN; PAM sequence: CTA
gcctagccttctctttttct

SEQ ID NO: 387339 - DNA, 20 bp, Artificial Sequence
  Description of Artificial Sequence: Synthetic oligonucleotide
  Target: LAMA2; (+) strand; PAM type: YTN; PAM sequence: CTA
gccttctctttttctgtgac

SEQ ID NO: 387340 - DNA, 20 bp, Artificial Sequence
  Description of Artificial Sequence: Synthetic oligonucleotide
  Target: LAMA2; (+) strand; PAM type: YTN; PAM sequence: CTT
ctctttttctgtgacatcca

SEQ ID NO: 387341 - DNA, 20 bp, Artificial Sequence
  Description of Artificial Sequence: Synthetic oligonucleotide
  Target: LAMA2; (+) strand; PAM type: YTN; PAM sequence: TTC
tctttttctgtgacatccac

SEQ ID NO: 387342 - DNA, 20 bp, Artificial Sequence
  Description of Artificial Sequence: Synthetic oligonucleotide
  Target: LAMA2; (+) strand; PAM type: YTN; PAM sequence: CTC
tttttctgtgacatccacaa

SEQ ID NO: 387343 - DNA, 20 bp, Artificial Sequence
  Description of Artificial Sequence: Synthetic oligonucleotide
  Target: LAMA2; (+) strand; PAM type: YTN; PAM sequence: CTT
tttctgtgacatccacaaaa

SEQ ID NO: 387344 - DNA, 20 bp, Artificial Sequence
  Description of Artificial Sequence: Synthetic oligonucleotide
  Target: LAMA2; (+) strand; PAM type: YTN; PAM sequence: TTT
ttctgtgacatccacaaaac

SEQ ID NO: 387345 - DNA, 20 bp, Artificial Sequence
  Description of Artificial Sequence: Synthetic oligonucleotide
  Target: LAMA2; (+) strand; PAM type: YTN; PAM sequence: TTT
tctgtgacatccacaaaaca

SEQ ID NO: 387346 - DNA, 20 bp, Artificial Sequence
  Description of Artificial Sequence: Synthetic oligonucleotide
  Target: LAMA2; (+) strand; PAM type: YTN; PAM sequence: TTT
ctgtgacatccacaaaacag

SEQ ID NO: 387347 - DNA, 20 bp, Artificial Sequence
  Description of Artificial Sequence: Synthetic oligonucleotide
  Target: LAMA2; (+) strand; PAM type: YTN; PAM sequence: TTC
tgtgacatccacaaaacaga

SEQ ID NO: 387348 - DNA, 20 bp, Artificial Sequence
  Description of Artificial Sequence: Synthetic oligonucleotide
  Target: LAMA2; (+) strand; PAM type: YTN; PAM sequence: CTG
tgacatccacaaaacagaca

SEQ ID NO: 387349 - DNA, 20 bp, Artificial Sequence
  Description of Artificial Sequence: Synthetic oligonucleotide
  Target: LAMA2; (+) strand; PAM type: YTN; PAM sequence: CTA
atgcaaggaagcatggtgtt

SEQ ID NO: 387350 - DNA, 20 bp, Artificial Sequence
  Description of Artificial Sequence: Synthetic oligonucleotide
  Target: LAMA2; (+) strand; PAM type: YTN; PAM sequence: TTA
tgaagtggctacagaaggtt

SEQ ID NO: 387351 - DNA, 20 bp, Artificial Sequence
  Description of Artificial Sequence: Synthetic oligonucleotide
  Target: LAMA2; (+) strand; PAM type: YTN; PAM sequence: CTA
cagaaggtttgaaacctagc

SEQ ID NO: 387352 - DNA, 20 bp, Artificial Sequence
  Description of Artificial Sequence: Synthetic oligonucleotide
  Target: LAMA2; (+) strand; PAM type: YTN; PAM sequence: TTT
gaaacctagcttgcaatttg

SEQ ID NO: 387353 - DNA, 20 bp, Artificial Sequence
  Description of Artificial Sequence: Synthetic oligonucleotide
  Target: LAMA2; (+) strand; PAM type: YTN; PAM sequence: TTG
aaacctagcttgcaatttgt

SEQ ID NO: 387354 - DNA, 20 bp, Artificial Sequence
  Description of Artificial Sequence: Synthetic oligonucleotide
  Target: LAMA2; (+) strand; PAM type: YTN; PAM sequence: CTA
gcttgcaatttgtgtgacat

SEQ ID NO: 387355 - DNA, 20 bp, Artificial Sequence
  Description of Artificial Sequence: Synthetic oligonucleotide
  Target: LAMA2; (+) strand; PAM type: YTN; PAM sequence: CTT
gcaatttgtgtgacattatt

SEQ ID NO: 387356 - DNA, 20 bp, Artificial Sequence
  Description of Artificial Sequence: Synthetic oligonucleotide
  Target: LAMA2; (+) strand; PAM type: YTN; PAM sequence: TTG
caatttgtgtgacattattt

SEQ ID NO: 387357 - DNA, 20 bp, Artificial Sequence
  Description of Artificial Sequence: Synthetic oligonucleotide
  Target: LAMA2; (+) strand; PAM type: YTN; PAM sequence: TTT
gtgtgacattatttaatttc

SEQ ID NO: 387358 - DNA, 20 bp, Artificial Sequence
  Description of Artificial Sequence: Synthetic oligonucleotide
  Target: LAMA2; (+) strand; PAM type: YTN; PAM sequence: TTG
tgtgacattatttaatttcc

SEQ ID NO: 387359 - DNA, 20 bp, Artificial Sequence
  Description of Artificial Sequence: Synthetic oligonucleotide
  Target: LAMA2; (+) strand; PAM type: YTN; PAM sequence: TTA
tttaatttcctaaacctcat

SEQ ID NO: 387360 - DNA, 20 bp, Artificial Sequence
  Description of Artificial Sequence: Synthetic oligonucleotide
  Target: LAMA2; (+) strand; PAM type: YTN; PAM sequence: TTT
aatttcctaaacctcatttt

SEQ ID NO: 387361 - DNA, 20 bp, Artificial Sequence
  Description of Artificial Sequence: Synthetic oligonucleotide
  Target: LAMA2; (+) strand; PAM type: YTN; PAM sequence: TTA
atttcctaaacctcattttc

SEQ ID NO: 387362 - DNA, 20 bp, Artificial Sequence
  Description of Artificial Sequence: Synthetic oligonucleotide
  Target: LAMA2; (+) strand; PAM type: YTN; PAM sequence: TTT
cctaaacctcattttcatcc

SEQ ID NO: 387363 - DNA, 20 bp, Artificial Sequence
  Description of Artificial Sequence: Synthetic oligonucleotide
  Target: LAMA2; (+) strand; PAM type: YTN; PAM sequence: TTC
ctaaacctcattttcatcct

SEQ ID NO: 387364 - DNA, 20 bp, Artificial Sequence
  Description of Artificial Sequence: Synthetic oligonucleotide
  Target: LAMA2; (+) strand; PAM type: YTN; PAM sequence: CTA
aacctcattttcatcctctg

SEQ ID NO: 387365 - DNA, 20 bp, Artificial Sequence
  Description of Artificial Sequence: Synthetic oligonucleotide
  Target: LAMA2; (+) strand; PAM type: YTN; PAM sequence: CTC
attttcatcctctgtaaaat

SEQ ID NO: 387366 - DNA, 20 bp, Artificial Sequence
  Description of Artificial Sequence: Synthetic oligonucleotide
  Target: LAMA2; (+) strand; PAM type: YTN; PAM sequence: TTT
tcatcctctgtaaaatggat

SEQ ID NO: 387367 - DNA, 20 bp, Artificial Sequence
  Description of Artificial Sequence: Synthetic oligonucleotide
  Target: LAMA2; (+) strand; PAM type: YTN; PAM sequence: TTT
catcctctgtaaaatggatg

SEQ ID NO: 387368 - DNA, 20 bp, Artificial Sequence
  Description of Artificial Sequence: Synthetic oligonucleotide
  Target: LAMA2; (+) strand; PAM type: YTN; PAM sequence: TTC
atcctctgtaaaatggatgt

SEQ ID NO: 387369 - DNA, 20 bp, Artificial Sequence
  Description of Artificial Sequence: Synthetic oligonucleotide
  Target: LAMA2; (+) strand; PAM type: YTN; PAM sequence: CTC
tgtaaaatggatgtaaaatg

SEQ ID NO: 387370 - DNA, 20 bp, Artificial Sequence
  Description of Artificial Sequence: Synthetic oligonucleotide
  Target: LAMA2; (+) strand; PAM type: YTN; PAM sequence: CTG
taaaatggatgtaaaatgct

SEQ ID NO: 387371 - DNA, 20 bp, Artificial Sequence
  Description of Artificial Sequence: Synthetic oligonucleotide
  Target: LAMA2; (+) strand; PAM type: YTN; PAM sequence: CTA
catacatgtatgtgaagtat

SEQ ID NO: 387372 - DNA, 20 bp, Artificial Sequence
  Description of Artificial Sequence: Synthetic oligonucleotide
  Target: LAMA2; (+) strand; PAM type: YTN; PAM sequence: CTA
agcataataggtgctcaata

SEQ ID NO: 387373 - DNA, 20 bp, Artificial Sequence
  Description of Artificial Sequence: Synthetic oligonucleotide
  Target: LAMA2; (+) strand; PAM type: YTN; PAM sequence: CTC
aataaattctaggcattgtt

SEQ ID NO: 387374 - DNA, 20 bp, Artificial Sequence
  Description of Artificial Sequence: Synthetic oligonucleotide
  Target: LAMA2; (+) strand; PAM type: YTN; PAM sequence: TTC
taggcattgttatcatcatt

SEQ ID NO: 387375 - DNA, 20 bp, Artificial Sequence
  Description of Artificial Sequence: Synthetic oligonucleotide
  Target: LAMA2; (+) strand; PAM type: YTN; PAM sequence: CTA
ggcattgttatcatcattgt

SEQ ID NO: 387376 - DNA, 20 bp, Artificial Sequence
  Description of Artificial Sequence: Synthetic oligonucleotide
  Target: LAMA2; (+) strand; PAM type: YTN; PAM sequence: TTG
ttatcatcattgttattatg

SEQ ID NO: 387377 - DNA, 20 bp, Artificial Sequence
  Description of Artificial Sequence: Synthetic oligonucleotide
  Target: LAMA2; (+) strand; PAM type: YTN; PAM sequence: TTA
tcatcattgttattatgtga

SEQ ID NO: 387378 - DNA, 20 bp, Artificial Sequence
  Description of Artificial Sequence: Synthetic oligonucleotide
  Target: LAMA2; (+) strand; PAM type: YTN; PAM sequence: TTG
ttattatgtgaccatttttt

SEQ ID NO: 387379 - DNA, 20 bp, Artificial Sequence
  Description of Artificial Sequence: Synthetic oligonucleotide
  Target: LAMA2; (+) strand; PAM type: YTN; PAM sequence: TTA
ttatgtgaccatttttttcc

SEQ ID NO: 387380 - DNA, 20 bp, Artificial Sequence
  Description of Artificial Sequence: Synthetic oligonucleotide
  Target: LAMA2; (+) strand; PAM type: YTN; PAM sequence: TTA
tgtgaccatttttttcccca

SEQ ID NO: 387381 - DNA, 20 bp, Artificial Sequence
  Description of Artificial Sequence: Synthetic oligonucleotide
  Target: LAMA2; (+) strand; PAM type: YTN; PAM sequence: TTT
ttttccccaaagacctgatg

SEQ ID NO: 387382 - DNA, 20 bp, Artificial Sequence
  Description of Artificial Sequence: Synthetic oligonucleotide
  Target: LAMA2; (+) strand; PAM type: YTN; PAM sequence: TTT
tttccccaaagacctgatgt

SEQ ID NO: 387383 - DNA, 20 bp, Artificial Sequence
  Description of Artificial Sequence: Synthetic oligonucleotide
  Target: LAMA2; (+) strand; PAM type: YTN; PAM sequence: TTT
ttccccaaagacctgatgtt

SEQ ID NO: 387384 - DNA, 20 bp, Artificial Sequence
  Description of Artificial Sequence: Synthetic oligonucleotide
  Target: LAMA2; (+) strand; PAM type: YTN; PAM sequence: TTT
tccccaaagacctgatgttt

SEQ ID NO: 387385 - DNA, 20 bp, Artificial Sequence
  Description of Artificial Sequence: Synthetic oligonucleotide
  Target: LAMA2; (+) strand; PAM type: YTN; PAM sequence: TTT
ccccaaagacctgatgtttt

SEQ ID NO: 387386 - DNA, 20 bp, Artificial Sequence
  Description of Artificial Sequence: Synthetic oligonucleotide
  Target: LAMA2; (+) strand; PAM type: YTN; PAM sequence: TTC
cccaaagacctgatgttttg

SEQ ID NO: 387387 - DNA, 20 bp, Artificial Sequence
  Description of Artificial Sequence: Synthetic oligonucleotide
  Target: LAMA2; (+) strand; PAM type: YTN; PAM sequence: CTG
atgttttgtgcaacgcatca

SEQ ID NO: 387388 - DNA, 20 bp, Artificial Sequence
  Description of Artificial Sequence: Synthetic oligonucleotide
  Target: LAMA2; (+) strand; PAM type: YTN; PAM sequence: TTT
tgtgcaacgcatcagtttct

SEQ ID NO: 387389 - DNA, 20 bp, Artificial Sequence
  Description of Artificial Sequence: Synthetic oligonucleotide
  Target: LAMA2; (+) strand; PAM type: YTN; PAM sequence: TTT
gtgcaacgcatcagtttctg

SEQ ID NO: 387390 - DNA, 20 bp, Artificial Sequence
  Description of Artificial Sequence: Synthetic oligonucleotide
  Target: LAMA2; (+) strand; PAM type: YTN; PAM sequence: TTG
tgcaacgcatcagtttctga

SEQ ID NO: 387391 - DNA, 20 bp, Artificial Sequence
  Description of Artificial Sequence: Synthetic oligonucleotide
  Target: LAMA2; (+) strand; PAM type: YTN; PAM sequence: TTT
ctgatgaaatattttcttta

SEQ ID NO: 387392 - DNA, 20 bp, Artificial Sequence
  Description of Artificial Sequence: Synthetic oligonucleotide
  Target: LAMA2; (+) strand; PAM type: YTN; PAM sequence: TTC
tgatgaaatattttctttag

SEQ ID NO: 387393 - DNA, 20 bp, Artificial Sequence
  Description of Artificial Sequence: Synthetic oligonucleotide
  Target: LAMA2; (+) strand; PAM type: YTN; PAM sequence: CTG
atgaaatattttctttagtt

SEQ ID NO: 387394 - DNA, 20 bp, Artificial Sequence
  Description of Artificial Sequence: Synthetic oligonucleotide
  Target: LAMA2; (+) strand; PAM type: YTN; PAM sequence: TTT
tctttagtttaggctgactt

SEQ ID NO: 387395 - DNA, 20 bp, Artificial Sequence
  Description of Artificial Sequence: Synthetic oligonucleotide
  Target: LAMA2; (+) strand; PAM type: YTN; PAM sequence: TTT
ctttagtttaggctgacttt

SEQ ID NO: 387396 - DNA, 20 bp, Artificial Sequence
  Description of Artificial Sequence: Synthetic oligonucleotide
  Target: LAMA2; (+) strand; PAM type: YTN; PAM sequence: TTC
tttagtttaggctgactttc

SEQ ID NO: 387397 - DNA, 20 bp, Artificial Sequence
  Description of Artificial Sequence: Synthetic oligonucleotide
  Target: LAMA2; (+) strand; PAM type: YTN; PAM sequence: CTT
tagtttaggctgactttcag

SEQ ID NO: 387398 - DNA, 20 bp, Artificial Sequence
  Description of Artificial Sequence: Synthetic oligonucleotide
  Target: LAMA2; (+) strand; PAM type: YTN; PAM sequence: TTT
agtttaggctgactttcagt

SEQ ID NO: 387399 - DNA, 20 bp, Artificial Sequence
  Description of Artificial Sequence: Synthetic oligonucleotide
  Target: LAMA2; (+) strand; PAM type: YTN; PAM sequence: TTA
gtttaggctgactttcagtt

SEQ ID NO: 387400 - DNA, 20 bp, Artificial Sequence
  Description of Artificial Sequence: Synthetic oligonucleotide
  Target: LAMA2; (+) strand; PAM type: YTN; PAM sequence: TTT
aggctgactttcagtttcct

SEQ ID NO: 387401 - DNA, 20 bp, Artificial Sequence
  Description of Artificial Sequence: Synthetic oligonucleotide
  Target: LAMA2; (+) strand; PAM type: YTN; PAM sequence: TTA
ggctgactttcagtttcctg

SEQ ID NO: 387402 - DNA, 20 bp, Artificial Sequence
  Description of Artificial Sequence: Synthetic oligonucleotide
  Target: LAMA2; (+) strand; PAM type: YTN; PAM sequence: CTG
actttcagtttcctgttact

SEQ ID NO: 387403 - DNA, 20 bp, Artificial Sequence
  Description of Artificial Sequence: Synthetic oligonucleotide
  Target: LAMA2; (+) strand; PAM type: YTN; PAM sequence: CTT
tcagtttcctgttactatct

SEQ ID NO: 387404 - DNA, 20 bp, Artificial Sequence
  Description of Artificial Sequence: Synthetic oligonucleotide
  Target: LAMA2; (+) strand; PAM type: YTN; PAM sequence: TTT
cagtttcctgttactatctc

SEQ ID NO: 387405 - DNA, 20 bp, Artificial Sequence
  Description of Artificial Sequence: Synthetic oligonucleotide
  Target: LAMA2; (+) strand; PAM type: YTN; PAM sequence: TTC
agtttcctgttactatctct

SEQ ID NO: 387406 - DNA, 20 bp, Artificial Sequence
  Description of Artificial Sequence: Synthetic oligonucleotide
  Target: LAMA2; (+) strand; PAM type: YTN; PAM sequence: TTT
cctgttactatctctaattc

SEQ ID NO: 387407 - DNA, 20 bp, Artificial Sequence
  Description of Artificial Sequence: Synthetic oligonucleotide
  Target: LAMA2; (+) strand; PAM type: YTN; PAM sequence: TTC
ctgttactatctctaattct

SEQ ID NO: 387408 - DNA, 20 bp, Artificial Sequence
  Description of Artificial Sequence: Synthetic oligonucleotide
  Target: LAMA2; (+) strand; PAM type: YTN; PAM sequence: CTG
ttactatctctaattctagg

SEQ ID NO: 387409 - DNA, 20 bp, Artificial Sequence
  Description of Artificial Sequence: Synthetic oligonucleotide
  Target: LAMA2; (+) strand; PAM type: YTN; PAM sequence: TTA
ctatctctaattctaggttc

SEQ ID NO: 387410 - DNA, 20 bp, Artificial Sequence
  Description of Artificial Sequence: Synthetic oligonucleotide
  Target: LAMA2; (+) strand; PAM type: YTN; PAM sequence: CTA
tctctaattctaggttcttc

SEQ ID NO: 387411 - DNA, 20 bp, Artificial Sequence
  Description of Artificial Sequence: Synthetic oligonucleotide
  Target: LAMA2; (+) strand; PAM type: YTN; PAM sequence: CTC
taattctaggttcttcaagt

SEQ ID NO: 387412 - DNA, 20 bp, Artificial Sequence
  Description of Artificial Sequence: Synthetic oligonucleotide
  Target: LAMA2; (+) strand; PAM type: YTN; PAM sequence: CTA
attctaggttcttcaagtca

SEQ ID NO: 387413 - DNA, 20 bp, Artificial Sequence
  Description of Artificial Sequence: Synthetic oligonucleotide
  Target: LAMA2; (+) strand; PAM type: YTN; PAM sequence: TTC
taggttcttcaagtcactga

SEQ ID NO: 387414 - DNA, 20 bp, Artificial Sequence
  Description of Artificial Sequence: Synthetic oligonucleotide
  Target: LAMA2; (+) strand; PAM type: YTN; PAM sequence: CTA
ggttcttcaagtcactgaaa

SEQ ID NO: 387415 - DNA, 20 bp, Artificial Sequence
  Description of Artificial Sequence: Synthetic oligonucleotide
  Target: LAMA2; (+) strand; PAM type: YTN; PAM sequence: TTC
ttcaagtcactgaaaaccac

SEQ ID NO: 387416 - DNA, 20 bp, Artificial Sequence
  Description of Artificial Sequence: Synthetic oligonucleotide
  Target: LAMA2; (+) strand; PAM type: YTN; PAM sequence: CTT
caagtcactgaaaaccactt

SEQ ID NO: 387417 - DNA, 20 bp, Artificial Sequence
  Description of Artificial Sequence: Synthetic oligonucleotide
  Target: LAMA2; (+) strand; PAM type: YTN; PAM sequence: TTC
aagtcactgaaaaccacttt

SEQ ID NO: 387418 - DNA, 20 bp, Artificial Sequence
  Description of Artificial Sequence: Synthetic oligonucleotide
  Target: LAMA2; (+) strand; PAM type: YTN; PAM sequence: CTG
aaaaccacttttatggccac

SEQ ID NO: 387419 - DNA, 20 bp, Artificial Sequence
  Description of Artificial Sequence: Synthetic oligonucleotide
  Target: LAMA2; (+) strand; PAM type: YTN; PAM sequence: CTT
ttatggccaccttacatttc

SEQ ID NO: 387420 - DNA, 20 bp, Artificial Sequence
  Description of Artificial Sequence: Synthetic oligonucleotide
  Target: LAMA2; (+) strand; PAM type: YTN; PAM sequence: TTT
tatggccaccttacatttct

SEQ ID NO: 387421 - DNA, 20 bp, Artificial Sequence
  Description of Artificial Sequence: Synthetic oligonucleotide
  Target: LAMA2; (+) strand; PAM type: YTN; PAM sequence: TTT
atggccaccttacatttctc

SEQ ID NO: 387422 - DNA, 20 bp, Artificial Sequence
  Description of Artificial Sequence: Synthetic oligonucleotide
  Target: LAMA2; (+) strand; PAM type: YTN; PAM sequence: TTA
tggccaccttacatttctcc

SEQ ID NO: 387423 - DNA, 20 bp, Artificial Sequence
  Description of Artificial Sequence: Synthetic oligonucleotide
  Target: LAMA2; (+) strand; PAM type: YTN; PAM sequence: CTT
acatttctcctgtctttaag

SEQ ID NO: 387424 - DNA, 20 bp, Artificial Sequence
  Description of Artificial Sequence: Synthetic oligonucleotide
  Target: LAMA2; (+) strand; PAM type: YTN; PAM sequence: TTA
catttctcctgtctttaagc

SEQ ID NO: 387425 - DNA, 20 bp, Artificial Sequence
  Description of Artificial Sequence: Synthetic oligonucleotide
  Target: LAMA2; (+) strand; PAM type: YTN; PAM sequence: TTT
ctcctgtctttaagcccttc

SEQ ID NO: 387426 - DNA, 20 bp, Artificial Sequence
  Description of Artificial Sequence: Synthetic oligonucleotide
  Target: LAMA2; (+) strand; PAM type: YTN; PAM sequence: TTC
tcctgtctttaagcccttca

SEQ ID NO: 387427 - DNA, 20 bp, Artificial Sequence
  Description of Artificial Sequence: Synthetic oligonucleotide
  Target: LAMA2; (+) strand; PAM type: YTN; PAM sequence: CTC
ctgtctttaagcccttcaca

SEQ ID NO: 387428 - DNA, 20 bp, Artificial Sequence
  Description of Artificial Sequence: Synthetic oligonucleotide
  Target: LAMA2; (+) strand; PAM type: YTN; PAM sequence: CTG
tctttaagcccttcacatgc

SEQ ID NO: 387429 - DNA, 20 bp, Artificial Sequence
  Description of Artificial Sequence: Synthetic oligonucleotide
  Target: LAMA2; (+) strand; PAM type: YTN; PAM sequence: CTT
taagcccttcacatgcatta

SEQ ID NO: 387430 - DNA, 20 bp, Artificial Sequence
  Description of Artificial Sequence: Synthetic oligonucleotide
  Target: LAMA2; (+) strand; PAM type: YTN; PAM sequence: TTT
aagcccttcacatgcattat

SEQ ID NO: 387431 - DNA, 20 bp, Artificial Sequence
  Description of Artificial Sequence: Synthetic oligonucleotide
  Target: LAMA2; (+) strand; PAM type: YTN; PAM sequence: TTA
agcccttcacatgcattatt

SEQ ID NO: 387432 - DNA, 20 bp, Artificial Sequence
  Description of Artificial Sequence: Synthetic oligonucleotide
  Target: LAMA2; (+) strand; PAM type: YTN; PAM sequence: CTT
cacatgcattatttatagat

SEQ ID NO: 387433 - DNA, 20 bp, Artificial Sequence
  Description of Artificial Sequence: Synthetic oligonucleotide
  Target: LAMA2; (+) strand; PAM type: YTN; PAM sequence: TTC
acatgcattatttatagatt

SEQ ID NO: 387434 - DNA, 20 bp, Artificial Sequence
  Description of Artificial Sequence: Synthetic oligonucleotide
  Target: LAMA2; (+) strand; PAM type: YTN; PAM sequence: TTA
tttatagattcataaacact

SEQ ID NO: 387435 - DNA, 20 bp, Artificial Sequence
  Description of Artificial Sequence: Synthetic oligonucleotide
  Target: LAMA2; (+) strand; PAM type: YTN; PAM sequence: TTT
atagattcataaacactctg

SEQ ID NO: 387436 - DNA, 20 bp, Artificial Sequence
  Description of Artificial Sequence: Synthetic oligonucleotide
  Target: LAMA2; (+) strand; PAM type: YTN; PAM sequence: TTA
tagattcataaacactctgg

SEQ ID NO: 387437 - DNA, 20 bp, Artificial Sequence
  Description of Artificial Sequence: Synthetic oligonucleotide
  Target: LAMA2; (+) strand; PAM type: YTN; PAM sequence: TTC
ataaacactctggttgtgac

SEQ ID NO: 387438 - DNA, 20 bp, Artificial Sequence
  Description of Artificial Sequence: Synthetic oligonucleotide
  Target: LAMA2; (+) strand; PAM type: YTN; PAM sequence: CTC
tggttgtgactatttttctc

SEQ ID NO: 387439 - DNA, 20 bp, Artificial Sequence
  Description of Artificial Sequence: Synthetic oligonucleotide
  Target: LAMA2; (+) strand; PAM type: YTN; PAM sequence: CTG
gttgtgactatttttctcat

SEQ ID NO: 387440 - DNA, 20 bp, Artificial Sequence
  Description of Artificial Sequence: Synthetic oligonucleotide
  Target: LAMA2; (+) strand; PAM type: YTN; PAM sequence: TTG
tgactatttttctcatctgt

SEQ ID NO: 387441 - DNA, 20 bp, Artificial Sequence
  Description of Artificial Sequence: Synthetic oligonucleotide
  Target: LAMA2; (+) strand; PAM type: YTN; PAM sequence: CTA
tttttctcatctgtaaaatg

SEQ ID NO: 387442 - DNA, 20 bp, Artificial Sequence
  Description of Artificial Sequence: Synthetic oligonucleotide
  Target: LAMA2; (+) strand; PAM type: YTN; PAM sequence: TTT
ttctcatctgtaaaatgagg

SEQ ID NO: 387443 - DNA, 20 bp, Artificial Sequence
  Description of Artificial Sequence: Synthetic oligonucleotide
  Target: LAMA2; (+) strand; PAM type: YTN; PAM sequence: TTT
tctcatctgtaaaatgagga

SEQ ID NO: 387444 - DNA, 20 bp, Artificial Sequence
  Description of Artificial Sequence: Synthetic oligonucleotide
  Target: LAMA2; (+) strand; PAM type: YTN; PAM sequence: TTT
ctcatctgtaaaatgaggat

SEQ ID NO: 387445 - DNA, 20 bp, Artificial Sequence
  Description of Artificial Sequence: Synthetic oligonucleotide
  Target: LAMA2; (+) strand; PAM type: YTN; PAM sequence: TTC
tcatctgtaaaatgaggata

SEQ ID NO: 387446 - DNA, 20 bp, Artificial Sequence
  Description of Artificial Sequence: Synthetic oligonucleotide
  Target: LAMA2; (+) strand; PAM type: YTN; PAM sequence: CTC
atctgtaaaatgaggatatg

SEQ ID NO: 387447 - DNA, 20 bp, Artificial Sequence
  Description of Artificial Sequence: Synthetic oligonucleotide
  Target: LAMA2; (+) strand; PAM type: YTN; PAM sequence: CTG
taaaatgaggatatgaatgg

SEQ ID NO: 387448 - DNA, 20 bp, Artificial Sequence
  Description of Artificial Sequence: Synthetic oligonucleotide
  Target: LAMA2; (+) strand; PAM type: YTN; PAM sequence: CTT
acctcatagaattgctttaa

SEQ ID NO: 387449 - DNA, 20 bp, Artificial Sequence
  Description of Artificial Sequence: Synthetic oligonucleotide
  Target: LAMA2; (+) strand; PAM type: YTN; PAM sequence: TTA
cctcatagaattgctttaaa

SEQ ID NO: 387450 - DNA, 20 bp, Artificial Sequence
  Description of Artificial Sequence: Synthetic oligonucleotide
  Target: LAMA2; (+) strand; PAM type: YTN; PAM sequence: CTC
atagaattgctttaaatatt

SEQ ID NO: 387451 - DNA, 20 bp, Artificial Sequence
  Description of Artificial Sequence: Synthetic oligonucleotide
  Target: LAMA2; (+) strand; PAM type: YTN; PAM sequence: TTG
ctttaaatattaagtgagat

SEQ ID NO: 387452 - DNA, 20 bp, Artificial Sequence
  Description of Artificial Sequence: Synthetic oligonucleotide
  Target: LAMA2; (+) strand; PAM type: YTN; PAM sequence: CTT
taaatattaagtgagataat

SEQ ID NO: 387453 - DNA, 20 bp, Artificial Sequence
  Description of Artificial Sequence: Synthetic oligonucleotide
  Target: LAMA2; (+) strand; PAM type: YTN; PAM sequence: TTT
aaatattaagtgagataatg

SEQ ID NO: 387454 - DNA, 20 bp, Artificial Sequence
  Description of Artificial Sequence: Synthetic oligonucleotide
  Target: LAMA2; (+) strand; PAM type: YTN; PAM sequence: TTA
aatattaagtgagataatga

SEQ ID NO: 387455 - DNA, 20 bp, Artificial Sequence
  Description of Artificial Sequence: Synthetic oligonucleotide
  Target: LAMA2; (+) strand; PAM type: YTN; PAM sequence: TTA
agtgagataatgatggcaaa

SEQ ID NO: 387456 - DNA, 20 bp, Artificial Sequence
  Description of Artificial Sequence: Synthetic oligonucleotide
  Target: LAMA2; (+) strand; PAM type: YTN; PAM sequence: TTG
ccagtcatgtagtgactgtt

SEQ ID NO: 387457 - DNA, 20 bp, Artificial Sequence
  Description of Artificial Sequence: Synthetic oligonucleotide
  Target: LAMA2; (+) strand; PAM type: YTN; PAM sequence: CTG
ttgtgtagataaaaactatt

SEQ ID NO: 387458 - DNA, 20 bp, Artificial Sequence
  Description of Artificial Sequence: Synthetic oligonucleotide
  Target: LAMA2; (+) strand; PAM type: YTN; PAM sequence: TTG
tgtagataaaaactattatc

SEQ ID NO: 387459 - DNA, 20 bp, Artificial Sequence
  Description of Artificial Sequence: Synthetic oligonucleotide
  Target: LAMA2; (+) strand; PAM type: YTN; PAM sequence: CTA
ttatcccattattatttata

SEQ ID NO: 387460 - DNA, 20 bp, Artificial Sequence
  Description of Artificial Sequence: Synthetic oligonucleotide
  Target: LAMA2; (+) strand; PAM type: YTN; PAM sequence: TTA
tcccattattatttatagta

SEQ ID NO: 387461 - DNA, 20 bp, Artificial Sequence
  Description of Artificial Sequence: Synthetic oligonucleotide
  Target: LAMA2; (+) strand; PAM type: YTN; PAM sequence: TTA
ttatttatagtactttcaaa

SEQ ID NO: 387462 - DNA, 20 bp, Artificial Sequence
  Description of Artificial Sequence: Synthetic oligonucleotide
  Target: LAMA2; (+) strand; PAM type: YTN; PAM sequence: TTA
tttatagtactttcaaagtt

SEQ ID NO: 387463 - DNA, 20 bp, Artificial Sequence
  Description of Artificial Sequence: Synthetic oligonucleotide
  Target: LAMA2; (+) strand; PAM type: YTN; PAM sequence: TTT
atagtactttcaaagtttcc

SEQ ID NO: 387464 - DNA, 20 bp, Artificial Sequence
  Description of Artificial Sequence: Synthetic oligonucleotide
  Target: LAMA2; (+) strand; PAM type: YTN; PAM sequence: TTA
tagtactttcaaagtttcca

SEQ ID NO: 387465 - DNA, 20 bp, Artificial Sequence
  Description of Artificial Sequence: Synthetic oligonucleotide
  Target: LAMA2; (+) strand; PAM type: YTN; PAM sequence: CTT
tcaaagtttccattagtgtt

SEQ ID NO: 387466 - DNA, 20 bp, Artificial Sequence
  Description of Artificial Sequence: Synthetic oligonucleotide
  Target: LAMA2; (+) strand; PAM type: YTN; PAM sequence: TTT
caaagtttccattagtgttt

SEQ ID NO: 387467 - DNA, 20 bp, Artificial Sequence
  Description of Artificial Sequence: Synthetic oligonucleotide
  Target: LAMA2; (+) strand; PAM type: YTN; PAM sequence: TTC
aaagtttccattagtgtttt

SEQ ID NO: 387468 - DNA, 20 bp, Artificial Sequence
  Description of Artificial Sequence: Synthetic oligonucleotide
  Target: LAMA2; (+) strand; PAM type: YTN; PAM sequence: TTT
ccattagtgttttgaagagt

SEQ ID NO: 387469 - DNA, 20 bp, Artificial Sequence
  Description of Artificial Sequence: Synthetic oligonucleotide
  Target: LAMA2; (+) strand; PAM type: YTN; PAM sequence: TTC
cattagtgttttgaagagtt

SEQ ID NO: 387470 - DNA, 20 bp, Artificial Sequence
  Description of Artificial Sequence: Synthetic oligonucleotide
  Target: LAMA2; (+) strand; PAM type: YTN; PAM sequence: TTA
gtgttttgaagagttacacc

SEQ ID NO: 387471 - DNA, 20 bp, Artificial Sequence
  Description of Artificial Sequence: Synthetic oligonucleotide
  Target: LAMA2; (+) strand; PAM type: YTN; PAM sequence: TTT
tgaagagttacaccatcttt

SEQ ID NO: 387472 - DNA, 20 bp, Artificial Sequence
  Description of Artificial Sequence: Synthetic oligonucleotide
  Target: LAMA2; (+) strand; PAM type: YTN; PAM sequence: TTT
gaagagttacaccatctttg

SEQ ID NO: 387473 - DNA, 20 bp, Artificial Sequence
  Description of Artificial Sequence: Synthetic oligonucleotide
  Target: LAMA2; (+) strand; PAM type: YTN; PAM sequence: TTG
aagagttacaccatctttga

SEQ ID NO: 387474 - DNA, 20 bp, Artificial Sequence
  Description of Artificial Sequence: Synthetic oligonucleotide
  Target: LAMA2; (+) strand; PAM type: YTN; PAM sequence: TTA
caccatctttgaaccacatt

SEQ ID NO: 387475 - DNA, 20 bp, Artificial Sequence
  Description of Artificial Sequence: Synthetic oligonucleotide
  Target: LAMA2; (+) strand; PAM type: YTN; PAM sequence: CTT
tgaaccacattgaacttgtt

SEQ ID NO: 387476 - DNA, 20 bp, Artificial Sequence
  Description of Artificial Sequence: Synthetic oligonucleotide
  Target: LAMA2; (+) strand; PAM type: YTN; PAM sequence: TTT
gaaccacattgaacttgttt

SEQ ID NO: 387477 - DNA, 20 bp, Artificial Sequence
  Description of Artificial Sequence: Synthetic oligonucleotide
  Target: LAMA2; (+) strand; PAM type: YTN; PAM sequence: TTG
aaccacattgaacttgtttt

SEQ ID NO: 387478 - DNA, 20 bp, Artificial Sequence
  Description of Artificial Sequence: Synthetic oligonucleotide
  Target: LAMA2; (+) strand; PAM type: YTN; PAM sequence: TTG
aacttgttttcccatgtatt

SEQ ID NO: 387479 - DNA, 20 bp, Artificial Sequence
  Description of Artificial Sequence: Synthetic oligonucleotide
  Target: LAMA2; (+) strand; PAM type: YTN; PAM sequence: CTT
gttttcccatgtattatata

SEQ ID NO: 387480 - DNA, 20 bp, Artificial Sequence
  Description of Artificial Sequence: Synthetic oligonucleotide
  Target: LAMA2; (+) strand; PAM type: YTN; PAM sequence: TTG
ttttcccatgtattatatat

SEQ ID NO: 387481 - DNA, 20 bp, Artificial Sequence
  Description of Artificial Sequence: Synthetic oligonucleotide
  Target: LAMA2; (+) strand; PAM type: YTN; PAM sequence: TTT
tcccatgtattatatataga

SEQ ID NO: 387482 - DNA, 20 bp, Artificial Sequence
  Description of Artificial Sequence: Synthetic oligonucleotide
  Target: LAMA2; (+) strand; PAM type: YTN; PAM sequence: TTT
cccatgtattatatatagaa

SEQ ID NO: 387483 - DNA, 20 bp, Artificial Sequence
  Description of Artificial Sequence: Synthetic oligonucleotide
  Target: LAMA2; (+) strand; PAM type: YTN; PAM sequence: TTC
ccatgtattatatatagaat

SEQ ID NO: 387484 - DNA, 20 bp, Artificial Sequence
  Description of Artificial Sequence: Synthetic oligonucleotide
  Target: LAMA2; (+) strand; PAM type: YTN; PAM sequence: TTA
tatatagaattttatttaat

SEQ ID NO: 387485 - DNA, 20 bp, Artificial Sequence
  Description of Artificial Sequence: Synthetic oligonucleotide
  Target: LAMA2; (+) strand; PAM type: YTN; PAM sequence: TTT
tatttaatatatataaaaca

SEQ ID NO: 387486 - DNA, 20 bp, Artificial Sequence
  Description of Artificial Sequence: Synthetic oligonucleotide
  Target: LAMA2; (+) strand; PAM type: YTN; PAM sequence: TTT
atttaatatatataaaacac

SEQ ID NO: 387487 - DNA, 20 bp, Artificial Sequence
  Description of Artificial Sequence: Synthetic oligonucleotide
  Target: LAMA2; (+) strand; PAM type: YTN; PAM sequence: TTA
tttaatatatataaaacaca

SEQ ID NO: 387488 - DNA, 20 bp, Artificial Sequence
  Description of Artificial Sequence: Synthetic oligonucleotide
  Target: LAMA2; (+) strand; PAM type: YTN; PAM sequence: TTT
aatatatataaaacacatat

SEQ ID NO: 387489 - DNA, 20 bp, Artificial Sequence
  Description of Artificial Sequence: Synthetic oligonucleotide
  Target: LAMA2; (+) strand; PAM type: YTN; PAM sequence: TTA
atatatataaaacacatata

SEQ ID NO: 387490 - DNA, 20 bp, Artificial Sequence
  Description of Artificial Sequence: Synthetic oligonucleotide
  Target: LAMA2; (+) strand; PAM type: YTN; PAM sequence: TTT
aatatataaaaatatataaa

SEQ ID NO: 387491 - DNA, 20 bp, Artificial Sequence
  Description of Artificial Sequence: Synthetic oligonucleotide
  Target: LAMA2; (+) strand; PAM type: YTN; PAM sequence: TTA
atatataaaaatatataaaa

SEQ ID NO: 387492 - DNA, 20 bp, Artificial Sequence
  Description of Artificial Sequence: Synthetic oligonucleotide
  Target: LAMA2; (+) strand; PAM type: YTN; PAM sequence: TTA
cttggtatgtcgacaaattc

SEQ ID NO: 387493 - DNA, 20 bp, Artificial Sequence
  Description of Artificial Sequence: Synthetic oligonucleotide
  Target: LAMA2; (+) strand; PAM type: YTN; PAM sequence: CTT
ggtatgtcgacaaattcatc

SEQ ID NO: 387494 - DNA, 20 bp, Artificial Sequence
  Description of Artificial Sequence: Synthetic oligonucleotide
  Target: LAMA2; (+) strand; PAM type: YTN; PAM sequence: TTG
gtatgtcgacaaattcatca

SEQ ID NO: 387495 - DNA, 20 bp, Artificial Sequence
  Description of Artificial Sequence: Synthetic oligonucleotide
  Target: LAMA2; (+) strand; PAM type: YTN; PAM sequence: TTC
atcagtctcagctgaggtct

SEQ ID NO: 387496 - DNA, 20 bp, Artificial Sequence
  Description of Artificial Sequence: Synthetic oligonucleotide
  Target: LAMA2; (+) strand; PAM type: YTN; PAM sequence: CTC
agctgaggtctacagctttc

SEQ ID NO: 387497 - DNA, 20 bp, Artificial Sequence
  Description of Artificial Sequence: Synthetic oligonucleotide
  Target: LAMA2; (+) strand; PAM type: YTN; PAM sequence: CTG
aggtctacagctttcctctc

SEQ ID NO: 387498 - DNA, 20 bp, Artificial Sequence
  Description of Artificial Sequence: Synthetic oligonucleotide
  Target: LAMA2; (+) strand; PAM type: YTN; PAM sequence: CTA
cagctttcctctctattcaa

SEQ ID NO: 387499 - DNA, 20 bp, Artificial Sequence
  Description of Artificial Sequence: Synthetic oligonucleotide
  Target: LAMA2; (+) strand; PAM type: YTN; PAM sequence: CTT
tcctctctattcaaagaaat

SEQ ID NO: 387500 - DNA, 20 bp, Artificial Sequence
  Description of Artificial Sequence: Synthetic oligonucleotide
  Target: LAMA2; (+) strand; PAM type: YTN; PAM sequence: TTT
cctctctattcaaagaaatg

SEQ ID NO: 387501 - DNA, 20 bp, Artificial Sequence
  Description of Artificial Sequence: Synthetic oligonucleotide
  Target: LAMA2; (+) strand; PAM type: YTN; PAM sequence: TTC
ctctctattcaaagaaatga

SEQ ID NO: 387502 - DNA, 20 bp, Artificial Sequence
  Description of Artificial Sequence: Synthetic oligonucleotide
  Target: LAMA2; (+) strand; PAM type: YTN; PAM sequence: CTC
tctattcaaagaaatgacag

SEQ ID NO: 387503 - DNA, 20 bp, Artificial Sequence
  Description of Artificial Sequence: Synthetic oligonucleotide
  Target: LAMA2; (+) strand; PAM type: YTN; PAM sequence: CTC
tattcaaagaaatgacaggt

SEQ ID NO: 387504 - DNA, 20 bp, Artificial Sequence
  Description of Artificial Sequence: Synthetic oligonucleotide
  Target: LAMA2; (+) strand; PAM type: YTN; PAM sequence: CTA
ttcaaagaaatgacaggtta

SEQ ID NO: 387505 - DNA, 20 bp, Artificial Sequence
  Description of Artificial Sequence: Synthetic oligonucleotide
  Target: LAMA2; (+) strand; PAM type: YTN; PAM sequence: TTC
aaagaaatgacaggttaaaa

SEQ ID NO: 387506 - DNA, 20 bp, Artificial Sequence
  Description of Artificial Sequence: Synthetic oligonucleotide
  Target: LAMA2; (+) strand; PAM type: YTN; PAM sequence: TTA
aaaggtcttcttaatgactc

SEQ ID NO: 387507 - DNA, 20 bp, Artificial Sequence
  Description of Artificial Sequence: Synthetic oligonucleotide
  Target: LAMA2; (+) strand; PAM type: YTN; PAM sequence: CTT
cttaatgactctggaatcaa

SEQ ID NO: 387508 - DNA, 20 bp, Artificial Sequence
  Description of Artificial Sequence: Synthetic oligonucleotide
  Target: LAMA2; (+) strand; PAM type: YTN; PAM sequence: TTC
ttaatgactctggaatcaaa

SEQ ID NO: 387509 - DNA, 20 bp, Artificial Sequence
  Description of Artificial Sequence: Synthetic oligonucleotide
  Target: LAMA2; (+) strand; PAM type: YTN; PAM sequence: CTT
aatgactctggaatcaaatt

SEQ ID NO: 387510 - DNA, 20 bp, Artificial Sequence
  Description of Artificial Sequence: Synthetic oligonucleotide
  Target: LAMA2; (+) strand; PAM type: YTN; PAM sequence: TTA
atgactctggaatcaaattt

SEQ ID NO: 387511 - DNA, 20 bp, Artificial Sequence
  Description of Artificial Sequence: Synthetic oligonucleotide
  Target: LAMA2; (+) strand; PAM type: YTN; PAM sequence: CTC
tggaatcaaatttttatttg

SEQ ID NO: 387512 - DNA, 20 bp, Artificial Sequence
  Description of Artificial Sequence: Synthetic oligonucleotide
  Target: LAMA2; (+) strand; PAM type: YTN; PAM sequence: CTG
gaatcaaatttttatttgag

SEQ ID NO: 387513 - DNA, 20 bp, Artificial Sequence
  Description of Artificial Sequence: Synthetic oligonucleotide
  Target: LAMA2; (+) strand; PAM type: YTN; PAM sequence: TTT
ttatttgagaagatatttat

SEQ ID NO: 387514 - DNA, 20 bp, Artificial Sequence
  Description of Artificial Sequence: Synthetic oligonucleotide
  Target: LAMA2; (+) strand; PAM type: YTN; PAM sequence: TTT
tatttgagaagatatttatt

SEQ ID NO: 387515 - DNA, 20 bp, Artificial Sequence
  Description of Artificial Sequence: Synthetic oligonucleotide
  Target: LAMA2; (+) strand; PAM type: YTN; PAM sequence: TTT
atttgagaagatatttattt

SEQ ID NO: 387516 - DNA, 20 bp, Artificial Sequence
  Description of Artificial Sequence: Synthetic oligonucleotide
  Target: LAMA2; (+) strand; PAM type: YTN; PAM sequence: TTA
tttgagaagatatttatttt

SEQ ID NO: 387517 - DNA, 20 bp, Artificial Sequence
  Description of Artificial Sequence: Synthetic oligonucleotide
  Target: LAMA2; (+) strand; PAM type: YTN; PAM sequence: TTT
gagaagatatttattttaaa

SEQ ID NO: 387518 - DNA, 20 bp, Artificial Sequence
  Description of Artificial Sequence: Synthetic oligonucleotide
  Target: LAMA2; (+) strand; PAM type: YTN; PAM sequence: TTG
agaagatatttattttaaaa

SEQ ID NO: 387519 - DNA, 20 bp, Artificial Sequence
  Description of Artificial Sequence: Synthetic oligonucleotide
  Target: LAMA2; (+) strand; PAM type: YTN; PAM sequence: TTT
attttaaaatagaatgacta

SEQ ID NO: 387520 - DNA, 20 bp, Artificial Sequence
  Description of Artificial Sequence: Synthetic oligonucleotide
  Target: LAMA2; (+) strand; PAM type: YTN; PAM sequence: TTA
ttttaaaatagaatgactaa

SEQ ID NO: 387521 - DNA, 20 bp, Artificial Sequence
  Description of Artificial Sequence: Synthetic oligonucleotide
  Target: LAMA2; (+) strand; PAM type: YTN; PAM sequence: TTT
taaaatagaatgactaaata

SEQ ID NO: 387522 - DNA, 20 bp, Artificial Sequence
  Description of Artificial Sequence: Synthetic oligonucleotide
  Target: LAMA2; (+) strand; PAM type: YTN; PAM sequence: TTT
aaaatagaatgactaaatac

SEQ ID NO: 387523 - DNA, 20 bp, Artificial Sequence
  Description of Artificial Sequence: Synthetic oligonucleotide
  Target: LAMA2; (+) strand; PAM type: YTN; PAM sequence: TTA
aaatagaatgactaaataca

SEQ ID NO: 387524 - DNA, 20 bp, Artificial Sequence
  Description of Artificial Sequence: Synthetic oligonucleotide
  Target: LAMA2; (+) strand; PAM type: YTN; PAM sequence: CTA
aatacatcttaataagccct

SEQ ID NO: 387525 - DNA, 20 bp, Artificial Sequence
  Description of Artificial Sequence: Synthetic oligonucleotide
  Target: LAMA2; (+) strand; PAM type: YTN; PAM sequence: CTT
aataagccctaaatatatgc

SEQ ID NO: 387526 - DNA, 20 bp, Artificial Sequence
  Description of Artificial Sequence: Synthetic oligonucleotide
  Target: LAMA2; (+) strand; PAM type: YTN; PAM sequence: TTA
ataagccctaaatatatgct

SEQ ID NO: 387527 - DNA, 20 bp, Artificial Sequence
  Description of Artificial Sequence: Synthetic oligonucleotide
  Target: LAMA2; (+) strand; PAM type: YTN; PAM sequence: CTA
aatatatgctaatgtaaaag

SEQ ID NO: 387528 - DNA, 20 bp, Artificial Sequence
  Description of Artificial Sequence: Synthetic oligonucleotide
  Target: LAMA2; (+) strand; PAM type: YTN; PAM sequence: CTA
atgtaaaagtttctttttga

SEQ ID NO: 387529 - DNA, 20 bp, Artificial Sequence
  Description of Artificial Sequence: Synthetic oligonucleotide
  Target: LAMA2; (+) strand; PAM type: YTN; PAM sequence: TTT
ctttttgaaggggaaaaagg

SEQ ID NO: 387530 - DNA, 20 bp, Artificial Sequence
  Description of Artificial Sequence: Synthetic oligonucleotide
  Target: LAMA2; (+) strand; PAM type: YTN; PAM sequence: TTC
tttttgaaggggaaaaaggg

SEQ ID NO: 387531 - DNA, 20 bp, Artificial Sequence
  Description of Artificial Sequence: Synthetic oligonucleotide
  Target: LAMA2; (+) strand; PAM type: YTN; PAM sequence: CTT
tttgaaggggaaaaagggaa

SEQ ID NO: 387532 - DNA, 20 bp, Artificial Sequence
  Description of Artificial Sequence: Synthetic oligonucleotide
  Target: LAMA2; (+) strand; PAM type: YTN; PAM sequence: TTT
ttgaaggggaaaaagggaag

SEQ ID NO: 387533 - DNA, 20 bp, Artificial Sequence
  Description of Artificial Sequence: Synthetic oligonucleotide
  Target: LAMA2; (+) strand; PAM type: YTN; PAM sequence: TTT
tgaaggggaaaaagggaagt

SEQ ID NO: 387534 - DNA, 20 bp, Artificial Sequence
  Description of Artificial Sequence: Synthetic oligonucleotide
  Target: LAMA2; (+) strand; PAM type: YTN; PAM sequence: TTT
gaaggggaaaaagggaagtg

SEQ ID NO: 387535 - DNA, 20 bp, Artificial Sequence
  Description of Artificial Sequence: Synthetic oligonucleotide
  Target: LAMA2; (+) strand; PAM type: YTN; PAM sequence: TTG
aaggggaaaaagggaagtga

SEQ ID NO: 387536 - DNA, 20 bp, Artificial Sequence
  Description of Artificial Sequence: Synthetic oligonucleotide
  Target: LAMA2; (+) strand; PAM type: YTN; PAM sequence: TTC
agatccagggaaccgtcaat

SEQ ID NO: 387537 - DNA, 20 bp, Artificial Sequence
  Description of Artificial Sequence: Synthetic oligonucleotide
  Target: LAMA2; (+) strand; PAM type: YTN; PAM sequence: TTC
atctaggagagttaatttaa

SEQ ID NO: 387538 - DNA, 20 bp, Artificial Sequence
  Description of Artificial Sequence: Synthetic oligonucleotide
  Target: LAMA2; (+) strand; PAM type: YTN; PAM sequence: CTA
ggagagttaatttaacatac

SEQ ID NO: 387539 - DNA, 20 bp, Artificial Sequence
  Description of Artificial Sequence: Synthetic oligonucleotide
  Target: LAMA2; (+) strand; PAM type: YTN; PAM sequence: TTA
atttaacatacacacattaa

SEQ ID NO: 387540 - DNA, 20 bp, Artificial Sequence
  Description of Artificial Sequence: Synthetic oligonucleotide
  Target: LAMA2; (+) strand; PAM type: YTN; PAM sequence: TTT
aacatacacacattaacaca

SEQ ID NO: 387541 - DNA, 20 bp, Artificial Sequence
  Description of Artificial Sequence: Synthetic oligonucleotide
  Target: LAMA2; (+) strand; PAM type: YTN; PAM sequence: TTA
acatacacacattaacacat

SEQ ID NO: 387542 - DNA, 20 bp, Artificial Sequence
  Description of Artificial Sequence: Synthetic oligonucleotide
  Target: LAMA2; (+) strand; PAM type: YTN; PAM sequence: TTA
acacataattttatcttttg

SEQ ID NO: 387543 - DNA, 20 bp, Artificial Sequence
  Description of Artificial Sequence: Synthetic oligonucleotide
  Target: LAMA2; (+) strand; PAM type: YTN; PAM sequence: TTT
tatcttttgttaaaaatgtg

SEQ ID NO: 387544 - DNA, 20 bp, Artificial Sequence
  Description of Artificial Sequence: Synthetic oligonucleotide
  Target: LAMA2; (+) strand; PAM type: YTN; PAM sequence: TTT
atcttttgttaaaaatgtgt

SEQ ID NO: 387545 - DNA, 20 bp, Artificial Sequence
  Description of Artificial Sequence: Synthetic oligonucleotide
  Target: LAMA2; (+) strand; PAM type: YTN; PAM sequence: TTA
tcttttgttaaaaatgtgta

SEQ ID NO: 387546 - DNA, 20 bp, Artificial Sequence
  Description of Artificial Sequence: Synthetic oligonucleotide
  Target: LAMA2; (+) strand; PAM type: YTN; PAM sequence: CTT
ttgttaaaaatgtgtattta

SEQ ID NO: 387547 - DNA, 20 bp, Artificial Sequence
  Description of Artificial Sequence: Synthetic oligonucleotide
  Target: LAMA2; (+) strand; PAM type: YTN; PAM sequence: TTT
tgttaaaaatgtgtatttac

SEQ ID NO: 387548 - DNA, 20 bp, Artificial Sequence
  Description of Artificial Sequence: Synthetic oligonucleotide
  Target: LAMA2; (+) strand; PAM type: YTN; PAM sequence: TTT
gttaaaaatgtgtatttact

SEQ ID NO: 387549 - DNA, 20 bp, Artificial Sequence
  Description of Artificial Sequence: Synthetic oligonucleotide
  Target: LAMA2; (+) strand; PAM type: YTN; PAM sequence: TTG
ttaaaaatgtgtatttactc

SEQ ID NO: 387550 - DNA, 20 bp, Artificial Sequence
  Description of Artificial Sequence: Synthetic oligonucleotide
  Target: LAMA2; (+) strand; PAM type: YTN; PAM sequence: TTA
aaaatgtgtatttactcatt

SEQ ID NO: 387551 - DNA, 20 bp, Artificial Sequence
  Description of Artificial Sequence: Synthetic oligonucleotide
  Target: LAMA2; (+) strand; PAM type: YTN; PAM sequence: TTT
actcattttattcctatttg

SEQ ID NO: 387552 - DNA, 20 bp, Artificial Sequence
  Description of Artificial Sequence: Synthetic oligonucleotide
  Target: LAMA2; (+) strand; PAM type: YTN; PAM sequence: TTA
ctcattttattcctatttga

SEQ ID NO: 387553 - DNA, 20 bp, Artificial Sequence
  Description of Artificial Sequence: Synthetic oligonucleotide
  Target: LAMA2; (+) strand; PAM type: YTN; PAM sequence: CTC
attttattcctatttgatta

SEQ ID NO: 387554 - DNA, 20 bp, Artificial Sequence
  Description of Artificial Sequence: Synthetic oligonucleotide
  Target: LAMA2; (+) strand; PAM type: YTN; PAM sequence: TTT
tattcctatttgattagagc

SEQ ID NO: 387555 - DNA, 20 bp, Artificial Sequence
  Description of Artificial Sequence: Synthetic oligonucleotide
  Target: LAMA2; (+) strand; PAM type: YTN; PAM sequence: TTT
attcctatttgattagagca

SEQ ID NO: 387556 - DNA, 20 bp, Artificial Sequence
  Description of Artificial Sequence: Synthetic oligonucleotide
  Target: LAMA2; (+) strand; PAM type: YTN; PAM sequence: TTA
ttcctatttgattagagcag

SEQ ID NO: 387557 - DNA, 20 bp, Artificial Sequence
  Description of Artificial Sequence: Synthetic oligonucleotide
  Target: LAMA2; (+) strand; PAM type: YTN; PAM sequence: TTC
ctatttgattagagcagaga

SEQ ID NO: 387558 - DNA, 20 bp, Artificial Sequence
  Description of Artificial Sequence: Synthetic oligonucleotide
  Target: LAMA2; (+) strand; PAM type: YTN; PAM sequence: CTA
tttgattagagcagagaatt

SEQ ID NO: 387559 - DNA, 20 bp, Artificial Sequence
  Description of Artificial Sequence: Synthetic oligonucleotide
  Target: LAMA2; (+) strand; PAM type: YTN; PAM sequence: TTT
gattagagcagagaatttat

SEQ ID NO: 387560 - DNA, 20 bp, Artificial Sequence
  Description of Artificial Sequence: Synthetic oligonucleotide
  Target: LAMA2; (+) strand; PAM type: YTN; PAM sequence: TTG
attagagcagagaatttatg

SEQ ID NO: 387561 - DNA, 20 bp, Artificial Sequence
  Description of Artificial Sequence: Synthetic oligonucleotide
  Target: LAMA2; (+) strand; PAM type: YTN; PAM sequence: TTA
gagcagagaatttatgtatc

SEQ ID NO: 387562 - DNA, 20 bp, Artificial Sequence
  Description of Artificial Sequence: Synthetic oligonucleotide
  Target: LAMA2; (+) strand; PAM type: YTN; PAM sequence: TTT
atgtatcgctacctaaaatt

SEQ ID NO: 387563 - DNA, 20 bp, Artificial Sequence
  Description of Artificial Sequence: Synthetic oligonucleotide
  Target: LAMA2; (+) strand; PAM type: YTN; PAM sequence: TTA
tgtatcgctacctaaaattg

SEQ ID NO: 387564 - DNA, 20 bp, Artificial Sequence
  Description of Artificial Sequence: Synthetic oligonucleotide
  Target: LAMA2; (+) strand; PAM type: YTN; PAM sequence: CTA
cctaaaattggttaatagct

SEQ ID NO: 387565 - DNA, 20 bp, Artificial Sequence
  Description of Artificial Sequence: Synthetic oligonucleotide
  Target: LAMA2; (+) strand; PAM type: YTN; PAM sequence: CTA
aaattggttaatagctttcg

SEQ ID NO: 387566 - DNA, 20 bp, Artificial Sequence
  Description of Artificial Sequence: Synthetic oligonucleotide
  Target: LAMA2; (+) strand; PAM type: YTN; PAM sequence: TTG
gttaatagctttcgcccttt

SEQ ID NO: 387567 - DNA, 20 bp, Artificial Sequence
  Description of Artificial Sequence: Synthetic oligonucleotide
  Target: LAMA2; (+) strand; PAM type: YTN; PAM sequence: TTA
atagctttcgccctttcaaa

SEQ ID NO: 387568 - DNA, 20 bp, Artificial Sequence
  Description of Artificial Sequence: Synthetic oligonucleotide
  Target: LAMA2; (+) strand; PAM type: YTN; PAM sequence: CTT
tcgccctttcaaaaatactc

SEQ ID NO: 387569 - DNA, 20 bp, Artificial Sequence
  Description of Artificial Sequence: Synthetic oligonucleotide
  Target: LAMA2; (+) strand; PAM type: YTN; PAM sequence: TTT
cgccctttcaaaaatactca

SEQ ID NO: 387570 - DNA, 20 bp, Artificial Sequence
  Description of Artificial Sequence: Synthetic oligonucleotide
  Target: LAMA2; (+) strand; PAM type: YTN; PAM sequence: TTC
gccctttcaaaaatactcag

SEQ ID NO: 387571 - DNA, 20 bp, Artificial Sequence
  Description of Artificial Sequence: Synthetic oligonucleotide
  Target: LAMA2; (+) strand; PAM type: YTN; PAM sequence: CTT
tcaaaaatactcagtgtcct

SEQ ID NO: 387572 - DNA, 20 bp, Artificial Sequence
  Description of Artificial Sequence: Synthetic oligonucleotide
  Target: LAMA2; (+) strand; PAM type: YTN; PAM sequence: TTT
caaaaatactcagtgtcctc

SEQ ID NO: 387573 - DNA, 20 bp, Artificial Sequence
  Description of Artificial Sequence: Synthetic oligonucleotide
  Target: LAMA2; (+) strand; PAM type: YTN; PAM sequence: TTC
aaaaatactcagtgtcctca

SEQ ID NO: 387574 - DNA, 20 bp, Artificial Sequence
  Description of Artificial Sequence: Synthetic oligonucleotide
  Target: LAMA2; (+) strand; PAM type: YTN; PAM sequence: CTC
agtgtcctcattttagcttc

SEQ ID NO: 387575 - DNA, 20 bp, Artificial Sequence
  Description of Artificial Sequence: Synthetic oligonucleotide
  Target: LAMA2; (+) strand; PAM type: YTN; PAM sequence: CTC
attttagcttcagcttcttt

SEQ ID NO: 387576 - DNA, 20 bp, Artificial Sequence
  Description of Artificial Sequence: Synthetic oligonucleotide
  Target: LAMA2; (+) strand; PAM type: YTN; PAM sequence: TTT
tagcttcagcttctttggtt

SEQ ID NO: 387577 - DNA, 20 bp, Artificial Sequence
  Description of Artificial Sequence: Synthetic oligonucleotide
  Target: LAMA2; (+) strand; PAM type: YTN; PAM sequence: TTT
agcttcagcttctttggttt

SEQ ID NO: 387578 - DNA, 20 bp, Artificial Sequence
  Description of Artificial Sequence: Synthetic oligonucleotide
  Target: LAMA2; (+) strand; PAM type: YTN; PAM sequence: TTA
gcttcagcttctttggtttg

SEQ ID NO: 387579 - DNA, 20 bp, Artificial Sequence
  Description of Artificial Sequence: Synthetic oligonucleotide
  Target: LAMA2; (+) strand; PAM type: YTN; PAM sequence: CTT
cagcttctttggtttggatg

SEQ ID NO: 387580 - DNA, 20 bp, Artificial Sequence
  Description of Artificial Sequence: Synthetic oligonucleotide
  Target: LAMA2; (+) strand; PAM type: YTN; PAM sequence: TTC
agcttctttggtttggatgc

SEQ ID NO: 387581 - DNA, 20 bp, Artificial Sequence
  Description of Artificial Sequence: Synthetic oligonucleotide
  Target: LAMA2; (+) strand; PAM type: YTN; PAM sequence: CTT
ctttggtttggatgcagtgt

SEQ ID NO: 387582 - DNA, 20 bp, Artificial Sequence
  Description of Artificial Sequence: Synthetic oligonucleotide
  Target: LAMA2; (+) strand; PAM type: YTN; PAM sequence: TTC
tttggtttggatgcagtgtg

SEQ ID NO: 387583 - DNA, 20 bp, Artificial Sequence
  Description of Artificial Sequence: Synthetic oligonucleotide
  Target: LAMA2; (+) strand; PAM type: YTN; PAM sequence: CTT
tggtttggatgcagtgtgtg

SEQ ID NO: 387584 - DNA, 20 bp, Artificial Sequence
  Description of Artificial Sequence: Synthetic oligonucleotide
  Target: LAMA2; (+) strand; PAM type: YTN; PAM sequence: TTT
ggtttggatgcagtgtgtga

SEQ ID NO: 387585 - DNA, 20 bp, Artificial Sequence
  Description of Artificial Sequence: Synthetic oligonucleotide
  Target: LAMA2; (+) strand; PAM type: YTN; PAM sequence: TTG
gtttggatgcagtgtgtgat

SEQ ID NO: 387586 - DNA, 20 bp, Artificial Sequence
  Description of Artificial Sequence: Synthetic oligonucleotide
  Target: LAMA2; (+) strand; PAM type: YTN; PAM sequence: TTT
ggatgcagtgtgtgattttt

SEQ ID NO: 387587 - DNA, 20 bp, Artificial Sequence
  Description of Artificial Sequence: Synthetic oligonucleotide
  Target: LAMA2; (+) strand; PAM type: YTN; PAM sequence: TTG
gatgcagtgtgtgatttttt

SEQ ID NO: 387588 - DNA, 20 bp, Artificial Sequence
  Description of Artificial Sequence: Synthetic oligonucleotide
  Target: LAMA2; (+) strand; PAM type: YTN; PAM sequence: TTT
tttttgtgacagtaagccag

SEQ ID NO: 387589 - DNA, 20 bp, Artificial Sequence
  Description of Artificial Sequence: Synthetic oligonucleotide
  Target: LAMA2; (+) strand; PAM type: YTN; PAM sequence: TTT
ttttgtgacagtaagccagt

SEQ ID NO: 387590 - DNA, 20 bp, Artificial Sequence
  Description of Artificial Sequence: Synthetic oligonucleotide
  Target: LAMA2; (+) strand; PAM type: YTN; PAM sequence: TTT
tttgtgacagtaagccagta

SEQ ID NO: 387591 - DNA, 20 bp, Artificial Sequence
  Description of Artificial Sequence: Synthetic oligonucleotide
  Target: LAMA2; (+) strand; PAM type: YTN; PAM sequence: TTT
ttgtgacagtaagccagtag

SEQ ID NO: 387592 - DNA, 20 bp, Artificial Sequence
  Description of Artificial Sequence: Synthetic oligonucleotide
  Target: LAMA2; (+) strand; PAM type: YTN; PAM sequence: TTT
tgtgacagtaagccagtagt

SEQ ID NO: 387593 - DNA, 20 bp, Artificial Sequence
  Description of Artificial Sequence: Synthetic oligonucleotide
  Target: LAMA2; (+) strand; PAM type: YTN; PAM sequence: TTT
gtgacagtaagccagtagtt

SEQ ID NO: 387594 - DNA, 20 bp, Artificial Sequence
  Description of Artificial Sequence: Synthetic oligonucleotide
  Target: LAMA2; (+) strand; PAM type: YTN; PAM sequence: TTG
tgacagtaagccagtagtta

SEQ ID NO: 387595 - DNA, 20 bp, Artificial Sequence
  Description of Artificial Sequence: Synthetic oligonucleotide
  Target: LAMA2; (+) strand; PAM type: YTN; PAM sequence: TTA
ttatgcatggggaatcctgg

SEQ ID NO: 387596 - DNA, 20 bp, Artificial Sequence
  Description of Artificial Sequence: Synthetic oligonucleotide
  Target: LAMA2; (+) strand; PAM type: YTN; PAM sequence: TTA
tgcatggggaatcctggtag

SEQ ID NO: 387597 - DNA, 20 bp, Artificial Sequence
  Description of Artificial Sequence: Synthetic oligonucleotide
  Target: LAMA2; (+) strand; PAM type: YTN; PAM sequence: CTG
gtagaaatgcagtattttgt

SEQ ID NO: 387598 - DNA, 20 bp, Artificial Sequence
  Description of Artificial Sequence: Synthetic oligonucleotide
  Target: LAMA2; (+) strand; PAM type: YTN; PAM sequence: TTT
tgtgctaattgctaacagaa

SEQ ID NO: 387599 - DNA, 20 bp, Artificial Sequence
  Description of Artificial Sequence: Synthetic oligonucleotide
  Target: LAMA2; (+) strand; PAM type: YTN; PAM sequence: TTT
gtgctaattgctaacagaaa

SEQ ID NO: 387600 - DNA, 20 bp, Artificial Sequence
  Description of Artificial Sequence: Synthetic oligonucleotide
  Target: LAMA2; (+) strand; PAM type: YTN; PAM sequence: TTG
tgctaattgctaacagaaag

SEQ ID NO: 387601 - DNA, 20 bp, Artificial Sequence
  Description of Artificial Sequence: Synthetic oligonucleotide
  Target: LAMA2; (+) strand; PAM type: YTN; PAM sequence: CTA
attgctaacagaaagatctg

SEQ ID NO: 387602 - DNA, 20 bp, Artificial Sequence
  Description of Artificial Sequence: Synthetic oligonucleotide
  Target: LAMA2; (+) strand; PAM type: YTN; PAM sequence: TTG
ctaacagaaagatctgtaat

SEQ ID NO: 387603 - DNA, 20 bp, Artificial Sequence
  Description of Artificial Sequence: Synthetic oligonucleotide
  Target: LAMA2; (+) strand; PAM type: YTN; PAM sequence: CTA
acagaaagatctgtaatact

SEQ ID NO: 387604 - DNA, 20 bp, Artificial Sequence
  Description of Artificial Sequence: Synthetic oligonucleotide
  Target: LAMA2; (+) strand; PAM type: YTN; PAM sequence: CTG
taatactggctgcatgattt

SEQ ID NO: 387605 - DNA, 20 bp, Artificial Sequence
  Description of Artificial Sequence: Synthetic oligonucleotide
  Target: LAMA2; (+) strand; PAM type: YTN; PAM sequence: CTG
gctgcatgatttgcccctta

SEQ ID NO: 387606 - DNA, 20 bp, Artificial Sequence
  Description of Artificial Sequence: Synthetic oligonucleotide
  Target: LAMA2; (+) strand; PAM type: YTN; PAM sequence: CTG
catgatttgccccttacatg

SEQ ID NO: 387607 - DNA, 20 bp, Artificial Sequence
  Description of Artificial Sequence: Synthetic oligonucleotide
  Target: LAMA2; (+) strand; PAM type: YTN; PAM sequence: TTT
gccccttacatgtgcccagc

SEQ ID NO: 387608 - DNA, 20 bp, Artificial Sequence
  Description of Artificial Sequence: Synthetic oligonucleotide
  Target: LAMA2; (+) strand; PAM type: YTN; PAM sequence: TTG
ccccttacatgtgcccagcc

SEQ ID NO: 387609 - DNA, 20 bp, Artificial Sequence
  Description of Artificial Sequence: Synthetic oligonucleotide
  Target: LAMA2; (+) strand; PAM type: YTN; PAM sequence: CTT
acatgtgcccagccataaca

SEQ ID NO: 387610 - DNA, 20 bp, Artificial Sequence
  Description of Artificial Sequence: Synthetic oligonucleotide
  Target: LAMA2; (+) strand; PAM type: YTN; PAM sequence: TTA
catgtgcccagccataacaa

SEQ ID NO: 387611 - DNA, 20 bp, Artificial Sequence
  Description of Artificial Sequence: Synthetic oligonucleotide
  Target: LAMA2; (+) strand; PAM type: YTN; PAM sequence: CTG
aatttagtactgtgtttgtt

SEQ ID NO: 387612 - DNA, 20 bp, Artificial Sequence
  Description of Artificial Sequence: Synthetic oligonucleotide
  Target: LAMA2; (+) strand; PAM type: YTN; PAM sequence: TTT
agtactgtgtttgttaatat

SEQ ID NO: 387613 - DNA, 20 bp, Artificial Sequence
  Description of Artificial Sequence: Synthetic oligonucleotide
  Target: LAMA2; (+) strand; PAM type: YTN; PAM sequence: TTA
gtactgtgtttgttaatatt

SEQ ID NO: 387614 - DNA, 20 bp, Artificial Sequence
  Description of Artificial Sequence: Synthetic oligonucleotide
  Target: LAMA2; (+) strand; PAM type: YTN; PAM sequence: CTG
tgtttgttaatattagacac

SEQ ID NO: 387615 - DNA, 20 bp, Artificial Sequence
  Description of Artificial Sequence: Synthetic oligonucleotide
  Target: LAMA2; (+) strand; PAM type: YTN; PAM sequence: TTT
gttaatattagacacaaatt

SEQ ID NO: 387616 - DNA, 20 bp, Artificial Sequence
  Description of Artificial Sequence: Synthetic oligonucleotide
  Target: LAMA2; (+) strand; PAM type: YTN; PAM sequence: TTG
ttaatattagacacaaattt

SEQ ID NO: 387617 - DNA, 20 bp, Artificial Sequence
  Description of Artificial Sequence: Synthetic oligonucleotide
  Target: LAMA2; (+) strand; PAM type: YTN; PAM sequence: TTA
atattagacacaaatttatc

SEQ ID NO: 387618 - DNA, 20 bp, Artificial Sequence
  Description of Artificial Sequence: Synthetic oligonucleotide
  Target: LAMA2; (+) strand; PAM type: YTN; PAM sequence: TTA
gacacaaatttatcctgaca

SEQ ID NO: 387619 - DNA, 20 bp, Artificial Sequence
  Description of Artificial Sequence: Synthetic oligonucleotide
  Target: LAMA2; (+) strand; PAM type: YTN; PAM sequence: TTT
atcctgacacttttataggc

SEQ ID NO: 387620 - DNA, 20 bp, Artificial Sequence
  Description of Artificial Sequence: Synthetic oligonucleotide
  Target: LAMA2; (+) strand; PAM type: YTN; PAM sequence: TTA
tcctgacacttttataggca

SEQ ID NO: 387621 - DNA, 20 bp, Artificial Sequence
  Description of Artificial Sequence: Synthetic oligonucleotide
  Target: LAMA2; (+) strand; PAM type: YTN; PAM sequence: CTG
acacttttataggcaaagcc

SEQ ID NO: 387622 - DNA, 20 bp, Artificial Sequence
  Description of Artificial Sequence: Synthetic oligonucleotide
  Target: LAMA2; (+) strand; PAM type: YTN; PAM sequence: CTT
ttataggcaaagcctcggaa

SEQ ID NO: 387623 - DNA, 20 bp, Artificial Sequence
  Description of Artificial Sequence: Synthetic oligonucleotide
  Target: LAMA2; (+) strand; PAM type: YTN; PAM sequence: TTT
tataggcaaagcctcggaaa

SEQ ID NO: 387624 - DNA, 20 bp, Artificial Sequence
  Description of Artificial Sequence: Synthetic oligonucleotide
  Target: LAMA2; (+) strand; PAM type: YTN; PAM sequence: TTT
ataggcaaagcctcggaaac

SEQ ID NO: 387625 - DNA, 20 bp, Artificial Sequence
  Description of Artificial Sequence: Synthetic oligonucleotide
  Target: LAMA2; (+) strand; PAM type: YTN; PAM sequence: TTA
taggcaaagcctcggaaaca

SEQ ID NO: 387626 - DNA, 20 bp, Artificial Sequence
  Description of Artificial Sequence: Synthetic oligonucleotide
  Target: LAMA2; (+) strand; PAM type: YTN; PAM sequence: CTC
ggaaacatttagtcatgtaa

SEQ ID NO: 387627 - DNA, 20 bp, Artificial Sequence
  Description of Artificial Sequence: Synthetic oligonucleotide
  Target: LAMA2; (+) strand; PAM type: YTN; PAM sequence: TTT
agtcatgtaaaatataatca

SEQ ID NO: 387628 - DNA, 20 bp, Artificial Sequence
  Description of Artificial Sequence: Synthetic oligonucleotide
  Target: LAMA2; (+) strand; PAM type: YTN; PAM sequence: TTA
gtcatgtaaaatataatcat

SEQ ID NO: 387629 - DNA, 20 bp, Artificial Sequence
  Description of Artificial Sequence: Synthetic oligonucleotide
  Target: LAMA2; (+) strand; PAM type: YTN; PAM sequence: CTT
gaaatatttgcttttgctcc

SEQ ID NO: 387630 - DNA, 20 bp, Artificial Sequence
  Description of Artificial Sequence: Synthetic oligonucleotide
  Target: LAMA2; (+) strand; PAM type: YTN; PAM sequence: TTG
aaatatttgcttttgctcct

SEQ ID NO: 387631 - DNA, 20 bp, Artificial Sequence
  Description of Artificial Sequence: Synthetic oligonucleotide
  Target: LAMA2; (+) strand; PAM type: YTN; PAM sequence: TTT
gcttttgctcctgtgcattt

SEQ ID NO: 387632 - DNA, 20 bp, Artificial Sequence
  Description of Artificial Sequence: Synthetic oligonucleotide
  Target: LAMA2; (+) strand; PAM type: YTN; PAM sequence: TTG
cttttgctcctgtgcatttt

SEQ ID NO: 387633 - DNA, 20 bp, Artificial Sequence
  Description of Artificial Sequence: Synthetic oligonucleotide
  Target: LAMA2; (+) strand; PAM type: YTN; PAM sequence: CTT
ttgctcctgtgcattttagg

SEQ ID NO: 387634 - DNA, 20 bp, Artificial Sequence
  Description of Artificial Sequence: Synthetic oligonucleotide
  Target: LAMA2; (+) strand; PAM type: YTN; PAM sequence: TTT
tgctcctgtgcattttaggc

SEQ ID NO: 387635 - DNA, 20 bp, Artificial Sequence
  Description of Artificial Sequence: Synthetic oligonucleotide
  Target: LAMA2; (+) strand; PAM type: YTN; PAM sequence: TTT
gctcctgtgcattttaggca

SEQ ID NO: 387636 - DNA, 20 bp, Artificial Sequence
  Description of Artificial Sequence: Synthetic oligonucleotide
  Target: LAMA2; (+) strand; PAM type: YTN; PAM sequence: TTG
ctcctgtgcattttaggcag

SEQ ID NO: 387637 - DNA, 20 bp, Artificial Sequence
  Description of Artificial Sequence: Synthetic oligonucleotide
  Target: LAMA2; (+) strand; PAM type: YTN; PAM sequence: CTC
ctgtgcattttaggcaggat

SEQ ID NO: 387638 - DNA, 20 bp, Artificial Sequence
  Description of Artificial Sequence: Synthetic oligonucleotide
  Target: LAMA2; (+) strand; PAM type: YTN; PAM sequence: CTG
tgcattttaggcaggatttc

SEQ ID NO: 387639 - DNA, 20 bp, Artificial Sequence
  Description of Artificial Sequence: Synthetic oligonucleotide
  Target: LAMA2; (+) strand; PAM type: YTN; PAM sequence: TTT
taggcaggatttcactttgt

SEQ ID NO: 387640 - DNA, 20 bp, Artificial Sequence
  Description of Artificial Sequence: Synthetic oligonucleotide
  Target: LAMA2; (+) strand; PAM type: YTN; PAM sequence: TTT
aggcaggatttcactttgta

SEQ ID NO: 387641 - DNA, 20 bp, Artificial Sequence
  Description of Artificial Sequence: Synthetic oligonucleotide
  Target: LAMA2; (+) strand; PAM type: YTN; PAM sequence: TTA
ggcaggatttcactttgtaa

SEQ ID NO: 387642 - DNA, 20 bp, Artificial Sequence
  Description of Artificial Sequence: Synthetic oligonucleotide
  Target: LAMA2; (+) strand; PAM type: YTN; PAM sequence: TTT
cactttgtaaccttattagt

SEQ ID NO: 387643 - DNA, 20 bp, Artificial Sequence
  Description of Artificial Sequence: Synthetic oligonucleotide
  Target: LAMA2; (+) strand; PAM type: YTN; PAM sequence: TTC
actttgtaaccttattagta

SEQ ID NO: 387644 - DNA, 20 bp, Artificial Sequence
  Description of Artificial Sequence: Synthetic oligonucleotide
  Target: LAMA2; (+) strand; PAM type: YTN; PAM sequence: CTT
tgtaaccttattagtattgc

SEQ ID NO: 387645 - DNA, 20 bp, Artificial Sequence
  Description of Artificial Sequence: Synthetic oligonucleotide
  Target: LAMA2; (+) strand; PAM type: YTN; PAM sequence: TTT
gtaaccttattagtattgct

SEQ ID NO: 387646 - DNA, 20 bp, Artificial Sequence
  Description of Artificial Sequence: Synthetic oligonucleotide
  Target: LAMA2; (+) strand; PAM type: YTN; PAM sequence: TTG
taaccttattagtattgctg

SEQ ID NO: 387647 - DNA, 20 bp, Artificial Sequence
  Description of Artificial Sequence: Synthetic oligonucleotide
  Target: LAMA2; (+) strand; PAM type: YTN; PAM sequence: CTT
attagtattgctgaatttgg

SEQ ID NO: 387648 - DNA, 20 bp, Artificial Sequence
  Description of Artificial Sequence: Synthetic oligonucleotide
  Target: LAMA2; (+) strand; PAM type: YTN; PAM sequence: TTA
ttagtattgctgaatttgga

SEQ ID NO: 387649 - DNA, 20 bp, Artificial Sequence
  Description of Artificial Sequence: Synthetic oligonucleotide
  Target: LAMA2; (+) strand; PAM type: YTN; PAM sequence: TTA
gtattgctgaatttggagaa

SEQ ID NO: 387650 - DNA, 20 bp, Artificial Sequence
  Description of Artificial Sequence: Synthetic oligonucleotide
  Target: LAMA2; (+) strand; PAM type: YTN; PAM sequence: TTG
ctgaatttggagaatggttt

SEQ ID NO: 387651 - DNA, 20 bp, Artificial Sequence
  Description of Artificial Sequence: Synthetic oligonucleotide
  Target: LAMA2; (+) strand; PAM type: YTN; PAM sequence: CTG
aatttggagaatggtttgga

SEQ ID NO: 387652 - DNA, 20 bp, Artificial Sequence
  Description of Artificial Sequence: Synthetic oligonucleotide
  Target: LAMA2; (+) strand; PAM type: YTN; PAM sequence: TTT
ggagaatggtttggaaaggt

SEQ ID NO: 387653 - DNA, 20 bp, Artificial Sequence
  Description of Artificial Sequence: Synthetic oligonucleotide
  Target: LAMA2; (+) strand; PAM type: YTN; PAM sequence: TTG
gagaatggtttggaaaggtt

SEQ ID NO: 387654 - DNA, 20 bp, Artificial Sequence
  Description of Artificial Sequence: Synthetic oligonucleotide
  Target: LAMA2; (+) strand; PAM type: YTN; PAM sequence: TTT
ggaaaggttctttgaggtcc

SEQ ID NO: 387655 - DNA, 20 bp, Artificial Sequence
  Description of Artificial Sequence: Synthetic oligonucleotide
  Target: LAMA2; (+) strand; PAM type: YTN; PAM sequence: TTG
gaaaggttctttgaggtcct

SEQ ID NO: 387656 - DNA, 20 bp, Artificial Sequence
  Description of Artificial Sequence: Synthetic oligonucleotide
  Target: LAMA2; (+) strand; PAM type: YTN; PAM sequence: TTC
tttgaggtcctgattgtaag

SEQ ID NO: 387657 - DNA, 20 bp, Artificial Sequence
  Description of Artificial Sequence: Synthetic oligonucleotide
  Target: LAMA2; (+) strand; PAM type: YTN; PAM sequence: CTT
tgaggtcctgattgtaagat

SEQ ID NO: 387658 - DNA, 20 bp, Artificial Sequence
  Description of Artificial Sequence: Synthetic oligonucleotide
  Target: LAMA2; (+) strand; PAM type: YTN; PAM sequence: TTT
gaggtcctgattgtaagata

SEQ ID NO: 387659 - DNA, 20 bp, Artificial Sequence
  Description of Artificial Sequence: Synthetic oligonucleotide
  Target: LAMA2; (+) strand; PAM type: YTN; PAM sequence: TTG
aggtcctgattgtaagatag

SEQ ID NO: 387660 - DNA, 20 bp, Artificial Sequence
  Description of Artificial Sequence: Synthetic oligonucleotide
  Target: LAMA2; (+) strand; PAM type: YTN; PAM sequence: CTG
attgtaagataggtgttcat

SEQ ID NO: 387661 - DNA, 20 bp, Artificial Sequence
  Description of Artificial Sequence: Synthetic oligonucleotide
  Target: LAMA2; (+) strand; PAM type: YTN; PAM sequence: TTG
taagataggtgttcatttac

SEQ ID NO: 387662 - DNA, 20 bp, Artificial Sequence
  Description of Artificial Sequence: Synthetic oligonucleotide
  Target: LAMA2; (+) strand; PAM type: YTN; PAM sequence: TTC
atttacactgagccattact

SEQ ID NO: 387663 - DNA, 20 bp, Artificial Sequence
  Description of Artificial Sequence: Synthetic oligonucleotide
  Target: LAMA2; (+) strand; PAM type: YTN; PAM sequence: TTT
acactgagccattactgcac

SEQ ID NO: 387664 - DNA, 20 bp, Artificial Sequence
  Description of Artificial Sequence: Synthetic oligonucleotide
  Target: LAMA2; (+) strand; PAM type: YTN; PAM sequence: TTA
cactgagccattactgcact

SEQ ID NO: 387665 - DNA, 20 bp, Artificial Sequence
  Description of Artificial Sequence: Synthetic oligonucleotide
  Target: LAMA2; (+) strand; PAM type: YTN; PAM sequence: CTG
agccattactgcactttatc

SEQ ID NO: 387666 - DNA, 20 bp, Artificial Sequence
  Description of Artificial Sequence: Synthetic oligonucleotide
  Target: LAMA2; (+) strand; PAM type: YTN; PAM sequence: TTA
ctgcactttatcaaagaaca

SEQ ID NO: 387667 - DNA, 20 bp, Artificial Sequence
  Description of Artificial Sequence: Synthetic oligonucleotide
  Target: LAMA2; (+) strand; PAM type: YTN; PAM sequence: CTG
cactttatcaaagaacagtt

SEQ ID NO: 387668 - DNA, 20 bp, Artificial Sequence
  Description of Artificial Sequence: Synthetic oligonucleotide
  Target: LAMA2; (+) strand; PAM type: YTN; PAM sequence: CTT
tatcaaagaacagttgttta

SEQ ID NO: 387669 - DNA, 20 bp, Artificial Sequence
  Description of Artificial Sequence: Synthetic oligonucleotide
  Target: LAMA2; (+) strand; PAM type: YTN; PAM sequence: TTT
atcaaagaacagttgtttac

SEQ ID NO: 387670 - DNA, 20 bp, Artificial Sequence
  Description of Artificial Sequence: Synthetic oligonucleotide
  Target: LAMA2; (+) strand; PAM type: YTN; PAM sequence: TTA
tcaaagaacagttgtttaca

SEQ ID NO: 387671 - DNA, 20 bp, Artificial Sequence
  Description of Artificial Sequence: Synthetic oligonucleotide
  Target: LAMA2; (+) strand; PAM type: YTN; PAM sequence: TTG
tttacagaatgtgaatattc

SEQ ID NO: 387672 - DNA, 20 bp, Artificial Sequence
  Description of Artificial Sequence: Synthetic oligonucleotide
  Target: LAMA2; (+) strand; PAM type: YTN; PAM sequence: TTT
acagaatgtgaatattccat

SEQ ID NO: 387673 - DNA, 20 bp, Artificial Sequence
  Description of Artificial Sequence: Synthetic oligonucleotide
  Target: LAMA2; (+) strand; PAM type: YTN; PAM sequence: TTA
cagaatgtgaatattccatg

SEQ ID NO: 387674 - DNA, 20 bp, Artificial Sequence
  Description of Artificial Sequence: Synthetic oligonucleotide
  Target: LAMA2; (+) strand; PAM type: YTN; PAM sequence: TTC
catgtctctacacactcttc

SEQ ID NO: 387675 - DNA, 20 bp, Artificial Sequence
  Description of Artificial Sequence: Synthetic oligonucleotide
  Target: LAMA2; (+) strand; PAM type: YTN; PAM sequence: CTC
tacacactcttcagattttc

SEQ ID NO: 387676 - DNA, 20 bp, Artificial Sequence
  Description of Artificial Sequence: Synthetic oligonucleotide
  Target: LAMA2; (+) strand; PAM type: YTN; PAM sequence: CTA
cacactcttcagattttccc

SEQ ID NO: 387677 - DNA, 20 bp, Artificial Sequence
  Description of Artificial Sequence: Synthetic oligonucleotide
  Target: LAMA2; (+) strand; PAM type: YTN; PAM sequence: CTC
ttcagattttccctatgata

SEQ ID NO: 387678 - DNA, 20 bp, Artificial Sequence
  Description of Artificial Sequence: Synthetic oligonucleotide
  Target: LAMA2; (+) strand; PAM type: YTN; PAM sequence: CTT
cagattttccctatgatagt

SEQ ID NO: 387679 - DNA, 20 bp, Artificial Sequence
  Description of Artificial Sequence: Synthetic oligonucleotide
  Target: LAMA2; (+) strand; PAM type: YTN; PAM sequence: TTC
agattttccctatgatagta

SEQ ID NO: 387680 - DNA, 20 bp, Artificial Sequence
  Description of Artificial Sequence: Synthetic oligonucleotide
  Target: LAMA2; (+) strand; PAM type: YTN; PAM sequence: TTT
tccctatgatagtaaattac

SEQ ID NO: 387681 - DNA, 20 bp, Artificial Sequence
  Description of Artificial Sequence: Synthetic oligonucleotide
  Target: LAMA2; (+) strand; PAM type: YTN; PAM sequence: TTT
ccctatgatagtaaattaca

SEQ ID NO: 387682 - DNA, 20 bp, Artificial Sequence
  Description of Artificial Sequence: Synthetic oligonucleotide
  Target: LAMA2; (+) strand; PAM type: YTN; PAM sequence: TTC
cctatgatagtaaattacat

SEQ ID NO: 387683 - DNA, 20 bp, Artificial Sequence
  Description of Artificial Sequence: Synthetic oligonucleotide
  Target: LAMA2; (+) strand; PAM type: YTN; PAM sequence: CTA
tgatagtaaattacatttgg

SEQ ID NO: 387684 - DNA, 20 bp, Artificial Sequence
  Description of Artificial Sequence: Synthetic oligonucleotide
  Target: LAMA2; (+) strand; PAM type: YTN; PAM sequence: TTA
catttggttttaatttgcat

SEQ ID NO: 387685 - DNA, 20 bp, Artificial Sequence
  Description of Artificial Sequence: Synthetic oligonucleotide
  Target: LAMA2; (+) strand; PAM type: YTN; PAM sequence: TTT
ggttttaatttgcattccat

SEQ ID NO: 387686 - DNA, 20 bp, Artificial Sequence
  Description of Artificial Sequence: Synthetic oligonucleotide
  Target: LAMA2; (+) strand; PAM type: YTN; PAM sequence: TTG
gttttaatttgcattccatt

SEQ ID NO: 387687 - DNA, 20 bp, Artificial Sequence
  Description of Artificial Sequence: Synthetic oligonucleotide
  Target: LAMA2; (+) strand; PAM type: YTN; PAM sequence: TTT
taatttgcattccatttcca

SEQ ID NO: 387688 - DNA, 20 bp, Artificial Sequence
  Description of Artificial Sequence: Synthetic oligonucleotide
  Target: LAMA2; (+) strand; PAM type: YTN; PAM sequence: TTT
aatttgcattccatttccaa

SEQ ID NO: 387689 - DNA, 20 bp, Artificial Sequence
  Description of Artificial Sequence: Synthetic oligonucleotide
  Target: LAMA2; (+) strand; PAM type: YTN; PAM sequence: TTA
atttgcattccatttccaat

SEQ ID NO: 387690 - DNA, 20 bp, Artificial Sequence
  Description of Artificial Sequence: Synthetic oligonucleotide
  Target: LAMA2; (+) strand; PAM type: YTN; PAM sequence: TTT
gcattccatttccaatgttt

SEQ ID NO: 387691 - DNA, 20 bp, Artificial Sequence
  Description of Artificial Sequence: Synthetic oligonucleotide
  Target: LAMA2; (+) strand; PAM type: YTN; PAM sequence: TTG
cattccatttccaatgtttg

SEQ ID NO: 387692 - DNA, 20 bp, Artificial Sequence
  Description of Artificial Sequence: Synthetic oligonucleotide
  Target: LAMA2; (+) strand; PAM type: YTN; PAM sequence: TTC
catttccaatgtttgttgcc

SEQ ID NO: 387693 - DNA, 20 bp, Artificial Sequence
  Description of Artificial Sequence: Synthetic oligonucleotide
  Target: LAMA2; (+) strand; PAM type: YTN; PAM sequence: TTT
ccaatgtttgttgccagaca

SEQ ID NO: 387694 - DNA, 20 bp, Artificial Sequence
  Description of Artificial Sequence: Synthetic oligonucleotide
  Target: LAMA2; (+) strand; PAM type: YTN; PAM sequence: TTC
caatgtttgttgccagacac

SEQ ID NO: 387695 - DNA, 20 bp, Artificial Sequence
  Description of Artificial Sequence: Synthetic oligonucleotide
  Target: LAMA2; (+) strand; PAM type: YTN; PAM sequence: TTT
gttgccagacactttggact

SEQ ID NO: 387696 - DNA, 20 bp, Artificial Sequence
  Description of Artificial Sequence: Synthetic oligonucleotide
  Target: LAMA2; (+) strand; PAM type: YTN; PAM sequence: TTG
ttgccagacactttggactt

SEQ ID NO: 387697 - DNA, 20 bp, Artificial Sequence
  Description of Artificial Sequence: Synthetic oligonucleotide
  Target: LAMA2; (+) strand; PAM type: YTN; PAM sequence: TTG
ccagacactttggacttttt

SEQ ID NO: 387698 - DNA, 20 bp, Artificial Sequence
  Description of Artificial Sequence: Synthetic oligonucleotide
  Target: LAMA2; (+) strand; PAM type: YTN; PAM sequence: CTT
tggactttttgagggcaaat

SEQ ID NO: 387699 - DNA, 20 bp, Artificial Sequence
  Description of Artificial Sequence: Synthetic oligonucleotide
  Target: LAMA2; (+) strand; PAM type: YTN; PAM sequence: TTT
ggactttttgagggcaaata

SEQ ID NO: 387700 - DNA, 20 bp, Artificial Sequence
  Description of Artificial Sequence: Synthetic oligonucleotide
  Target: LAMA2; (+) strand; PAM type: YTN; PAM sequence: TTG
gactttttgagggcaaataa

SEQ ID NO: 387701 - DNA, 20 bp, Artificial Sequence
  Description of Artificial Sequence: Synthetic oligonucleotide
  Target: LAMA2; (+) strand; PAM type: YTN; PAM sequence: CTT
tttgagggcaaataaaagta

SEQ ID NO: 387702 - DNA, 20 bp, Artificial Sequence
  Description of Artificial Sequence: Synthetic oligonucleotide
  Target: LAMA2; (+) strand; PAM type: YTN; PAM sequence: TTT
ttgagggcaaataaaagtag

SEQ ID NO: 387703 - DNA, 20 bp, Artificial Sequence
  Description of Artificial Sequence: Synthetic oligonucleotide
  Target: LAMA2; (+) strand; PAM type: YTN; PAM sequence: TTT
tgagggcaaataaaagtagc

SEQ ID NO: 387704 - DNA, 20 bp, Artificial Sequence
  Description of Artificial Sequence: Synthetic oligonucleotide
  Target: LAMA2; (+) strand; PAM type: YTN; PAM sequence: TTT
gagggcaaataaaagtagct

SEQ ID NO: 387705 - DNA, 20 bp, Artificial Sequence
  Description of Artificial Sequence: Synthetic oligonucleotide
  Target: LAMA2; (+) strand; PAM type: YTN; PAM sequence: TTG
agggcaaataaaagtagctt

SEQ ID NO: 387706 - DNA, 20 bp, Artificial Sequence
  Description of Artificial Sequence: Synthetic oligonucleotide
  Target: LAMA2; (+) strand; PAM type: YTN; PAM sequence: CTT
ctggtgtaagtgaaatattt

SEQ ID NO: 387707 - DNA, 20 bp, Artificial Sequence
  Description of Artificial Sequence: Synthetic oligonucleotide
  Target: LAMA2; (+) strand; PAM type: YTN; PAM sequence: TTC
tggtgtaagtgaaatatttt

SEQ ID NO: 387708 - DNA, 20 bp, Artificial Sequence
  Description of Artificial Sequence: Synthetic oligonucleotide
  Target: LAMA2; (+) strand; PAM type: YTN; PAM sequence: CTG
gtgtaagtgaaatattttgt

SEQ ID NO: 387709 - DNA, 20 bp, Artificial Sequence
  Description of Artificial Sequence: Synthetic oligonucleotide
  Target: LAMA2; (+) strand; PAM type: YTN; PAM sequence: TTT
tgtgtcagaataaaatagca

SEQ ID NO: 387710 - DNA, 20 bp, Artificial Sequence
  Description of Artificial Sequence: Synthetic oligonucleotide
  Target: LAMA2; (+) strand; PAM type: YTN; PAM sequence: TTT
gtgtcagaataaaatagcaa

SEQ ID NO: 387711 - DNA, 20 bp, Artificial Sequence
  Description of Artificial Sequence: Synthetic oligonucleotide
  Target: LAMA2; (+) strand; PAM type: YTN; PAM sequence: TTG
tgtcagaataaaatagcaaa

SEQ ID NO: 387712 - DNA, 20 bp, Artificial Sequence
  Description of Artificial Sequence: Synthetic oligonucleotide
  Target: LAMA2; (+) strand; PAM type: YTN; PAM sequence: TTA
tgtaaagggcactttcccca

SEQ ID NO: 387713 - DNA, 20 bp, Artificial Sequence
  Description of Artificial Sequence: Synthetic oligonucleotide
  Target: LAMA2; (+) strand; PAM type: YTN; PAM sequence: CTT
tccccatgtgtttaccttat

SEQ ID NO: 387714 - DNA, 20 bp, Artificial Sequence
  Description of Artificial Sequence: Synthetic oligonucleotide
  Target: LAMA2; (+) strand; PAM type: YTN; PAM sequence: TTT
ccccatgtgtttaccttata

SEQ ID NO: 387715 - DNA, 20 bp, Artificial Sequence
  Description of Artificial Sequence: Synthetic oligonucleotide
  Target: LAMA2; (+) strand; PAM type: YTN; PAM sequence: TTC
cccatgtgtttaccttataa

SEQ ID NO: 387716 - DNA, 20 bp, Artificial Sequence
  Description of Artificial Sequence: Synthetic oligonucleotide
  Target: LAMA2; (+) strand; PAM type: YTN; PAM sequence: TTT
accttataacttcatgagct

SEQ ID NO: 387717 - DNA, 20 bp, Artificial Sequence
  Description of Artificial Sequence: Synthetic oligonucleotide
  Target: LAMA2; (+) strand; PAM type: YTN; PAM sequence: TTA
ccttataacttcatgagcta

SEQ ID NO: 387718 - DNA, 20 bp, Artificial Sequence
  Description of Artificial Sequence: Synthetic oligonucleotide
  Target: LAMA2; (+) strand; PAM type: YTN; PAM sequence: CTT
ataacttcatgagctagact

SEQ ID NO: 387719 - DNA, 20 bp, Artificial Sequence
  Description of Artificial Sequence: Synthetic oligonucleotide
  Target: LAMA2; (+) strand; PAM type: YTN; PAM sequence: TTA
taacttcatgagctagactt

SEQ ID NO: 387720 - DNA, 20 bp, Artificial Sequence
  Description of Artificial Sequence: Synthetic oligonucleotide
  Target: LAMA2; (+) strand; PAM type: YTN; PAM sequence: CTT
catgagctagacttgtacag

SEQ ID NO: 387721 - DNA, 20 bp, Artificial Sequence
  Description of Artificial Sequence: Synthetic oligonucleotide
  Target: LAMA2; (+) strand; PAM type: YTN; PAM sequence: TTC
atgagctagacttgtacaga

SEQ ID NO: 387722 - DNA, 20 bp, Artificial Sequence
  Description of Artificial Sequence: Synthetic oligonucleotide
  Target: LAMA2; (+) strand; PAM type: YTN; PAM sequence: CTA
gacttgtacagaagctttga

SEQ ID NO: 387723 - DNA, 20 bp, Artificial Sequence
  Description of Artificial Sequence: Synthetic oligonucleotide
  Target: LAMA2; (+) strand; PAM type: YTN; PAM sequence: CTT
gtacagaagctttgaaaaaa

SEQ ID NO: 387724 - DNA, 20 bp, Artificial Sequence
  Description of Artificial Sequence: Synthetic oligonucleotide
  Target: LAMA2; (+) strand; PAM type: YTN; PAM sequence: TTG
tacagaagctttgaaaaaat

SEQ ID NO: 387725 - DNA, 20 bp, Artificial Sequence
  Description of Artificial Sequence: Synthetic oligonucleotide
  Target: LAMA2; (+) strand; PAM type: YTN; PAM sequence: CTT
tgaaaaaatccccatggctg

SEQ ID NO: 387726 - DNA, 20 bp, Artificial Sequence
  Description of Artificial Sequence: Synthetic oligonucleotide
  Target: LAMA2; (+) strand; PAM type: YTN; PAM sequence: TTT
gaaaaaatccccatggctgt

SEQ ID NO: 387727 - DNA, 20 bp, Artificial Sequence
  Description of Artificial Sequence: Synthetic oligonucleotide
  Target: LAMA2; (+) strand; PAM type: YTN; PAM sequence: TTG
aaaaaatccccatggctgtc

SEQ ID NO: 387728 - DNA, 20 bp, Artificial Sequence
  Description of Artificial Sequence: Synthetic oligonucleotide
  Target: LAMA2; (+) strand; PAM type: YTN; PAM sequence: CTG
tcatattcataagtctctct

SEQ ID NO: 387729 - DNA, 20 bp, Artificial Sequence
  Description of Artificial Sequence: Synthetic oligonucleotide
  Target: LAMA2; (+) strand; PAM type: YTN; PAM sequence: TTC
ataagtctctctgacccatt

SEQ ID NO: 387730 - DNA, 20 bp, Artificial Sequence
  Description of Artificial Sequence: Synthetic oligonucleotide
  Target: LAMA2; (+) strand; PAM type: YTN; PAM sequence: CTC
tctgacccattcagacagat

SEQ ID NO: 387731 - DNA, 20 bp, Artificial Sequence
  Description of Artificial Sequence: Synthetic oligonucleotide
  Target: LAMA2; (+) strand; PAM type: YTN; PAM sequence: CTC
tgacccattcagacagatgt

SEQ ID NO: 387732 - DNA, 20 bp, Artificial Sequence
  Description of Artificial Sequence: Synthetic oligonucleotide
  Target: LAMA2; (+) strand; PAM type: YTN; PAM sequence: CTG
acccattcagacagatgtta

SEQ ID NO: 387733 - DNA, 20 bp, Artificial Sequence
  Description of Artificial Sequence: Synthetic oligonucleotide
  Target: LAMA2; (+) strand; PAM type: YTN; PAM sequence: TTC
agacagatgttagtatattg

SEQ ID NO: 387734 - DNA, 20 bp, Artificial Sequence
  Description of Artificial Sequence: Synthetic oligonucleotide
  Target: LAMA2; (+) strand; PAM type: YTN; PAM sequence: TTA
gtatattgcttggagcgtac

SEQ ID NO: 387735 - DNA, 20 bp, Artificial Sequence
  Description of Artificial Sequence: Synthetic oligonucleotide
  Target: LAMA2; (+) strand; PAM type: YTN; PAM sequence: TTG
cttggagcgtactataaaac

SEQ ID NO: 387736 - DNA, 20 bp, Artificial Sequence
  Description of Artificial Sequence: Synthetic oligonucleotide
  Target: LAMA2; (+) strand; PAM type: YTN; PAM sequence: CTT
ggagcgtactataaaactta

SEQ ID NO: 387737 - DNA, 20 bp, Artificial Sequence
  Description of Artificial Sequence: Synthetic oligonucleotide
  Target: LAMA2; (+) strand; PAM type: YTN; PAM sequence: TTG
gagcgtactataaaacttac

SEQ ID NO: 387738 - DNA, 20 bp, Artificial Sequence
  Description of Artificial Sequence: Synthetic oligonucleotide
  Target: LAMA2; (+) strand; PAM type: YTN; PAM sequence: CTA
taaaacttacctttcactta

SEQ ID NO: 387739 - DNA, 20 bp, Artificial Sequence
  Description of Artificial Sequence: Synthetic oligonucleotide
  Target: LAMA2; (+) strand; PAM type: YTN; PAM sequence: CTT
acctttcacttatggaaatg

SEQ ID NO: 387740 - DNA, 20 bp, Artificial Sequence
  Description of Artificial Sequence: Synthetic oligonucleotide
  Target: LAMA2; (+) strand; PAM type: YTN; PAM sequence: TTA
cctttcacttatggaaatgt

SEQ ID NO: 387741 - DNA, 20 bp, Artificial Sequence
  Description of Artificial Sequence: Synthetic oligonucleotide
  Target: LAMA2; (+) strand; PAM type: YTN; PAM sequence: CTT
tcacttatggaaatgtgctt

SEQ ID NO: 387742 - DNA, 20 bp, Artificial Sequence
  Description of Artificial Sequence: Synthetic oligonucleotide
  Target: LAMA2; (+) strand; PAM type: YTN; PAM sequence: TTT
cacttatggaaatgtgcttg

SEQ ID NO: 387743 - DNA, 20 bp, Artificial Sequence
  Description of Artificial Sequence: Synthetic oligonucleotide
  Target: LAMA2; (+) strand; PAM type: YTN; PAM sequence: TTC
acttatggaaatgtgcttgt

SEQ ID NO: 387744 - DNA, 20 bp, Artificial Sequence
  Description of Artificial Sequence: Synthetic oligonucleotide
  Target: LAMA2; (+) strand; PAM type: YTN; PAM sequence: CTT
atggaaatgtgcttgtactt

SEQ ID NO: 387745 - DNA, 20 bp, Artificial Sequence
  Description of Artificial Sequence: Synthetic oligonucleotide
  Target: LAMA2; (+) strand; PAM type: YTN; PAM sequence: TTA
tggaaatgtgcttgtacttt

SEQ ID NO: 387746 - DNA, 20 bp, Artificial Sequence
  Description of Artificial Sequence: Synthetic oligonucleotide
  Target: LAMA2; (+) strand; PAM type: YTN; PAM sequence: CTT
gtactttgttccccaaaaag

SEQ ID NO: 387747 - DNA, 20 bp, Artificial Sequence
  Description of Artificial Sequence: Synthetic oligonucleotide
  Target: LAMA2; (+) strand; PAM type: YTN; PAM sequence: TTG
tactttgttccccaaaaagc

SEQ ID NO: 387748 - DNA, 20 bp, Artificial Sequence
  Description of Artificial Sequence: Synthetic oligonucleotide
  Target: LAMA2; (+) strand; PAM type: YTN; PAM sequence: CTT
tgttccccaaaaagcaaata

SEQ ID NO: 387749 - DNA, 20 bp, Artificial Sequence
  Description of Artificial Sequence: Synthetic oligonucleotide
  Target: LAMA2; (+) strand; PAM type: YTN; PAM sequence: TTT
gttccccaaaaagcaaatac

SEQ ID NO: 387750 - DNA, 20 bp, Artificial Sequence
  Description of Artificial Sequence: Synthetic oligonucleotide
  Target: LAMA2; (+) strand; PAM type: YTN; PAM sequence: TTG
ttccccaaaaagcaaataca

SEQ ID NO: 387751 - DNA, 20 bp, Artificial Sequence
  Description of Artificial Sequence: Synthetic oligonucleotide
  Target: LAMA2; (+) strand; PAM type: YTN; PAM sequence: TTC
cccaaaaagcaaatacagat

SEQ ID NO: 387752 - DNA, 20 bp, Artificial Sequence
  Description of Artificial Sequence: Synthetic oligonucleotide
  Target: LAMA2; (+) strand; PAM type: YTN; PAM sequence: CTT
tggacacagaaacataaaat

SEQ ID NO: 387753 - DNA, 20 bp, Artificial Sequence
  Description of Artificial Sequence: Synthetic oligonucleotide
  Target: LAMA2; (+) strand; PAM type: YTN; PAM sequence: TTT
ggacacagaaacataaaatg

SEQ ID NO: 387754 - DNA, 20 bp, Artificial Sequence
  Description of Artificial Sequence: Synthetic oligonucleotide
  Target: LAMA2; (+) strand; PAM type: YTN; PAM sequence: TTG
gacacagaaacataaaatgg

SEQ ID NO: 387755 - DNA, 20 bp, Artificial Sequence
  Description of Artificial Sequence: Synthetic oligonucleotide
  Target: LAMA2; (+) strand; PAM type: YTN; PAM sequence: CTT
gaaagagcaattaaatacat

SEQ ID NO: 387756 - DNA, 20 bp, Artificial Sequence
  Description of Artificial Sequence: Synthetic oligonucleotide
  Target: LAMA2; (+) strand; PAM type: YTN; PAM sequence: TTG
aaagagcaattaaatacatt

SEQ ID NO: 387757 - DNA, 20 bp, Artificial Sequence
  Description of Artificial Sequence: Synthetic oligonucleotide
  Target: LAMA2; (+) strand; PAM type: YTN; PAM sequence: TTA
aatacattttcatttcaaca

SEQ ID NO: 387758 - DNA, 20 bp, Artificial Sequence
  Description of Artificial Sequence: Synthetic oligonucleotide
  Target: LAMA2; (+) strand; PAM type: YTN; PAM sequence: TTT
tcatttcaacagctgaagat

SEQ ID NO: 387759 - DNA, 20 bp, Artificial Sequence
  Description of Artificial Sequence: Synthetic oligonucleotide
  Target: LAMA2; (+) strand; PAM type: YTN; PAM sequence: TTT
catttcaacagctgaagatg

SEQ ID NO: 387760 - DNA, 20 bp, Artificial Sequence
  Description of Artificial Sequence: Synthetic oligonucleotide
  Target: LAMA2; (+) strand; PAM type: YTN; PAM sequence: TTC
atttcaacagctgaagatga

SEQ ID NO: 387761 - DNA, 20 bp, Artificial Sequence
  Description of Artificial Sequence: Synthetic oligonucleotide
  Target: LAMA2; (+) strand; PAM type: YTN; PAM sequence: TTT
caacagctgaagatgaggaa

SEQ ID NO: 387762 - DNA, 20 bp, Artificial Sequence
  Description of Artificial Sequence: Synthetic oligonucleotide
  Target: LAMA2; (+) strand; PAM type: YTN; PAM sequence: TTC
aacagctgaagatgaggaac

SEQ ID NO: 387763 - DNA, 20 bp, Artificial Sequence
  Description of Artificial Sequence: Synthetic oligonucleotide
  Target: LAMA2; (+) strand; PAM type: YTN; PAM sequence: CTG
aagatgaggaaccaaaacag

SEQ ID NO: 387764 - DNA, 20 bp, Artificial Sequence
  Description of Artificial Sequence: Synthetic oligonucleotide
  Target: LAMA2; (+) strand; PAM type: YTN; PAM sequence: TTC
atcatgcctcttggcattct

SEQ ID NO: 387765 - DNA, 20 bp, Artificial Sequence
  Description of Artificial Sequence: Synthetic oligonucleotide
  Target: LAMA2; (+) strand; PAM type: YTN; PAM sequence: CTC
ttggcattctagtacaccgt

SEQ ID NO: 387766 - DNA, 20 bp, Artificial Sequence
  Description of Artificial Sequence: Synthetic oligonucleotide
  Target: LAMA2; (+) strand; PAM type: YTN; PAM sequence: CTT
ggcattctagtacaccgtag

SEQ ID NO: 387767 - DNA, 20 bp, Artificial Sequence
  Description of Artificial Sequence: Synthetic oligonucleotide
  Target: LAMA2; (+) strand; PAM type: YTN; PAM sequence: TTG
gcattctagtacaccgtagc

SEQ ID NO: 387768 - DNA, 20 bp, Artificial Sequence
  Description of Artificial Sequence: Synthetic oligonucleotide
  Target: LAMA2; (+) strand; PAM type: YTN; PAM sequence: TTC
tagtacaccgtagcatatta

SEQ ID NO: 387769 - DNA, 20 bp, Artificial Sequence
  Description of Artificial Sequence: Synthetic oligonucleotide
  Target: LAMA2; (+) strand; PAM type: YTN; PAM sequence: CTA
gtacaccgtagcatattaca

SEQ ID NO: 387770 - DNA, 20 bp, Artificial Sequence
  Description of Artificial Sequence: Synthetic oligonucleotide
  Target: LAMA2; (+) strand; PAM type: YTN; PAM sequence: TTA
cagtacatcagctctagttc

SEQ ID NO: 387771 - DNA, 20 bp, Artificial Sequence
  Description of Artificial Sequence: Synthetic oligonucleotide
  Target: LAMA2; (+) strand; PAM type: YTN; PAM sequence: CTC
tagttctgcattctggtccc

SEQ ID NO: 387772 - DNA, 20 bp, Artificial Sequence
  Description of Artificial Sequence: Synthetic oligonucleotide
  Target: LAMA2; (+) strand; PAM type: YTN; PAM sequence: CTA
gttctgcattctggtccctg

SEQ ID NO: 387773 - DNA, 20 bp, Artificial Sequence
  Description of Artificial Sequence: Synthetic oligonucleotide
  Target: LAMA2; (+) strand; PAM type: YTN; PAM sequence: TTC
tgcattctggtccctgattt

SEQ ID NO: 387774 - DNA, 20 bp, Artificial Sequence
  Description of Artificial Sequence: Synthetic oligonucleotide
  Target: LAMA2; (+) strand; PAM type: YTN; PAM sequence: CTG
cattctggtccctgatttat

SEQ ID NO: 387775 - DNA, 20 bp, Artificial Sequence
  Description of Artificial Sequence: Synthetic oligonucleotide
  Target: LAMA2; (+) strand; PAM type: YTN; PAM sequence: TTC
tggtccctgatttattcttg

SEQ ID NO: 387776 - DNA, 20 bp, Artificial Sequence
  Description of Artificial Sequence: Synthetic oligonucleotide
  Target: LAMA2; (+) strand; PAM type: YTN; PAM sequence: CTG
gtccctgatttattcttgta

SEQ ID NO: 387777 - DNA, 20 bp, Artificial Sequence
  Description of Artificial Sequence: Synthetic oligonucleotide
  Target: LAMA2; (+) strand; PAM type: YTN; PAM sequence: CTG
atttattcttgtatgaagta

SEQ ID NO: 387778 - DNA, 20 bp, Artificial Sequence
  Description of Artificial Sequence: Synthetic oligonucleotide
  Target: LAMA2; (+) strand; PAM type: YTN; PAM sequence: TTT
attcttgtatgaagtaaaaa

SEQ ID NO: 387779 - DNA, 20 bp, Artificial Sequence
  Description of Artificial Sequence: Synthetic oligonucleotide
  Target: LAMA2; (+) strand; PAM type: YTN; PAM sequence: TTA
ttcttgtatgaagtaaaaac

SEQ ID NO: 387780 - DNA, 20 bp, Artificial Sequence
  Description of Artificial Sequence: Synthetic oligonucleotide
  Target: LAMA2; (+) strand; PAM type: YTN; PAM sequence: TTC
ttgtatgaagtaaaaactga

SEQ ID NO: 387781 - DNA, 20 bp, Artificial Sequence
  Description of Artificial Sequence: Synthetic oligonucleotide
  Target: LAMA2; (+) strand; PAM type: YTN; PAM sequence: CTT
gtatgaagtaaaaactgaga

SEQ ID NO: 387782 - DNA, 20 bp, Artificial Sequence
  Description of Artificial Sequence: Synthetic oligonucleotide
  Target: LAMA2; (+) strand; PAM type: YTN; PAM sequence: TTG
tatgaagtaaaaactgagaa

SEQ ID NO: 387783 - DNA, 20 bp, Artificial Sequence
  Description of Artificial Sequence: Synthetic oligonucleotide
  Target: LAMA2; (+) strand; PAM type: YTN; PAM sequence: CTG
agaaaacgataggtactttc

SEQ ID NO: 387784 - DNA, 20 bp, Artificial Sequence
  Description of Artificial Sequence: Synthetic oligonucleotide
  Target: LAMA2; (+) strand; PAM type: YTN; PAM sequence: CTT
tccttggaaatttctggaac

SEQ ID NO: 387785 - DNA, 20 bp, Artificial Sequence
  Description of Artificial Sequence: Synthetic oligonucleotide
  Target: LAMA2; (+) strand; PAM type: YTN; PAM sequence: TTT
ccttggaaatttctggaacc

SEQ ID NO: 387786 - DNA, 20 bp, Artificial Sequence
  Description of Artificial Sequence: Synthetic oligonucleotide
  Target: LAMA2; (+) strand; PAM type: YTN; PAM sequence: TTC
cttggaaatttctggaacca

SEQ ID NO: 387787 - DNA, 20 bp, Artificial Sequence
  Description of Artificial Sequence: Synthetic oligonucleotide
  Target: LAMA2; (+) strand; PAM type: YTN; PAM sequence: CTT
ggaaatttctggaaccatct

SEQ ID NO: 387788 - DNA, 20 bp, Artificial Sequence
  Description of Artificial Sequence: Synthetic oligonucleotide
  Target: LAMA2; (+) strand; PAM type: YTN; PAM sequence: TTG
gaaatttctggaaccatcta

SEQ ID NO: 387789 - DNA, 20 bp, Artificial Sequence
  Description of Artificial Sequence: Synthetic oligonucleotide
  Target: LAMA2; (+) strand; PAM type: YTN; PAM sequence: TTT
ctggaaccatctagtaagga

SEQ ID NO: 387790 - DNA, 20 bp, Artificial Sequence
  Description of Artificial Sequence: Synthetic oligonucleotide
  Target: LAMA2; (+) strand; PAM type: YTN; PAM sequence: TTC
tggaaccatctagtaaggag

SEQ ID NO: 387791 - DNA, 20 bp, Artificial Sequence
  Description of Artificial Sequence: Synthetic oligonucleotide
  Target: LAMA2; (+) strand; PAM type: YTN; PAM sequence: CTG
gaaccatctagtaaggagta

SEQ ID NO: 387792 - DNA, 20 bp, Artificial Sequence
  Description of Artificial Sequence: Synthetic oligonucleotide
  Target: LAMA2; (+) strand; PAM type: YTN; PAM sequence: CTA
gtaaggagtatctagccatc

SEQ ID NO: 387793 - DNA, 20 bp, Artificial Sequence
  Description of Artificial Sequence: Synthetic oligonucleotide
  Target: LAMA2; (+) strand; PAM type: YTN; PAM sequence: CTA
gccatcctgttatcaacaaa

SEQ ID NO: 387794 - DNA, 20 bp, Artificial Sequence
  Description of Artificial Sequence: Synthetic oligonucleotide
  Target: LAMA2; (+) strand; PAM type: YTN; PAM sequence: CTG
ttatcaacaaactgattcaa

SEQ ID NO: 387795 - DNA, 20 bp, Artificial Sequence
  Description of Artificial Sequence: Synthetic oligonucleotide
  Target: LAMA2; (+) strand; PAM type: YTN; PAM sequence: TTA
tcaacaaactgattcaattc

SEQ ID NO: 387796 - DNA, 20 bp, Artificial Sequence
  Description of Artificial Sequence: Synthetic oligonucleotide
  Target: LAMA2; (+) strand; PAM type: YTN; PAM sequence: CTG
attcaattccttcttggaaa

SEQ ID NO: 387797 - DNA, 20 bp, Artificial Sequence
  Description of Artificial Sequence: Synthetic oligonucleotide
  Target: LAMA2; (+) strand; PAM type: YTN; PAM sequence: TTC
aattccttcttggaaatagg

SEQ ID NO: 387798 - DNA, 20 bp, Artificial Sequence
  Description of Artificial Sequence: Synthetic oligonucleotide
  Target: LAMA2; (+) strand; PAM type: YTN; PAM sequence: TTC
cttcttggaaataggtaggt

SEQ ID NO: 387799 - DNA, 20 bp, Artificial Sequence
  Description of Artificial Sequence: Synthetic oligonucleotide
  Target: LAMA2; (+) strand; PAM type: YTN; PAM sequence: CTT
cttggaaataggtaggttat

SEQ ID NO: 387800 - DNA, 20 bp, Artificial Sequence
  Description of Artificial Sequence: Synthetic oligonucleotide
  Target: LAMA2; (+) strand; PAM type: YTN; PAM sequence: TTC
ttggaaataggtaggttata

SEQ ID NO: 387801 - DNA, 20 bp, Artificial Sequence
  Description of Artificial Sequence: Synthetic oligonucleotide
  Target: LAMA2; (+) strand; PAM type: YTN; PAM sequence: CTT
ggaaataggtaggttatata

SEQ ID NO: 387802 - DNA, 20 bp, Artificial Sequence
  Description of Artificial Sequence: Synthetic oligonucleotide
  Target: LAMA2; (+) strand; PAM type: YTN; PAM sequence: TTG
gaaataggtaggttatatat

SEQ ID NO: 387803 - DNA, 20 bp, Artificial Sequence
  Description of Artificial Sequence: Synthetic oligonucleotide
  Target: LAMA2; (+) strand; PAM type: YTN; PAM sequence: TTA
tatattattaaataaattaa

SEQ ID NO: 387804 - DNA, 20 bp, Artificial Sequence
  Description of Artificial Sequence: Synthetic oligonucleotide
  Target: LAMA2; (+) strand; PAM type: YTN; PAM sequence: TTA
ttaaataaattaaagaataa

SEQ ID NO: 387805 - DNA, 20 bp, Artificial Sequence
  Description of Artificial Sequence: Synthetic oligonucleotide
  Target: LAMA2; (+) strand; PAM type: YTN; PAM sequence: TTA
aataaattaaagaataattt

SEQ ID NO: 387806 - DNA, 20 bp, Artificial Sequence
  Description of Artificial Sequence: Synthetic oligonucleotide
  Target: LAMA2; (+) strand; PAM type: YTN; PAM sequence: TTA
aagaataatttaatgtttgc

SEQ ID NO: 387807 - DNA, 20 bp, Artificial Sequence
  Description of Artificial Sequence: Synthetic oligonucleotide
  Target: LAMA2; (+) strand; PAM type: YTN; PAM sequence: TTT
aatgtttgctatcaaaggca

SEQ ID NO: 387808 - DNA, 20 bp, Artificial Sequence
  Description of Artificial Sequence: Synthetic oligonucleotide
  Target: LAMA2; (+) strand; PAM type: YTN; PAM sequence: TTA
atgtttgctatcaaaggcac

SEQ ID NO: 387809 - DNA, 20 bp, Artificial Sequence
  Description of Artificial Sequence: Synthetic oligonucleotide
  Target: LAMA2; (+) strand; PAM type: YTN; PAM sequence: TTT
gctatcaaaggcacacactg

SEQ ID NO: 387810 - DNA, 20 bp, Artificial Sequence
  Description of Artificial Sequence: Synthetic oligonucleotide
  Target: LAMA2; (+) strand; PAM type: YTN; PAM sequence: TTG
ctatcaaaggcacacactgc

SEQ ID NO: 387811 - DNA, 20 bp, Artificial Sequence
  Description of Artificial Sequence: Synthetic oligonucleotide
  Target: LAMA2; (+) strand; PAM type: YTN; PAM sequence: CTA
tcaaaggcacacactgccct

SEQ ID NO: 387812 - DNA, 20 bp, Artificial Sequence
  Description of Artificial Sequence: Synthetic oligonucleotide
  Target: LAMA2; (+) strand; PAM type: YTN; PAM sequence: CTG
ccctaaaaagcatggtgaaa

SEQ ID NO: 387813 - DNA, 20 bp, Artificial Sequence
  Description of Artificial Sequence: Synthetic oligonucleotide
  Target: LAMA2; (+) strand; PAM type: YTN; PAM sequence: CTA
aaaagcatggtgaaacatcc

SEQ ID NO: 387814 - DNA, 20 bp, Artificial Sequence
  Description of Artificial Sequence: Synthetic oligonucleotide
  Target: LAMA2; (+) strand; PAM type: YTN; PAM sequence: CTA
ttatcattaccaagtatctt

SEQ ID NO: 387815 - DNA, 20 bp, Artificial Sequence
  Description of Artificial Sequence: Synthetic oligonucleotide
  Target: LAMA2; (+) strand; PAM type: YTN; PAM sequence: TTA
tcattaccaagtatctttaa

SEQ ID NO: 387816 - DNA, 20 bp, Artificial Sequence
  Description of Artificial Sequence: Synthetic oligonucleotide
  Target: LAMA2; (+) strand; PAM type: YTN; PAM sequence: TTA
ccaagtatctttaaagatct

SEQ ID NO: 387817 - DNA, 20 bp, Artificial Sequence
  Description of Artificial Sequence: Synthetic oligonucleotide
  Target: LAMA2; (+) strand; PAM type: YTN; PAM sequence: CTT
taaagatcttggaggtgaaa

SEQ ID NO: 387818 - DNA, 20 bp, Artificial Sequence
  Description of Artificial Sequence: Synthetic oligonucleotide
  Target: LAMA2; (+) strand; PAM type: YTN; PAM sequence: TTT
aaagatcttggaggtgaaaa

SEQ ID NO: 387819 - DNA, 20 bp, Artificial Sequence
  Description of Artificial Sequence: Synthetic oligonucleotide
  Target: LAMA2; (+) strand; PAM type: YTN; PAM sequence: TTA
aagatcttggaggtgaaaaa

SEQ ID NO: 387820 - DNA, 20 bp, Artificial Sequence
  Description of Artificial Sequence: Synthetic oligonucleotide
  Target: LAMA2; (+) strand; PAM type: YTN; PAM sequence: CTT
ggaggtgaaaaaagagcaaa

SEQ ID NO: 387821 - DNA, 20 bp, Artificial Sequence
  Description of Artificial Sequence: Synthetic oligonucleotide
  Target: LAMA2; (+) strand; PAM type: YTN; PAM sequence: TTG
gaggtgaaaaaagagcaaat

SEQ ID NO: 387822 - DNA, 20 bp, Artificial Sequence
  Description of Artificial Sequence: Synthetic oligonucleotide
  Target: LAMA2; (+) strand; PAM type: YTN; PAM sequence: TTG
cttgcttgcatcctaggaac

SEQ ID NO: 387823 - DNA, 20 bp, Artificial Sequence
  Description of Artificial Sequence: Synthetic oligonucleotide
  Target: LAMA2; (+) strand; PAM type: YTN; PAM sequence: CTT
gcttgcatcctaggaacatc

SEQ ID NO: 387824 - DNA, 20 bp, Artificial Sequence
  Description of Artificial Sequence: Synthetic oligonucleotide
  Target: LAMA2; (+) strand; PAM type: YTN; PAM sequence: TTG
cttgcatcctaggaacatct

SEQ ID NO: 387825 - DNA, 20 bp, Artificial Sequence
  Description of Artificial Sequence: Synthetic oligonucleotide
  Target: LAMA2; (+) strand; PAM type: YTN; PAM sequence: CTT
gcatcctaggaacatctgcc

SEQ ID NO: 387826 - DNA, 20 bp, Artificial Sequence
  Description of Artificial Sequence: Synthetic oligonucleotide
  Target: LAMA2; (+) strand; PAM type: YTN; PAM sequence: TTG
catcctaggaacatctgccc

SEQ ID NO: 387827 - DNA, 20 bp, Artificial Sequence
  Description of Artificial Sequence: Synthetic oligonucleotide
  Target: LAMA2; (+) strand; PAM type: YTN; PAM sequence: CTA
ggaacatctgcccaaaatac

SEQ ID NO: 387828 - DNA, 20 bp, Artificial Sequence
  Description of Artificial Sequence: Synthetic oligonucleotide
  Target: LAMA2; (+) strand; PAM type: YTN; PAM sequence: CTG
cccaaaatacatcttcacta

SEQ ID NO: 387829 - DNA, 20 bp, Artificial Sequence
  Description of Artificial Sequence: Synthetic oligonucleotide
  Target: LAMA2; (+) strand; PAM type: YTN; PAM sequence: CTT
cactagaggtcaaatggaac

SEQ ID NO: 387830 - DNA, 20 bp, Artificial Sequence
  Description of Artificial Sequence: Synthetic oligonucleotide
  Target: LAMA2; (+) strand; PAM type: YTN; PAM sequence: TTC
actagaggtcaaatggaact

SEQ ID NO: 387831 - DNA, 20 bp, Artificial Sequence
  Description of Artificial Sequence: Synthetic oligonucleotide
  Target: LAMA2; (+) strand; PAM type: YTN; PAM sequence: CTA
gaggtcaaatggaactttta

SEQ ID NO: 387832 - DNA, 20 bp, Artificial Sequence
  Description of Artificial Sequence: Synthetic oligonucleotide
  Target: LAMA2; (+) strand; PAM type: YTN; PAM sequence: CTT
ttaaaacaatgatgaacttg

SEQ ID NO: 387833 - DNA, 20 bp, Artificial Sequence
  Description of Artificial Sequence: Synthetic oligonucleotide
  Target: LAMA2; (+) strand; PAM type: YTN; PAM sequence: TTT
taaaacaatgatgaacttgg

SEQ ID NO: 387834 - DNA, 20 bp, Artificial Sequence
  Description of Artificial Sequence: Synthetic oligonucleotide
  Target: LAMA2; (+) strand; PAM type: YTN; PAM sequence: TTT
aaaacaatgatgaacttggg

SEQ ID NO: 387835 - DNA, 20 bp, Artificial Sequence
  Description of Artificial Sequence: Synthetic oligonucleotide
  Target: LAMA2; (+) strand; PAM type: YTN; PAM sequence: TTA
aaacaatgatgaacttgggc

SEQ ID NO: 387836 - DNA, 20 bp, Artificial Sequence
  Description of Artificial Sequence: Synthetic oligonucleotide
  Target: LAMA2; (+) strand; PAM type: YTN; PAM sequence: CTT
gggctcagtgagagaagaac

SEQ ID NO: 387837 - DNA, 20 bp, Artificial Sequence
  Description of Artificial Sequence: Synthetic oligonucleotide
  Target: LAMA2; (+) strand; PAM type: YTN; PAM sequence: TTG
ggctcagtgagagaagaacc

SEQ ID NO: 387838 - DNA, 20 bp, Artificial Sequence
  Description of Artificial Sequence: Synthetic oligonucleotide
  Target: LAMA2; (+) strand; PAM type: YTN; PAM sequence: CTC
agtgagagaagaaccttcct

SEQ ID NO: 387839 - DNA, 20 bp, Artificial Sequence
  Description of Artificial Sequence: Synthetic oligonucleotide
  Target: LAMA2; (+) strand; PAM type: YTN; PAM sequence: CTT
cctattcttcataattccta

SEQ ID NO: 387840 - DNA, 20 bp, Artificial Sequence
  Description of Artificial Sequence: Synthetic oligonucleotide
  Target: LAMA2; (+) strand; PAM type: YTN; PAM sequence: TTC
ctattcttcataattcctaa

SEQ ID NO: 387841 - DNA, 20 bp, Artificial Sequence
  Description of Artificial Sequence: Synthetic oligonucleotide
  Target: LAMA2; (+) strand; PAM type: YTN; PAM sequence: CTA
ttcttcataattcctaataa

SEQ ID NO: 387842 - DNA, 20 bp, Artificial Sequence
  Description of Artificial Sequence: Synthetic oligonucleotide
  Target: LAMA2; (+) strand; PAM type: YTN; PAM sequence: TTC
ttcataattcctaataaaat

SEQ ID NO: 387843 - DNA, 20 bp, Artificial Sequence
  Description of Artificial Sequence: Synthetic oligonucleotide
  Target: LAMA2; (+) strand; PAM type: YTN; PAM sequence: CTT
cataattcctaataaaatta

SEQ ID NO: 387844 - DNA, 20 bp, Artificial Sequence
  Description of Artificial Sequence: Synthetic oligonucleotide
  Target: LAMA2; (+) strand; PAM type: YTN; PAM sequence: TTC
ataattcctaataaaattat

SEQ ID NO: 387845 - DNA, 20 bp, Artificial Sequence
  Description of Artificial Sequence: Synthetic oligonucleotide
  Target: LAMA2; (+) strand; PAM type: YTN; PAM sequence: TTC
ctaataaaattataattgtt

SEQ ID NO: 387846 - DNA, 20 bp, Artificial Sequence
  Description of Artificial Sequence: Synthetic oligonucleotide
  Target: LAMA2; (+) strand; PAM type: YTN; PAM sequence: CTA
ataaaattataattgttact

SEQ ID NO: 387847 - DNA, 20 bp, Artificial Sequence
  Description of Artificial Sequence: Synthetic oligonucleotide
  Target: LAMA2; (+) strand; PAM type: YTN; PAM sequence: TTA
taattgttactactgctgtt

SEQ ID NO: 387848 - DNA, 20 bp, Artificial Sequence
  Description of Artificial Sequence: Synthetic oligonucleotide
  Target: LAMA2; (+) strand; PAM type: YTN; PAM sequence: TTG
ttactactgctgtttttaac

SEQ ID NO: 387849 - DNA, 20 bp, Artificial Sequence
  Description of Artificial Sequence: Synthetic oligonucleotide
  Target: LAMA2; (+) strand; PAM type: YTN; PAM sequence: TTA
ctactgctgtttttaaccta

SEQ ID NO: 387850 - DNA, 20 bp, Artificial Sequence
  Description of Artificial Sequence: Synthetic oligonucleotide
  Target: LAMA2; (+) strand; PAM type: YTN; PAM sequence: CTA
ctgctgtttttaacctatga

SEQ ID NO: 387851 - DNA, 20 bp, Artificial Sequence
  Description of Artificial Sequence: Synthetic oligonucleotide
  Target: LAMA2; (+) strand; PAM type: YTN; PAM sequence: CTG
ctgtttttaacctatgaatt

SEQ ID NO: 387852 - DNA, 20 bp, Artificial Sequence
  Description of Artificial Sequence: Synthetic oligonucleotide
  Target: LAMA2; (+) strand; PAM type: YTN; PAM sequence: CTG
tttttaacctatgaattgca

SEQ ID NO: 387853 - DNA, 20 bp, Artificial Sequence
  Description of Artificial Sequence: Synthetic oligonucleotide
  Target: LAMA2; (+) strand; PAM type: YTN; PAM sequence: TTT
ttaacctatgaattgcagct

SEQ ID NO: 387854 - DNA, 20 bp, Artificial Sequence
  Description of Artificial Sequence: Synthetic oligonucleotide
  Target: LAMA2; (+) strand; PAM type: YTN; PAM sequence: TTT
taacctatgaattgcagctt

SEQ ID NO: 387855 - DNA, 20 bp, Artificial Sequence
  Description of Artificial Sequence: Synthetic oligonucleotide
  Target: LAMA2; (+) strand; PAM type: YTN; PAM sequence: TTT
aacctatgaattgcagcttg

SEQ ID NO: 387856 - DNA, 20 bp, Artificial Sequence
  Description of Artificial Sequence: Synthetic oligonucleotide
  Target: LAMA2; (+) strand; PAM type: YTN; PAM sequence: TTA
acctatgaattgcagcttga

SEQ ID NO: 387857 - DNA, 20 bp, Artificial Sequence
  Description of Artificial Sequence: Synthetic oligonucleotide
  Target: LAMA2; (+) strand; PAM type: YTN; PAM sequence: CTA
tgaattgcagcttgaaagtc

SEQ ID NO: 387858 - DNA, 20 bp, Artificial Sequence
  Description of Artificial Sequence: Synthetic oligonucleotide
  Target: LAMA2; (+) strand; PAM type: YTN; PAM sequence: TTG
cagcttgaaagtctctgatc

SEQ ID NO: 387859 - DNA, 20 bp, Artificial Sequence
  Description of Artificial Sequence: Synthetic oligonucleotide
  Target: LAMA2; (+) strand; PAM type: YTN; PAM sequence: CTT
gaaagtctctgatctgaatc

SEQ ID NO: 387860 - DNA, 20 bp, Artificial Sequence
  Description of Artificial Sequence: Synthetic oligonucleotide
  Target: LAMA2; (+) strand; PAM type: YTN; PAM sequence: TTG
aaagtctctgatctgaatca

SEQ ID NO: 387861 - DNA, 20 bp, Artificial Sequence
  Description of Artificial Sequence: Synthetic oligonucleotide
  Target: LAMA2; (+) strand; PAM type: YTN; PAM sequence: CTC
tgatctgaatcacatgtgca

SEQ ID NO: 387862 - DNA, 20 bp, Artificial Sequence
  Description of Artificial Sequence: Synthetic oligonucleotide
  Target: LAMA2; (+) strand; PAM type: YTN; PAM sequence: CTG
atctgaatcacatgtgcaaa

SEQ ID NO: 387863 - DNA, 20 bp, Artificial Sequence
  Description of Artificial Sequence: Synthetic oligonucleotide
  Target: LAMA2; (+) strand; PAM type: YTN; PAM sequence: CTG
aatcacatgtgcaaaacttg

SEQ ID NO: 387864 - DNA, 20 bp, Artificial Sequence
  Description of Artificial Sequence: Synthetic oligonucleotide
  Target: LAMA2; (+) strand; PAM type: YTN; PAM sequence: CTT
gaaaaagtgtgtcagttatc

SEQ ID NO: 387865 - DNA, 20 bp, Artificial Sequence
  Description of Artificial Sequence: Synthetic oligonucleotide
  Target: LAMA2; (+) strand; PAM type: YTN; PAM sequence: TTG
aaaaagtgtgtcagttatcg

SEQ ID NO: 387866 - DNA, 20 bp, Artificial Sequence
  Description of Artificial Sequence: Synthetic oligonucleotide
  Target: LAMA2; (+) strand; PAM type: YTN; PAM sequence: TTA
tcgattgtatcagttataca

SEQ ID NO: 387867 - DNA, 20 bp, Artificial Sequence
  Description of Artificial Sequence: Synthetic oligonucleotide
  Target: LAMA2; (+) strand; PAM type: YTN; PAM sequence: TTG
tatcagttatacattccaaa

SEQ ID NO: 387868 - DNA, 20 bp, Artificial Sequence
  Description of Artificial Sequence: Synthetic oligonucleotide
  Target: LAMA2; (+) strand; PAM type: YTN; PAM sequence: TTA
tacattccaaagtttagtag

SEQ ID NO: 387869 - DNA, 20 bp, Artificial Sequence
  Description of Artificial Sequence: Synthetic oligonucleotide
  Target: LAMA2; (+) strand; PAM type: YTN; PAM sequence: TTC
caaagtttagtagcttaaaa

SEQ ID NO: 387870 - DNA, 20 bp, Artificial Sequence
  Description of Artificial Sequence: Synthetic oligonucleotide
  Target: LAMA2; (+) strand; PAM type: YTN; PAM sequence: TTT
agtagcttaaaacaacaagt

SEQ ID NO: 387871 - DNA, 20 bp, Artificial Sequence
  Description of Artificial Sequence: Synthetic oligonucleotide
  Target: LAMA2; (+) strand; PAM type: YTN; PAM sequence: TTA
gtagcttaaaacaacaagtg

SEQ ID NO: 387872 - DNA, 20 bp, Artificial Sequence
  Description of Artificial Sequence: Synthetic oligonucleotide
  Target: LAMA2; (+) strand; PAM type: YTN; PAM sequence: CTT
aaaacaacaagtgcatacac

SEQ ID NO: 387873 - DNA, 20 bp, Artificial Sequence
  Description of Artificial Sequence: Synthetic oligonucleotide
  Target: LAMA2; (+) strand; PAM type: YTN; PAM sequence: TTA
aaacaacaagtgcatacact

SEQ ID NO: 387874 - DNA, 20 bp, Artificial Sequence
  Description of Artificial Sequence: Synthetic oligonucleotide
  Target: LAMA2; (+) strand; PAM type: YTN; PAM sequence: CTC
tcatgattctgtaggttggc

SEQ ID NO: 387875 - DNA, 20 bp, Artificial Sequence
  Description of Artificial Sequence: Synthetic oligonucleotide
  Target: LAMA2; (+) strand; PAM type: YTN; PAM sequence: CTC
atgattctgtaggttggcaa

SEQ ID NO: 387876 - DNA, 20 bp, Artificial Sequence
  Description of Artificial Sequence: Synthetic oligonucleotide
  Target: LAMA2; (+) strand; PAM type: YTN; PAM sequence: TTC
tgtaggttggcaatttgggc

SEQ ID NO: 387877 - DNA, 20 bp, Artificial Sequence
  Description of Artificial Sequence: Synthetic oligonucleotide
  Target: LAMA2; (+) strand; PAM type: YTN; PAM sequence: CTG
taggttggcaatttgggctg

SEQ ID NO: 387878 - DNA, 20 bp, Artificial Sequence
  Description of Artificial Sequence: Synthetic oligonucleotide
  Target: LAMA2; (+) strand; PAM type: YTN; PAM sequence: TTG
gcaatttgggctgagctcag

SEQ ID NO: 387879 - DNA, 20 bp, Artificial Sequence
  Description of Artificial Sequence: Synthetic oligonucleotide
  Target: LAMA2; (+) strand; PAM type: YTN; PAM sequence: TTT
gggctgagctcagttggaca

SEQ ID NO: 387880 - DNA, 20 bp, Artificial Sequence
  Description of Artificial Sequence: Synthetic oligonucleotide
  Target: LAMA2; (+) strand; PAM type: YTN; PAM sequence: TTG
ggctgagctcagttggacag

SEQ ID NO: 387881 - DNA, 20 bp, Artificial Sequence
  Description of Artificial Sequence: Synthetic oligonucleotide
  Target: LAMA2; (+) strand; PAM type: YTN; PAM sequence: CTG
agctcagttggacagatctt

SEQ ID NO: 387882 - DNA, 20 bp, Artificial Sequence
  Description of Artificial Sequence: Synthetic oligonucleotide
  Target: LAMA2; (+) strand; PAM type: YTN; PAM sequence: CTC
agttggacagatcttccact

SEQ ID NO: 387883 - DNA, 20 bp, Artificial Sequence
  Description of Artificial Sequence: Synthetic oligonucleotide
  Target: LAMA2; (+) strand; PAM type: YTN; PAM sequence: TTG
gacagatcttccactgtcac

SEQ ID NO: 387884 - DNA, 20 bp, Artificial Sequence
  Description of Artificial Sequence: Synthetic oligonucleotide
  Target: LAMA2; (+) strand; PAM type: YTN; PAM sequence: CTT
ccactgtcacgcctaggggc

SEQ ID NO: 387885 - DNA, 20 bp, Artificial Sequence
  Description of Artificial Sequence: Synthetic oligonucleotide
  Target: LAMA2; (+) strand; PAM type: YTN; PAM sequence: TTC
cactgtcacgcctaggggct

SEQ ID NO: 387886 - DNA, 20 bp, Artificial Sequence
  Description of Artificial Sequence: Synthetic oligonucleotide
  Target: LAMA2; (+) strand; PAM type: YTN; PAM sequence: CTG
tcacgcctaggggctcccag

SEQ ID NO: 387887 - DNA, 20 bp, Artificial Sequence
  Description of Artificial Sequence: Synthetic oligonucleotide
  Target: LAMA2; (+) strand; PAM type: YTN; PAM sequence: CTA
ggggctcccagatggcctca

SEQ ID NO: 387888 - DNA, 20 bp, Artificial Sequence
  Description of Artificial Sequence: Synthetic oligonucleotide
  Target: LAMA2; (+) strand; PAM type: YTN; PAM sequence: CTC
ccagatggcctcaagcccaa

SEQ ID NO: 387889 - DNA, 20 bp, Artificial Sequence
  Description of Artificial Sequence: Synthetic oligonucleotide
  Target: LAMA2; (+) strand; PAM type: YTN; PAM sequence: CTC
aagcccaaattggggcctca

SEQ ID NO: 387890 - DNA, 20 bp, Artificial Sequence
  Description of Artificial Sequence: Synthetic oligonucleotide
  Target: LAMA2; (+) strand; PAM type: YTN; PAM sequence: TTG
gggcctcaactgccctttcc

SEQ ID NO: 387891 - DNA, 20 bp, Artificial Sequence
  Description of Artificial Sequence: Synthetic oligonucleotide
  Target: LAMA2; (+) strand; PAM type: YTN; PAM sequence: CTC
aactgccctttcctctctca

SEQ ID NO: 387892 - DNA, 20 bp, Artificial Sequence
  Description of Artificial Sequence: Synthetic oligonucleotide
  Target: LAMA2; (+) strand; PAM type: YTN; PAM sequence: CTG
ccctttcctctctcacgttg

SEQ ID NO: 387893 - DNA, 20 bp, Artificial Sequence
  Description of Artificial Sequence: Synthetic oligonucleotide
  Target: LAMA2; (+) strand; PAM type: YTN; PAM sequence: CTT
tcctctctcacgttgcctcc

SEQ ID NO: 387894 - DNA, 20 bp, Artificial Sequence
  Description of Artificial Sequence: Synthetic oligonucleotide
  Target: LAMA2; (+) strand; PAM type: YTN; PAM sequence: TTT
cctctctcacgttgcctccc

SEQ ID NO: 387895 - DNA, 20 bp, Artificial Sequence
  Description of Artificial Sequence: Synthetic oligonucleotide
  Target: LAMA2; (+) strand; PAM type: YTN; PAM sequence: TTC
ctctctcacgttgcctccct

SEQ ID NO: 387896 - DNA, 20 bp, Artificial Sequence
  Description of Artificial Sequence: Synthetic oligonucleotide
  Target: LAMA2; (+) strand; PAM type: YTN; PAM sequence: CTC
tctcacgttgcctcccttcc

SEQ ID NO: 387897 - DNA, 20 bp, Artificial Sequence
  Description of Artificial Sequence: Synthetic oligonucleotide
  Target: LAMA2; (+) strand; PAM type: YTN; PAM sequence: CTC
tcacgttgcctcccttcctc

SEQ ID NO: 387898 - DNA, 20 bp, Artificial Sequence
  Description of Artificial Sequence: Synthetic oligonucleotide
  Target: LAMA2; (+) strand; PAM type: YTN; PAM sequence: CTC
acgttgcctcccttcctcaa

SEQ ID NO: 387899 - DNA, 20 bp, Artificial Sequence
  Description of Artificial Sequence: Synthetic oligonucleotide
  Target: LAMA2; (+) strand; PAM type: YTN; PAM sequence: TTG
cctcccttcctcaaggaggc

SEQ ID NO: 387900 - DNA, 20 bp, Artificial Sequence
  Description of Artificial Sequence: Synthetic oligonucleotide
  Target: LAMA2; (+) strand; PAM type: YTN; PAM sequence: CTC
ccttcctcaaggaggctaac

SEQ ID NO: 387901 - DNA, 20 bp, Artificial Sequence
  Description of Artificial Sequence: Synthetic oligonucleotide
  Target: LAMA2; (+) strand; PAM type: YTN; PAM sequence: CTT
cctcaaggaggctaacctgg

SEQ ID NO: 387902 - DNA, 20 bp, Artificial Sequence
  Description of Artificial Sequence: Synthetic oligonucleotide
  Target: LAMA2; (+) strand; PAM type: YTN; PAM sequence: TTC
ctcaaggaggctaacctggg

SEQ ID NO: 387903 - DNA, 20 bp, Artificial Sequence
  Description of Artificial Sequence: Synthetic oligonucleotide
  Target: LAMA2; (+) strand; PAM type: YTN; PAM sequence: CTC
aaggaggctaacctgggatt

SEQ ID NO: 387904 - DNA, 20 bp, Artificial Sequence
  Description of Artificial Sequence: Synthetic oligonucleotide
  Target: LAMA2; (+) strand; PAM type: YTN; PAM sequence: CTA
acctgggattgttctgaagg

SEQ ID NO: 387905 - DNA, 20 bp, Artificial Sequence
  Description of Artificial Sequence: Synthetic oligonucleotide
  Target: LAMA2; (+) strand; PAM type: YTN; PAM sequence: CTG
ggattgttctgaaggcagca

SEQ ID NO: 387906 - DNA, 20 bp, Artificial Sequence
  Description of Artificial Sequence: Synthetic oligonucleotide
  Target: LAMA2; (+) strand; PAM type: YTN; PAM sequence: TTG
ttctgaaggcagcaggggtc

SEQ ID NO: 387907 - DNA, 20 bp, Artificial Sequence
  Description of Artificial Sequence: Synthetic oligonucleotide
  Target: LAMA2; (+) strand; PAM type: YTN; PAM sequence: TTC
tgaaggcagcaggggtccaa

SEQ ID NO: 387908 - DNA, 20 bp, Artificial Sequence
  Description of Artificial Sequence: Synthetic oligonucleotide
  Target: LAMA2; (+) strand; PAM type: YTN; PAM sequence: CTG
aaggcagcaggggtccaaga

SEQ ID NO: 387909 - DNA, 20 bp, Artificial Sequence
  Description of Artificial Sequence: Synthetic oligonucleotide
  Target: LAMA2; (+) strand; PAM type: YTN; PAM sequence: TTT
caatatgttgctctgccaca

SEQ ID NO: 387910 - DNA, 20 bp, Artificial Sequence
  Description of Artificial Sequence: Synthetic oligonucleotide
  Target: LAMA2; (+) strand; PAM type: YTN; PAM sequence: TTC
aatatgttgctctgccacat

SEQ ID NO: 387911 - DNA, 20 bp, Artificial Sequence
  Description of Artificial Sequence: Synthetic oligonucleotide
  Target: LAMA2; (+) strand; PAM type: YTN; PAM sequence: TTG
ctctgccacattctgttggt

SEQ ID NO: 387912 - DNA, 20 bp, Artificial Sequence
  Description of Artificial Sequence: Synthetic oligonucleotide
  Target: LAMA2; (+) strand; PAM type: YTN; PAM sequence: CTC
tgccacattctgttggtcag

SEQ ID NO: 387913 - DNA, 20 bp, Artificial Sequence
  Description of Artificial Sequence: Synthetic oligonucleotide
  Target: LAMA2; (+) strand; PAM type: YTN; PAM sequence: CTG
ccacattctgttggtcagag

SEQ ID NO: 387914 - DNA, 20 bp, Artificial Sequence
  Description of Artificial Sequence: Synthetic oligonucleotide
  Target: LAMA2; (+) strand; PAM type: YTN; PAM sequence: TTC
tgttggtcagagtatgttgc

SEQ ID NO: 387915 - DNA, 20 bp, Artificial Sequence
  Description of Artificial Sequence: Synthetic oligonucleotide
  Target: LAMA2; (+) strand; PAM type: YTN; PAM sequence: CTG
ttggtcagagtatgttgcaa

SEQ ID NO: 387916 - DNA, 20 bp, Artificial Sequence
  Description of Artificial Sequence: Synthetic oligonucleotide
  Target: LAMA2; (+) strand; PAM type: YTN; PAM sequence: TTG
gtcagagtatgttgcaaagc

SEQ ID NO: 387917 - DNA, 20 bp, Artificial Sequence
  Description of Artificial Sequence: Synthetic oligonucleotide
  Target: LAMA2; (+) strand; PAM type: YTN; PAM sequence: TTG
caaagctaacccagattcaa

SEQ ID NO: 387918 - DNA, 20 bp, Artificial Sequence
  Description of Artificial Sequence: Synthetic oligonucleotide
  Target: LAMA2; (+) strand; PAM type: YTN; PAM sequence: CTA
acccagattcaaggggaagg

SEQ ID NO: 387919 - DNA, 20 bp, Artificial Sequence
  Description of Artificial Sequence: Synthetic oligonucleotide
  Target: LAMA2; (+) strand; PAM type: YTN; PAM sequence: TTC
aaggggaagggaagtagact

SEQ ID NO: 387920 - DNA, 20 bp, Artificial Sequence
  Description of Artificial Sequence: Synthetic oligonucleotide
  Target: LAMA2; (+) strand; PAM type: YTN; PAM sequence: CTT
cacatcttaatgtgaggtgt

SEQ ID NO: 387921 - DNA, 20 bp, Artificial Sequence
  Description of Artificial Sequence: Synthetic oligonucleotide
  Target: LAMA2; (+) strand; PAM type: YTN; PAM sequence: TTC
acatcttaatgtgaggtgtg

SEQ ID NO: 387922 - DNA, 20 bp, Artificial Sequence
  Description of Artificial Sequence: Synthetic oligonucleotide
  Target: LAMA2; (+) strand; PAM type: YTN; PAM sequence: CTT
aatgtgaggtgtggcaaaga

SEQ ID NO: 387923 - DNA, 20 bp, Artificial Sequence
  Description of Artificial Sequence: Synthetic oligonucleotide
  Target: LAMA2; (+) strand; PAM type: YTN; PAM sequence: TTA
atgtgaggtgtggcaaagaa

SEQ ID NO: 387924 - DNA, 20 bp, Artificial Sequence
  Description of Artificial Sequence: Synthetic oligonucleotide
  Target: LAMA2; (+) strand; PAM type: YTN; PAM sequence: TTA
acagtaaccttttttttttt

SEQ ID NO: 387925 - DNA, 20 bp, Artificial Sequence
  Description of Artificial Sequence: Synthetic oligonucleotide
  Target: LAMA2; (+) strand; PAM type: YTN; PAM sequence: CTT
tttttttttttttttttgag

SEQ ID NO: 387926 - DNA, 20 bp, Artificial Sequence
  Description of Artificial Sequence: Synthetic oligonucleotide
  Target: LAMA2; (+) strand; PAM type: YTN; PAM sequence: TTT
ttttttttttttttttgaga

SEQ ID NO: 387927 - DNA, 20 bp, Artificial Sequence
  Description of Artificial Sequence: Synthetic oligonucleotide
  Target: LAMA2; (+) strand; PAM type: YTN; PAM sequence: TTT
tttttttttttttttgagat

SEQ ID NO: 387928 - DNA, 20 bp, Artificial Sequence
  Description of Artificial Sequence: Synthetic oligonucleotide
  Target: LAMA2; (+) strand; PAM type: YTN; PAM sequence: TTT
ttttttttttttttgagatg

SEQ ID NO: 387929 - DNA, 20 bp, Artificial Sequence
  Description of Artificial Sequence: Synthetic oligonucleotide
  Target: LAMA2; (+) strand; PAM type: YTN; PAM sequence: TTT
tttttttttttttgagatgg

SEQ ID NO: 387930 - DNA, 20 bp, Artificial Sequence
  Description of Artificial Sequence: Synthetic oligonucleotide
  Target: LAMA2; (+) strand; PAM type: YTN; PAM sequence: TTT
ttttttttttttgagatgga

SEQ ID NO: 387931 - DNA, 20 bp, Artificial Sequence
  Description of Artificial Sequence: Synthetic oligonucleotide
  Target: LAMA2; (+) strand; PAM type: YTN; PAM sequence: TTT
tttttttttttgagatggag

SEQ ID NO: 387932 - DNA, 20 bp, Artificial Sequence
  Description of Artificial Sequence: Synthetic oligonucleotide
  Target: LAMA2; (+) strand; PAM type: YTN; PAM sequence: TTT
ttttttttttgagatggagt

SEQ ID NO: 387933 - DNA, 20 bp, Artificial Sequence
  Description of Artificial Sequence: Synthetic oligonucleotide
  Target: LAMA2; (+) strand; PAM type: YTN; PAM sequence: TTT
tttttttttgagatggagtc

SEQ ID NO: 387934 - DNA, 20 bp, Artificial Sequence
  Description of Artificial Sequence: Synthetic oligonucleotide
  Target: LAMA2; (+) strand; PAM type: YTN; PAM sequence: TTT
ttttttttgagatggagtct

SEQ ID NO: 387935 - DNA, 20 bp, Artificial Sequence
  Description of Artificial Sequence: Synthetic oligonucleotide
  Target: LAMA2; (+) strand; PAM type: YTN; PAM sequence: TTT
tttttttgagatggagtctc

SEQ ID NO: 387936 - DNA, 20 bp, Artificial Sequence
  Description of Artificial Sequence: Synthetic oligonucleotide
  Target: LAMA2; (+) strand; PAM type: YTN; PAM sequence: TTT
ttttttgagatggagtctca

SEQ ID NO: 387937 - DNA, 20 bp, Artificial Sequence
  Description of Artificial Sequence: Synthetic oligonucleotide
  Target: LAMA2; (+) strand; PAM type: YTN; PAM sequence: TTT
tttttgagatggagtctcac

SEQ ID NO: 387938 - DNA, 20 bp, Artificial Sequence
  Description of Artificial Sequence: Synthetic oligonucleotide
  Target: LAMA2; (+) strand; PAM type: YTN; PAM sequence: TTT
ttttgagatggagtctcact

SEQ ID NO: 387939 - DNA, 20 bp, Artificial Sequence
  Description of Artificial Sequence: Synthetic oligonucleotide
  Target: LAMA2; (+) strand; PAM type: YTN; PAM sequence: TTT
tttgagatggagtctcactc

SEQ ID NO: 387940 - DNA, 20 bp, Artificial Sequence
  Description of Artificial Sequence: Synthetic oligonucleotide
  Target: LAMA2; (+) strand; PAM type: YTN; PAM sequence: TTT
ttgagatggagtctcactct

SEQ ID NO: 387941 - DNA, 20 bp, Artificial Sequence
  Description of Artificial Sequence: Synthetic oligonucleotide
  Target: LAMA2; (+) strand; PAM type: YTN; PAM sequence: TTT
tgagatggagtctcactctg

SEQ ID NO: 387942 - DNA, 20 bp, Artificial Sequence
  Description of Artificial Sequence: Synthetic oligonucleotide
  Target: LAMA2; (+) strand; PAM type: YTN; PAM sequence: TTT
gagatggagtctcactctgt

SEQ ID NO: 387943 - DNA, 20 bp, Artificial Sequence
  Description of Artificial Sequence: Synthetic oligonucleotide
  Target: LAMA2; (+) strand; PAM type: YTN; PAM sequence: TTG
agatggagtctcactctgtt

SEQ ID NO: 387944 - DNA, 20 bp, Artificial Sequence
  Description of Artificial Sequence: Synthetic oligonucleotide
  Target: LAMA2; (+) strand; PAM type: YTN; PAM sequence: CTC
actctgtttcccaggctgaa

SEQ ID NO: 387945 - DNA, 20 bp, Artificial Sequence
  Description of Artificial Sequence: Synthetic oligonucleotide
  Target: LAMA2; (+) strand; PAM type: YTN; PAM sequence: CTC
tgtttcccaggctgaagtgc

SEQ ID NO: 387946 - DNA, 20 bp, Artificial Sequence
  Description of Artificial Sequence: Synthetic oligonucleotide
  Target: LAMA2; (+) strand; PAM type: YTN; PAM sequence: CTG
tttcccaggctgaagtgcag

SEQ ID NO: 387947 - DNA, 20 bp, Artificial Sequence
  Description of Artificial Sequence: Synthetic oligonucleotide
  Target: LAMA2; (+) strand; PAM type: YTN; PAM sequence: TTT
cccaggctgaagtgcagtgg

SEQ ID NO: 387948 - DNA, 20 bp, Artificial Sequence
  Description of Artificial Sequence: Synthetic oligonucleotide
  Target: LAMA2; (+) strand; PAM type: YTN; PAM sequence: TTC
ccaggctgaagtgcagtggc

SEQ ID NO: 387949 - DNA, 20 bp, Artificial Sequence
  Description of Artificial Sequence: Synthetic oligonucleotide
  Target: LAMA2; (+) strand; PAM type: YTN; PAM sequence: CTG
aagtgcagtggcatgatcta

SEQ ID NO: 387950 - DNA, 20 bp, Artificial Sequence
  Description of Artificial Sequence: Synthetic oligonucleotide
  Target: LAMA2; (+) strand; PAM type: YTN; PAM sequence: CTA
ggctcactgcagcctctacc

SEQ ID NO: 387951 - DNA, 20 bp, Artificial Sequence
  Description of Artificial Sequence: Synthetic oligonucleotide
  Target: LAMA2; (+) strand; PAM type: YTN; PAM sequence: CTC
actgcagcctctacctcctg

SEQ ID NO: 387952 - DNA, 20 bp, Artificial Sequence
  Description of Artificial Sequence: Synthetic oligonucleotide
  Target: LAMA2; (+) strand; PAM type: YTN; PAM sequence: CTG
cagcctctacctcctgggtt

SEQ ID NO: 387953 - DNA, 20 bp, Artificial Sequence
  Description of Artificial Sequence: Synthetic oligonucleotide
  Target: LAMA2; (+) strand; PAM type: YTN; PAM sequence: CTC
tacctcctgggttcaagtga

SEQ ID NO: 387954 - DNA, 20 bp, Artificial Sequence
  Description of Artificial Sequence: Synthetic oligonucleotide
  Target: LAMA2; (+) strand; PAM type: YTN; PAM sequence: CTA
cctcctgggttcaagtgata

SEQ ID NO: 387955 - DNA, 20 bp, Artificial Sequence
  Description of Artificial Sequence: Synthetic oligonucleotide
  Target: LAMA2; (+) strand; PAM type: YTN; PAM sequence: CTC
ctgggttcaagtgatactcc

SEQ ID NO: 387956 - DNA, 20 bp, Artificial Sequence
  Description of Artificial Sequence: Synthetic oligonucleotide
  Target: LAMA2; (+) strand; PAM type: YTN; PAM sequence: CTG
ggttcaagtgatactcctcc

SEQ ID NO: 387957 - DNA, 20 bp, Artificial Sequence
  Description of Artificial Sequence: Synthetic oligonucleotide
  Target: LAMA2; (+) strand; PAM type: YTN; PAM sequence: TTC
aagtgatactcctccctcag

SEQ ID NO: 387958 - DNA, 20 bp, Artificial Sequence
  Description of Artificial Sequence: Synthetic oligonucleotide
  Target: LAMA2; (+) strand; PAM type: YTN; PAM sequence: CTC
ctccctcagcctcccgagta

SEQ ID NO: 387959 - DNA, 20 bp, Artificial Sequence
  Description of Artificial Sequence: Synthetic oligonucleotide
  Target: LAMA2; (+) strand; PAM type: YTN; PAM sequence: CTC
cctcagcctcccgagtagcg

SEQ ID NO: 387960 - DNA, 20 bp, Artificial Sequence
  Description of Artificial Sequence: Synthetic oligonucleotide
  Target: LAMA2; (+) strand; PAM type: YTN; PAM sequence: CTC
agcctcccgagtagcgggac

SEQ ID NO: 387961 - DNA, 20 bp, Artificial Sequence
  Description of Artificial Sequence: Synthetic oligonucleotide
  Target: LAMA2; (+) strand; PAM type: YTN; PAM sequence: CTC
ccgagtagcgggactagagg

SEQ ID NO: 387962 - DNA, 20 bp, Artificial Sequence
  Description of Artificial Sequence: Synthetic oligonucleotide
  Target: LAMA2; (+) strand; PAM type: YTN; PAM sequence: CTA
gaggcacatgccaccacacc

SEQ ID NO: 387963 - DNA, 20 bp, Artificial Sequence
  Description of Artificial Sequence: Synthetic oligonucleotide
  Target: LAMA2; (+) strand; PAM type: YTN; PAM sequence: CTG
gctaatttttgtatttttag

SEQ ID NO: 387964 - DNA, 20 bp, Artificial Sequence
  Description of Artificial Sequence: Synthetic oligonucleotide
  Target: LAMA2; (+) strand; PAM type: YTN; PAM sequence: CTA
atttttgtatttttagtaga

SEQ ID NO: 387965 - DNA, 20 bp, Artificial Sequence
  Description of Artificial Sequence: Synthetic oligonucleotide
  Target: LAMA2; (+) strand; PAM type: YTN; PAM sequence: TTT
ttgtatttttagtagagatg

SEQ ID NO: 387966 - DNA, 20 bp, Artificial Sequence
  Description of Artificial Sequence: Synthetic oligonucleotide
  Target: LAMA2; (+) strand; PAM type: YTN; PAM sequence: TTT
tgtatttttagtagagatgg

SEQ ID NO: 387967 - DNA, 20 bp, Artificial Sequence
  Description of Artificial Sequence: Synthetic oligonucleotide
  Target: LAMA2; (+) strand; PAM type: YTN; PAM sequence: TTT
gtatttttagtagagatggg

SEQ ID NO: 387968 - DNA, 20 bp, Artificial Sequence
  Description of Artificial Sequence: Synthetic oligonucleotide
  Target: LAMA2; (+) strand; PAM type: YTN; PAM sequence: TTG
tatttttagtagagatgggg

SEQ ID NO: 387969 - DNA, 20 bp, Artificial Sequence
  Description of Artificial Sequence: Synthetic oligonucleotide
  Target: LAMA2; (+) strand; PAM type: YTN; PAM sequence: TTT
ttagtagagatggggtttca

SEQ ID NO: 387970 - DNA, 20 bp, Artificial Sequence
  Description of Artificial Sequence: Synthetic oligonucleotide
  Target: LAMA2; (+) strand; PAM type: YTN; PAM sequence: TTT
tagtagagatggggtttcac

SEQ ID NO: 387971 - DNA, 20 bp, Artificial Sequence
  Description of Artificial Sequence: Synthetic oligonucleotide
  Target: LAMA2; (+) strand; PAM type: YTN; PAM sequence: TTT
agtagagatggggtttcacc

SEQ ID NO: 387972 - DNA, 20 bp, Artificial Sequence
  Description of Artificial Sequence: Synthetic oligonucleotide
  Target: LAMA2; (+) strand; PAM type: YTN; PAM sequence: TTA
gtagagatggggtttcacca

SEQ ID NO: 387973 - DNA, 20 bp, Artificial Sequence
  Description of Artificial Sequence: Synthetic oligonucleotide
  Target: LAMA2; (+) strand; PAM type: YTN; PAM sequence: TTT
caccatgttggccaggctgg

SEQ ID NO: 387974 - DNA, 20 bp, Artificial Sequence
  Description of Artificial Sequence: Synthetic oligonucleotide
  Target: LAMA2; (+) strand; PAM type: YTN; PAM sequence: TTC
accatgttggccaggctggt

SEQ ID NO: 387975 - DNA, 20 bp, Artificial Sequence
  Description of Artificial Sequence: Synthetic oligonucleotide
  Target: LAMA2; (+) strand; PAM type: YTN; PAM sequence: TTG
gccaggctggtctcaaactt

SEQ ID NO: 387976 - DNA, 20 bp, Artificial Sequence
  Description of Artificial Sequence: Synthetic oligonucleotide
  Target: LAMA2; (+) strand; PAM type: YTN; PAM sequence: CTG
gtctcaaacttctcacctca

SEQ ID NO: 387977 - DNA, 20 bp, Artificial Sequence
  Description of Artificial Sequence: Synthetic oligonucleotide
  Target: LAMA2; (+) strand; PAM type: YTN; PAM sequence: CTC
aaacttctcacctcaagtga

SEQ ID NO: 387978 - DNA, 20 bp, Artificial Sequence
  Description of Artificial Sequence: Synthetic oligonucleotide
  Target: LAMA2; (+) strand; PAM type: YTN; PAM sequence: CTT
ctcacctcaagtgatctgcc

SEQ ID NO: 387979 - DNA, 20 bp, Artificial Sequence
  Description of Artificial Sequence: Synthetic oligonucleotide
  Target: LAMA2; (+) strand; PAM type: YTN; PAM sequence: TTC
tcacctcaagtgatctgccc

SEQ ID NO: 387980 - DNA, 20 bp, Artificial Sequence
  Description of Artificial Sequence: Synthetic oligonucleotide
  Target: LAMA2; (+) strand; PAM type: YTN; PAM sequence: CTC
acctcaagtgatctgcccat

SEQ ID NO: 387981 - DNA, 20 bp, Artificial Sequence
  Description of Artificial Sequence: Synthetic oligonucleotide
  Target: LAMA2; (+) strand; PAM type: YTN; PAM sequence: CTC
aagtgatctgcccatctcaa

SEQ ID NO: 387982 - DNA, 20 bp, Artificial Sequence
  Description of Artificial Sequence: Synthetic oligonucleotide
  Target: LAMA2; (+) strand; PAM type: YTN; PAM sequence: CTG
cccatctcaagcctcccata

SEQ ID NO: 387983 - DNA, 20 bp, Artificial Sequence
  Description of Artificial Sequence: Synthetic oligonucleotide
  Target: LAMA2; (+) strand; PAM type: YTN; PAM sequence: CTC
aagcctcccatactgcttgg

SEQ ID NO: 387984 - DNA, 20 bp, Artificial Sequence
  Description of Artificial Sequence: Synthetic oligonucleotide
  Target: LAMA2; (+) strand; PAM type: YTN; PAM sequence: CTC
ccatactgcttggattacag

SEQ ID NO: 387985 - DNA, 20 bp, Artificial Sequence
  Description of Artificial Sequence: Synthetic oligonucleotide
  Target: LAMA2; (+) strand; PAM type: YTN; PAM sequence: CTG
cttggattacaggcctgagc

SEQ ID NO: 387986 - DNA, 20 bp, Artificial Sequence
  Description of Artificial Sequence: Synthetic oligonucleotide
  Target: LAMA2; (+) strand; PAM type: YTN; PAM sequence: CTT
ggattacaggcctgagccac

SEQ ID NO: 387987 - DNA, 20 bp, Artificial Sequence
  Description of Artificial Sequence: Synthetic oligonucleotide
  Target: LAMA2; (+) strand; PAM type: YTN; PAM sequence: TTG
gattacaggcctgagccacc

SEQ ID NO: 387988 - DNA, 20 bp, Artificial Sequence
  Description of Artificial Sequence: Synthetic oligonucleotide
  Target: LAMA2; (+) strand; PAM type: YTN; PAM sequence: TTA
caggcctgagccaccacacc

SEQ ID NO: 387989 - DNA, 20 bp, Artificial Sequence
  Description of Artificial Sequence: Synthetic oligonucleotide
  Target: LAMA2; (+) strand; PAM type: YTN; PAM sequence: CTG
agccaccacacccagccagt

SEQ ID NO: 387990 - DNA, 20 bp, Artificial Sequence
  Description of Artificial Sequence: Synthetic oligonucleotide
  Target: LAMA2; (+) strand; PAM type: YTN; PAM sequence: TTT
ttaattgtccccagaaatga

SEQ ID NO: 387991 - DNA, 20 bp, Artificial Sequence
  Description of Artificial Sequence: Synthetic oligonucleotide
  Target: LAMA2; (+) strand; PAM type: YTN; PAM sequence: TTT
taattgtccccagaaatgat

SEQ ID NO: 387992 - DNA, 20 bp, Artificial Sequence
  Description of Artificial Sequence: Synthetic oligonucleotide
  Target: LAMA2; (+) strand; PAM type: YTN; PAM sequence: TTT
aattgtccccagaaatgatc

SEQ ID NO: 387993 - DNA, 20 bp, Artificial Sequence
  Description of Artificial Sequence: Synthetic oligonucleotide
  Target: LAMA2; (+) strand; PAM type: YTN; PAM sequence: TTA
attgtccccagaaatgatca

SEQ ID NO: 387994 - DNA, 20 bp, Artificial Sequence
  Description of Artificial Sequence: Synthetic oligonucleotide
  Target: LAMA2; (+) strand; PAM type: YTN; PAM sequence: TTG
tccccagaaatgatcatcgc

SEQ ID NO: 387995 - DNA, 20 bp, Artificial Sequence
  Description of Artificial Sequence: Synthetic oligonucleotide
  Target: LAMA2; (+) strand; PAM type: YTN; PAM sequence: CTT
tgatctgtcagtcatggtgt

SEQ ID NO: 387996 - DNA, 20 bp, Artificial Sequence
  Description of Artificial Sequence: Synthetic oligonucleotide
  Target: LAMA2; (+) strand; PAM type: YTN; PAM sequence: TTT
gatctgtcagtcatggtgtt

SEQ ID NO: 387997 - DNA, 20 bp, Artificial Sequence
  Description of Artificial Sequence: Synthetic oligonucleotide
  Target: LAMA2; (+) strand; PAM type: YTN; PAM sequence: TTG
atctgtcagtcatggtgttc

SEQ ID NO: 387998 - DNA, 20 bp, Artificial Sequence
  Description of Artificial Sequence: Synthetic oligonucleotide
  Target: LAMA2; (+) strand; PAM type: YTN; PAM sequence: CTG
tcagtcatggtgttctttcc

SEQ ID NO: 387999 - DNA, 20 bp, Artificial Sequence
  Description of Artificial Sequence: Synthetic oligonucleotide
  Target: LAMA2; (+) strand; PAM type: YTN; PAM sequence: TTC
tttcctcctaaagttttgtg

SEQ ID NO: 388000 - DNA, 20 bp, Artificial Sequence
  Description of Artificial Sequence: Synthetic oligonucleotide
  Target: LAMA2; (+) strand; PAM type: YTN; PAM sequence: CTT
tcctcctaaagttttgtgct

SEQ ID NO: 388001 - DNA, 20 bp, Artificial Sequence
  Description of Artificial Sequence: Synthetic oligonucleotide
  Target: LAMA2; (+) strand; PAM type: YTN; PAM sequence: TTT
cctcctaaagttttgtgctg

SEQ ID NO: 388002 - DNA, 20 bp, Artificial Sequence
  Description of Artificial Sequence: Synthetic oligonucleotide
  Target: LAMA2; (+) strand; PAM type: YTN; PAM sequence: TTC
ctcctaaagttttgtgctga

SEQ ID NO: 388003 - DNA, 20 bp, Artificial Sequence
  Description of Artificial Sequence: Synthetic oligonucleotide
  Target: LAMA2; (+) strand; PAM type: YTN; PAM sequence: CTC
ctaaagttttgtgctgattt

SEQ ID NO: 388004 - DNA, 20 bp, Artificial Sequence
  Description of Artificial Sequence: Synthetic oligonucleotide
  Target: LAMA2; (+) strand; PAM type: YTN; PAM sequence: CTA
aagttttgtgctgattttct

SEQ ID NO: 388005 - DNA, 20 bp, Artificial Sequence
  Description of Artificial Sequence: Synthetic oligonucleotide
  Target: LAMA2; (+) strand; PAM type: YTN; PAM sequence: TTT
tgtgctgattttcttcccgt

SEQ ID NO: 388006 - DNA, 20 bp, Artificial Sequence
  Description of Artificial Sequence: Synthetic oligonucleotide
  Target: LAMA2; (+) strand; PAM type: YTN; PAM sequence: TTT
gtgctgattttcttcccgtc

SEQ ID NO: 388007 - DNA, 20 bp, Artificial Sequence
  Description of Artificial Sequence: Synthetic oligonucleotide
  Target: LAMA2; (+) strand; PAM type: YTN; PAM sequence: TTG
tgctgattttcttcccgtcc

SEQ ID NO: 388008 - DNA, 20 bp, Artificial Sequence
  Description of Artificial Sequence: Synthetic oligonucleotide
  Target: LAMA2; (+) strand; PAM type: YTN; PAM sequence: CTG
attttcttcccgtccatctc

SEQ ID NO: 388009 - DNA, 20 bp, Artificial Sequence
  Description of Artificial Sequence: Synthetic oligonucleotide
  Target: LAMA2; (+) strand; PAM type: YTN; PAM sequence: TTT
tcttcccgtccatctctccc

SEQ ID NO: 388010 - DNA, 20 bp, Artificial Sequence
  Description of Artificial Sequence: Synthetic oligonucleotide
  Target: LAMA2; (+) strand; PAM type: YTN; PAM sequence: TTT
cttcccgtccatctctccct

SEQ ID NO: 388011 - DNA, 20 bp, Artificial Sequence
  Description of Artificial Sequence: Synthetic oligonucleotide
  Target: LAMA2; (+) strand; PAM type: YTN; PAM sequence: TTC
ttcccgtccatctctccctt

SEQ ID NO: 388012 - DNA, 20 bp, Artificial Sequence
  Description of Artificial Sequence: Synthetic oligonucleotide
  Target: LAMA2; (+) strand; PAM type: YTN; PAM sequence: CTT
cccgtccatctctccctttc

SEQ ID NO: 388013 - DNA, 20 bp, Artificial Sequence
  Description of Artificial Sequence: Synthetic oligonucleotide
  Target: LAMA2; (+) strand; PAM type: YTN; PAM sequence: TTC
ccgtccatctctccctttcc

SEQ ID NO: 388014 - DNA, 20 bp, Artificial Sequence
  Description of Artificial Sequence: Synthetic oligonucleotide
  Target: LAMA2; (+) strand; PAM type: YTN; PAM sequence: CTC
tccctttcctgagtcaaaac

SEQ ID NO: 388015 - DNA, 20 bp, Artificial Sequence
  Description of Artificial Sequence: Synthetic oligonucleotide
  Target: LAMA2; (+) strand; PAM type: YTN; PAM sequence: CTC
cctttcctgagtcaaaactg

SEQ ID NO: 388016 - DNA, 20 bp, Artificial Sequence
  Description of Artificial Sequence: Synthetic oligonucleotide
  Target: LAMA2; (+) strand; PAM type: YTN; PAM sequence: CTT
tcctgagtcaaaactgaaat

SEQ ID NO: 388017 - DNA, 20 bp, Artificial Sequence
  Description of Artificial Sequence: Synthetic oligonucleotide
  Target: LAMA2; (+) strand; PAM type: YTN; PAM sequence: TTT
cctgagtcaaaactgaaatc

SEQ ID NO: 388018 - DNA, 20 bp, Artificial Sequence
  Description of Artificial Sequence: Synthetic oligonucleotide
  Target: LAMA2; (+) strand; PAM type: YTN; PAM sequence: TTC
ctgagtcaaaactgaaatcc

SEQ ID NO: 388019 - DNA, 20 bp, Artificial Sequence
  Description of Artificial Sequence: Synthetic oligonucleotide
  Target: LAMA2; (+) strand; PAM type: YTN; PAM sequence: CTG
agtcaaaactgaaatccttc

SEQ ID NO: 388020 - DNA, 20 bp, Artificial Sequence
  Description of Artificial Sequence: Synthetic oligonucleotide
  Target: LAMA2; (+) strand; PAM type: YTN; PAM sequence: CTG
aaatccttcaggcaggtatc

SEQ ID NO: 388021 - DNA, 20 bp, Artificial Sequence
  Description of Artificial Sequence: Synthetic oligonucleotide
  Target: LAMA2; (+) strand; PAM type: YTN; PAM sequence: CTT
caggcaggtatctgaatagt

SEQ ID NO: 388022 - DNA, 20 bp, Artificial Sequence
  Description of Artificial Sequence: Synthetic oligonucleotide
  Target: LAMA2; (+) strand; PAM type: YTN; PAM sequence: TTC
aggcaggtatctgaatagtc

SEQ ID NO: 388023 - DNA, 20 bp, Artificial Sequence
  Description of Artificial Sequence: Synthetic oligonucleotide
  Target: LAMA2; (+) strand; PAM type: YTN; PAM sequence: CTG
aatagtcattcttgttgatc

SEQ ID NO: 388024 - DNA, 20 bp, Artificial Sequence
  Description of Artificial Sequence: Synthetic oligonucleotide
  Target: LAMA2; (+) strand; PAM type: YTN; PAM sequence: TTC
ttgttgatcggacagtctct

SEQ ID NO: 388025 - DNA, 20 bp, Artificial Sequence
  Description of Artificial Sequence: Synthetic oligonucleotide
  Target: LAMA2; (+) strand; PAM type: YTN; PAM sequence: CTT
gttgatcggacagtctctgc

SEQ ID NO: 388026 - DNA, 20 bp, Artificial Sequence
  Description of Artificial Sequence: Synthetic oligonucleotide
  Target: LAMA2; (+) strand; PAM type: YTN; PAM sequence: TTG
ttgatcggacagtctctgcc

SEQ ID NO: 388027 - DNA, 20 bp, Artificial Sequence
  Description of Artificial Sequence: Synthetic oligonucleotide
  Target: LAMA2; (+) strand; PAM type: YTN; PAM sequence: TTG
atcggacagtctctgcctct

SEQ ID NO: 388028 - DNA, 20 bp, Artificial Sequence
  Description of Artificial Sequence: Synthetic oligonucleotide
  Target: LAMA2; (+) strand; PAM type: YTN; PAM sequence: CTC
tgcctctgcaatcacaagat

SEQ ID NO: 388029 - DNA, 20 bp, Artificial Sequence
  Description of Artificial Sequence: Synthetic oligonucleotide
  Target: LAMA2; (+) strand; PAM type: YTN; PAM sequence: CTG
cctctgcaatcacaagatag

SEQ ID NO: 388030 - DNA, 20 bp, Artificial Sequence
  Description of Artificial Sequence: Synthetic oligonucleotide
  Target: LAMA2; (+) strand; PAM type: YTN; PAM sequence: CTC
tgcaatcacaagatagttct

SEQ ID NO: 388031 - DNA, 20 bp, Artificial Sequence
  Description of Artificial Sequence: Synthetic oligonucleotide
  Target: LAMA2; (+) strand; PAM type: YTN; PAM sequence: CTG
caatcacaagatagttctct

SEQ ID NO: 388032 - DNA, 20 bp, Artificial Sequence
  Description of Artificial Sequence: Synthetic oligonucleotide
  Target: LAMA2; (+) strand; PAM type: YTN; PAM sequence: TTC
tctttctgtctctaaaccat

SEQ ID NO: 388033 - DNA, 20 bp, Artificial Sequence
  Description of Artificial Sequence: Synthetic oligonucleotide
  Target: LAMA2; (+) strand; PAM type: YTN; PAM sequence: CTC
tttctgtctctaaaccattg

SEQ ID NO: 388034 - DNA, 20 bp, Artificial Sequence
  Description of Artificial Sequence: Synthetic oligonucleotide
  Target: LAMA2; (+) strand; PAM type: YTN; PAM sequence: CTT
tctgtctctaaaccattgtt

SEQ ID NO: 388035 - DNA, 20 bp, Artificial Sequence
  Description of Artificial Sequence: Synthetic oligonucleotide
  Target: LAMA2; (+) strand; PAM type: YTN; PAM sequence: TTT
ctgtctctaaaccattgttt

SEQ ID NO: 388036 - DNA, 20 bp, Artificial Sequence
  Description of Artificial Sequence: Synthetic oligonucleotide
  Target: LAMA2; (+) strand; PAM type: YTN; PAM sequence: TTC
tgtctctaaaccattgtttt

SEQ ID NO: 388037 - DNA, 20 bp, Artificial Sequence
  Description of Artificial Sequence: Synthetic oligonucleotide
  Target: LAMA2; (+) strand; PAM type: YTN; PAM sequence: CTG
tctctaaaccattgttttta

SEQ ID NO: 388038 - DNA, 20 bp, Artificial Sequence
  Description of Artificial Sequence: Synthetic oligonucleotide
  Target: LAMA2; (+) strand; PAM type: YTN; PAM sequence: CTC
taaaccattgtttttaatgt

SEQ ID NO: 388039 - DNA, 20 bp, Artificial Sequence
  Description of Artificial Sequence: Synthetic oligonucleotide
  Target: LAMA2; (+) strand; PAM type: YTN; PAM sequence: CTA
aaccattgtttttaatgtat

SEQ ID NO: 388040 - DNA, 20 bp, Artificial Sequence
  Description of Artificial Sequence: Synthetic oligonucleotide
  Target: LAMA2; (+) strand; PAM type: YTN; PAM sequence: TTG
tttttaatgtattctcctgt

SEQ ID NO: 388041 - DNA, 20 bp, Artificial Sequence
  Description of Artificial Sequence: Synthetic oligonucleotide
  Target: LAMA2; (+) strand; PAM type: YTN; PAM sequence: TTT
ttaatgtattctcctgttcc

SEQ ID NO: 388042 - DNA, 20 bp, Artificial Sequence
  Description of Artificial Sequence: Synthetic oligonucleotide
  Target: LAMA2; (+) strand; PAM type: YTN; PAM sequence: TTT
taatgtattctcctgttcct

SEQ ID NO: 388043 - DNA, 20 bp, Artificial Sequence
  Description of Artificial Sequence: Synthetic oligonucleotide
  Target: LAMA2; (+) strand; PAM type: YTN; PAM sequence: TTT
aatgtattctcctgttcctc

SEQ ID NO: 388044 - DNA, 20 bp, Artificial Sequence
  Description of Artificial Sequence: Synthetic oligonucleotide
  Target: LAMA2; (+) strand; PAM type: YTN; PAM sequence: TTA
atgtattctcctgttcctca

SEQ ID NO: 388045 - DNA, 20 bp, Artificial Sequence
  Description of Artificial Sequence: Synthetic oligonucleotide
  Target: LAMA2; (+) strand; PAM type: YTN; PAM sequence: TTC
tcctgttcctcacacatctg

SEQ ID NO: 388046 - DNA, 20 bp, Artificial Sequence
  Description of Artificial Sequence: Synthetic oligonucleotide
  Target: LAMA2; (+) strand; PAM type: YTN; PAM sequence: CTC
ctgttcctcacacatctgtg

SEQ ID NO: 388047 - DNA, 20 bp, Artificial Sequence
  Description of Artificial Sequence: Synthetic oligonucleotide
  Target: LAMA2; (+) strand; PAM type: YTN; PAM sequence: CTG
ttcctcacacatctgtgagg

SEQ ID NO: 388048 - DNA, 20 bp, Artificial Sequence
  Description of Artificial Sequence: Synthetic oligonucleotide
  Target: LAMA2; (+) strand; PAM type: YTN; PAM sequence: TTC
ctcacacatctgtgaggttt

SEQ ID NO: 388049 - DNA, 20 bp, Artificial Sequence
  Description of Artificial Sequence: Synthetic oligonucleotide
  Target: LAMA2; (+) strand; PAM type: YTN; PAM sequence: CTC
acacatctgtgaggttttct

SEQ ID NO: 388050 - DNA, 20 bp, Artificial Sequence
  Description of Artificial Sequence: Synthetic oligonucleotide
  Target: LAMA2; (+) strand; PAM type: YTN; PAM sequence: CTG
tgaggttttctatcttgttc

SEQ ID NO: 388051 - DNA, 20 bp, Artificial Sequence
  Description of Artificial Sequence: Synthetic oligonucleotide
  Target: LAMA2; (+) strand; PAM type: YTN; PAM sequence: TTT
tctatcttgttctcacattc

SEQ ID NO: 388052 - DNA, 20 bp, Artificial Sequence
  Description of Artificial Sequence: Synthetic oligonucleotide
  Target: LAMA2; (+) strand; PAM type: YTN; PAM sequence: TTT
ctatcttgttctcacattca

SEQ ID NO: 388053 - DNA, 20 bp, Artificial Sequence
  Description of Artificial Sequence: Synthetic oligonucleotide
  Target: LAMA2; (+) strand; PAM type: YTN; PAM sequence: TTC
tatcttgttctcacattcag

SEQ ID NO: 388054 - DNA, 20 bp, Artificial Sequence
  Description of Artificial Sequence: Synthetic oligonucleotide
  Target: LAMA2; (+) strand; PAM type: YTN; PAM sequence: CTA
tcttgttctcacattcagaa

SEQ ID NO: 388055 - DNA, 20 bp, Artificial Sequence
  Description of Artificial Sequence: Synthetic oligonucleotide
  Target: LAMA2; (+) strand; PAM type: YTN; PAM sequence: CTT
gttctcacattcagaagttt

SEQ ID NO: 388056 - DNA, 20 bp, Artificial Sequence
  Description of Artificial Sequence: Synthetic oligonucleotide
  Target: LAMA2; (+) strand; PAM type: YTN; PAM sequence: TTG
ttctcacattcagaagtttt

SEQ ID NO: 388057 - DNA, 20 bp, Artificial Sequence
  Description of Artificial Sequence: Synthetic oligonucleotide
  Target: LAMA2; (+) strand; PAM type: YTN; PAM sequence: TTC
tcacattcagaagttttctt

SEQ ID NO: 388058 - DNA, 20 bp, Artificial Sequence
  Description of Artificial Sequence: Synthetic oligonucleotide
  Target: LAMA2; (+) strand; PAM type: YTN; PAM sequence: CTC
acattcagaagttttcttcc

SEQ ID NO: 388059 - DNA, 20 bp, Artificial Sequence
  Description of Artificial Sequence: Synthetic oligonucleotide
  Target: LAMA2; (+) strand; PAM type: YTN; PAM sequence: TTC
agaagttttcttccggccaa

SEQ ID NO: 388060 - DNA, 20 bp, Artificial Sequence
  Description of Artificial Sequence: Synthetic oligonucleotide
  Target: LAMA2; (+) strand; PAM type: YTN; PAM sequence: TTT
tcttccggccaaccccaacc

SEQ ID NO: 388061 - DNA, 20 bp, Artificial Sequence
  Description of Artificial Sequence: Synthetic oligonucleotide
  Target: LAMA2; (+) strand; PAM type: YTN; PAM sequence: TTT
cttccggccaaccccaacct

SEQ ID NO: 388062 - DNA, 20 bp, Artificial Sequence
  Description of Artificial Sequence: Synthetic oligonucleotide
  Target: LAMA2; (+) strand; PAM type: YTN; PAM sequence: TTC
ttccggccaaccccaacctc

SEQ ID NO: 388063 - DNA, 20 bp, Artificial Sequence
  Description of Artificial Sequence: Synthetic oligonucleotide
  Target: LAMA2; (+) strand; PAM type: YTN; PAM sequence: CTT
ccggccaaccccaacctctt

SEQ ID NO: 388064 - DNA, 20 bp, Artificial Sequence
  Description of Artificial Sequence: Synthetic oligonucleotide
  Target: LAMA2; (+) strand; PAM type: YTN; PAM sequence: TTC
cggccaaccccaacctcttc

SEQ ID NO: 388065 - DNA, 20 bp, Artificial Sequence
  Description of Artificial Sequence: Synthetic oligonucleotide
  Target: LAMA2; (+) strand; PAM type: YTN; PAM sequence: CTC
ttccctcttcccctcttccc

SEQ ID NO: 388066 - DNA, 20 bp, Artificial Sequence
  Description of Artificial Sequence: Synthetic oligonucleotide
  Target: LAMA2; (+) strand; PAM type: YTN; PAM sequence: CTT
ccctcttcccctcttcccct

SEQ ID NO: 388067 - DNA, 20 bp, Artificial Sequence
  Description of Artificial Sequence: Synthetic oligonucleotide
  Target: LAMA2; (+) strand; PAM type: YTN; PAM sequence: TTC
cctcttcccctcttcccctc

SEQ ID NO: 388068 - DNA, 20 bp, Artificial Sequence
  Description of Artificial Sequence: Synthetic oligonucleotide
  Target: LAMA2; (+) strand; PAM type: YTN; PAM sequence: CTC
ttcccctcttcccctctctc

SEQ ID NO: 388069 - DNA, 20 bp, Artificial Sequence
  Description of Artificial Sequence: Synthetic oligonucleotide
  Target: LAMA2; (+) strand; PAM type: YTN; PAM sequence: CTT
cccctcttcccctctctctt

SEQ ID NO: 388070 - DNA, 20 bp, Artificial Sequence
  Description of Artificial Sequence: Synthetic oligonucleotide
  Target: LAMA2; (+) strand; PAM type: YTN; PAM sequence: TTC
ccctcttcccctctctcttc

SEQ ID NO: 388071 - DNA, 20 bp, Artificial Sequence
  Description of Artificial Sequence: Synthetic oligonucleotide
  Target: LAMA2; (+) strand; PAM type: YTN; PAM sequence: CTC
ttcccctctctcttctctcc

SEQ ID NO: 388072 - DNA, 20 bp, Artificial Sequence
  Description of Artificial Sequence: Synthetic oligonucleotide
  Target: LAMA2; (+) strand; PAM type: YTN; PAM sequence: CTT
cccctctctcttctctccta

SEQ ID NO: 388073 - DNA, 20 bp, Artificial Sequence
  Description of Artificial Sequence: Synthetic oligonucleotide
  Target: LAMA2; (+) strand; PAM type: YTN; PAM sequence: TTC
ccctctctcttctctcctaa

SEQ ID NO: 388074 - DNA, 20 bp, Artificial Sequence
  Description of Artificial Sequence: Synthetic oligonucleotide
  Target: LAMA2; (+) strand; PAM type: YTN; PAM sequence: CTC
tctcttctctcctaacattc

SEQ ID NO: 388075 - DNA, 20 bp, Artificial Sequence
  Description of Artificial Sequence: Synthetic oligonucleotide
  Target: LAMA2; (+) strand; PAM type: YTN; PAM sequence: CTC
tcttctctcctaacattcta

SEQ ID NO: 388076 - DNA, 20 bp, Artificial Sequence
  Description of Artificial Sequence: Synthetic oligonucleotide
  Target: LAMA2; (+) strand; PAM type: YTN; PAM sequence: CTC
ttctctcctaacattctacc

SEQ ID NO: 388077 - DNA, 20 bp, Artificial Sequence
  Description of Artificial Sequence: Synthetic oligonucleotide
  Target: LAMA2; (+) strand; PAM type: YTN; PAM sequence: CTT
ctctcctaacattctacctc

SEQ ID NO: 388078 - DNA, 20 bp, Artificial Sequence
  Description of Artificial Sequence: Synthetic oligonucleotide
  Target: LAMA2; (+) strand; PAM type: YTN; PAM sequence: TTC
tctcctaacattctacctcc

SEQ ID NO: 388079 - DNA, 20 bp, Artificial Sequence
  Description of Artificial Sequence: Synthetic oligonucleotide
  Target: LAMA2; (+) strand; PAM type: YTN; PAM sequence: CTC
tcctaacattctacctccct

SEQ ID NO: 388080 - DNA, 20 bp, Artificial Sequence
  Description of Artificial Sequence: Synthetic oligonucleotide
  Target: LAMA2; (+) strand; PAM type: YTN; PAM sequence: CTC
ctaacattctacctccctga

SEQ ID NO: 388081 - DNA, 20 bp, Artificial Sequence
  Description of Artificial Sequence: Synthetic oligonucleotide
  Target: LAMA2; (+) strand; PAM type: YTN; PAM sequence: CTA
acattctacctccctgatct

SEQ ID NO: 388082 - DNA, 20 bp, Artificial Sequence
  Description of Artificial Sequence: Synthetic oligonucleotide
  Target: LAMA2; (+) strand; PAM type: YTN; PAM sequence: TTC
tacctccctgatcttctcac

SEQ ID NO: 388083 - DNA, 20 bp, Artificial Sequence
  Description of Artificial Sequence: Synthetic oligonucleotide
  Target: LAMA2; (+) strand; PAM type: YTN; PAM sequence: CTA
cctccctgatcttctcacta

SEQ ID NO: 388084 - DNA, 20 bp, Artificial Sequence
  Description of Artificial Sequence: Synthetic oligonucleotide
  Target: LAMA2; (+) strand; PAM type: YTN; PAM sequence: CTC
cctgatcttctcactatttc

SEQ ID NO: 388085 - DNA, 20 bp, Artificial Sequence
  Description of Artificial Sequence: Synthetic oligonucleotide
  Target: LAMA2; (+) strand; PAM type: YTN; PAM sequence: CTG
atcttctcactatttcatgt

SEQ ID NO: 388086 - DNA, 20 bp, Artificial Sequence
  Description of Artificial Sequence: Synthetic oligonucleotide
  Target: LAMA2; (+) strand; PAM type: YTN; PAM sequence: CTT
ctcactatttcatgtacttg

SEQ ID NO: 388087 - DNA, 20 bp, Artificial Sequence
  Description of Artificial Sequence: Synthetic oligonucleotide
  Target: LAMA2; (+) strand; PAM type: YTN; PAM sequence: TTC
tcactatttcatgtacttgg

SEQ ID NO: 388088 - DNA, 20 bp, Artificial Sequence
  Description of Artificial Sequence: Synthetic oligonucleotide
  Target: LAMA2; (+) strand; PAM type: YTN; PAM sequence: CTC
actatttcatgtacttgggc

SEQ ID NO: 388089 - DNA, 20 bp, Artificial Sequence
  Description of Artificial Sequence: Synthetic oligonucleotide
  Target: LAMA2; (+) strand; PAM type: YTN; PAM sequence: CTA
tttcatgtacttgggcacat

SEQ ID NO: 388090 - DNA, 20 bp, Artificial Sequence
  Description of Artificial Sequence: Synthetic oligonucleotide
  Target: LAMA2; (+) strand; PAM type: YTN; PAM sequence: TTT
catgtacttgggcacatgcc

SEQ ID NO: 388091 - DNA, 20 bp, Artificial Sequence
  Description of Artificial Sequence: Synthetic oligonucleotide
  Target: LAMA2; (+) strand; PAM type: YTN; PAM sequence: TTC
atgtacttgggcacatgcca

SEQ ID NO: 388092 - DNA, 20 bp, Artificial Sequence
  Description of Artificial Sequence: Synthetic oligonucleotide
  Target: LAMA2; (+) strand; PAM type: YTN; PAM sequence: CTT
gggcacatgccatgctcaaa

SEQ ID NO: 388093 - DNA, 20 bp, Artificial Sequence
  Description of Artificial Sequence: Synthetic oligonucleotide
  Target: LAMA2; (+) strand; PAM type: YTN; PAM sequence: TTG
ggcacatgccatgctcaaac

SEQ ID NO: 388094 - DNA, 20 bp, Artificial Sequence
  Description of Artificial Sequence: Synthetic oligonucleotide
  Target: LAMA2; (+) strand; PAM type: YTN; PAM sequence: CTC
aaacattaacccttgccatt

SEQ ID NO: 388095 - DNA, 20 bp, Artificial Sequence
  Description of Artificial Sequence: Synthetic oligonucleotide
  Target: LAMA2; (+) strand; PAM type: YTN; PAM sequence: TTA
acccttgccattctctttgt

SEQ ID NO: 388096 - DNA, 20 bp, Artificial Sequence
  Description of Artificial Sequence: Synthetic oligonucleotide
  Target: LAMA2; (+) strand; PAM type: YTN; PAM sequence: CTT
gccattctctttgtccaaag

SEQ ID NO: 388097 - DNA, 20 bp, Artificial Sequence
  Description of Artificial Sequence: Synthetic oligonucleotide
  Target: LAMA2; (+) strand; PAM type: YTN; PAM sequence: TTG
ccattctctttgtccaaagt

SEQ ID NO: 388098 - DNA, 20 bp, Artificial Sequence
  Description of Artificial Sequence: Synthetic oligonucleotide
  Target: LAMA2; (+) strand; PAM type: YTN; PAM sequence: TTC
tctttgtccaaagtgttttg

SEQ ID NO: 388099 - DNA, 20 bp, Artificial Sequence
  Description of Artificial Sequence: Synthetic oligonucleotide
  Target: LAMA2; (+) strand; PAM type: YTN; PAM sequence: CTC
tttgtccaaagtgttttgat

SEQ ID NO: 388100 - DNA, 20 bp, Artificial Sequence
  Description of Artificial Sequence: Synthetic oligonucleotide
  Target: LAMA2; (+) strand; PAM type: YTN; PAM sequence: CTT
tgtccaaagtgttttgatac

SEQ ID NO: 388101 - DNA, 20 bp, Artificial Sequence
  Description of Artificial Sequence: Synthetic oligonucleotide
  Target: LAMA2; (+) strand; PAM type: YTN; PAM sequence: TTT
gtccaaagtgttttgatacc

SEQ ID NO: 388102 - DNA, 20 bp, Artificial Sequence
  Description of Artificial Sequence: Synthetic oligonucleotide
  Target: LAMA2; (+) strand; PAM type: YTN; PAM sequence: TTG
tccaaagtgttttgataccc

SEQ ID NO: 388103 - DNA, 20 bp, Artificial Sequence
  Description of Artificial Sequence: Synthetic oligonucleotide
  Target: LAMA2; (+) strand; PAM type: YTN; PAM sequence: TTT
tgatacccttctctcacaaa

SEQ ID NO: 388104 - DNA, 20 bp, Artificial Sequence
  Description of Artificial Sequence: Synthetic oligonucleotide
  Target: LAMA2; (+) strand; PAM type: YTN; PAM sequence: TTT
gatacccttctctcacaaaa

SEQ ID NO: 388105 - DNA, 20 bp, Artificial Sequence
  Description of Artificial Sequence: Synthetic oligonucleotide
  Target: LAMA2; (+) strand; PAM type: YTN; PAM sequence: TTG
atacccttctctcacaaaaa

SEQ ID NO: 388106 - DNA, 20 bp, Artificial Sequence
  Description of Artificial Sequence: Synthetic oligonucleotide
  Target: LAMA2; (+) strand; PAM type: YTN; PAM sequence: CTT
ctctcacaaaaatattagcc

SEQ ID NO: 388107 - DNA, 20 bp, Artificial Sequence
  Description of Artificial Sequence: Synthetic oligonucleotide
  Target: LAMA2; (+) strand; PAM type: YTN; PAM sequence: TTC
tctcacaaaaatattagccc

SEQ ID NO: 388108 - DNA, 20 bp, Artificial Sequence
  Description of Artificial Sequence: Synthetic oligonucleotide
  Target: LAMA2; (+) strand; PAM type: YTN; PAM sequence: CTC
tcacaaaaatattagcccac

SEQ ID NO: 388109 - DNA, 20 bp, Artificial Sequence
  Description of Artificial Sequence: Synthetic oligonucleotide
  Target: LAMA2; (+) strand; PAM type: YTN; PAM sequence: CTC
acaaaaatattagcccacaa

SEQ ID NO: 388110 - DNA, 20 bp, Artificial Sequence
  Description of Artificial Sequence: Synthetic oligonucleotide
  Target: LAMA2; (+) strand; PAM type: YTN; PAM sequence: TTA
gcccacaaatatttactgaa

SEQ ID NO: 388111 - DNA, 20 bp, Artificial Sequence
  Description of Artificial Sequence: Synthetic oligonucleotide
  Target: LAMA2; (+) strand; PAM type: YTN; PAM sequence: TTT
actgaatattaactgtgtac

SEQ ID NO: 388112 - DNA, 20 bp, Artificial Sequence
  Description of Artificial Sequence: Synthetic oligonucleotide
  Target: LAMA2; (+) strand; PAM type: YTN; PAM sequence: TTA
ctgaatattaactgtgtaca

SEQ ID NO: 388113 - DNA, 20 bp, Artificial Sequence
  Description of Artificial Sequence: Synthetic oligonucleotide
  Target: LAMA2; (+) strand; PAM type: YTN; PAM sequence: CTG
aatattaactgtgtacaaga

SEQ ID NO: 388114 - DNA, 20 bp, Artificial Sequence
  Description of Artificial Sequence: Synthetic oligonucleotide
  Target: LAMA2; (+) strand; PAM type: YTN; PAM sequence: TTA
actgtgtacaagaccctttc

SEQ ID NO: 388115 - DNA, 20 bp, Artificial Sequence
  Description of Artificial Sequence: Synthetic oligonucleotide
  Target: LAMA2; (+) strand; PAM type: YTN; PAM sequence: CTG
tgtacaagaccctttcctag

SEQ ID NO: 388116 - DNA, 20 bp, Artificial Sequence
  Description of Artificial Sequence: Synthetic oligonucleotide
  Target: LAMA2; (+) strand; PAM type: YTN; PAM sequence: CTT
tcctaggcaccataaccaag

SEQ ID NO: 388117 - DNA, 20 bp, Artificial Sequence
  Description of Artificial Sequence: Synthetic oligonucleotide
  Target: LAMA2; (+) strand; PAM type: YTN; PAM sequence: TTT
cctaggcaccataaccaagg

SEQ ID NO: 388118 - DNA, 20 bp, Artificial Sequence
  Description of Artificial Sequence: Synthetic oligonucleotide
  Target: LAMA2; (+) strand; PAM type: YTN; PAM sequence: TTC
ctaggcaccataaccaaggt

SEQ ID NO: 388119 - DNA, 20 bp, Artificial Sequence
  Description of Artificial Sequence: Synthetic oligonucleotide
  Target: LAMA2; (+) strand; PAM type: YTN; PAM sequence: CTA
ggcaccataaccaaggtgtt

SEQ ID NO: 388120 - DNA, 20 bp, Artificial Sequence
  Description of Artificial Sequence: Synthetic oligonucleotide
  Target: LAMA2; (+) strand; PAM type: YTN; PAM sequence: TTT
aaggtcccttctttaacgag

SEQ ID NO: 388121 - DNA, 20 bp, Artificial Sequence
  Description of Artificial Sequence: Synthetic oligonucleotide
  Target: LAMA2; (+) strand; PAM type: YTN; PAM sequence: TTA
aggtcccttctttaacgagg

SEQ ID NO: 388122 - DNA, 20 bp, Artificial Sequence
  Description of Artificial Sequence: Synthetic oligonucleotide
  Target: LAMA2; (+) strand; PAM type: YTN; PAM sequence: CTT
ctttaacgaggaagaaagaa

SEQ ID NO: 388123 - DNA, 20 bp, Artificial Sequence
  Description of Artificial Sequence: Synthetic oligonucleotide
  Target: LAMA2; (+) strand; PAM type: YTN; PAM sequence: TTC
tttaacgaggaagaaagaat

SEQ ID NO: 388124 - DNA, 20 bp, Artificial Sequence
  Description of Artificial Sequence: Synthetic oligonucleotide
  Target: LAMA2; (+) strand; PAM type: YTN; PAM sequence: CTT
taacgaggaagaaagaatat

SEQ ID NO: 388125 - DNA, 20 bp, Artificial Sequence
  Description of Artificial Sequence: Synthetic oligonucleotide
  Target: LAMA2; (+) strand; PAM type: YTN; PAM sequence: TTT
aacgaggaagaaagaatata

SEQ ID NO: 388126 - DNA, 20 bp, Artificial Sequence
  Description of Artificial Sequence: Synthetic oligonucleotide
  Target: LAMA2; (+) strand; PAM type: YTN; PAM sequence: TTA
acgaggaagaaagaatatat

SEQ ID NO: 388127 - DNA, 20 bp, Artificial Sequence
  Description of Artificial Sequence: Synthetic oligonucleotide
  Target: LAMA2; (+) strand; PAM type: YTN; PAM sequence: TTA
agtaataatgtagcccaaac

SEQ ID NO: 388128 - DNA, 20 bp, Artificial Sequence
  Description of Artificial Sequence: Synthetic oligonucleotide
  Target: LAMA2; (+) strand; PAM type: YTN; PAM sequence: TTA
agaaagcaaaggaaatgcag

SEQ ID NO: 388129 - DNA, 20 bp, Artificial Sequence
  Description of Artificial Sequence: Synthetic oligonucleotide
  Target: LAMA2; (+) strand; PAM type: YTN; PAM sequence: CTG
gcgcagggtatagggctggg

SEQ ID NO: 388130 - DNA, 20 bp, Artificial Sequence
  Description of Artificial Sequence: Synthetic oligonucleotide
  Target: LAMA2; (+) strand; PAM type: YTN; PAM sequence: CTG
ggggtggtggggagtttcag

SEQ ID NO: 388131 - DNA, 20 bp, Artificial Sequence
  Description of Artificial Sequence: Synthetic oligonucleotide
  Target: LAMA2; (+) strand; PAM type: YTN; PAM sequence: TTT
caggtaacagtaattttaga

SEQ ID NO: 388132 - DNA, 20 bp, Artificial Sequence
  Description of Artificial Sequence: Synthetic oligonucleotide
  Target: LAMA2; (+) strand; PAM type: YTN; PAM sequence: TTC
aggtaacagtaattttagaa

SEQ ID NO: 388133 - DNA, 20 bp, Artificial Sequence
  Description of Artificial Sequence: Synthetic oligonucleotide
  Target: LAMA2; (+) strand; PAM type: YTN; PAM sequence: TTT
tagaatcatcagggacttgc

SEQ ID NO: 388134 - DNA, 20 bp, Artificial Sequence
  Description of Artificial Sequence: Synthetic oligonucleotide
  Target: LAMA2; (+) strand; PAM type: YTN; PAM sequence: TTT
agaatcatcagggacttgct

SEQ ID NO: 388135 - DNA, 20 bp, Artificial Sequence
  Description of Artificial Sequence: Synthetic oligonucleotide
  Target: LAMA2; (+) strand; PAM type: YTN; PAM sequence: TTA
gaatcatcagggacttgctc

SEQ ID NO: 388136 - DNA, 20 bp, Artificial Sequence
  Description of Artificial Sequence: Synthetic oligonucleotide
  Target: LAMA2; (+) strand; PAM type: YTN; PAM sequence: CTT
gctctctgaaaaagtgacac

SEQ ID NO: 388137 - DNA, 20 bp, Artificial Sequence
  Description of Artificial Sequence: Synthetic oligonucleotide
  Target: LAMA2; (+) strand; PAM type: YTN; PAM sequence: TTG
ctctctgaaaaagtgacact

SEQ ID NO: 388138 - DNA, 20 bp, Artificial Sequence
  Description of Artificial Sequence: Synthetic oligonucleotide
  Target: LAMA2; (+) strand; PAM type: YTN; PAM sequence: CTC
tctgaaaaagtgacacttga

SEQ ID NO: 388139 - DNA, 20 bp, Artificial Sequence
  Description of Artificial Sequence: Synthetic oligonucleotide
  Target: LAMA2; (+) strand; PAM type: YTN; PAM sequence: CTC
tgaaaaagtgacacttgagc

SEQ ID NO: 388140 - DNA, 20 bp, Artificial Sequence
  Description of Artificial Sequence: Synthetic oligonucleotide
  Target: LAMA2; (+) strand; PAM type: YTN; PAM sequence: CTG
aaaaagtgacacttgagcac

SEQ ID NO: 388141 - DNA, 20 bp, Artificial Sequence
  Description of Artificial Sequence: Synthetic oligonucleotide
  Target: LAMA2; (+) strand; PAM type: YTN; PAM sequence: CTT
gagcacttgacctgaacacc

SEQ ID NO: 388142 - DNA, 20 bp, Artificial Sequence
  Description of Artificial Sequence: Synthetic oligonucleotide
  Target: LAMA2; (+) strand; PAM type: YTN; PAM sequence: TTG
agcacttgacctgaacacct

SEQ ID NO: 388143 - DNA, 20 bp, Artificial Sequence
  Description of Artificial Sequence: Synthetic oligonucleotide
  Target: LAMA2; (+) strand; PAM type: YTN; PAM sequence: CTT
gacctgaacacctaggaacc

SEQ ID NO: 388144 - DNA, 20 bp, Artificial Sequence
  Description of Artificial Sequence: Synthetic oligonucleotide
  Target: LAMA2; (+) strand; PAM type: YTN; PAM sequence: TTG
acctgaacacctaggaacca

SEQ ID NO: 388145 - DNA, 20 bp, Artificial Sequence
  Description of Artificial Sequence: Synthetic oligonucleotide
  Target: LAMA2; (+) strand; PAM type: YTN; PAM sequence: CTG
aacacctaggaaccaggtgg

SEQ ID NO: 388146 - DNA, 20 bp, Artificial Sequence
  Description of Artificial Sequence: Synthetic oligonucleotide
  Target: LAMA2; (+) strand; PAM type: YTN; PAM sequence: CTA
ggaaccaggtgggagaagac

SEQ ID NO: 388147 - DNA, 20 bp, Artificial Sequence
  Description of Artificial Sequence: Synthetic oligonucleotide
  Target: LAMA2; (+) strand; PAM type: YTN; PAM sequence: TTC
taggtagagaagacagcaag

SEQ ID NO: 388148 - DNA, 20 bp, Artificial Sequence
  Description of Artificial Sequence: Synthetic oligonucleotide
  Target: LAMA2; (+) strand; PAM type: YTN; PAM sequence: CTA
ggtagagaagacagcaagca

SEQ ID NO: 388149 - DNA, 20 bp, Artificial Sequence
  Description of Artificial Sequence: Synthetic oligonucleotide
  Target: LAMA2; (+) strand; PAM type: YTN; PAM sequence: CTC
ttccaaatccttgctccctt

SEQ ID NO: 388150 - DNA, 20 bp, Artificial Sequence
  Description of Artificial Sequence: Synthetic oligonucleotide
  Target: LAMA2; (+) strand; PAM type: YTN; PAM sequence: CTT
ccaaatccttgctcccttga

SEQ ID NO: 388151 - DNA, 20 bp, Artificial Sequence
  Description of Artificial Sequence: Synthetic oligonucleotide
  Target: LAMA2; (+) strand; PAM type: YTN; PAM sequence: TTC
caaatccttgctcccttgaa

SEQ ID NO: 388152 - DNA, 20 bp, Artificial Sequence
  Description of Artificial Sequence: Synthetic oligonucleotide
  Target: LAMA2; (+) strand; PAM type: YTN; PAM sequence: CTT
gctcccttgaagattgagca

SEQ ID NO: 388153 - DNA, 20 bp, Artificial Sequence
  Description of Artificial Sequence: Synthetic oligonucleotide
  Target: LAMA2; (+) strand; PAM type: YTN; PAM sequence: TTG
ctcccttgaagattgagcat

SEQ ID NO: 388154 - DNA, 20 bp, Artificial Sequence
  Description of Artificial Sequence: Synthetic oligonucleotide
  Target: LAMA2; (+) strand; PAM type: YTN; PAM sequence: CTC
ccttgaagattgagcatccc

SEQ ID NO: 388155 - DNA, 20 bp, Artificial Sequence
  Description of Artificial Sequence: Synthetic oligonucleotide
  Target: LAMA2; (+) strand; PAM type: YTN; PAM sequence: CTT
gaagattgagcatccctata

SEQ ID NO: 388156 - DNA, 20 bp, Artificial Sequence
  Description of Artificial Sequence: Synthetic oligonucleotide
  Target: LAMA2; (+) strand; PAM type: YTN; PAM sequence: TTG
aagattgagcatccctataa

SEQ ID NO: 388157 - DNA, 20 bp, Artificial Sequence
  Description of Artificial Sequence: Synthetic oligonucleotide
  Target: LAMA2; (+) strand; PAM type: YTN; PAM sequence: TTG
agcatccctataatttatca

SEQ ID NO: 388158 - DNA, 20 bp, Artificial Sequence
  Description of Artificial Sequence: Synthetic oligonucleotide
  Target: LAMA2; (+) strand; PAM type: YTN; PAM sequence: CTA
taatttatcacctggtccag

SEQ ID NO: 388159 - DNA, 20 bp, Artificial Sequence
  Description of Artificial Sequence: Synthetic oligonucleotide
  Target: LAMA2; (+) strand; PAM type: YTN; PAM sequence: TTT
atcacctggtccagtggttt

SEQ ID NO: 388160 - DNA, 20 bp, Artificial Sequence
  Description of Artificial Sequence: Synthetic oligonucleotide
  Target: LAMA2; (+) strand; PAM type: YTN; PAM sequence: TTA
tcacctggtccagtggtttt

SEQ ID NO: 388161 - DNA, 20 bp, Artificial Sequence
  Description of Artificial Sequence: Synthetic oligonucleotide
  Target: LAMA2; (+) strand; PAM type: YTN; PAM sequence: CTG
gtccagtggttttatccttt

SEQ ID NO: 388162 - DNA, 20 bp, Artificial Sequence
  Description of Artificial Sequence: Synthetic oligonucleotide
  Target: LAMA2; (+) strand; PAM type: YTN; PAM sequence: TTT
tatcctttggctacatggtt

SEQ ID NO: 388163 - DNA, 20 bp, Artificial Sequence
  Description of Artificial Sequence: Synthetic oligonucleotide
  Target: LAMA2; (+) strand; PAM type: YTN; PAM sequence: TTT
atcctttggctacatggttt

SEQ ID NO: 388164 - DNA, 20 bp, Artificial Sequence
  Description of Artificial Sequence: Synthetic oligonucleotide
  Target: LAMA2; (+) strand; PAM type: YTN; PAM sequence: TTA
tcctttggctacatggtttt

SEQ ID NO: 388165 - DNA, 20 bp, Artificial Sequence
  Description of Artificial Sequence: Synthetic oligonucleotide
  Target: LAMA2; (+) strand; PAM type: YTN; PAM sequence: CTT
tggctacatggtttttcaat

SEQ ID NO: 388166 - DNA, 20 bp, Artificial Sequence
  Description of Artificial Sequence: Synthetic oligonucleotide
  Target: LAMA2; (+) strand; PAM type: YTN; PAM sequence: TTT
ggctacatggtttttcaatt

SEQ ID NO: 388167 - DNA, 20 bp, Artificial Sequence
  Description of Artificial Sequence: Synthetic oligonucleotide
  Target: LAMA2; (+) strand; PAM type: YTN; PAM sequence: TTG
gctacatggtttttcaatta

SEQ ID NO: 388168 - DNA, 20 bp, Artificial Sequence
  Description of Artificial Sequence: Synthetic oligonucleotide
  Target: LAMA2; (+) strand; PAM type: YTN; PAM sequence: CTA
catggtttttcaattactgg

SEQ ID NO: 388169 - DNA, 20 bp, Artificial Sequence
  Description of Artificial Sequence: Synthetic oligonucleotide
  Target: LAMA2; (+) strand; PAM type: YTN; PAM sequence: TTT
ttcaattactggaatatttt

SEQ ID NO: 388170 - DNA, 20 bp, Artificial Sequence
  Description of Artificial Sequence: Synthetic oligonucleotide
  Target: LAMA2; (+) strand; PAM type: YTN; PAM sequence: TTT
tcaattactggaatattttt

SEQ ID NO: 388171 - DNA, 20 bp, Artificial Sequence
  Description of Artificial Sequence: Synthetic oligonucleotide
  Target: LAMA2; (+) strand; PAM type: YTN; PAM sequence: TTT
caattactggaatattttta

SEQ ID NO: 388172 - DNA, 20 bp, Artificial Sequence
  Description of Artificial Sequence: Synthetic oligonucleotide
  Target: LAMA2; (+) strand; PAM type: YTN; PAM sequence: TTC
aattactggaatatttttaa

SEQ ID NO: 388173 - DNA, 20 bp, Artificial Sequence
  Description of Artificial Sequence: Synthetic oligonucleotide
  Target: LAMA2; (+) strand; PAM type: YTN; PAM sequence: TTA
ctggaatatttttaaaatac

SEQ ID NO: 388174 - DNA, 20 bp, Artificial Sequence
  Description of Artificial Sequence: Synthetic oligonucleotide
  Target: LAMA2; (+) strand; PAM type: YTN; PAM sequence: CTG
gaatatttttaaaatacagt

SEQ ID NO: 388175 - DNA, 20 bp, Artificial Sequence
  Description of Artificial Sequence: Synthetic oligonucleotide
  Target: LAMA2; (+) strand; PAM type: YTN; PAM sequence: TTT
ttaaaatacagtggttcacg

SEQ ID NO: 388176 - DNA, 20 bp, Artificial Sequence
  Description of Artificial Sequence: Synthetic oligonucleotide
  Target: LAMA2; (+) strand; PAM type: YTN; PAM sequence: TTT
taaaatacagtggttcacgc

SEQ ID NO: 388177 - DNA, 20 bp, Artificial Sequence
  Description of Artificial Sequence: Synthetic oligonucleotide
  Target: LAMA2; (+) strand; PAM type: YTN; PAM sequence: TTT
aaaatacagtggttcacgcc

SEQ ID NO: 388178 - DNA, 20 bp, Artificial Sequence
  Description of Artificial Sequence: Synthetic oligonucleotide
  Target: LAMA2; (+) strand; PAM type: YTN; PAM sequence: TTA
aaatacagtggttcacgcct

SEQ ID NO: 388179 - DNA, 20 bp, Artificial Sequence
  Description of Artificial Sequence: Synthetic oligonucleotide
  Target: LAMA2; (+) strand; PAM type: YTN; PAM sequence: TTC
acgcctatgatcccagcact

SEQ ID NO: 388180 - DNA, 20 bp, Artificial Sequence
  Description of Artificial Sequence: Synthetic oligonucleotide
  Target: LAMA2; (+) strand; PAM type: YTN; PAM sequence: CTA
tgatcccagcacttggggaa

SEQ ID NO: 388181 - DNA, 20 bp, Artificial Sequence
  Description of Artificial Sequence: Synthetic oligonucleotide
  Target: LAMA2; (+) strand; PAM type: YTN; PAM sequence: CTT
ggggaagctgaggtgggagg

SEQ ID NO: 388182 - DNA, 20 bp, Artificial Sequence
  Description of Artificial Sequence: Synthetic oligonucleotide
  Target: LAMA2; (+) strand; PAM type: YTN; PAM sequence: TTG
gggaagctgaggtgggagga

SEQ ID NO: 388183 - DNA, 20 bp, Artificial Sequence
  Description of Artificial Sequence: Synthetic oligonucleotide
  Target: LAMA2; (+) strand; PAM type: YTN; PAM sequence: CTG
aggtgggaggatcacttgag

SEQ ID NO: 388184 - DNA, 20 bp, Artificial Sequence
  Description of Artificial Sequence: Synthetic oligonucleotide
  Target: LAMA2; (+) strand; PAM type: YTN; PAM sequence: CTT
gaggccaggagtctgacatc

SEQ ID NO: 388185 - DNA, 20 bp, Artificial Sequence
  Description of Artificial Sequence: Synthetic oligonucleotide
  Target: LAMA2; (+) strand; PAM type: YTN; PAM sequence: TTG
aggccaggagtctgacatca

SEQ ID NO: 388186 - DNA, 20 bp, Artificial Sequence
  Description of Artificial Sequence: Synthetic oligonucleotide
  Target: LAMA2; (+) strand; PAM type: YTN; PAM sequence: CTG
acatcagccagggcaacaca

SEQ ID NO: 388187 - DNA, 20 bp, Artificial Sequence
  Description of Artificial Sequence: Synthetic oligonucleotide
  Target: LAMA2; (+) strand; PAM type: YTN; PAM sequence: CTC
tatgttaaaaaactagctgg

SEQ ID NO: 388188 - DNA, 20 bp, Artificial Sequence
  Description of Artificial Sequence: Synthetic oligonucleotide
  Target: LAMA2; (+) strand; PAM type: YTN; PAM sequence: CTA
tgttaaaaaactagctggat

SEQ ID NO: 388189 - DNA, 20 bp, Artificial Sequence
  Description of Artificial Sequence: Synthetic oligonucleotide
  Target: LAMA2; (+) strand; PAM type: YTN; PAM sequence: TTA
aaaaactagctggatgtggt

SEQ ID NO: 388190 - DNA, 20 bp, Artificial Sequence
  Description of Artificial Sequence: Synthetic oligonucleotide
  Target: LAMA2; (+) strand; PAM type: YTN; PAM sequence: CTA
gctggatgtggtggcatgtg

SEQ ID NO: 388191 - DNA, 20 bp, Artificial Sequence
  Description of Artificial Sequence: Synthetic oligonucleotide
  Target: LAMA2; (+) strand; PAM type: YTN; PAM sequence: CTG
gatgtggtggcatgtgcctg

SEQ ID NO: 388192 - DNA, 20 bp, Artificial Sequence
  Description of Artificial Sequence: Synthetic oligonucleotide
  Target: LAMA2; (+) strand; PAM type: YTN; PAM sequence: CTG
tagtctcaaccactcgggag

SEQ ID NO: 388193 - DNA, 20 bp, Artificial Sequence
  Description of Artificial Sequence: Synthetic oligonucleotide
  Target: LAMA2; (+) strand; PAM type: YTN; PAM sequence: CTC
aaccactcgggaggctgagg

SEQ ID NO: 388194 - DNA, 20 bp, Artificial Sequence
  Description of Artificial Sequence: Synthetic oligonucleotide
  Target: LAMA2; (+) strand; PAM type: YTN; PAM sequence: CTC
gggaggctgaggcaggagga

SEQ ID NO: 388195 - DNA, 20 bp, Artificial Sequence
  Description of Artificial Sequence: Synthetic oligonucleotide
  Target: LAMA2; (+) strand; PAM type: YTN; PAM sequence: CTG
aggcaggaggatcactttag

SEQ ID NO: 388196 - DNA, 20 bp, Artificial Sequence
  Description of Artificial Sequence: Synthetic oligonucleotide
  Target: LAMA2; (+) strand; PAM type: YTN; PAM sequence: CTT
tagcccaggagtttgaggcc

SEQ ID NO: 388197 - DNA, 20 bp, Artificial Sequence
  Description of Artificial Sequence: Synthetic oligonucleotide
  Target: LAMA2; (+) strand; PAM type: YTN; PAM sequence: TTT
agcccaggagtttgaggccg

SEQ ID NO: 388198 - DNA, 20 bp, Artificial Sequence
  Description of Artificial Sequence: Synthetic oligonucleotide
  Target: LAMA2; (+) strand; PAM type: YTN; PAM sequence: TTA
gcccaggagtttgaggccgc

SEQ ID NO: 388199 - DNA, 20 bp, Artificial Sequence
  Description of Artificial Sequence: Synthetic oligonucleotide
  Target: LAMA2; (+) strand; PAM type: YTN; PAM sequence: TTT
gaggccgcagtgagtcatga

SEQ ID NO: 388200 - DNA, 20 bp, Artificial Sequence
  Description of Artificial Sequence: Synthetic oligonucleotide
  Target: LAMA2; (+) strand; PAM type: YTN; PAM sequence: TTG
aggccgcagtgagtcatgat

SEQ ID NO: 388201 - DNA, 20 bp, Artificial Sequence
  Description of Artificial Sequence: Synthetic oligonucleotide
  Target: LAMA2; (+) strand; PAM type: YTN; PAM sequence: CTG
tactccagcatgggtggcag

SEQ ID NO: 388202 - DNA, 20 bp, Artificial Sequence
  Description of Artificial Sequence: Synthetic oligonucleotide
  Target: LAMA2; (+) strand; PAM type: YTN; PAM sequence: CTC
cagcatgggtggcagagcaa

SEQ ID NO: 388203 - DNA, 20 bp, Artificial Sequence
  Description of Artificial Sequence: Synthetic oligonucleotide
  Target: LAMA2; (+) strand; PAM type: YTN; PAM sequence: CTG
tctcagaaaaaaataaaaat

SEQ ID NO: 388204 - DNA, 20 bp, Artificial Sequence
  Description of Artificial Sequence: Synthetic oligonucleotide
  Target: LAMA2; (+) strand; PAM type: YTN; PAM sequence: CTC
agaaaaaaataaaaatagaa

SEQ ID NO: 388205 - DNA, 20 bp, Artificial Sequence
  Description of Artificial Sequence: Synthetic oligonucleotide
  Target: LAMA2; (+) strand; PAM type: YTN; PAM sequence: CTG
atggttagaccttaccacag

SEQ ID NO: 388206 - DNA, 20 bp, Artificial Sequence
  Description of Artificial Sequence: Synthetic oligonucleotide
  Target: LAMA2; (+) strand; PAM type: YTN; PAM sequence: TTA
gaccttaccacagacccatc

SEQ ID NO: 388207 - DNA, 20 bp, Artificial Sequence
  Description of Artificial Sequence: Synthetic oligonucleotide
  Target: LAMA2; (+) strand; PAM type: YTN; PAM sequence: CTT
accacagacccatcaaaaat

SEQ ID NO: 388208 - DNA, 20 bp, Artificial Sequence
  Description of Artificial Sequence: Synthetic oligonucleotide
  Target: LAMA2; (+) strand; PAM type: YTN; PAM sequence: TTA
ccacagacccatcaaaaatc

SEQ ID NO: 388209 - DNA, 20 bp, Artificial Sequence
  Description of Artificial Sequence: Synthetic oligonucleotide
  Target: LAMA2; (+) strand; PAM type: YTN; PAM sequence: TTC
tgtggtggtgaggagggaaa

SEQ ID NO: 388210 - DNA, 20 bp, Artificial Sequence
  Description of Artificial Sequence: Synthetic oligonucleotide
  Target: LAMA2; (+) strand; PAM type: YTN; PAM sequence: CTG
tggtggtgaggagggaaaga

SEQ ID NO: 388211 - DNA, 20 bp, Artificial Sequence
  Description of Artificial Sequence: Synthetic oligonucleotide
  Target: LAMA2; (+) strand; PAM type: YTN; PAM sequence: CTG
tattttataaatgttcatgt

SEQ ID NO: 388212 - DNA, 20 bp, Artificial Sequence
  Description of Artificial Sequence: Synthetic oligonucleotide
  Target: LAMA2; (+) strand; PAM type: YTN; PAM sequence: TTT
tataaatgttcatgtgattc

SEQ ID NO: 388213 - DNA, 20 bp, Artificial Sequence
  Description of Artificial Sequence: Synthetic oligonucleotide
  Target: LAMA2; (+) strand; PAM type: YTN; PAM sequence: TTT
ataaatgttcatgtgattcc

SEQ ID NO: 388214 - DNA, 20 bp, Artificial Sequence
  Description of Artificial Sequence: Synthetic oligonucleotide
  Target: LAMA2; (+) strand; PAM type: YTN; PAM sequence: TTA
taaatgttcatgtgattcca

SEQ ID NO: 388215 - DNA, 20 bp, Artificial Sequence
  Description of Artificial Sequence: Synthetic oligonucleotide
  Target: LAMA2; (+) strand; PAM type: YTN; PAM sequence: TTC
atgtgattccaatgggcagc

SEQ ID NO: 388216 - DNA, 20 bp, Artificial Sequence
  Description of Artificial Sequence: Synthetic oligonucleotide
  Target: LAMA2; (+) strand; PAM type: YTN; PAM sequence: TTC
caatgggcagccaaaggtga

SEQ ID NO: 388217 - DNA, 20 bp, Artificial Sequence
  Description of Artificial Sequence: Synthetic oligonucleotide
  Target: LAMA2; (+) strand; PAM type: YTN; PAM sequence: CTG
atccacaccaatgttgtcac

SEQ ID NO: 388218 - DNA, 20 bp, Artificial Sequence
  Description of Artificial Sequence: Synthetic oligonucleotide
  Target: LAMA2; (+) strand; PAM type: YTN; PAM sequence: TTG
tcacattctaatgtgcagag

SEQ ID NO: 388219 - DNA, 20 bp, Artificial Sequence
  Description of Artificial Sequence: Synthetic oligonucleotide
  Target: LAMA2; (+) strand; PAM type: YTN; PAM sequence: TTC
taatgtgcagagataatgtg

SEQ ID NO: 388220 - DNA, 20 bp, Artificial Sequence
  Description of Artificial Sequence: Synthetic oligonucleotide
  Target: LAMA2; (+) strand; PAM type: YTN; PAM sequence: CTA
atgtgcagagataatgtggg

SEQ ID NO: 388221 - DNA, 20 bp, Artificial Sequence
  Description of Artificial Sequence: Synthetic oligonucleotide
  Target: LAMA2; (+) strand; PAM type: YTN; PAM sequence: TTC
tgatttcctagatctggggt

SEQ ID NO: 388222 - DNA, 20 bp, Artificial Sequence
  Description of Artificial Sequence: Synthetic oligonucleotide
  Target: LAMA2; (+) strand; PAM type: YTN; PAM sequence: CTG
atttcctagatctggggtag

SEQ ID NO: 388223 - DNA, 20 bp, Artificial Sequence
  Description of Artificial Sequence: Synthetic oligonucleotide
  Target: LAMA2; (+) strand; PAM type: YTN; PAM sequence: TTT
cctagatctggggtagagcc

SEQ ID NO: 388224 - DNA, 20 bp, Artificial Sequence
  Description of Artificial Sequence: Synthetic oligonucleotide
  Target: LAMA2; (+) strand; PAM type: YTN; PAM sequence: TTC
ctagatctggggtagagccc

SEQ ID NO: 388225 - DNA, 20 bp, Artificial Sequence
  Description of Artificial Sequence: Synthetic oligonucleotide
  Target: LAMA2; (+) strand; PAM type: YTN; PAM sequence: CTA
gatctggggtagagcccgat

SEQ ID NO: 388226 - DNA, 20 bp, Artificial Sequence
  Description of Artificial Sequence: Synthetic oligonucleotide
  Target: LAMA2; (+) strand; PAM type: YTN; PAM sequence: CTG
gggtagagcccgattataca

SEQ ID NO: 388227 - DNA, 20 bp, Artificial Sequence
  Description of Artificial Sequence: Synthetic oligonucleotide
  Target: LAMA2; (+) strand; PAM type: YTN; PAM sequence: TTA
tacatttctaataagcttcc

SEQ ID NO: 388228 - DNA, 20 bp, Artificial Sequence
  Description of Artificial Sequence: Synthetic oligonucleotide
  Target: LAMA2; (+) strand; PAM type: YTN; PAM sequence: TTT
ctaataagcttccaggtggt

SEQ ID NO: 388229 - DNA, 20 bp, Artificial Sequence
  Description of Artificial Sequence: Synthetic oligonucleotide
  Target: LAMA2; (+) strand; PAM type: YTN; PAM sequence: TTC
taataagcttccaggtggtg

SEQ ID NO: 388230 - DNA, 20 bp, Artificial Sequence
  Description of Artificial Sequence: Synthetic oligonucleotide
  Target: LAMA2; (+) strand; PAM type: YTN; PAM sequence: CTA
ataagcttccaggtggtgcc

SEQ ID NO: 388231 - DNA, 20 bp, Artificial Sequence
  Description of Artificial Sequence: Synthetic oligonucleotide
  Target: LAMA2; (+) strand; PAM type: YTN; PAM sequence: CTT
ccaggtggtgccaaaactgt

SEQ ID NO: 388232 - DNA, 20 bp, Artificial Sequence
  Description of Artificial Sequence: Synthetic oligonucleotide
  Target: LAMA2; (+) strand; PAM type: YTN; PAM sequence: TTC
caggtggtgccaaaactgtt

SEQ ID NO: 388233 - DNA, 20 bp, Artificial Sequence
  Description of Artificial Sequence: Synthetic oligonucleotide
  Target: LAMA2; (+) strand; PAM type: YTN; PAM sequence: CTG
ttggtctgattgctactcaa

SEQ ID NO: 388234 - DNA, 20 bp, Artificial Sequence
  Description of Artificial Sequence: Synthetic oligonucleotide
  Target: LAMA2; (+) strand; PAM type: YTN; PAM sequence: TTG
gtctgattgctactcaaagt

SEQ ID NO: 388235 - DNA, 20 bp, Artificial Sequence
  Description of Artificial Sequence: Synthetic oligonucleotide
  Target: LAMA2; (+) strand; PAM type: YTN; PAM sequence: CTG
attgctactcaaagtgtggt

SEQ ID NO: 388236 - DNA, 20 bp, Artificial Sequence
  Description of Artificial Sequence: Synthetic oligonucleotide
  Target: LAMA2; (+) strand; PAM type: YTN; PAM sequence: TTG
ctactcaaagtgtggtgcac

SEQ ID NO: 388237 - DNA, 20 bp, Artificial Sequence
  Description of Artificial Sequence: Synthetic oligonucleotide
  Target: LAMA2; (+) strand; PAM type: YTN; PAM sequence: CTA
ctcaaagtgtggtgcacaga

SEQ ID NO: 388238 - DNA, 20 bp, Artificial Sequence
  Description of Artificial Sequence: Synthetic oligonucleotide
  Target: LAMA2; (+) strand; PAM type: YTN; PAM sequence: CTC
aaagtgtggtgcacagacca

SEQ ID NO: 388239 - DNA, 20 bp, Artificial Sequence
  Description of Artificial Sequence: Synthetic oligonucleotide
  Target: LAMA2; (+) strand; PAM type: YTN; PAM sequence: CTG
ggagcttgttagaaaagcac

SEQ ID NO: 388240 - DNA, 20 bp, Artificial Sequence
  Description of Artificial Sequence: Synthetic oligonucleotide
  Target: LAMA2; (+) strand; PAM type: YTN; PAM sequence: CTT
gttagaaaagcacattctca

SEQ ID NO: 388241 - DNA, 20 bp, Artificial Sequence
  Description of Artificial Sequence: Synthetic oligonucleotide
  Target: LAMA2; (+) strand; PAM type: YTN; PAM sequence: TTG
ttagaaaagcacattctcag

SEQ ID NO: 388242 - DNA, 20 bp, Artificial Sequence
  Description of Artificial Sequence: Synthetic oligonucleotide
  Target: LAMA2; (+) strand; PAM type: YTN; PAM sequence: TTA
gaaaagcacattctcagtca

SEQ ID NO: 388243 - DNA, 20 bp, Artificial Sequence
  Description of Artificial Sequence: Synthetic oligonucleotide
  Target: LAMA2; (+) strand; PAM type: YTN; PAM sequence: TTC
tcagtcagagactaagagaa

SEQ ID NO: 388244 - DNA, 20 bp, Artificial Sequence
  Description of Artificial Sequence: Synthetic oligonucleotide
  Target: LAMA2; (+) strand; PAM type: YTN; PAM sequence: CTC
agtcagagactaagagaaac

SEQ ID NO: 388245 - DNA, 20 bp, Artificial Sequence
  Description of Artificial Sequence: Synthetic oligonucleotide
  Target: LAMA2; (+) strand; PAM type: YTN; PAM sequence: CTA
agagaaaccaggtgatcaaa

SEQ ID NO: 388246 - DNA, 20 bp, Artificial Sequence
  Description of Artificial Sequence: Synthetic oligonucleotide
  Target: LAMA2; (+) strand; PAM type: YTN; PAM sequence: CTC
ctgattcagaaatactaggg

SEQ ID NO: 388247 - DNA, 20 bp, Artificial Sequence
  Description of Artificial Sequence: Synthetic oligonucleotide
  Target: LAMA2; (+) strand; PAM type: YTN; PAM sequence: CTG
attcagaaatactagggggt

SEQ ID NO: 388248 - DNA, 20 bp, Artificial Sequence
  Description of Artificial Sequence: Synthetic oligonucleotide
  Target: LAMA2; (+) strand; PAM type: YTN; PAM sequence: TTC
agaaatactagggggtgtgg

SEQ ID NO: 388249 - DNA, 20 bp, Artificial Sequence
  Description of Artificial Sequence: Synthetic oligonucleotide
  Target: LAMA2; (+) strand; PAM type: YTN; PAM sequence: CTA
gggggtgtggaccagccctc

SEQ ID NO: 388250 - DNA, 20 bp, Artificial Sequence
  Description of Artificial Sequence: Synthetic oligonucleotide
  Target: LAMA2; (+) strand; PAM type: YTN; PAM sequence: CTC
taggatttccgaaagtccta

SEQ ID NO: 388251 - DNA, 20 bp, Artificial Sequence
  Description of Artificial Sequence: Synthetic oligonucleotide
  Target: LAMA2; (+) strand; PAM type: YTN; PAM sequence: CTA
ggatttccgaaagtcctact

SEQ ID NO: 388252 - DNA, 20 bp, Artificial Sequence
  Description of Artificial Sequence: Synthetic oligonucleotide
  Target: LAMA2; (+) strand; PAM type: YTN; PAM sequence: TTT
ccgaaagtcctactggtggt

SEQ ID NO: 388253 - DNA, 20 bp, Artificial Sequence
  Description of Artificial Sequence: Synthetic oligonucleotide
  Target: LAMA2; (+) strand; PAM type: YTN; PAM sequence: TTC
cgaaagtcctactggtggtt

SEQ ID NO: 388254 - DNA, 20 bp, Artificial Sequence
  Description of Artificial Sequence: Synthetic oligonucleotide
  Target: LAMA2; (+) strand; PAM type: YTN; PAM sequence: CTA
ctggtggttctgaggcccac

SEQ ID NO: 388255 - DNA, 20 bp, Artificial Sequence
  Description of Artificial Sequence: Synthetic oligonucleotide
  Target: LAMA2; (+) strand; PAM type: YTN; PAM sequence: CTG
gtggttctgaggcccactaa

SEQ ID NO: 388256 - DNA, 20 bp, Artificial Sequence
  Description of Artificial Sequence: Synthetic oligonucleotide
  Target: LAMA2; (+) strand; PAM type: YTN; PAM sequence: TTC
tgaggcccactaaagcttga

SEQ ID NO: 388257 - DNA, 20 bp, Artificial Sequence
  Description of Artificial Sequence: Synthetic oligonucleotide
  Target: LAMA2; (+) strand; PAM type: YTN; PAM sequence: CTG
aggcccactaaagcttgaga

SEQ ID NO: 388258 - DNA, 20 bp, Artificial Sequence
  Description of Artificial Sequence: Synthetic oligonucleotide
  Target: LAMA2; (+) strand; PAM type: YTN; PAM sequence: CTA
aagcttgagaaccagactgt

SEQ ID NO: 388259 - DNA, 20 bp, Artificial Sequence
  Description of Artificial Sequence: Synthetic oligonucleotide
  Target: LAMA2; (+) strand; PAM type: YTN; PAM sequence: CTT
gagaaccagactgtggatct

SEQ ID NO: 388260 - DNA, 20 bp, Artificial Sequence
  Description of Artificial Sequence: Synthetic oligonucleotide
  Target: LAMA2; (+) strand; PAM type: YTN; PAM sequence: TTG
agaaccagactgtggatctt

SEQ ID NO: 388261 - DNA, 20 bp, Artificial Sequence
  Description of Artificial Sequence: Synthetic oligonucleotide
  Target: LAMA2; (+) strand; PAM type: YTN; PAM sequence: CTG
tggatcttggtgtttagaca

SEQ ID NO: 388262 - DNA, 20 bp, Artificial Sequence
  Description of Artificial Sequence: Synthetic oligonucleotide
  Target: LAMA2; (+) strand; PAM type: YTN; PAM sequence: CTT
ggtgtttagacacagtcaat

SEQ ID NO: 388263 - DNA, 20 bp, Artificial Sequence
  Description of Artificial Sequence: Synthetic oligonucleotide
  Target: LAMA2; (+) strand; PAM type: YTN; PAM sequence: TTG
gtgtttagacacagtcaatt

SEQ ID NO: 388264 - DNA, 20 bp, Artificial Sequence
  Description of Artificial Sequence: Synthetic oligonucleotide
  Target: LAMA2; (+) strand; PAM type: YTN; PAM sequence: TTT
agacacagtcaatttggcac

SEQ ID NO: 388265 - DNA, 20 bp, Artificial Sequence
  Description of Artificial Sequence: Synthetic oligonucleotide
  Target: LAMA2; (+) strand; PAM type: YTN; PAM sequence: TTA
gacacagtcaatttggcact

SEQ ID NO: 388266 - DNA, 20 bp, Artificial Sequence
  Description of Artificial Sequence: Synthetic oligonucleotide
  Target: LAMA2; (+) strand; PAM type: YTN; PAM sequence: TTT
ggcacttaactgagttctat

SEQ ID NO: 388267 - DNA, 20 bp, Artificial Sequence
  Description of Artificial Sequence: Synthetic oligonucleotide
  Target: LAMA2; (+) strand; PAM type: YTN; PAM sequence: TTG
gcacttaactgagttctatg

SEQ ID NO: 388268 - DNA, 20 bp, Artificial Sequence
  Description of Artificial Sequence: Synthetic oligonucleotide
  Target: LAMA2; (+) strand; PAM type: YTN; PAM sequence: CTT
aactgagttctatgttgtgt

SEQ ID NO: 388269 - DNA, 20 bp, Artificial Sequence
  Description of Artificial Sequence: Synthetic oligonucleotide
  Target: LAMA2; (+) strand; PAM type: YTN; PAM sequence: TTA
actgagttctatgttgtgtt

SEQ ID NO: 388270 - DNA, 20 bp, Artificial Sequence
  Description of Artificial Sequence: Synthetic oligonucleotide
  Target: LAMA2; (+) strand; PAM type: YTN; PAM sequence: CTG
agttctatgttgtgttttct

SEQ ID NO: 388271 - DNA, 20 bp, Artificial Sequence
  Description of Artificial Sequence: Synthetic oligonucleotide
  Target: LAMA2; (+) strand; PAM type: YTN; PAM sequence: TTC
tatgttgtgttttctctaat

SEQ ID NO: 388272 - DNA, 20 bp, Artificial Sequence
  Description of Artificial Sequence: Synthetic oligonucleotide
  Target: LAMA2; (+) strand; PAM type: YTN; PAM sequence: CTA
tgttgtgttttctctaattg

SEQ ID NO: 388273 - DNA, 20 bp, Artificial Sequence
  Description of Artificial Sequence: Synthetic oligonucleotide
  Target: LAMA2; (+) strand; PAM type: YTN; PAM sequence: TTG
tgttttctctaattgtttaa

SEQ ID NO: 388274 - DNA, 20 bp, Artificial Sequence
  Description of Artificial Sequence: Synthetic oligonucleotide
  Target: LAMA2; (+) strand; PAM type: YTN; PAM sequence: TTT
tctctaattgtttaatgtgg

SEQ ID NO: 388275 - DNA, 20 bp, Artificial Sequence
  Description of Artificial Sequence: Synthetic oligonucleotide
  Target: LAMA2; (+) strand; PAM type: YTN; PAM sequence: TTT
ctctaattgtttaatgtgga

SEQ ID NO: 388276 - DNA, 20 bp, Artificial Sequence
  Description of Artificial Sequence: Synthetic oligonucleotide
  Target: LAMA2; (+) strand; PAM type: YTN; PAM sequence: TTC
tctaattgtttaatgtggac

SEQ ID NO: 388277 - DNA, 20 bp, Artificial Sequence
  Description of Artificial Sequence: Synthetic oligonucleotide
  Target: LAMA2; (+) strand; PAM type: YTN; PAM sequence: CTC
taattgtttaatgtggacaa

SEQ ID NO: 388278 - DNA, 20 bp, Artificial Sequence
  Description of Artificial Sequence: Synthetic oligonucleotide
  Target: LAMA2; (+) strand; PAM type: YTN; PAM sequence: CTA
attgtttaatgtggacaagt

SEQ ID NO: 388279 - DNA, 20 bp, Artificial Sequence
  Description of Artificial Sequence: Synthetic oligonucleotide
  Target: LAMA2; (+) strand; PAM type: YTN; PAM sequence: TTG
tttaatgtggacaagtctgt

SEQ ID NO: 388280 - DNA, 20 bp, Artificial Sequence
  Description of Artificial Sequence: Synthetic oligonucleotide
  Target: LAMA2; (+) strand; PAM type: YTN; PAM sequence: TTT
aatgtggacaagtctgttga

SEQ ID NO: 388281 - DNA, 20 bp, Artificial Sequence
  Description of Artificial Sequence: Synthetic oligonucleotide
  Target: LAMA2; (+) strand; PAM type: YTN; PAM sequence: TTA
atgtggacaagtctgttgaa

SEQ ID NO: 388282 - DNA, 20 bp, Artificial Sequence
  Description of Artificial Sequence: Synthetic oligonucleotide
  Target: LAMA2; (+) strand; PAM type: YTN; PAM sequence: CTG
ttgaagtttgcattgaacgg

SEQ ID NO: 388283 - DNA, 20 bp, Artificial Sequence
  Description of Artificial Sequence: Synthetic oligonucleotide
  Target: LAMA2; (+) strand; PAM type: YTN; PAM sequence: TTG
aagtttgcattgaacggggc

SEQ ID NO: 388284 - DNA, 20 bp, Artificial Sequence
  Description of Artificial Sequence: Synthetic oligonucleotide
  Target: LAMA2; (+) strand; PAM type: YTN; PAM sequence: TTT
gcattgaacggggctatgaa

SEQ ID NO: 388285 - DNA, 20 bp, Artificial Sequence
  Description of Artificial Sequence: Synthetic oligonucleotide
  Target: LAMA2; (+) strand; PAM type: YTN; PAM sequence: TTG
cattgaacggggctatgaag

SEQ ID NO: 388286 - DNA, 20 bp, Artificial Sequence
  Description of Artificial Sequence: Synthetic oligonucleotide
  Target: LAMA2; (+) strand; PAM type: YTN; PAM sequence: TTG
aacggggctatgaagccaaa

SEQ ID NO: 388287 - DNA, 20 bp, Artificial Sequence
  Description of Artificial Sequence: Synthetic oligonucleotide
  Target: LAMA2; (+) strand; PAM type: YTN; PAM sequence: CTA
tgaagccaaaataatctttt

SEQ ID NO: 388288 - DNA, 20 bp, Artificial Sequence
  Description of Artificial Sequence: Synthetic oligonucleotide
  Target: LAMA2; (+) strand; PAM type: YTN; PAM sequence: CTT
ttacttggtttccatgcagt

SEQ ID NO: 388289 - DNA, 20 bp, Artificial Sequence
  Description of Artificial Sequence: Synthetic oligonucleotide
  Target: LAMA2; (+) strand; PAM type: YTN; PAM sequence: TTT
tacttggtttccatgcagtg

SEQ ID NO: 388290 - DNA, 20 bp, Artificial Sequence
  Description of Artificial Sequence: Synthetic oligonucleotide
  Target: LAMA2; (+) strand; PAM type: YTN; PAM sequence: TTT
acttggtttccatgcagtgc

SEQ ID NO: 388291 - DNA, 20 bp, Artificial Sequence
  Description of Artificial Sequence: Synthetic oligonucleotide
  Target: LAMA2; (+) strand; PAM type: YTN; PAM sequence: TTA
cttggtttccatgcagtgca

SEQ ID NO: 388292 - DNA, 20 bp, Artificial Sequence
  Description of Artificial Sequence: Synthetic oligonucleotide
  Target: LAMA2; (+) strand; PAM type: YTN; PAM sequence: CTT
ggtttccatgcagtgcaaat

SEQ ID NO: 388293 - DNA, 20 bp, Artificial Sequence
  Description of Artificial Sequence: Synthetic oligonucleotide
  Target: LAMA2; (+) strand; PAM type: YTN; PAM sequence: TTG
gtttccatgcagtgcaaatt

SEQ ID NO: 388294 - DNA, 20 bp, Artificial Sequence
  Description of Artificial Sequence: Synthetic oligonucleotide
  Target: LAMA2; (+) strand; PAM type: YTN; PAM sequence: TTT
ccatgcagtgcaaatttggt

SEQ ID NO: 388295 - DNA, 20 bp, Artificial Sequence
  Description of Artificial Sequence: Synthetic oligonucleotide
  Target: LAMA2; (+) strand; PAM type: YTN; PAM sequence: TTC
catgcagtgcaaatttggtt

SEQ ID NO: 388296 - DNA, 20 bp, Artificial Sequence
  Description of Artificial Sequence: Synthetic oligonucleotide
  Target: LAMA2; (+) strand; PAM type: YTN; PAM sequence: TTT
ggtttcattctggctaggag

SEQ ID NO: 388297 - DNA, 20 bp, Artificial Sequence
  Description of Artificial Sequence: Synthetic oligonucleotide
  Target: LAMA2; (+) strand; PAM type: YTN; PAM sequence: TTG
gtttcattctggctaggaga

SEQ ID NO: 388298 - DNA, 20 bp, Artificial Sequence
  Description of Artificial Sequence: Synthetic oligonucleotide
  Target: LAMA2; (+) strand; PAM type: YTN; PAM sequence: TTT
cattctggctaggagaagag

SEQ ID NO: 388299 - DNA, 20 bp, Artificial Sequence
  Description of Artificial Sequence: Synthetic oligonucleotide
  Target: LAMA2; (+) strand; PAM type: YTN; PAM sequence: TTC
attctggctaggagaagagt

SEQ ID NO: 388300 - DNA, 20 bp, Artificial Sequence
  Description of Artificial Sequence: Synthetic oligonucleotide
  Target: LAMA2; (+) strand; PAM type: YTN; PAM sequence: TTC
tggctaggagaagagtaaga

SEQ ID NO: 388301 - DNA, 20 bp, Artificial Sequence
  Description of Artificial Sequence: Synthetic oligonucleotide
  Target: LAMA2; (+) strand; PAM type: YTN; PAM sequence: CTG
gctaggagaagagtaagaga

SEQ ID NO: 388302 - DNA, 20 bp, Artificial Sequence
  Description of Artificial Sequence: Synthetic oligonucleotide
  Target: LAMA2; (+) strand; PAM type: YTN; PAM sequence: CTA
ggagaagagtaagagatata

SEQ ID NO: 388303 - DNA, 20 bp, Artificial Sequence
  Description of Artificial Sequence: Synthetic oligonucleotide
  Target: LAMA2; (+) strand; PAM type: YTN; PAM sequence: CTA
gttccagacttctgctctgg

SEQ ID NO: 388304 - DNA, 20 bp, Artificial Sequence
  Description of Artificial Sequence: Synthetic oligonucleotide
  Target: LAMA2; (+) strand; PAM type: YTN; PAM sequence: TTC
cagacttctgctctggcctc

SEQ ID NO: 388305 - DNA, 20 bp, Artificial Sequence
  Description of Artificial Sequence: Synthetic oligonucleotide
  Target: LAMA2; (+) strand; PAM type: YTN; PAM sequence: CTT
ctgctctggcctccaaagcc

SEQ ID NO: 388306 - DNA, 20 bp, Artificial Sequence
  Description of Artificial Sequence: Synthetic oligonucleotide
  Target: LAMA2; (+) strand; PAM type: YTN; PAM sequence: TTC
tgctctggcctccaaagcct

SEQ ID NO: 388307 - DNA, 20 bp, Artificial Sequence
  Description of Artificial Sequence: Synthetic oligonucleotide
  Target: LAMA2; (+) strand; PAM type: YTN; PAM sequence: CTG
ctctggcctccaaagcctct

SEQ ID NO: 388308 - DNA, 20 bp, Artificial Sequence
  Description of Artificial Sequence: Synthetic oligonucleotide
  Target: LAMA2; (+) strand; PAM type: YTN; PAM sequence: CTC
tggcctccaaagcctctttg

SEQ ID NO: 388309 - DNA, 20 bp, Artificial Sequence
  Description of Artificial Sequence: Synthetic oligonucleotide
  Target: LAMA2; (+) strand; PAM type: YTN; PAM sequence: CTG
gcctccaaagcctctttgtt

SEQ ID NO: 388310 - DNA, 20 bp, Artificial Sequence
  Description of Artificial Sequence: Synthetic oligonucleotide
  Target: LAMA2; (+) strand; PAM type: YTN; PAM sequence: CTC
caaagcctctttgttcattc

SEQ ID NO: 388311 - DNA, 20 bp, Artificial Sequence
  Description of Artificial Sequence: Synthetic oligonucleotide
  Target: LAMA2; (+) strand; PAM type: YTN; PAM sequence: CTC
tttgttcattcagcttgtga

SEQ ID NO: 388312 - DNA, 20 bp, Artificial Sequence
  Description of Artificial Sequence: Synthetic oligonucleotide
  Target: LAMA2; (+) strand; PAM type: YTN; PAM sequence: CTT
tgttcattcagcttgtgaag

SEQ ID NO: 388313 - DNA, 20 bp, Artificial Sequence
  Description of Artificial Sequence: Synthetic oligonucleotide
  Target: LAMA2; (+) strand; PAM type: YTN; PAM sequence: TTT
gttcattcagcttgtgaagc

SEQ ID NO: 388314 - DNA, 20 bp, Artificial Sequence
  Description of Artificial Sequence: Synthetic oligonucleotide
  Target: LAMA2; (+) strand; PAM type: YTN; PAM sequence: TTG
ttcattcagcttgtgaagca

SEQ ID NO: 388315 - DNA, 20 bp, Artificial Sequence
  Description of Artificial Sequence: Synthetic oligonucleotide
  Target: LAMA2; (+) strand; PAM type: YTN; PAM sequence: TTC
attcagcttgtgaagcatca

SEQ ID NO: 388316 - DNA, 20 bp, Artificial Sequence
  Description of Artificial Sequence: Synthetic oligonucleotide
  Target: LAMA2; (+) strand; PAM type: YTN; PAM sequence: TTC
agcttgtgaagcatcaggag

SEQ ID NO: 388317 - DNA, 20 bp, Artificial Sequence
  Description of Artificial Sequence: Synthetic oligonucleotide
  Target: LAMA2; (+) strand; PAM type: YTN; PAM sequence: CTT
gtgaagcatcaggagcttgc

SEQ ID NO: 388318 - DNA, 20 bp, Artificial Sequence
  Description of Artificial Sequence: Synthetic oligonucleotide
  Target: LAMA2; (+) strand; PAM type: YTN; PAM sequence: TTG
tgaagcatcaggagcttgca

SEQ ID NO: 388319 - DNA, 20 bp, Artificial Sequence
  Description of Artificial Sequence: Synthetic oligonucleotide
  Target: LAMA2; (+) strand; PAM type: YTN; PAM sequence: CTT
gcaaagcccctgcaggtgac

SEQ ID NO: 388320 - DNA, 20 bp, Artificial Sequence
  Description of Artificial Sequence: Synthetic oligonucleotide
  Target: LAMA2; (+) strand; PAM type: YTN; PAM sequence: TTG
caaagcccctgcaggtgacg

SEQ ID NO: 388321 - DNA, 20 bp, Artificial Sequence
  Description of Artificial Sequence: Synthetic oligonucleotide
  Target: LAMA2; (+) strand; PAM type: YTN; PAM sequence: CTG
caggtgacgctctacagttg

SEQ ID NO: 388322 - DNA, 20 bp, Artificial Sequence
  Description of Artificial Sequence: Synthetic oligonucleotide
  Target: LAMA2; (+) strand; PAM type: YTN; PAM sequence: CTC
tacagttgtcacctgcaaga

SEQ ID NO: 388323 - DNA, 20 bp, Artificial Sequence
  Description of Artificial Sequence: Synthetic oligonucleotide
  Target: LAMA2; (+) strand; PAM type: YTN; PAM sequence: CTA
cagttgtcacctgcaagaag

SEQ ID NO: 388324 - DNA, 20 bp, Artificial Sequence
  Description of Artificial Sequence: Synthetic oligonucleotide
  Target: LAMA2; (+) strand; PAM type: YTN; PAM sequence: TTG
tcacctgcaagaagctgcag

SEQ ID NO: 388325 - DNA, 20 bp, Artificial Sequence
  Description of Artificial Sequence: Synthetic oligonucleotide
  Target: LAMA2; (+) strand; PAM type: YTN; PAM sequence: CTG
caagaagctgcaggtgtcac

SEQ ID NO: 388326 - DNA, 20 bp, Artificial Sequence
  Description of Artificial Sequence: Synthetic oligonucleotide
  Target: LAMA2; (+) strand; PAM type: YTN; PAM sequence: CTG
caggtgtcacctgcaagaag

SEQ ID NO: 388327 - DNA, 20 bp, Artificial Sequence
  Description of Artificial Sequence: Synthetic oligonucleotide
  Target: LAMA2; (+) strand; PAM type: YTN; PAM sequence: CTG
caagaagctgatttattaaa

SEQ ID NO: 388328 - DNA, 20 bp, Artificial Sequence
  Description of Artificial Sequence: Synthetic oligonucleotide
  Target: LAMA2; (+) strand; PAM type: YTN; PAM sequence: CTG
atttattaaaagccctgcca

SEQ ID NO: 388329 - DNA, 20 bp, Artificial Sequence
  Description of Artificial Sequence: Synthetic oligonucleotide
  Target: LAMA2; (+) strand; PAM type: YTN; PAM sequence: TTT
attaaaagccctgccagggc

SEQ ID NO: 388330 - DNA, 20 bp, Artificial Sequence
  Description of Artificial Sequence: Synthetic oligonucleotide
  Target: LAMA2; (+) strand; PAM type: YTN; PAM sequence: TTA
ttaaaagccctgccagggca

SEQ ID NO: 388331 - DNA, 20 bp, Artificial Sequence
  Description of Artificial Sequence: Synthetic oligonucleotide
  Target: LAMA2; (+) strand; PAM type: YTN; PAM sequence: TTA
aaagccctgccagggcagtt

SEQ ID NO: 388332 - DNA, 20 bp, Artificial Sequence
  Description of Artificial Sequence: Synthetic oligonucleotide
  Target: LAMA2; (+) strand; PAM type: YTN; PAM sequence: CTG
ccagggcagtttaatccctg

SEQ ID NO: 388333 - DNA, 20 bp, Artificial Sequence
  Description of Artificial Sequence: Synthetic oligonucleotide
  Target: LAMA2; (+) strand; PAM type: YTN; PAM sequence: TTT
aatccctgtgaagtgatatt

SEQ ID NO: 388334 - DNA, 20 bp, Artificial Sequence
  Description of Artificial Sequence: Synthetic oligonucleotide
  Target: LAMA2; (+) strand; PAM type: YTN; PAM sequence: TTA
atccctgtgaagtgatattg

SEQ ID NO: 388335 - DNA, 20 bp, Artificial Sequence
  Description of Artificial Sequence: Synthetic oligonucleotide
  Target: LAMA2; (+) strand; PAM type: YTN; PAM sequence: CTG
tgaagtgatattgtaactca

SEQ ID NO: 388336 - DNA, 20 bp, Artificial Sequence
  Description of Artificial Sequence: Synthetic oligonucleotide
  Target: LAMA2; (+) strand; PAM type: YTN; PAM sequence: TTG
taactcacctctagctgctg

SEQ ID NO: 388337 - DNA, 20 bp, Artificial Sequence
  Description of Artificial Sequence: Synthetic oligonucleotide
  Target: LAMA2; (+) strand; PAM type: YTN; PAM sequence: CTC
acctctagctgctgtcctat

SEQ ID NO: 388338 - DNA, 20 bp, Artificial Sequence
  Description of Artificial Sequence: Synthetic oligonucleotide
  Target: LAMA2; (+) strand; PAM type: YTN; PAM sequence: CTC
tagctgctgtcctatcaaaa

SEQ ID NO: 388339 - DNA, 20 bp, Artificial Sequence
  Description of Artificial Sequence: Synthetic oligonucleotide
  Target: LAMA2; (+) strand; PAM type: YTN; PAM sequence: CTA
gctgctgtcctatcaaaaaa

SEQ ID NO: 388340 - DNA, 20 bp, Artificial Sequence
  Description of Artificial Sequence: Synthetic oligonucleotide
  Target: LAMA2; (+) strand; PAM type: YTN; PAM sequence: CTG
ctgtcctatcaaaaaatcac

SEQ ID NO: 388341 - DNA, 20 bp, Artificial Sequence
  Description of Artificial Sequence: Synthetic oligonucleotide
  Target: LAMA2; (+) strand; PAM type: YTN; PAM sequence: CTG
tcctatcaaaaaatcactct

SEQ ID NO: 388342 - DNA, 20 bp, Artificial Sequence
  Description of Artificial Sequence: Synthetic oligonucleotide
  Target: LAMA2; (+) strand; PAM type: YTN; PAM sequence: CTA
tcaaaaaatcactctccgtc

SEQ ID NO: 388343 - DNA, 20 bp, Artificial Sequence
  Description of Artificial Sequence: Synthetic oligonucleotide
  Target: LAMA2; (+) strand; PAM type: YTN; PAM sequence: CTC
tccgtcctccttctctttgt

SEQ ID NO: 388344 - DNA, 20 bp, Artificial Sequence
  Description of Artificial Sequence: Synthetic oligonucleotide
  Target: LAMA2; (+) strand; PAM type: YTN; PAM sequence: CTC
cgtcctccttctctttgttt

SEQ ID NO: 388345 - DNA, 20 bp, Artificial Sequence
  Description of Artificial Sequence: Synthetic oligonucleotide
  Target: LAMA2; (+) strand; PAM type: YTN; PAM sequence: CTC
cttctctttgtttacaagca

SEQ ID NO: 388346 - DNA, 20 bp, Artificial Sequence
  Description of Artificial Sequence: Synthetic oligonucleotide
  Target: LAMA2; (+) strand; PAM type: YTN; PAM sequence: CTT
ctctttgtttacaagcacca

SEQ ID NO: 388347 - DNA, 20 bp, Artificial Sequence
  Description of Artificial Sequence: Synthetic oligonucleotide
  Target: LAMA2; (+) strand; PAM type: YTN; PAM sequence: TTC
tctttgtttacaagcaccag

SEQ ID NO: 388348 - DNA, 20 bp, Artificial Sequence
  Description of Artificial Sequence: Synthetic oligonucleotide
  Target: LAMA2; (+) strand; PAM type: YTN; PAM sequence: CTC
tttgtttacaagcaccagtt

SEQ ID NO: 388349 - DNA, 20 bp, Artificial Sequence
  Description of Artificial Sequence: Synthetic oligonucleotide
  Target: LAMA2; (+) strand; PAM type: YTN; PAM sequence: CTT
tgtttacaagcaccagttaa

SEQ ID NO: 388350 - DNA, 20 bp, Artificial Sequence
  Description of Artificial Sequence: Synthetic oligonucleotide
  Target: LAMA2; (+) strand; PAM type: YTN; PAM sequence: TTT
gtttacaagcaccagttaat

SEQ ID NO: 388351 - DNA, 20 bp, Artificial Sequence
  Description of Artificial Sequence: Synthetic oligonucleotide
  Target: LAMA2; (+) strand; PAM type: YTN; PAM sequence: TTG
tttacaagcaccagttaatg

SEQ ID NO: 388352 - DNA, 20 bp, Artificial Sequence
  Description of Artificial Sequence: Synthetic oligonucleotide
  Target: LAMA2; (+) strand; PAM type: YTN; PAM sequence: TTT
acaagcaccagttaatggtt

SEQ ID NO: 388353 - DNA, 20 bp, Artificial Sequence
  Description of Artificial Sequence: Synthetic oligonucleotide
  Target: LAMA2; (+) strand; PAM type: YTN; PAM sequence: TTA
caagcaccagttaatggttt

SEQ ID NO: 388354 - DNA, 20 bp, Artificial Sequence
  Description of Artificial Sequence: Synthetic oligonucleotide
  Target: LAMA2; (+) strand; PAM type: YTN; PAM sequence: TTA
atggttttctctccattaag

SEQ ID NO: 388355 - DNA, 20 bp, Artificial Sequence
  Description of Artificial Sequence: Synthetic oligonucleotide
  Target: LAMA2; (+) strand; PAM type: YTN; PAM sequence: TTT
tctctccattaagcagctca

SEQ ID NO: 388356 - DNA, 20 bp, Artificial Sequence
  Description of Artificial Sequence: Synthetic oligonucleotide
  Target: LAMA2; (+) strand; PAM type: YTN; PAM sequence: TTT
ctctccattaagcagctcag

SEQ ID NO: 388357 - DNA, 20 bp, Artificial Sequence
  Description of Artificial Sequence: Synthetic oligonucleotide
  Target: LAMA2; (+) strand; PAM type: YTN; PAM sequence: TTC
tctccattaagcagctcagg

SEQ ID NO: 388358 - DNA, 20 bp, Artificial Sequence
  Description of Artificial Sequence: Synthetic oligonucleotide
  Target: LAMA2; (+) strand; PAM type: YTN; PAM sequence: CTC
tccattaagcagctcagggg

SEQ ID NO: 388359 - DNA, 20 bp, Artificial Sequence
  Description of Artificial Sequence: Synthetic oligonucleotide
  Target: LAMA2; (+) strand; PAM type: YTN; PAM sequence: CTC
cattaagcagctcaggggac

SEQ ID NO: 388360 - DNA, 20 bp, Artificial Sequence
  Description of Artificial Sequence: Synthetic oligonucleotide
  Target: LAMA2; (+) strand; PAM type: YTN; PAM sequence: TTA
agcagctcaggggactgctg

SEQ ID NO: 388361 - DNA, 20 bp, Artificial Sequence
  Description of Artificial Sequence: Synthetic oligonucleotide
  Target: LAMA2; (+) strand; PAM type: YTN; PAM sequence: CTC
aggggactgctgtttagaga

SEQ ID NO: 388362 - DNA, 20 bp, Artificial Sequence
  Description of Artificial Sequence: Synthetic oligonucleotide
  Target: LAMA2; (+) strand; PAM type: YTN; PAM sequence: CTG
ctgtttagagacctaattga

SEQ ID NO: 388363 - DNA, 20 bp, Artificial Sequence
  Description of Artificial Sequence: Synthetic oligonucleotide
  Target: LAMA2; (+) strand; PAM type: YTN; PAM sequence: CTG
tttagagacctaattgaatt

SEQ ID NO: 388364 - DNA, 20 bp, Artificial Sequence
  Description of Artificial Sequence: Synthetic oligonucleotide
  Target: LAMA2; (+) strand; PAM type: YTN; PAM sequence: TTT
agagacctaattgaattctt

SEQ ID NO: 388365 - DNA, 20 bp, Artificial Sequence
  Description of Artificial Sequence: Synthetic oligonucleotide
  Target: LAMA2; (+) strand; PAM type: YTN; PAM sequence: TTA
gagacctaattgaattcttg

SEQ ID NO: 388366 - DNA, 20 bp, Artificial Sequence
  Description of Artificial Sequence: Synthetic oligonucleotide
  Target: LAMA2; (+) strand; PAM type: YTN; PAM sequence: CTA
attgaattcttgccaagttt

SEQ ID NO: 388367 - DNA, 20 bp, Artificial Sequence
  Description of Artificial Sequence: Synthetic oligonucleotide
  Target: LAMA2; (+) strand; PAM type: YTN; PAM sequence: TTG
aattcttgccaagtttgggc

SEQ ID NO: 388368 - DNA, 20 bp, Artificial Sequence
  Description of Artificial Sequence: Synthetic oligonucleotide
  Target: LAMA2; (+) strand; PAM type: YTN; PAM sequence: TTC
ttgccaagtttgggcatgat

SEQ ID NO: 388369 - DNA, 20 bp, Artificial Sequence
  Description of Artificial Sequence: Synthetic oligonucleotide
  Target: LAMA2; (+) strand; PAM type: YTN; PAM sequence: CTT
gccaagtttgggcatgatcc

SEQ ID NO: 388370 - DNA, 20 bp, Artificial Sequence
  Description of Artificial Sequence: Synthetic oligonucleotide
  Target: LAMA2; (+) strand; PAM type: YTN; PAM sequence: TTG
ccaagtttgggcatgatcca

SEQ ID NO: 388371 - DNA, 20 bp, Artificial Sequence
  Description of Artificial Sequence: Synthetic oligonucleotide
  Target: LAMA2; (+) strand; PAM type: YTN; PAM sequence: TTT
gggcatgatccagagctgct

SEQ ID NO: 388372 - DNA, 20 bp, Artificial Sequence
  Description of Artificial Sequence: Synthetic oligonucleotide
  Target: LAMA2; (+) strand; PAM type: YTN; PAM sequence: TTG
ggcatgatccagagctgctc

SEQ ID NO: 388373 - DNA, 20 bp, Artificial Sequence
  Description of Artificial Sequence: Synthetic oligonucleotide
  Target: LAMA2; (+) strand; PAM type: YTN; PAM sequence: CTG
ctccaattctcggtattttc

SEQ ID NO: 388374 - DNA, 20 bp, Artificial Sequence
  Description of Artificial Sequence: Synthetic oligonucleotide
  Target: LAMA2; (+) strand; PAM type: YTN; PAM sequence: CTC
caattctcggtattttccat

SEQ ID NO: 388375 - DNA, 20 bp, Artificial Sequence
  Description of Artificial Sequence: Synthetic oligonucleotide
  Target: LAMA2; (+) strand; PAM type: YTN; PAM sequence: TTC
tcggtattttccatgctatg

SEQ ID NO: 388376 - DNA, 20 bp, Artificial Sequence
  Description of Artificial Sequence: Synthetic oligonucleotide
  Target: LAMA2; (+) strand; PAM type: YTN; PAM sequence: CTC
ggtattttccatgctatgta

SEQ ID NO: 388377 - DNA, 20 bp, Artificial Sequence
  Description of Artificial Sequence: Synthetic oligonucleotide
  Target: LAMA2; (+) strand; PAM type: YTN; PAM sequence: TTT
tccatgctatgtattttccc

SEQ ID NO: 388378 - DNA, 20 bp, Artificial Sequence
  Description of Artificial Sequence: Synthetic oligonucleotide
  Target: LAMA2; (+) strand; PAM type: YTN; PAM sequence: TTT
ccatgctatgtattttcccc

SEQ ID NO: 388379 - DNA, 20 bp, Artificial Sequence
  Description of Artificial Sequence: Synthetic oligonucleotide
  Target: LAMA2; (+) strand; PAM type: YTN; PAM sequence: TTC
catgctatgtattttcccct

SEQ ID NO: 388380 - DNA, 20 bp, Artificial Sequence
  Description of Artificial Sequence: Synthetic oligonucleotide
  Target: LAMA2; (+) strand; PAM type: YTN; PAM sequence: CTA
tgtattttcccctattctaa

SEQ ID NO: 388381 - DNA, 20 bp, Artificial Sequence
  Description of Artificial Sequence: Synthetic oligonucleotide
  Target: LAMA2; (+) strand; PAM type: YTN; PAM sequence: TTT
tcccctattctaacatgtat

SEQ ID NO: 388382 - DNA, 20 bp, Artificial Sequence
  Description of Artificial Sequence: Synthetic oligonucleotide
  Target: LAMA2; (+) strand; PAM type: YTN; PAM sequence: TTT
cccctattctaacatgtata

SEQ ID NO: 388383 - DNA, 20 bp, Artificial Sequence
  Description of Artificial Sequence: Synthetic oligonucleotide
  Target: LAMA2; (+) strand; PAM type: YTN; PAM sequence: TTC
ccctattctaacatgtatat

SEQ ID NO: 388384 - DNA, 20 bp, Artificial Sequence
  Description of Artificial Sequence: Synthetic oligonucleotide
  Target: LAMA2; (+) strand; PAM type: YTN; PAM sequence: CTA
ttctaacatgtatatagcat

SEQ ID NO: 388385 - DNA, 20 bp, Artificial Sequence
  Description of Artificial Sequence: Synthetic oligonucleotide
  Target: LAMA2; (+) strand; PAM type: YTN; PAM sequence: TTC
taacatgtatatagcattga

SEQ ID NO: 388386 - DNA, 20 bp, Artificial Sequence
  Description of Artificial Sequence: Synthetic oligonucleotide
  Target: LAMA2; (+) strand; PAM type: YTN; PAM sequence: CTA
acatgtatatagcattgata

SEQ ID NO: 388387 - DNA, 20 bp, Artificial Sequence
  Description of Artificial Sequence: Synthetic oligonucleotide
  Target: LAMA2; (+) strand; PAM type: YTN; PAM sequence: TTG
atacctctatctgcagaatg

SEQ ID NO: 388388 - DNA, 20 bp, Artificial Sequence
  Description of Artificial Sequence: Synthetic oligonucleotide
  Target: LAMA2; (+) strand; PAM type: YTN; PAM sequence: CTC
tatctgcagaatgtaagaaa

SEQ ID NO: 388389 - DNA, 20 bp, Artificial Sequence
  Description of Artificial Sequence: Synthetic oligonucleotide
  Target: LAMA2; (+) strand; PAM type: YTN; PAM sequence: CTA
tctgcagaatgtaagaaatt

SEQ ID NO: 388390 - DNA, 20 bp, Artificial Sequence
  Description of Artificial Sequence: Synthetic oligonucleotide
  Target: LAMA2; (+) strand; PAM type: YTN; PAM sequence: CTG
cagaatgtaagaaattgtaa

SEQ ID NO: 388391 - DNA, 20 bp, Artificial Sequence
  Description of Artificial Sequence: Synthetic oligonucleotide
  Target: LAMA2; (+) strand; PAM type: YTN; PAM sequence: TTG
taactgtatacatgagagta

SEQ ID NO: 388392 - DNA, 20 bp, Artificial Sequence
  Description of Artificial Sequence: Synthetic oligonucleotide
  Target: LAMA2; (+) strand; PAM type: YTN; PAM sequence: CTG
tatacatgagagtatattat

SEQ ID NO: 388393 - DNA, 20 bp, Artificial Sequence
  Description of Artificial Sequence: Synthetic oligonucleotide
  Target: LAMA2; (+) strand; PAM type: YTN; PAM sequence: TTA
taaatgcagtagttcctgct

SEQ ID NO: 388394 - DNA, 20 bp, Artificial Sequence
  Description of Artificial Sequence: Synthetic oligonucleotide
  Target: LAMA2; (+) strand; PAM type: YTN; PAM sequence: TTC
ctgctccttggcgtgcagat

SEQ ID NO: 388395 - DNA, 20 bp, Artificial Sequence
  Description of Artificial Sequence: Synthetic oligonucleotide
  Target: LAMA2; (+) strand; PAM type: YTN; PAM sequence: CTG
ctccttggcgtgcagataca

SEQ ID NO: 388396 - DNA, 20 bp, Artificial Sequence
  Description of Artificial Sequence: Synthetic oligonucleotide
  Target: LAMA2; (+) strand; PAM type: YTN; PAM sequence: CTC
cttggcgtgcagatacacct

SEQ ID NO: 388397 - DNA, 20 bp, Artificial Sequence
  Description of Artificial Sequence: Synthetic oligonucleotide
  Target: LAMA2; (+) strand; PAM type: YTN; PAM sequence: CTT
ggcgtgcagatacacctcat

SEQ ID NO: 388398 - DNA, 20 bp, Artificial Sequence
  Description of Artificial Sequence: Synthetic oligonucleotide
  Target: LAMA2; (+) strand; PAM type: YTN; PAM sequence: TTG
gcgtgcagatacacctcatt

SEQ ID NO: 388399 - DNA, 20 bp, Artificial Sequence
  Description of Artificial Sequence: Synthetic oligonucleotide
  Target: LAMA2; (+) strand; PAM type: YTN; PAM sequence: CTC
attactctgcaatgcaaaac

SEQ ID NO: 388400 - DNA, 20 bp, Artificial Sequence
  Description of Artificial Sequence: Synthetic oligonucleotide
  Target: LAMA2; (+) strand; PAM type: YTN; PAM sequence: TTA
ctctgcaatgcaaaactaaa

SEQ ID NO: 388401 - DNA, 20 bp, Artificial Sequence
  Description of Artificial Sequence: Synthetic oligonucleotide
  Target: LAMA2; (+) strand; PAM type: YTN; PAM sequence: CTC
tgcaatgcaaaactaaaaat

SEQ ID NO: 388402 - DNA, 20 bp, Artificial Sequence
  Description of Artificial Sequence: Synthetic oligonucleotide
  Target: LAMA2; (+) strand; PAM type: YTN; PAM sequence: CTG
caatgcaaaactaaaaatat

SEQ ID NO: 388403 - DNA, 20 bp, Artificial Sequence
  Description of Artificial Sequence: Synthetic oligonucleotide
  Target: LAMA2; (+) strand; PAM type: YTN; PAM sequence: CTA
aaaatatacatgttttttaa

SEQ ID NO: 388404 - DNA, 20 bp, Artificial Sequence
  Description of Artificial Sequence: Synthetic oligonucleotide
  Target: LAMA2; (+) strand; PAM type: YTN; PAM sequence: TTT
tttaaatctgctaaaagatt

SEQ ID NO: 388405 - DNA, 20 bp, Artificial Sequence
  Description of Artificial Sequence: Synthetic oligonucleotide
  Target: LAMA2; (+) strand; PAM type: YTN; PAM sequence: TTT
ttaaatctgctaaaagattc

SEQ ID NO: 388406 - DNA, 20 bp, Artificial Sequence
  Description of Artificial Sequence: Synthetic oligonucleotide
  Target: LAMA2; (+) strand; PAM type: YTN; PAM sequence: TTT
taaatctgctaaaagattca

SEQ ID NO: 388407 - DNA, 20 bp, Artificial Sequence
  Description of Artificial Sequence: Synthetic oligonucleotide
  Target: LAMA2; (+) strand; PAM type: YTN; PAM sequence: TTT
aaatctgctaaaagattcaa

SEQ ID NO: 388408 - DNA, 20 bp, Artificial Sequence
  Description of Artificial Sequence: Synthetic oligonucleotide
  Target: LAMA2; (+) strand; PAM type: YTN; PAM sequence: TTA
aatctgctaaaagattcaat

SEQ ID NO: 388409 - DNA, 20 bp, Artificial Sequence
  Description of Artificial Sequence: Synthetic oligonucleotide
  Target: LAMA2; (+) strand; PAM type: YTN; PAM sequence: CTG
ctaaaagattcaatatatgt

SEQ ID NO: 388410 - DNA, 20 bp, Artificial Sequence
  Description of Artificial Sequence: Synthetic oligonucleotide
  Target: LAMA2; (+) strand; PAM type: YTN; PAM sequence: CTA
aaagattcaatatatgttaa

SEQ ID NO: 388411 - DNA, 20 bp, Artificial Sequence
  Description of Artificial Sequence: Synthetic oligonucleotide
  Target: LAMA2; (+) strand; PAM type: YTN; PAM sequence: TTC
aatatatgttaattttggaa

SEQ ID NO: 388412 - DNA, 20 bp, Artificial Sequence
  Description of Artificial Sequence: Synthetic oligonucleotide
  Target: LAMA2; (+) strand; PAM type: YTN; PAM sequence: TTA
attttggaaattatacgact

SEQ ID NO: 388413 - DNA, 20 bp, Artificial Sequence
  Description of Artificial Sequence: Synthetic oligonucleotide
  Target: LAMA2; (+) strand; PAM type: YTN; PAM sequence: TTT
tggaaattatacgactattt

SEQ ID NO: 388414 - DNA, 20 bp, Artificial Sequence
  Description of Artificial Sequence: Synthetic oligonucleotide
  Target: LAMA2; (+) strand; PAM type: YTN; PAM sequence: TTT
ggaaattatacgactattta

SEQ ID NO: 388415 - DNA, 20 bp, Artificial Sequence
  Description of Artificial Sequence: Synthetic oligonucleotide
  Target: LAMA2; (+) strand; PAM type: YTN; PAM sequence: TTG
gaaattatacgactatttat

SEQ ID NO: 388416 - DNA, 20 bp, Artificial Sequence
  Description of Artificial Sequence: Synthetic oligonucleotide
  Target: LAMA2; (+) strand; PAM type: YTN; PAM sequence: TTA
tacgactatttatgagatct

SEQ ID NO: 388417 - DNA, 20 bp, Artificial Sequence
  Description of Artificial Sequence: Synthetic oligonucleotide
  Target: LAMA2; (+) strand; PAM type: YTN; PAM sequence: CTA
tttatgagatctattccata

SEQ ID NO: 388418 - DNA, 20 bp, Artificial Sequence
  Description of Artificial Sequence: Synthetic oligonucleotide
  Target: LAMA2; (+) strand; PAM type: YTN; PAM sequence: TTT
atgagatctattccataatg

SEQ ID NO: 388419 - DNA, 20 bp, Artificial Sequence
  Description of Artificial Sequence: Synthetic oligonucleotide
  Target: LAMA2; (+) strand; PAM type: YTN; PAM sequence: TTA
tgagatctattccataatga

SEQ ID NO: 388420 - DNA, 20 bp, Artificial Sequence
  Description of Artificial Sequence: Synthetic oligonucleotide
  Target: LAMA2; (+) strand; PAM type: YTN; PAM sequence: CTA
ttccataatgaagagtcaac

SEQ ID NO: 388421 - DNA, 20 bp, Artificial Sequence
  Description of Artificial Sequence: Synthetic oligonucleotide
  Target: LAMA2; (+) strand; PAM type: YTN; PAM sequence: TTC
cataatgaagagtcaacaat

SEQ ID NO: 388422 - DNA, 20 bp, Artificial Sequence
  Description of Artificial Sequence: Synthetic oligonucleotide
  Target: LAMA2; (+) strand; PAM type: YTN; PAM sequence: TTT
gtctctctaccaattctacc

SEQ ID NO: 388423 - DNA, 20 bp, Artificial Sequence
  Description of Artificial Sequence: Synthetic oligonucleotide
  Target: LAMA2; (+) strand; PAM type: YTN; PAM sequence: TTG
tctctctaccaattctacca

SEQ ID NO: 388424 - DNA, 20 bp, Artificial Sequence
  Description of Artificial Sequence: Synthetic oligonucleotide
  Target: LAMA2; (+) strand; PAM type: YTN; PAM sequence: CTC
tctaccaattctaccaccta

SEQ ID NO: 388425 - DNA, 20 bp, Artificial Sequence
  Description of Artificial Sequence: Synthetic oligonucleotide
  Target: LAMA2; (+) strand; PAM type: YTN; PAM sequence: CTC
taccaattctaccacctatc

SEQ ID NO: 388426 - DNA, 20 bp, Artificial Sequence
  Description of Artificial Sequence: Synthetic oligonucleotide
  Target: LAMA2; (+) strand; PAM type: YTN; PAM sequence: CTA
ccaattctaccacctatcct

SEQ ID NO: 388427 - DNA, 20 bp, Artificial Sequence
  Description of Artificial Sequence: Synthetic oligonucleotide
  Target: LAMA2; (+) strand; PAM type: YTN; PAM sequence: TTC
taccacctatcctggcccct

SEQ ID NO: 388428 - DNA, 20 bp, Artificial Sequence
  Description of Artificial Sequence: Synthetic oligonucleotide
  Target: LAMA2; (+) strand; PAM type: YTN; PAM sequence: CTA
ccacctatcctggcccctac

SEQ ID NO: 388429 - DNA, 20 bp, Artificial Sequence
  Description of Artificial Sequence: Synthetic oligonucleotide
  Target: LAMA2; (+) strand; PAM type: YTN; PAM sequence: CTA
tcctggcccctaccaccaaa

SEQ ID NO: 388430 - DNA, 20 bp, Artificial Sequence
  Description of Artificial Sequence: Synthetic oligonucleotide
  Target: LAMA2; (+) strand; PAM type: YTN; PAM sequence: CTG
gcccctaccaccaaatttga

SEQ ID NO: 388431 - DNA, 20 bp, Artificial Sequence
  Description of Artificial Sequence: Synthetic oligonucleotide
  Target: LAMA2; (+) strand; PAM type: YTN; PAM sequence: CTA
ccaccaaatttgaatagcac

SEQ ID NO: 388432 - DNA, 20 bp, Artificial Sequence
  Description of Artificial Sequence: Synthetic oligonucleotide
  Target: LAMA2; (+) strand; PAM type: YTN; PAM sequence: TTT
gaatagcacctctttgatgg

SEQ ID NO: 388433 - DNA, 20 bp, Artificial Sequence
  Description of Artificial Sequence: Synthetic oligonucleotide
  Target: LAMA2; (+) strand; PAM type: YTN; PAM sequence: TTG
aatagcacctctttgatggc

SEQ ID NO: 388434 - DNA, 20 bp, Artificial Sequence
  Description of Artificial Sequence: Synthetic oligonucleotide
  Target: LAMA2; (+) strand; PAM type: YTN; PAM sequence: CTC
tttgatggccaaaaatatta

SEQ ID NO: 388435 - DNA, 20 bp, Artificial Sequence
  Description of Artificial Sequence: Synthetic oligonucleotide
  Target: LAMA2; (+) strand; PAM type: YTN; PAM sequence: CTT
tgatggccaaaaatattatg

SEQ ID NO: 388436 - DNA, 20 bp, Artificial Sequence
  Description of Artificial Sequence: Synthetic oligonucleotide
  Target: LAMA2; (+) strand; PAM type: YTN; PAM sequence: TTT
gatggccaaaaatattatgg

SEQ ID NO: 388437 - DNA, 20 bp, Artificial Sequence
  Description of Artificial Sequence: Synthetic oligonucleotide
  Target: LAMA2; (+) strand; PAM type: YTN; PAM sequence: TTG
atggccaaaaatattatggt

SEQ ID NO: 388438 - DNA, 20 bp, Artificial Sequence
  Description of Artificial Sequence: Synthetic oligonucleotide
  Target: LAMA2; (+) strand; PAM type: YTN; PAM sequence: TTA
tggtgagtgtattagtccat

SEQ ID NO: 388439 - DNA, 20 bp, Artificial Sequence
  Description of Artificial Sequence: Synthetic oligonucleotide
  Target: LAMA2; (+) strand; PAM type: YTN; PAM sequence: TTA
gtccattttcgtattgctat

SEQ ID NO: 388440 - DNA, 20 bp, Artificial Sequence
  Description of Artificial Sequence: Synthetic oligonucleotide
  Target: LAMA2; (+) strand; PAM type: YTN; PAM sequence: TTT
tcgtattgctataaagaaat

SEQ ID NO: 388441 - DNA, 20 bp, Artificial Sequence
  Description of Artificial Sequence: Synthetic oligonucleotide
  Target: LAMA2; (+) strand; PAM type: YTN; PAM sequence: TTT
cgtattgctataaagaaatg

SEQ ID NO: 388442 - DNA, 20 bp, Artificial Sequence
  Description of Artificial Sequence: Synthetic oligonucleotide
  Target: LAMA2; (+) strand; PAM type: YTN; PAM sequence: TTC
gtattgctataaagaaatgc

SEQ ID NO: 388443 - DNA, 20 bp, Artificial Sequence
  Description of Artificial Sequence: Synthetic oligonucleotide
  Target: LAMA2; (+) strand; PAM type: YTN; PAM sequence: TTG
ctataaagaaatgcctgaag

SEQ ID NO: 388444 - DNA, 20 bp, Artificial Sequence
  Description of Artificial Sequence: Synthetic oligonucleotide
  Target: LAMA2; (+) strand; PAM type: YTN; PAM sequence: CTA
taaagaaatgcctgaagctc

SEQ ID NO: 388445 - DNA, 20 bp, Artificial Sequence
  Description of Artificial Sequence: Synthetic oligonucleotide
  Target: LAMA2; (+) strand; PAM type: YTN; PAM sequence: CTG
aagctcggcaatttgtaaag

SEQ ID NO: 388446 - DNA, 20 bp, Artificial Sequence
  Description of Artificial Sequence: Synthetic oligonucleotide
  Target: LAMA2; (+) strand; PAM type: YTN; PAM sequence: CTC
ggcaatttgtaaagaaaaga

SEQ ID NO: 388447 - DNA, 20 bp, Artificial Sequence
  Description of Artificial Sequence: Synthetic oligonucleotide
  Target: LAMA2; (+) strand; PAM type: YTN; PAM sequence: TTT
gtaaagaaaagaggtataat

SEQ ID NO: 388448 - DNA, 20 bp, Artificial Sequence
  Description of Artificial Sequence: Synthetic oligonucleotide
  Target: LAMA2; (+) strand; PAM type: YTN; PAM sequence: TTG
taaagaaaagaggtataatt

SEQ ID NO: 388449 - DNA, 20 bp, Artificial Sequence
  Description of Artificial Sequence: Synthetic oligonucleotide
  Target: LAMA2; (+) strand; PAM type: YTN; PAM sequence: TTG
gctcatggttccatcaggct

SEQ ID NO: 388450 - DNA, 20 bp, Artificial Sequence
  Description of Artificial Sequence: Synthetic oligonucleotide
  Target: LAMA2; (+) strand; PAM type: YTN; PAM sequence: CTC
atggttccatcaggctgtac

SEQ ID NO: 388451 - DNA, 20 bp, Artificial Sequence
  Description of Artificial Sequence: Synthetic oligonucleotide
  Target: LAMA2; (+) strand; PAM type: YTN; PAM sequence: TTC
catcaggctgtacaggaagc

SEQ ID NO: 388452 - DNA, 20 bp, Artificial Sequence
  Description of Artificial Sequence: Synthetic oligonucleotide
  Target: LAMA2; (+) strand; PAM type: YTN; PAM sequence: CTG
tacaggaagcatggctgggg

SEQ ID NO: 388453 - DNA, 20 bp, Artificial Sequence
  Description of Artificial Sequence: Synthetic oligonucleotide
  Target: LAMA2; (+) strand; PAM type: YTN; PAM sequence: CTG
gggtggcctcagggaacttt

SEQ ID NO: 388454 - DNA, 20 bp, Artificial Sequence
  Description of Artificial Sequence: Synthetic oligonucleotide
  Target: LAMA2; (+) strand; PAM type: YTN; PAM sequence: CTC
agggaactttcactcatggc

SEQ ID NO: 388455 - DNA, 20 bp, Artificial Sequence
  Description of Artificial Sequence: Synthetic oligonucleotide
  Target: LAMA2; (+) strand; PAM type: YTN; PAM sequence: CTT
tcactcatggcagaaggcaa

SEQ ID NO: 388456 - DNA, 20 bp, Artificial Sequence
  Description of Artificial Sequence: Synthetic oligonucleotide
  Target: LAMA2; (+) strand; PAM type: YTN; PAM sequence: TTT
cactcatggcagaaggcaaa

SEQ ID NO: 388457 - DNA, 20 bp, Artificial Sequence
  Description of Artificial Sequence: Synthetic oligonucleotide
  Target: LAMA2; (+) strand; PAM type: YTN; PAM sequence: TTC
actcatggcagaaggcaaag

SEQ ID NO: 388458 - DNA, 20 bp, Artificial Sequence
  Description of Artificial Sequence: Synthetic oligonucleotide
  Target: LAMA2; (+) strand; PAM type: YTN; PAM sequence: CTC
atggcagaaggcaaagctgg

SEQ ID NO: 388459 - DNA, 20 bp, Artificial Sequence
  Description of Artificial Sequence: Synthetic oligonucleotide
  Target: LAMA2; (+) strand; PAM type: YTN; PAM sequence: CTG
gagcaggcatcttcacacag

SEQ ID NO: 388460 - DNA, 20 bp, Artificial Sequence
  Description of Artificial Sequence: Synthetic oligonucleotide
  Target: LAMA2; (+) strand; PAM type: YTN; PAM sequence: CTT
cacacaggcagagcaggagg

SEQ ID NO: 388461 - DNA, 20 bp, Artificial Sequence
  Description of Artificial Sequence: Synthetic oligonucleotide
  Target: LAMA2; (+) strand; PAM type: YTN; PAM sequence: TTC
acacaggcagagcaggagga

SEQ ID NO: 388462 - DNA, 20 bp, Artificial Sequence
  Description of Artificial Sequence: Synthetic oligonucleotide
  Target: LAMA2; (+) strand; PAM type: YTN; PAM sequence: CTG
gaggtggcacacacttttaa

SEQ ID NO: 388463 - DNA, 20 bp, Artificial Sequence
  Description of Artificial Sequence: Synthetic oligonucleotide
  Target: LAMA2; (+) strand; PAM type: YTN; PAM sequence: CTT
ttaaataaccaggtcttatg

SEQ ID NO: 388464 - DNA, 20 bp, Artificial Sequence
  Description of Artificial Sequence: Synthetic oligonucleotide
  Target: LAMA2; (+) strand; PAM type: YTN; PAM sequence: TTT
taaataaccaggtcttatga

SEQ ID NO: 388465 - DNA, 20 bp, Artificial Sequence
  Description of Artificial Sequence: Synthetic oligonucleotide
  Target: LAMA2; (+) strand; PAM type: YTN; PAM sequence: TTT
aaataaccaggtcttatgag

SEQ ID NO: 388466 - DNA, 20 bp, Artificial Sequence
  Description of Artificial Sequence: Synthetic oligonucleotide
  Target: LAMA2; (+) strand; PAM type: YTN; PAM sequence: TTA
aataaccaggtcttatgaga

SEQ ID NO: 388467 - DNA, 20 bp, Artificial Sequence
  Description of Artificial Sequence: Synthetic oligonucleotide
  Target: LAMA2; (+) strand; PAM type: YTN; PAM sequence: CTT
atgagaactctgtcatgaga

SEQ ID NO: 388468 - DNA, 20 bp, Artificial Sequence
  Description of Artificial Sequence: Synthetic oligonucleotide
  Target: LAMA2; (+) strand; PAM type: YTN; PAM sequence: TTA
tgagaactctgtcatgagaa

SEQ ID NO: 388469 - DNA, 20 bp, Artificial Sequence
  Description of Artificial Sequence: Synthetic oligonucleotide
  Target: LAMA2; (+) strand; PAM type: YTN; PAM sequence: CTC
tgtcatgagaacatcactag

SEQ ID NO: 388470 - DNA, 20 bp, Artificial Sequence
  Description of Artificial Sequence: Synthetic oligonucleotide
  Target: LAMA2; (+) strand; PAM type: YTN; PAM sequence: CTG
tcatgagaacatcactaggg

SEQ ID NO: 388471 - DNA, 20 bp, Artificial Sequence
  Description of Artificial Sequence: Synthetic oligonucleotide
  Target: LAMA2; (+) strand; PAM type: YTN; PAM sequence: CTA
gggcggtggtgctaagccat

SEQ ID NO: 388472 - DNA, 20 bp, Artificial Sequence
  Description of Artificial Sequence: Synthetic oligonucleotide
  Target: LAMA2; (+) strand; PAM type: YTN; PAM sequence: CTA
agccattaaaaccactccag

SEQ ID NO: 388473 - DNA, 20 bp, Artificial Sequence
  Description of Artificial Sequence: Synthetic oligonucleotide
  Target: LAMA2; (+) strand; PAM type: YTN; PAM sequence: TTA
aaaccactccagtgattcaa

SEQ ID NO: 388474 - DNA, 20 bp, Artificial Sequence
  Description of Artificial Sequence: Synthetic oligonucleotide
  Target: LAMA2; (+) strand; PAM type: YTN; PAM sequence: CTC
cagtgattcaatacctccca

SEQ ID NO: 388475 - DNA, 20 bp, Artificial Sequence
  Description of Artificial Sequence: Synthetic oligonucleotide
  Target: LAMA2; (+) strand; PAM type: YTN; PAM sequence: TTC
aatacctcccacgaggcccc

SEQ ID NO: 388476 - DNA, 20 bp, Artificial Sequence
  Description of Artificial Sequence: Synthetic oligonucleotide
  Target: LAMA2; (+) strand; PAM type: YTN; PAM sequence: CTC
ccacgaggccccatatccag

SEQ ID NO: 388477 - DNA, 20 bp, Artificial Sequence
  Description of Artificial Sequence: Synthetic oligonucleotide
  Target: LAMA2; (+) strand; PAM type: YTN; PAM sequence: TTG
gggatgacatttcaatatga

SEQ ID NO: 388478 - DNA, 20 bp, Artificial Sequence
  Description of Artificial Sequence: Synthetic oligonucleotide
  Target: LAMA2; (+) strand; PAM type: YTN; PAM sequence: TTT
caatatgagatttggatggg

SEQ ID NO: 388479 - DNA, 20 bp, Artificial Sequence
  Description of Artificial Sequence: Synthetic oligonucleotide
  Target: LAMA2; (+) strand; PAM type: YTN; PAM sequence: TTC
aatatgagatttggatgggg

SEQ ID NO: 388480 - DNA, 20 bp, Artificial Sequence
  Description of Artificial Sequence: Synthetic oligonucleotide
  Target: LAMA2; (+) strand; PAM type: YTN; PAM sequence: TTT
ggatggggacacagatccaa

SEQ ID NO: 388481 - DNA, 20 bp, Artificial Sequence
  Description of Artificial Sequence: Synthetic oligonucleotide
  Target: LAMA2; (+) strand; PAM type: YTN; PAM sequence: TTG
gatggggacacagatccaaa

SEQ ID NO: 388482 - DNA, 20 bp, Artificial Sequence
  Description of Artificial Sequence: Synthetic oligonucleotide
  Target: LAMA2; (+) strand; PAM type: YTN; PAM sequence: CTG
gtagaatattagcattcttg

SEQ ID NO: 388483 - DNA, 20 bp, Artificial Sequence
  Description of Artificial Sequence: Synthetic oligonucleotide
  Target: LAMA2; (+) strand; PAM type: YTN; PAM sequence: TTA
gcattcttggctacttaaag

SEQ ID NO: 388484 - DNA, 20 bp, Artificial Sequence
  Description of Artificial Sequence: Synthetic oligonucleotide
  Target: LAMA2; (+) strand; PAM type: YTN; PAM sequence: TTC
ttggctacttaaagaatata

SEQ ID NO: 388485 - DNA, 20 bp, Artificial Sequence
  Description of Artificial Sequence: Synthetic oligonucleotide
  Target: LAMA2; (+) strand; PAM type: YTN; PAM sequence: CTT
ggctacttaaagaatatagt

SEQ ID NO: 388486 - DNA, 20 bp, Artificial Sequence
  Description of Artificial Sequence: Synthetic oligonucleotide
  Target: LAMA2; (+) strand; PAM type: YTN; PAM sequence: TTG
gctacttaaagaatatagtt

SEQ ID NO: 388487 - DNA, 20 bp, Artificial Sequence
  Description of Artificial Sequence: Synthetic oligonucleotide
  Target: LAMA2; (+) strand; PAM type: YTN; PAM sequence: CTA
cttaaagaatatagtttttc

SEQ ID NO: 388488 - DNA, 20 bp, Artificial Sequence
  Description of Artificial Sequence: Synthetic oligonucleotide
  Target: LAMA2; (+) strand; PAM type: YTN; PAM sequence: CTT
aaagaatatagtttttctag

SEQ ID NO: 388489 - DNA, 20 bp, Artificial Sequence
  Description of Artificial Sequence: Synthetic oligonucleotide
  Target: LAMA2; (+) strand; PAM type: YTN; PAM sequence: TTA
aagaatatagtttttctagc

SEQ ID NO: 388490 - DNA, 20 bp, Artificial Sequence
  Description of Artificial Sequence: Synthetic oligonucleotide
  Target: LAMA2; (+) strand; PAM type: YTN; PAM sequence: TTT
ttctagcctttagcaattat

SEQ ID NO: 388491 - DNA, 20 bp, Artificial Sequence
  Description of Artificial Sequence: Synthetic oligonucleotide
  Target: LAMA2; (+) strand; PAM type: YTN; PAM sequence: TTT
tctagcctttagcaattatt

SEQ ID NO: 388492 - DNA, 20 bp, Artificial Sequence
  Description of Artificial Sequence: Synthetic oligonucleotide
  Target: LAMA2; (+) strand; PAM type: YTN; PAM sequence: TTT
ctagcctttagcaattattt

SEQ ID NO: 388493 - DNA, 20 bp, Artificial Sequence
  Description of Artificial Sequence: Synthetic oligonucleotide
  Target: LAMA2; (+) strand; PAM type: YTN; PAM sequence: TTC
tagcctttagcaattattta

SEQ ID NO: 388494 - DNA, 20 bp, Artificial Sequence
  Description of Artificial Sequence: Synthetic oligonucleotide
  Target: LAMA2; (+) strand; PAM type: YTN; PAM sequence: CTA
gcctttagcaattatttatc

SEQ ID NO: 388495 - DNA, 20 bp, Artificial Sequence
  Description of Artificial Sequence: Synthetic oligonucleotide
  Target: LAMA2; (+) strand; PAM type: YTN; PAM sequence: CTT
tagcaattatttatctataa

SEQ ID NO: 388496 - DNA, 20 bp, Artificial Sequence
  Description of Artificial Sequence: Synthetic oligonucleotide
  Target: LAMA2; (+) strand; PAM type: YTN; PAM sequence: TTT
agcaattatttatctataag

SEQ ID NO: 388497 - DNA, 20 bp, Artificial Sequence
  Description of Artificial Sequence: Synthetic oligonucleotide
  Target: LAMA2; (+) strand; PAM type: YTN; PAM sequence: TTA
gcaattatttatctataaga

SEQ ID NO: 388498 - DNA, 20 bp, Artificial Sequence
  Description of Artificial Sequence: Synthetic oligonucleotide
  Target: LAMA2; (+) strand; PAM type: YTN; PAM sequence: TTA
tttatctataagactgaaag

SEQ ID NO: 388499 - DNA, 20 bp, Artificial Sequence
  Description of Artificial Sequence: Synthetic oligonucleotide
  Target: LAMA2; (+) strand; PAM type: YTN; PAM sequence: TTT
atctataagactgaaagagg

SEQ ID NO: 388500 - DNA, 20 bp, Artificial Sequence
  Description of Artificial Sequence: Synthetic oligonucleotide
  Target: LAMA2; (+) strand; PAM type: YTN; PAM sequence: TTA
tctataagactgaaagaggt

SEQ ID NO: 388501 - DNA, 20 bp, Artificial Sequence
  Description of Artificial Sequence: Synthetic oligonucleotide
  Target: LAMA2; (+) strand; PAM type: YTN; PAM sequence: CTA
taagactgaaagaggttaat

SEQ ID NO: 388502 - DNA, 20 bp, Artificial Sequence
  Description of Artificial Sequence: Synthetic oligonucleotide
  Target: LAMA2; (+) strand; PAM type: YTN; PAM sequence: CTG
aaagaggttaatcatcaaag

SEQ ID NO: 388503 - DNA, 20 bp, Artificial Sequence
  Description of Artificial Sequence: Synthetic oligonucleotide
  Target: LAMA2; (+) strand; PAM type: YTN; PAM sequence: TTA
atcatcaaagtagggatttg

SEQ ID NO: 388504 - DNA, 20 bp, Artificial Sequence
  Description of Artificial Sequence: Synthetic oligonucleotide
  Target: LAMA2; (+) strand; PAM type: YTN; PAM sequence: TTT
gtgagactgcatctaatcat

SEQ ID NO: 388505 - DNA, 20 bp, Artificial Sequence
  Description of Artificial Sequence: Synthetic oligonucleotide
  Target: LAMA2; (+) strand; PAM type: YTN; PAM sequence: TTG
tgagactgcatctaatcatg

SEQ ID NO: 388506 - DNA, 20 bp, Artificial Sequence
  Description of Artificial Sequence: Synthetic oligonucleotide
  Target: LAMA2; (+) strand; PAM type: YTN; PAM sequence: CTG
catctaatcatgggtggtaa

SEQ ID NO: 388507 - DNA, 20 bp, Artificial Sequence
  Description of Artificial Sequence: Synthetic oligonucleotide
  Target: LAMA2; (+) strand; PAM type: YTN; PAM sequence: CTA
atcatgggtggtaatagact

SEQ ID NO: 388508 - DNA, 20 bp, Artificial Sequence
  Description of Artificial Sequence: Synthetic oligonucleotide
  Target: LAMA2; (+) strand; PAM type: YTN; PAM sequence: CTG
aagggataaagaggaacagt

SEQ ID NO: 388509 - DNA, 20 bp, Artificial Sequence
  Description of Artificial Sequence: Synthetic oligonucleotide
  Target: LAMA2; (+) strand; PAM type: YTN; PAM sequence: TTG
gcaaataaataagtcaataa

SEQ ID NO: 388510 - DNA, 20 bp, Artificial Sequence
  Description of Artificial Sequence: Synthetic oligonucleotide
  Target: LAMA2; (+) strand; PAM type: YTN; PAM sequence: TTA
tcataagaaaacactataga

SEQ ID NO: 388511 - DNA, 20 bp, Artificial Sequence
  Description of Artificial Sequence: Synthetic oligonucleotide
  Target: LAMA2; (+) strand; PAM type: YTN; PAM sequence: CTA
tagaaagaaaagttattttt

SEQ ID NO: 388512 - DNA, 20 bp, Artificial Sequence
  Description of Artificial Sequence: Synthetic oligonucleotide
  Target: LAMA2; (+) strand; PAM type: YTN; PAM sequence: TTA
tttttattttgactttttat

SEQ ID NO: 388513 - DNA, 20 bp, Artificial Sequence
  Description of Artificial Sequence: Synthetic oligonucleotide
  Target: LAMA2; (+) strand; PAM type: YTN; PAM sequence: TTT
ttattttgactttttatttt

SEQ ID NO: 388514 - DNA, 20 bp, Artificial Sequence
  Description of Artificial Sequence: Synthetic oligonucleotide
  Target: LAMA2; (+) strand; PAM type: YTN; PAM sequence: TTT
tattttgactttttatttta

SEQ ID NO: 388515 - DNA, 20 bp, Artificial Sequence
  Description of Artificial Sequence: Synthetic oligonucleotide
  Target: LAMA2; (+) strand; PAM type: YTN; PAM sequence: TTT
attttgactttttattttat

SEQ ID NO: 388516 - DNA, 20 bp, Artificial Sequence
  Description of Artificial Sequence: Synthetic oligonucleotide
  Target: LAMA2; (+) strand; PAM type: YTN; PAM sequence: TTA
ttttgactttttattttatt

SEQ ID NO: 388517 - DNA, 20 bp, Artificial Sequence
  Description of Artificial Sequence: Synthetic oligonucleotide
  Target: LAMA2; (+) strand; PAM type: YTN; PAM sequence: TTT
tgactttttattttattttt

SEQ ID NO: 388518 - DNA, 20 bp, Artificial Sequence
  Description of Artificial Sequence: Synthetic oligonucleotide
  Target: LAMA2; (+) strand; PAM type: YTN; PAM sequence: TTT
gactttttattttatttttt

SEQ ID NO: 388519 - DNA, 20 bp, Artificial Sequence
  Description of Artificial Sequence: Synthetic oligonucleotide
  Target: LAMA2; (+) strand; PAM type: YTN; PAM sequence: TTG
actttttattttattttttg

SEQ ID NO: 388520 - DNA, 20 bp, Artificial Sequence
  Description of Artificial Sequence: Synthetic oligonucleotide
  Target: LAMA2; (+) strand; PAM type: YTN; PAM sequence: CTT
tttattttattttttggggg

SEQ ID NO: 388521 - DNA, 20 bp, Artificial Sequence
  Description of Artificial Sequence: Synthetic oligonucleotide
  Target: LAMA2; (+) strand; PAM type: YTN; PAM sequence: TTT
ttattttattttttgggggg

SEQ ID NO: 388522 - DNA, 20 bp, Artificial Sequence
  Description of Artificial Sequence: Synthetic oligonucleotide
  Target: LAMA2; (+) strand; PAM type: YTN; PAM sequence: TTT
tattttattttttggggggt

SEQ ID NO: 388523 - DNA, 20 bp, Artificial Sequence
  Description of Artificial Sequence: Synthetic oligonucleotide
  Target: LAMA2; (+) strand; PAM type: YTN; PAM sequence: TTT
attttattttttggggggtg

SEQ ID NO: 388524 - DNA, 20 bp, Artificial Sequence
  Description of Artificial Sequence: Synthetic oligonucleotide
  Target: LAMA2; (+) strand; PAM type: YTN; PAM sequence: TTA
ttttattttttggggggtgg

SEQ ID NO: 388525 - DNA, 20 bp, Artificial Sequence
  Description of Artificial Sequence: Synthetic oligonucleotide
  Target: LAMA2; (+) strand; PAM type: YTN; PAM sequence: TTT
tattttttggggggtggagt

SEQ ID NO: 388526 - DNA, 20 bp, Artificial Sequence
  Description of Artificial Sequence: Synthetic oligonucleotide
  Target: LAMA2; (+) strand; PAM type: YTN; PAM sequence: TTT
attttttggggggtggagtc

SEQ ID NO: 388527 - DNA, 20 bp, Artificial Sequence
  Description of Artificial Sequence: Synthetic oligonucleotide
  Target: LAMA2; (+) strand; PAM type: YTN; PAM sequence: TTA
ttttttggggggtggagtct

SEQ ID NO: 388528 - DNA, 20 bp, Artificial Sequence
  Description of Artificial Sequence: Synthetic oligonucleotide
  Target: LAMA2; (+) strand; PAM type: YTN; PAM sequence: TTT
tttggggggtggagtctcag

SEQ ID NO: 388529 - DNA, 20 bp, Artificial Sequence
  Description of Artificial Sequence: Synthetic oligonucleotide
  Target: LAMA2; (+) strand; PAM type: YTN; PAM sequence: TTT
ttggggggtggagtctcagt

SEQ ID NO: 388530 - DNA, 20 bp, Artificial Sequence
  Description of Artificial Sequence: Synthetic oligonucleotide
  Target: LAMA2; (+) strand; PAM type: YTN; PAM sequence: TTT
tggggggtggagtctcagtc

SEQ ID NO: 388531 - DNA, 20 bp, Artificial Sequence
  Description of Artificial Sequence: Synthetic oligonucleotide
  Target: LAMA2; (+) strand; PAM type: YTN; PAM sequence: TTT
ggggggtggagtctcagtct

SEQ ID NO: 388532 - DNA, 20 bp, Artificial Sequence
  Description of Artificial Sequence: Synthetic oligonucleotide
  Target: LAMA2; (+) strand; PAM type: YTN; PAM sequence: TTG
gggggtggagtctcagtctg

SEQ ID NO: 388533 - DNA, 20 bp, Artificial Sequence
  Description of Artificial Sequence: Synthetic oligonucleotide
  Target: LAMA2; (+) strand; PAM type: YTN; PAM sequence: CTC
agtctgtcgcccaggctgga

SEQ ID NO: 388534 - DNA, 20 bp, Artificial Sequence
  Description of Artificial Sequence: Synthetic oligonucleotide
  Target: LAMA2; (+) strand; PAM type: YTN; PAM sequence: CTG
tcgcccaggctggagtgcag

SEQ ID NO: 388535 - DNA, 20 bp, Artificial Sequence
  Description of Artificial Sequence: Synthetic oligonucleotide
  Target: LAMA2; (+) strand; PAM type: YTN; PAM sequence: CTG
gagtgcagtggtgcaatctt

SEQ ID NO: 388536 - DNA, 20 bp, Artificial Sequence
  Description of Artificial Sequence: Synthetic oligonucleotide
  Target: LAMA2; (+) strand; PAM type: YTN; PAM sequence: CTT
ggctcactgcaacctccgcc

SEQ ID NO: 388537 - DNA, 20 bp, Artificial Sequence
  Description of Artificial Sequence: Synthetic oligonucleotide
  Target: LAMA2; (+) strand; PAM type: YTN; PAM sequence: TTG
gctcactgcaacctccgcct

SEQ ID NO: 388538 - DNA, 20 bp, Artificial Sequence
  Description of Artificial Sequence: Synthetic oligonucleotide
  Target: LAMA2; (+) strand; PAM type: YTN; PAM sequence: CTC
actgcaacctccgcctccca

SEQ ID NO: 388539 - DNA, 20 bp, Artificial Sequence
  Description of Artificial Sequence: Synthetic oligonucleotide
  Target: LAMA2; (+) strand; PAM type: YTN; PAM sequence: CTG
caacctccgcctcccagttt

SEQ ID NO: 388540 - DNA, 20 bp, Artificial Sequence
  Description of Artificial Sequence: Synthetic oligonucleotide
  Target: LAMA2; (+) strand; PAM type: YTN; PAM sequence: CTC
cgcctcccagtttcaagtga

SEQ ID NO: 388541 - DNA, 20 bp, Artificial Sequence
  Description of Artificial Sequence: Synthetic oligonucleotide
  Target: LAMA2; (+) strand; PAM type: YTN; PAM sequence: CTC
ccagtttcaagtgattctcc

SEQ ID NO: 388542 - DNA, 20 bp, Artificial Sequence
  Description of Artificial Sequence: Synthetic oligonucleotide
  Target: LAMA2; (+) strand; PAM type: YTN; PAM sequence: TTT
caagtgattctcctgcctca

SEQ ID NO: 388543 - DNA, 20 bp, Artificial Sequence
  Description of Artificial Sequence: Synthetic oligonucleotide
  Target: LAMA2; (+) strand; PAM type: YTN; PAM sequence: TTC
aagtgattctcctgcctcag

SEQ ID NO: 388544 - DNA, 20 bp, Artificial Sequence
  Description of Artificial Sequence: Synthetic oligonucleotide
  Target: LAMA2; (+) strand; PAM type: YTN; PAM sequence: TTC
tcctgcctcagccttctggg

SEQ ID NO: 388545 - DNA, 20 bp, Artificial Sequence
  Description of Artificial Sequence: Synthetic oligonucleotide
  Target: LAMA2; (+) strand; PAM type: YTN; PAM sequence: CTC
ctgcctcagccttctgggta

SEQ ID NO: 388546 - DNA, 20 bp, Artificial Sequence
  Description of Artificial Sequence: Synthetic oligonucleotide
  Target: LAMA2; (+) strand; PAM type: YTN; PAM sequence: CTG
cctcagccttctgggtagct

SEQ ID NO: 388547 - DNA, 20 bp, Artificial Sequence
  Description of Artificial Sequence: Synthetic oligonucleotide
  Target: LAMA2; (+) strand; PAM type: YTN; PAM sequence: CTC
agccttctgggtagctgaga

SEQ ID NO: 388548 - DNA, 20 bp, Artificial Sequence
  Description of Artificial Sequence: Synthetic oligonucleotide
  Target: LAMA2; (+) strand; PAM type: YTN; PAM sequence: CTT
ctgggtagctgagactacag

SEQ ID NO: 388549 - DNA, 20 bp, Artificial Sequence
  Description of Artificial Sequence: Synthetic oligonucleotide
  Target: LAMA2; (+) strand; PAM type: YTN; PAM sequence: TTC
tgggtagctgagactacagg

SEQ ID NO: 388550 - DNA, 20 bp, Artificial Sequence
  Description of Artificial Sequence: Synthetic oligonucleotide
  Target: LAMA2; (+) strand; PAM type: YTN; PAM sequence: CTG
ggtagctgagactacagggg

SEQ ID NO: 388551 - DNA, 20 bp, Artificial Sequence
  Description of Artificial Sequence: Synthetic oligonucleotide
  Target: LAMA2; (+) strand; PAM type: YTN; PAM sequence: CTG
agactacaggggcccgccac

SEQ ID NO: 388552 - DNA, 20 bp, Artificial Sequence
  Description of Artificial Sequence: Synthetic oligonucleotide
  Target: LAMA2; (+) strand; PAM type: YTN; PAM sequence: CTA
caggggcccgccaccacgcc

SEQ ID NO: 388553 - DNA, 20 bp, Artificial Sequence
  Description of Artificial Sequence: Synthetic oligonucleotide
  Target: LAMA2; (+) strand; PAM type: YTN; PAM sequence: CTG
gctaatttttgtatttttag

SEQ ID NO: 388554 - DNA, 20 bp, Artificial Sequence
  Description of Artificial Sequence: Synthetic oligonucleotide
  Target: LAMA2; (+) strand; PAM type: YTN; PAM sequence: CTA
atttttgtatttttagtaga

SEQ ID NO: 388555 - DNA, 20 bp, Artificial Sequence
  Description of Artificial Sequence: Synthetic oligonucleotide
  Target: LAMA2; (+) strand; PAM type: YTN; PAM sequence: TTT
ttgtatttttagtagagaca

SEQ ID NO: 388556 - DNA, 20 bp, Artificial Sequence
  Description of Artificial Sequence: Synthetic oligonucleotide
  Target: LAMA2; (+) strand; PAM type: YTN; PAM sequence: TTT
tgtatttttagtagagacag

SEQ ID NO: 388557 - DNA, 20 bp, Artificial Sequence
  Description of Artificial Sequence: Synthetic oligonucleotide
  Target: LAMA2; (+) strand; PAM type: YTN; PAM sequence: TTT
gtatttttagtagagacagg

SEQ ID NO: 388558 - DNA, 20 bp, Artificial Sequence
  Description of Artificial Sequence: Synthetic oligonucleotide
  Target: LAMA2; (+) strand; PAM type: YTN; PAM sequence: TTG
tatttttagtagagacaggg

SEQ ID NO: 388559 - DNA, 20 bp, Artificial Sequence
  Description of Artificial Sequence: Synthetic oligonucleotide
  Target: LAMA2; (+) strand; PAM type: YTN; PAM sequence: TTT
ttagtagagacagggtttca

SEQ ID NO: 388560 - DNA, 20 bp, Artificial Sequence
  Description of Artificial Sequence: Synthetic oligonucleotide
  Target: LAMA2; (+) strand; PAM type: YTN; PAM sequence: TTT
tagtagagacagggtttcac

SEQ ID NO: 388561 - DNA, 20 bp, Artificial Sequence
  Description of Artificial Sequence: Synthetic oligonucleotide
  Target: LAMA2; (+) strand; PAM type: YTN; PAM sequence: TTT
agtagagacagggtttcacc

SEQ ID NO: 388562 - DNA, 20 bp, Artificial Sequence
  Description of Artificial Sequence: Synthetic oligonucleotide
  Target: LAMA2; (+) strand; PAM type: YTN; PAM sequence: TTA
gtagagacagggtttcacca

SEQ ID NO: 388563 - DNA, 20 bp, Artificial Sequence
  Description of Artificial Sequence: Synthetic oligonucleotide
  Target: LAMA2; (+) strand; PAM type: YTN; PAM sequence: TTT
caccatgttggtcaggctgg

SEQ ID NO: 388564 - DNA, 20 bp, Artificial Sequence
  Description of Artificial Sequence: Synthetic oligonucleotide
  Target: LAMA2; (+) strand; PAM type: YTN; PAM sequence: TTC
accatgttggtcaggctggt

SEQ ID NO: 388565 - DNA, 20 bp, Artificial Sequence
  Description of Artificial Sequence: Synthetic oligonucleotide
  Target: LAMA2; (+) strand; PAM type: YTN; PAM sequence: TTG
gtcaggctggtcttgaactc

SEQ ID NO: 388566 - DNA, 20 bp, Artificial Sequence
  Description of Artificial Sequence: Synthetic oligonucleotide
  Target: LAMA2; (+) strand; PAM type: YTN; PAM sequence: CTG
gtcttgaactcctgacctca

SEQ ID NO: 388567 - DNA, 20 bp, Artificial Sequence
  Description of Artificial Sequence: Synthetic oligonucleotide
  Target: LAMA2; (+) strand; PAM type: YTN; PAM sequence: CTT
gaactcctgacctcaggtga

SEQ ID NO: 388568 - DNA, 20 bp, Artificial Sequence
  Description of Artificial Sequence: Synthetic oligonucleotide
  Target: LAMA2; (+) strand; PAM type: YTN; PAM sequence: TTG
aactcctgacctcaggtgat

SEQ ID NO: 388569 - DNA, 20 bp, Artificial Sequence
  Description of Artificial Sequence: Synthetic oligonucleotide
  Target: LAMA2; (+) strand; PAM type: YTN; PAM sequence: CTC
ctgacctcaggtgatccacc

SEQ ID NO: 388570 - DNA, 20 bp, Artificial Sequence
  Description of Artificial Sequence: Synthetic oligonucleotide
  Target: LAMA2; (+) strand; PAM type: YTN; PAM sequence: CTG
acctcaggtgatccacccac

SEQ ID NO: 388571 - DNA, 20 bp, Artificial Sequence
  Description of Artificial Sequence: Synthetic oligonucleotide
  Target: LAMA2; (+) strand; PAM type: YTN; PAM sequence: CTC
aggtgatccacccacctcgg

SEQ ID NO: 388572 - DNA, 20 bp, Artificial Sequence
  Description of Artificial Sequence: Synthetic oligonucleotide
  Target: LAMA2; (+) strand; PAM type: YTN; PAM sequence: CTC
ggcctctcaaagtgttggga

SEQ ID NO: 388573 - DNA, 20 bp, Artificial Sequence
  Description of Artificial Sequence: Synthetic oligonucleotide
  Target: LAMA2; (+) strand; PAM type: YTN; PAM sequence: CTC
tcaaagtgttgggattacag

SEQ ID NO: 388574 - DNA, 20 bp, Artificial Sequence
  Description of Artificial Sequence: Synthetic oligonucleotide
  Target: LAMA2; (+) strand; PAM type: YTN; PAM sequence: CTC
aaagtgttgggattacaggc

SEQ ID NO: 388575 - DNA, 20 bp, Artificial Sequence
  Description of Artificial Sequence: Synthetic oligonucleotide
  Target: LAMA2; (+) strand; PAM type: YTN; PAM sequence: TTG
ggattacaggcatgagccac

SEQ ID NO: 388576 - DNA, 20 bp, Artificial Sequence
  Description of Artificial Sequence: Synthetic oligonucleotide
  Target: LAMA2; (+) strand; PAM type: YTN; PAM sequence: TTA
caggcatgagccaccacacc

SEQ ID NO: 388577 - DNA, 20 bp, Artificial Sequence
  Description of Artificial Sequence: Synthetic oligonucleotide
  Target: LAMA2; (+) strand; PAM type: YTN; PAM sequence: CTT
ctttagactttttttttttt

SEQ ID NO: 388578 - DNA, 20 bp, Artificial Sequence
  Description of Artificial Sequence: Synthetic oligonucleotide
  Target: LAMA2; (+) strand; PAM type: YTN; PAM sequence: TTC
tttagacttttttttttttt

SEQ ID NO: 388579 - DNA, 20 bp, Artificial Sequence
  Description of Artificial Sequence: Synthetic oligonucleotide
  Target: LAMA2; (+) strand; PAM type: YTN; PAM sequence: CTT
tagactttttttttttttaa

SEQ ID NO: 388580 - DNA, 20 bp, Artificial Sequence
  Description of Artificial Sequence: Synthetic oligonucleotide
  Target: LAMA2; (+) strand; PAM type: YTN; PAM sequence: TTT
agactttttttttttttaat

SEQ ID NO: 388581 - DNA, 20 bp, Artificial Sequence
  Description of Artificial Sequence: Synthetic oligonucleotide
  Target: LAMA2; (+) strand; PAM type: YTN; PAM sequence: TTA
gactttttttttttttaatt

SEQ ID NO: 388582 - DNA, 20 bp, Artificial Sequence
  Description of Artificial Sequence: Synthetic oligonucleotide
  Target: LAMA2; (+) strand; PAM type: YTN; PAM sequence: CTT
tttttttttttaattattct

SEQ ID NO: 388583 - DNA, 20 bp, Artificial Sequence
  Description of Artificial Sequence: Synthetic oligonucleotide
  Target: LAMA2; (+) strand; PAM type: YTN; PAM sequence: TTT
ttttttttttaattattcta

SEQ ID NO: 388584 - DNA, 20 bp, Artificial Sequence
  Description of Artificial Sequence: Synthetic oligonucleotide
  Target: LAMA2; (+) strand; PAM type: YTN; PAM sequence: TTT
tttttttttaattattctac

SEQ ID NO: 388585 - DNA, 20 bp, Artificial Sequence
  Description of Artificial Sequence: Synthetic oligonucleotide
  Target: LAMA2; (+) strand; PAM type: YTN; PAM sequence: TTT
ttttttttaattattctact

SEQ ID NO: 388586 - DNA, 20 bp, Artificial Sequence
  Description of Artificial Sequence: Synthetic oligonucleotide
  Target: LAMA2; (+) strand; PAM type: YTN; PAM sequence: TTT
tttttttaattattctactc

SEQ ID NO: 388587 - DNA, 20 bp, Artificial Sequence
  Description of Artificial Sequence: Synthetic oligonucleotide
  Target: LAMA2; (+) strand; PAM type: YTN; PAM sequence: TTT
ttttttaattattctactca

SEQ ID NO: 388588 - DNA, 20 bp, Artificial Sequence
  Description of Artificial Sequence: Synthetic oligonucleotide
  Target: LAMA2; (+) strand; PAM type: YTN; PAM sequence: TTT
tttttaattattctactcaa

SEQ ID NO: 388589 - DNA, 20 bp, Artificial Sequence
  Description of Artificial Sequence: Synthetic oligonucleotide
  Target: LAMA2; (+) strand; PAM type: YTN; PAM sequence: TTT
ttttaattattctactcaat

SEQ ID NO: 388590 - DNA, 20 bp, Artificial Sequence
  Description of Artificial Sequence: Synthetic oligonucleotide
  Target: LAMA2; (+) strand; PAM type: YTN; PAM sequence: TTT
tttaattattctactcaata

SEQ ID NO: 388591 - DNA, 20 bp, Artificial Sequence
  Description of Artificial Sequence: Synthetic oligonucleotide
  Target: LAMA2; (+) strand; PAM type: YTN; PAM sequence: TTT
ttaattattctactcaatag

SEQ ID NO: 388592 - DNA, 20 bp, Artificial Sequence
  Description of Artificial Sequence: Synthetic oligonucleotide
  Target: LAMA2; (+) strand; PAM type: YTN; PAM sequence: TTT
taattattctactcaataga

SEQ ID NO: 388593 - DNA, 20 bp, Artificial Sequence
  Description of Artificial Sequence: Synthetic oligonucleotide
  Target: LAMA2; (+) strand; PAM type: YTN; PAM sequence: TTT
aattattctactcaatagat

SEQ ID NO: 388594 - DNA, 20 bp, Artificial Sequence
  Description of Artificial Sequence: Synthetic oligonucleotide
  Target: LAMA2; (+) strand; PAM type: YTN; PAM sequence: TTA
attattctactcaatagata

SEQ ID NO: 388595 - DNA, 20 bp, Artificial Sequence
  Description of Artificial Sequence: Synthetic oligonucleotide
  Target: LAMA2; (+) strand; PAM type: YTN; PAM sequence: TTA
ttctactcaatagataccaa

SEQ ID NO: 388596 - DNA, 20 bp, Artificial Sequence
  Description of Artificial Sequence: Synthetic oligonucleotide
  Target: LAMA2; (+) strand; PAM type: YTN; PAM sequence: TTC
tactcaatagataccaagct

SEQ ID NO: 388597 - DNA, 20 bp, Artificial Sequence
  Description of Artificial Sequence: Synthetic oligonucleotide
  Target: LAMA2; (+) strand; PAM type: YTN; PAM sequence: CTA
ctcaatagataccaagctaa

SEQ ID NO: 388598 - DNA, 20 bp, Artificial Sequence
  Description of Artificial Sequence: Synthetic oligonucleotide
  Target: LAMA2; (+) strand; PAM type: YTN; PAM sequence: CTC
aatagataccaagctaaaaa

SEQ ID NO: 388599 - DNA, 20 bp, Artificial Sequence
  Description of Artificial Sequence: Synthetic oligonucleotide
  Target: LAMA2; (+) strand; PAM type: YTN; PAM sequence: CTA
aaaatttatatactttttga

SEQ ID NO: 388600 - DNA, 20 bp, Artificial Sequence
  Description of Artificial Sequence: Synthetic oligonucleotide
  Target: LAMA2; (+) strand; PAM type: YTN; PAM sequence: TTT
atatactttttgaatgtgta

SEQ ID NO: 388601 - DNA, 20 bp, Artificial Sequence
  Description of Artificial Sequence: Synthetic oligonucleotide
  Target: LAMA2; (+) strand; PAM type: YTN; PAM sequence: TTA
tatactttttgaatgtgtaa

SEQ ID NO: 388602 - DNA, 20 bp, Artificial Sequence
  Description of Artificial Sequence: Synthetic oligonucleotide
  Target: LAMA2; (+) strand; PAM type: YTN; PAM sequence: CTT
tttgaatgtgtaatacataa

SEQ ID NO: 388603 - DNA, 20 bp, Artificial Sequence
  Description of Artificial Sequence: Synthetic oligonucleotide
  Target: LAMA2; (+) strand; PAM type: YTN; PAM sequence: TTT
ttgaatgtgtaatacataaa

SEQ ID NO: 388604 - DNA, 20 bp, Artificial Sequence
  Description of Artificial Sequence: Synthetic oligonucleotide
  Target: LAMA2; (+) strand; PAM type: YTN; PAM sequence: TTT
tgaatgtgtaatacataaag

SEQ ID NO: 388605 - DNA, 20 bp, Artificial Sequence
  Description of Artificial Sequence: Synthetic oligonucleotide
  Target: LAMA2; (+) strand; PAM type: YTN; PAM sequence: TTT
gaatgtgtaatacataaagc

SEQ ID NO: 388606 - DNA, 20 bp, Artificial Sequence
  Description of Artificial Sequence: Synthetic oligonucleotide
  Target: LAMA2; (+) strand; PAM type: YTN; PAM sequence: TTG
aatgtgtaatacataaagca

SEQ ID NO: 388607 - DNA, 20 bp, Artificial Sequence
  Description of Artificial Sequence: Synthetic oligonucleotide
  Target: LAMA2; (+) strand; PAM type: YTN; PAM sequence: TTA
ctatgactttctccagtgca

SEQ ID NO: 388608 - DNA, 20 bp, Artificial Sequence
  Description of Artificial Sequence: Synthetic oligonucleotide
  Target: LAMA2; (+) strand; PAM type: YTN; PAM sequence: CTA
tgactttctccagtgcaatc

SEQ ID NO: 388609 - DNA, 20 bp, Artificial Sequence
  Description of Artificial Sequence: Synthetic oligonucleotide
  Target: LAMA2; (+) strand; PAM type: YTN; PAM sequence: CTT
tctccagtgcaatctaatgg

SEQ ID NO: 388610 - DNA, 20 bp, Artificial Sequence
  Description of Artificial Sequence: Synthetic oligonucleotide
  Target: LAMA2; (+) strand; PAM type: YTN; PAM sequence: TTT
ctccagtgcaatctaatgga

SEQ ID NO: 388611 - DNA, 20 bp, Artificial Sequence
  Description of Artificial Sequence: Synthetic oligonucleotide
  Target: LAMA2; (+) strand; PAM type: YTN; PAM sequence: TTC
tccagtgcaatctaatggag

SEQ ID NO: 388612 - DNA, 20 bp, Artificial Sequence
  Description of Artificial Sequence: Synthetic oligonucleotide
  Target: LAMA2; (+) strand; PAM type: YTN; PAM sequence: CTC
cagtgcaatctaatggagca

SEQ ID NO: 388613 - DNA, 20 bp, Artificial Sequence
  Description of Artificial Sequence: Synthetic oligonucleotide
  Target: LAMA2; (+) strand; PAM type: YTN; PAM sequence: CTA
atggagcaccacacatttag

SEQ ID NO: 388614 - DNA, 20 bp, Artificial Sequence
  Description of Artificial Sequence: Synthetic oligonucleotide
  Target: LAMA2; (+) strand; PAM type: YTN; PAM sequence: TTT
agactctggagcatgtttta

SEQ ID NO: 388615 - DNA, 20 bp, Artificial Sequence
  Description of Artificial Sequence: Synthetic oligonucleotide
  Target: LAMA2; (+) strand; PAM type: YTN; PAM sequence: TTA
gactctggagcatgttttat

SEQ ID NO: 388616 - DNA, 20 bp, Artificial Sequence
  Description of Artificial Sequence: Synthetic oligonucleotide
  Target: LAMA2; (+) strand; PAM type: YTN; PAM sequence: CTC
tggagcatgttttattccct

SEQ ID NO: 388617 - DNA, 20 bp, Artificial Sequence
  Description of Artificial Sequence: Synthetic oligonucleotide
  Target: LAMA2; (+) strand; PAM type: YTN; PAM sequence: CTG
gagcatgttttattccctgt

SEQ ID NO: 388618 - DNA, 20 bp, Artificial Sequence
  Description of Artificial Sequence: Synthetic oligonucleotide
  Target: LAMA2; (+) strand; PAM type: YTN; PAM sequence: TTT
tattccctgtggacaggttc

SEQ ID NO: 388619 - DNA, 20 bp, Artificial Sequence
  Description of Artificial Sequence: Synthetic oligonucleotide
  Target: LAMA2; (+) strand; PAM type: YTN; PAM sequence: TTT
attccctgtggacaggttcc

SEQ ID NO: 388620 - DNA, 20 bp, Artificial Sequence
  Description of Artificial Sequence: Synthetic oligonucleotide
  Target: LAMA2; (+) strand; PAM type: YTN; PAM sequence: TTA
ttccctgtggacaggttcct

SEQ ID NO: 388621 - DNA, 20 bp, Artificial Sequence
  Description of Artificial Sequence: Synthetic oligonucleotide
  Target: LAMA2; (+) strand; PAM type: YTN; PAM sequence: TTC
cctgtggacaggttcctttc

SEQ ID NO: 388622 - DNA, 20 bp, Artificial Sequence
  Description of Artificial Sequence: Synthetic oligonucleotide
  Target: LAMA2; (+) strand; PAM type: YTN; PAM sequence: CTG
tggacaggttcctttcgatt

SEQ ID NO: 388623 - DNA, 20 bp, Artificial Sequence
  Description of Artificial Sequence: Synthetic oligonucleotide
  Target: LAMA2; (+) strand; PAM type: YTN; PAM sequence: TTC
ctttcgattgctcatgtagg

SEQ ID NO: 388624 - DNA, 20 bp, Artificial Sequence
  Description of Artificial Sequence: Synthetic oligonucleotide
  Target: LAMA2; (+) strand; PAM type: YTN; PAM sequence: CTT
tcgattgctcatgtagggat

SEQ ID NO: 388625 - DNA, 20 bp, Artificial Sequence
  Description of Artificial Sequence: Synthetic oligonucleotide
  Target: LAMA2; (+) strand; PAM type: YTN; PAM sequence: TTT
cgattgctcatgtagggatt

SEQ ID NO: 388626 - DNA, 20 bp, Artificial Sequence
  Description of Artificial Sequence: Synthetic oligonucleotide
  Target: LAMA2; (+) strand; PAM type: YTN; PAM sequence: TTC
gattgctcatgtagggattt

SEQ ID NO: 388627 - DNA, 20 bp, Artificial Sequence
  Description of Artificial Sequence: Synthetic oligonucleotide
  Target: LAMA2; (+) strand; PAM type: YTN; PAM sequence: TTG
ctcatgtagggatttagggg

SEQ ID NO: 388628 - DNA, 20 bp, Artificial Sequence
  Description of Artificial Sequence: Synthetic oligonucleotide
  Target: LAMA2; (+) strand; PAM type: YTN; PAM sequence: CTC
atgtagggatttagggggta

SEQ ID NO: 388629 - DNA, 20 bp, Artificial Sequence
  Description of Artificial Sequence: Synthetic oligonucleotide
  Target: LAMA2; (+) strand; PAM type: YTN; PAM sequence: TTT
agggggtacttttaatgtta

SEQ ID NO: 388630 - DNA, 20 bp, Artificial Sequence
  Description of Artificial Sequence: Synthetic oligonucleotide
  Target: LAMA2; (+) strand; PAM type: YTN; PAM sequence: TTA
gggggtacttttaatgttat

SEQ ID NO: 388631 - DNA, 20 bp, Artificial Sequence
  Description of Artificial Sequence: Synthetic oligonucleotide
  Target: LAMA2; (+) strand; PAM type: YTN; PAM sequence: CTT
ttaatgttatattctatgcc

SEQ ID NO: 388632 - DNA, 20 bp, Artificial Sequence
  Description of Artificial Sequence: Synthetic oligonucleotide
  Target: LAMA2; (+) strand; PAM type: YTN; PAM sequence: TTT
taatgttatattctatgcct

SEQ ID NO: 388633 - DNA, 20 bp, Artificial Sequence
  Description of Artificial Sequence: Synthetic oligonucleotide
  Target: LAMA2; (+) strand; PAM type: YTN; PAM sequence: TTT
aatgttatattctatgcctt

SEQ ID NO: 388634 - DNA, 20 bp, Artificial Sequence
  Description of Artificial Sequence: Synthetic oligonucleotide
  Target: LAMA2; (+) strand; PAM type: YTN; PAM sequence: TTA
atgttatattctatgcctta

SEQ ID NO: 388635 - DNA, 20 bp, Artificial Sequence
  Description of Artificial Sequence: Synthetic oligonucleotide
  Target: LAMA2; (+) strand; PAM type: YTN; PAM sequence: TTA
tattctatgccttaaaggaa

SEQ ID NO: 388636 - DNA, 20 bp, Artificial Sequence
  Description of Artificial Sequence: Synthetic oligonucleotide
  Target: LAMA2; (+) strand; PAM type: YTN; PAM sequence: TTC
tatgccttaaaggaaatctt

SEQ ID NO: 388637 - DNA, 20 bp, Artificial Sequence
  Description of Artificial Sequence: Synthetic oligonucleotide
  Target: LAMA2; (+) strand; PAM type: YTN; PAM sequence: CTA
tgccttaaaggaaatcttca

SEQ ID NO: 388638 - DNA, 20 bp, Artificial Sequence
  Description of Artificial Sequence: Synthetic oligonucleotide
  Target: LAMA2; (+) strand; PAM type: YTN; PAM sequence: CTT
aaaggaaatcttcaatactt

SEQ ID NO: 388639 - DNA, 20 bp, Artificial Sequence
  Description of Artificial Sequence: Synthetic oligonucleotide
  Target: LAMA2; (+) strand; PAM type: YTN; PAM sequence: TTA
aaggaaatcttcaatacttg

SEQ ID NO: 388640 - DNA, 20 bp, Artificial Sequence
  Description of Artificial Sequence: Synthetic oligonucleotide
  Target: LAMA2; (+) strand; PAM type: YTN; PAM sequence: CTT
caatacttgtgcaatacact

SEQ ID NO: 388641 - DNA, 20 bp, Artificial Sequence
  Description of Artificial Sequence: Synthetic oligonucleotide
  Target: LAMA2; (+) strand; PAM type: YTN; PAM sequence: TTC
aatacttgtgcaatacactt

SEQ ID NO: 388642 - DNA, 20 bp, Artificial Sequence
  Description of Artificial Sequence: Synthetic oligonucleotide
  Target: LAMA2; (+) strand; PAM type: YTN; PAM sequence: CTT
gtgcaatacactttttctcc

SEQ ID NO: 388643 - DNA, 20 bp, Artificial Sequence
  Description of Artificial Sequence: Synthetic oligonucleotide
  Target: LAMA2; (+) strand; PAM type: YTN; PAM sequence: TTG
tgcaatacactttttctccc

SEQ ID NO: 388644 - DNA, 20 bp, Artificial Sequence
  Description of Artificial Sequence: Synthetic oligonucleotide
  Target: LAMA2; (+) strand; PAM type: YTN; PAM sequence: CTT
tttctccccaaatctatttg

SEQ ID NO: 388645 - DNA, 20 bp, Artificial Sequence
  Description of Artificial Sequence: Synthetic oligonucleotide
  Target: LAMA2; (+) strand; PAM type: YTN; PAM sequence: TTT
ttctccccaaatctatttgc

SEQ ID NO: 388646 - DNA, 20 bp, Artificial Sequence
  Description of Artificial Sequence: Synthetic oligonucleotide
  Target: LAMA2; (+) strand; PAM type: YTN; PAM sequence: TTT
tctccccaaatctatttgct

SEQ ID NO: 388647 - DNA, 20 bp, Artificial Sequence
  Description of Artificial Sequence: Synthetic oligonucleotide
  Target: LAMA2; (+) strand; PAM type: YTN; PAM sequence: TTT
ctccccaaatctatttgctc

SEQ ID NO: 388648 - DNA, 20 bp, Artificial Sequence
  Description of Artificial Sequence: Synthetic oligonucleotide
  Target: LAMA2; (+) strand; PAM type: YTN; PAM sequence: TTC
tccccaaatctatttgctcc

SEQ ID NO: 388649 - DNA, 20 bp, Artificial Sequence
  Description of Artificial Sequence: Synthetic oligonucleotide
  Target: LAMA2; (+) strand; PAM type: YTN; PAM sequence: CTC
cccaaatctatttgctcctc

SEQ ID NO: 388650 - DNA, 20 bp, Artificial Sequence
  Description of Artificial Sequence: Synthetic oligonucleotide
  Target: LAMA2; (+) strand; PAM type: YTN; PAM sequence: CTA
tttgctcctcctctttggtc

SEQ ID NO: 388651 - DNA, 20 bp, Artificial Sequence
  Description of Artificial Sequence: Synthetic oligonucleotide
  Target: LAMA2; (+) strand; PAM type: YTN; PAM sequence: TTT
gctcctcctctttggtccct

SEQ ID NO: 388652 - DNA, 20 bp, Artificial Sequence
  Description of Artificial Sequence: Synthetic oligonucleotide
  Target: LAMA2; (+) strand; PAM type: YTN; PAM sequence: TTG
ctcctcctctttggtccctc

SEQ ID NO: 388653 - DNA, 20 bp, Artificial Sequence
  Description of Artificial Sequence: Synthetic oligonucleotide
  Target: LAMA2; (+) strand; PAM type: YTN; PAM sequence: CTC
ctcctctttggtccctcagt

SEQ ID NO: 388654 - DNA, 20 bp, Artificial Sequence
  Description of Artificial Sequence: Synthetic oligonucleotide
  Target: LAMA2; (+) strand; PAM type: YTN; PAM sequence: CTC
ctctttggtccctcagttta

SEQ ID NO: 388655 - DNA, 20 bp, Artificial Sequence
  Description of Artificial Sequence: Synthetic oligonucleotide
  Target: LAMA2; (+) strand; PAM type: YTN; PAM sequence: CTC
tttggtccctcagtttatat

SEQ ID NO: 388656 - DNA, 20 bp, Artificial Sequence
  Description of Artificial Sequence: Synthetic oligonucleotide
  Target: LAMA2; (+) strand; PAM type: YTN; PAM sequence: CTT
tggtccctcagtttatatta

SEQ ID NO: 388657 - DNA, 20 bp, Artificial Sequence
  Description of Artificial Sequence: Synthetic oligonucleotide
  Target: LAMA2; (+) strand; PAM type: YTN; PAM sequence: TTT
ggtccctcagtttatattat

SEQ ID NO: 388658 - DNA, 20 bp, Artificial Sequence
  Description of Artificial Sequence: Synthetic oligonucleotide
  Target: LAMA2; (+) strand; PAM type: YTN; PAM sequence: TTG
gtccctcagtttatattatc

SEQ ID NO: 388659 - DNA, 20 bp, Artificial Sequence
  Description of Artificial Sequence: Synthetic oligonucleotide
  Target: LAMA2; (+) strand; PAM type: YTN; PAM sequence: CTC
agtttatattatcgcctcta

SEQ ID NO: 388660 - DNA, 20 bp, Artificial Sequence
  Description of Artificial Sequence: Synthetic oligonucleotide
  Target: LAMA2; (+) strand; PAM type: YTN; PAM sequence: TTT
atattatcgcctctatttca

SEQ ID NO: 388661 - DNA, 20 bp, Artificial Sequence
  Description of Artificial Sequence: Synthetic oligonucleotide
  Target: LAMA2; (+) strand; PAM type: YTN; PAM sequence: TTA
tattatcgcctctatttcag

SEQ ID NO: 388662 - DNA, 20 bp, Artificial Sequence
  Description of Artificial Sequence: Synthetic oligonucleotide
  Target: LAMA2; (+) strand; PAM type: YTN; PAM sequence: TTA
tcgcctctatttcaggttct

SEQ ID NO: 388663 - DNA, 20 bp, Artificial Sequence
  Description of Artificial Sequence: Synthetic oligonucleotide
  Target: LAMA2; (+) strand; PAM type: YTN; PAM sequence: CTC
tatttcaggttctgggcgac

SEQ ID NO: 388664 - DNA, 20 bp, Artificial Sequence
  Description of Artificial Sequence: Synthetic oligonucleotide
  Target: LAMA2; (+) strand; PAM type: YTN; PAM sequence: CTA
tttcaggttctgggcgacat

SEQ ID NO: 388665 - DNA, 20 bp, Artificial Sequence
  Description of Artificial Sequence: Synthetic oligonucleotide
  Target: LAMA2; (+) strand; PAM type: YTN; PAM sequence: TTT
caggttctgggcgacatgca

SEQ ID NO: 388666 - DNA, 20 bp, Artificial Sequence
  Description of Artificial Sequence: Synthetic oligonucleotide
  Target: LAMA2; (+) strand; PAM type: YTN; PAM sequence: TTC
aggttctgggcgacatgcat

SEQ ID NO: 388667 - DNA, 20 bp, Artificial Sequence
  Description of Artificial Sequence: Synthetic oligonucleotide
  Target: LAMA2; (+) strand; PAM type: YTN; PAM sequence: TTC
tgggcgacatgcatatctgt

SEQ ID NO: 388668 - DNA, 20 bp, Artificial Sequence
  Description of Artificial Sequence: Synthetic oligonucleotide
  Target: LAMA2; (+) strand; PAM type: YTN; PAM sequence: CTG
ggcgacatgcatatctgttc

SEQ ID NO: 388669 - DNA, 20 bp, Artificial Sequence
  Description of Artificial Sequence: Synthetic oligonucleotide
  Target: LAMA2; (+) strand; PAM type: YTN; PAM sequence: CTG
ttcttttgttgttgttctta

SEQ ID NO: 388670 - DNA, 20 bp, Artificial Sequence
  Description of Artificial Sequence: Synthetic oligonucleotide
  Target: LAMA2; (+) strand; PAM type: YTN; PAM sequence: TTC
ttttgttgttgttcttatct

SEQ ID NO: 388671 - DNA, 20 bp, Artificial Sequence
  Description of Artificial Sequence: Synthetic oligonucleotide
  Target: LAMA2; (+) strand; PAM type: YTN; PAM sequence: CTT
ttgttgttgttcttatcttt

SEQ ID NO: 388672 - DNA, 20 bp, Artificial Sequence
  Description of Artificial Sequence: Synthetic oligonucleotide
  Target: LAMA2; (+) strand; PAM type: YTN; PAM sequence: TTT
tgttgttgttcttatctttc

SEQ ID NO: 388673 - DNA, 20 bp, Artificial Sequence
  Description of Artificial Sequence: Synthetic oligonucleotide
  Target: LAMA2; (+) strand; PAM type: YTN; PAM sequence: TTT
gttgttgttcttatctttcc

SEQ ID NO: 388674 - DNA, 20 bp, Artificial Sequence
  Description of Artificial Sequence: Synthetic oligonucleotide
  Target: LAMA2; (+) strand; PAM type: YTN; PAM sequence: TTG
ttgttgttcttatctttcct

SEQ ID NO: 388675 - DNA, 20 bp, Artificial Sequence
  Description of Artificial Sequence: Synthetic oligonucleotide
  Target: LAMA2; (+) strand; PAM type: YTN; PAM sequence: TTG
ttgttcttatctttcctcaa

SEQ ID NO: 388676 - DNA, 20 bp, Artificial Sequence
  Description of Artificial Sequence: Synthetic oligonucleotide
  Target: LAMA2; (+) strand; PAM type: YTN; PAM sequence: TTG
ttcttatctttcctcaacca

SEQ ID NO: 388677 - DNA, 20 bp, Artificial Sequence
  Description of Artificial Sequence: Synthetic oligonucleotide
  Target: LAMA2; (+) strand; PAM type: YTN; PAM sequence: TTC
ttatctttcctcaaccatca

SEQ ID NO: 388678 - DNA, 20 bp, Artificial Sequence
  Description of Artificial Sequence: Synthetic oligonucleotide
  Target: LAMA2; (+) strand; PAM type: YTN; PAM sequence: CTT
atctttcctcaaccatcatc

SEQ ID NO: 388679 - DNA, 20 bp, Artificial Sequence
  Description of Artificial Sequence: Synthetic oligonucleotide
  Target: LAMA2; (+) strand; PAM type: YTN; PAM sequence: TTA
tctttcctcaaccatcatcc

SEQ ID NO: 388680 - DNA, 20 bp, Artificial Sequence
  Description of Artificial Sequence: Synthetic oligonucleotide
  Target: LAMA2; (+) strand; PAM type: YTN; PAM sequence: CTT
tcctcaaccatcatccattt

SEQ ID NO: 388681 - DNA, 20 bp, Artificial Sequence
  Description of Artificial Sequence: Synthetic oligonucleotide
  Target: LAMA2; (+) strand; PAM type: YTN; PAM sequence: TTT
cctcaaccatcatccatttg

SEQ ID NO: 388682 - DNA, 20 bp, Artificial Sequence
  Description of Artificial Sequence: Synthetic oligonucleotide
  Target: LAMA2; (+) strand; PAM type: YTN; PAM sequence: TTC
ctcaaccatcatccatttga

SEQ ID NO: 388683 - DNA, 20 bp, Artificial Sequence
  Description of Artificial Sequence: Synthetic oligonucleotide
  Target: LAMA2; (+) strand; PAM type: YTN; PAM sequence: CTC
aaccatcatccatttgatag

SEQ ID NO: 388684 - DNA, 20 bp, Artificial Sequence
  Description of Artificial Sequence: Synthetic oligonucleotide
  Target: LAMA2; (+) strand; PAM type: YTN; PAM sequence: TTT
gatagcattaatattctgag

SEQ ID NO: 388685 - DNA, 20 bp, Artificial Sequence
  Description of Artificial Sequence: Synthetic oligonucleotide
  Target: LAMA2; (+) strand; PAM type: YTN; PAM sequence: TTG
atagcattaatattctgaga

SEQ ID NO: 388686 - DNA, 20 bp, Artificial Sequence
  Description of Artificial Sequence: Synthetic oligonucleotide
  Target: LAMA2; (+) strand; PAM type: YTN; PAM sequence: TTA
atattctgagatgagtagtt

SEQ ID NO: 388687 - DNA, 20 bp, Artificial Sequence
  Description of Artificial Sequence: Synthetic oligonucleotide
  Target: LAMA2; (+) strand; PAM type: YTN; PAM sequence: TTC
tgagatgagtagtttcatct

SEQ ID NO: 388688 - DNA, 20 bp, Artificial Sequence
  Description of Artificial Sequence: Synthetic oligonucleotide
  Target: LAMA2; (+) strand; PAM type: YTN; PAM sequence: CTG
agatgagtagtttcatcttc

SEQ ID NO: 388689 - DNA, 20 bp, Artificial Sequence
  Description of Artificial Sequence: Synthetic oligonucleotide
  Target: LAMA2; (+) strand; PAM type: YTN; PAM sequence: TTT
catcttccatggaattattc

SEQ ID NO: 388690 - DNA, 20 bp, Artificial Sequence
  Description of Artificial Sequence: Synthetic oligonucleotide
  Target: LAMA2; (+) strand; PAM type: YTN; PAM sequence: TTC
atcttccatggaattattct

SEQ ID NO: 388691 - DNA, 20 bp, Artificial Sequence
  Description of Artificial Sequence: Synthetic oligonucleotide
  Target: LAMA2; (+) strand; PAM type: YTN; PAM sequence: CTT
ccatggaattattcttggac

SEQ ID NO: 388692 - DNA, 20 bp, Artificial Sequence
  Description of Artificial Sequence: Synthetic oligonucleotide
  Target: LAMA2; (+) strand; PAM type: YTN; PAM sequence: TTC
catggaattattcttggacc

SEQ ID NO: 388693 - DNA, 20 bp, Artificial Sequence
  Description of Artificial Sequence: Synthetic oligonucleotide
  Target: LAMA2; (+) strand; PAM type: YTN; PAM sequence: TTA
ttcttggaccataaaatatt

SEQ ID NO: 388694 - DNA, 20 bp, Artificial Sequence
  Description of Artificial Sequence: Synthetic oligonucleotide
  Target: LAMA2; (+) strand; PAM type: YTN; PAM sequence: TTC
ttggaccataaaatatttca

SEQ ID NO: 388695 - DNA, 20 bp, Artificial Sequence
  Description of Artificial Sequence: Synthetic oligonucleotide
  Target: LAMA2; (+) strand; PAM type: YTN; PAM sequence: CTT
ggaccataaaatatttcata

SEQ ID NO: 388696 - DNA, 20 bp, Artificial Sequence
  Description of Artificial Sequence: Synthetic oligonucleotide
  Target: LAMA2; (+) strand; PAM type: YTN; PAM sequence: TTG
gaccataaaatatttcatag

SEQ ID NO: 388697 - DNA, 20 bp, Artificial Sequence
  Description of Artificial Sequence: Synthetic oligonucleotide
  Target: LAMA2; (+) strand; PAM type: YTN; PAM sequence: TTT
catagctgaattctttgaac

SEQ ID NO: 388698 - DNA, 20 bp, Artificial Sequence
  Description of Artificial Sequence: Synthetic oligonucleotide
  Target: LAMA2; (+) strand; PAM type: YTN; PAM sequence: TTC
atagctgaattctttgaaca

SEQ ID NO: 388699 - DNA, 20 bp, Artificial Sequence
  Description of Artificial Sequence: Synthetic oligonucleotide
  Target: LAMA2; (+) strand; PAM type: YTN; PAM sequence: CTG
aattctttgaacatctgcct

SEQ ID NO: 388700 - DNA, 20 bp, Artificial Sequence
  Description of Artificial Sequence: Synthetic oligonucleotide
  Target: LAMA2; (+) strand; PAM type: YTN; PAM sequence: TTC
tttgaacatctgcctgggat

SEQ ID NO: 388701 - DNA, 20 bp, Artificial Sequence
  Description of Artificial Sequence: Synthetic oligonucleotide
  Target: LAMA2; (+) strand; PAM type: YTN; PAM sequence: CTT
tgaacatctgcctgggatgt

SEQ ID NO: 388702 - DNA, 20 bp, Artificial Sequence
  Description of Artificial Sequence: Synthetic oligonucleotide
  Target: LAMA2; (+) strand; PAM type: YTN; PAM sequence: TTT
gaacatctgcctgggatgtt

SEQ ID NO: 388703 - DNA, 20 bp, Artificial Sequence
  Description of Artificial Sequence: Synthetic oligonucleotide
  Target: LAMA2; (+) strand; PAM type: YTN; PAM sequence: TTG
aacatctgcctgggatgttt

SEQ ID NO: 388704 - DNA, 20 bp, Artificial Sequence
  Description of Artificial Sequence: Synthetic oligonucleotide
  Target: LAMA2; (+) strand; PAM type: YTN; PAM sequence: CTG
cctgggatgtttagcagaag

SEQ ID NO: 388705 - DNA, 20 bp, Artificial Sequence
  Description of Artificial Sequence: Synthetic oligonucleotide
  Target: LAMA2; (+) strand; PAM type: YTN; PAM sequence: CTG
ggatgtttagcagaagtaac

SEQ ID NO: 388706 - DNA, 20 bp, Artificial Sequence
  Description of Artificial Sequence: Synthetic oligonucleotide
  Target: LAMA2; (+) strand; PAM type: YTN; PAM sequence: TTT
agcagaagtaactactcttt

SEQ ID NO: 388707 - DNA, 20 bp, Artificial Sequence
  Description of Artificial Sequence: Synthetic oligonucleotide
  Target: LAMA2; (+) strand; PAM type: YTN; PAM sequence: TTA
gcagaagtaactactctttg

SEQ ID NO: 388708 - DNA, 20 bp, Artificial Sequence
  Description of Artificial Sequence: Synthetic oligonucleotide
  Target: LAMA2; (+) strand; PAM type: YTN; PAM sequence: CTA
ctctttgtcacttctctttc

SEQ ID NO: 388709 - DNA, 20 bp, Artificial Sequence
  Description of Artificial Sequence: Synthetic oligonucleotide
  Target: LAMA2; (+) strand; PAM type: YTN; PAM sequence: CTC
tttgtcacttctctttcaca

SEQ ID NO: 388710 - DNA, 20 bp, Artificial Sequence
  Description of Artificial Sequence: Synthetic oligonucleotide
  Target: LAMA2; (+) strand; PAM type: YTN; PAM sequence: CTT
tgtcacttctctttcacagt

SEQ ID NO: 388711 - DNA, 20 bp, Artificial Sequence
  Description of Artificial Sequence: Synthetic oligonucleotide
  Target: LAMA2; (+) strand; PAM type: YTN; PAM sequence: TTT
gtcacttctctttcacagtt

SEQ ID NO: 388712 - DNA, 20 bp, Artificial Sequence
  Description of Artificial Sequence: Synthetic oligonucleotide
  Target: LAMA2; (+) strand; PAM type: YTN; PAM sequence: TTG
tcacttctctttcacagttt

SEQ ID NO: 388713 - DNA, 20 bp, Artificial Sequence
  Description of Artificial Sequence: Synthetic oligonucleotide
  Target: LAMA2; (+) strand; PAM type: YTN; PAM sequence: CTT
ctctttcacagtttgtggag

SEQ ID NO: 388714 - DNA, 20 bp, Artificial Sequence
  Description of Artificial Sequence: Synthetic oligonucleotide
  Target: LAMA2; (+) strand; PAM type: YTN; PAM sequence: TTC
tctttcacagtttgtggaga

SEQ ID NO: 388715 - DNA, 20 bp, Artificial Sequence
  Description of Artificial Sequence: Synthetic oligonucleotide
  Target: LAMA2; (+) strand; PAM type: YTN; PAM sequence: CTC
tttcacagtttgtggagatg

SEQ ID NO: 388716 - DNA, 20 bp, Artificial Sequence
  Description of Artificial Sequence: Synthetic oligonucleotide
  Target: LAMA2; (+) strand; PAM type: YTN; PAM sequence: CTT
tcacagtttgtggagatgag

SEQ ID NO: 388717 - DNA, 20 bp, Artificial Sequence
  Description of Artificial Sequence: Synthetic oligonucleotide
  Target: LAMA2; (+) strand; PAM type: YTN; PAM sequence: TTT
cacagtttgtggagatgagt

SEQ ID NO: 388718 - DNA, 20 bp, Artificial Sequence
  Description of Artificial Sequence: Synthetic oligonucleotide
  Target: LAMA2; (+) strand; PAM type: YTN; PAM sequence: TTC
acagtttgtggagatgagtg

SEQ ID NO: 388719 - DNA, 20 bp, Artificial Sequence
  Description of Artificial Sequence: Synthetic oligonucleotide
  Target: LAMA2; (+) strand; PAM type: YTN; PAM sequence: TTT
gtggagatgagtgcactggc

SEQ ID NO: 388720 - DNA, 20 bp, Artificial Sequence
  Description of Artificial Sequence: Synthetic oligonucleotide
  Target: LAMA2; (+) strand; PAM type: YTN; PAM sequence: TTG
tggagatgagtgcactggcc

SEQ ID NO: 388721 - DNA, 20 bp, Artificial Sequence
  Description of Artificial Sequence: Synthetic oligonucleotide
  Target: LAMA2; (+) strand; PAM type: YTN; PAM sequence: CTG
gccttcttctcggtgacttg

SEQ ID NO: 388722 - DNA, 20 bp, Artificial Sequence
  Description of Artificial Sequence: Synthetic oligonucleotide
  Target: LAMA2; (+) strand; PAM type: YTN; PAM sequence: CTT
cttctcggtgacttggctcg

SEQ ID NO: 388723 - DNA, 20 bp, Artificial Sequence
  Description of Artificial Sequence: Synthetic oligonucleotide
  Target: LAMA2; (+) strand; PAM type: YTN; PAM sequence: TTC
ttctcggtgacttggctcgc

SEQ ID NO: 388724 - DNA, 20 bp, Artificial Sequence
  Description of Artificial Sequence: Synthetic oligonucleotide
  Target: LAMA2; (+) strand; PAM type: YTN; PAM sequence: CTT
ctcggtgacttggctcgcct

SEQ ID NO: 388725 - DNA, 20 bp, Artificial Sequence
  Description of Artificial Sequence: Synthetic oligonucleotide
  Target: LAMA2; (+) strand; PAM type: YTN; PAM sequence: TTC
tcggtgacttggctcgcctg

SEQ ID NO: 388726 - DNA, 20 bp, Artificial Sequence
  Description of Artificial Sequence: Synthetic oligonucleotide
  Target: LAMA2; (+) strand; PAM type: YTN; PAM sequence: CTC
ggtgacttggctcgcctgga

SEQ ID NO: 388727 - DNA, 20 bp, Artificial Sequence
  Description of Artificial Sequence: Synthetic oligonucleotide
  Target: LAMA2; (+) strand; PAM type: YTN; PAM sequence: CTT
ggctcgcctggagcagatgg

SEQ ID NO: 388728 - DNA, 20 bp, Artificial Sequence
  Description of Artificial Sequence: Synthetic oligonucleotide
  Target: LAMA2; (+) strand; PAM type: YTN; PAM sequence: TTG
gctcgcctggagcagatggt

SEQ ID NO: 388729 - DNA, 20 bp, Artificial Sequence
  Description of Artificial Sequence: Synthetic oligonucleotide
  Target: LAMA2; (+) strand; PAM type: YTN; PAM sequence: CTC
gcctggagcagatggtcatg

SEQ ID NO: 388730 - DNA, 20 bp, Artificial Sequence
  Description of Artificial Sequence: Synthetic oligonucleotide
  Target: LAMA2; (+) strand; PAM type: YTN; PAM sequence: CTG
gagcagatggtcatgagcat

SEQ ID NO: 388731 - DNA, 20 bp, Artificial Sequence
  Description of Artificial Sequence: Synthetic oligonucleotide
  Target: LAMA2; (+) strand; PAM type: YTN; PAM sequence: CTC
actggtccgctgcctgcgcc

SEQ ID NO: 388732 - DNA, 20 bp, Artificial Sequence
  Description of Artificial Sequence: Synthetic oligonucleotide
  Target: LAMA2; (+) strand; PAM type: YTN; PAM sequence: CTG
gtccgctgcctgcgccatat

SEQ ID NO: 388733 - DNA, 20 bp, Artificial Sequence
  Description of Artificial Sequence: Synthetic oligonucleotide
  Target: LAMA2; (+) strand; PAM type: YTN; PAM sequence: CTG
cctgcgccatataaaatgct

SEQ ID NO: 388734 - DNA, 20 bp, Artificial Sequence
  Description of Artificial Sequence: Synthetic oligonucleotide
  Target: LAMA2; (+) strand; PAM type: YTN; PAM sequence: CTG
cgccatataaaatgctgtat

SEQ ID NO: 388735 - DNA, 20 bp, Artificial Sequence
  Description of Artificial Sequence: Synthetic oligonucleotide
  Target: LAMA2; (+) strand; PAM type: YTN; PAM sequence: CTG
tatggtcttgaaaatatgac

SEQ ID NO: 388736 - DNA, 20 bp, Artificial Sequence
  Description of Artificial Sequence: Synthetic oligonucleotide
  Target: LAMA2; (+) strand; PAM type: YTN; PAM sequence: CTT
gaaaatatgactcaggagct

SEQ ID NO: 388737 - DNA, 20 bp, Artificial Sequence
  Description of Artificial Sequence: Synthetic oligonucleotide
  Target: LAMA2; (+) strand; PAM type: YTN; PAM sequence: TTG
aaaatatgactcaggagcta

SEQ ID NO: 388738 - DNA, 20 bp, Artificial Sequence
  Description of Artificial Sequence: Synthetic oligonucleotide
  Target: LAMA2; (+) strand; PAM type: YTN; PAM sequence: CTC
aggagctaaaggtaggttgg

SEQ ID NO: 388739 - DNA, 20 bp, Artificial Sequence
  Description of Artificial Sequence: Synthetic oligonucleotide
  Target: LAMA2; (+) strand; PAM type: YTN; PAM sequence: CTA
aaggtaggttggtgcagtca

SEQ ID NO: 388740 - DNA, 20 bp, Artificial Sequence
  Description of Artificial Sequence: Synthetic oligonucleotide
  Target: LAMA2; (+) strand; PAM type: YTN; PAM sequence: TTG
gtgcagtcacaagcaagggc

SEQ ID NO: 388741 - DNA, 20 bp, Artificial Sequence
  Description of Artificial Sequence: Synthetic oligonucleotide
  Target: LAMA2; (+) strand; PAM type: YTN; PAM sequence: CTT
cacaagcggtattggctgta

SEQ ID NO: 388742 - DNA, 20 bp, Artificial Sequence
  Description of Artificial Sequence: Synthetic oligonucleotide
  Target: LAMA2; (+) strand; PAM type: YTN; PAM sequence: TTC
acaagcggtattggctgtaa

SEQ ID NO: 388743 - DNA, 20 bp, Artificial Sequence
  Description of Artificial Sequence: Synthetic oligonucleotide
  Target: LAMA2; (+) strand; PAM type: YTN; PAM sequence: TTG
gctgtaattggtaaatgttc

SEQ ID NO: 388744 - DNA, 20 bp, Artificial Sequence
  Description of Artificial Sequence: Synthetic oligonucleotide
  Target: LAMA2; (+) strand; PAM type: YTN; PAM sequence: CTG
taattggtaaatgttcttcc

SEQ ID NO: 388745 - DNA, 20 bp, Artificial Sequence
  Description of Artificial Sequence: Synthetic oligonucleotide
  Target: LAMA2; (+) strand; PAM type: YTN; PAM sequence: TTG
gtaaatgttcttcccacagc

SEQ ID NO: 388746 - DNA, 20 bp, Artificial Sequence
  Description of Artificial Sequence: Synthetic oligonucleotide
  Target: LAMA2; (+) strand; PAM type: YTN; PAM sequence: TTC
ttcccacagccccaaatcaa

SEQ ID NO: 388747 - DNA, 20 bp, Artificial Sequence
  Description of Artificial Sequence: Synthetic oligonucleotide
  Target: LAMA2; (+) strand; PAM type: YTN; PAM sequence: CTT
cccacagccccaaatcaagg

SEQ ID NO: 388748 - DNA, 20 bp, Artificial Sequence
  Description of Artificial Sequence: Synthetic oligonucleotide
  Target: LAMA2; (+) strand; PAM type: YTN; PAM sequence: TTC
ccacagccccaaatcaaggg

SEQ ID NO: 388749 - DNA, 20 bp, Artificial Sequence
  Description of Artificial Sequence: Synthetic oligonucleotide
  Target: LAMA2; (+) strand; PAM type: YTN; PAM sequence: CTG
ttagggaaattcagagactt

SEQ ID NO: 388750 - DNA, 20 bp, Artificial Sequence
  Description of Artificial Sequence: Synthetic oligonucleotide
  Target: LAMA2; (+) strand; PAM type: YTN; PAM sequence: TTA
gggaaattcagagactttct

SEQ ID NO: 388751 - DNA, 20 bp, Artificial Sequence
  Description of Artificial Sequence: Synthetic oligonucleotide
  Target: LAMA2; (+) strand; PAM type: YTN; PAM sequence: TTC
agagactttcttaaccagtg

SEQ ID NO: 388752 - DNA, 20 bp, Artificial Sequence
  Description of Artificial Sequence: Synthetic oligonucleotide
  Target: LAMA2; (+) strand; PAM type: YTN; PAM sequence: CTT
tcttaaccagtgtttttcaa

SEQ ID NO: 388753 - DNA, 20 bp, Artificial Sequence
  Description of Artificial Sequence: Synthetic oligonucleotide
  Target: LAMA2; (+) strand; PAM type: YTN; PAM sequence: TTT
cttaaccagtgtttttcaaa

SEQ ID NO: 388754 - DNA, 20 bp, Artificial Sequence
  Description of Artificial Sequence: Synthetic oligonucleotide
  Target: LAMA2; (+) strand; PAM type: YTN; PAM sequence: TTC
ttaaccagtgtttttcaaac

SEQ ID NO: 388755 - DNA, 20 bp, Artificial Sequence
  Description of Artificial Sequence: Synthetic oligonucleotide
  Target: LAMA2; (+) strand; PAM type: YTN; PAM sequence: CTT
aaccagtgtttttcaaactc

SEQ ID NO: 388756 - DNA, 20 bp, Artificial Sequence
  Description of Artificial Sequence: Synthetic oligonucleotide
  Target: LAMA2; (+) strand; PAM type: YTN; PAM sequence: TTA
accagtgtttttcaaactca

SEQ ID NO: 388757 - DNA, 20 bp, Artificial Sequence
  Description of Artificial Sequence: Synthetic oligonucleotide
  Target: LAMA2; (+) strand; PAM type: YTN; PAM sequence: TTT
ttcaaactcaagaactataa

SEQ ID NO: 388758 - DNA, 20 bp, Artificial Sequence
  Description of Artificial Sequence: Synthetic oligonucleotide
  Target: LAMA2; (+) strand; PAM type: YTN; PAM sequence: TTT
tcaaactcaagaactataat

SEQ ID NO: 388759 - DNA, 20 bp, Artificial Sequence
  Description of Artificial Sequence: Synthetic oligonucleotide
  Target: LAMA2; (+) strand; PAM type: YTN; PAM sequence: TTT
caaactcaagaactataata

SEQ ID NO: 388760 - DNA, 20 bp, Artificial Sequence
  Description of Artificial Sequence: Synthetic oligonucleotide
  Target: LAMA2; (+) strand; PAM type: YTN; PAM sequence: TTC
aaactcaagaactataatat

SEQ ID NO: 388761 - DNA, 20 bp, Artificial Sequence
  Description of Artificial Sequence: Synthetic oligonucleotide
  Target: LAMA2; (+) strand; PAM type: YTN; PAM sequence: CTC
aagaactataatatacagat

SEQ ID NO: 388762 - DNA, 20 bp, Artificial Sequence
  Description of Artificial Sequence: Synthetic oligonucleotide
  Target: LAMA2; (+) strand; PAM type: YTN; PAM sequence: CTA
taatatacagatttctatta

SEQ ID NO: 388763 - DNA, 20 bp, Artificial Sequence
  Description of Artificial Sequence: Synthetic oligonucleotide
  Target: LAMA2; (+) strand; PAM type: YTN; PAM sequence: TTT
ctattaagggaaaagagtct

SEQ ID NO: 388764 - DNA, 20 bp, Artificial Sequence
  Description of Artificial Sequence: Synthetic oligonucleotide
  Target: LAMA2; (+) strand; PAM type: YTN; PAM sequence: TTC
tattaagggaaaagagtctc

SEQ ID NO: 388765 - DNA, 20 bp, Artificial Sequence
  Description of Artificial Sequence: Synthetic oligonucleotide
  Target: LAMA2; (+) strand; PAM type: YTN; PAM sequence: CTA
ttaagggaaaagagtctcat

SEQ ID NO: 388766 - DNA, 20 bp, Artificial Sequence
  Description of Artificial Sequence: Synthetic oligonucleotide
  Target: LAMA2; (+) strand; PAM type: YTN; PAM sequence: TTA
agggaaaagagtctcatgta

SEQ ID NO: 388767 - DNA, 20 bp, Artificial Sequence
  Description of Artificial Sequence: Synthetic oligonucleotide
  Target: LAMA2; (+) strand; PAM type: YTN; PAM sequence: CTC
atgtaccccccagtgtctgg

SEQ ID NO: 388768 - DNA, 20 bp, Artificial Sequence
  Description of Artificial Sequence: Synthetic oligonucleotide
  Target: LAMA2; (+) strand; PAM type: YTN; PAM sequence: CTG
gcctaaatcagttttattat

SEQ ID NO: 388769 - DNA, 20 bp, Artificial Sequence
  Description of Artificial Sequence: Synthetic oligonucleotide
  Target: LAMA2; (+) strand; PAM type: YTN; PAM sequence: CTA
aatcagttttattatgtcac

SEQ ID NO: 388770 - DNA, 20 bp, Artificial Sequence
  Description of Artificial Sequence: Synthetic oligonucleotide
  Target: LAMA2; (+) strand; PAM type: YTN; PAM sequence: TTT
tattatgtcacttaaatatg

SEQ ID NO: 388771 - DNA, 20 bp, Artificial Sequence
  Description of Artificial Sequence: Synthetic oligonucleotide
  Target: LAMA2; (+) strand; PAM type: YTN; PAM sequence: TTT
attatgtcacttaaatatgt

SEQ ID NO: 388772 - DNA, 20 bp, Artificial Sequence
  Description of Artificial Sequence: Synthetic oligonucleotide
  Target: LAMA2; (+) strand; PAM type: YTN; PAM sequence: TTA
ttatgtcacttaaatatgtg

SEQ ID NO: 388773 - DNA, 20 bp, Artificial Sequence
  Description of Artificial Sequence: Synthetic oligonucleotide
  Target: LAMA2; (+) strand; PAM type: YTN; PAM sequence: TTA
tgtcacttaaatatgtgcaa

SEQ ID NO: 388774 - DNA, 20 bp, Artificial Sequence
  Description of Artificial Sequence: Synthetic oligonucleotide
  Target: LAMA2; (+) strand; PAM type: YTN; PAM sequence: CTT
aaatatgtgcaaacataaaa

SEQ ID NO: 388775 - DNA, 20 bp, Artificial Sequence
  Description of Artificial Sequence: Synthetic oligonucleotide
  Target: LAMA2; (+) strand; PAM type: YTN; PAM sequence: TTA
aatatgtgcaaacataaaat

SEQ ID NO: 388776 - DNA, 20 bp, Artificial Sequence
  Description of Artificial Sequence: Synthetic oligonucleotide
  Target: LAMA2; (+) strand; PAM type: YTN; PAM sequence: CTC
tttatacttatagctctata

SEQ ID NO: 388777 - DNA, 20 bp, Artificial Sequence
  Description of Artificial Sequence: Synthetic oligonucleotide
  Target: LAMA2; (+) strand; PAM type: YTN; PAM sequence: CTT
tatacttatagctctataaa

SEQ ID NO: 388778 - DNA, 20 bp, Artificial Sequence
  Description of Artificial Sequence: Synthetic oligonucleotide
  Target: LAMA2; (+) strand; PAM type: YTN; PAM sequence: TTT
atacttatagctctataaaa

SEQ ID NO: 388779 - DNA, 20 bp, Artificial Sequence
  Description of Artificial Sequence: Synthetic oligonucleotide
  Target: LAMA2; (+) strand; PAM type: YTN; PAM sequence: TTA
tacttatagctctataaaat

SEQ ID NO: 388780 - DNA, 20 bp, Artificial Sequence
  Description of Artificial Sequence: Synthetic oligonucleotide
  Target: LAMA2; (+) strand; PAM type: YTN; PAM sequence: CTT
atagctctataaaattaaaa

SEQ ID NO: 388781 - DNA, 20 bp, Artificial Sequence
  Description of Artificial Sequence: Synthetic oligonucleotide
  Target: LAMA2; (+) strand; PAM type: YTN; PAM sequence: TTA
tagctctataaaattaaaac

SEQ ID NO: 388782 - DNA, 20 bp, Artificial Sequence
  Description of Artificial Sequence: Synthetic oligonucleotide
  Target: LAMA2; (+) strand; PAM type: YTN; PAM sequence: CTC
tataaaattaaaacaaatta

SEQ ID NO: 388783 - DNA, 20 bp, Artificial Sequence
  Description of Artificial Sequence: Synthetic oligonucleotide
  Target: LAMA2; (+) strand; PAM type: YTN; PAM sequence: CTA
taaaattaaaacaaattaat

SEQ ID NO: 388784 - DNA, 20 bp, Artificial Sequence
  Description of Artificial Sequence: Synthetic oligonucleotide
  Target: LAMA2; (+) strand; PAM type: YTN; PAM sequence: TTA
aaacaaattaatccttacaa

SEQ ID NO: 388785 - DNA, 20 bp, Artificial Sequence
  Description of Artificial Sequence: Synthetic oligonucleotide
  Target: LAMA2; (+) strand; PAM type: YTN; PAM sequence: TTA
atccttacaaaaccaataaa

SEQ ID NO: 388786 - DNA, 20 bp, Artificial Sequence
  Description of Artificial Sequence: Synthetic oligonucleotide
  Target: LAMA2; (+) strand; PAM type: YTN; PAM sequence: CTT
acaaaaccaataaaattcaa

SEQ ID NO: 388787 - DNA, 20 bp, Artificial Sequence
  Description of Artificial Sequence: Synthetic oligonucleotide
  Target: LAMA2; (+) strand; PAM type: YTN; PAM sequence: TTA
caaaaccaataaaattcaaa

SEQ ID NO: 388788 - DNA, 20 bp, Artificial Sequence
  Description of Artificial Sequence: Synthetic oligonucleotide
  Target: LAMA2; (+) strand; PAM type: YTN; PAM sequence: TTC
aaattaaaaacattaatata

SEQ ID NO: 388789 - DNA, 20 bp, Artificial Sequence
  Description of Artificial Sequence: Synthetic oligonucleotide
  Target: LAMA2; (+) strand; PAM type: YTN; PAM sequence: TTA
aaaacattaatataaagtaa

SEQ ID NO: 388790 - DNA, 20 bp, Artificial Sequence
  Description of Artificial Sequence: Synthetic oligonucleotide
  Target: LAMA2; (+) strand; PAM type: YTN; PAM sequence: TTA
atataaagtaacatgatttt

SEQ ID NO: 388791 - DNA, 20 bp, Artificial Sequence
  Description of Artificial Sequence: Synthetic oligonucleotide
  Target: LAMA2; (+) strand; PAM type: YTN; PAM sequence: TTT
tggctgaatggaaattgctg

SEQ ID NO: 388792 - DNA, 20 bp, Artificial Sequence
  Description of Artificial Sequence: Synthetic oligonucleotide
  Target: LAMA2; (+) strand; PAM type: YTN; PAM sequence: TTT
ggctgaatggaaattgctgc

SEQ ID NO: 388793 - DNA, 20 bp, Artificial Sequence
  Description of Artificial Sequence: Synthetic oligonucleotide
  Target: LAMA2; (+) strand; PAM type: YTN; PAM sequence: TTG
gctgaatggaaattgctgct

SEQ ID NO: 388794 - DNA, 20 bp, Artificial Sequence
  Description of Artificial Sequence: Synthetic oligonucleotide
  Target: LAMA2; (+) strand; PAM type: YTN; PAM sequence: CTG
aatggaaattgctgcttgca

SEQ ID NO: 388795 - DNA, 20 bp, Artificial Sequence
  Description of Artificial Sequence: Synthetic oligonucleotide
  Target: LAMA2; (+) strand; PAM type: YTN; PAM sequence: TTG
ctgcttgcaacaagaatagg

SEQ ID NO: 388796 - DNA, 20 bp, Artificial Sequence
  Description of Artificial Sequence: Synthetic oligonucleotide
  Target: LAMA2; (+) strand; PAM type: YTN; PAM sequence: CTG
cttgcaacaagaataggata

SEQ ID NO: 388797 - DNA, 20 bp, Artificial Sequence
  Description of Artificial Sequence: Synthetic oligonucleotide
  Target: LAMA2; (+) strand; PAM type: YTN; PAM sequence: CTT
gcaacaagaataggatattg

SEQ ID NO: 388798 - DNA, 20 bp, Artificial Sequence
  Description of Artificial Sequence: Synthetic oligonucleotide
  Target: LAMA2; (+) strand; PAM type: YTN; PAM sequence: TTG
caacaagaataggatattga

SEQ ID NO: 388799 - DNA, 20 bp, Artificial Sequence
  Description of Artificial Sequence: Synthetic oligonucleotide
  Target: LAMA2; (+) strand; PAM type: YTN; PAM sequence: TTG
actattttcacacagttctt

SEQ ID NO: 388800 - DNA, 20 bp, Artificial Sequence
  Description of Artificial Sequence: Synthetic oligonucleotide
  Target: LAMA2; (+) strand; PAM type: YTN; PAM sequence: CTA
ttttcacacagttcttccac

SEQ ID NO: 388801 - DNA, 20 bp, Artificial Sequence
  Description of Artificial Sequence: Synthetic oligonucleotide
  Target: LAMA2; (+) strand; PAM type: YTN; PAM sequence: TTT
tcacacagttcttccaccag

SEQ ID NO: 388802 - DNA, 20 bp, Artificial Sequence
  Description of Artificial Sequence: Synthetic oligonucleotide
  Target: LAMA2; (+) strand; PAM type: YTN; PAM sequence: TTT
cacacagttcttccaccaga

SEQ ID NO: 388803 - DNA, 20 bp, Artificial Sequence
  Description of Artificial Sequence: Synthetic oligonucleotide
  Target: LAMA2; (+) strand; PAM type: YTN; PAM sequence: TTC
acacagttcttccaccagag

SEQ ID NO: 388804 - DNA, 20 bp, Artificial Sequence
  Description of Artificial Sequence: Synthetic oligonucleotide
  Target: LAMA2; (+) strand; PAM type: YTN; PAM sequence: TTC
ttccaccagagatgatgtgg

SEQ ID NO: 388805 - DNA, 20 bp, Artificial Sequence
  Description of Artificial Sequence: Synthetic oligonucleotide
  Target: LAMA2; (+) strand; PAM type: YTN; PAM sequence: CTT
ccaccagagatgatgtggta

SEQ ID NO: 388806 - DNA, 20 bp, Artificial Sequence
  Description of Artificial Sequence: Synthetic oligonucleotide
  Target: LAMA2; (+) strand; PAM type: YTN; PAM sequence: TTC
caccagagatgatgtggtaa

SEQ ID NO: 388807 - DNA, 20 bp, Artificial Sequence
  Description of Artificial Sequence: Synthetic oligonucleotide
  Target: LAMA2; (+) strand; PAM type: YTN; PAM sequence: CTC
atttctcctaccttaccaca

SEQ ID NO: 388808 - DNA, 20 bp, Artificial Sequence
  Description of Artificial Sequence: Synthetic oligonucleotide
  Target: LAMA2; (+) strand; PAM type: YTN; PAM sequence: TTT
ctcctaccttaccacatttg

SEQ ID NO: 388809 - DNA, 20 bp, Artificial Sequence
  Description of Artificial Sequence: Synthetic oligonucleotide
  Target: LAMA2; (+) strand; PAM type: YTN; PAM sequence: TTC
tcctaccttaccacatttga

SEQ ID NO: 388810 - DNA, 20 bp, Artificial Sequence
  Description of Artificial Sequence: Synthetic oligonucleotide
  Target: LAMA2; (+) strand; PAM type: YTN; PAM sequence: CTC
ctaccttaccacatttgaac

SEQ ID NO: 388811 - DNA, 20 bp, Artificial Sequence
  Description of Artificial Sequence: Synthetic oligonucleotide
  Target: LAMA2; (+) strand; PAM type: YTN; PAM sequence: CTA
ccttaccacatttgaaccag

SEQ ID NO: 388812 - DNA, 20 bp, Artificial Sequence
  Description of Artificial Sequence: Synthetic oligonucleotide
  Target: LAMA2; (+) strand; PAM type: YTN; PAM sequence: CTT
accacatttgaaccagagag

SEQ ID NO: 388813 - DNA, 20 bp, Artificial Sequence
  Description of Artificial Sequence: Synthetic oligonucleotide
  Target: LAMA2; (+) strand; PAM type: YTN; PAM sequence: TTA
ccacatttgaaccagagagc

SEQ ID NO: 388814 - DNA, 20 bp, Artificial Sequence
  Description of Artificial Sequence: Synthetic oligonucleotide
  Target: LAMA2; (+) strand; PAM type: YTN; PAM sequence: TTT
gaaccagagagccccctaca

SEQ ID NO: 388815 - DNA, 20 bp, Artificial Sequence
  Description of Artificial Sequence: Synthetic oligonucleotide
  Target: LAMA2; (+) strand; PAM type: YTN; PAM sequence: TTG
aaccagagagccccctacaa

SEQ ID NO: 388816 - DNA, 20 bp, Artificial Sequence
  Description of Artificial Sequence: Synthetic oligonucleotide
  Target: LAMA2; (+) strand; PAM type: YTN; PAM sequence: CTA
caaagggtcctgaaatgaat

SEQ ID NO: 388817 - DNA, 20 bp, Artificial Sequence
  Description of Artificial Sequence: Synthetic oligonucleotide
  Target: LAMA2; (+) strand; PAM type: YTN; PAM sequence: CTG
aaatgaatgtgagcatcact

SEQ ID NO: 388818 - DNA, 20 bp, Artificial Sequence
  Description of Artificial Sequence: Synthetic oligonucleotide
  Target: LAMA2; (+) strand; PAM type: YTN; PAM sequence: CTT
gacaagtttatgtgactaac

SEQ ID NO: 388819 - DNA, 20 bp, Artificial Sequence
  Description of Artificial Sequence: Synthetic oligonucleotide
  Target: LAMA2; (+) strand; PAM type: YTN; PAM sequence: TTG
acaagtttatgtgactaacg

SEQ ID NO: 388820 - DNA, 20 bp, Artificial Sequence
  Description of Artificial Sequence: Synthetic oligonucleotide
  Target: LAMA2; (+) strand; PAM type: YTN; PAM sequence: TTT
atgtgactaacgtgctcagt

SEQ ID NO: 388821 - DNA, 20 bp, Artificial Sequence
  Description of Artificial Sequence: Synthetic oligonucleotide
  Target: LAMA2; (+) strand; PAM type: YTN; PAM sequence: TTA
tgtgactaacgtgctcagtc

SEQ ID NO: 388822 - DNA, 20 bp, Artificial Sequence
  Description of Artificial Sequence: Synthetic oligonucleotide
  Target: LAMA2; (+) strand; PAM type: YTN; PAM sequence: CTA
acgtgctcagtctgccatag

SEQ ID NO: 388823 - DNA, 20 bp, Artificial Sequence
  Description of Artificial Sequence: Synthetic oligonucleotide
  Target: LAMA2; (+) strand; PAM type: YTN; PAM sequence: CTC
agtctgccataggctcaaac

SEQ ID NO: 388824 - DNA, 20 bp, Artificial Sequence
  Description of Artificial Sequence: Synthetic oligonucleotide
  Target: LAMA2; (+) strand; PAM type: YTN; PAM sequence: CTG
ccataggctcaaacacacag

SEQ ID NO: 388825 - DNA, 20 bp, Artificial Sequence
  Description of Artificial Sequence: Synthetic oligonucleotide
  Target: LAMA2; (+) strand; PAM type: YTN; PAM sequence: CTC
aaacacacaggcaaatgtag

SEQ ID NO: 388826 - DNA, 20 bp, Artificial Sequence
  Description of Artificial Sequence: Synthetic oligonucleotide
  Target: LAMA2; (+) strand; PAM type: YTN; PAM sequence: CTG
agatcaggtggccatattca

SEQ ID NO: 388827 - DNA, 20 bp, Artificial Sequence
  Description of Artificial Sequence: Synthetic oligonucleotide
  Target: LAMA2; (+) strand; PAM type: YTN; PAM sequence: TTC
atctctcaggtgcctagcct

SEQ ID NO: 388828 - DNA, 20 bp, Artificial Sequence
  Description of Artificial Sequence: Synthetic oligonucleotide
  Target: LAMA2; (+) strand; PAM type: YTN; PAM sequence: CTC
tcaggtgcctagcctgggat

SEQ ID NO: 388829 - DNA, 20 bp, Artificial Sequence
  Description of Artificial Sequence: Synthetic oligonucleotide
  Target: LAMA2; (+) strand; PAM type: YTN; PAM sequence: CTC
aggtgcctagcctgggatcc

SEQ ID NO: 388830 - DNA, 20 bp, Artificial Sequence
  Description of Artificial Sequence: Synthetic oligonucleotide
  Target: LAMA2; (+) strand; PAM type: YTN; PAM sequence: CTA
gcctgggatccagaaatgct

SEQ ID NO: 388831 - DNA, 20 bp, Artificial Sequence
  Description of Artificial Sequence: Synthetic oligonucleotide
  Target: LAMA2; (+) strand; PAM type: YTN; PAM sequence: CTG
ggatccagaaatgcttacat

SEQ ID NO: 388832 - DNA, 20 bp, Artificial Sequence
  Description of Artificial Sequence: Synthetic oligonucleotide
  Target: LAMA2; (+) strand; PAM type: YTN; PAM sequence: CTT
acattaatatttaaggttat

SEQ ID NO: 388833 - DNA, 20 bp, Artificial Sequence
  Description of Artificial Sequence: Synthetic oligonucleotide
  Target: LAMA2; (+) strand; PAM type: YTN; PAM sequence: TTA
cattaatatttaaggttatc

SEQ ID NO: 388834 - DNA, 20 bp, Artificial Sequence
  Description of Artificial Sequence: Synthetic oligonucleotide
  Target: LAMA2; (+) strand; PAM type: YTN; PAM sequence: TTA
atatttaaggttatcatcaa

SEQ ID NO: 388835 - DNA, 20 bp, Artificial Sequence
  Description of Artificial Sequence: Synthetic oligonucleotide
  Target: LAMA2; (+) strand; PAM type: YTN; PAM sequence: TTT
aaggttatcatcaaaatgaa

SEQ ID NO: 388836 - DNA, 20 bp, Artificial Sequence
  Description of Artificial Sequence: Synthetic oligonucleotide
  Target: LAMA2; (+) strand; PAM type: YTN; PAM sequence: TTA
aggttatcatcaaaatgaaa

SEQ ID NO: 388837 - DNA, 20 bp, Artificial Sequence
  Description of Artificial Sequence: Synthetic oligonucleotide
  Target: LAMA2; (+) strand; PAM type: YTN; PAM sequence: TTA
tcatcaaaatgaaaacacat

SEQ ID NO: 388838 - DNA, 20 bp, Artificial Sequence
  Description of Artificial Sequence: Synthetic oligonucleotide
  Target: LAMA2; (+) strand; PAM type: YTN; PAM sequence: TTA
gaatcttgtactaaagagct

SEQ ID NO: 388839 - DNA, 20 bp, Artificial Sequence
  Description of Artificial Sequence: Synthetic oligonucleotide
  Target: LAMA2; (+) strand; PAM type: YTN; PAM sequence: CTT
gtactaaagagctagaacta

SEQ ID NO: 388840 - DNA, 20 bp, Artificial Sequence
  Description of Artificial Sequence: Synthetic oligonucleotide
  Target: LAMA2; (+) strand; PAM type: YTN; PAM sequence: TTG
tactaaagagctagaactag

SEQ ID NO: 388841 - DNA, 20 bp, Artificial Sequence
  Description of Artificial Sequence: Synthetic oligonucleotide
  Target: LAMA2; (+) strand; PAM type: YTN; PAM sequence: CTA
aagagctagaactagtagac

SEQ ID NO: 388842 - DNA, 20 bp, Artificial Sequence
  Description of Artificial Sequence: Synthetic oligonucleotide
  Target: LAMA2; (+) strand; PAM type: YTN; PAM sequence: CTA
gaactagtagacctttaaaa

SEQ ID NO: 388843 - DNA, 20 bp, Artificial Sequence
  Description of Artificial Sequence: Synthetic oligonucleotide
  Target: LAMA2; (+) strand; PAM type: YTN; PAM sequence: CTA
gtagacctttaaaagttctt

SEQ ID NO: 388844 - DNA, 20 bp, Artificial Sequence
  Description of Artificial Sequence: Synthetic oligonucleotide
  Target: LAMA2; (+) strand; PAM type: YTN; PAM sequence: CTT
taaaagttcttcaacaagca

SEQ ID NO: 388845 - DNA, 20 bp, Artificial Sequence
  Description of Artificial Sequence: Synthetic oligonucleotide
  Target: LAMA2; (+) strand; PAM type: YTN; PAM sequence: TTT
aaaagttcttcaacaagcac

SEQ ID NO: 388846 - DNA, 20 bp, Artificial Sequence
  Description of Artificial Sequence: Synthetic oligonucleotide
  Target: LAMA2; (+) strand; PAM type: YTN; PAM sequence: TTA
aaagttcttcaacaagcacc

SEQ ID NO: 388847 - DNA, 20 bp, Artificial Sequence
  Description of Artificial Sequence: Synthetic oligonucleotide
  Target: LAMA2; (+) strand; PAM type: YTN; PAM sequence: TTC
ttcaacaagcaccagtttga

SEQ ID NO: 388848 - DNA, 20 bp, Artificial Sequence
  Description of Artificial Sequence: Synthetic oligonucleotide
  Target: LAMA2; (+) strand; PAM type: YTN; PAM sequence: CTT
caacaagcaccagtttgata

SEQ ID NO: 388849 - DNA, 20 bp, Artificial Sequence
  Description of Artificial Sequence: Synthetic oligonucleotide
  Target: LAMA2; (+) strand; PAM type: YTN; PAM sequence: TTC
aacaagcaccagtttgataa

SEQ ID NO: 388850 - DNA, 20 bp, Artificial Sequence
  Description of Artificial Sequence: Synthetic oligonucleotide
  Target: LAMA2; (+) strand; PAM type: YTN; PAM sequence: TTT
gataaacactgttctaaatt

SEQ ID NO: 388851 - DNA, 20 bp, Artificial Sequence
  Description of Artificial Sequence: Synthetic oligonucleotide
  Target: LAMA2; (+) strand; PAM type: YTN; PAM sequence: TTG
ataaacactgttctaaattg

SEQ ID NO: 388852 - DNA, 20 bp, Artificial Sequence
  Description of Artificial Sequence: Synthetic oligonucleotide
  Target: LAMA2; (+) strand; PAM type: YTN; PAM sequence: CTG
ttctaaattgtggttaaagc

SEQ ID NO: 388853 - DNA, 20 bp, Artificial Sequence
  Description of Artificial Sequence: Synthetic oligonucleotide
  Target: LAMA2; (+) strand; PAM type: YTN; PAM sequence: TTC
taaattgtggttaaagcttt

SEQ ID NO: 388854 - DNA, 20 bp, Artificial Sequence
  Description of Artificial Sequence: Synthetic oligonucleotide
  Target: LAMA2; (+) strand; PAM type: YTN; PAM sequence: CTA
aattgtggttaaagcttttg

SEQ ID NO: 388855 - DNA, 20 bp, Artificial Sequence
  Description of Artificial Sequence: Synthetic oligonucleotide
  Target: LAMA2; (+) strand; PAM type: YTN; PAM sequence: TTG
tggttaaagcttttggtagt

SEQ ID NO: 388856 - DNA, 20 bp, Artificial Sequence
  Description of Artificial Sequence: Synthetic oligonucleotide
  Target: LAMA2; (+) strand; PAM type: YTN; PAM sequence: TTA
aagcttttggtagttaacga

SEQ ID NO: 388857 - DNA, 20 bp, Artificial Sequence
  Description of Artificial Sequence: Synthetic oligonucleotide
  Target: LAMA2; (+) strand; PAM type: YTN; PAM sequence: CTT
ttggtagttaacgaggtagg

SEQ ID NO: 388858 - DNA, 20 bp, Artificial Sequence
  Description of Artificial Sequence: Synthetic oligonucleotide
  Target: LAMA2; (+) strand; PAM type: YTN; PAM sequence: TTT
tggtagttaacgaggtagga

SEQ ID NO: 388859 - DNA, 20 bp, Artificial Sequence
  Description of Artificial Sequence: Synthetic oligonucleotide
  Target: LAMA2; (+) strand; PAM type: YTN; PAM sequence: TTT
ggtagttaacgaggtaggag

SEQ ID NO: 388860 - DNA, 20 bp, Artificial Sequence
  Description of Artificial Sequence: Synthetic oligonucleotide
  Target: LAMA2; (+) strand; PAM type: YTN; PAM sequence: TTG
gtagttaacgaggtaggaga

SEQ ID NO: 388861 - DNA, 20 bp, Artificial Sequence
  Description of Artificial Sequence: Synthetic oligonucleotide
  Target: LAMA2; (+) strand; PAM type: YTN; PAM sequence: TTA
acgaggtaggagaaaacatt

SEQ ID NO: 388862 - DNA, 20 bp, Artificial Sequence
  Description of Artificial Sequence: Synthetic oligonucleotide
  Target: LAMA2; (+) strand; PAM type: YTN; PAM sequence: TTA
aagaaattggggttgtttca

SEQ ID NO: 388863 - DNA, 20 bp, Artificial Sequence
  Description of Artificial Sequence: Synthetic oligonucleotide
  Target: LAMA2; (+) strand; PAM type: YTN; PAM sequence: TTG
gggttgtttcacctgatgga

SEQ ID NO: 388864 - DNA, 20 bp, Artificial Sequence
  Description of Artificial Sequence: Synthetic oligonucleotide
  Target: LAMA2; (+) strand; PAM type: YTN; PAM sequence: TTG
tttcacctgatggaaaaaga

SEQ ID NO: 388865 - DNA, 20 bp, Artificial Sequence
  Description of Artificial Sequence: Synthetic oligonucleotide
  Target: LAMA2; (+) strand; PAM type: YTN; PAM sequence: TTT
cacctgatggaaaaagatga

SEQ ID NO: 388866 - DNA, 20 bp, Artificial Sequence
  Description of Artificial Sequence: Synthetic oligonucleotide
  Target: LAMA2; (+) strand; PAM type: YTN; PAM sequence: TTC
acctgatggaaaaagatgaa

SEQ ID NO: 388867 - DNA, 20 bp, Artificial Sequence
  Description of Artificial Sequence: Synthetic oligonucleotide
  Target: LAMA2; (+) strand; PAM type: YTN; PAM sequence: CTG
atggaaaaagatgaaaggtg

SEQ ID NO: 388868 - DNA, 20 bp, Artificial Sequence
  Description of Artificial Sequence: Synthetic oligonucleotide
  Target: LAMA2; (+) strand; PAM type: YTN; PAM sequence: CTT
actatcagtcaattatcaga

SEQ ID NO: 388869 - DNA, 20 bp, Artificial Sequence
  Description of Artificial Sequence: Synthetic oligonucleotide
  Target: LAMA2; (+) strand; PAM type: YTN; PAM sequence: TTA
ctatcagtcaattatcagat

SEQ ID NO: 388870 - DNA, 20 bp, Artificial Sequence
  Description of Artificial Sequence: Synthetic oligonucleotide
  Target: LAMA2; (+) strand; PAM type: YTN; PAM sequence: CTA
tcagtcaattatcagatatt

SEQ ID NO: 388871 - DNA, 20 bp, Artificial Sequence
  Description of Artificial Sequence: Synthetic oligonucleotide
  Target: LAMA2; (+) strand; PAM type: YTN; PAM sequence: TTA
tcagatatttattaagaaat

SEQ ID NO: 388872 - DNA, 20 bp, Artificial Sequence
  Description of Artificial Sequence: Synthetic oligonucleotide
  Target: LAMA2; (+) strand; PAM type: YTN; PAM sequence: TTT
attaagaaattatagaatac

SEQ ID NO: 388873 - DNA, 20 bp, Artificial Sequence
  Description of Artificial Sequence: Synthetic oligonucleotide
  Target: LAMA2; (+) strand; PAM type: YTN; PAM sequence: TTA
ttaagaaattatagaatacc

SEQ ID NO: 388874 - DNA, 20 bp, Artificial Sequence
  Description of Artificial Sequence: Synthetic oligonucleotide
  Target: LAMA2; (+) strand; PAM type: YTN; PAM sequence: TTA
agaaattatagaatacctca

SEQ ID NO: 388875 - DNA, 20 bp, Artificial Sequence
  Description of Artificial Sequence: Synthetic oligonucleotide
  Target: LAMA2; (+) strand; PAM type: YTN; PAM sequence: TTA
tagaatacctcagcattgca

SEQ ID NO: 388876 - DNA, 20 bp, Artificial Sequence
  Description of Artificial Sequence: Synthetic oligonucleotide
  Target: LAMA2; (+) strand; PAM type: YTN; PAM sequence: CTC
agcattgcacttggttccct

SEQ ID NO: 388877 - DNA, 20 bp, Artificial Sequence
  Description of Artificial Sequence: Synthetic oligonucleotide
  Target: LAMA2; (+) strand; PAM type: YTN; PAM sequence: TTG
cacttggttccctggggatt

SEQ ID NO: 388878 - DNA, 20 bp, Artificial Sequence
  Description of Artificial Sequence: Synthetic oligonucleotide
  Target: LAMA2; (+) strand; PAM type: YTN; PAM sequence: CTT
ggttccctggggatttcatg

SEQ ID NO: 388879 - DNA, 20 bp, Artificial Sequence
  Description of Artificial Sequence: Synthetic oligonucleotide
  Target: LAMA2; (+) strand; PAM type: YTN; PAM sequence: TTG
gttccctggggatttcatga

SEQ ID NO: 388880 - DNA, 20 bp, Artificial Sequence
  Description of Artificial Sequence: Synthetic oligonucleotide
  Target: LAMA2; (+) strand; PAM type: YTN; PAM sequence: TTC
cctggggatttcatgactct

SEQ ID NO: 388881 - DNA, 20 bp, Artificial Sequence
  Description of Artificial Sequence: Synthetic oligonucleotide
  Target: LAMA2; (+) strand; PAM type: YTN; PAM sequence: CTG
gggatttcatgactctttta

SEQ ID NO: 388882 - DNA, 20 bp, Artificial Sequence
  Description of Artificial Sequence: Synthetic oligonucleotide
  Target: LAMA2; (+) strand; PAM type: YTN; PAM sequence: TTT
catgactcttttaatatctt

SEQ ID NO: 388883 - DNA, 20 bp, Artificial Sequence
  Description of Artificial Sequence: Synthetic oligonucleotide
  Target: LAMA2; (+) strand; PAM type: YTN; PAM sequence: TTC
atgactcttttaatatcttc

SEQ ID NO: 388884 - DNA, 20 bp, Artificial Sequence
  Description of Artificial Sequence: Synthetic oligonucleotide
  Target: LAMA2; (+) strand; PAM type: YTN; PAM sequence: CTC
ttttaatatcttcactaccc

SEQ ID NO: 388885 - DNA, 20 bp, Artificial Sequence
  Description of Artificial Sequence: Synthetic oligonucleotide
  Target: LAMA2; (+) strand; PAM type: YTN; PAM sequence: CTT
ttaatatcttcactaccctt

SEQ ID NO: 388886 - DNA, 20 bp, Artificial Sequence
  Description of Artificial Sequence: Synthetic oligonucleotide
  Target: LAMA2; (+) strand; PAM type: YTN; PAM sequence: TTT
taatatcttcactaccctta

SEQ ID NO: 388887 - DNA, 20 bp, Artificial Sequence
  Description of Artificial Sequence: Synthetic oligonucleotide
  Target: LAMA2; (+) strand; PAM type: YTN; PAM sequence: TTT
aatatcttcactacccttag

SEQ ID NO: 388888 - DNA, 20 bp, Artificial Sequence
  Description of Artificial Sequence: Synthetic oligonucleotide
  Target: LAMA2; (+) strand; PAM type: YTN; PAM sequence: TTA
atatcttcactacccttagg

SEQ ID NO: 388889 - DNA, 20 bp, Artificial Sequence
  Description of Artificial Sequence: Synthetic oligonucleotide
  Target: LAMA2; (+) strand; PAM type: YTN; PAM sequence: CTT
cactacccttaggaaatgta

SEQ ID NO: 388890 - DNA, 20 bp, Artificial Sequence
  Description of Artificial Sequence: Synthetic oligonucleotide
  Target: LAMA2; (+) strand; PAM type: YTN; PAM sequence: TTC
actacccttaggaaatgtag

SEQ ID NO: 388891 - DNA, 20 bp, Artificial Sequence
  Description of Artificial Sequence: Synthetic oligonucleotide
  Target: LAMA2; (+) strand; PAM type: YTN; PAM sequence: CTA
cccttaggaaatgtagattc

SEQ ID NO: 388892 - DNA, 20 bp, Artificial Sequence
  Description of Artificial Sequence: Synthetic oligonucleotide
  Target: LAMA2; (+) strand; PAM type: YTN; PAM sequence: CTT
aggaaatgtagattctatgt

SEQ ID NO: 388893 - DNA, 20 bp, Artificial Sequence
  Description of Artificial Sequence: Synthetic oligonucleotide
  Target: LAMA2; (+) strand; PAM type: YTN; PAM sequence: TTA
ggaaatgtagattctatgtg

SEQ ID NO: 388894 - DNA, 20 bp, Artificial Sequence
  Description of Artificial Sequence: Synthetic oligonucleotide
  Target: LAMA2; (+) strand; PAM type: YTN; PAM sequence: TTC
tatgtgctttaaaaataatc

SEQ ID NO: 388895 - DNA, 20 bp, Artificial Sequence
  Description of Artificial Sequence: Synthetic oligonucleotide
  Target: LAMA2; (+) strand; PAM type: YTN; PAM sequence: CTA
tgtgctttaaaaataatcat

SEQ ID NO: 388896 - DNA, 20 bp, Artificial Sequence
  Description of Artificial Sequence: Synthetic oligonucleotide
  Target: LAMA2; (+) strand; PAM type: YTN; PAM sequence: CTT
taaaaataatcattaaacaa

SEQ ID NO: 388897 - DNA, 20 bp, Artificial Sequence
  Description of Artificial Sequence: Synthetic oligonucleotide
  Target: LAMA2; (+) strand; PAM type: YTN; PAM sequence: TTT
aaaaataatcattaaacaat

SEQ ID NO: 388898 - DNA, 20 bp, Artificial Sequence
  Description of Artificial Sequence: Synthetic oligonucleotide
  Target: LAMA2; (+) strand; PAM type: YTN; PAM sequence: TTA
aaaataatcattaaacaata

SEQ ID NO: 388899 - DNA, 20 bp, Artificial Sequence
  Description of Artificial Sequence: Synthetic oligonucleotide
  Target: LAMA2; (+) strand; PAM type: YTN; PAM sequence: TTA
aacaataatcaagcaattag

SEQ ID NO: 388900 - DNA, 20 bp, Artificial Sequence
  Description of Artificial Sequence: Synthetic oligonucleotide
  Target: LAMA2; (+) strand; PAM type: YTN; PAM sequence: TTA
gcaagaatacataatgacca

SEQ ID NO: 388901 - DNA, 20 bp, Artificial Sequence
  Description of Artificial Sequence: Synthetic oligonucleotide
  Target: LAMA2; (+) strand; PAM type: YTN; PAM sequence: TTT
tacaaacattcaaagtacat

SEQ ID NO: 388902 - DNA, 20 bp, Artificial Sequence
  Description of Artificial Sequence: Synthetic oligonucleotide
  Target: LAMA2; (+) strand; PAM type: YTN; PAM sequence: TTT
acaaacattcaaagtacatt

SEQ ID NO: 388903 - DNA, 20 bp, Artificial Sequence
  Description of Artificial Sequence: Synthetic oligonucleotide
  Target: LAMA2; (+) strand; PAM type: YTN; PAM sequence: TTA
caaacattcaaagtacatta

SEQ ID NO: 388904 - DNA, 20 bp, Artificial Sequence
  Description of Artificial Sequence: Synthetic oligonucleotide
  Target: LAMA2; (+) strand; PAM type: YTN; PAM sequence: TTC
aaagtacattagcgcacaga

SEQ ID NO: 388905 - DNA, 20 bp, Artificial Sequence
  Description of Artificial Sequence: Synthetic oligonucleotide
  Target: LAMA2; (+) strand; PAM type: YTN; PAM sequence: TTA
gcgcacagagactggagaaa

SEQ ID NO: 388906 - DNA, 20 bp, Artificial Sequence
  Description of Artificial Sequence: Synthetic oligonucleotide
  Target: LAMA2; (+) strand; PAM type: YTN; PAM sequence: CTG
gagaaatcagtaagattcag

SEQ ID NO: 388907 - DNA, 20 bp, Artificial Sequence
  Description of Artificial Sequence: Synthetic oligonucleotide
  Target: LAMA2; (+) strand; PAM type: YTN; PAM sequence: TTC
agggtaaccagagaatgtac

SEQ ID NO: 388908 - DNA, 20 bp, Artificial Sequence
  Description of Artificial Sequence: Synthetic oligonucleotide
  Target: LAMA2; (+) strand; PAM type: YTN; PAM sequence: TTA
ctgagagtataatttctgtt

SEQ ID NO: 388909 - DNA, 20 bp, Artificial Sequence
  Description of Artificial Sequence: Synthetic oligonucleotide
  Target: LAMA2; (+) strand; PAM type: YTN; PAM sequence: CTG
agagtataatttctgttgga

SEQ ID NO: 388910 - DNA, 20 bp, Artificial Sequence
  Description of Artificial Sequence: Synthetic oligonucleotide
  Target: LAMA2; (+) strand; PAM type: YTN; PAM sequence: TTT
ctgttggaatttgaagtgta

SEQ ID NO: 388911 - DNA, 20 bp, Artificial Sequence
  Description of Artificial Sequence: Synthetic oligonucleotide
  Target: LAMA2; (+) strand; PAM type: YTN; PAM sequence: TTC
tgttggaatttgaagtgtag

SEQ ID NO: 388912 - DNA, 20 bp, Artificial Sequence
  Description of Artificial Sequence: Synthetic oligonucleotide
  Target: LAMA2; (+) strand; PAM type: YTN; PAM sequence: CTG
ttggaatttgaagtgtagac

SEQ ID NO: 388913 - DNA, 20 bp, Artificial Sequence
  Description of Artificial Sequence: Synthetic oligonucleotide
  Target: LAMA2; (+) strand; PAM type: YTN; PAM sequence: TTG
gaatttgaagtgtagacaca

SEQ ID NO: 388914 - DNA, 20 bp, Artificial Sequence
  Description of Artificial Sequence: Synthetic oligonucleotide
  Target: LAMA2; (+) strand; PAM type: YTN; PAM sequence: TTT
gaagtgtagacacaatttta

SEQ ID NO: 388915 - DNA, 20 bp, Artificial Sequence
  Description of Artificial Sequence: Synthetic oligonucleotide
  Target: LAMA2; (+) strand; PAM type: YTN; PAM sequence: TTG
aagtgtagacacaattttag

SEQ ID NO: 388916 - DNA, 20 bp, Artificial Sequence
  Description of Artificial Sequence: Synthetic oligonucleotide
  Target: LAMA2; (+) strand; PAM type: YTN; PAM sequence: TTT
tagtagagaagtatttgttg

SEQ ID NO: 388917 - DNA, 20 bp, Artificial Sequence
  Description of Artificial Sequence: Synthetic oligonucleotide
  Target: LAMA2; (+) strand; PAM type: YTN; PAM sequence: TTT
agtagagaagtatttgttgc

SEQ ID NO: 388918 - DNA, 20 bp, Artificial Sequence
  Description of Artificial Sequence: Synthetic oligonucleotide
  Target: LAMA2; (+) strand; PAM type: YTN; PAM sequence: TTA
gtagagaagtatttgttgct

SEQ ID NO: 388919 - DNA, 20 bp, Artificial Sequence
  Description of Artificial Sequence: Synthetic oligonucleotide
  Target: LAMA2; (+) strand; PAM type: YTN; PAM sequence: TTT
gttgctttagaggaaggcat

SEQ ID NO: 388920 - DNA, 20 bp, Artificial Sequence
  Description of Artificial Sequence: Synthetic oligonucleotide
  Target: LAMA2; (+) strand; PAM type: YTN; PAM sequence: TTG
ttgctttagaggaaggcatc

SEQ ID NO: 388921 - DNA, 20 bp, Artificial Sequence
  Description of Artificial Sequence: Synthetic oligonucleotide
  Target: LAMA2; (+) strand; PAM type: YTN; PAM sequence: TTG
ctttagaggaaggcatctaa

SEQ ID NO: 388922 - DNA, 20 bp, Artificial Sequence
  Description of Artificial Sequence: Synthetic oligonucleotide
  Target: LAMA2; (+) strand; PAM type: YTN; PAM sequence: CTT
tagaggaaggcatctaagat

SEQ ID NO: 388923 - DNA, 20 bp, Artificial Sequence
  Description of Artificial Sequence: Synthetic oligonucleotide
  Target: LAMA2; (+) strand; PAM type: YTN; PAM sequence: TTT
agaggaaggcatctaagatt

SEQ ID NO: 388924 - DNA, 20 bp, Artificial Sequence
  Description of Artificial Sequence: Synthetic oligonucleotide
  Target: LAMA2; (+) strand; PAM type: YTN; PAM sequence: TTA
gaggaaggcatctaagattt

SEQ ID NO: 388925 - DNA, 20 bp, Artificial Sequence
  Description of Artificial Sequence: Synthetic oligonucleotide
  Target: LAMA2; (+) strand; PAM type: YTN; PAM sequence: CTA
agatttattcactacacatt

SEQ ID NO: 388926 - DNA, 20 bp, Artificial Sequence
  Description of Artificial Sequence: Synthetic oligonucleotide
  Target: LAMA2; (+) strand; PAM type: YTN; PAM sequence: TTT
attcactacacattggtaga

SEQ ID NO: 388927 - DNA, 20 bp, Artificial Sequence
  Description of Artificial Sequence: Synthetic oligonucleotide
  Target: LAMA2; (+) strand; PAM type: YTN; PAM sequence: TTA
ttcactacacattggtagat

SEQ ID NO: 388928 - DNA, 20 bp, Artificial Sequence
  Description of Artificial Sequence: Synthetic oligonucleotide
  Target: LAMA2; (+) strand; PAM type: YTN; PAM sequence: TTC
actacacattggtagatatt

SEQ ID NO: 388929 - DNA, 20 bp, Artificial Sequence
  Description of Artificial Sequence: Synthetic oligonucleotide
  Target: LAMA2; (+) strand; PAM type: YTN; PAM sequence: CTA
cacattggtagatattcttt

SEQ ID NO: 388930 - DNA, 20 bp, Artificial Sequence
  Description of Artificial Sequence: Synthetic oligonucleotide
  Target: LAMA2; (+) strand; PAM type: YTN; PAM sequence: TTG
gtagatattcttttaggaaa

SEQ ID NO: 388931 - DNA, 20 bp, Artificial Sequence
  Description of Artificial Sequence: Synthetic oligonucleotide
  Target: LAMA2; (+) strand; PAM type: YTN; PAM sequence: TTC
ttttaggaaatatattcttt

SEQ ID NO: 388932 - DNA, 20 bp, Artificial Sequence
  Description of Artificial Sequence: Synthetic oligonucleotide
  Target: LAMA2; (+) strand; PAM type: YTN; PAM sequence: CTT
ttaggaaatatattctttaa

SEQ ID NO: 388933 - DNA, 20 bp, Artificial Sequence
  Description of Artificial Sequence: Synthetic oligonucleotide
  Target: LAMA2; (+) strand; PAM type: YTN; PAM sequence: TTT
taggaaatatattctttaat

SEQ ID NO: 388934 - DNA, 20 bp, Artificial Sequence
  Description of Artificial Sequence: Synthetic oligonucleotide
  Target: LAMA2; (+) strand; PAM type: YTN; PAM sequence: TTT
aggaaatatattctttaatt

SEQ ID NO: 388935 - DNA, 20 bp, Artificial Sequence
  Description of Artificial Sequence: Synthetic oligonucleotide
  Target: LAMA2; (+) strand; PAM type: YTN; PAM sequence: TTA
ggaaatatattctttaattc

SEQ ID NO: 388936 - DNA, 20 bp, Artificial Sequence
  Description of Artificial Sequence: Synthetic oligonucleotide
  Target: LAMA2; (+) strand; PAM type: YTN; PAM sequence: TTC
tttaattctgaccataacct

SEQ ID NO: 388937 - DNA, 20 bp, Artificial Sequence
  Description of Artificial Sequence: Synthetic oligonucleotide
  Target: LAMA2; (+) strand; PAM type: YTN; PAM sequence: CTT
taattctgaccataaccttt

SEQ ID NO: 388938 - DNA, 20 bp, Artificial Sequence
  Description of Artificial Sequence: Synthetic oligonucleotide
  Target: LAMA2; (+) strand; PAM type: YTN; PAM sequence: TTT
aattctgaccataaccttta

SEQ ID NO: 388939 - DNA, 20 bp, Artificial Sequence
  Description of Artificial Sequence: Synthetic oligonucleotide
  Target: LAMA2; (+) strand; PAM type: YTN; PAM sequence: TTA
attctgaccataacctttaa

SEQ ID NO: 388940 - DNA, 20 bp, Artificial Sequence
  Description of Artificial Sequence: Synthetic oligonucleotide
  Target: LAMA2; (+) strand; PAM type: YTN; PAM sequence: TTC
tgaccataacctttaaggta

SEQ ID NO: 388941 - DNA, 20 bp, Artificial Sequence
  Description of Artificial Sequence: Synthetic oligonucleotide
  Target: LAMA2; (+) strand; PAM type: YTN; PAM sequence: CTG
accataacctttaaggtaag

SEQ ID NO: 388942 - DNA, 20 bp, Artificial Sequence
  Description of Artificial Sequence: Synthetic oligonucleotide
  Target: LAMA2; (+) strand; PAM type: YTN; PAM sequence: CTT
taaggtaagtattattatcc

SEQ ID NO: 388943 - DNA, 20 bp, Artificial Sequence
  Description of Artificial Sequence: Synthetic oligonucleotide
  Target: LAMA2; (+) strand; PAM type: YTN; PAM sequence: TTT
aaggtaagtattattatccc

SEQ ID NO: 388944 - DNA, 20 bp, Artificial Sequence
  Description of Artificial Sequence: Synthetic oligonucleotide
  Target: LAMA2; (+) strand; PAM type: YTN; PAM sequence: TTA
aggtaagtattattatccct

SEQ ID NO: 388945 - DNA, 20 bp, Artificial Sequence
  Description of Artificial Sequence: Synthetic oligonucleotide
  Target: LAMA2; (+) strand; PAM type: YTN; PAM sequence: TTA
ttatccctattttccagaag

SEQ ID NO: 388946 - DNA, 20 bp, Artificial Sequence
  Description of Artificial Sequence: Synthetic oligonucleotide
  Target: LAMA2; (+) strand; PAM type: YTN; PAM sequence: TTA
tccctattttccagaagaag

SEQ ID NO: 388947 - DNA, 20 bp, Artificial Sequence
  Description of Artificial Sequence: Synthetic oligonucleotide
  Target: LAMA2; (+) strand; PAM type: YTN; PAM sequence: CTA
ttttccagaagaagaaacca

SEQ ID NO: 388948 - DNA, 20 bp, Artificial Sequence
  Description of Artificial Sequence: Synthetic oligonucleotide
  Target: LAMA2; (+) strand; PAM type: YTN; PAM sequence: TTT
tccagaagaagaaaccaata

SEQ ID NO: 388949 - DNA, 20 bp, Artificial Sequence
  Description of Artificial Sequence: Synthetic oligonucleotide
  Target: LAMA2; (+) strand; PAM type: YTN; PAM sequence: TTT
ccagaagaagaaaccaataa

SEQ ID NO: 388950 - DNA, 20 bp, Artificial Sequence
  Description of Artificial Sequence: Synthetic oligonucleotide
  Target: LAMA2; (+) strand; PAM type: YTN; PAM sequence: TTC
cagaagaagaaaccaataat

SEQ ID NO: 388951 - DNA, 20 bp, Artificial Sequence
  Description of Artificial Sequence: Synthetic oligonucleotide
  Target: LAMA2; (+) strand; PAM type: YTN; PAM sequence: CTA
acatttattgaaaagctagg

SEQ ID NO: 388952 - DNA, 20 bp, Artificial Sequence
  Description of Artificial Sequence: Synthetic oligonucleotide
  Target: LAMA2; (+) strand; PAM type: YTN; PAM sequence: TTT
attgaaaagctaggcaattg

SEQ ID NO: 388953 - DNA, 20 bp, Artificial Sequence
  Description of Artificial Sequence: Synthetic oligonucleotide
  Target: LAMA2; (+) strand; PAM type: YTN; PAM sequence: TTA
ttgaaaagctaggcaattga

SEQ ID NO: 388954 - DNA, 20 bp, Artificial Sequence
  Description of Artificial Sequence: Synthetic oligonucleotide
  Target: LAMA2; (+) strand; PAM type: YTN; PAM sequence: TTG
aaaagctaggcaattgactg

SEQ ID NO: 388955 - DNA, 20 bp, Artificial Sequence
  Description of Artificial Sequence: Synthetic oligonucleotide
  Target: LAMA2; (+) strand; PAM type: YTN; PAM sequence: CTA
ggcaattgactgaagtctta

SEQ ID NO: 388956 - DNA, 20 bp, Artificial Sequence
  Description of Artificial Sequence: Synthetic oligonucleotide
  Target: LAMA2; (+) strand; PAM type: YTN; PAM sequence: TTG
actgaagtcttaaatggatt

SEQ ID NO: 388957 - DNA, 20 bp, Artificial Sequence
  Description of Artificial Sequence: Synthetic oligonucleotide
  Target: LAMA2; (+) strand; PAM type: YTN; PAM sequence: CTG
aagtcttaaatggattacca

SEQ ID NO: 388958 - DNA, 20 bp, Artificial Sequence
  Description of Artificial Sequence: Synthetic oligonucleotide
  Target: LAMA2; (+) strand; PAM type: YTN; PAM sequence: CTT
aaatggattaccatacatag

SEQ ID NO: 388959 - DNA, 20 bp, Artificial Sequence
  Description of Artificial Sequence: Synthetic oligonucleotide
  Target: LAMA2; (+) strand; PAM type: YTN; PAM sequence: TTA
aatggattaccatacatagc

SEQ ID NO: 388960 - DNA, 20 bp, Artificial Sequence
  Description of Artificial Sequence: Synthetic oligonucleotide
  Target: LAMA2; (+) strand; PAM type: YTN; PAM sequence: TTA
ccatacatagcttttacaga

SEQ ID NO: 388961 - DNA, 20 bp, Artificial Sequence
  Description of Artificial Sequence: Synthetic oligonucleotide
  Target: LAMA2; (+) strand; PAM type: YTN; PAM sequence: CTT
ttacagaaactccaagaaat

SEQ ID NO: 388962 - DNA, 20 bp, Artificial Sequence
  Description of Artificial Sequence: Synthetic oligonucleotide
  Target: LAMA2; (+) strand; PAM type: YTN; PAM sequence: TTT
tacagaaactccaagaaata

SEQ ID NO: 388963 - DNA, 20 bp, Artificial Sequence
  Description of Artificial Sequence: Synthetic oligonucleotide
  Target: LAMA2; (+) strand; PAM type: YTN; PAM sequence: TTT
acagaaactccaagaaatag

SEQ ID NO: 388964 - DNA, 20 bp, Artificial Sequence
  Description of Artificial Sequence: Synthetic oligonucleotide
  Target: LAMA2; (+) strand; PAM type: YTN; PAM sequence: TTA
cagaaactccaagaaatagg

SEQ ID NO: 388965 - DNA, 20 bp, Artificial Sequence
  Description of Artificial Sequence: Synthetic oligonucleotide
  Target: LAMA2; (+) strand; PAM type: YTN; PAM sequence: CTC
caagaaataggaaagaagtt

SEQ ID NO: 388966 - DNA, 20 bp, Artificial Sequence
  Description of Artificial Sequence: Synthetic oligonucleotide
  Target: LAMA2; (+) strand; PAM type: YTN; PAM sequence: TTG
tcatggtctgaatatttaca

SEQ ID NO: 388967 - DNA, 20 bp, Artificial Sequence
  Description of Artificial Sequence: Synthetic oligonucleotide
  Target: LAMA2; (+) strand; PAM type: YTN; PAM sequence: CTG
aatatttacatctccccaaa

SEQ ID NO: 388968 - DNA, 20 bp, Artificial Sequence
  Description of Artificial Sequence: Synthetic oligonucleotide
  Target: LAMA2; (+) strand; PAM type: YTN; PAM sequence: TTT
acatctccccaaatttatat

SEQ ID NO: 388969 - DNA, 20 bp, Artificial Sequence
  Description of Artificial Sequence: Synthetic oligonucleotide
  Target: LAMA2; (+) strand; PAM type: YTN; PAM sequence: TTA
catctccccaaatttatatg

SEQ ID NO: 388970 - DNA, 20 bp, Artificial Sequence
  Description of Artificial Sequence: Synthetic oligonucleotide
  Target: LAMA2; (+) strand; PAM type: YTN; PAM sequence: CTC
cccaaatttatatgttgaaa

SEQ ID NO: 388971 - DNA, 20 bp, Artificial Sequence
  Description of Artificial Sequence: Synthetic oligonucleotide
  Target: LAMA2; (+) strand; PAM type: YTN; PAM sequence: TTT
atatgttgaaagtctgtcac

SEQ ID NO: 388972 - DNA, 20 bp, Artificial Sequence
  Description of Artificial Sequence: Synthetic oligonucleotide
  Target: LAMA2; (+) strand; PAM type: YTN; PAM sequence: TTA
tatgttgaaagtctgtcaca

SEQ ID NO: 388973 - DNA, 20 bp, Artificial Sequence
  Description of Artificial Sequence: Synthetic oligonucleotide
  Target: LAMA2; (+) strand; PAM type: YTN; PAM sequence: TTG
aaagtctgtcacagtccatt

SEQ ID NO: 388974 - DNA, 20 bp, Artificial Sequence
  Description of Artificial Sequence: Synthetic oligonucleotide
  Target: LAMA2; (+) strand; PAM type: YTN; PAM sequence: CTG
tcacagtccattggagctgc

SEQ ID NO: 388975 - DNA, 20 bp, Artificial Sequence
  Description of Artificial Sequence: Synthetic oligonucleotide
  Target: LAMA2; (+) strand; PAM type: YTN; PAM sequence: TTG
gagctgctgtgacaaatacc

SEQ ID NO: 388976 - DNA, 20 bp, Artificial Sequence
  Description of Artificial Sequence: Synthetic oligonucleotide
  Target: LAMA2; (+) strand; PAM type: YTN; PAM sequence: CTG
ctgtgacaaataccataaac

SEQ ID NO: 388977 - DNA, 20 bp, Artificial Sequence
  Description of Artificial Sequence: Synthetic oligonucleotide
  Target: LAMA2; (+) strand; PAM type: YTN; PAM sequence: CTG
tgacaaataccataaactga

SEQ ID NO: 388978 - DNA, 20 bp, Artificial Sequence
  Description of Artificial Sequence: Synthetic oligonucleotide
  Target: LAMA2; (+) strand; PAM type: YTN; PAM sequence: CTG
attagcttataaacaataga

SEQ ID NO: 388979 - DNA, 20 bp, Artificial Sequence
  Description of Artificial Sequence: Synthetic oligonucleotide
  Target: LAMA2; (+) strand; PAM type: YTN; PAM sequence: TTA
gcttataaacaatagaaata

SEQ ID NO: 388980 - DNA, 20 bp, Artificial Sequence
  Description of Artificial Sequence: Synthetic oligonucleotide
  Target: LAMA2; (+) strand; PAM type: YTN; PAM sequence: CTT
ataaacaatagaaatatatc

SEQ ID NO: 388981 - DNA, 20 bp, Artificial Sequence
  Description of Artificial Sequence: Synthetic oligonucleotide
  Target: LAMA2; (+) strand; PAM type: YTN; PAM sequence: TTA
taaacaatagaaatatatct

SEQ ID NO: 388982 - DNA, 20 bp, Artificial Sequence
  Description of Artificial Sequence: Synthetic oligonucleotide
  Target: LAMA2; (+) strand; PAM type: YTN; PAM sequence: CTC
tcacagttctgaggctggga

SEQ ID NO: 388983 - DNA, 20 bp, Artificial Sequence
  Description of Artificial Sequence: Synthetic oligonucleotide
  Target: LAMA2; (+) strand; PAM type: YTN; PAM sequence: CTC
acagttctgaggctgggaag

SEQ ID NO: 388984 - DNA, 20 bp, Artificial Sequence
  Description of Artificial Sequence: Synthetic oligonucleotide
  Target: LAMA2; (+) strand; PAM type: YTN; PAM sequence: TTC
tgaggctgggaagcccaaga

SEQ ID NO: 388985 - DNA, 20 bp, Artificial Sequence
  Description of Artificial Sequence: Synthetic oligonucleotide
  Target: LAMA2; (+) strand; PAM type: YTN; PAM sequence: CTG
aggctgggaagcccaagatc

SEQ ID NO: 388986 - DNA, 20 bp, Artificial Sequence
  Description of Artificial Sequence: Synthetic oligonucleotide
  Target: LAMA2; (+) strand; PAM type: YTN; PAM sequence: CTG
ggaagcccaagatcaaggta

SEQ ID NO: 388987 - DNA, 20 bp, Artificial Sequence
  Description of Artificial Sequence: Synthetic oligonucleotide
  Target: LAMA2; (+) strand; PAM type: YTN; PAM sequence: TTC
aatgtctagtgaaggcctgt

SEQ ID NO: 388988 - DNA, 20 bp, Artificial Sequence
  Description of Artificial Sequence: Synthetic oligonucleotide
  Target: LAMA2; (+) strand; PAM type: YTN; PAM sequence: CTA
gtgaaggcctgttcctcaca

SEQ ID NO: 388989 - DNA, 20 bp, Artificial Sequence
  Description of Artificial Sequence: Synthetic oligonucleotide
  Target: LAMA2; (+) strand; PAM type: YTN; PAM sequence: CTG
ttcctcacagagggtgactt

SEQ ID NO: 388990 - DNA, 20 bp, Artificial Sequence
  Description of Artificial Sequence: Synthetic oligonucleotide
  Target: LAMA2; (+) strand; PAM type: YTN; PAM sequence: TTC
ctcacagagggtgacttctt

SEQ ID NO: 388991 - DNA, 20 bp, Artificial Sequence
  Description of Artificial Sequence: Synthetic oligonucleotide
  Target: LAMA2; (+) strand; PAM type: YTN; PAM sequence: CTC
acagagggtgacttcttgct

SEQ ID NO: 388992 - DNA, 20 bp, Artificial Sequence
  Description of Artificial Sequence: Synthetic oligonucleotide
  Target: LAMA2; (+) strand; PAM type: YTN; PAM sequence: CTT
cttgctatgaccccacattt

SEQ ID NO: 388993 - DNA, 20 bp, Artificial Sequence
  Description of Artificial Sequence: Synthetic oligonucleotide
  Target: LAMA2; (+) strand; PAM type: YTN; PAM sequence: TTC
ttgctatgaccccacattta

SEQ ID NO: 388994 - DNA, 20 bp, Artificial Sequence
  Description of Artificial Sequence: Synthetic oligonucleotide
  Target: LAMA2; (+) strand; PAM type: YTN; PAM sequence: CTT
gctatgaccccacatttaat

SEQ ID NO: 388995 - DNA, 20 bp, Artificial Sequence
  Description of Artificial Sequence: Synthetic oligonucleotide
  Target: LAMA2; (+) strand; PAM type: YTN; PAM sequence: TTG
ctatgaccccacatttaatt

SEQ ID NO: 388996 - DNA, 20 bp, Artificial Sequence
  Description of Artificial Sequence: Synthetic oligonucleotide
  Target: LAMA2; (+) strand; PAM type: YTN; PAM sequence: CTA
tgaccccacatttaattcat

SEQ ID NO: 388997 - DNA, 20 bp, Artificial Sequence
  Description of Artificial Sequence: Synthetic oligonucleotide
  Target: LAMA2; (+) strand; PAM type: YTN; PAM sequence: TTT
aattcatttaatatctggat

SEQ ID NO: 388998 - DNA, 20 bp, Artificial Sequence
  Description of Artificial Sequence: Synthetic oligonucleotide
  Target: LAMA2; (+) strand; PAM type: YTN; PAM sequence: TTA
attcatttaatatctggata

SEQ ID NO: 388999 - DNA, 20 bp, Artificial Sequence
  Description of Artificial Sequence: Synthetic oligonucleotide
  Target: LAMA2; (+) strand; PAM type: YTN; PAM sequence: TTC
atttaatatctggatactga

SEQ ID NO: 389000 - DNA, 20 bp, Artificial Sequence
  Description of Artificial Sequence: Synthetic oligonucleotide
  Target: LAMA2; (+) strand; PAM type: YTN; PAM sequence: TTT
aatatctggatactgaggaa

SEQ ID NO: 389001 - DNA, 20 bp, Artificial Sequence
  Description of Artificial Sequence: Synthetic oligonucleotide
  Target: LAMA2; (+) strand; PAM type: YTN; PAM sequence: TTA
atatctggatactgaggaaa

SEQ ID NO: 389002 - DNA, 20 bp, Artificial Sequence
  Description of Artificial Sequence: Synthetic oligonucleotide
  Target: LAMA2; (+) strand; PAM type: YTN; PAM sequence: CTG
gatactgaggaaaaggatag

SEQ ID NO: 389003 - DNA, 20 bp, Artificial Sequence
  Description of Artificial Sequence: Synthetic oligonucleotide
  Target: LAMA2; (+) strand; PAM type: YTN; PAM sequence: CTG
aggaaaaggatagctagctc

SEQ ID NO: 389004 - DNA, 20 bp, Artificial Sequence
  Description of Artificial Sequence: Synthetic oligonucleotide
  Target: LAMA2; (+) strand; PAM type: YTN; PAM sequence: CTA
gctctctggggtctctttaa

SEQ ID NO: 389005 - DNA, 20 bp, Artificial Sequence
  Description of Artificial Sequence: Synthetic oligonucleotide
  Target: LAMA2; (+) strand; PAM type: YTN; PAM sequence: CTC
tctggggtctctttaataag

SEQ ID NO: 389006 - DNA, 20 bp, Artificial Sequence
  Description of Artificial Sequence: Synthetic oligonucleotide
  Target: LAMA2; (+) strand; PAM type: YTN; PAM sequence: CTC
tggggtctctttaataaggg

SEQ ID NO: 389007 - DNA, 20 bp, Artificial Sequence
  Description of Artificial Sequence: Synthetic oligonucleotide
  Target: LAMA2; (+) strand; PAM type: YTN; PAM sequence: CTG
gggtctctttaataagggca

SEQ ID NO: 389008 - DNA, 20 bp, Artificial Sequence
  Description of Artificial Sequence: Synthetic oligonucleotide
  Target: LAMA2; (+) strand; PAM type: YTN; PAM sequence: CTC
tttaataagggcactaatcc

SEQ ID NO: 389009 - DNA, 20 bp, Artificial Sequence
  Description of Artificial Sequence: Synthetic oligonucleotide
  Target: LAMA2; (+) strand; PAM type: YTN; PAM sequence: CTT
taataagggcactaatccca

SEQ ID NO: 389010 - DNA, 20 bp, Artificial Sequence
  Description of Artificial Sequence: Synthetic oligonucleotide
  Target: LAMA2; (+) strand; PAM type: YTN; PAM sequence: TTT
aataagggcactaatcccaa

SEQ ID NO: 389011 - DNA, 20 bp, Artificial Sequence
  Description of Artificial Sequence: Synthetic oligonucleotide
  Target: LAMA2; (+) strand; PAM type: YTN; PAM sequence: TTA
ataagggcactaatcccaat

SEQ ID NO: 389012 - DNA, 20 bp, Artificial Sequence
  Description of Artificial Sequence: Synthetic oligonucleotide
  Target: LAMA2; (+) strand; PAM type: YTN; PAM sequence: CTA
atcccaatcatgaaggctac

SEQ ID NO: 389013 - DNA, 20 bp, Artificial Sequence
  Description of Artificial Sequence: Synthetic oligonucleotide
  Target: LAMA2; (+) strand; PAM type: YTN; PAM sequence: CTA
cattctcatgactcaatcac

SEQ ID NO: 389014 - DNA, 20 bp, Artificial Sequence
  Description of Artificial Sequence: Synthetic oligonucleotide
  Target: LAMA2; (+) strand; PAM type: YTN; PAM sequence: TTC
tcatgactcaatcacttccc

SEQ ID NO: 389015 - DNA, 20 bp, Artificial Sequence
  Description of Artificial Sequence: Synthetic oligonucleotide
  Target: LAMA2; (+) strand; PAM type: YTN; PAM sequence: CTC
atgactcaatcacttcccaa

SEQ ID NO: 389016 - DNA, 20 bp, Artificial Sequence
  Description of Artificial Sequence: Synthetic oligonucleotide
  Target: LAMA2; (+) strand; PAM type: YTN; PAM sequence: CTC
aatcacttcccaaaggctcc

SEQ ID NO: 389017 - DNA, 20 bp, Artificial Sequence
  Description of Artificial Sequence: Synthetic oligonucleotide
  Target: LAMA2; (+) strand; PAM type: YTN; PAM sequence: CTT
cccaaaggctccacctccta

SEQ ID NO: 389018 - DNA, 20 bp, Artificial Sequence
  Description of Artificial Sequence: Synthetic oligonucleotide
  Target: LAMA2; (+) strand; PAM type: YTN; PAM sequence: TTC
ccaaaggctccacctcctaa

SEQ ID NO: 389019 - DNA, 20 bp, Artificial Sequence
  Description of Artificial Sequence: Synthetic oligonucleotide
  Target: LAMA2; (+) strand; PAM type: YTN; PAM sequence: CTC
cacctcctaatatcatcaca

SEQ ID NO: 389020 - DNA, 20 bp, Artificial Sequence
  Description of Artificial Sequence: Synthetic oligonucleotide
  Target: LAMA2; (+) strand; PAM type: YTN; PAM sequence: CTC
ctaatatcatcacattggga

SEQ ID NO: 389021 - DNA, 20 bp, Artificial Sequence
  Description of Artificial Sequence: Synthetic oligonucleotide
  Target: LAMA2; (+) strand; PAM type: YTN; PAM sequence: CTA
atatcatcacattgggaact

SEQ ID NO: 389022 - DNA, 20 bp, Artificial Sequence
  Description of Artificial Sequence: Synthetic oligonucleotide
  Target: LAMA2; (+) strand; PAM type: YTN; PAM sequence: TTG
ggaactaggatgtcaacaca

SEQ ID NO: 389023 - DNA, 20 bp, Artificial Sequence
  Description of Artificial Sequence: Synthetic oligonucleotide
  Target: LAMA2; (+) strand; PAM type: YTN; PAM sequence: CTA
ggatgtcaacacatggatat

SEQ ID NO: 389024 - DNA, 20 bp, Artificial Sequence
  Description of Artificial Sequence: Synthetic oligonucleotide
  Target: LAMA2; (+) strand; PAM type: YTN; PAM sequence: TTA
gaaggacacaaacattctgc

SEQ ID NO: 389025 - DNA, 20 bp, Artificial Sequence
  Description of Artificial Sequence: Synthetic oligonucleotide
  Target: LAMA2; (+) strand; PAM type: YTN; PAM sequence: TTC
tgccttctgccgtgtgagga

SEQ ID NO: 389026 - DNA, 20 bp, Artificial Sequence
  Description of Artificial Sequence: Synthetic oligonucleotide
  Target: LAMA2; (+) strand; PAM type: YTN; PAM sequence: CTG
ccttctgccgtgtgaggaca

SEQ ID NO: 389027 - DNA, 20 bp, Artificial Sequence
  Description of Artificial Sequence: Synthetic oligonucleotide
  Target: LAMA2; (+) strand; PAM type: YTN; PAM sequence: CTT
ctgccgtgtgaggacacagg

SEQ ID NO: 389028 - DNA, 20 bp, Artificial Sequence
  Description of Artificial Sequence: Synthetic oligonucleotide
  Target: LAMA2; (+) strand; PAM type: YTN; PAM sequence: TTC
tgccgtgtgaggacacaggg

SEQ ID NO: 389029 - DNA, 20 bp, Artificial Sequence
  Description of Artificial Sequence: Synthetic oligonucleotide
  Target: LAMA2; (+) strand; PAM type: YTN; PAM sequence: CTG
ccgtgtgaggacacagggag

SEQ ID NO: 389030 - DNA, 20 bp, Artificial Sequence
  Description of Artificial Sequence: Synthetic oligonucleotide
  Target: LAMA2; (+) strand; PAM type: YTN; PAM sequence: CTG
tgcttaacagagccatgtga

SEQ ID NO: 389031 - DNA, 20 bp, Artificial Sequence
  Description of Artificial Sequence: Synthetic oligonucleotide
  Target: LAMA2; (+) strand; PAM type: YTN; PAM sequence: CTT
aacagagccatgtgagcaga

SEQ ID NO: 389032 - DNA, 20 bp, Artificial Sequence
  Description of Artificial Sequence: Synthetic oligonucleotide
  Target: LAMA2; (+) strand; PAM type: YTN; PAM sequence: TTA
acagagccatgtgagcagag

SEQ ID NO: 389033 - DNA, 20 bp, Artificial Sequence
  Description of Artificial Sequence: Synthetic oligonucleotide
  Target: LAMA2; (+) strand; PAM type: YTN; PAM sequence: TTA
gatctgtctggcagatatta

SEQ ID NO: 389034 - DNA, 20 bp, Artificial Sequence
  Description of Artificial Sequence: Synthetic oligonucleotide
  Target: LAMA2; (+) strand; PAM type: YTN; PAM sequence: CTG
tctggcagatattaaaagtc

SEQ ID NO: 389035 - DNA, 20 bp, Artificial Sequence
  Description of Artificial Sequence: Synthetic oligonucleotide
  Target: LAMA2; (+) strand; PAM type: YTN; PAM sequence: CTG
gcagatattaaaagtcagac

SEQ ID NO: 389036 - DNA, 20 bp, Artificial Sequence
  Description of Artificial Sequence: Synthetic oligonucleotide
  Target: LAMA2; (+) strand; PAM type: YTN; PAM sequence: TTA
aaagtcagacctgctagtga

SEQ ID NO: 389037 - DNA, 20 bp, Artificial Sequence
  Description of Artificial Sequence: Synthetic oligonucleotide
  Target: LAMA2; (+) strand; PAM type: YTN; PAM sequence: CTG
ctagtgaaagataaggctgg

SEQ ID NO: 389038 - DNA, 20 bp, Artificial Sequence
  Description of Artificial Sequence: Synthetic oligonucleotide
  Target: LAMA2; (+) strand; PAM type: YTN; PAM sequence: CTA
gtgaaagataaggctggaga

SEQ ID NO: 389039 - DNA, 20 bp, Artificial Sequence
  Description of Artificial Sequence: Synthetic oligonucleotide
  Target: LAMA2; (+) strand; PAM type: YTN; PAM sequence: CTG
gagacttcagtgaggcaggg

SEQ ID NO: 389040 - DNA, 20 bp, Artificial Sequence
  Description of Artificial Sequence: Synthetic oligonucleotide
  Target: LAMA2; (+) strand; PAM type: YTN; PAM sequence: CTT
cagtgaggcagggtgatatg

SEQ ID NO: 389041 - DNA, 20 bp, Artificial Sequence
  Description of Artificial Sequence: Synthetic oligonucleotide
  Target: LAMA2; (+) strand; PAM type: YTN; PAM sequence: TTC
agtgaggcagggtgatatga

SEQ ID NO: 389042 - DNA, 20 bp, Artificial Sequence
  Description of Artificial Sequence: Synthetic oligonucleotide
  Target: LAMA2; (+) strand; PAM type: YTN; PAM sequence: CTT
gaaagccaggcagaggaacc

SEQ ID NO: 389043 - DNA, 20 bp, Artificial Sequence
  Description of Artificial Sequence: Synthetic oligonucleotide
  Target: LAMA2; (+) strand; PAM type: YTN; PAM sequence: TTG
aaagccaggcagaggaacct

SEQ ID NO: 389044 - DNA, 20 bp, Artificial Sequence
  Description of Artificial Sequence: Synthetic oligonucleotide
  Target: LAMA2; (+) strand; PAM type: YTN; PAM sequence: CTG
agtttaccttgtggtcctgg

SEQ ID NO: 389045 - DNA, 20 bp, Artificial Sequence
  Description of Artificial Sequence: Synthetic oligonucleotide
  Target: LAMA2; (+) strand; PAM type: YTN; PAM sequence: TTT
accttgtggtcctggtattc

SEQ ID NO: 389046 - DNA, 20 bp, Artificial Sequence
  Description of Artificial Sequence: Synthetic oligonucleotide
  Target: LAMA2; (+) strand; PAM type: YTN; PAM sequence: TTA
ccttgtggtcctggtattca

SEQ ID NO: 389047 - DNA, 20 bp, Artificial Sequence
  Description of Artificial Sequence: Synthetic oligonucleotide
  Target: LAMA2; (+) strand; PAM type: YTN; PAM sequence: CTT
gtggtcctggtattcaggga

SEQ ID NO: 389048 - DNA, 20 bp, Artificial Sequence
  Description of Artificial Sequence: Synthetic oligonucleotide
  Target: LAMA2; (+) strand; PAM type: YTN; PAM sequence: TTG
tggtcctggtattcagggaa

SEQ ID NO: 389049 - DNA, 20 bp, Artificial Sequence
  Description of Artificial Sequence: Synthetic oligonucleotide
  Target: LAMA2; (+) strand; PAM type: YTN; PAM sequence: CTG
gtattcagggaagtgaagag

SEQ ID NO: 389050 - DNA, 20 bp, Artificial Sequence
  Description of Artificial Sequence: Synthetic oligonucleotide
  Target: LAMA2; (+) strand; PAM type: YTN; PAM sequence: TTC
agggaagtgaagagttttaa

SEQ ID NO: 389051 - DNA, 20 bp, Artificial Sequence
  Description of Artificial Sequence: Synthetic oligonucleotide
  Target: LAMA2; (+) strand; PAM type: YTN; PAM sequence: TTT
taatgaaaagaatgccgatc

SEQ ID NO: 389052 - DNA, 20 bp, Artificial Sequence
  Description of Artificial Sequence: Synthetic oligonucleotide
  Target: LAMA2; (+) strand; PAM type: YTN; PAM sequence: TTT
aatgaaaagaatgccgatca

SEQ ID NO: 389053 - DNA, 20 bp, Artificial Sequence
  Description of Artificial Sequence: Synthetic oligonucleotide
  Target: LAMA2; (+) strand; PAM type: YTN; PAM sequence: TTA
atgaaaagaatgccgatcag

SEQ ID NO: 389054 - DNA, 20 bp, Artificial Sequence
  Description of Artificial Sequence: Synthetic oligonucleotide
  Target: LAMA2; (+) strand; PAM type: YTN; PAM sequence: TTA
ttttccttgtatatggagag

SEQ ID NO: 389055 - DNA, 20 bp, Artificial Sequence
  Description of Artificial Sequence: Synthetic oligonucleotide
  Target: LAMA2; (+) strand; PAM type: YTN; PAM sequence: TTT
tccttgtatatggagagaat

SEQ ID NO: 389056 - DNA, 20 bp, Artificial Sequence
  Description of Artificial Sequence: Synthetic oligonucleotide
  Target: LAMA2; (+) strand; PAM type: YTN; PAM sequence: TTT
ccttgtatatggagagaata

SEQ ID NO: 389057 - DNA, 20 bp, Artificial Sequence
  Description of Artificial Sequence: Synthetic oligonucleotide
  Target: LAMA2; (+) strand; PAM type: YTN; PAM sequence: TTC
cttgtatatggagagaatac

SEQ ID NO: 389058 - DNA, 20 bp, Artificial Sequence
  Description of Artificial Sequence: Synthetic oligonucleotide
  Target: LAMA2; (+) strand; PAM type: YTN; PAM sequence: CTT
gtatatggagagaatacaga

SEQ ID NO: 389059 - DNA, 20 bp, Artificial Sequence
  Description of Artificial Sequence: Synthetic oligonucleotide
  Target: LAMA2; (+) strand; PAM type: YTN; PAM sequence: TTG
tatatggagagaatacagaa

SEQ ID NO: 389060 - DNA, 20 bp, Artificial Sequence
  Description of Artificial Sequence: Synthetic oligonucleotide
  Target: LAMA2; (+) strand; PAM type: YTN; PAM sequence: TTA
aactagaaaagcaaacattt

SEQ ID NO: 389061 - DNA, 20 bp, Artificial Sequence
  Description of Artificial Sequence: Synthetic oligonucleotide
  Target: LAMA2; (+) strand; PAM type: YTN; PAM sequence: CTA
gaaaagcaaacattttagtt

SEQ ID NO: 389062 - DNA, 20 bp, Artificial Sequence
  Description of Artificial Sequence: Synthetic oligonucleotide
  Target: LAMA2; (+) strand; PAM type: YTN; PAM sequence: TTT
tagttgaacatgaaacattt

SEQ ID NO: 389063 - DNA, 20 bp, Artificial Sequence
  Description of Artificial Sequence: Synthetic oligonucleotide
  Target: LAMA2; (+) strand; PAM type: YTN; PAM sequence: TTT
agttgaacatgaaacatttt

SEQ ID NO: 389064 - DNA, 20 bp, Artificial Sequence
  Description of Artificial Sequence: Synthetic oligonucleotide
  Target: LAMA2; (+) strand; PAM type: YTN; PAM sequence: TTA
gttgaacatgaaacatttta

SEQ ID NO: 389065 - DNA, 20 bp, Artificial Sequence
  Description of Artificial Sequence: Synthetic oligonucleotide
  Target: LAMA2; (+) strand; PAM type: YTN; PAM sequence: TTG
aacatgaaacattttaaaac

SEQ ID NO: 389066 - DNA, 20 bp, Artificial Sequence
  Description of Artificial Sequence: Synthetic oligonucleotide
  Target: LAMA2; (+) strand; PAM type: YTN; PAM sequence: TTT
taaaactaatacttaagcaa

SEQ ID NO: 389067 - DNA, 20 bp, Artificial Sequence
  Description of Artificial Sequence: Synthetic oligonucleotide
  Target: LAMA2; (+) strand; PAM type: YTN; PAM sequence: TTT
aaaactaatacttaagcaat

SEQ ID NO: 389068 - DNA, 20 bp, Artificial Sequence
  Description of Artificial Sequence: Synthetic oligonucleotide
  Target: LAMA2; (+) strand; PAM type: YTN; PAM sequence: TTA
aaactaatacttaagcaatg

SEQ ID NO: 389069 - DNA, 20 bp, Artificial Sequence
  Description of Artificial Sequence: Synthetic oligonucleotide
  Target: LAMA2; (+) strand; PAM type: YTN; PAM sequence: CTA
atacttaagcaatggatgat

SEQ ID NO: 389070 - DNA, 20 bp, Artificial Sequence
  Description of Artificial Sequence: Synthetic oligonucleotide
  Target: LAMA2; (+) strand; PAM type: YTN; PAM sequence: CTT
aagcaatggatgatgaagta

SEQ ID NO: 389071 - DNA, 20 bp, Artificial Sequence
  Description of Artificial Sequence: Synthetic oligonucleotide
  Target: LAMA2; (+) strand; PAM type: YTN; PAM sequence: TTA
agcaatggatgatgaagtaa

SEQ ID NO: 389072 - DNA, 20 bp, Artificial Sequence
  Description of Artificial Sequence: Synthetic oligonucleotide
  Target: LAMA2; (+) strand; PAM type: YTN; PAM sequence: CTA
tagaagaggctccaatttgt

SEQ ID NO: 389073 - DNA, 20 bp, Artificial Sequence
  Description of Artificial Sequence: Synthetic oligonucleotide
  Target: LAMA2; (+) strand; PAM type: YTN; PAM sequence: CTC
caatttgtgaacatcttcta

SEQ ID NO: 389074 - DNA, 20 bp, Artificial Sequence
  Description of Artificial Sequence: Synthetic oligonucleotide
  Target: LAMA2; (+) strand; PAM type: YTN; PAM sequence: TTT
gtgaacatcttctaagccaa

SEQ ID NO: 389075 - DNA, 20 bp, Artificial Sequence
  Description of Artificial Sequence: Synthetic oligonucleotide
  Target: LAMA2; (+) strand; PAM type: YTN; PAM sequence: TTG
tgaacatcttctaagccaag

SEQ ID NO: 389076 - DNA, 20 bp, Artificial Sequence
  Description of Artificial Sequence: Synthetic oligonucleotide
  Target: LAMA2; (+) strand; PAM type: YTN; PAM sequence: CTT
ctaagccaagggattcagtg

SEQ ID NO: 389077 - DNA, 20 bp, Artificial Sequence
  Description of Artificial Sequence: Synthetic oligonucleotide
  Target: LAMA2; (+) strand; PAM type: YTN; PAM sequence: TTC
taagccaagggattcagtga

SEQ ID NO: 389078 - DNA, 20 bp, Artificial Sequence
  Description of Artificial Sequence: Synthetic oligonucleotide
  Target: LAMA2; (+) strand; PAM type: YTN; PAM sequence: CTA
agccaagggattcagtgacc

SEQ ID NO: 389079 - DNA, 20 bp, Artificial Sequence
  Description of Artificial Sequence: Synthetic oligonucleotide
  Target: LAMA2; (+) strand; PAM type: YTN; PAM sequence: TTC
agtgacccatccacttctgg

SEQ ID NO: 389080 - DNA, 20 bp, Artificial Sequence
  Description of Artificial Sequence: Synthetic oligonucleotide
  Target: LAMA2; (+) strand; PAM type: YTN; PAM sequence: CTT
ctggctggatattgatccag

SEQ ID NO: 389081 - DNA, 20 bp, Artificial Sequence
  Description of Artificial Sequence: Synthetic oligonucleotide
  Target: LAMA2; (+) strand; PAM type: YTN; PAM sequence: TTC
tggctggatattgatccaga

SEQ ID NO: 389082 - DNA, 20 bp, Artificial Sequence
  Description of Artificial Sequence: Synthetic oligonucleotide
  Target: LAMA2; (+) strand; PAM type: YTN; PAM sequence: CTG
gctggatattgatccagatg

SEQ ID NO: 389083 - DNA, 20 bp, Artificial Sequence
  Description of Artificial Sequence: Synthetic oligonucleotide
  Target: LAMA2; (+) strand; PAM type: YTN; PAM sequence: CTG
gatattgatccagatgacct

SEQ ID NO: 389084 - DNA, 20 bp, Artificial Sequence
  Description of Artificial Sequence: Synthetic oligonucleotide
  Target: LAMA2; (+) strand; PAM type: YTN; PAM sequence: TTG
atccagatgacctggattat

SEQ ID NO: 389085 - DNA, 20 bp, Artificial Sequence
  Description of Artificial Sequence: Synthetic oligonucleotide
  Target: LAMA2; (+) strand; PAM type: YTN; PAM sequence: CTG
gattatccttaaattctagt

SEQ ID NO: 389086 - DNA, 20 bp, Artificial Sequence
  Description of Artificial Sequence: Synthetic oligonucleotide
  Target: LAMA2; (+) strand; PAM type: YTN; PAM sequence: TTA
tccttaaattctagtctttc

SEQ ID NO: 389087 - DNA, 20 bp, Artificial Sequence
  Description of Artificial Sequence: Synthetic oligonucleotide
  Target: LAMA2; (+) strand; PAM type: YTN; PAM sequence: CTT
aaattctagtctttcttgat

SEQ ID NO: 389088 - DNA, 20 bp, Artificial Sequence
  Description of Artificial Sequence: Synthetic oligonucleotide
  Target: LAMA2; (+) strand; PAM type: YTN; PAM sequence: TTA
aattctagtctttcttgatt

SEQ ID NO: 389089 - DNA, 20 bp, Artificial Sequence
  Description of Artificial Sequence: Synthetic oligonucleotide
  Target: LAMA2; (+) strand; PAM type: YTN; PAM sequence: TTC
tagtctttcttgatttttta

SEQ ID NO: 389090 - DNA, 20 bp, Artificial Sequence
  Description of Artificial Sequence: Synthetic oligonucleotide
  Target: LAMA2; (+) strand; PAM type: YTN; PAM sequence: CTA
gtctttcttgattttttatt

SEQ ID NO: 389091 - DNA, 20 bp, Artificial Sequence
  Description of Artificial Sequence: Synthetic oligonucleotide
  Target: LAMA2; (+) strand; PAM type: YTN; PAM sequence: CTT
tcttgattttttattttgtt

SEQ ID NO: 389092 - DNA, 20 bp, Artificial Sequence
  Description of Artificial Sequence: Synthetic oligonucleotide
  Target: LAMA2; (+) strand; PAM type: YTN; PAM sequence: TTT
cttgattttttattttgttc

SEQ ID NO: 389093 - DNA, 20 bp, Artificial Sequence
  Description of Artificial Sequence: Synthetic oligonucleotide
  Target: LAMA2; (+) strand; PAM type: YTN; PAM sequence: TTC
ttgattttttattttgttct

SEQ ID NO: 389094 - DNA, 20 bp, Artificial Sequence
  Description of Artificial Sequence: Synthetic oligonucleotide
  Target: LAMA2; (+) strand; PAM type: YTN; PAM sequence: CTT
gattttttattttgttcttc

SEQ ID NO: 389095 - DNA, 20 bp, Artificial Sequence
  Description of Artificial Sequence: Synthetic oligonucleotide
  Target: LAMA2; (+) strand; PAM type: YTN; PAM sequence: TTG
attttttattttgttcttct

SEQ ID NO: 389096 - DNA, 20 bp, Artificial Sequence
  Description of Artificial Sequence: Synthetic oligonucleotide
  Target: LAMA2; (+) strand; PAM type: YTN; PAM sequence: TTT
tttattttgttcttcttcca

SEQ ID NO: 389097 - DNA, 20 bp, Artificial Sequence
  Description of Artificial Sequence: Synthetic oligonucleotide
  Target: LAMA2; (+) strand; PAM type: YTN; PAM sequence: TTT
ttattttgttcttcttccat

SEQ ID NO: 389098 - DNA, 20 bp, Artificial Sequence
  Description of Artificial Sequence: Synthetic oligonucleotide
  Target: LAMA2; (+) strand; PAM type: YTN; PAM sequence: TTT
tattttgttcttcttccatc

SEQ ID NO: 389099 - DNA, 20 bp, Artificial Sequence
  Description of Artificial Sequence: Synthetic oligonucleotide
  Target: LAMA2; (+) strand; PAM type: YTN; PAM sequence: TTT
attttgttcttcttccatca

SEQ ID NO: 389100 - DNA, 20 bp, Artificial Sequence
  Description of Artificial Sequence: Synthetic oligonucleotide
  Target: LAMA2; (+) strand; PAM type: YTN; PAM sequence: TTA
ttttgttcttcttccatcat

SEQ ID NO: 389101 - DNA, 20 bp, Artificial Sequence
  Description of Artificial Sequence: Synthetic oligonucleotide
  Target: LAMA2; (+) strand; PAM type: YTN; PAM sequence: TTT
tgttcttcttccatcattca

SEQ ID NO: 389102 - DNA, 20 bp, Artificial Sequence
  Description of Artificial Sequence: Synthetic oligonucleotide
  Target: LAMA2; (+) strand; PAM type: YTN; PAM sequence: TTT
gttcttcttccatcattcac

SEQ ID NO: 389103 - DNA, 20 bp, Artificial Sequence
  Description of Artificial Sequence: Synthetic oligonucleotide
  Target: LAMA2; (+) strand; PAM type: YTN; PAM sequence: TTG
ttcttcttccatcattcact

SEQ ID NO: 389104 - DNA, 20 bp, Artificial Sequence
  Description of Artificial Sequence: Synthetic oligonucleotide
  Target: LAMA2; (+) strand; PAM type: YTN; PAM sequence: TTC
ttcttccatcattcacttga

SEQ ID NO: 389105 - DNA, 20 bp, Artificial Sequence
  Description of Artificial Sequence: Synthetic oligonucleotide
  Target: LAMA2; (+) strand; PAM type: YTN; PAM sequence: CTT
cttccatcattcacttgaca

SEQ ID NO: 389106 - DNA, 20 bp, Artificial Sequence
  Description of Artificial Sequence: Synthetic oligonucleotide
  Target: LAMA2; (+) strand; PAM type: YTN; PAM sequence: TTC
ttccatcattcacttgacat

SEQ ID NO: 389107 - DNA, 20 bp, Artificial Sequence
  Description of Artificial Sequence: Synthetic oligonucleotide
  Target: LAMA2; (+) strand; PAM type: YTN; PAM sequence: CTT
ccatcattcacttgacattt

SEQ ID NO: 389108 - DNA, 20 bp, Artificial Sequence
  Description of Artificial Sequence: Synthetic oligonucleotide
  Target: LAMA2; (+) strand; PAM type: YTN; PAM sequence: TTC
catcattcacttgacatttg

SEQ ID NO: 389109 - DNA, 20 bp, Artificial Sequence
  Description of Artificial Sequence: Synthetic oligonucleotide
  Target: LAMA2; (+) strand; PAM type: YTN; PAM sequence: TTC
acttgacatttgtatactga

SEQ ID NO: 389110 - DNA, 20 bp, Artificial Sequence
  Description of Artificial Sequence: Synthetic oligonucleotide
  Target: LAMA2; (+) strand; PAM type: YTN; PAM sequence: CTT
gacatttgtatactgaggat

SEQ ID NO: 389111 - DNA, 20 bp, Artificial Sequence
  Description of Artificial Sequence: Synthetic oligonucleotide
  Target: LAMA2; (+) strand; PAM type: YTN; PAM sequence: TTG
acatttgtatactgaggatc

SEQ ID NO: 389112 - DNA, 20 bp, Artificial Sequence
  Description of Artificial Sequence: Synthetic oligonucleotide
  Target: LAMA2; (+) strand; PAM type: YTN; PAM sequence: TTT
gtatactgaggatcaccttc

SEQ ID NO: 389113 - DNA, 20 bp, Artificial Sequence
  Description of Artificial Sequence: Synthetic oligonucleotide
  Target: LAMA2; (+) strand; PAM type: YTN; PAM sequence: TTG
tatactgaggatcaccttct

SEQ ID NO: 389114 - DNA, 20 bp, Artificial Sequence
  Description of Artificial Sequence: Synthetic oligonucleotide
  Target: LAMA2; (+) strand; PAM type: YTN; PAM sequence: CTG
aggatcaccttctggtatta

SEQ ID NO: 389115 - DNA, 20 bp, Artificial Sequence
  Description of Artificial Sequence: Synthetic oligonucleotide
  Target: LAMA2; (+) strand; PAM type: YTN; PAM sequence: CTT
ctggtattataaaaacttaa

SEQ ID NO: 389116 - DNA, 20 bp, Artificial Sequence
  Description of Artificial Sequence: Synthetic oligonucleotide
  Target: LAMA2; (+) strand; PAM type: YTN; PAM sequence: TTC
tggtattataaaaacttaag

SEQ ID NO: 389117 - DNA, 20 bp, Artificial Sequence
  Description of Artificial Sequence: Synthetic oligonucleotide
  Target: LAMA2; (+) strand; PAM type: YTN; PAM sequence: CTG
gtattataaaaacttaagtt

SEQ ID NO: 389118 - DNA, 20 bp, Artificial Sequence
  Description of Artificial Sequence: Synthetic oligonucleotide
  Target: LAMA2; (+) strand; PAM type: YTN; PAM sequence: TTA
taaaaacttaagttatttca

SEQ ID NO: 389119 - DNA, 20 bp, Artificial Sequence
  Description of Artificial Sequence: Synthetic oligonucleotide
  Target: LAMA2; (+) strand; PAM type: YTN; PAM sequence: CTT
aagttatttcacctctttgc

SEQ ID NO: 389120 - DNA, 20 bp, Artificial Sequence
  Description of Artificial Sequence: Synthetic oligonucleotide
  Target: LAMA2; (+) strand; PAM type: YTN; PAM sequence: TTA
agttatttcacctctttgct

SEQ ID NO: 389121 - DNA, 20 bp, Artificial Sequence
  Description of Artificial Sequence: Synthetic oligonucleotide
  Target: LAMA2; (+) strand; PAM type: YTN; PAM sequence: TTA
tttcacctctttgctcaatt

SEQ ID NO: 389122 - DNA, 20 bp, Artificial Sequence
  Description of Artificial Sequence: Synthetic oligonucleotide
  Target: LAMA2; (+) strand; PAM type: YTN; PAM sequence: TTT
cacctctttgctcaatttct

SEQ ID NO: 389123 - DNA, 20 bp, Artificial Sequence
  Description of Artificial Sequence: Synthetic oligonucleotide
  Target: LAMA2; (+) strand; PAM type: YTN; PAM sequence: TTC
acctctttgctcaatttctt

SEQ ID NO: 389124 - DNA, 20 bp, Artificial Sequence
  Description of Artificial Sequence: Synthetic oligonucleotide
  Target: LAMA2; (+) strand; PAM type: YTN; PAM sequence: CTC
tttgctcaatttctttaact

SEQ ID NO: 389125 - DNA, 20 bp, Artificial Sequence
  Description of Artificial Sequence: Synthetic oligonucleotide
  Target: LAMA2; (+) strand; PAM type: YTN; PAM sequence: CTT
tgctcaatttctttaactat

SEQ ID NO: 389126 - DNA, 20 bp, Artificial Sequence
  Description of Artificial Sequence: Synthetic oligonucleotide
  Target: LAMA2; (+) strand; PAM type: YTN; PAM sequence: TTT
gctcaatttctttaactatg

SEQ ID NO: 389127 - DNA, 20 bp, Artificial Sequence
  Description of Artificial Sequence: Synthetic oligonucleotide
  Target: LAMA2; (+) strand; PAM type: YTN; PAM sequence: TTG
ctcaatttctttaactatgt

SEQ ID NO: 389128 - DNA, 20 bp, Artificial Sequence
  Description of Artificial Sequence: Synthetic oligonucleotide
  Target: LAMA2; (+) strand; PAM type: YTN; PAM sequence: CTC
aatttctttaactatgtcag

SEQ ID NO: 389129 - DNA, 20 bp, Artificial Sequence
  Description of Artificial Sequence: Synthetic oligonucleotide
  Target: LAMA2; (+) strand; PAM type: YTN; PAM sequence: TTT
ctttaactatgtcagtgctc

SEQ ID NO: 389130 - DNA, 20 bp, Artificial Sequence
  Description of Artificial Sequence: Synthetic oligonucleotide
  Target: LAMA2; (+) strand; PAM type: YTN; PAM sequence: TTC
tttaactatgtcagtgctcc

SEQ ID NO: 389131 - DNA, 20 bp, Artificial Sequence
  Description of Artificial Sequence: Synthetic oligonucleotide
  Target: LAMA2; (+) strand; PAM type: YTN; PAM sequence: CTT
taactatgtcagtgctcccc

SEQ ID NO: 389132 - DNA, 20 bp, Artificial Sequence
  Description of Artificial Sequence: Synthetic oligonucleotide
  Target: LAMA2; (+) strand; PAM type: YTN; PAM sequence: TTT
aactatgtcagtgctcccca

SEQ ID NO: 389133 - DNA, 20 bp, Artificial Sequence
  Description of Artificial Sequence: Synthetic oligonucleotide
  Target: LAMA2; (+) strand; PAM type: YTN; PAM sequence: TTA
actatgtcagtgctccccaa

SEQ ID NO: 389134 - DNA, 20 bp, Artificial Sequence
  Description of Artificial Sequence: Synthetic oligonucleotide
  Target: LAMA2; (+) strand; PAM type: YTN; PAM sequence: CTA
tgtcagtgctccccaagctt

SEQ ID NO: 389135 - DNA, 20 bp, Artificial Sequence
  Description of Artificial Sequence: Synthetic oligonucleotide
  Target: LAMA2; (+) strand; PAM type: YTN; PAM sequence: CTC
cccaagcttcagccaaagac

SEQ ID NO: 389136 - DNA, 20 bp, Artificial Sequence
  Description of Artificial Sequence: Synthetic oligonucleotide
  Target: LAMA2; (+) strand; PAM type: YTN; PAM sequence: CTT
cagccaaagaccatcaagga

SEQ ID NO: 389137 - DNA, 20 bp, Artificial Sequence
  Description of Artificial Sequence: Synthetic oligonucleotide
  Target: LAMA2; (+) strand; PAM type: YTN; PAM sequence: TTC
agccaaagaccatcaaggac

SEQ ID NO: 389138 - DNA, 20 bp, Artificial Sequence
  Description of Artificial Sequence: Synthetic oligonucleotide
  Target: LAMA2; (+) strand; PAM type: YTN; PAM sequence: TTT
attaacttgttgcaacaagg

SEQ ID NO: 389139 - DNA, 20 bp, Artificial Sequence
  Description of Artificial Sequence: Synthetic oligonucleotide
  Target: LAMA2; (+) strand; PAM type: YTN; PAM sequence: TTA
ttaacttgttgcaacaaggg

SEQ ID NO: 389140 - DNA, 20 bp, Artificial Sequence
  Description of Artificial Sequence: Synthetic oligonucleotide
  Target: LAMA2; (+) strand; PAM type: YTN; PAM sequence: TTA
acttgttgcaacaaggggca

SEQ ID NO: 389141 - DNA, 20 bp, Artificial Sequence
  Description of Artificial Sequence: Synthetic oligonucleotide
  Target: LAMA2; (+) strand; PAM type: YTN; PAM sequence: CTT
gttgcaacaaggggcactga

SEQ ID NO: 389142 - DNA, 20 bp, Artificial Sequence
  Description of Artificial Sequence: Synthetic oligonucleotide
  Target: LAMA2; (+) strand; PAM type: YTN; PAM sequence: TTG
ttgcaacaaggggcactgaa

SEQ ID NO: 389143 - DNA, 20 bp, Artificial Sequence
  Description of Artificial Sequence: Synthetic oligonucleotide
  Target: LAMA2; (+) strand; PAM type: YTN; PAM sequence: TTG
caacaaggggcactgaacac

SEQ ID NO: 389144 - DNA, 20 bp, Artificial Sequence
  Description of Artificial Sequence: Synthetic oligonucleotide
  Target: LAMA2; (+) strand; PAM type: YTN; PAM sequence: CTG
aacaccatgggggaattgtg

SEQ ID NO: 389145 - DNA, 20 bp, Artificial Sequence
  Description of Artificial Sequence: Synthetic oligonucleotide
  Target: LAMA2; (+) strand; PAM type: YTN; PAM sequence: TTG
tgggctgtctcaataagaag

SEQ ID NO: 389146 - DNA, 20 bp, Artificial Sequence
  Description of Artificial Sequence: Synthetic oligonucleotide
  Target: LAMA2; (+) strand; PAM type: YTN; PAM sequence: CTG
tctcaataagaaggtgttag

SEQ ID NO: 389147 - DNA, 20 bp, Artificial Sequence
  Description of Artificial Sequence: Synthetic oligonucleotide
  Target: LAMA2; (+) strand; PAM type: YTN; PAM sequence: CTC
aataagaaggtgttaggaat

SEQ ID NO: 389148 - DNA, 20 bp, Artificial Sequence
  Description of Artificial Sequence: Synthetic oligonucleotide
  Target: LAMA2; (+) strand; PAM type: YTN; PAM sequence: TTA
ggaataacttctagtatttg

SEQ ID NO: 389149 - DNA, 20 bp, Artificial Sequence
  Description of Artificial Sequence: Synthetic oligonucleotide
  Target: LAMA2; (+) strand; PAM type: YTN; PAM sequence: CTT
ctagtatttgaggctgtgct

SEQ ID NO: 389150 - DNA, 20 bp, Artificial Sequence
  Description of Artificial Sequence: Synthetic oligonucleotide
  Target: LAMA2; (+) strand; PAM type: YTN; PAM sequence: TTC
tagtatttgaggctgtgcta

SEQ ID NO: 389151 - DNA, 20 bp, Artificial Sequence
  Description of Artificial Sequence: Synthetic oligonucleotide
  Target: LAMA2; (+) strand; PAM type: YTN; PAM sequence: CTA
gtatttgaggctgtgctaga

SEQ ID NO: 389152 - DNA, 20 bp, Artificial Sequence
  Description of Artificial Sequence: Synthetic oligonucleotide
  Target: LAMA2; (+) strand; PAM type: YTN; PAM sequence: TTT
gaggctgtgctagataactt

SEQ ID NO: 389153 - DNA, 20 bp, Artificial Sequence
  Description of Artificial Sequence: Synthetic oligonucleotide
  Target: LAMA2; (+) strand; PAM type: YTN; PAM sequence: TTG
aggctgtgctagataactta

SEQ ID NO: 389154 - DNA, 20 bp, Artificial Sequence
  Description of Artificial Sequence: Synthetic oligonucleotide
  Target: LAMA2; (+) strand; PAM type: YTN; PAM sequence: CTG
tgctagataacttaaggtta

SEQ ID NO: 389155 - DNA, 20 bp, Artificial Sequence
  Description of Artificial Sequence: Synthetic oligonucleotide
  Target: LAMA2; (+) strand; PAM type: YTN; PAM sequence: CTA
gataacttaaggttagcact

SEQ ID NO: 389156 - DNA, 20 bp, Artificial Sequence
  Description of Artificial Sequence: Synthetic oligonucleotide
  Target: LAMA2; (+) strand; PAM type: YTN; PAM sequence: CTT
aaggttagcactcaactggg

SEQ ID NO: 389157 - DNA, 20 bp, Artificial Sequence
  Description of Artificial Sequence: Synthetic oligonucleotide
  Target: LAMA2; (+) strand; PAM type: YTN; PAM sequence: TTA
aggttagcactcaactgggt

SEQ ID NO: 389158 - DNA, 20 bp, Artificial Sequence
  Description of Artificial Sequence: Synthetic oligonucleotide
  Target: LAMA2; (+) strand; PAM type: YTN; PAM sequence: TTA
gcactcaactgggtgctatt

SEQ ID NO: 389159 - DNA, 20 bp, Artificial Sequence
  Description of Artificial Sequence: Synthetic oligonucleotide
  Target: LAMA2; (+) strand; PAM type: YTN; PAM sequence: CTC
aactgggtgctattcagaag

SEQ ID NO: 389160 - DNA, 20 bp, Artificial Sequence
  Description of Artificial Sequence: Synthetic oligonucleotide
  Target: LAMA2; (+) strand; PAM type: YTN; PAM sequence: CTG
ggtgctattcagaagtggga

SEQ ID NO: 389161 - DNA, 20 bp, Artificial Sequence
  Description of Artificial Sequence: Synthetic oligonucleotide
  Target: LAMA2; (+) strand; PAM type: YTN; PAM sequence: CTA
ttcagaagtgggagtaattc

SEQ ID NO: 389162 - DNA, 20 bp, Artificial Sequence
  Description of Artificial Sequence: Synthetic oligonucleotide
  Target: LAMA2; (+) strand; PAM type: YTN; PAM sequence: TTC
agaagtgggagtaattctgt

SEQ ID NO: 389163 - DNA, 20 bp, Artificial Sequence
  Description of Artificial Sequence: Synthetic oligonucleotide
  Target: LAMA2; (+) strand; PAM type: YTN; PAM sequence: TTC
tgtgagtattttgtgaatcc

SEQ ID NO: 389164 - DNA, 20 bp, Artificial Sequence
  Description of Artificial Sequence: Synthetic oligonucleotide
  Target: LAMA2; (+) strand; PAM type: YTN; PAM sequence: CTG
tgagtattttgtgaatccta

SEQ ID NO: 389165 - DNA, 20 bp, Artificial Sequence
  Description of Artificial Sequence: Synthetic oligonucleotide
  Target: LAMA2; (+) strand; PAM type: YTN; PAM sequence: TTT
tgtgaatcctatctagaggg

SEQ ID NO: 389166 - DNA, 20 bp, Artificial Sequence
  Description of Artificial Sequence: Synthetic oligonucleotide
  Target: LAMA2; (+) strand; PAM type: YTN; PAM sequence: TTT
gtgaatcctatctagaggga

SEQ ID NO: 389167 - DNA, 20 bp, Artificial Sequence
  Description of Artificial Sequence: Synthetic oligonucleotide
  Target: LAMA2; (+) strand; PAM type: YTN; PAM sequence: TTG
tgaatcctatctagagggaa

SEQ ID NO: 389168 - DNA, 20 bp, Artificial Sequence
  Description of Artificial Sequence: Synthetic oligonucleotide
  Target: LAMA2; (+) strand; PAM type: YTN; PAM sequence: CTA
tctagagggaaggaagaaca

SEQ ID NO: 389169 - DNA, 20 bp, Artificial Sequence
  Description of Artificial Sequence: Synthetic oligonucleotide
  Target: LAMA2; (+) strand; PAM type: YTN; PAM sequence: CTA
gagggaaggaagaacagagg

SEQ ID NO: 389170 - DNA, 20 bp, Artificial Sequence
  Description of Artificial Sequence: Synthetic oligonucleotide
  Target: LAMA2; (+) strand; PAM type: YTN; PAM sequence: CTA
tgattaataaggaggcagtg

SEQ ID NO: 389171 - DNA, 20 bp, Artificial Sequence
  Description of Artificial Sequence: Synthetic oligonucleotide
  Target: LAMA2; (+) strand; PAM type: YTN; PAM sequence: TTA
ataaggaggcagtgttcatt

SEQ ID NO: 389172 - DNA, 20 bp, Artificial Sequence
  Description of Artificial Sequence: Synthetic oligonucleotide
  Target: LAMA2; (+) strand; PAM type: YTN; PAM sequence: TTC
attcatattagccaggaaat

SEQ ID NO: 389173 - DNA, 20 bp, Artificial Sequence
  Description of Artificial Sequence: Synthetic oligonucleotide
  Target: LAMA2; (+) strand; PAM type: YTN; PAM sequence: TTC
atattagccaggaaatggga

SEQ ID NO: 389174 - DNA, 20 bp, Artificial Sequence
  Description of Artificial Sequence: Synthetic oligonucleotide
  Target: LAMA2; (+) strand; PAM type: YTN; PAM sequence: TTA
gccaggaaatgggaggttgg

SEQ ID NO: 389175 - DNA, 20 bp, Artificial Sequence
  Description of Artificial Sequence: Synthetic oligonucleotide
  Target: LAMA2; (+) strand; PAM type: YTN; PAM sequence: TTG
gggtagttttgtggtctaca

SEQ ID NO: 389176 - DNA, 20 bp, Artificial Sequence
  Description of Artificial Sequence: Synthetic oligonucleotide
  Target: LAMA2; (+) strand; PAM type: YTN; PAM sequence: TTT
tgtggtctacacaaaacccg

SEQ ID NO: 389177 - DNA, 20 bp, Artificial Sequence
  Description of Artificial Sequence: Synthetic oligonucleotide
  Target: LAMA2; (+) strand; PAM type: YTN; PAM sequence: TTT
gtggtctacacaaaacccgc

SEQ ID NO: 389178 - DNA, 20 bp, Artificial Sequence
  Description of Artificial Sequence: Synthetic oligonucleotide
  Target: LAMA2; (+) strand; PAM type: YTN; PAM sequence: TTG
tggtctacacaaaacccgct

SEQ ID NO: 389179 - DNA, 20 bp, Artificial Sequence
  Description of Artificial Sequence: Synthetic oligonucleotide
  Target: LAMA2; (+) strand; PAM type: YTN; PAM sequence: CTA
cacaaaacccgctatggttt

SEQ ID NO: 389180 - DNA, 20 bp, Artificial Sequence
  Description of Artificial Sequence: Synthetic oligonucleotide
  Target: LAMA2; (+) strand; PAM type: YTN; PAM sequence: CTA
tggttttgtctgcgcttaga

SEQ ID NO: 389181 - DNA, 20 bp, Artificial Sequence
  Description of Artificial Sequence: Synthetic oligonucleotide
  Target: LAMA2; (+) strand; PAM type: YTN; PAM sequence: TTT
tgtctgcgcttagacattac

SEQ ID NO: 389182 - DNA, 20 bp, Artificial Sequence
  Description of Artificial Sequence: Synthetic oligonucleotide
  Target: LAMA2; (+) strand; PAM type: YTN; PAM sequence: TTT
gtctgcgcttagacattaca

SEQ ID NO: 389183 - DNA, 20 bp, Artificial Sequence
  Description of Artificial Sequence: Synthetic oligonucleotide
  Target: LAMA2; (+) strand; PAM type: YTN; PAM sequence: TTG
tctgcgcttagacattacag

SEQ ID NO: 389184 - DNA, 20 bp, Artificial Sequence
  Description of Artificial Sequence: Synthetic oligonucleotide
  Target: LAMA2; (+) strand; PAM type: YTN; PAM sequence: CTG
cgcttagacattacagggta

SEQ ID NO: 389185 - DNA, 20 bp, Artificial Sequence
  Description of Artificial Sequence: Synthetic oligonucleotide
  Target: LAMA2; (+) strand; PAM type: YTN; PAM sequence: CTT
agacattacagggtagtctc

SEQ ID NO: 389186 - DNA, 20 bp, Artificial Sequence
  Description of Artificial Sequence: Synthetic oligonucleotide
  Target: LAMA2; (+) strand; PAM type: YTN; PAM sequence: TTA
gacattacagggtagtctct

SEQ ID NO: 389187 - DNA, 20 bp, Artificial Sequence
  Description of Artificial Sequence: Synthetic oligonucleotide
  Target: LAMA2; (+) strand; PAM type: YTN; PAM sequence: TTA
cagggtagtctctttttttc

SEQ ID NO: 389188 - DNA, 20 bp, Artificial Sequence
  Description of Artificial Sequence: Synthetic oligonucleotide
  Target: LAMA2; (+) strand; PAM type: YTN; PAM sequence: CTC
tttttttctgtttcattcat

SEQ ID NO: 389189 - DNA, 20 bp, Artificial Sequence
  Description of Artificial Sequence: Synthetic oligonucleotide
  Target: LAMA2; (+) strand; PAM type: YTN; PAM sequence: CTT
tttttctgtttcattcatca

SEQ ID NO: 389190 - DNA, 20 bp, Artificial Sequence
  Description of Artificial Sequence: Synthetic oligonucleotide
  Target: LAMA2; (+) strand; PAM type: YTN; PAM sequence: TTT
ttttctgtttcattcatcac

SEQ ID NO: 389191 - DNA, 20 bp, Artificial Sequence
  Description of Artificial Sequence: Synthetic oligonucleotide
  Target: LAMA2; (+) strand; PAM type: YTN; PAM sequence: TTT
tttctgtttcattcatcact

SEQ ID NO: 389192 - DNA, 20 bp, Artificial Sequence
  Description of Artificial Sequence: Synthetic oligonucleotide
  Target: LAMA2; (+) strand; PAM type: YTN; PAM sequence: TTT
ttctgtttcattcatcactg

SEQ ID NO: 389193 - DNA, 20 bp, Artificial Sequence
  Description of Artificial Sequence: Synthetic oligonucleotide
  Target: LAMA2; (+) strand; PAM type: YTN; PAM sequence: TTT
tctgtttcattcatcactgg

SEQ ID NO: 389194 - DNA, 20 bp, Artificial Sequence
  Description of Artificial Sequence: Synthetic oligonucleotide
  Target: LAMA2; (+) strand; PAM type: YTN; PAM sequence: TTT
ctgtttcattcatcactggt

SEQ ID NO: 389195 - DNA, 20 bp, Artificial Sequence
  Description of Artificial Sequence: Synthetic oligonucleotide
  Target: LAMA2; (+) strand; PAM type: YTN; PAM sequence: TTC
tgtttcattcatcactggtt

SEQ ID NO: 389196 - DNA, 20 bp, Artificial Sequence
  Description of Artificial Sequence: Synthetic oligonucleotide
  Target: LAMA2; (+) strand; PAM type: YTN; PAM sequence: CTG
tttcattcatcactggttca

SEQ ID NO: 389197 - DNA, 20 bp, Artificial Sequence
  Description of Artificial Sequence: Synthetic oligonucleotide
  Target: LAMA2; (+) strand; PAM type: YTN; PAM sequence: TTT
cattcatcactggttcagag

SEQ ID NO: 389198 - DNA, 20 bp, Artificial Sequence
  Description of Artificial Sequence: Synthetic oligonucleotide
  Target: LAMA2; (+) strand; PAM type: YTN; PAM sequence: TTC
attcatcactggttcagagt

SEQ ID NO: 389199 - DNA, 20 bp, Artificial Sequence
  Description of Artificial Sequence: Synthetic oligonucleotide
  Target: LAMA2; (+) strand; PAM type: YTN; PAM sequence: TTC
atcactggttcagagtgacc

SEQ ID NO: 389200 - DNA, 20 bp, Artificial Sequence
  Description of Artificial Sequence: Synthetic oligonucleotide
  Target: LAMA2; (+) strand; PAM type: YTN; PAM sequence: CTG
gttcagagtgaccttgtcta

SEQ ID NO: 389201 - DNA, 20 bp, Artificial Sequence
  Description of Artificial Sequence: Synthetic oligonucleotide
  Target: LAMA2; (+) strand; PAM type: YTN; PAM sequence: TTC
agagtgaccttgtctaattt

SEQ ID NO: 389202 - DNA, 20 bp, Artificial Sequence
  Description of Artificial Sequence: Synthetic oligonucleotide
  Target: LAMA2; (+) strand; PAM type: YTN; PAM sequence: CTT
gtctaatttagtgtcctatg

SEQ ID NO: 389203 - DNA, 20 bp, Artificial Sequence
  Description of Artificial Sequence: Synthetic oligonucleotide
  Target: LAMA2; (+) strand; PAM type: YTN; PAM sequence: TTG
tctaatttagtgtcctatga

SEQ ID NO: 389204 - DNA, 20 bp, Artificial Sequence
  Description of Artificial Sequence: Synthetic oligonucleotide
  Target: LAMA2; (+) strand; PAM type: YTN; PAM sequence: CTA
atttagtgtcctatgagatt

SEQ ID NO: 389205 - DNA, 20 bp, Artificial Sequence
  Description of Artificial Sequence: Synthetic oligonucleotide
  Target: LAMA2; (+) strand; PAM type: YTN; PAM sequence: TTT
agtgtcctatgagattattt

SEQ ID NO: 389206 - DNA, 20 bp, Artificial Sequence
  Description of Artificial Sequence: Synthetic oligonucleotide
  Target: LAMA2; (+) strand; PAM type: YTN; PAM sequence: TTA
gtgtcctatgagattattta

SEQ ID NO: 389207 - DNA, 20 bp, Artificial Sequence
  Description of Artificial Sequence: Synthetic oligonucleotide
  Target: LAMA2; (+) strand; PAM type: YTN; PAM sequence: CTA
tgagattatttatgttccat

SEQ ID NO: 389208 - DNA, 20 bp, Artificial Sequence
  Description of Artificial Sequence: Synthetic oligonucleotide
  Target: LAMA2; (+) strand; PAM type: YTN; PAM sequence: TTA
tttatgttccataggaaaaa

SEQ ID NO: 389209 - DNA, 20 bp, Artificial Sequence
  Description of Artificial Sequence: Synthetic oligonucleotide
  Target: LAMA2; (+) strand; PAM type: YTN; PAM sequence: TTT
atgttccataggaaaaaaat

SEQ ID NO: 389210 - DNA, 20 bp, Artificial Sequence
  Description of Artificial Sequence: Synthetic oligonucleotide
  Target: LAMA2; (+) strand; PAM type: YTN; PAM sequence: TTA
tgttccataggaaaaaaata

SEQ ID NO: 389211 - DNA, 20 bp, Artificial Sequence
  Description of Artificial Sequence: Synthetic oligonucleotide
  Target: LAMA2; (+) strand; PAM type: YTN; PAM sequence: TTC
cataggaaaaaaatatggcc

SEQ ID NO: 389212 - DNA, 20 bp, Artificial Sequence
  Description of Artificial Sequence: Synthetic oligonucleotide
  Target: LAMA2; (+) strand; PAM type: YTN; PAM sequence: CTG
ctgttaggccagttcctagc

SEQ ID NO: 389213 - DNA, 20 bp, Artificial Sequence
  Description of Artificial Sequence: Synthetic oligonucleotide
  Target: LAMA2; (+) strand; PAM type: YTN; PAM sequence: CTG
ttaggccagttcctagcaac

SEQ ID NO: 389214 - DNA, 20 bp, Artificial Sequence
  Description of Artificial Sequence: Synthetic oligonucleotide
  Target: LAMA2; (+) strand; PAM type: YTN; PAM sequence: TTA
ggccagttcctagcaacacc

SEQ ID NO: 389215 - DNA, 20 bp, Artificial Sequence
  Description of Artificial Sequence: Synthetic oligonucleotide
  Target: LAMA2; (+) strand; PAM type: YTN; PAM sequence: TTC
ctagcaacaccgaggacagg

SEQ ID NO: 389216 - DNA, 20 bp, Artificial Sequence
  Description of Artificial Sequence: Synthetic oligonucleotide
  Target: LAMA2; (+) strand; PAM type: YTN; PAM sequence: CTA
gcaacaccgaggacaggcca

SEQ ID NO: 389217 - DNA, 20 bp, Artificial Sequence
  Description of Artificial Sequence: Synthetic oligonucleotide
  Target: LAMA2; (+) strand; PAM type: YTN; PAM sequence: TTA
gttagcgcctagccaggtct

SEQ ID NO: 389218 - DNA, 20 bp, Artificial Sequence
  Description of Artificial Sequence: Synthetic oligonucleotide
  Target: LAMA2; (+) strand; PAM type: YTN; PAM sequence: TTA
gcgcctagccaggtctctat

SEQ ID NO: 389219 - DNA, 20 bp, Artificial Sequence
  Description of Artificial Sequence: Synthetic oligonucleotide
  Target: LAMA2; (+) strand; PAM type: YTN; PAM sequence: CTA
gccaggtctctatgttaagg

SEQ ID NO: 389220 - DNA, 20 bp, Artificial Sequence
  Description of Artificial Sequence: Synthetic oligonucleotide
  Target: LAMA2; (+) strand; PAM type: YTN; PAM sequence: CTC
tatgttaaggcctgccgttc

SEQ ID NO: 389221 - DNA, 20 bp, Artificial Sequence
  Description of Artificial Sequence: Synthetic oligonucleotide
  Target: LAMA2; (+) strand; PAM type: YTN; PAM sequence: CTA
tgttaaggcctgccgttctc

SEQ ID NO: 389222 - DNA, 20 bp, Artificial Sequence
  Description of Artificial Sequence: Synthetic oligonucleotide
  Target: LAMA2; (+) strand; PAM type: YTN; PAM sequence: TTA
aggcctgccgttctcttttt

SEQ ID NO: 389223 - DNA, 20 bp, Artificial Sequence
  Description of Artificial Sequence: Synthetic oligonucleotide
  Target: LAMA2; (+) strand; PAM type: YTN; PAM sequence: CTG
ccgttctcttttttacctgt

SEQ ID NO: 389224 - DNA, 20 bp, Artificial Sequence
  Description of Artificial Sequence: Synthetic oligonucleotide
  Target: LAMA2; (+) strand; PAM type: YTN; PAM sequence: TTC
tcttttttacctgtgatctg

SEQ ID NO: 389225 - DNA, 20 bp, Artificial Sequence
  Description of Artificial Sequence: Synthetic oligonucleotide
  Target: LAMA2; (+) strand; PAM type: YTN; PAM sequence: CTC
ttttttacctgtgatctgtg

SEQ ID NO: 389226 - DNA, 20 bp, Artificial Sequence
  Description of Artificial Sequence: Synthetic oligonucleotide
  Target: LAMA2; (+) strand; PAM type: YTN; PAM sequence: CTT
ttttacctgtgatctgtgtc

SEQ ID NO: 389227 - DNA, 20 bp, Artificial Sequence
  Description of Artificial Sequence: Synthetic oligonucleotide
  Target: LAMA2; (+) strand; PAM type: YTN; PAM sequence: TTT
tttacctgtgatctgtgtct

SEQ ID NO: 389228 - DNA, 20 bp, Artificial Sequence
  Description of Artificial Sequence: Synthetic oligonucleotide
  Target: LAMA2; (+) strand; PAM type: YTN; PAM sequence: TTT
ttacctgtgatctgtgtctc

SEQ ID NO: 389229 - DNA, 20 bp, Artificial Sequence
  Description of Artificial Sequence: Synthetic oligonucleotide
  Target: LAMA2; (+) strand; PAM type: YTN; PAM sequence: TTT
tacctgtgatctgtgtctct

SEQ ID NO: 389230 - DNA, 20 bp, Artificial Sequence
  Description of Artificial Sequence: Synthetic oligonucleotide
  Target: LAMA2; (+) strand; PAM type: YTN; PAM sequence: TTT
acctgtgatctgtgtctctg

SEQ ID NO: 389231 - DNA, 20 bp, Artificial Sequence
  Description of Artificial Sequence: Synthetic oligonucleotide
  Target: LAMA2; (+) strand; PAM type: YTN; PAM sequence: TTA
cctgtgatctgtgtctctgt

SEQ ID NO: 389232 - DNA, 20 bp, Artificial Sequence
  Description of Artificial Sequence: Synthetic oligonucleotide
  Target: LAMA2; (+) strand; PAM type: YTN; PAM sequence: CTG
tgatctgtgtctctgttaat

SEQ ID NO: 389233 - DNA, 20 bp, Artificial Sequence
  Description of Artificial Sequence: Synthetic oligonucleotide
  Target: LAMA2; (+) strand; PAM type: YTN; PAM sequence: CTG
tgtctctgttaattggaatg

SEQ ID NO: 389234 - DNA, 20 bp, Artificial Sequence
  Description of Artificial Sequence: Synthetic oligonucleotide
  Target: LAMA2; (+) strand; PAM type: YTN; PAM sequence: CTC
tgttaattggaatgggagcc

SEQ ID NO: 389235 - DNA, 20 bp, Artificial Sequence
  Description of Artificial Sequence: Synthetic oligonucleotide
  Target: LAMA2; (+) strand; PAM type: YTN; PAM sequence: CTG
ttaattggaatgggagcctt

SEQ ID NO: 389236 - DNA, 20 bp, Artificial Sequence
  Description of Artificial Sequence: Synthetic oligonucleotide
  Target: LAMA2; (+) strand; PAM type: YTN; PAM sequence: TTA
attggaatgggagccttaaa

SEQ ID NO: 389237 - DNA, 20 bp, Artificial Sequence
  Description of Artificial Sequence: Synthetic oligonucleotide
  Target: LAMA2; (+) strand; PAM type: YTN; PAM sequence: TTG
gaatgggagccttaaatggg

SEQ ID NO: 389238 - DNA, 20 bp, Artificial Sequence
  Description of Artificial Sequence: Synthetic oligonucleotide
  Target: LAMA2; (+) strand; PAM type: YTN; PAM sequence: CTT
aaatgggccaggcaaggagt

SEQ ID NO: 389239 - DNA, 20 bp, Artificial Sequence
  Description of Artificial Sequence: Synthetic oligonucleotide
  Target: LAMA2; (+) strand; PAM type: YTN; PAM sequence: TTA
aatgggccaggcaaggagtt

SEQ ID NO: 389240 - DNA, 20 bp, Artificial Sequence
  Description of Artificial Sequence: Synthetic oligonucleotide
  Target: LAMA2; (+) strand; PAM type: YTN; PAM sequence: TTT
atcttaactctaccccttac

SEQ ID NO: 389241 - DNA, 20 bp, Artificial Sequence
  Description of Artificial Sequence: Synthetic oligonucleotide
  Target: LAMA2; (+) strand; PAM type: YTN; PAM sequence: TTA
tcttaactctaccccttact

SEQ ID NO: 389242 - DNA, 20 bp, Artificial Sequence
  Description of Artificial Sequence: Synthetic oligonucleotide
  Target: LAMA2; (+) strand; PAM type: YTN; PAM sequence: CTT
aactctaccccttactgact

SEQ ID NO: 389243 - DNA, 20 bp, Artificial Sequence
  Description of Artificial Sequence: Synthetic oligonucleotide
  Target: LAMA2; (+) strand; PAM type: YTN; PAM sequence: TTA
actctaccccttactgactg

SEQ ID NO: 389244 - DNA, 20 bp, Artificial Sequence
  Description of Artificial Sequence: Synthetic oligonucleotide
  Target: LAMA2; (+) strand; PAM type: YTN; PAM sequence: CTC
taccccttactgactgtgtg

SEQ ID NO: 389245 - DNA, 20 bp, Artificial Sequence
  Description of Artificial Sequence: Synthetic oligonucleotide
  Target: LAMA2; (+) strand; PAM type: YTN; PAM sequence: CTA
ccccttactgactgtgtgat

SEQ ID NO: 389246 - DNA, 20 bp, Artificial Sequence
  Description of Artificial Sequence: Synthetic oligonucleotide
  Target: LAMA2; (+) strand; PAM type: YTN; PAM sequence: CTT
actgactgtgtgatctcgtg

SEQ ID NO: 389247 - DNA, 20 bp, Artificial Sequence
  Description of Artificial Sequence: Synthetic oligonucleotide
  Target: LAMA2; (+) strand; PAM type: YTN; PAM sequence: TTA
ctgactgtgtgatctcgtgc

SEQ ID NO: 389248 - DNA, 20 bp, Artificial Sequence
  Description of Artificial Sequence: Synthetic oligonucleotide
  Target: LAMA2; (+) strand; PAM type: YTN; PAM sequence: CTG
actgtgtgatctcgtgcaca

SEQ ID NO: 389249 - DNA, 20 bp, Artificial Sequence
  Description of Artificial Sequence: Synthetic oligonucleotide
  Target: LAMA2; (+) strand; PAM type: YTN; PAM sequence: CTG
tgtgatctcgtgcacatttt

SEQ ID NO: 389250 - DNA, 20 bp, Artificial Sequence
  Description of Artificial Sequence: Synthetic oligonucleotide
  Target: LAMA2; (+) strand; PAM type: YTN; PAM sequence: CTC
gtgcacatttttaactgtct

SEQ ID NO: 389251 - DNA, 20 bp, Artificial Sequence
  Description of Artificial Sequence: Synthetic oligonucleotide
  Target: LAMA2; (+) strand; PAM type: YTN; PAM sequence: TTT
ttaactgtcttcaagacagt

SEQ ID NO: 389252 - DNA, 20 bp, Artificial Sequence
  Description of Artificial Sequence: Synthetic oligonucleotide
  Target: LAMA2; (+) strand; PAM type: YTN; PAM sequence: TTT
taactgtcttcaagacagtt

SEQ ID NO: 389253 - DNA, 20 bp, Artificial Sequence
  Description of Artificial Sequence: Synthetic oligonucleotide
  Target: LAMA2; (+) strand; PAM type: YTN; PAM sequence: TTT
aactgtcttcaagacagttt

SEQ ID NO: 389254 - DNA, 20 bp, Artificial Sequence
  Description of Artificial Sequence: Synthetic oligonucleotide
  Target: LAMA2; (+) strand; PAM type: YTN; PAM sequence: TTA
actgtcttcaagacagtttg

SEQ ID NO: 389255 - DNA, 20 bp, Artificial Sequence
  Description of Artificial Sequence: Synthetic oligonucleotide
  Target: LAMA2; (+) strand; PAM type: YTN; PAM sequence: CTG
tcttcaagacagtttgctct

SEQ ID NO: 389256 - DNA, 20 bp, Artificial Sequence
  Description of Artificial Sequence: Synthetic oligonucleotide
  Target: LAMA2; (+) strand; PAM type: YTN; PAM sequence: CTT
caagacagtttgctctttca

SEQ ID NO: 389257 - DNA, 20 bp, Artificial Sequence
  Description of Artificial Sequence: Synthetic oligonucleotide
  Target: LAMA2; (+) strand; PAM type: YTN; PAM sequence: TTC
aagacagtttgctctttcat

SEQ ID NO: 389258 - DNA, 20 bp, Artificial Sequence
  Description of Artificial Sequence: Synthetic oligonucleotide
  Target: LAMA2; (+) strand; PAM type: YTN; PAM sequence: TTT
gctctttcatgaaatggaat

SEQ ID NO: 389259 - DNA, 20 bp, Artificial Sequence
  Description of Artificial Sequence: Synthetic oligonucleotide
  Target: LAMA2; (+) strand; PAM type: YTN; PAM sequence: TTG
ctctttcatgaaatggaata

SEQ ID NO: 389260 - DNA, 20 bp, Artificial Sequence
  Description of Artificial Sequence: Synthetic oligonucleotide
  Target: LAMA2; (+) strand; PAM type: YTN; PAM sequence: CTC
tttcatgaaatggaataatg

SEQ ID NO: 389261 - DNA, 20 bp, Artificial Sequence
  Description of Artificial Sequence: Synthetic oligonucleotide
  Target: LAMA2; (+) strand; PAM type: YTN; PAM sequence: CTT
tcatgaaatggaataatgct

SEQ ID NO: 389262 - DNA, 20 bp, Artificial Sequence
  Description of Artificial Sequence: Synthetic oligonucleotide
  Target: LAMA2; (+) strand; PAM type: YTN; PAM sequence: TTT
catgaaatggaataatgctt

SEQ ID NO: 389263 - DNA, 20 bp, Artificial Sequence
  Description of Artificial Sequence: Synthetic oligonucleotide
  Target: LAMA2; (+) strand; PAM type: YTN; PAM sequence: TTC
atgaaatggaataatgctta

SEQ ID NO: 389264 - DNA, 20 bp, Artificial Sequence
  Description of Artificial Sequence: Synthetic oligonucleotide
  Target: LAMA2; (+) strand; PAM type: YTN; PAM sequence: CTT
accccccatagagctgttgt

SEQ ID NO: 389265 - DNA, 20 bp, Artificial Sequence
  Description of Artificial Sequence: Synthetic oligonucleotide
  Target: LAMA2; (+) strand; PAM type: YTN; PAM sequence: TTA
ccccccatagagctgttgtg

SEQ ID NO: 389266 - DNA, 20 bp, Artificial Sequence
  Description of Artificial Sequence: Synthetic oligonucleotide
  Target: LAMA2; (+) strand; PAM type: YTN; PAM sequence: CTG
ttgtgaaaattaaatgaaaa

SEQ ID NO: 389267 - DNA, 20 bp, Artificial Sequence
  Description of Artificial Sequence: Synthetic oligonucleotide
  Target: LAMA2; (+) strand; PAM type: YTN; PAM sequence: TTG
tgaaaattaaatgaaaaaac

SEQ ID NO: 389268 - DNA, 20 bp, Artificial Sequence
  Description of Artificial Sequence: Synthetic oligonucleotide
  Target: LAMA2; (+) strand; PAM type: YTN; PAM sequence: TTA
aatgaaaaaacaaaacataa

SEQ ID NO: 389269 - DNA, 20 bp, Artificial Sequence
  Description of Artificial Sequence: Synthetic oligonucleotide
  Target: LAMA2; (+) strand; PAM type: YTN; PAM sequence: CTG
gcacatagtaatttctcaat

SEQ ID NO: 389270 - DNA, 20 bp, Artificial Sequence
  Description of Artificial Sequence: Synthetic oligonucleotide
  Target: LAMA2; (+) strand; PAM type: YTN; PAM sequence: TTT
ctcaataagtcactgcaatt

SEQ ID NO: 389271 - DNA, 20 bp, Artificial Sequence
  Description of Artificial Sequence: Synthetic oligonucleotide
  Target: LAMA2; (+) strand; PAM type: YTN; PAM sequence: TTC
tcaataagtcactgcaattt

SEQ ID NO: 389272 - DNA, 20 bp, Artificial Sequence
  Description of Artificial Sequence: Synthetic oligonucleotide
  Target: LAMA2; (+) strand; PAM type: YTN; PAM sequence: CTC
aataagtcactgcaattttt

SEQ ID NO: 389273 - DNA, 20 bp, Artificial Sequence
  Description of Artificial Sequence: Synthetic oligonucleotide
  Target: LAMA2; (+) strand; PAM type: YTN; PAM sequence: CTG
caatttttattatttgcctg

SEQ ID NO: 389274 - DNA, 20 bp, Artificial Sequence
  Description of Artificial Sequence: Synthetic oligonucleotide
  Target: LAMA2; (+) strand; PAM type: YTN; PAM sequence: TTT
ttattatttgcctgaatatt

SEQ ID NO: 389275 - DNA, 20 bp, Artificial Sequence
  Description of Artificial Sequence: Synthetic oligonucleotide
  Target: LAMA2; (+) strand; PAM type: YTN; PAM sequence: TTT
tattatttgcctgaatattt

SEQ ID NO: 389276 - DNA, 20 bp, Artificial Sequence
  Description of Artificial Sequence: Synthetic oligonucleotide
  Target: LAMA2; (+) strand; PAM type: YTN; PAM sequence: TTT
attatttgcctgaatatttg

SEQ ID NO: 389277 - DNA, 20 bp, Artificial Sequence
  Description of Artificial Sequence: Synthetic oligonucleotide
  Target: LAMA2; (+) strand; PAM type: YTN; PAM sequence: TTA
ttatttgcctgaatatttgg

SEQ ID NO: 389278 - DNA, 20 bp, Artificial Sequence
  Description of Artificial Sequence: Synthetic oligonucleotide
  Target: LAMA2; (+) strand; PAM type: YTN; PAM sequence: TTA
tttgcctgaatatttggcat

SEQ ID NO: 389279 - DNA, 20 bp, Artificial Sequence
  Description of Artificial Sequence: Synthetic oligonucleotide
  Target: LAMA2; (+) strand; PAM type: YTN; PAM sequence: TTT
gcctgaatatttggcatgac

SEQ ID NO: 389280 - DNA, 20 bp, Artificial Sequence
  Description of Artificial Sequence: Synthetic oligonucleotide
  Target: LAMA2; (+) strand; PAM type: YTN; PAM sequence: TTG
cctgaatatttggcatgaca

SEQ ID NO: 389281 - DNA, 20 bp, Artificial Sequence
  Description of Artificial Sequence: Synthetic oligonucleotide
  Target: LAMA2; (+) strand; PAM type: YTN; PAM sequence: CTG
aatatttggcatgacactca

SEQ ID NO: 389282 - DNA, 20 bp, Artificial Sequence
  Description of Artificial Sequence: Synthetic oligonucleotide
  Target: LAMA2; (+) strand; PAM type: YTN; PAM sequence: TTT
ggcatgacactcaatgtgta

SEQ ID NO: 389283 - DNA, 20 bp, Artificial Sequence
  Description of Artificial Sequence: Synthetic oligonucleotide
  Target: LAMA2; (+) strand; PAM type: YTN; PAM sequence: TTG
gcatgacactcaatgtgtaa

SEQ ID NO: 389284 - DNA, 20 bp, Artificial Sequence
  Description of Artificial Sequence: Synthetic oligonucleotide
  Target: LAMA2; (+) strand; PAM type: YTN; PAM sequence: CTC
aatgtgtaagtgcccagttg

SEQ ID NO: 389285 - DNA, 20 bp, Artificial Sequence
  Description of Artificial Sequence: Synthetic oligonucleotide
  Target: LAMA2; (+) strand; PAM type: YTN; PAM sequence: TTG
aaatagtttccttatctttt

SEQ ID NO: 389286 - DNA, 20 bp, Artificial Sequence
  Description of Artificial Sequence: Synthetic oligonucleotide
  Target: LAMA2; (+) strand; PAM type: YTN; PAM sequence: TTT
ccttatcttttctttgaagg

SEQ ID NO: 389287 - DNA, 20 bp, Artificial Sequence
  Description of Artificial Sequence: Synthetic oligonucleotide
  Target: LAMA2; (+) strand; PAM type: YTN; PAM sequence: TTC
cttatcttttctttgaaggt

SEQ ID NO: 389288 - DNA, 20 bp, Artificial Sequence
  Description of Artificial Sequence: Synthetic oligonucleotide
  Target: LAMA2; (+) strand; PAM type: YTN; PAM sequence: CTT
atcttttctttgaaggtgag

SEQ ID NO: 389289 - DNA, 20 bp, Artificial Sequence
  Description of Artificial Sequence: Synthetic oligonucleotide
  Target: LAMA2; (+) strand; PAM type: YTN; PAM sequence: TTA
tcttttctttgaaggtgaga

SEQ ID NO: 389290 - DNA, 20 bp, Artificial Sequence
  Description of Artificial Sequence: Synthetic oligonucleotide
  Target: LAMA2; (+) strand; PAM type: YTN; PAM sequence: CTT
ttctttgaaggtgagaaggc

SEQ ID NO: 389291 - DNA, 20 bp, Artificial Sequence
  Description of Artificial Sequence: Synthetic oligonucleotide
  Target: LAMA2; (+) strand; PAM type: YTN; PAM sequence: TTT
tctttgaaggtgagaaggct

SEQ ID NO: 389292 - DNA, 20 bp, Artificial Sequence
  Description of Artificial Sequence: Synthetic oligonucleotide
  Target: LAMA2; (+) strand; PAM type: YTN; PAM sequence: TTT
ctttgaaggtgagaaggcta

SEQ ID NO: 389293 - DNA, 20 bp, Artificial Sequence
  Description of Artificial Sequence: Synthetic oligonucleotide
  Target: LAMA2; (+) strand; PAM type: YTN; PAM sequence: TTC
tttgaaggtgagaaggctaa

SEQ ID NO: 389294 - DNA, 20 bp, Artificial Sequence
  Description of Artificial Sequence: Synthetic oligonucleotide
  Target: LAMA2; (+) strand; PAM type: YTN; PAM sequence: CTT
tgaaggtgagaaggctaagt

SEQ ID NO: 389295 - DNA, 20 bp, Artificial Sequence
  Description of Artificial Sequence: Synthetic oligonucleotide
  Target: LAMA2; (+) strand; PAM type: YTN; PAM sequence: TTT
gaaggtgagaaggctaagtt

SEQ ID NO: 389296 - DNA, 20 bp, Artificial Sequence
  Description of Artificial Sequence: Synthetic oligonucleotide
  Target: LAMA2; (+) strand; PAM type: YTN; PAM sequence: TTG
aaggtgagaaggctaagttc

SEQ ID NO: 389297 - DNA, 20 bp, Artificial Sequence
  Description of Artificial Sequence: Synthetic oligonucleotide
  Target: LAMA2; (+) strand; PAM type: YTN; PAM sequence: CTA
agttccttttatatacaaaa

SEQ ID NO: 389298 - DNA, 20 bp, Artificial Sequence
  Description of Artificial Sequence: Synthetic oligonucleotide
  Target: LAMA2; (+) strand; PAM type: YTN; PAM sequence: TTC
cttttatatacaaaaatgtg

SEQ ID NO: 389299 - DNA, 20 bp, Artificial Sequence
  Description of Artificial Sequence: Synthetic oligonucleotide
  Target: LAMA2; (+) strand; PAM type: YTN; PAM sequence: CTT
ttatatacaaaaatgtgttc

SEQ ID NO: 389300 - DNA, 20 bp, Artificial Sequence
  Description of Artificial Sequence: Synthetic oligonucleotide
  Target: LAMA2; (+) strand; PAM type: YTN; PAM sequence: TTT
tatatacaaaaatgtgttct

SEQ ID NO: 389301 - DNA, 20 bp, Artificial Sequence
  Description of Artificial Sequence: Synthetic oligonucleotide
  Target: LAMA2; (+) strand; PAM type: YTN; PAM sequence: TTT
atatacaaaaatgtgttctg

SEQ ID NO: 389302 - DNA, 20 bp, Artificial Sequence
  Description of Artificial Sequence: Synthetic oligonucleotide
  Target: LAMA2; (+) strand; PAM type: YTN; PAM sequence: TTA
tatacaaaaatgtgttctgt

SEQ ID NO: 389303 - DNA, 20 bp, Artificial Sequence
  Description of Artificial Sequence: Synthetic oligonucleotide
  Target: LAMA2; (+) strand; PAM type: YTN; PAM sequence: TTC
tgtcgaacactatcactgca

SEQ ID NO: 389304 - DNA, 20 bp, Artificial Sequence
  Description of Artificial Sequence: Synthetic oligonucleotide
  Target: LAMA2; (+) strand; PAM type: YTN; PAM sequence: CTG
tcgaacactatcactgcaag

SEQ ID NO: 389305 - DNA, 20 bp, Artificial Sequence
  Description of Artificial Sequence: Synthetic oligonucleotide
  Target: LAMA2; (+) strand; PAM type: YTN; PAM sequence: CTA
tcactgcaaggccatttact

SEQ ID NO: 389306 - DNA, 20 bp, Artificial Sequence
  Description of Artificial Sequence: Synthetic oligonucleotide
  Target: LAMA2; (+) strand; PAM type: YTN; PAM sequence: CTG
caaggccatttactaaaaat

SEQ ID NO: 389307 - DNA, 20 bp, Artificial Sequence
  Description of Artificial Sequence: Synthetic oligonucleotide
  Target: LAMA2; (+) strand; PAM type: YTN; PAM sequence: TTT
actaaaaatgtttatgggat

SEQ ID NO: 389308 - DNA, 20 bp, Artificial Sequence
  Description of Artificial Sequence: Synthetic oligonucleotide
  Target: LAMA2; (+) strand; PAM type: YTN; PAM sequence: TTA
ctaaaaatgtttatgggatg

SEQ ID NO: 389309 - DNA, 20 bp, Artificial Sequence
  Description of Artificial Sequence: Synthetic oligonucleotide
  Target: LAMA2; (+) strand; PAM type: YTN; PAM sequence: CTA
aaaatgtttatgggatggaa

SEQ ID NO: 389310 - DNA, 20 bp, Artificial Sequence
  Description of Artificial Sequence: Synthetic oligonucleotide
  Target: LAMA2; (+) strand; PAM type: YTN; PAM sequence: TTT
atgggatggaatctttttca

SEQ ID NO: 389311 - DNA, 20 bp, Artificial Sequence
  Description of Artificial Sequence: Synthetic oligonucleotide
  Target: LAMA2; (+) strand; PAM type: YTN; PAM sequence: TTA
tgggatggaatctttttcag

SEQ ID NO: 389312 - DNA, 20 bp, Artificial Sequence
  Description of Artificial Sequence: Synthetic oligonucleotide
  Target: LAMA2; (+) strand; PAM type: YTN; PAM sequence: CTT
tttcagcacttgctgtcacc

SEQ ID NO: 389313 - DNA, 20 bp, Artificial Sequence
  Description of Artificial Sequence: Synthetic oligonucleotide
  Target: LAMA2; (+) strand; PAM type: YTN; PAM sequence: TTT
ttcagcacttgctgtcacct

SEQ ID NO: 389314 - DNA, 20 bp, Artificial Sequence
  Description of Artificial Sequence: Synthetic oligonucleotide
  Target: LAMA2; (+) strand; PAM type: YTN; PAM sequence: TTT
tcagcacttgctgtcacctc

SEQ ID NO: 389315 - DNA, 20 bp, Artificial Sequence
  Description of Artificial Sequence: Synthetic oligonucleotide
  Target: LAMA2; (+) strand; PAM type: YTN; PAM sequence: TTT
cagcacttgctgtcacctca

SEQ ID NO: 389316 - DNA, 20 bp, Artificial Sequence
  Description of Artificial Sequence: Synthetic oligonucleotide
  Target: LAMA2; (+) strand; PAM type: YTN; PAM sequence: TTC
agcacttgctgtcacctcag

SEQ ID NO: 389317 - DNA, 20 bp, Artificial Sequence
  Description of Artificial Sequence: Synthetic oligonucleotide
  Target: LAMA2; (+) strand; PAM type: YTN; PAM sequence: CTT
gctgtcacctcagcgggccc

SEQ ID NO: 389318 - DNA, 20 bp, Artificial Sequence
  Description of Artificial Sequence: Synthetic oligonucleotide
  Target: LAMA2; (+) strand; PAM type: YTN; PAM sequence: TTG
ctgtcacctcagcgggcccc

SEQ ID NO: 389319 - DNA, 20 bp, Artificial Sequence
  Description of Artificial Sequence: Synthetic oligonucleotide
  Target: LAMA2; (+) strand; PAM type: YTN; PAM sequence: CTG
tcacctcagcgggccccaga

SEQ ID NO: 389320 - DNA, 20 bp, Artificial Sequence
  Description of Artificial Sequence: Synthetic oligonucleotide
  Target: LAMA2; (+) strand; PAM type: YTN; PAM sequence: CTC
agcgggccccagagaggctt

SEQ ID NO: 389321 - DNA, 20 bp, Artificial Sequence
  Description of Artificial Sequence: Synthetic oligonucleotide
  Target: LAMA2; (+) strand; PAM type: YTN; PAM sequence: CTT
attcagctggcagagggcaa

SEQ ID NO: 389322 - DNA, 20 bp, Artificial Sequence
  Description of Artificial Sequence: Synthetic oligonucleotide
  Target: LAMA2; (+) strand; PAM type: YTN; PAM sequence: TTA
ttcagctggcagagggcaat

SEQ ID NO: 389323 - DNA, 20 bp, Artificial Sequence
  Description of Artificial Sequence: Synthetic oligonucleotide
  Target: LAMA2; (+) strand; PAM type: YTN; PAM sequence: TTC
agctggcagagggcaatctg

SEQ ID NO: 389324 - DNA, 20 bp, Artificial Sequence
  Description of Artificial Sequence: Synthetic oligonucleotide
  Target: LAMA2; (+) strand; PAM type: YTN; PAM sequence: CTG
gcagagggcaatctgaatac

SEQ ID NO: 389325 - DNA, 20 bp, Artificial Sequence
  Description of Artificial Sequence: Synthetic oligonucleotide
  Target: LAMA2; (+) strand; PAM type: YTN; PAM sequence: CTG
aatacactcgtgaccgaaat

SEQ ID NO: 389326 - DNA, 20 bp, Artificial Sequence
  Description of Artificial Sequence: Synthetic oligonucleotide
  Target: LAMA2; (+) strand; PAM type: YTN; PAM sequence: CTC
gtgaccgaaatgaacgagct

SEQ ID NO: 389327 - DNA, 20 bp, Artificial Sequence
  Description of Artificial Sequence: Synthetic oligonucleotide
  Target: LAMA2; (+) strand; PAM type: YTN; PAM sequence: CTG
ctgaccagggtaaggtggca

SEQ ID NO: 389328 - DNA, 20 bp, Artificial Sequence
  Description of Artificial Sequence: Synthetic oligonucleotide
  Target: LAMA2; (+) strand; PAM type: YTN; PAM sequence: CTG
accagggtaaggtggcaaaa

SEQ ID NO: 389329 - DNA, 20 bp, Artificial Sequence
  Description of Artificial Sequence: Synthetic oligonucleotide
  Target: LAMA2; (+) strand; PAM type: YTN; PAM sequence: TTA
tgaatcttctgaaagcagat

SEQ ID NO: 389330 - DNA, 20 bp, Artificial Sequence
  Description of Artificial Sequence: Synthetic oligonucleotide
  Target: LAMA2; (+) strand; PAM type: YTN; PAM sequence: CTT
ctgaaagcagatagattatg

SEQ ID NO: 389331 - DNA, 20 bp, Artificial Sequence
  Description of Artificial Sequence: Synthetic oligonucleotide
  Target: LAMA2; (+) strand; PAM type: YTN; PAM sequence: TTC
tgaaagcagatagattatgt

SEQ ID NO: 389332 - DNA, 20 bp, Artificial Sequence
  Description of Artificial Sequence: Synthetic oligonucleotide
  Target: LAMA2; (+) strand; PAM type: YTN; PAM sequence: CTG
aaagcagatagattatgtca

SEQ ID NO: 389333 - DNA, 20 bp, Artificial Sequence
  Description of Artificial Sequence: Synthetic oligonucleotide
  Target: LAMA2; (+) strand; PAM type: YTN; PAM sequence: TTA
tgtcaatgaaggaaaattac

SEQ ID NO: 389334 - DNA, 20 bp, Artificial Sequence
  Description of Artificial Sequence: Synthetic oligonucleotide
  Target: LAMA2; (+) strand; PAM type: YTN; PAM sequence: TTA
cttcaaagttctgaaatgca

SEQ ID NO: 389335 - DNA, 20 bp, Artificial Sequence
  Description of Artificial Sequence: Synthetic oligonucleotide
  Target: LAMA2; (+) strand; PAM type: YTN; PAM sequence: CTT
caaagttctgaaatgcaaat

SEQ ID NO: 389336 - DNA, 20 bp, Artificial Sequence
  Description of Artificial Sequence: Synthetic oligonucleotide
  Target: LAMA2; (+) strand; PAM type: YTN; PAM sequence: TTC
aaagttctgaaatgcaaatc

SEQ ID NO: 389337 - DNA, 20 bp, Artificial Sequence
  Description of Artificial Sequence: Synthetic oligonucleotide
  Target: LAMA2; (+) strand; PAM type: YTN; PAM sequence: TTC
tgaaatgcaaatcaccttct

SEQ ID NO: 389338 - DNA, 20 bp, Artificial Sequence
  Description of Artificial Sequence: Synthetic oligonucleotide
  Target: LAMA2; (+) strand; PAM type: YTN; PAM sequence: CTG
aaatgcaaatcaccttcttc

SEQ ID NO: 389339 - DNA, 20 bp, Artificial Sequence
  Description of Artificial Sequence: Synthetic oligonucleotide
  Target: LAMA2; (+) strand; PAM type: YTN; PAM sequence: CTT
cttcctaattcccaatttgg

SEQ ID NO: 389340 - DNA, 20 bp, Artificial Sequence
  Description of Artificial Sequence: Synthetic oligonucleotide
  Target: LAMA2; (+) strand; PAM type: YTN; PAM sequence: TTC
ttcctaattcccaatttggt

SEQ ID NO: 389341 - DNA, 20 bp, Artificial Sequence
  Description of Artificial Sequence: Synthetic oligonucleotide
  Target: LAMA2; (+) strand; PAM type: YTN; PAM sequence: CTT
cctaattcccaatttggtat

SEQ ID NO: 389342 - DNA, 20 bp, Artificial Sequence
  Description of Artificial Sequence: Synthetic oligonucleotide
  Target: LAMA2; (+) strand; PAM type: YTN; PAM sequence: TTC
ctaattcccaatttggtata

SEQ ID NO: 389343 - DNA, 20 bp, Artificial Sequence
  Description of Artificial Sequence: Synthetic oligonucleotide
  Target: LAMA2; (+) strand; PAM type: YTN; PAM sequence: CTA
attcccaatttggtatataa

SEQ ID NO: 389344 - DNA, 20 bp, Artificial Sequence
  Description of Artificial Sequence: Synthetic oligonucleotide
  Target: LAMA2; (+) strand; PAM type: YTN; PAM sequence: TTC
ccaatttggtatataaaata

SEQ ID NO: 389345 - DNA, 20 bp, Artificial Sequence
  Description of Artificial Sequence: Synthetic oligonucleotide
  Target: LAMA2; (+) strand; PAM type: YTN; PAM sequence: TTT
ggtatataaaatagatgtat

SEQ ID NO: 389346 - DNA, 20 bp, Artificial Sequence
  Description of Artificial Sequence: Synthetic oligonucleotide
  Target: LAMA2; (+) strand; PAM type: YTN; PAM sequence: TTG
gtatataaaatagatgtatt

SEQ ID NO: 389347 - DNA, 20 bp, Artificial Sequence
  Description of Artificial Sequence: Synthetic oligonucleotide
  Target: LAMA2; (+) strand; PAM type: YTN; PAM sequence: TTC
tgacttgctaattctgcttc

SEQ ID NO: 389348 - DNA, 20 bp, Artificial Sequence
  Description of Artificial Sequence: Synthetic oligonucleotide
  Target: LAMA2; (+) strand; PAM type: YTN; PAM sequence: CTG
acttgctaattctgcttcaa

SEQ ID NO: 389349 - DNA, 20 bp, Artificial Sequence
  Description of Artificial Sequence: Synthetic oligonucleotide
  Target: LAMA2; (+) strand; PAM type: YTN; PAM sequence: CTT
gctaattctgcttcaaatca

SEQ ID NO: 389350 - DNA, 20 bp, Artificial Sequence
  Description of Artificial Sequence: Synthetic oligonucleotide
  Target: LAMA2; (+) strand; PAM type: YTN; PAM sequence: TTG
ctaattctgcttcaaatcaa

SEQ ID NO: 389351 - DNA, 20 bp, Artificial Sequence
  Description of Artificial Sequence: Synthetic oligonucleotide
  Target: LAMA2; (+) strand; PAM type: YTN; PAM sequence: CTA
attctgcttcaaatcaaatc

SEQ ID NO: 389352 - DNA, 20 bp, Artificial Sequence
  Description of Artificial Sequence: Synthetic oligonucleotide
  Target: LAMA2; (+) strand; PAM type: YTN; PAM sequence: TTC
tgcttcaaatcaaatcatag

SEQ ID NO: 389353 - DNA, 20 bp, Artificial Sequence
  Description of Artificial Sequence: Synthetic oligonucleotide
  Target: LAMA2; (+) strand; PAM type: YTN; PAM sequence: CTG
cttcaaatcaaatcatagaa

SEQ ID NO: 389354 - DNA, 20 bp, Artificial Sequence
  Description of Artificial Sequence: Synthetic oligonucleotide
  Target: LAMA2; (+) strand; PAM type: YTN; PAM sequence: CTT
caaatcaaatcatagaaatc

SEQ ID NO: 389355 - DNA, 20 bp, Artificial Sequence
  Description of Artificial Sequence: Synthetic oligonucleotide
  Target: LAMA2; (+) strand; PAM type: YTN; PAM sequence: TTC
aaatcaaatcatagaaatca

SEQ ID NO: 389356 - DNA, 20 bp, Artificial Sequence
  Description of Artificial Sequence: Synthetic oligonucleotide
  Target: LAMA2; (+) strand; PAM type: YTN; PAM sequence: TTG
gggatacctggaaattgtca

SEQ ID NO: 389357 - DNA, 20 bp, Artificial Sequence
  Description of Artificial Sequence: Synthetic oligonucleotide
  Target: LAMA2; (+) strand; PAM type: YTN; PAM sequence: CTG
gaaattgtcaatggctaaaa

SEQ ID NO: 389358 - DNA, 20 bp, Artificial Sequence
  Description of Artificial Sequence: Synthetic oligonucleotide
  Target: LAMA2; (+) strand; PAM type: YTN; PAM sequence: TTG
tcaatggctaaaaagtccag

SEQ ID NO: 389359 - DNA, 20 bp, Artificial Sequence
  Description of Artificial Sequence: Synthetic oligonucleotide
  Target: LAMA2; (+) strand; PAM type: YTN; PAM sequence: CTA
aaaagtccagaatgacagtg

SEQ ID NO: 389360 - DNA, 20 bp, Artificial Sequence
  Description of Artificial Sequence: Synthetic oligonucleotide
  Target: LAMA2; (+) strand; PAM type: YTN; PAM sequence: TTT
tgagaactttattcagtagc

SEQ ID NO: 389361 - DNA, 20 bp, Artificial Sequence
  Description of Artificial Sequence: Synthetic oligonucleotide
  Target: LAMA2; (+) strand; PAM type: YTN; PAM sequence: TTT
gagaactttattcagtagcc

SEQ ID NO: 389362 - DNA, 20 bp, Artificial Sequence
  Description of Artificial Sequence: Synthetic oligonucleotide
  Target: LAMA2; (+) strand; PAM type: YTN; PAM sequence: TTG
agaactttattcagtagcct

SEQ ID NO: 389363 - DNA, 20 bp, Artificial Sequence
  Description of Artificial Sequence: Synthetic oligonucleotide
  Target: LAMA2; (+) strand; PAM type: YTN; PAM sequence: CTT
tattcagtagcctccgtggt

SEQ ID NO: 389364 - DNA, 20 bp, Artificial Sequence
  Description of Artificial Sequence: Synthetic oligonucleotide
  Target: LAMA2; (+) strand; PAM type: YTN; PAM sequence: TTT
attcagtagcctccgtggta

SEQ ID NO: 389365 - DNA, 20 bp, Artificial Sequence
  Description of Artificial Sequence: Synthetic oligonucleotide
  Target: LAMA2; (+) strand; PAM type: YTN; PAM sequence: TTA
ttcagtagcctccgtggtaa

SEQ ID NO: 389366 - DNA, 20 bp, Artificial Sequence
  Description of Artificial Sequence: Synthetic oligonucleotide
  Target: LAMA2; (+) strand; PAM type: YTN; PAM sequence: TTC
agtagcctccgtggtaaagt

SEQ ID NO: 389367 - DNA, 20 bp, Artificial Sequence
  Description of Artificial Sequence: Synthetic oligonucleotide
  Target: LAMA2; (+) strand; PAM type: YTN; PAM sequence: CTC
cgtggtaaagtttgtatctg

SEQ ID NO: 389368 - DNA, 20 bp, Artificial Sequence
  Description of Artificial Sequence: Synthetic oligonucleotide
  Target: LAMA2; (+) strand; PAM type: YTN; PAM sequence: TTT
gtatctgttctgatttccaa

SEQ ID NO: 389369 - DNA, 20 bp, Artificial Sequence
  Description of Artificial Sequence: Synthetic oligonucleotide
  Target: LAMA2; (+) strand; PAM type: YTN; PAM sequence: TTG
tatctgttctgatttccaaa

SEQ ID NO: 389370 - DNA, 20 bp, Artificial Sequence
  Description of Artificial Sequence: Synthetic oligonucleotide
  Target: LAMA2; (+) strand; PAM type: YTN; PAM sequence: CTG
ttctgatttccaaaagcact

SEQ ID NO: 389371 - DNA, 20 bp, Artificial Sequence
  Description of Artificial Sequence: Synthetic oligonucleotide
  Target: LAMA2; (+) strand; PAM type: YTN; PAM sequence: TTC
tgatttccaaaagcactatc

SEQ ID NO: 389372 - DNA, 20 bp, Artificial Sequence
  Description of Artificial Sequence: Synthetic oligonucleotide
  Target: LAMA2; (+) strand; PAM type: YTN; PAM sequence: CTG
atttccaaaagcactatctt

SEQ ID NO: 389373 - DNA, 20 bp, Artificial Sequence
  Description of Artificial Sequence: Synthetic oligonucleotide
  Target: LAMA2; (+) strand; PAM type: YTN; PAM sequence: TTT
ccaaaagcactatctttgat

SEQ ID NO: 389374 - DNA, 20 bp, Artificial Sequence
  Description of Artificial Sequence: Synthetic oligonucleotide
  Target: LAMA2; (+) strand; PAM type: YTN; PAM sequence: TTC
caaaagcactatctttgatt

SEQ ID NO: 389375 - DNA, 20 bp, Artificial Sequence
  Description of Artificial Sequence: Synthetic oligonucleotide
  Target: LAMA2; (+) strand; PAM type: YTN; PAM sequence: CTA
tctttgattgtgtaaagaga

SEQ ID NO: 389376 - DNA, 20 bp, Artificial Sequence
  Description of Artificial Sequence: Synthetic oligonucleotide
  Target: LAMA2; (+) strand; PAM type: YTN; PAM sequence: CTT
tgattgtgtaaagagaaaga

SEQ ID NO: 389377 - DNA, 20 bp, Artificial Sequence
  Description of Artificial Sequence: Synthetic oligonucleotide
  Target: LAMA2; (+) strand; PAM type: YTN; PAM sequence: TTT
gattgtgtaaagagaaagaa

SEQ ID NO: 389378 - DNA, 20 bp, Artificial Sequence
  Description of Artificial Sequence: Synthetic oligonucleotide
  Target: LAMA2; (+) strand; PAM type: YTN; PAM sequence: TTG
attgtgtaaagagaaagaaa

SEQ ID NO: 389379 - DNA, 20 bp, Artificial Sequence
  Description of Artificial Sequence: Synthetic oligonucleotide
  Target: LAMA2; (+) strand; PAM type: YTN; PAM sequence: TTG
tgtaaagagaaagaaaaaca

SEQ ID NO: 389380 - DNA, 20 bp, Artificial Sequence
  Description of Artificial Sequence: Synthetic oligonucleotide
  Target: LAMA2; (+) strand; PAM type: YTN; PAM sequence: CTT
gtggtctctttcatctcatc

SEQ ID NO: 389381 - DNA, 20 bp, Artificial Sequence
  Description of Artificial Sequence: Synthetic oligonucleotide
  Target: LAMA2; (+) strand; PAM type: YTN; PAM sequence: TTG
tggtctctttcatctcatcg

SEQ ID NO: 389382 - DNA, 20 bp, Artificial Sequence
  Description of Artificial Sequence: Synthetic oligonucleotide
  Target: LAMA2; (+) strand; PAM type: YTN; PAM sequence: CTC
tttcatctcatcgtgggatt

SEQ ID NO: 389383 - DNA, 20 bp, Artificial Sequence
  Description of Artificial Sequence: Synthetic oligonucleotide
  Target: LAMA2; (+) strand; PAM type: YTN; PAM sequence: CTT
tcatctcatcgtgggatttt

SEQ ID NO: 389384 - DNA, 20 bp, Artificial Sequence
  Description of Artificial Sequence: Synthetic oligonucleotide
  Target: LAMA2; (+) strand; PAM type: YTN; PAM sequence: TTT
catctcatcgtgggattttt

SEQ ID NO: 389385 - DNA, 20 bp, Artificial Sequence
  Description of Artificial Sequence: Synthetic oligonucleotide
  Target: LAMA2; (+) strand; PAM type: YTN; PAM sequence: TTC
atctcatcgtgggatttttg

SEQ ID NO: 389386 - DNA, 20 bp, Artificial Sequence
  Description of Artificial Sequence: Synthetic oligonucleotide
  Target: LAMA2; (+) strand; PAM type: YTN; PAM sequence: CTC
atcgtgggatttttgcatta

SEQ ID NO: 389387 - DNA, 20 bp, Artificial Sequence
  Description of Artificial Sequence: Synthetic oligonucleotide
  Target: LAMA2; (+) strand; PAM type: YTN; PAM sequence: TTT
ttgcattagtatagaaatac

SEQ ID NO: 389388 - DNA, 20 bp, Artificial Sequence
  Description of Artificial Sequence: Synthetic oligonucleotide
  Target: LAMA2; (+) strand; PAM type: YTN; PAM sequence: TTT
tgcattagtatagaaataca

SEQ ID NO: 389389 - DNA, 20 bp, Artificial Sequence
  Description of Artificial Sequence: Synthetic oligonucleotide
  Target: LAMA2; (+) strand; PAM type: YTN; PAM sequence: TTT
gcattagtatagaaatacag

SEQ ID NO: 389390 - DNA, 20 bp, Artificial Sequence
  Description of Artificial Sequence: Synthetic oligonucleotide
  Target: LAMA2; (+) strand; PAM type: YTN; PAM sequence: TTG
cattagtatagaaatacagt

SEQ ID NO: 389391 - DNA, 20 bp, Artificial Sequence
  Description of Artificial Sequence: Synthetic oligonucleotide
  Target: LAMA2; (+) strand; PAM type: YTN; PAM sequence: TTA
gtatagaaatacagtgtaaa

SEQ ID NO: 389392 - DNA, 20 bp, Artificial Sequence
  Description of Artificial Sequence: Synthetic oligonucleotide
  Target: LAMA2; (+) strand; PAM type: YTN; PAM sequence: CTT
tccacacaaaagaggaaatc

SEQ ID NO: 389393 - DNA, 20 bp, Artificial Sequence
  Description of Artificial Sequence: Synthetic oligonucleotide
  Target: LAMA2; (+) strand; PAM type: YTN; PAM sequence: TTT
ccacacaaaagaggaaatct

SEQ ID NO: 389394 - DNA, 20 bp, Artificial Sequence
  Description of Artificial Sequence: Synthetic oligonucleotide
  Target: LAMA2; (+) strand; PAM type: YTN; PAM sequence: TTC
cacacaaaagaggaaatctt

SEQ ID NO: 389395 - DNA, 20 bp, Artificial Sequence
  Description of Artificial Sequence: Synthetic oligonucleotide
  Target: LAMA2; (+) strand; PAM type: YTN; PAM sequence: CTT
ctctattgtgagactccaaa

SEQ ID NO: 389396 - DNA, 20 bp, Artificial Sequence
  Description of Artificial Sequence: Synthetic oligonucleotide
  Target: LAMA2; (+) strand; PAM type: YTN; PAM sequence: TTC
tctattgtgagactccaaag

SEQ ID NO: 389397 - DNA, 20 bp, Artificial Sequence
  Description of Artificial Sequence: Synthetic oligonucleotide
  Target: LAMA2; (+) strand; PAM type: YTN; PAM sequence: CTC
tattgtgagactccaaagtg

SEQ ID NO: 389398 - DNA, 20 bp, Artificial Sequence
  Description of Artificial Sequence: Synthetic oligonucleotide
  Target: LAMA2; (+) strand; PAM type: YTN; PAM sequence: CTA
ttgtgagactccaaagtgct

SEQ ID NO: 389399 - DNA, 20 bp, Artificial Sequence
  Description of Artificial Sequence: Synthetic oligonucleotide
  Target: LAMA2; (+) strand; PAM type: YTN; PAM sequence: TTG
tgagactccaaagtgcttaa

SEQ ID NO: 389400 - DNA, 20 bp, Artificial Sequence
  Description of Artificial Sequence: Synthetic oligonucleotide
  Target: LAMA2; (+) strand; PAM type: YTN; PAM sequence: CTC
caaagtgcttaagacacttt

SEQ ID NO: 389401 - DNA, 20 bp, Artificial Sequence
  Description of Artificial Sequence: Synthetic oligonucleotide
  Target: LAMA2; (+) strand; PAM type: YTN; PAM sequence: CTT
aagacactttttaaagtcag

SEQ ID NO: 389402 - DNA, 20 bp, Artificial Sequence
  Description of Artificial Sequence: Synthetic oligonucleotide
  Target: LAMA2; (+) strand; PAM type: YTN; PAM sequence: TTA
agacactttttaaagtcaga

SEQ ID NO: 389403 - DNA, 20 bp, Artificial Sequence
  Description of Artificial Sequence: Synthetic oligonucleotide
  Target: LAMA2; (+) strand; PAM type: YTN; PAM sequence: CTT
tttaaagtcagaatgtaaag

SEQ ID NO: 389404 - DNA, 20 bp, Artificial Sequence
  Description of Artificial Sequence: Synthetic oligonucleotide
  Target: LAMA2; (+) strand; PAM type: YTN; PAM sequence: TTT
ttaaagtcagaatgtaaagt

SEQ ID NO: 389405 - DNA, 20 bp, Artificial Sequence
  Description of Artificial Sequence: Synthetic oligonucleotide
  Target: LAMA2; (+) strand; PAM type: YTN; PAM sequence: TTT
taaagtcagaatgtaaagtc

SEQ ID NO: 389406 - DNA, 20 bp, Artificial Sequence
  Description of Artificial Sequence: Synthetic oligonucleotide
  Target: LAMA2; (+) strand; PAM type: YTN; PAM sequence: TTT
aaagtcagaatgtaaagtcc

SEQ ID NO: 389407 - DNA, 20 bp, Artificial Sequence
  Description of Artificial Sequence: Synthetic oligonucleotide
  Target: LAMA2; (+) strand; PAM type: YTN; PAM sequence: TTA
aagtcagaatgtaaagtcca

SEQ ID NO: 389408 - DNA, 20 bp, Artificial Sequence
  Description of Artificial Sequence: Synthetic oligonucleotide
  Target: LAMA2; (+) strand; PAM type: YTN; PAM sequence: TTG
catttatcaggctttttaaa

SEQ ID NO: 389409 - DNA, 20 bp, Artificial Sequence
  Description of Artificial Sequence: Synthetic oligonucleotide
  Target: LAMA2; (+) strand; PAM type: YTN; PAM sequence: TTT
atcaggctttttaaagaatt

SEQ ID NO: 389410 - DNA, 20 bp, Artificial Sequence
  Description of Artificial Sequence: Synthetic oligonucleotide
  Target: LAMA2; (+) strand; PAM type: YTN; PAM sequence: TTA
tcaggctttttaaagaattg

SEQ ID NO: 389411 - DNA, 20 bp, Artificial Sequence
  Description of Artificial Sequence: Synthetic oligonucleotide
  Target: LAMA2; (+) strand; PAM type: YTN; PAM sequence: CTT
tttaaagaattggaaatttt

SEQ ID NO: 389412 - DNA, 20 bp, Artificial Sequence
  Description of Artificial Sequence: Synthetic oligonucleotide
  Target: LAMA2; (+) strand; PAM type: YTN; PAM sequence: TTT
ttaaagaattggaaatttta

SEQ ID NO: 389413 - DNA, 20 bp, Artificial Sequence
  Description of Artificial Sequence: Synthetic oligonucleotide
  Target: LAMA2; (+) strand; PAM type: YTN; PAM sequence: TTT
taaagaattggaaattttaa

SEQ ID NO: 389414 - DNA, 20 bp, Artificial Sequence
  Description of Artificial Sequence: Synthetic oligonucleotide
  Target: LAMA2; (+) strand; PAM type: YTN; PAM sequence: TTT
aaagaattggaaattttaaa

SEQ ID NO: 389415 - DNA, 20 bp, Artificial Sequence
  Description of Artificial Sequence: Synthetic oligonucleotide
  Target: LAMA2; (+) strand; PAM type: YTN; PAM sequence: TTA
aagaattggaaattttaaat

SEQ ID NO: 389416 - DNA, 20 bp, Artificial Sequence
  Description of Artificial Sequence: Synthetic oligonucleotide
  Target: LAMA2; (+) strand; PAM type: YTN; PAM sequence: TTG
gaaattttaaattttcaaaa

SEQ ID NO: 389417 - DNA, 20 bp, Artificial Sequence
  Description of Artificial Sequence: Synthetic oligonucleotide
  Target: LAMA2; (+) strand; PAM type: YTN; PAM sequence: TTT
taaattttcaaaactgcgat

SEQ ID NO: 389418 - DNA, 20 bp, Artificial Sequence
  Description of Artificial Sequence: Synthetic oligonucleotide
  Target: LAMA2; (+) strand; PAM type: YTN; PAM sequence: TTT
aaattttcaaaactgcgatg

SEQ ID NO: 389419 - DNA, 20 bp, Artificial Sequence
  Description of Artificial Sequence: Synthetic oligonucleotide
  Target: LAMA2; (+) strand; PAM type: YTN; PAM sequence: TTA
aattttcaaaactgcgatgg

SEQ ID NO: 389420 - DNA, 20 bp, Artificial Sequence
  Description of Artificial Sequence: Synthetic oligonucleotide
  Target: LAMA2; (+) strand; PAM type: YTN; PAM sequence: TTT
tcaaaactgcgatggtatta

SEQ ID NO: 389421 - DNA, 20 bp, Artificial Sequence
  Description of Artificial Sequence: Synthetic oligonucleotide
  Target: LAMA2; (+) strand; PAM type: YTN; PAM sequence: TTT
caaaactgcgatggtattaa

SEQ ID NO: 389422 - DNA, 20 bp, Artificial Sequence
  Description of Artificial Sequence: Synthetic oligonucleotide
  Target: LAMA2; (+) strand; PAM type: YTN; PAM sequence: TTC
aaaactgcgatggtattaaa

SEQ ID NO: 389423 - DNA, 20 bp, Artificial Sequence
  Description of Artificial Sequence: Synthetic oligonucleotide
  Target: LAMA2; (+) strand; PAM type: YTN; PAM sequence: CTG
cgatggtattaaaaactttt

SEQ ID NO: 389424 - DNA, 20 bp, Artificial Sequence
  Description of Artificial Sequence: Synthetic oligonucleotide
  Target: LAMA2; (+) strand; PAM type: YTN; PAM sequence: TTA
aaaactttttgcagttagag

SEQ ID NO: 389425 - DNA, 20 bp, Artificial Sequence
  Description of Artificial Sequence: Synthetic oligonucleotide
  Target: LAMA2; (+) strand; PAM type: YTN; PAM sequence: CTT
tttgcagttagagaatgaag

SEQ ID NO: 389426 - DNA, 20 bp, Artificial Sequence
  Description of Artificial Sequence: Synthetic oligonucleotide
  Target: LAMA2; (+) strand; PAM type: YTN; PAM sequence: TTT
ttgcagttagagaatgaaga

SEQ ID NO: 389427 - DNA, 20 bp, Artificial Sequence
  Description of Artificial Sequence: Synthetic oligonucleotide
  Target: LAMA2; (+) strand; PAM type: YTN; PAM sequence: TTT
tgcagttagagaatgaagaa

SEQ ID NO: 389428 - DNA, 20 bp, Artificial Sequence
  Description of Artificial Sequence: Synthetic oligonucleotide
  Target: LAMA2; (+) strand; PAM type: YTN; PAM sequence: TTT
gcagttagagaatgaagaaa

SEQ ID NO: 389429 - DNA, 20 bp, Artificial Sequence
  Description of Artificial Sequence: Synthetic oligonucleotide
  Target: LAMA2; (+) strand; PAM type: YTN; PAM sequence: TTG
cagttagagaatgaagaaaa

SEQ ID NO: 389430 - DNA, 20 bp, Artificial Sequence
  Description of Artificial Sequence: Synthetic oligonucleotide
  Target: LAMA2; (+) strand; PAM type: YTN; PAM sequence: TTA
gagaatgaagaaaacaacat

SEQ ID NO: 389431 - DNA, 20 bp, Artificial Sequence
  Description of Artificial Sequence: Synthetic oligonucleotide
  Target: LAMA2; (+) strand; PAM type: YTN; PAM sequence: CTT
gtggccagaaatatgcatga

SEQ ID NO: 389432 - DNA, 20 bp, Artificial Sequence
  Description of Artificial Sequence: Synthetic oligonucleotide
  Target: LAMA2; (+) strand; PAM type: YTN; PAM sequence: TTG
tggccagaaatatgcatgaa

SEQ ID NO: 389433 - DNA, 20 bp, Artificial Sequence
  Description of Artificial Sequence: Synthetic oligonucleotide
  Target: LAMA2; (+) strand; PAM type: YTN; PAM sequence: CTA
gaaacggggctgcaaagtac

SEQ ID NO: 389434 - DNA, 20 bp, Artificial Sequence
  Description of Artificial Sequence: Synthetic oligonucleotide
  Target: LAMA2; (+) strand; PAM type: YTN; PAM sequence: CTG
caaagtacggatttaatttg

SEQ ID NO: 389435 - DNA, 20 bp, Artificial Sequence
  Description of Artificial Sequence: Synthetic oligonucleotide
  Target: LAMA2; (+) strand; PAM type: YTN; PAM sequence: TTT
aatttgattatctaagagct

SEQ ID NO: 389436 - DNA, 20 bp, Artificial Sequence
  Description of Artificial Sequence: Synthetic oligonucleotide
  Target: LAMA2; (+) strand; PAM type: YTN; PAM sequence: TTA
atttgattatctaagagctt

SEQ ID NO: 389437 - DNA, 20 bp, Artificial Sequence
  Description of Artificial Sequence: Synthetic oligonucleotide
  Target: LAMA2; (+) strand; PAM type: YTN; PAM sequence: TTT
gattatctaagagctttaaa

SEQ ID NO: 389438 - DNA, 20 bp, Artificial Sequence
  Description of Artificial Sequence: Synthetic oligonucleotide
  Target: LAMA2; (+) strand; PAM type: YTN; PAM sequence: TTG
attatctaagagctttaaat

SEQ ID NO: 389439 - DNA, 20 bp, Artificial Sequence
  Description of Artificial Sequence: Synthetic oligonucleotide
  Target: LAMA2; (+) strand; PAM type: YTN; PAM sequence: TTA
tctaagagctttaaatgata

SEQ ID NO: 389440 - DNA, 20 bp, Artificial Sequence
  Description of Artificial Sequence: Synthetic oligonucleotide
  Target: LAMA2; (+) strand; PAM type: YTN; PAM sequence: CTA
agagctttaaatgataaaga

SEQ ID NO: 389441 - DNA, 20 bp, Artificial Sequence
  Description of Artificial Sequence: Synthetic oligonucleotide
  Target: LAMA2; (+) strand; PAM type: YTN; PAM sequence: CTT
taaatgataaagagtattgg

SEQ ID NO: 389442 - DNA, 20 bp, Artificial Sequence
  Description of Artificial Sequence: Synthetic oligonucleotide
  Target: LAMA2; (+) strand; PAM type: YTN; PAM sequence: TTT
aaatgataaagagtattgga

SEQ ID NO: 389443 - DNA, 20 bp, Artificial Sequence
  Description of Artificial Sequence: Synthetic oligonucleotide
  Target: LAMA2; (+) strand; PAM type: YTN; PAM sequence: TTA
aatgataaagagtattggag

SEQ ID NO: 389444 - DNA, 20 bp, Artificial Sequence
  Description of Artificial Sequence: Synthetic oligonucleotide
  Target: LAMA2; (+) strand; PAM type: YTN; PAM sequence: TTG
gagctagaaggttcctgggg

SEQ ID NO: 389445 - DNA, 20 bp, Artificial Sequence
  Description of Artificial Sequence: Synthetic oligonucleotide
  Target: LAMA2; (+) strand; PAM type: YTN; PAM sequence: CTA
gaaggttcctggggattatc

SEQ ID NO: 389446 - DNA, 20 bp, Artificial Sequence
  Description of Artificial Sequence: Synthetic oligonucleotide
  Target: LAMA2; (+) strand; PAM type: YTN; PAM sequence: TTC
ctggggattatcgagtccac

SEQ ID NO: 389447 - DNA, 20 bp, Artificial Sequence
  Description of Artificial Sequence: Synthetic oligonucleotide
  Target: LAMA2; (+) strand; PAM type: YTN; PAM sequence: CTG
gggattatcgagtccacttt

SEQ ID NO: 389448 - DNA, 20 bp, Artificial Sequence
  Description of Artificial Sequence: Synthetic oligonucleotide
  Target: LAMA2; (+) strand; PAM type: YTN; PAM sequence: TTA
tcgagtccactttgtatttt

SEQ ID NO: 389449 - DNA, 20 bp, Artificial Sequence
  Description of Artificial Sequence: Synthetic oligonucleotide
  Target: LAMA2; (+) strand; PAM type: YTN; PAM sequence: CTT
tgtattttaaagaagagctg

SEQ ID NO: 389450 - DNA, 20 bp, Artificial Sequence
  Description of Artificial Sequence: Synthetic oligonucleotide
  Target: LAMA2; (+) strand; PAM type: YTN; PAM sequence: TTT
gtattttaaagaagagctgc

SEQ ID NO: 389451 - DNA, 20 bp, Artificial Sequence
  Description of Artificial Sequence: Synthetic oligonucleotide
  Target: LAMA2; (+) strand; PAM type: YTN; PAM sequence: TTG
tattttaaagaagagctgcc

SEQ ID NO: 389452 - DNA, 20 bp, Artificial Sequence
  Description of Artificial Sequence: Synthetic oligonucleotide
  Target: LAMA2; (+) strand; PAM type: YTN; PAM sequence: TTT
taaagaagagctgcctcggg

SEQ ID NO: 389453 - DNA, 20 bp, Artificial Sequence
  Description of Artificial Sequence: Synthetic oligonucleotide
  Target: LAMA2; (+) strand; PAM type: YTN; PAM sequence: TTT
aaagaagagctgcctcgggc

SEQ ID NO: 389454 - DNA, 20 bp, Artificial Sequence
  Description of Artificial Sequence: Synthetic oligonucleotide
  Target: LAMA2; (+) strand; PAM type: YTN; PAM sequence: TTA
aagaagagctgcctcgggcc

SEQ ID NO: 389455 - DNA, 20 bp, Artificial Sequence
  Description of Artificial Sequence: Synthetic oligonucleotide
  Target: LAMA2; (+) strand; PAM type: YTN; PAM sequence: CTG
cctcgggccatgacagtgaa

SEQ ID NO: 389456 - DNA, 20 bp, Artificial Sequence
  Description of Artificial Sequence: Synthetic oligonucleotide
  Target: LAMA2; (+) strand; PAM type: YTN; PAM sequence: CTC
gggccatgacagtgaaacga

SEQ ID NO: 389457 - DNA, 20 bp, Artificial Sequence
  Description of Artificial Sequence: Synthetic oligonucleotide
  Target: LAMA2; (+) strand; PAM type: YTN; PAM sequence: TTA
acaatggccatacaatttgc

SEQ ID NO: 389458 - DNA, 20 bp, Artificial Sequence
  Description of Artificial Sequence: Synthetic oligonucleotide
  Target: LAMA2; (+) strand; PAM type: YTN; PAM sequence: TTT
gctaaactcagggacttaag

SEQ ID NO: 389459 - DNA, 20 bp, Artificial Sequence
  Description of Artificial Sequence: Synthetic oligonucleotide
  Target: LAMA2; (+) strand; PAM type: YTN; PAM sequence: TTG
ctaaactcagggacttaagc

SEQ ID NO: 389460 - DNA, 20 bp, Artificial Sequence
  Description of Artificial Sequence: Synthetic oligonucleotide
  Target: LAMA2; (+) strand; PAM type: YTN; PAM sequence: CTA
aactcagggacttaagctgg

SEQ ID NO: 389461 - DNA, 20 bp, Artificial Sequence
  Description of Artificial Sequence: Synthetic oligonucleotide
  Target: LAMA2; (+) strand; PAM type: YTN; PAM sequence: CTC
agggacttaagctggaccca

SEQ ID NO: 389462 - DNA, 20 bp, Artificial Sequence
  Description of Artificial Sequence: Synthetic oligonucleotide
  Target: LAMA2; (+) strand; PAM type: YTN; PAM sequence: CTT
aagctggacccagtctcaag

SEQ ID NO: 389463 - DNA, 20 bp, Artificial Sequence
  Description of Artificial Sequence: Synthetic oligonucleotide
  Target: LAMA2; (+) strand; PAM type: YTN; PAM sequence: TTA
agctggacccagtctcaaga

SEQ ID NO: 389464 - DNA, 20 bp, Artificial Sequence
  Description of Artificial Sequence: Synthetic oligonucleotide
  Target: LAMA2; (+) strand; PAM type: YTN; PAM sequence: CTG
gacccagtctcaagattccc

SEQ ID NO: 389465 - DNA, 20 bp, Artificial Sequence
  Description of Artificial Sequence: Synthetic oligonucleotide
  Target: LAMA2; (+) strand; PAM type: YTN; PAM sequence: CTC
aagattcccactggcccagt

SEQ ID NO: 389466 - DNA, 20 bp, Artificial Sequence
  Description of Artificial Sequence: Synthetic oligonucleotide
  Target: LAMA2; (+) strand; PAM type: YTN; PAM sequence: TTC
ccactggcccagtacttttt

SEQ ID NO: 389467 - DNA, 20 bp, Artificial Sequence
  Description of Artificial Sequence: Synthetic oligonucleotide
  Target: LAMA2; (+) strand; PAM type: YTN; PAM sequence: CTG
gcccagtactttttctacat

SEQ ID NO: 389468 - DNA, 20 bp, Artificial Sequence
  Description of Artificial Sequence: Synthetic oligonucleotide
  Target: LAMA2; (+) strand; PAM type: YTN; PAM sequence: CTT
tttctacatagcctgctgtc

SEQ ID NO: 389469 - DNA, 20 bp, Artificial Sequence
  Description of Artificial Sequence: Synthetic oligonucleotide
  Target: LAMA2; (+) strand; PAM type: YTN; PAM sequence: TTT
ttctacatagcctgctgtcg

SEQ ID NO: 389470 - DNA, 20 bp, Artificial Sequence
  Description of Artificial Sequence: Synthetic oligonucleotide
  Target: LAMA2; (+) strand; PAM type: YTN; PAM sequence: TTT
tctacatagcctgctgtcgg

SEQ ID NO: 389471 - DNA, 20 bp, Artificial Sequence
  Description of Artificial Sequence: Synthetic oligonucleotide
  Target: LAMA2; (+) strand; PAM type: YTN; PAM sequence: TTT
ctacatagcctgctgtcggt

SEQ ID NO: 389472 - DNA, 20 bp, Artificial Sequence
  Description of Artificial Sequence: Synthetic oligonucleotide
  Target: LAMA2; (+) strand; PAM type: YTN; PAM sequence: TTC
tacatagcctgctgtcggtt

SEQ ID NO: 389473 - DNA, 20 bp, Artificial Sequence
  Description of Artificial Sequence: Synthetic oligonucleotide
  Target: LAMA2; (+) strand; PAM type: YTN; PAM sequence: CTA
catagcctgctgtcggttta

SEQ ID NO: 389474 - DNA, 20 bp, Artificial Sequence
  Description of Artificial Sequence: Synthetic oligonucleotide
  Target: LAMA2; (+) strand; PAM type: YTN; PAM sequence: CTG
ctgtcggtttaggaaaatat

SEQ ID NO: 389475 - DNA, 20 bp, Artificial Sequence
  Description of Artificial Sequence: Synthetic oligonucleotide
  Target: LAMA2; (+) strand; PAM type: YTN; PAM sequence: CTG
tcggtttaggaaaatatcca

SEQ ID NO: 389476 - DNA, 20 bp, Artificial Sequence
  Description of Artificial Sequence: Synthetic oligonucleotide
  Target: LAMA2; (+) strand; PAM type: YTN; PAM sequence: TTT
aggaaaatatccacaggaaa

SEQ ID NO: 389477 - DNA, 20 bp, Artificial Sequence
  Description of Artificial Sequence: Synthetic oligonucleotide
  Target: LAMA2; (+) strand; PAM type: YTN; PAM sequence: TTA
ggaaaatatccacaggaaaa

SEQ ID NO: 389478 - DNA, 20 bp, Artificial Sequence
  Description of Artificial Sequence: Synthetic oligonucleotide
  Target: LAMA2; (+) strand; PAM type: YTN; PAM sequence: CTT
ctgagcacataatgctaaac

SEQ ID NO: 389479 - DNA, 20 bp, Artificial Sequence
  Description of Artificial Sequence: Synthetic oligonucleotide
  Target: LAMA2; (+) strand; PAM type: YTN; PAM sequence: TTC
tgagcacataatgctaaaca

SEQ ID NO: 389480 - DNA, 20 bp, Artificial Sequence
  Description of Artificial Sequence: Synthetic oligonucleotide
  Target: LAMA2; (+) strand; PAM type: YTN; PAM sequence: CTG
agcacataatgctaaacaac

SEQ ID NO: 389481 - DNA, 20 bp, Artificial Sequence
  Description of Artificial Sequence: Synthetic oligonucleotide
  Target: LAMA2; (+) strand; PAM type: YTN; PAM sequence: CTA
aacaacggccctgatgttac

SEQ ID NO: 389482 - DNA, 20 bp, Artificial Sequence
  Description of Artificial Sequence: Synthetic oligonucleotide
  Target: LAMA2; (+) strand; PAM type: YTN; PAM sequence: CTG
atgttacaatagcatactaa

SEQ ID NO: 389483 - DNA, 20 bp, Artificial Sequence
  Description of Artificial Sequence: Synthetic oligonucleotide
  Target: LAMA2; (+) strand; PAM type: YTN; PAM sequence: TTA
caatagcatactaaacactt

SEQ ID NO: 389484 - DNA, 20 bp, Artificial Sequence
  Description of Artificial Sequence: Synthetic oligonucleotide
  Target: LAMA2; (+) strand; PAM type: YTN; PAM sequence: CTA
aacactttttcagaatctca

SEQ ID NO: 389485 - DNA, 20 bp, Artificial Sequence
  Description of Artificial Sequence: Synthetic oligonucleotide
  Target: LAMA2; (+) strand; PAM type: YTN; PAM sequence: CTT
tttcagaatctcatagcaac

SEQ ID NO: 389486 - DNA, 20 bp, Artificial Sequence
  Description of Artificial Sequence: Synthetic oligonucleotide
  Target: LAMA2; (+) strand; PAM type: YTN; PAM sequence: TTT
ttcagaatctcatagcaaca

SEQ ID NO: 389487 - DNA, 20 bp, Artificial Sequence
  Description of Artificial Sequence: Synthetic oligonucleotide
  Target: LAMA2; (+) strand; PAM type: YTN; PAM sequence: TTT
tcagaatctcatagcaacaa

SEQ ID NO: 389488 - DNA, 20 bp, Artificial Sequence
  Description of Artificial Sequence: Synthetic oligonucleotide
  Target: LAMA2; (+) strand; PAM type: YTN; PAM sequence: TTT
cagaatctcatagcaacaat

SEQ ID NO: 389489 - DNA, 20 bp, Artificial Sequence
  Description of Artificial Sequence: Synthetic oligonucleotide
  Target: LAMA2; (+) strand; PAM type: YTN; PAM sequence: TTC
agaatctcatagcaacaata

SEQ ID NO: 389490 - DNA, 20 bp, Artificial Sequence
  Description of Artificial Sequence: Synthetic oligonucleotide
  Target: LAMA2; (+) strand; PAM type: YTN; PAM sequence: CTC
atagcaacaatatagaatgt

SEQ ID NO: 389491 - DNA, 20 bp, Artificial Sequence
  Description of Artificial Sequence: Synthetic oligonucleotide
  Target: LAMA2; (+) strand; PAM type: YTN; PAM sequence: TTT
cttgccaaatgtatgtagac

SEQ ID NO: 389492 - DNA, 20 bp, Artificial Sequence
  Description of Artificial Sequence: Synthetic oligonucleotide
  Target: LAMA2; (+) strand; PAM type: YTN; PAM sequence: TTC
ttgccaaatgtatgtagaca

SEQ ID NO: 389493 - DNA, 20 bp, Artificial Sequence
  Description of Artificial Sequence: Synthetic oligonucleotide
  Target: LAMA2; (+) strand; PAM type: YTN; PAM sequence: CTT
gccaaatgtatgtagacatt

SEQ ID NO: 389494 - DNA, 20 bp, Artificial Sequence
  Description of Artificial Sequence: Synthetic oligonucleotide
  Target: LAMA2; (+) strand; PAM type: YTN; PAM sequence: TTG
ccaaatgtatgtagacatta

SEQ ID NO: 389495 - DNA, 20 bp, Artificial Sequence
  Description of Artificial Sequence: Synthetic oligonucleotide
  Target: LAMA2; (+) strand; PAM type: YTN; PAM sequence: TTA
gattaaattgagtgcattta

SEQ ID NO: 389496 - DNA, 20 bp, Artificial Sequence
  Description of Artificial Sequence: Synthetic oligonucleotide
  Target: LAMA2; (+) strand; PAM type: YTN; PAM sequence: TTA
aattgagtgcatttatctca

SEQ ID NO: 389497 - DNA, 20 bp, Artificial Sequence
  Description of Artificial Sequence: Synthetic oligonucleotide
  Target: LAMA2; (+) strand; PAM type: YTN; PAM sequence: TTG
agtgcatttatctcatatta

SEQ ID NO: 389498 - DNA, 20 bp, Artificial Sequence
  Description of Artificial Sequence: Synthetic oligonucleotide
  Target: LAMA2; (+) strand; PAM type: YTN; PAM sequence: TTT
atctcatattaatttaatat

SEQ ID NO: 389499 - DNA, 20 bp, Artificial Sequence
  Description of Artificial Sequence: Synthetic oligonucleotide
  Target: LAMA2; (+) strand; PAM type: YTN; PAM sequence: TTA
tctcatattaatttaatatg

SEQ ID NO: 389500 - DNA, 20 bp, Artificial Sequence
  Description of Artificial Sequence: Synthetic oligonucleotide
  Target: LAMA2; (+) strand; PAM type: YTN; PAM sequence: CTC
atattaatttaatatgaaat

SEQ ID NO: 389501 - DNA, 20 bp, Artificial Sequence
  Description of Artificial Sequence: Synthetic oligonucleotide
  Target: LAMA2; (+) strand; PAM type: YTN; PAM sequence: TTA
atttaatatgaaataattca

SEQ ID NO: 389502 - DNA, 20 bp, Artificial Sequence
  Description of Artificial Sequence: Synthetic oligonucleotide
  Target: LAMA2; (+) strand; PAM type: YTN; PAM sequence: TTT
aatatgaaataattcatatt

SEQ ID NO: 389503 - DNA, 20 bp, Artificial Sequence
  Description of Artificial Sequence: Synthetic oligonucleotide
  Target: LAMA2; (+) strand; PAM type: YTN; PAM sequence: TTA
atatgaaataattcatattt

SEQ ID NO: 389504 - DNA, 20 bp, Artificial Sequence
  Description of Artificial Sequence: Synthetic oligonucleotide
  Target: LAMA2; (+) strand; PAM type: YTN; PAM sequence: TTC
atatttgttataaataagaa

SEQ ID NO: 389505 - DNA, 20 bp, Artificial Sequence
  Description of Artificial Sequence: Synthetic oligonucleotide
  Target: LAMA2; (+) strand; PAM type: YTN; PAM sequence: TTT
gttataaataagaattttct

SEQ ID NO: 389506 - DNA, 20 bp, Artificial Sequence
  Description of Artificial Sequence: Synthetic oligonucleotide
  Target: LAMA2; (+) strand; PAM type: YTN; PAM sequence: TTG
ttataaataagaattttcta

SEQ ID NO: 389507 - DNA, 20 bp, Artificial Sequence
  Description of Artificial Sequence: Synthetic oligonucleotide
  Target: LAMA2; (+) strand; PAM type: YTN; PAM sequence: TTA
taaataagaattttctaaca

SEQ ID NO: 389508 - DNA, 20 bp, Artificial Sequence
  Description of Artificial Sequence: Synthetic oligonucleotide
  Target: LAMA2; (+) strand; PAM type: YTN; PAM sequence: TTT
tctaacaggtcatggtagaa

SEQ ID NO: 389509 - DNA, 20 bp, Artificial Sequence
  Description of Artificial Sequence: Synthetic oligonucleotide
  Target: LAMA2; (+) strand; PAM type: YTN; PAM sequence: TTT
ctaacaggtcatggtagaat

SEQ ID NO: 389510 - DNA, 20 bp, Artificial Sequence
  Description of Artificial Sequence: Synthetic oligonucleotide
  Target: LAMA2; (+) strand; PAM type: YTN; PAM sequence: TTC
taacaggtcatggtagaata

SEQ ID NO: 389511 - DNA, 20 bp, Artificial Sequence
  Description of Artificial Sequence: Synthetic oligonucleotide
  Target: LAMA2; (+) strand; PAM type: YTN; PAM sequence: CTA
acaggtcatggtagaataaa

SEQ ID NO: 389512 - DNA, 20 bp, Artificial Sequence
  Description of Artificial Sequence: Synthetic oligonucleotide
  Target: LAMA2; (+) strand; PAM type: YTN; PAM sequence: TTT
aacaagcacacataaatgtt

SEQ ID NO: 389513 - DNA, 20 bp, Artificial Sequence
  Description of Artificial Sequence: Synthetic oligonucleotide
  Target: LAMA2; (+) strand; PAM type: YTN; PAM sequence: TTA
acaagcacacataaatgttc

SEQ ID NO: 389514 - DNA, 20 bp, Artificial Sequence
  Description of Artificial Sequence: Synthetic oligonucleotide
  Target: LAMA2; (+) strand; PAM type: YTN; PAM sequence: TTC
ataacatacaaagcctaagt

SEQ ID NO: 389515 - DNA, 20 bp, Artificial Sequence
  Description of Artificial Sequence: Synthetic oligonucleotide
  Target: LAMA2; (+) strand; PAM type: YTN; PAM sequence: CTA
agttacgtgttggcagatga

SEQ ID NO: 389516 - DNA, 20 bp, Artificial Sequence
  Description of Artificial Sequence: Synthetic oligonucleotide
  Target: LAMA2; (+) strand; PAM type: YTN; PAM sequence: TTA
cgtgttggcagatgaaaaat

SEQ ID NO: 389517 - DNA, 20 bp, Artificial Sequence
  Description of Artificial Sequence: Synthetic oligonucleotide
  Target: LAMA2; (+) strand; PAM type: YTN; PAM sequence: TTG
gcagatgaaaaatatgaatg

SEQ ID NO: 389518 - DNA, 20 bp, Artificial Sequence
  Description of Artificial Sequence: Synthetic oligonucleotide
  Target: LAMA2; (+) strand; PAM type: YTN; PAM sequence: CTC
aatctgtcttcaaagaactt

SEQ ID NO: 389519 - DNA, 20 bp, Artificial Sequence
  Description of Artificial Sequence: Synthetic oligonucleotide
  Target: LAMA2; (+) strand; PAM type: YTN; PAM sequence: CTG
tcttcaaagaactttgagat

SEQ ID NO: 389520 - DNA, 20 bp, Artificial Sequence
  Description of Artificial Sequence: Synthetic oligonucleotide
  Target: LAMA2; (+) strand; PAM type: YTN; PAM sequence: CTT
caaagaactttgagatgtgt

SEQ ID NO: 389521 - DNA, 20 bp, Artificial Sequence
  Description of Artificial Sequence: Synthetic oligonucleotide
  Target: LAMA2; (+) strand; PAM type: YTN; PAM sequence: TTC
aaagaactttgagatgtgtg

SEQ ID NO: 389522 - DNA, 20 bp, Artificial Sequence
  Description of Artificial Sequence: Synthetic oligonucleotide
  Target: LAMA2; (+) strand; PAM type: YTN; PAM sequence: CTT
tgagatgtgtgtgtgtgtgt

SEQ ID NO: 389523 - DNA, 20 bp, Artificial Sequence
  Description of Artificial Sequence: Synthetic oligonucleotide
  Target: LAMA2; (+) strand; PAM type: YTN; PAM sequence: TTT
gagatgtgtgtgtgtgtgtg

SEQ ID NO: 389524 - DNA, 20 bp, Artificial Sequence
  Description of Artificial Sequence: Synthetic oligonucleotide
  Target: LAMA2; (+) strand; PAM type: YTN; PAM sequence: TTG
agatgtgtgtgtgtgtgtgt

SEQ ID NO: 389525 - DNA, 20 bp, Artificial Sequence
  Description of Artificial Sequence: Synthetic oligonucleotide
  Target: LAMA2; (+) strand; PAM type: YTN; PAM sequence: TTT
aagtgtatggaggaccatat

SEQ ID NO: 389526 - DNA, 20 bp, Artificial Sequence
  Description of Artificial Sequence: Synthetic oligonucleotide
  Target: LAMA2; (+) strand; PAM type: YTN; PAM sequence: TTA
agtgtatggaggaccatatt

SEQ ID NO: 389527 - DNA, 20 bp, Artificial Sequence
  Description of Artificial Sequence: Synthetic oligonucleotide
  Target: LAMA2; (+) strand; PAM type: YTN; PAM sequence: TTA
gacaactgcatgcaggtata

SEQ ID NO: 389528 - DNA, 20 bp, Artificial Sequence
  Description of Artificial Sequence: Synthetic oligonucleotide
  Target: LAMA2; (+) strand; PAM type: YTN; PAM sequence: CTG
catgcaggtatataataaaa

SEQ ID NO: 389529 - DNA, 20 bp, Artificial Sequence
  Description of Artificial Sequence: Synthetic oligonucleotide
  Target: LAMA2; (+) strand; PAM type: YTN; PAM sequence: TTC
tggagaaatatttaataata

SEQ ID NO: 389530 - DNA, 20 bp, Artificial Sequence
  Description of Artificial Sequence: Synthetic oligonucleotide
  Target: LAMA2; (+) strand; PAM type: YTN; PAM sequence: CTG
gagaaatatttaataataga

SEQ ID NO: 389531 - DNA, 20 bp, Artificial Sequence
  Description of Artificial Sequence: Synthetic oligonucleotide
  Target: LAMA2; (+) strand; PAM type: YTN; PAM sequence: TTT
aataatagaataatttcatc

SEQ ID NO: 389532 - DNA, 20 bp, Artificial Sequence
  Description of Artificial Sequence: Synthetic oligonucleotide
  Target: LAMA2; (+) strand; PAM type: YTN; PAM sequence: TTA
ataatagaataatttcatct

SEQ ID NO: 389533 - DNA, 20 bp, Artificial Sequence
  Description of Artificial Sequence: Synthetic oligonucleotide
  Target: LAMA2; (+) strand; PAM type: YTN; PAM sequence: TTT
catctgcttaggggtaatta

SEQ ID NO: 389534 - DNA, 20 bp, Artificial Sequence
  Description of Artificial Sequence: Synthetic oligonucleotide
  Target: LAMA2; (+) strand; PAM type: YTN; PAM sequence: TTC
atctgcttaggggtaattag

SEQ ID NO: 389535 - DNA, 20 bp, Artificial Sequence
  Description of Artificial Sequence: Synthetic oligonucleotide
  Target: LAMA2; (+) strand; PAM type: YTN; PAM sequence: CTG
cttaggggtaattagaaaaa

SEQ ID NO: 389536 - DNA, 20 bp, Artificial Sequence
  Description of Artificial Sequence: Synthetic oligonucleotide
  Target: LAMA2; (+) strand; PAM type: YTN; PAM sequence: CTT
aggggtaattagaaaaaatt

SEQ ID NO: 389537 - DNA, 20 bp, Artificial Sequence
  Description of Artificial Sequence: Synthetic oligonucleotide
  Target: LAMA2; (+) strand; PAM type: YTN; PAM sequence: TTA
ggggtaattagaaaaaattt

SEQ ID NO: 389538 - DNA, 20 bp, Artificial Sequence
  Description of Artificial Sequence: Synthetic oligonucleotide
  Target: LAMA2; (+) strand; PAM type: YTN; PAM sequence: TTA
gaaaaaatttcatgtaataa

SEQ ID NO: 389539 - DNA, 20 bp, Artificial Sequence
  Description of Artificial Sequence: Synthetic oligonucleotide
  Target: LAMA2; (+) strand; PAM type: YTN; PAM sequence: TTT
catgtaataaatggcatttc

SEQ ID NO: 389540 - DNA, 20 bp, Artificial Sequence
  Description of Artificial Sequence: Synthetic oligonucleotide
  Target: LAMA2; (+) strand; PAM type: YTN; PAM sequence: TTC
atgtaataaatggcatttca

SEQ ID NO: 389541 - DNA, 20 bp, Artificial Sequence
  Description of Artificial Sequence: Synthetic oligonucleotide
  Target: LAMA2; (+) strand; PAM type: YTN; PAM sequence: TTT
cattcattcattcacttaac

SEQ ID NO: 389542 - DNA, 20 bp, Artificial Sequence
  Description of Artificial Sequence: Synthetic oligonucleotide
  Target: LAMA2; (+) strand; PAM type: YTN; PAM sequence: TTC
attcattcattcacttaact

SEQ ID NO: 389543 - DNA, 20 bp, Artificial Sequence
  Description of Artificial Sequence: Synthetic oligonucleotide
  Target: LAMA2; (+) strand; PAM type: YTN; PAM sequence: TTC
attcattcacttaactaata

SEQ ID NO: 389544 - DNA, 20 bp, Artificial Sequence
  Description of Artificial Sequence: Synthetic oligonucleotide
  Target: LAMA2; (+) strand; PAM type: YTN; PAM sequence: TTC
attcacttaactaatacttt

SEQ ID NO: 389545 - DNA, 20 bp, Artificial Sequence
  Description of Artificial Sequence: Synthetic oligonucleotide
  Target: LAMA2; (+) strand; PAM type: YTN; PAM sequence: TTC
acttaactaatactttttgg

SEQ ID NO: 389546 - DNA, 20 bp, Artificial Sequence
  Description of Artificial Sequence: Synthetic oligonucleotide
  Target: LAMA2; (+) strand; PAM type: YTN; PAM sequence: CTT
aactaatactttttgggagt

SEQ ID NO: 389547 - DNA, 20 bp, Artificial Sequence
  Description of Artificial Sequence: Synthetic oligonucleotide
  Target: LAMA2; (+) strand; PAM type: YTN; PAM sequence: TTA
actaatactttttgggagtc

SEQ ID NO: 389548 - DNA, 20 bp, Artificial Sequence
  Description of Artificial Sequence: Synthetic oligonucleotide
  Target: LAMA2; (+) strand; PAM type: YTN; PAM sequence: CTA
atactttttgggagtctctc

SEQ ID NO: 389549 - DNA, 20 bp, Artificial Sequence
  Description of Artificial Sequence: Synthetic oligonucleotide
  Target: LAMA2; (+) strand; PAM type: YTN; PAM sequence: CTT
tttgggagtctctcatgttc

SEQ ID NO: 389550 - DNA, 20 bp, Artificial Sequence
  Description of Artificial Sequence: Synthetic oligonucleotide
  Target: LAMA2; (+) strand; PAM type: YTN; PAM sequence: TTT
ttgggagtctctcatgttct

SEQ ID NO: 389551 - DNA, 20 bp, Artificial Sequence
  Description of Artificial Sequence: Synthetic oligonucleotide
  Target: LAMA2; (+) strand; PAM type: YTN; PAM sequence: TTT
tgggagtctctcatgttcta

SEQ ID NO: 389552 - DNA, 20 bp, Artificial Sequence
  Description of Artificial Sequence: Synthetic oligonucleotide
  Target: LAMA2; (+) strand; PAM type: YTN; PAM sequence: TTT
gggagtctctcatgttctag

SEQ ID NO: 389553 - DNA, 20 bp, Artificial Sequence
  Description of Artificial Sequence: Synthetic oligonucleotide
  Target: LAMA2; (+) strand; PAM type: YTN; PAM sequence: TTG
ggagtctctcatgttctagg

SEQ ID NO: 389554 - DNA, 20 bp, Artificial Sequence
  Description of Artificial Sequence: Synthetic oligonucleotide
  Target: LAMA2; (+) strand; PAM type: YTN; PAM sequence: CTC
tcatgttctaggaattatga

SEQ ID NO: 389555 - DNA, 20 bp, Artificial Sequence
  Description of Artificial Sequence: Synthetic oligonucleotide
  Target: LAMA2; (+) strand; PAM type: YTN; PAM sequence: CTC
atgttctaggaattatgaca

SEQ ID NO: 389556 - DNA, 20 bp, Artificial Sequence
  Description of Artificial Sequence: Synthetic oligonucleotide
  Target: LAMA2; (+) strand; PAM type: YTN; PAM sequence: TTC
taggaattatgacactgggg

SEQ ID NO: 389557 - DNA, 20 bp, Artificial Sequence
  Description of Artificial Sequence: Synthetic oligonucleotide
  Target: LAMA2; (+) strand; PAM type: YTN; PAM sequence: CTA
ggaattatgacactggggat

SEQ ID NO: 389558 - DNA, 20 bp, Artificial Sequence
  Description of Artificial Sequence: Synthetic oligonucleotide
  Target: LAMA2; (+) strand; PAM type: YTN; PAM sequence: TTA
tgacactggggatagaagtg

SEQ ID NO: 389559 - DNA, 20 bp, Artificial Sequence
  Description of Artificial Sequence: Synthetic oligonucleotide
  Target: LAMA2; (+) strand; PAM type: YTN; PAM sequence: CTG
gggatagaagtgtgagcaaa

SEQ ID NO: 389560 - DNA, 20 bp, Artificial Sequence
  Description of Artificial Sequence: Synthetic oligonucleotide
  Target: LAMA2; (+) strand; PAM type: YTN; PAM sequence: CTG
cgcagtccttgccctcattg

SEQ ID NO: 389561 - DNA, 20 bp, Artificial Sequence
  Description of Artificial Sequence: Synthetic oligonucleotide
  Target: LAMA2; (+) strand; PAM type: YTN; PAM sequence: CTT
gccctcattggcttagtata

SEQ ID NO: 389562 - DNA, 20 bp, Artificial Sequence
  Description of Artificial Sequence: Synthetic oligonucleotide
  Target: LAMA2; (+) strand; PAM type: YTN; PAM sequence: TTG
ccctcattggcttagtatag

SEQ ID NO: 389563 - DNA, 20 bp, Artificial Sequence
  Description of Artificial Sequence: Synthetic oligonucleotide
  Target: LAMA2; (+) strand; PAM type: YTN; PAM sequence: CTC
attggcttagtatagtctaa

SEQ ID NO: 389564 - DNA, 20 bp, Artificial Sequence
  Description of Artificial Sequence: Synthetic oligonucleotide
  Target: LAMA2; (+) strand; PAM type: YTN; PAM sequence: TTG
gcttagtatagtctaatgat

SEQ ID NO: 389565 - DNA, 20 bp, Artificial Sequence
  Description of Artificial Sequence: Synthetic oligonucleotide
  Target: LAMA2; (+) strand; PAM type: YTN; PAM sequence: CTT
agtatagtctaatgatctga

SEQ ID NO: 389566 - DNA, 20 bp, Artificial Sequence
  Description of Artificial Sequence: Synthetic oligonucleotide
  Target: LAMA2; (+) strand; PAM type: YTN; PAM sequence: TTA
gtatagtctaatgatctgac

SEQ ID NO: 389567 - DNA, 20 bp, Artificial Sequence
  Description of Artificial Sequence: Synthetic oligonucleotide
  Target: LAMA2; (+) strand; PAM type: YTN; PAM sequence: CTA
atgatctgacgttagagaca

SEQ ID NO: 389568 - DNA, 20 bp, Artificial Sequence
  Description of Artificial Sequence: Synthetic oligonucleotide
  Target: LAMA2; (+) strand; PAM type: YTN; PAM sequence: CTG
acgttagagacacaaaaagt

SEQ ID NO: 389569 - DNA, 20 bp, Artificial Sequence
  Description of Artificial Sequence: Synthetic oligonucleotide
  Target: LAMA2; (+) strand; PAM type: YTN; PAM sequence: TTA
gagacacaaaaagtatttct

SEQ ID NO: 389570 - DNA, 20 bp, Artificial Sequence
  Description of Artificial Sequence: Synthetic oligonucleotide
  Target: LAMA2; (+) strand; PAM type: YTN; PAM sequence: TTT
ctttttttttttttttttga

SEQ ID NO: 389571 - DNA, 20 bp, Artificial Sequence
  Description of Artificial Sequence: Synthetic oligonucleotide
  Target: LAMA2; (+) strand; PAM type: YTN; PAM sequence: TTC
tttttttttttttttttgag

SEQ ID NO: 389572 - DNA, 20 bp, Artificial Sequence
  Description of Artificial Sequence: Synthetic oligonucleotide
  Target: LAMA2; (+) strand; PAM type: YTN; PAM sequence: CTT
tttttttttttttttgagac

SEQ ID NO: 389573 - DNA, 20 bp, Artificial Sequence
  Description of Artificial Sequence: Synthetic oligonucleotide
  Target: LAMA2; (+) strand; PAM type: YTN; PAM sequence: TTT
ttttttttttttttgagaca

SEQ ID NO: 389574 - DNA, 20 bp, Artificial Sequence
  Description of Artificial Sequence: Synthetic oligonucleotide
  Target: LAMA2; (+) strand; PAM type: YTN; PAM sequence: TTT
tttttttttttttgagacag

SEQ ID NO: 389575 - DNA, 20 bp, Artificial Sequence
  Description of Artificial Sequence: Synthetic oligonucleotide
  Target: LAMA2; (+) strand; PAM type: YTN; PAM sequence: TTT
ttttttttttttgagacaga

SEQ ID NO: 389576 - DNA, 20 bp, Artificial Sequence
  Description of Artificial Sequence: Synthetic oligonucleotide
  Target: LAMA2; (+) strand; PAM type: YTN; PAM sequence: TTT
tttttttttttgagacagag

SEQ ID NO: 389577 - DNA, 20 bp, Artificial Sequence
  Description of Artificial Sequence: Synthetic oligonucleotide
  Target: LAMA2; (+) strand; PAM type: YTN; PAM sequence: TTT
ttttttttttgagacagagt

SEQ ID NO: 389578 - DNA, 20 bp, Artificial Sequence
  Description of Artificial Sequence: Synthetic oligonucleotide
  Target: LAMA2; (+) strand; PAM type: YTN; PAM sequence: TTT
tttttttttgagacagagtc

SEQ ID NO: 389579 - DNA, 20 bp, Artificial Sequence
  Description of Artificial Sequence: Synthetic oligonucleotide
  Target: LAMA2; (+) strand; PAM type: YTN; PAM sequence: TTT
ttttttttgagacagagtct

SEQ ID NO: 389580 - DNA, 20 bp, Artificial Sequence
  Description of Artificial Sequence: Synthetic oligonucleotide
  Target: LAMA2; (+) strand; PAM type: YTN; PAM sequence: TTT
tttttttgagacagagtctt

SEQ ID NO: 389581 - DNA, 20 bp, Artificial Sequence
  Description of Artificial Sequence: Synthetic oligonucleotide
  Target: LAMA2; (+) strand; PAM type: YTN; PAM sequence: TTT
ttttttgagacagagtcttg

SEQ ID NO: 389582 - DNA, 20 bp, Artificial Sequence
  Description of Artificial Sequence: Synthetic oligonucleotide
  Target: LAMA2; (+) strand; PAM type: YTN; PAM sequence: TTT
tttttgagacagagtcttgc

SEQ ID NO: 389583 - DNA, 20 bp, Artificial Sequence
  Description of Artificial Sequence: Synthetic oligonucleotide
  Target: LAMA2; (+) strand; PAM type: YTN; PAM sequence: TTT
ttttgagacagagtcttgct

SEQ ID NO: 389584 - DNA, 20 bp, Artificial Sequence
  Description of Artificial Sequence: Synthetic oligonucleotide
  Target: LAMA2; (+) strand; PAM type: YTN; PAM sequence: TTT
tttgagacagagtcttgctc

SEQ ID NO: 389585 - DNA, 20 bp, Artificial Sequence
  Description of Artificial Sequence: Synthetic oligonucleotide
  Target: LAMA2; (+) strand; PAM type: YTN; PAM sequence: TTT
ttgagacagagtcttgctct

SEQ ID NO: 389586 - DNA, 20 bp, Artificial Sequence
  Description of Artificial Sequence: Synthetic oligonucleotide
  Target: LAMA2; (+) strand; PAM type: YTN; PAM sequence: TTT
tgagacagagtcttgctctg

SEQ ID NO: 389587 - DNA, 20 bp, Artificial Sequence
  Description of Artificial Sequence: Synthetic oligonucleotide
  Target: LAMA2; (+) strand; PAM type: YTN; PAM sequence: TTT
gagacagagtcttgctctgt

SEQ ID NO: 389588 - DNA, 20 bp, Artificial Sequence
  Description of Artificial Sequence: Synthetic oligonucleotide
  Target: LAMA2; (+) strand; PAM type: YTN; PAM sequence: TTG
agacagagtcttgctctgtc

SEQ ID NO: 389589 - DNA, 20 bp, Artificial Sequence
  Description of Artificial Sequence: Synthetic oligonucleotide
  Target: LAMA2; (+) strand; PAM type: YTN; PAM sequence: CTT
gctctgtcgccgaggctgga

SEQ ID NO: 389590 - DNA, 20 bp, Artificial Sequence
  Description of Artificial Sequence: Synthetic oligonucleotide
  Target: LAMA2; (+) strand; PAM type: YTN; PAM sequence: TTG
ctctgtcgccgaggctggag

SEQ ID NO: 389591 - DNA, 20 bp, Artificial Sequence
  Description of Artificial Sequence: Synthetic oligonucleotide
  Target: LAMA2; (+) strand; PAM type: YTN; PAM sequence: CTC
tgtcgccgaggctggagtgc

SEQ ID NO: 389592 - DNA, 20 bp, Artificial Sequence
  Description of Artificial Sequence: Synthetic oligonucleotide
  Target: LAMA2; (+) strand; PAM type: YTN; PAM sequence: CTG
tcgccgaggctggagtgcag

SEQ ID NO: 389593 - DNA, 20 bp, Artificial Sequence
  Description of Artificial Sequence: Synthetic oligonucleotide
  Target: LAMA2; (+) strand; PAM type: YTN; PAM sequence: CTG
gagtgcagtggtgcgatctt

SEQ ID NO: 389594 - DNA, 20 bp, Artificial Sequence
  Description of Artificial Sequence: Synthetic oligonucleotide
  Target: LAMA2; (+) strand; PAM type: YTN; PAM sequence: CTT
ggctcactgcaacctccgcc

SEQ ID NO: 389595 - DNA, 20 bp, Artificial Sequence
  Description of Artificial Sequence: Synthetic oligonucleotide
  Target: LAMA2; (+) strand; PAM type: YTN; PAM sequence: TTG
gctcactgcaacctccgcct

SEQ ID NO: 389596 - DNA, 20 bp, Artificial Sequence
  Description of Artificial Sequence: Synthetic oligonucleotide
  Target: LAMA2; (+) strand; PAM type: YTN; PAM sequence: CTC
actgcaacctccgcctcccg

SEQ ID NO: 389597 - DNA, 20 bp, Artificial Sequence
  Description of Artificial Sequence: Synthetic oligonucleotide
  Target: LAMA2; (+) strand; PAM type: YTN; PAM sequence: CTG
caacctccgcctcccgggtt

SEQ ID NO: 389598 - DNA, 20 bp, Artificial Sequence
  Description of Artificial Sequence: Synthetic oligonucleotide
  Target: LAMA2; (+) strand; PAM type: YTN; PAM sequence: CTC
cgcctcccgggttcaagtga

SEQ ID NO: 389599 - DNA, 20 bp, Artificial Sequence
  Description of Artificial Sequence: Synthetic oligonucleotide
  Target: LAMA2; (+) strand; PAM type: YTN; PAM sequence: CTC
ccgggttcaagtgattttcc

SEQ ID NO: 389600 - DNA, 20 bp, Artificial Sequence
  Description of Artificial Sequence: Synthetic oligonucleotide
  Target: LAMA2; (+) strand; PAM type: YTN; PAM sequence: TTC
aagtgattttcctgcctcag

SEQ ID NO: 389601 - DNA, 20 bp, Artificial Sequence
  Description of Artificial Sequence: Synthetic oligonucleotide
  Target: LAMA2; (+) strand; PAM type: YTN; PAM sequence: TTT
tcctgcctcagcctcccaag

SEQ ID NO: 389602 - DNA, 20 bp, Artificial Sequence
  Description of Artificial Sequence: Synthetic oligonucleotide
  Target: LAMA2; (+) strand; PAM type: YTN; PAM sequence: TTT
cctgcctcagcctcccaagt

SEQ ID NO: 389603 - DNA, 20 bp, Artificial Sequence
  Description of Artificial Sequence: Synthetic oligonucleotide
  Target: LAMA2; (+) strand; PAM type: YTN; PAM sequence: TTC
ctgcctcagcctcccaagta

SEQ ID NO: 389604 - DNA, 20 bp, Artificial Sequence
  Description of Artificial Sequence: Synthetic oligonucleotide
  Target: LAMA2; (+) strand; PAM type: YTN; PAM sequence: CTG
cctcagcctcccaagtagct

SEQ ID NO: 389605 - DNA, 20 bp, Artificial Sequence
  Description of Artificial Sequence: Synthetic oligonucleotide
  Target: LAMA2; (+) strand; PAM type: YTN; PAM sequence: CTC
agcctcccaagtagctggga

SEQ ID NO: 389606 - DNA, 20 bp, Artificial Sequence
  Description of Artificial Sequence: Synthetic oligonucleotide
  Target: LAMA2; (+) strand; PAM type: YTN; PAM sequence: CTC
ccaagtagctgggattacag

SEQ ID NO: 389607 - DNA, 20 bp, Artificial Sequence
  Description of Artificial Sequence: Synthetic oligonucleotide
  Target: LAMA2; (+) strand; PAM type: YTN; PAM sequence: CTG
ggattacaggtgtgtgccac

SEQ ID NO: 389608 - DNA, 20 bp, Artificial Sequence
  Description of Artificial Sequence: Synthetic oligonucleotide
  Target: LAMA2; (+) strand; PAM type: YTN; PAM sequence: TTA
caggtgtgtgccaccacacc

SEQ ID NO: 389609 - DNA, 20 bp, Artificial Sequence
  Description of Artificial Sequence: Synthetic oligonucleotide
  Target: LAMA2; (+) strand; PAM type: YTN; PAM sequence: CTG
gctaattttttttgtatttt

SEQ ID NO: 389610 - DNA, 20 bp, Artificial Sequence
  Description of Artificial Sequence: Synthetic oligonucleotide
  Target: LAMA2; (+) strand; PAM type: YTN; PAM sequence: CTA
attttttttgtatttttagt

SEQ ID NO: 389611 - DNA, 20 bp, Artificial Sequence
  Description of Artificial Sequence: Synthetic oligonucleotide
  Target: LAMA2; (+) strand; PAM type: YTN; PAM sequence: TTT
tttttgtatttttagtagag

SEQ ID NO: 389612 - DNA, 20 bp, Artificial Sequence
  Description of Artificial Sequence: Synthetic oligonucleotide
  Target: LAMA2; (+) strand; PAM type: YTN; PAM sequence: TTT
ttttgtatttttagtagaga

SEQ ID NO: 389613 - DNA, 20 bp, Artificial Sequence
  Description of Artificial Sequence: Synthetic oligonucleotide
  Target: LAMA2; (+) strand; PAM type: YTN; PAM sequence: TTT
tttgtatttttagtagagac

SEQ ID NO: 389614 - DNA, 20 bp, Artificial Sequence
  Description of Artificial Sequence: Synthetic oligonucleotide
  Target: LAMA2; (+) strand; PAM type: YTN; PAM sequence: TTT
ttgtatttttagtagagacg

SEQ ID NO: 389615 - DNA, 20 bp, Artificial Sequence
  Description of Artificial Sequence: Synthetic oligonucleotide
  Target: LAMA2; (+) strand; PAM type: YTN; PAM sequence: TTT
tgtatttttagtagagacgg

SEQ ID NO: 389616 - DNA, 20 bp, Artificial Sequence
  Description of Artificial Sequence: Synthetic oligonucleotide
  Target: LAMA2; (+) strand; PAM type: YTN; PAM sequence: TTT
gtatttttagtagagacggg

SEQ ID NO: 389617 - DNA, 20 bp, Artificial Sequence
  Description of Artificial Sequence: Synthetic oligonucleotide
  Target: LAMA2; (+) strand; PAM type: YTN; PAM sequence: TTG
tatttttagtagagacgggt

SEQ ID NO: 389618 - DNA, 20 bp, Artificial Sequence
  Description of Artificial Sequence: Synthetic oligonucleotide
  Target: LAMA2; (+) strand; PAM type: YTN; PAM sequence: TTT
ttagtagagacgggtttcac

SEQ ID NO: 389619 - DNA, 20 bp, Artificial Sequence
  Description of Artificial Sequence: Synthetic oligonucleotide
  Target: LAMA2; (+) strand; PAM type: YTN; PAM sequence: TTT
tagtagagacgggtttcacc

SEQ ID NO: 389620 - DNA, 20 bp, Artificial Sequence
  Description of Artificial Sequence: Synthetic oligonucleotide
  Target: LAMA2; (+) strand; PAM type: YTN; PAM sequence: TTT
agtagagacgggtttcacca

SEQ ID NO: 389621 - DNA, 20 bp, Artificial Sequence
  Description of Artificial Sequence: Synthetic oligonucleotide
  Target: LAMA2; (+) strand; PAM type: YTN; PAM sequence: TTA
gtagagacgggtttcaccat

SEQ ID NO: 389622 - DNA, 20 bp, Artificial Sequence
  Description of Artificial Sequence: Synthetic oligonucleotide
  Target: LAMA2; (+) strand; PAM type: YTN; PAM sequence: TTT
caccatgttcgtcaggctgg

SEQ ID NO: 389623 - DNA, 20 bp, Artificial Sequence
  Description of Artificial Sequence: Synthetic oligonucleotide
  Target: LAMA2; (+) strand; PAM type: YTN; PAM sequence: TTC
accatgttcgtcaggctggt

SEQ ID NO: 389624 - DNA, 20 bp, Artificial Sequence
  Description of Artificial Sequence: Synthetic oligonucleotide
  Target: LAMA2; (+) strand; PAM type: YTN; PAM sequence: TTC
gtcaggctggtcttgaactc

SEQ ID NO: 389625 - DNA, 20 bp, Artificial Sequence
  Description of Artificial Sequence: Synthetic oligonucleotide
  Target: LAMA2; (+) strand; PAM type: YTN; PAM sequence: CTG
gtcttgaactcctgaccttg

SEQ ID NO: 389626 - DNA, 20 bp, Artificial Sequence
  Description of Artificial Sequence: Synthetic oligonucleotide
  Target: LAMA2; (+) strand; PAM type: YTN; PAM sequence: CTT
gaactcctgaccttgtgatt

SEQ ID NO: 389627 - DNA, 20 bp, Artificial Sequence
  Description of Artificial Sequence: Synthetic oligonucleotide
  Target: LAMA2; (+) strand; PAM type: YTN; PAM sequence: TTG
aactcctgaccttgtgattc

SEQ ID NO: 389628 - DNA, 20 bp, Artificial Sequence
  Description of Artificial Sequence: Synthetic oligonucleotide
  Target: LAMA2; (+) strand; PAM type: YTN; PAM sequence: CTC
ctgaccttgtgattcgcctg

SEQ ID NO: 389629 - DNA, 20 bp, Artificial Sequence
  Description of Artificial Sequence: Synthetic oligonucleotide
  Target: LAMA2; (+) strand; PAM type: YTN; PAM sequence: CTG
accttgtgattcgcctgcct

SEQ ID NO: 389630 - DNA, 20 bp, Artificial Sequence
  Description of Artificial Sequence: Synthetic oligonucleotide
  Target: LAMA2; (+) strand; PAM type: YTN; PAM sequence: CTT
gtgattcgcctgccttggcc

SEQ ID NO: 389631 - DNA, 20 bp, Artificial Sequence
  Description of Artificial Sequence: Synthetic oligonucleotide
  Target: LAMA2; (+) strand; PAM type: YTN; PAM sequence: TTG
tgattcgcctgccttggcct

SEQ ID NO: 389632 - DNA, 20 bp, Artificial Sequence
  Description of Artificial Sequence: Synthetic oligonucleotide
  Target: LAMA2; (+) strand; PAM type: YTN; PAM sequence: TTC
gcctgccttggcctcccaaa

SEQ ID NO: 389633 - DNA, 20 bp, Artificial Sequence
  Description of Artificial Sequence: Synthetic oligonucleotide
  Target: LAMA2; (+) strand; PAM type: YTN; PAM sequence: CTG
ccttggcctcccaaaatgct

SEQ ID NO: 389634 - DNA, 20 bp, Artificial Sequence
  Description of Artificial Sequence: Synthetic oligonucleotide
  Target: LAMA2; (+) strand; PAM type: YTN; PAM sequence: CTT
ggcctcccaaaatgctggga

SEQ ID NO: 389635 - DNA, 20 bp, Artificial Sequence
  Description of Artificial Sequence: Synthetic oligonucleotide
  Target: LAMA2; (+) strand; PAM type: YTN; PAM sequence: TTG
gcctcccaaaatgctgggat

SEQ ID NO: 389636 - DNA, 20 bp, Artificial Sequence
  Description of Artificial Sequence: Synthetic oligonucleotide
  Target: LAMA2; (+) strand; PAM type: YTN; PAM sequence: CTC
ccaaaatgctgggattacag

SEQ ID NO: 389637 - DNA, 20 bp, Artificial Sequence
  Description of Artificial Sequence: Synthetic oligonucleotide
  Target: LAMA2; (+) strand; PAM type: YTN; PAM sequence: CTG
ggattacaggcatgagccac

SEQ ID NO: 389638 - DNA, 20 bp, Artificial Sequence
  Description of Artificial Sequence: Synthetic oligonucleotide
  Target: LAMA2; (+) strand; PAM type: YTN; PAM sequence: TTA
caggcatgagccaccgcacc

SEQ ID NO: 389639 - DNA, 20 bp, Artificial Sequence
  Description of Artificial Sequence: Synthetic oligonucleotide
  Target: LAMA2; (+) strand; PAM type: YTN; PAM sequence: CTG
gccacaagaagtatttcatt

SEQ ID NO: 389640 - DNA, 20 bp, Artificial Sequence
  Description of Artificial Sequence: Synthetic oligonucleotide
  Target: LAMA2; (+) strand; PAM type: YTN; PAM sequence: TTT
cattaagagtgtcagatctt

SEQ ID NO: 389641 - DNA, 20 bp, Artificial Sequence
  Description of Artificial Sequence: Synthetic oligonucleotide
  Target: LAMA2; (+) strand; PAM type: YTN; PAM sequence: TTC
attaagagtgtcagatcttt

SEQ ID NO: 389642 - DNA, 20 bp, Artificial Sequence
  Description of Artificial Sequence: Synthetic oligonucleotide
  Target: LAMA2; (+) strand; PAM type: YTN; PAM sequence: TTA
agagtgtcagatctttatta

SEQ ID NO: 389643 - DNA, 20 bp, Artificial Sequence
  Description of Artificial Sequence: Synthetic oligonucleotide
  Target: LAMA2; (+) strand; PAM type: YTN; PAM sequence: CTT
tattatgtctcaacctatac

SEQ ID NO: 389644 - DNA, 20 bp, Artificial Sequence
  Description of Artificial Sequence: Synthetic oligonucleotide
  Target: LAMA2; (+) strand; PAM type: YTN; PAM sequence: TTT
attatgtctcaacctatact

SEQ ID NO: 389645 - DNA, 20 bp, Artificial Sequence
  Description of Artificial Sequence: Synthetic oligonucleotide
  Target: LAMA2; (+) strand; PAM type: YTN; PAM sequence: TTA
ttatgtctcaacctatactc

SEQ ID NO: 389646 - DNA, 20 bp, Artificial Sequence
  Description of Artificial Sequence: Synthetic oligonucleotide
  Target: LAMA2; (+) strand; PAM type: YTN; PAM sequence: TTA
tgtctcaacctatactcttt

SEQ ID NO: 389647 - DNA, 20 bp, Artificial Sequence
  Description of Artificial Sequence: Synthetic oligonucleotide
  Target: LAMA2; (+) strand; PAM type: YTN; PAM sequence: CTC
aacctatactctttaccctt

SEQ ID NO: 389648 - DNA, 20 bp, Artificial Sequence
  Description of Artificial Sequence: Synthetic oligonucleotide
  Target: LAMA2; (+) strand; PAM type: YTN; PAM sequence: CTA
tactctttaccctttccagc

SEQ ID NO: 389649 - DNA, 20 bp, Artificial Sequence
  Description of Artificial Sequence: Synthetic oligonucleotide
  Target: LAMA2; (+) strand; PAM type: YTN; PAM sequence: CTC
tttaccctttccagcagatt

SEQ ID NO: 389650 - DNA, 20 bp, Artificial Sequence
  Description of Artificial Sequence: Synthetic oligonucleotide
  Target: LAMA2; (+) strand; PAM type: YTN; PAM sequence: CTT
taccctttccagcagattgt

SEQ ID NO: 389651 - DNA, 20 bp, Artificial Sequence
  Description of Artificial Sequence: Synthetic oligonucleotide
  Target: LAMA2; (+) strand; PAM type: YTN; PAM sequence: TTT
accctttccagcagattgtc

SEQ ID NO: 389652 - DNA, 20 bp, Artificial Sequence
  Description of Artificial Sequence: Synthetic oligonucleotide
  Target: LAMA2; (+) strand; PAM type: YTN; PAM sequence: TTA
ccctttccagcagattgtct

SEQ ID NO: 389653 - DNA, 20 bp, Artificial Sequence
  Description of Artificial Sequence: Synthetic oligonucleotide
  Target: LAMA2; (+) strand; PAM type: YTN; PAM sequence: CTT
tccagcagattgtctcatgc

SEQ ID NO: 389654 - DNA, 20 bp, Artificial Sequence
  Description of Artificial Sequence: Synthetic oligonucleotide
  Target: LAMA2; (+) strand; PAM type: YTN; PAM sequence: TTT
ccagcagattgtctcatgct

SEQ ID NO: 389655 - DNA, 20 bp, Artificial Sequence
  Description of Artificial Sequence: Synthetic oligonucleotide
  Target: LAMA2; (+) strand; PAM type: YTN; PAM sequence: TTC
cagcagattgtctcatgcta

SEQ ID NO: 389656 - DNA, 20 bp, Artificial Sequence
  Description of Artificial Sequence: Synthetic oligonucleotide
  Target: LAMA2; (+) strand; PAM type: YTN; PAM sequence: TTG
tctcatgctatgttttttaa

SEQ ID NO: 389657 - DNA, 20 bp, Artificial Sequence
  Description of Artificial Sequence: Synthetic oligonucleotide
  Target: LAMA2; (+) strand; PAM type: YTN; PAM sequence: CTC
atgctatgttttttaaacag

SEQ ID NO: 389658 - DNA, 20 bp, Artificial Sequence
  Description of Artificial Sequence: Synthetic oligonucleotide
  Target: LAMA2; (+) strand; PAM type: YTN; PAM sequence: CTA
tgttttttaaacagacttta

SEQ ID NO: 389659 - DNA, 20 bp, Artificial Sequence
  Description of Artificial Sequence: Synthetic oligonucleotide
  Target: LAMA2; (+) strand; PAM type: YTN; PAM sequence: TTT
tttaaacagactttattttt

SEQ ID NO: 389660 - DNA, 20 bp, Artificial Sequence
  Description of Artificial Sequence: Synthetic oligonucleotide
  Target: LAMA2; (+) strand; PAM type: YTN; PAM sequence: TTT
ttaaacagactttatttttt

SEQ ID NO: 389661 - DNA, 20 bp, Artificial Sequence
  Description of Artificial Sequence: Synthetic oligonucleotide
  Target: LAMA2; (+) strand; PAM type: YTN; PAM sequence: TTT
taaacagactttatttttta

SEQ ID NO: 389662 - DNA, 20 bp, Artificial Sequence
  Description of Artificial Sequence: Synthetic oligonucleotide
  Target: LAMA2; (+) strand; PAM type: YTN; PAM sequence: TTT
aaacagactttattttttag

SEQ ID NO: 389663 - DNA, 20 bp, Artificial Sequence
  Description of Artificial Sequence: Synthetic oligonucleotide
  Target: LAMA2; (+) strand; PAM type: YTN; PAM sequence: TTA
aacagactttattttttaga

SEQ ID NO: 389664 - DNA, 20 bp, Artificial Sequence
  Description of Artificial Sequence: Synthetic oligonucleotide
  Target: LAMA2; (+) strand; PAM type: YTN; PAM sequence: CTT
tattttttagaacagcttaa

SEQ ID NO: 389665 - DNA, 20 bp, Artificial Sequence
  Description of Artificial Sequence: Synthetic oligonucleotide
  Target: LAMA2; (+) strand; PAM type: YTN; PAM sequence: TTT
attttttagaacagcttaaa

SEQ ID NO: 389666 - DNA, 20 bp, Artificial Sequence
  Description of Artificial Sequence: Synthetic oligonucleotide
  Target: LAMA2; (+) strand; PAM type: YTN; PAM sequence: TTA
ttttttagaacagcttaaag

SEQ ID NO: 389667 - DNA, 20 bp, Artificial Sequence
  Description of Artificial Sequence: Synthetic oligonucleotide
  Target: LAMA2; (+) strand; PAM type: YTN; PAM sequence: TTT
tttagaacagcttaaagttc

SEQ ID NO: 389668 - DNA, 20 bp, Artificial Sequence
  Description of Artificial Sequence: Synthetic oligonucleotide
  Target: LAMA2; (+) strand; PAM type: YTN; PAM sequence: TTT
ttagaacagcttaaagttca

SEQ ID NO: 389669 - DNA, 20 bp, Artificial Sequence
  Description of Artificial Sequence: Synthetic oligonucleotide
  Target: LAMA2; (+) strand; PAM type: YTN; PAM sequence: TTT
tagaacagcttaaagttcaa

SEQ ID NO: 389670 - DNA, 20 bp, Artificial Sequence
  Description of Artificial Sequence: Synthetic oligonucleotide
  Target: LAMA2; (+) strand; PAM type: YTN; PAM sequence: TTT
agaacagcttaaagttcaaa

SEQ ID NO: 389671 - DNA, 20 bp, Artificial Sequence
  Description of Artificial Sequence: Synthetic oligonucleotide
  Target: LAMA2; (+) strand; PAM type: YTN; PAM sequence: TTA
gaacagcttaaagttcaaag

SEQ ID NO: 389672 - DNA, 20 bp, Artificial Sequence
  Description of Artificial Sequence: Synthetic oligonucleotide
  Target: LAMA2; (+) strand; PAM type: YTN; PAM sequence: CTT
aaagttcaaagaaaaattga

SEQ ID NO: 389673 - DNA, 20 bp, Artificial Sequence
  Description of Artificial Sequence: Synthetic oligonucleotide
  Target: LAMA2; (+) strand; PAM type: YTN; PAM sequence: TTA
aagttcaaagaaaaattgag

SEQ ID NO: 389674 - DNA, 20 bp, Artificial Sequence
  Description of Artificial Sequence: Synthetic oligonucleotide
  Target: LAMA2; (+) strand; PAM type: YTN; PAM sequence: TTC
aaagaaaaattgagtgtaaa

SEQ ID NO: 389675 - DNA, 20 bp, Artificial Sequence
  Description of Artificial Sequence: Synthetic oligonucleotide
  Target: LAMA2; (+) strand; PAM type: YTN; PAM sequence: TTG
agtgtaaagttcagagtgtt

SEQ ID NO: 389676 - DNA, 20 bp, Artificial Sequence
  Description of Artificial Sequence: Synthetic oligonucleotide
  Target: LAMA2; (+) strand; PAM type: YTN; PAM sequence: TTC
agagtgttctcatatctact

SEQ ID NO: 389677 - DNA, 20 bp, Artificial Sequence
  Description of Artificial Sequence: Synthetic oligonucleotide
  Target: LAMA2; (+) strand; PAM type: YTN; PAM sequence: TTC
tcatatctactccctgcccc

SEQ ID NO: 389678 - DNA, 20 bp, Artificial Sequence
  Description of Artificial Sequence: Synthetic oligonucleotide
  Target: LAMA2; (+) strand; PAM type: YTN; PAM sequence: CTC
atatctactccctgccccca

SEQ ID NO: 389679 - DNA, 20 bp, Artificial Sequence
  Description of Artificial Sequence: Synthetic oligonucleotide
  Target: LAMA2; (+) strand; PAM type: YTN; PAM sequence: CTA
ctccctgcccccacaacctt

SEQ ID NO: 389680 - DNA, 20 bp, Artificial Sequence
  Description of Artificial Sequence: Synthetic oligonucleotide
  Target: LAMA2; (+) strand; PAM type: YTN; PAM sequence: CTC
cctgcccccacaaccttccc

SEQ ID NO: 389681 - DNA, 20 bp, Artificial Sequence
  Description of Artificial Sequence: Synthetic oligonucleotide
  Target: LAMA2; (+) strand; PAM type: YTN; PAM sequence: CTG
cccccacaaccttccccacc

SEQ ID NO: 389682 - DNA, 20 bp, Artificial Sequence
  Description of Artificial Sequence: Synthetic oligonucleotide
  Target: LAMA2; (+) strand; PAM type: YTN; PAM sequence: CTT
ccccaccagaatggtacatt

SEQ ID NO: 389683 - DNA, 20 bp, Artificial Sequence
  Description of Artificial Sequence: Synthetic oligonucleotide
  Target: LAMA2; (+) strand; PAM type: YTN; PAM sequence: TTC
cccaccagaatggtacattt

SEQ ID NO: 389684 - DNA, 20 bp, Artificial Sequence
  Description of Artificial Sequence: Synthetic oligonucleotide
  Target: LAMA2; (+) strand; PAM type: YTN; PAM sequence: TTT
attatagtcgataaacctaa

SEQ ID NO: 389685 - DNA, 20 bp, Artificial Sequence
  Description of Artificial Sequence: Synthetic oligonucleotide
  Target: LAMA2; (+) strand; PAM type: YTN; PAM sequence: TTA
ttatagtcgataaacctaag

SEQ ID NO: 389686 - DNA, 20 bp, Artificial Sequence
  Description of Artificial Sequence: Synthetic oligonucleotide
  Target: LAMA2; (+) strand; PAM type: YTN; PAM sequence: TTA
tagtcgataaacctaagttg

SEQ ID NO: 389687 - DNA, 20 bp, Artificial Sequence
  Description of Artificial Sequence: Synthetic oligonucleotide
  Target: LAMA2; (+) strand; PAM type: YTN; PAM sequence: CTA
agttgacacctcctcatcac

SEQ ID NO: 389688 - DNA, 20 bp, Artificial Sequence
  Description of Artificial Sequence: Synthetic oligonucleotide
  Target: LAMA2; (+) strand; PAM type: YTN; PAM sequence: TTG
acacctcctcatcacccaaa

SEQ ID NO: 389689 - DNA, 20 bp, Artificial Sequence
  Description of Artificial Sequence: Synthetic oligonucleotide
  Target: LAMA2; (+) strand; PAM type: YTN; PAM sequence: CTC
ctcatcacccaaagtccata

SEQ ID NO: 389690 - DNA, 20 bp, Artificial Sequence
  Description of Artificial Sequence: Synthetic oligonucleotide
  Target: LAMA2; (+) strand; PAM type: YTN; PAM sequence: CTC
atcacccaaagtccatagtt

SEQ ID NO: 389691 - DNA, 20 bp, Artificial Sequence
  Description of Artificial Sequence: Synthetic oligonucleotide
  Target: LAMA2; (+) strand; PAM type: YTN; PAM sequence: TTT
acattagggttccctcttgg

SEQ ID NO: 389692 - DNA, 20 bp, Artificial Sequence
  Description of Artificial Sequence: Synthetic oligonucleotide
  Target: LAMA2; (+) strand; PAM type: YTN; PAM sequence: TTA
cattagggttccctcttggt

SEQ ID NO: 389693 - DNA, 20 bp, Artificial Sequence
  Description of Artificial Sequence: Synthetic oligonucleotide
  Target: LAMA2; (+) strand; PAM type: YTN; PAM sequence: TTA
gggttccctcttggtattgt

SEQ ID NO: 389694 - DNA, 20 bp, Artificial Sequence
  Description of Artificial Sequence: Synthetic oligonucleotide
  Target: LAMA2; (+) strand; PAM type: YTN; PAM sequence: TTC
cctcttggtattgtacattc

SEQ ID NO: 389695 - DNA, 20 bp, Artificial Sequence
  Description of Artificial Sequence: Synthetic oligonucleotide
  Target: LAMA2; (+) strand; PAM type: YTN; PAM sequence: CTC
ttggtattgtacattctatg

SEQ ID NO: 389696 - DNA, 20 bp, Artificial Sequence
  Description of Artificial Sequence: Synthetic oligonucleotide
  Target: LAMA2; (+) strand; PAM type: YTN; PAM sequence: CTT
ggtattgtacattctatggg

SEQ ID NO: 389697 - DNA, 20 bp, Artificial Sequence
  Description of Artificial Sequence: Synthetic oligonucleotide
  Target: LAMA2; (+) strand; PAM type: YTN; PAM sequence: TTG
gtattgtacattctatgggt

SEQ ID NO: 389698 - DNA, 20 bp, Artificial Sequence
  Description of Artificial Sequence: Synthetic oligonucleotide
  Target: LAMA2; (+) strand; PAM type: YTN; PAM sequence: TTG
tacattctatgggtttggaa

SEQ ID NO: 389699 - DNA, 20 bp, Artificial Sequence
  Description of Artificial Sequence: Synthetic oligonucleotide
  Target: LAMA2; (+) strand; PAM type: YTN; PAM sequence: TTC
tatgggtttggaaaaatgca

SEQ ID NO: 389700 - DNA, 20 bp, Artificial Sequence
  Description of Artificial Sequence: Synthetic oligonucleotide
  Target: LAMA2; (+) strand; PAM type: YTN; PAM sequence: CTA
tgggtttggaaaaatgcatt

SEQ ID NO: 389701 - DNA, 20 bp, Artificial Sequence
  Description of Artificial Sequence: Synthetic oligonucleotide
  Target: LAMA2; (+) strand; PAM type: YTN; PAM sequence: TTT
ggaaaaatgcattatgacat

SEQ ID NO: 389702 - DNA, 20 bp, Artificial Sequence
  Description of Artificial Sequence: Synthetic oligonucleotide
  Target: LAMA2; (+) strand; PAM type: YTN; PAM sequence: TTG
gaaaaatgcattatgacatg

SEQ ID NO: 389703 - DNA, 20 bp, Artificial Sequence
  Description of Artificial Sequence: Synthetic oligonucleotide
  Target: LAMA2; (+) strand; PAM type: YTN; PAM sequence: TTA
tgacatgtgtccaccgttgt

SEQ ID NO: 389704 - DNA, 20 bp, Artificial Sequence
  Description of Artificial Sequence: Synthetic oligonucleotide
  Target: LAMA2; (+) strand; PAM type: YTN; PAM sequence: TTG
ttgtaaaatatagaaaagtt

SEQ ID NO: 389705 - DNA, 20 bp, Artificial Sequence
  Description of Artificial Sequence: Synthetic oligonucleotide
  Target: LAMA2; (+) strand; PAM type: YTN; PAM sequence: TTG
taaaatatagaaaagtttta

SEQ ID NO: 389706 - DNA, 20 bp, Artificial Sequence
  Description of Artificial Sequence: Synthetic oligonucleotide
  Target: LAMA2; (+) strand; PAM type: YTN; PAM sequence: TTT
tactgcccgaaaactcctct

SEQ ID NO: 389707 - DNA, 20 bp, Artificial Sequence
  Description of Artificial Sequence: Synthetic oligonucleotide
  Target: LAMA2; (+) strand; PAM type: YTN; PAM sequence: TTT
actgcccgaaaactcctcta

SEQ ID NO: 389708 - DNA, 20 bp, Artificial Sequence
  Description of Artificial Sequence: Synthetic oligonucleotide
  Target: LAMA2; (+) strand; PAM type: YTN; PAM sequence: TTA
ctgcccgaaaactcctctat

SEQ ID NO: 389709 - DNA, 20 bp, Artificial Sequence
  Description of Artificial Sequence: Synthetic oligonucleotide
  Target: LAMA2; (+) strand; PAM type: YTN; PAM sequence: CTG
cccgaaaactcctctatgct

SEQ ID NO: 389710 - DNA, 20 bp, Artificial Sequence
  Description of Artificial Sequence: Synthetic oligonucleotide
  Target: LAMA2; (+) strand; PAM type: YTN; PAM sequence: CTC
ctctatgcttcacctattca

SEQ ID NO: 389711 - DNA, 20 bp, Artificial Sequence
  Description of Artificial Sequence: Synthetic oligonucleotide
  Target: LAMA2; (+) strand; PAM type: YTN; PAM sequence: CTC
tatgcttcacctattcatac

SEQ ID NO: 389712 - DNA, 20 bp, Artificial Sequence
  Description of Artificial Sequence: Synthetic oligonucleotide
  Target: LAMA2; (+) strand; PAM type: YTN; PAM sequence: CTA
tgcttcacctattcatacct

SEQ ID NO: 389713 - DNA, 20 bp, Artificial Sequence
  Description of Artificial Sequence: Synthetic oligonucleotide
  Target: LAMA2; (+) strand; PAM type: YTN; PAM sequence: CTT
cacctattcatacctccctc

SEQ ID NO: 389714 - DNA, 20 bp, Artificial Sequence
  Description of Artificial Sequence: Synthetic oligonucleotide
  Target: LAMA2; (+) strand; PAM type: YTN; PAM sequence: TTC
acctattcatacctccctct

SEQ ID NO: 389715 - DNA, 20 bp, Artificial Sequence
  Description of Artificial Sequence: Synthetic oligonucleotide
  Target: LAMA2; (+) strand; PAM type: YTN; PAM sequence: CTA
ttcatacctccctcttcctt

SEQ ID NO: 389716 - DNA, 20 bp, Artificial Sequence
  Description of Artificial Sequence: Synthetic oligonucleotide
  Target: LAMA2; (+) strand; PAM type: YTN; PAM sequence: TTC
atacctccctcttccttgac

SEQ ID NO: 389717 - DNA, 20 bp, Artificial Sequence
  Description of Artificial Sequence: Synthetic oligonucleotide
  Target: LAMA2; (+) strand; PAM type: YTN; PAM sequence: CTC
cctcttccttgacccctggc

SEQ ID NO: 389718 - DNA, 20 bp, Artificial Sequence
  Description of Artificial Sequence: Synthetic oligonucleotide
  Target: LAMA2; (+) strand; PAM type: YTN; PAM sequence: CTC
ttccttgacccctggcaacc

SEQ ID NO: 389719 - DNA, 20 bp, Artificial Sequence
  Description of Artificial Sequence: Synthetic oligonucleotide
  Target: LAMA2; (+) strand; PAM type: YTN; PAM sequence: CTT
ccttgacccctggcaaccac

SEQ ID NO: 389720 - DNA, 20 bp, Artificial Sequence
  Description of Artificial Sequence: Synthetic oligonucleotide
  Target: LAMA2; (+) strand; PAM type: YTN; PAM sequence: TTC
cttgacccctggcaaccact

SEQ ID NO: 389721 - DNA, 20 bp, Artificial Sequence
  Description of Artificial Sequence: Synthetic oligonucleotide
  Target: LAMA2; (+) strand; PAM type: YTN; PAM sequence: CTT
gacccctggcaaccactcat

SEQ ID NO: 389722 - DNA, 20 bp, Artificial Sequence
  Description of Artificial Sequence: Synthetic oligonucleotide
  Target: LAMA2; (+) strand; PAM type: YTN; PAM sequence: TTG
acccctggcaaccactcata

SEQ ID NO: 389723 - DNA, 20 bp, Artificial Sequence
  Description of Artificial Sequence: Synthetic oligonucleotide
  Target: LAMA2; (+) strand; PAM type: YTN; PAM sequence: CTG
gcaaccactcatatttttac

SEQ ID NO: 389724 - DNA, 20 bp, Artificial Sequence
  Description of Artificial Sequence: Synthetic oligonucleotide
  Target: LAMA2; (+) strand; PAM type: YTN; PAM sequence: CTC
atatttttactacatccata

SEQ ID NO: 389725 - DNA, 20 bp, Artificial Sequence
  Description of Artificial Sequence: Synthetic oligonucleotide
  Target: LAMA2; (+) strand; PAM type: YTN; PAM sequence: TTT
ttactacatccatagttttg

SEQ ID NO: 389726 - DNA, 20 bp, Artificial Sequence
  Description of Artificial Sequence: Synthetic oligonucleotide
  Target: LAMA2; (+) strand; PAM type: YTN; PAM sequence: TTT
tactacatccatagttttgc

SEQ ID NO: 389727 - DNA, 20 bp, Artificial Sequence
  Description of Artificial Sequence: Synthetic oligonucleotide
  Target: LAMA2; (+) strand; PAM type: YTN; PAM sequence: TTT
actacatccatagttttgcc

SEQ ID NO: 389728 - DNA, 20 bp, Artificial Sequence
  Description of Artificial Sequence: Synthetic oligonucleotide
  Target: LAMA2; (+) strand; PAM type: YTN; PAM sequence: TTA
ctacatccatagttttgcct

SEQ ID NO: 389729 - DNA, 20 bp, Artificial Sequence
  Description of Artificial Sequence: Synthetic oligonucleotide
  Target: LAMA2; (+) strand; PAM type: YTN; PAM sequence: CTA
catccatagttttgcctttt

SEQ ID NO: 389730 - DNA, 20 bp, Artificial Sequence
  Description of Artificial Sequence: Synthetic oligonucleotide
  Target: LAMA2; (+) strand; PAM type: YTN; PAM sequence: TTT
tgccttttttggaatatata

SEQ ID NO: 389731 - DNA, 20 bp, Artificial Sequence
  Description of Artificial Sequence: Synthetic oligonucleotide
  Target: LAMA2; (+) strand; PAM type: YTN; PAM sequence: TTT
gccttttttggaatatatag

SEQ ID NO: 389732 - DNA, 20 bp, Artificial Sequence
  Description of Artificial Sequence: Synthetic oligonucleotide
  Target: LAMA2; (+) strand; PAM type: YTN; PAM sequence: TTG
ccttttttggaatatatagc

SEQ ID NO: 389733 - DNA, 20 bp, Artificial Sequence
  Description of Artificial Sequence: Synthetic oligonucleotide
  Target: LAMA2; (+) strand; PAM type: YTN; PAM sequence: CTT
ttttggaatatatagctgga

SEQ ID NO: 389734 - DNA, 20 bp, Artificial Sequence
  Description of Artificial Sequence: Synthetic oligonucleotide
  Target: LAMA2; (+) strand; PAM type: YTN; PAM sequence: TTT
tttggaatatatagctggaa

SEQ ID NO: 389735 - DNA, 20 bp, Artificial Sequence
  Description of Artificial Sequence: Synthetic oligonucleotide
  Target: LAMA2; (+) strand; PAM type: YTN; PAM sequence: TTT
ttggaatatatagctggaat

SEQ ID NO: 389736 - DNA, 20 bp, Artificial Sequence
  Description of Artificial Sequence: Synthetic oligonucleotide
  Target: LAMA2; (+) strand; PAM type: YTN; PAM sequence: TTT
tggaatatatagctggaatc

SEQ ID NO: 389737 - DNA, 20 bp, Artificial Sequence
  Description of Artificial Sequence: Synthetic oligonucleotide
  Target: LAMA2; (+) strand; PAM type: YTN; PAM sequence: TTT
ggaatatatagctggaatca

SEQ ID NO: 389738 - DNA, 20 bp, Artificial Sequence
  Description of Artificial Sequence: Synthetic oligonucleotide
  Target: LAMA2; (+) strand; PAM type: YTN; PAM sequence: TTG
gaatatatagctggaatcat

SEQ ID NO: 389739 - DNA, 20 bp, Artificial Sequence
  Description of Artificial Sequence: Synthetic oligonucleotide
  Target: LAMA2; (+) strand; PAM type: YTN; PAM sequence: CTG
gaatcatacagtgtggtact

SEQ ID NO: 389740 - DNA, 20 bp, Artificial Sequence
  Description of Artificial Sequence: Synthetic oligonucleotide
  Target: LAMA2; (+) strand; PAM type: YTN; PAM sequence: CTT
tttcatattagcttctttcc

SEQ ID NO: 389741 - DNA, 20 bp, Artificial Sequence
  Description of Artificial Sequence: Synthetic oligonucleotide
  Target: LAMA2; (+) strand; PAM type: YTN; PAM sequence: TTT
ttcatattagcttctttccc

SEQ ID NO: 389742 - DNA, 20 bp, Artificial Sequence
  Description of Artificial Sequence: Synthetic oligonucleotide
  Target: LAMA2; (+) strand; PAM type: YTN; PAM sequence: TTT
tcatattagcttctttccct

SEQ ID NO: 389743 - DNA, 20 bp, Artificial Sequence
  Description of Artificial Sequence: Synthetic oligonucleotide
  Target: LAMA2; (+) strand; PAM type: YTN; PAM sequence: TTT
catattagcttctttccctt

SEQ ID NO: 389744 - DNA, 20 bp, Artificial Sequence
  Description of Artificial Sequence: Synthetic oligonucleotide
  Target: LAMA2; (+) strand; PAM type: YTN; PAM sequence: TTC
atattagcttctttcccttg

SEQ ID NO: 389745 - DNA, 20 bp, Artificial Sequence
  Description of Artificial Sequence: Synthetic oligonucleotide
  Target: LAMA2; (+) strand; PAM type: YTN; PAM sequence: TTA
gcttctttcccttggtaata

SEQ ID NO: 389746 - DNA, 20 bp, Artificial Sequence
  Description of Artificial Sequence: Synthetic oligonucleotide
  Target: LAMA2; (+) strand; PAM type: YTN; PAM sequence: CTT
ctttcccttggtaatataca

SEQ ID NO: 389747 - DNA, 20 bp, Artificial Sequence
  Description of Artificial Sequence: Synthetic oligonucleotide
  Target: LAMA2; (+) strand; PAM type: YTN; PAM sequence: TTC
tttcccttggtaatatacac

SEQ ID NO: 389748 - DNA, 20 bp, Artificial Sequence
  Description of Artificial Sequence: Synthetic oligonucleotide
  Target: LAMA2; (+) strand; PAM type: YTN; PAM sequence: CTT
tcccttggtaatatacactt

SEQ ID NO: 389749 - DNA, 20 bp, Artificial Sequence
  Description of Artificial Sequence: Synthetic oligonucleotide
  Target: LAMA2; (+) strand; PAM type: YTN; PAM sequence: TTT
cccttggtaatatacactta

SEQ ID NO: 389750 - DNA, 20 bp, Artificial Sequence
  Description of Artificial Sequence: Synthetic oligonucleotide
  Target: LAMA2; (+) strand; PAM type: YTN; PAM sequence: TTC
ccttggtaatatacacttaa

SEQ ID NO: 389751 - DNA, 20 bp, Artificial Sequence
  Description of Artificial Sequence: Synthetic oligonucleotide
  Target: LAMA2; (+) strand; PAM type: YTN; PAM sequence: CTT
ggtaatatacacttaaggtt

SEQ ID NO: 389752 - DNA, 20 bp, Artificial Sequence
  Description of Artificial Sequence: Synthetic oligonucleotide
  Target: LAMA2; (+) strand; PAM type: YTN; PAM sequence: TTG
gtaatatacacttaaggttt

SEQ ID NO: 389753 - DNA, 20 bp, Artificial Sequence
  Description of Artificial Sequence: Synthetic oligonucleotide
  Target: LAMA2; (+) strand; PAM type: YTN; PAM sequence: CTT
aaggtttctccatatttttt

SEQ ID NO: 389754 - DNA, 20 bp, Artificial Sequence
  Description of Artificial Sequence: Synthetic oligonucleotide
  Target: LAMA2; (+) strand; PAM type: YTN; PAM sequence: TTA
aggtttctccatattttttc

SEQ ID NO: 389755 - DNA, 20 bp, Artificial Sequence
  Description of Artificial Sequence: Synthetic oligonucleotide
  Target: LAMA2; (+) strand; PAM type: YTN; PAM sequence: TTT
ctccatattttttcatgact

SEQ ID NO: 389756 - DNA, 20 bp, Artificial Sequence
  Description of Artificial Sequence: Synthetic oligonucleotide
  Target: LAMA2; (+) strand; PAM type: YTN; PAM sequence: TTC
tccatattttttcatgactt

SEQ ID NO: 389757 - DNA, 20 bp, Artificial Sequence
  Description of Artificial Sequence: Synthetic oligonucleotide
  Target: LAMA2; (+) strand; PAM type: YTN; PAM sequence: CTC
catattttttcatgacttta

SEQ ID NO: 389758 - DNA, 20 bp, Artificial Sequence
  Description of Artificial Sequence: Synthetic oligonucleotide
  Target: LAMA2; (+) strand; PAM type: YTN; PAM sequence: TTT
tttcatgactttatagctca

SEQ ID NO: 389759 - DNA, 20 bp, Artificial Sequence
  Description of Artificial Sequence: Synthetic oligonucleotide
  Target: LAMA2; (+) strand; PAM type: YTN; PAM sequence: TTT
ttcatgactttatagctcat

SEQ ID NO: 389760 - DNA, 20 bp, Artificial Sequence
  Description of Artificial Sequence: Synthetic oligonucleotide
  Target: LAMA2; (+) strand; PAM type: YTN; PAM sequence: TTT
tcatgactttatagctcatt

SEQ ID NO: 389761 - DNA, 20 bp, Artificial Sequence
  Description of Artificial Sequence: Synthetic oligonucleotide
  Target: LAMA2; (+) strand; PAM type: YTN; PAM sequence: TTT
catgactttatagctcattt

SEQ ID NO: 389762 - DNA, 20 bp, Artificial Sequence
  Description of Artificial Sequence: Synthetic oligonucleotide
  Target: LAMA2; (+) strand; PAM type: YTN; PAM sequence: TTC
atgactttatagctcatttc

SEQ ID NO: 389763 - DNA, 20 bp, Artificial Sequence
  Description of Artificial Sequence: Synthetic oligonucleotide
  Target: LAMA2; (+) strand; PAM type: YTN; PAM sequence: CTT
tatagctcatttctttgtag

SEQ ID NO: 389764 - DNA, 20 bp, Artificial Sequence
  Description of Artificial Sequence: Synthetic oligonucleotide
  Target: LAMA2; (+) strand; PAM type: YTN; PAM sequence: TTT
atagctcatttctttgtagt

SEQ ID NO: 389765 - DNA, 20 bp, Artificial Sequence
  Description of Artificial Sequence: Synthetic oligonucleotide
  Target: LAMA2; (+) strand; PAM type: YTN; PAM sequence: TTA
tagctcatttctttgtagtg

SEQ ID NO: 389766 - DNA, 20 bp, Artificial Sequence
  Description of Artificial Sequence: Synthetic oligonucleotide
  Target: LAMA2; (+) strand; PAM type: YTN; PAM sequence: CTC
atttctttgtagtgttgaat

SEQ ID NO: 389767 - DNA, 20 bp, Artificial Sequence
  Description of Artificial Sequence: Synthetic oligonucleotide
  Target: LAMA2; (+) strand; PAM type: YTN; PAM sequence: TTT
ctttgtagtgttgaataata

SEQ ID NO: 389768 - DNA, 20 bp, Artificial Sequence
  Description of Artificial Sequence: Synthetic oligonucleotide
  Target: LAMA2; (+) strand; PAM type: YTN; PAM sequence: TTC
tttgtagtgttgaataatat

SEQ ID NO: 389769 - DNA, 20 bp, Artificial Sequence
  Description of Artificial Sequence: Synthetic oligonucleotide
  Target: LAMA2; (+) strand; PAM type: YTN; PAM sequence: CTT
tgtagtgttgaataatattt

SEQ ID NO: 389770 - DNA, 20 bp, Artificial Sequence
  Description of Artificial Sequence: Synthetic oligonucleotide
  Target: LAMA2; (+) strand; PAM type: YTN; PAM sequence: TTT
gtagtgttgaataatatttc

SEQ ID NO: 389771 - DNA, 20 bp, Artificial Sequence
  Description of Artificial Sequence: Synthetic oligonucleotide
  Target: LAMA2; (+) strand; PAM type: YTN; PAM sequence: TTG
tagtgttgaataatatttca

SEQ ID NO: 389772 - DNA, 20 bp, Artificial Sequence
  Description of Artificial Sequence: Synthetic oligonucleotide
  Target: LAMA2; (+) strand; PAM type: YTN; PAM sequence: TTG
aataatatttcattgtttag

SEQ ID NO: 389773 - DNA, 20 bp, Artificial Sequence
  Description of Artificial Sequence: Synthetic oligonucleotide
  Target: LAMA2; (+) strand; PAM type: YTN; PAM sequence: TTT
cattgtttagacatatcact

SEQ ID NO: 389774 - DNA, 20 bp, Artificial Sequence
  Description of Artificial Sequence: Synthetic oligonucleotide
  Target: LAMA2; (+) strand; PAM type: YTN; PAM sequence: TTC
attgtttagacatatcactg

SEQ ID NO: 389775 - DNA, 20 bp, Artificial Sequence
  Description of Artificial Sequence: Synthetic oligonucleotide
  Target: LAMA2; (+) strand; PAM type: YTN; PAM sequence: TTG
tttagacatatcactgttta

SEQ ID NO: 389776 - DNA, 20 bp, Artificial Sequence
  Description of Artificial Sequence: Synthetic oligonucleotide
  Target: LAMA2; (+) strand; PAM type: YTN; PAM sequence: TTT
agacatatcactgtttactt

SEQ ID NO: 389777 - DNA, 20 bp, Artificial Sequence
  Description of Artificial Sequence: Synthetic oligonucleotide
  Target: LAMA2; (+) strand; PAM type: YTN; PAM sequence: TTA
gacatatcactgtttactta

SEQ ID NO: 389778 - DNA, 20 bp, Artificial Sequence
  Description of Artificial Sequence: Synthetic oligonucleotide
  Target: LAMA2; (+) strand; PAM type: YTN; PAM sequence: CTG
tttacttattcattccccta

SEQ ID NO: 389779 - DNA, 20 bp, Artificial Sequence
  Description of Artificial Sequence: Synthetic oligonucleotide
  Target: LAMA2; (+) strand; PAM type: YTN; PAM sequence: TTT
acttattcattcccctactg

SEQ ID NO: 389780 - DNA, 20 bp, Artificial Sequence
  Description of Artificial Sequence: Synthetic oligonucleotide
  Target: LAMA2; (+) strand; PAM type: YTN; PAM sequence: TTA
cttattcattcccctactga

SEQ ID NO: 389781 - DNA, 20 bp, Artificial Sequence
  Description of Artificial Sequence: Synthetic oligonucleotide
  Target: LAMA2; (+) strand; PAM type: YTN; PAM sequence: CTT
attcattcccctactgaagg

SEQ ID NO: 389782 - DNA, 20 bp, Artificial Sequence
  Description of Artificial Sequence: Synthetic oligonucleotide
  Target: LAMA2; (+) strand; PAM type: YTN; PAM sequence: TTA
ttcattcccctactgaagga

SEQ ID NO: 389783 - DNA, 20 bp, Artificial Sequence
  Description of Artificial Sequence: Synthetic oligonucleotide
  Target: LAMA2; (+) strand; PAM type: YTN; PAM sequence: TTC
attcccctactgaaggacat

SEQ ID NO: 389784 - DNA, 20 bp, Artificial Sequence
  Description of Artificial Sequence: Synthetic oligonucleotide
  Target: LAMA2; (+) strand; PAM type: YTN; PAM sequence: TTC
ccctactgaaggacatcttg

SEQ ID NO: 389785 - DNA, 20 bp, Artificial Sequence
  Description of Artificial Sequence: Synthetic oligonucleotide
  Target: LAMA2; (+) strand; PAM type: YTN; PAM sequence: CTA
ctgaaggacatcttggttgc

SEQ ID NO: 389786 - DNA, 20 bp, Artificial Sequence
  Description of Artificial Sequence: Synthetic oligonucleotide
  Target: LAMA2; (+) strand; PAM type: YTN; PAM sequence: CTG
aaggacatcttggttgcttc

SEQ ID NO: 389787 - DNA, 20 bp, Artificial Sequence
  Description of Artificial Sequence: Synthetic oligonucleotide
  Target: LAMA2; (+) strand; PAM type: YTN; PAM sequence: CTT
ggttgcttccaaattttggc

SEQ ID NO: 389788 - DNA, 20 bp, Artificial Sequence
  Description of Artificial Sequence: Synthetic oligonucleotide
  Target: LAMA2; (+) strand; PAM type: YTN; PAM sequence: TTG
gttgcttccaaattttggca

SEQ ID NO: 389789 - DNA, 20 bp, Artificial Sequence
  Description of Artificial Sequence: Synthetic oligonucleotide
  Target: LAMA2; (+) strand; PAM type: YTN; PAM sequence: TTG
cttccaaattttggcagcat

SEQ ID NO: 389790 - DNA, 20 bp, Artificial Sequence
  Description of Artificial Sequence: Synthetic oligonucleotide
  Target: LAMA2; (+) strand; PAM type: YTN; PAM sequence: CTT
ccaaattttggcagcatgaa

SEQ ID NO: 389791 - DNA, 20 bp, Artificial Sequence
  Description of Artificial Sequence: Synthetic oligonucleotide
  Target: LAMA2; (+) strand; PAM type: YTN; PAM sequence: TTC
caaattttggcagcatgaat

SEQ ID NO: 389792 - DNA, 20 bp, Artificial Sequence
  Description of Artificial Sequence: Synthetic oligonucleotide
  Target: LAMA2; (+) strand; PAM type: YTN; PAM sequence: TTT
tggcagcatgaatcaagttg

SEQ ID NO: 389793 - DNA, 20 bp, Artificial Sequence
  Description of Artificial Sequence: Synthetic oligonucleotide
  Target: LAMA2; (+) strand; PAM type: YTN; PAM sequence: TTT
ggcagcatgaatcaagttgc

SEQ ID NO: 389794 - DNA, 20 bp, Artificial Sequence
  Description of Artificial Sequence: Synthetic oligonucleotide
  Target: LAMA2; (+) strand; PAM type: YTN; PAM sequence: TTG
gcagcatgaatcaagttgct

SEQ ID NO: 389795 - DNA, 20 bp, Artificial Sequence
  Description of Artificial Sequence: Synthetic oligonucleotide
  Target: LAMA2; (+) strand; PAM type: YTN; PAM sequence: TTG
ctgtaaacatctttgtgcag

SEQ ID NO: 389796 - DNA, 20 bp, Artificial Sequence
  Description of Artificial Sequence: Synthetic oligonucleotide
  Target: LAMA2; (+) strand; PAM type: YTN; PAM sequence: CTG
taaacatctttgtgcagact

SEQ ID NO: 389797 - DNA, 20 bp, Artificial Sequence
  Description of Artificial Sequence: Synthetic oligonucleotide
  Target: LAMA2; (+) strand; PAM type: YTN; PAM sequence: CTT
tgtgcagacttttgtgtgga

SEQ ID NO: 389798 - DNA, 20 bp, Artificial Sequence
  Description of Artificial Sequence: Synthetic oligonucleotide
  Target: LAMA2; (+) strand; PAM type: YTN; PAM sequence: TTT
gtgcagacttttgtgtggac

SEQ ID NO: 389799 - DNA, 20 bp, Artificial Sequence
  Description of Artificial Sequence: Synthetic oligonucleotide
  Target: LAMA2; (+) strand; PAM type: YTN; PAM sequence: TTG
tgcagacttttgtgtggact

SEQ ID NO: 389800 - DNA, 20 bp, Artificial Sequence
  Description of Artificial Sequence: Synthetic oligonucleotide
  Target: LAMA2; (+) strand; PAM type: YTN; PAM sequence: CTT
ttgtgtggacttaagttttc

SEQ ID NO: 389801 - DNA, 20 bp, Artificial Sequence
  Description of Artificial Sequence: Synthetic oligonucleotide
  Target: LAMA2; (+) strand; PAM type: YTN; PAM sequence: TTT
tgtgtggacttaagttttca

SEQ ID NO: 389802 - DNA, 20 bp, Artificial Sequence
  Description of Artificial Sequence: Synthetic oligonucleotide
  Target: LAMA2; (+) strand; PAM type: YTN; PAM sequence: TTT
gtgtggacttaagttttcaa

SEQ ID NO: 389803 - DNA, 20 bp, Artificial Sequence
  Description of Artificial Sequence: Synthetic oligonucleotide
  Target: LAMA2; (+) strand; PAM type: YTN; PAM sequence: TTG
tgtggacttaagttttcaac

SEQ ID NO: 389804 - DNA, 20 bp, Artificial Sequence
  Description of Artificial Sequence: Synthetic oligonucleotide
  Target: LAMA2; (+) strand; PAM type: YTN; PAM sequence: CTT
aagttttcaacctatttggg

SEQ ID NO: 389805 - DNA, 20 bp, Artificial Sequence
  Description of Artificial Sequence: Synthetic oligonucleotide
  Target: LAMA2; (+) strand; PAM type: YTN; PAM sequence: TTA
agttttcaacctatttgggt

SEQ ID NO: 389806 - DNA, 20 bp, Artificial Sequence
  Description of Artificial Sequence: Synthetic oligonucleotide
  Target: LAMA2; (+) strand; PAM type: YTN; PAM sequence: TTT
tcaacctatttgggtgaata

SEQ ID NO: 389807 - DNA, 20 bp, Artificial Sequence
  Description of Artificial Sequence: Synthetic oligonucleotide
  Target: LAMA2; (+) strand; PAM type: YTN; PAM sequence: TTT
caacctatttgggtgaatat

SEQ ID NO: 389808 - DNA, 20 bp, Artificial Sequence
  Description of Artificial Sequence: Synthetic oligonucleotide
  Target: LAMA2; (+) strand; PAM type: YTN; PAM sequence: TTC
aacctatttgggtgaatata

SEQ ID NO: 389809 - DNA, 20 bp, Artificial Sequence
  Description of Artificial Sequence: Synthetic oligonucleotide
  Target: LAMA2; (+) strand; PAM type: YTN; PAM sequence: CTA
tttgggtgaatataaaggag

SEQ ID NO: 389810 - DNA, 20 bp, Artificial Sequence
  Description of Artificial Sequence: Synthetic oligonucleotide
  Target: LAMA2; (+) strand; PAM type: YTN; PAM sequence: TTT
gggtgaatataaaggagcat

SEQ ID NO: 389811 - DNA, 20 bp, Artificial Sequence
  Description of Artificial Sequence: Synthetic oligonucleotide
  Target: LAMA2; (+) strand; PAM type: YTN; PAM sequence: TTG
ggtgaatataaaggagcatg

SEQ ID NO: 389812 - DNA, 20 bp, Artificial Sequence
  Description of Artificial Sequence: Synthetic oligonucleotide
  Target: LAMA2; (+) strand; PAM type: YTN; PAM sequence: TTG
ctggatggtatggtaagagt

SEQ ID NO: 389813 - DNA, 20 bp, Artificial Sequence
  Description of Artificial Sequence: Synthetic oligonucleotide
  Target: LAMA2; (+) strand; PAM type: YTN; PAM sequence: CTG
gatggtatggtaagagtata

SEQ ID NO: 389814 - DNA, 20 bp, Artificial Sequence
  Description of Artificial Sequence: Synthetic oligonucleotide
  Target: LAMA2; (+) strand; PAM type: YTN; PAM sequence: TTT
agttttgaaagaaattacca

SEQ ID NO: 389815 - DNA, 20 bp, Artificial Sequence
  Description of Artificial Sequence: Synthetic oligonucleotide
  Target: LAMA2; (+) strand; PAM type: YTN; PAM sequence: TTA
gttttgaaagaaattaccaa

SEQ ID NO: 389816 - DNA, 20 bp, Artificial Sequence
  Description of Artificial Sequence: Synthetic oligonucleotide
  Target: LAMA2; (+) strand; PAM type: YTN; PAM sequence: TTT
tgaaagaaattaccaaaatg

SEQ ID NO: 389817 - DNA, 20 bp, Artificial Sequence
  Description of Artificial Sequence: Synthetic oligonucleotide
  Target: LAMA2; (+) strand; PAM type: YTN; PAM sequence: TTT
gaaagaaattaccaaaatgt

SEQ ID NO: 389818 - DNA, 20 bp, Artificial Sequence
  Description of Artificial Sequence: Synthetic oligonucleotide
  Target: LAMA2; (+) strand; PAM type: YTN; PAM sequence: TTG
aaagaaattaccaaaatgta

SEQ ID NO: 389819 - DNA, 20 bp, Artificial Sequence
  Description of Artificial Sequence: Synthetic oligonucleotide
  Target: LAMA2; (+) strand; PAM type: YTN; PAM sequence: TTA
ccaaaatgtattccaaatgg

SEQ ID NO: 389820 - DNA, 20 bp, Artificial Sequence
  Description of Artificial Sequence: Synthetic oligonucleotide
  Target: LAMA2; (+) strand; PAM type: YTN; PAM sequence: TTC
caaatggtcttttctatttt

SEQ ID NO: 389821 - DNA, 20 bp, Artificial Sequence
  Description of Artificial Sequence: Synthetic oligonucleotide
  Target: LAMA2; (+) strand; PAM type: YTN; PAM sequence: CTT
ttctattttgcattcccacc

SEQ ID NO: 389822 - DNA, 20 bp, Artificial Sequence
  Description of Artificial Sequence: Synthetic oligonucleotide
  Target: LAMA2; (+) strand; PAM type: YTN; PAM sequence: TTT
tctattttgcattcccaccg

SEQ ID NO: 389823 - DNA, 20 bp, Artificial Sequence
  Description of Artificial Sequence: Synthetic oligonucleotide
  Target: LAMA2; (+) strand; PAM type: YTN; PAM sequence: TTT
ctattttgcattcccaccgg

SEQ ID NO: 389824 - DNA, 20 bp, Artificial Sequence
  Description of Artificial Sequence: Synthetic oligonucleotide
  Target: LAMA2; (+) strand; PAM type: YTN; PAM sequence: TTC
tattttgcattcccaccggc

SEQ ID NO: 389825 - DNA, 20 bp, Artificial Sequence
  Description of Artificial Sequence: Synthetic oligonucleotide
  Target: LAMA2; (+) strand; PAM type: YTN; PAM sequence: CTA
ttttgcattcccaccggcaa

SEQ ID NO: 389826 - DNA, 20 bp, Artificial Sequence
  Description of Artificial Sequence: Synthetic oligonucleotide
  Target: LAMA2; (+) strand; PAM type: YTN; PAM sequence: TTT
tgcattcccaccggcaataa

SEQ ID NO: 389827 - DNA, 20 bp, Artificial Sequence
  Description of Artificial Sequence: Synthetic oligonucleotide
  Target: LAMA2; (+) strand; PAM type: YTN; PAM sequence: TTT
gcattcccaccggcaataaa

SEQ ID NO: 389828 - DNA, 20 bp, Artificial Sequence
  Description of Artificial Sequence: Synthetic oligonucleotide
  Target: LAMA2; (+) strand; PAM type: YTN; PAM sequence: TTG
cattcccaccggcaataaat

SEQ ID NO: 389829 - DNA, 20 bp, Artificial Sequence
  Description of Artificial Sequence: Synthetic oligonucleotide
  Target: LAMA2; (+) strand; PAM type: YTN; PAM sequence: TTC
ccaccggcaataaatgagag

SEQ ID NO: 389830 - DNA, 20 bp, Artificial Sequence
  Description of Artificial Sequence: Synthetic oligonucleotide
  Target: LAMA2; (+) strand; PAM type: YTN; PAM sequence: TTT
ctgttgctccacatcctcaa

SEQ ID NO: 389831 - DNA, 20 bp, Artificial Sequence
  Description of Artificial Sequence: Synthetic oligonucleotide
  Target: LAMA2; (+) strand; PAM type: YTN; PAM sequence: TTC
tgttgctccacatcctcaat

SEQ ID NO: 389832 - DNA, 20 bp, Artificial Sequence
  Description of Artificial Sequence: Synthetic oligonucleotide
  Target: LAMA2; (+) strand; PAM type: YTN; PAM sequence: CTG
ttgctccacatcctcaatag

SEQ ID NO: 389833 - DNA, 20 bp, Artificial Sequence
  Description of Artificial Sequence: Synthetic oligonucleotide
  Target: LAMA2; (+) strand; PAM type: YTN; PAM sequence: TTG
ctccacatcctcaatagcat

SEQ ID NO: 389834 - DNA, 20 bp, Artificial Sequence
  Description of Artificial Sequence: Synthetic oligonucleotide
  Target: LAMA2; (+) strand; PAM type: YTN; PAM sequence: CTC
cacatcctcaatagcatttg

SEQ ID NO: 389835 - DNA, 20 bp, Artificial Sequence
  Description of Artificial Sequence: Synthetic oligonucleotide
  Target: LAMA2; (+) strand; PAM type: YTN; PAM sequence: CTC
aatagcatttggtgttttta

SEQ ID NO: 389836 - DNA, 20 bp, Artificial Sequence
  Description of Artificial Sequence: Synthetic oligonucleotide
  Target: LAMA2; (+) strand; PAM type: YTN; PAM sequence: TTT
ggtgtttttagtgtttggat

SEQ ID NO: 389837 - DNA, 20 bp, Artificial Sequence
  Description of Artificial Sequence: Synthetic oligonucleotide
  Target: LAMA2; (+) strand; PAM type: YTN; PAM sequence: TTG
gtgtttttagtgtttggatt

SEQ ID NO: 389838 - DNA, 20 bp, Artificial Sequence
  Description of Artificial Sequence: Synthetic oligonucleotide
  Target: LAMA2; (+) strand; PAM type: YTN; PAM sequence: TTT
ttagtgtttggattttgtca

SEQ ID NO: 389839 - DNA, 20 bp, Artificial Sequence
  Description of Artificial Sequence: Synthetic oligonucleotide
  Target: LAMA2; (+) strand; PAM type: YTN; PAM sequence: TTT
tagtgtttggattttgtcat

SEQ ID NO: 389840 - DNA, 20 bp, Artificial Sequence
  Description of Artificial Sequence: Synthetic oligonucleotide
  Target: LAMA2; (+) strand; PAM type: YTN; PAM sequence: TTT
agtgtttggattttgtcatt

SEQ ID NO: 389841 - DNA, 20 bp, Artificial Sequence
  Description of Artificial Sequence: Synthetic oligonucleotide
  Target: LAMA2; (+) strand; PAM type: YTN; PAM sequence: TTA
gtgtttggattttgtcattc

SEQ ID NO: 389842 - DNA, 20 bp, Artificial Sequence
  Description of Artificial Sequence: Synthetic oligonucleotide
  Target: LAMA2; (+) strand; PAM type: YTN; PAM sequence: TTT
ggattttgtcattctaataa

SEQ ID NO: 389843 - DNA, 20 bp, Artificial Sequence
  Description of Artificial Sequence: Synthetic oligonucleotide
  Target: LAMA2; (+) strand; PAM type: YTN; PAM sequence: TTG
gattttgtcattctaataag

SEQ ID NO: 389844 - DNA, 20 bp, Artificial Sequence
  Description of Artificial Sequence: Synthetic oligonucleotide
  Target: LAMA2; (+) strand; PAM type: YTN; PAM sequence: TTT
tgtcattctaataagtgtgt

SEQ ID NO: 389845 - DNA, 20 bp, Artificial Sequence
  Description of Artificial Sequence: Synthetic oligonucleotide
  Target: LAMA2; (+) strand; PAM type: YTN; PAM sequence: TTT
gtcattctaataagtgtgta

SEQ ID NO: 389846 - DNA, 20 bp, Artificial Sequence
  Description of Artificial Sequence: Synthetic oligonucleotide
  Target: LAMA2; (+) strand; PAM type: YTN; PAM sequence: TTG
tcattctaataagtgtgtat

SEQ ID NO: 389847 - DNA, 20 bp, Artificial Sequence
  Description of Artificial Sequence: Synthetic oligonucleotide
  Target: LAMA2; (+) strand; PAM type: YTN; PAM sequence: TTC
taataagtgtgtatggtatc

SEQ ID NO: 389848 - DNA, 20 bp, Artificial Sequence
  Description of Artificial Sequence: Synthetic oligonucleotide
  Target: LAMA2; (+) strand; PAM type: YTN; PAM sequence: CTA
ataagtgtgtatggtatctc

SEQ ID NO: 389849 - DNA, 20 bp, Artificial Sequence
  Description of Artificial Sequence: Synthetic oligonucleotide
  Target: LAMA2; (+) strand; PAM type: YTN; PAM sequence: CTC
attcttgttttagtttgcaa

SEQ ID NO: 389850 - DNA, 20 bp, Artificial Sequence
  Description of Artificial Sequence: Synthetic oligonucleotide
  Target: LAMA2; (+) strand; PAM type: YTN; PAM sequence: TTC
ttgttttagtttgcaattcc

SEQ ID NO: 389851 - DNA, 20 bp, Artificial Sequence
  Description of Artificial Sequence: Synthetic oligonucleotide
  Target: LAMA2; (+) strand; PAM type: YTN; PAM sequence: CTT
gttttagtttgcaattcctt

SEQ ID NO: 389852 - DNA, 20 bp, Artificial Sequence
  Description of Artificial Sequence: Synthetic oligonucleotide
  Target: LAMA2; (+) strand; PAM type: YTN; PAM sequence: TTG
ttttagtttgcaattcctta

SEQ ID NO: 389853 - DNA, 20 bp, Artificial Sequence
  Description of Artificial Sequence: Synthetic oligonucleotide
  Target: LAMA2; (+) strand; PAM type: YTN; PAM sequence: TTT
tagtttgcaattccttaatg

SEQ ID NO: 389854 - DNA, 20 bp, Artificial Sequence
  Description of Artificial Sequence: Synthetic oligonucleotide
  Target: LAMA2; (+) strand; PAM type: YTN; PAM sequence: TTT
agtttgcaattccttaatga

SEQ ID NO: 389855 - DNA, 20 bp, Artificial Sequence
  Description of Artificial Sequence: Synthetic oligonucleotide
  Target: LAMA2; (+) strand; PAM type: YTN; PAM sequence: TTA
gtttgcaattccttaatgac

SEQ ID NO: 389856 - DNA, 20 bp, Artificial Sequence
  Description of Artificial Sequence: Synthetic oligonucleotide
  Target: LAMA2; (+) strand; PAM type: YTN; PAM sequence: TTT
gcaattccttaatgacatat

SEQ ID NO: 389857 - DNA, 20 bp, Artificial Sequence
  Description of Artificial Sequence: Synthetic oligonucleotide
  Target: LAMA2; (+) strand; PAM type: YTN; PAM sequence: TTG
caattccttaatgacatatg

SEQ ID NO: 389858 - DNA, 20 bp, Artificial Sequence
  Description of Artificial Sequence: Synthetic oligonucleotide
  Target: LAMA2; (+) strand; PAM type: YTN; PAM sequence: TTC
cttaatgacatatgatgtcg

SEQ ID NO: 389859 - DNA, 20 bp, Artificial Sequence
  Description of Artificial Sequence: Synthetic oligonucleotide
  Target: LAMA2; (+) strand; PAM type: YTN; PAM sequence: CTT
aatgacatatgatgtcgagc

SEQ ID NO: 389860 - DNA, 20 bp, Artificial Sequence
  Description of Artificial Sequence: Synthetic oligonucleotide
  Target: LAMA2; (+) strand; PAM type: YTN; PAM sequence: TTA
atgacatatgatgtcgagca

SEQ ID NO: 389861 - DNA, 20 bp, Artificial Sequence
  Description of Artificial Sequence: Synthetic oligonucleotide
  Target: LAMA2; (+) strand; PAM type: YTN; PAM sequence: CTT
ttcatatgcttatttgccat

SEQ ID NO: 389862 - DNA, 20 bp, Artificial Sequence
  Description of Artificial Sequence: Synthetic oligonucleotide
  Target: LAMA2; (+) strand; PAM type: YTN; PAM sequence: TTT
tcatatgcttatttgccatc

SEQ ID NO: 389863 - DNA, 20 bp, Artificial Sequence
  Description of Artificial Sequence: Synthetic oligonucleotide
  Target: LAMA2; (+) strand; PAM type: YTN; PAM sequence: TTT
catatgcttatttgccatct

SEQ ID NO: 389864 - DNA, 20 bp, Artificial Sequence
  Description of Artificial Sequence: Synthetic oligonucleotide
  Target: LAMA2; (+) strand; PAM type: YTN; PAM sequence: TTC
atatgcttatttgccatctg

SEQ ID NO: 389865 - DNA, 20 bp, Artificial Sequence
  Description of Artificial Sequence: Synthetic oligonucleotide
  Target: LAMA2; (+) strand; PAM type: YTN; PAM sequence: CTT
atttgccatctgtatatctt

SEQ ID NO: 389866 - DNA, 20 bp, Artificial Sequence
  Description of Artificial Sequence: Synthetic oligonucleotide
  Target: LAMA2; (+) strand; PAM type: YTN; PAM sequence: TTA
tttgccatctgtatatcttc

SEQ ID NO: 389867 - DNA, 20 bp, Artificial Sequence
  Description of Artificial Sequence: Synthetic oligonucleotide
  Target: LAMA2; (+) strand; PAM type: YTN; PAM sequence: TTT
gccatctgtatatcttcttt

SEQ ID NO: 389868 - DNA, 20 bp, Artificial Sequence
  Description of Artificial Sequence: Synthetic oligonucleotide
  Target: LAMA2; (+) strand; PAM type: YTN; PAM sequence: TTG
ccatctgtatatcttctttg

SEQ ID NO: 389869 - DNA, 20 bp, Artificial Sequence
  Description of Artificial Sequence: Synthetic oligonucleotide
  Target: LAMA2; (+) strand; PAM type: YTN; PAM sequence: CTG
tatatcttctttggtaaggt

SEQ ID NO: 389870 - DNA, 20 bp, Artificial Sequence
  Description of Artificial Sequence: Synthetic oligonucleotide
  Target: LAMA2; (+) strand; PAM type: YTN; PAM sequence: CTT
ctttggtaaggtgtctattt

SEQ ID NO: 389871 - DNA, 20 bp, Artificial Sequence
  Description of Artificial Sequence: Synthetic oligonucleotide
  Target: LAMA2; (+) strand; PAM type: YTN; PAM sequence: TTC
tttggtaaggtgtctattta

SEQ ID NO: 389872 - DNA, 20 bp, Artificial Sequence
  Description of Artificial Sequence: Synthetic oligonucleotide
  Target: LAMA2; (+) strand; PAM type: YTN; PAM sequence: CTT
tggtaaggtgtctatttagg

SEQ ID NO: 389873 - DNA, 20 bp, Artificial Sequence
  Description of Artificial Sequence: Synthetic oligonucleotide
  Target: LAMA2; (+) strand; PAM type: YTN; PAM sequence: TTT
ggtaaggtgtctatttaggt

SEQ ID NO: 389874 - DNA, 20 bp, Artificial Sequence
  Description of Artificial Sequence: Synthetic oligonucleotide
  Target: LAMA2; (+) strand; PAM type: YTN; PAM sequence: TTG
gtaaggtgtctatttaggtc

SEQ ID NO: 389875 - DNA, 20 bp, Artificial Sequence
  Description of Artificial Sequence: Synthetic oligonucleotide
  Target: LAMA2; (+) strand; PAM type: YTN; PAM sequence: CTA
tttaggtctttttccatttt

SEQ ID NO: 389876 - DNA, 20 bp, Artificial Sequence
  Description of Artificial Sequence: Synthetic oligonucleotide
  Target: LAMA2; (+) strand; PAM type: YTN; PAM sequence: TTT
aggtctttttccattttttc

SEQ ID NO: 389877 - DNA, 20 bp, Artificial Sequence
  Description of Artificial Sequence: Synthetic oligonucleotide
  Target: LAMA2; (+) strand; PAM type: YTN; PAM sequence: TTA
ggtctttttccattttttca

SEQ ID NO: 389878 - DNA, 20 bp, Artificial Sequence
  Description of Artificial Sequence: Synthetic oligonucleotide
  Target: LAMA2; (+) strand; PAM type: YTN; PAM sequence: CTT
tttccattttttcattgggt

SEQ ID NO: 389879 - DNA, 20 bp, Artificial Sequence
  Description of Artificial Sequence: Synthetic oligonucleotide
  Target: LAMA2; (+) strand; PAM type: YTN; PAM sequence: TTT
ttccattttttcattgggtt

SEQ ID NO: 389880 - DNA, 20 bp, Artificial Sequence
  Description of Artificial Sequence: Synthetic oligonucleotide
  Target: LAMA2; (+) strand; PAM type: YTN; PAM sequence: TTT
tccattttttcattgggttg

SEQ ID NO: 389881 - DNA, 20 bp, Artificial Sequence
  Description of Artificial Sequence: Synthetic oligonucleotide
  Target: LAMA2; (+) strand; PAM type: YTN; PAM sequence: TTT
ccattttttcattgggttgt

SEQ ID NO: 389882 - DNA, 20 bp, Artificial Sequence
  Description of Artificial Sequence: Synthetic oligonucleotide
  Target: LAMA2; (+) strand; PAM type: YTN; PAM sequence: TTC
cattttttcattgggttgtt

SEQ ID NO: 389883 - DNA, 20 bp, Artificial Sequence
  Description of Artificial Sequence: Synthetic oligonucleotide
  Target: LAMA2; (+) strand; PAM type: YTN; PAM sequence: TTT
tttcattgggttgttttctt

SEQ ID NO: 389884 - DNA, 20 bp, Artificial Sequence
  Description of Artificial Sequence: Synthetic oligonucleotide
  Target: LAMA2; (+) strand; PAM type: YTN; PAM sequence: TTT
ttcattgggttgttttcttg

SEQ ID NO: 389885 - DNA, 20 bp, Artificial Sequence
  Description of Artificial Sequence: Synthetic oligonucleotide
  Target: LAMA2; (+) strand; PAM type: YTN; PAM sequence: TTT
tcattgggttgttttcttgt

SEQ ID NO: 389886 - DNA, 20 bp, Artificial Sequence
  Description of Artificial Sequence: Synthetic oligonucleotide
  Target: LAMA2; (+) strand; PAM type: YTN; PAM sequence: TTT
cattgggttgttttcttgtc

SEQ ID NO: 389887 - DNA, 20 bp, Artificial Sequence
  Description of Artificial Sequence: Synthetic oligonucleotide
  Target: LAMA2; (+) strand; PAM type: YTN; PAM sequence: TTC
attgggttgttttcttgtcg

SEQ ID NO: 389888 - DNA, 20 bp, Artificial Sequence
  Description of Artificial Sequence: Synthetic oligonucleotide
  Target: LAMA2; (+) strand; PAM type: YTN; PAM sequence: TTG
ggttgttttcttgtcgaatt

SEQ ID NO: 389889 - DNA, 20 bp, Artificial Sequence
  Description of Artificial Sequence: Synthetic oligonucleotide
  Target: LAMA2; (+) strand; PAM type: YTN; PAM sequence: TTG
ttttcttgtcgaattcagag

SEQ ID NO: 389890 - DNA, 20 bp, Artificial Sequence
  Description of Artificial Sequence: Synthetic oligonucleotide
  Target: LAMA2; (+) strand; PAM type: YTN; PAM sequence: TTT
tcttgtcgaattcagagttt

SEQ ID NO: 389891 - DNA, 20 bp, Artificial Sequence
  Description of Artificial Sequence: Synthetic oligonucleotide
  Target: LAMA2; (+) strand; PAM type: YTN; PAM sequence: TTT
cttgtcgaattcagagtttt

SEQ ID NO: 389892 - DNA, 20 bp, Artificial Sequence
  Description of Artificial Sequence: Synthetic oligonucleotide
  Target: LAMA2; (+) strand; PAM type: YTN; PAM sequence: TTC
ttgtcgaattcagagttttt

SEQ ID NO: 389893 - DNA, 20 bp, Artificial Sequence
  Description of Artificial Sequence: Synthetic oligonucleotide
  Target: LAMA2; (+) strand; PAM type: YTN; PAM sequence: CTT
gtcgaattcagagttttttg

SEQ ID NO: 389894 - DNA, 20 bp, Artificial Sequence
  Description of Artificial Sequence: Synthetic oligonucleotide
  Target: LAMA2; (+) strand; PAM type: YTN; PAM sequence: TTG
tcgaattcagagttttttgt

SEQ ID NO: 389895 - DNA, 20 bp, Artificial Sequence
  Description of Artificial Sequence: Synthetic oligonucleotide
  Target: LAMA2; (+) strand; PAM type: YTN; PAM sequence: TTC
agagttttttgtatattttg

SEQ ID NO: 389896 - DNA, 20 bp, Artificial Sequence
  Description of Artificial Sequence: Synthetic oligonucleotide
  Target: LAMA2; (+) strand; PAM type: YTN; PAM sequence: TTT
tttgtatattttgggtaata

SEQ ID NO: 389897 - DNA, 20 bp, Artificial Sequence
  Description of Artificial Sequence: Synthetic oligonucleotide
  Target: LAMA2; (+) strand; PAM type: YTN; PAM sequence: TTT
ttgtatattttgggtaatag

SEQ ID NO: 389898 - DNA, 20 bp, Artificial Sequence
  Description of Artificial Sequence: Synthetic oligonucleotide
  Target: LAMA2; (+) strand; PAM type: YTN; PAM sequence: TTT
tgtatattttgggtaatagt

SEQ ID NO: 389899 - DNA, 20 bp, Artificial Sequence
  Description of Artificial Sequence: Synthetic oligonucleotide
  Target: LAMA2; (+) strand; PAM type: YTN; PAM sequence: TTT
gtatattttgggtaatagtc

SEQ ID NO: 389900 - DNA, 20 bp, Artificial Sequence
  Description of Artificial Sequence: Synthetic oligonucleotide
  Target: LAMA2; (+) strand; PAM type: YTN; PAM sequence: TTG
tatattttgggtaatagtcc

SEQ ID NO: 389901 - DNA, 20 bp, Artificial Sequence
  Description of Artificial Sequence: Synthetic oligonucleotide
  Target: LAMA2; (+) strand; PAM type: YTN; PAM sequence: TTT
tgggtaatagtcctttatca

SEQ ID NO: 389902 - DNA, 20 bp, Artificial Sequence
  Description of Artificial Sequence: Synthetic oligonucleotide
  Target: LAMA2; (+) strand; PAM type: YTN; PAM sequence: TTT
gggtaatagtcctttatcag

SEQ ID NO: 389903 - DNA, 20 bp, Artificial Sequence
  Description of Artificial Sequence: Synthetic oligonucleotide
  Target: LAMA2; (+) strand; PAM type: YTN; PAM sequence: TTG
ggtaatagtcctttatcaga

SEQ ID NO: 389904 - DNA, 20 bp, Artificial Sequence
  Description of Artificial Sequence: Synthetic oligonucleotide
  Target: LAMA2; (+) strand; PAM type: YTN; PAM sequence: CTT
tatcagatatgtcttttgcc

SEQ ID NO: 389905 - DNA, 20 bp, Artificial Sequence
  Description of Artificial Sequence: Synthetic oligonucleotide
  Target: LAMA2; (+) strand; PAM type: YTN; PAM sequence: TTT
atcagatatgtcttttgcca

SEQ ID NO: 389906 - DNA, 20 bp, Artificial Sequence
  Description of Artificial Sequence: Synthetic oligonucleotide
  Target: LAMA2; (+) strand; PAM type: YTN; PAM sequence: TTA
tcagatatgtcttttgccat

SEQ ID NO: 389907 - DNA, 20 bp, Artificial Sequence
  Description of Artificial Sequence: Synthetic oligonucleotide
  Target: LAMA2; (+) strand; PAM type: YTN; PAM sequence: CTT
ttgccattatttgcttcccc

SEQ ID NO: 389908 - DNA, 20 bp, Artificial Sequence
  Description of Artificial Sequence: Synthetic oligonucleotide
  Target: LAMA2; (+) strand; PAM type: YTN; PAM sequence: TTT
tgccattatttgcttcccct

SEQ ID NO: 389909 - DNA, 20 bp, Artificial Sequence
  Description of Artificial Sequence: Synthetic oligonucleotide
  Target: LAMA2; (+) strand; PAM type: YTN; PAM sequence: TTT
gccattatttgcttcccctc

SEQ ID NO: 389910 - DNA, 20 bp, Artificial Sequence
  Description of Artificial Sequence: Synthetic oligonucleotide
  Target: LAMA2; (+) strand; PAM type: YTN; PAM sequence: TTG
ccattatttgcttcccctct

SEQ ID NO: 389911 - DNA, 20 bp, Artificial Sequence
  Description of Artificial Sequence: Synthetic oligonucleotide
  Target: LAMA2; (+) strand; PAM type: YTN; PAM sequence: TTA
tttgcttcccctctgtggct

SEQ ID NO: 389912 - DNA, 20 bp, Artificial Sequence
  Description of Artificial Sequence: Synthetic oligonucleotide
  Target: LAMA2; (+) strand; PAM type: YTN; PAM sequence: TTT
gcttcccctctgtggcttgt

SEQ ID NO: 389913 - DNA, 20 bp, Artificial Sequence
  Description of Artificial Sequence: Synthetic oligonucleotide
  Target: LAMA2; (+) strand; PAM type: YTN; PAM sequence: TTG
cttcccctctgtggcttgtc

SEQ ID NO: 389914 - DNA, 20 bp, Artificial Sequence
  Description of Artificial Sequence: Synthetic oligonucleotide
  Target: LAMA2; (+) strand; PAM type: YTN; PAM sequence: CTT
cccctctgtggcttgtcttg

SEQ ID NO: 389915 - DNA, 20 bp, Artificial Sequence
  Description of Artificial Sequence: Synthetic oligonucleotide
  Target: LAMA2; (+) strand; PAM type: YTN; PAM sequence: TTC
ccctctgtggcttgtcttgt

SEQ ID NO: 389916 - DNA, 20 bp, Artificial Sequence
  Description of Artificial Sequence: Synthetic oligonucleotide
  Target: LAMA2; (+) strand; PAM type: YTN; PAM sequence: CTC
tgtggcttgtcttgttctct

SEQ ID NO: 389917 - DNA, 20 bp, Artificial Sequence
  Description of Artificial Sequence: Synthetic oligonucleotide
  Target: LAMA2; (+) strand; PAM type: YTN; PAM sequence: CTG
tggcttgtcttgttctcttg

SEQ ID NO: 389918 - DNA, 20 bp, Artificial Sequence
  Description of Artificial Sequence: Synthetic oligonucleotide
  Target: LAMA2; (+) strand; PAM type: YTN; PAM sequence: CTT
gtcttgttctcttgagaagt

SEQ ID NO: 389919 - DNA, 20 bp, Artificial Sequence
  Description of Artificial Sequence: Synthetic oligonucleotide
  Target: LAMA2; (+) strand; PAM type: YTN; PAM sequence: TTG
tcttgttctcttgagaagtg

SEQ ID NO: 389920 - DNA, 20 bp, Artificial Sequence
  Description of Artificial Sequence: Synthetic oligonucleotide
  Target: LAMA2; (+) strand; PAM type: YTN; PAM sequence: CTT
gttctcttgagaagtgtctt

SEQ ID NO: 389921 - DNA, 20 bp, Artificial Sequence
  Description of Artificial Sequence: Synthetic oligonucleotide
  Target: LAMA2; (+) strand; PAM type: YTN; PAM sequence: TTG
ttctcttgagaagtgtcttt

SEQ ID NO: 389922 - DNA, 20 bp, Artificial Sequence
  Description of Artificial Sequence: Synthetic oligonucleotide
  Target: LAMA2; (+) strand; PAM type: YTN; PAM sequence: TTC
tcttgagaagtgtctttcac

SEQ ID NO: 389923 - DNA, 20 bp, Artificial Sequence
  Description of Artificial Sequence: Synthetic oligonucleotide
  Target: LAMA2; (+) strand; PAM type: YTN; PAM sequence: CTC
ttgagaagtgtctttcacag

SEQ ID NO: 389924 - DNA, 20 bp, Artificial Sequence
  Description of Artificial Sequence: Synthetic oligonucleotide
  Target: LAMA2; (+) strand; PAM type: YTN; PAM sequence: CTT
gagaagtgtctttcacagag

SEQ ID NO: 389925 - DNA, 20 bp, Artificial Sequence
  Description of Artificial Sequence: Synthetic oligonucleotide
  Target: LAMA2; (+) strand; PAM type: YTN; PAM sequence: TTG
agaagtgtctttcacagagc

SEQ ID NO: 389926 - DNA, 20 bp, Artificial Sequence
  Description of Artificial Sequence: Synthetic oligonucleotide
  Target: LAMA2; (+) strand; PAM type: YTN; PAM sequence: CTT
tcacagagcagaagttttta

SEQ ID NO: 389927 - DNA, 20 bp, Artificial Sequence
  Description of Artificial Sequence: Synthetic oligonucleotide
  Target: LAMA2; (+) strand; PAM type: YTN; PAM sequence: TTT
cacagagcagaagtttttaa

SEQ ID NO: 389928 - DNA, 20 bp, Artificial Sequence
  Description of Artificial Sequence: Synthetic oligonucleotide
  Target: LAMA2; (+) strand; PAM type: YTN; PAM sequence: TTC
acagagcagaagtttttaat

SEQ ID NO: 389929 - DNA, 20 bp, Artificial Sequence
  Description of Artificial Sequence: Synthetic oligonucleotide
  Target: LAMA2; (+) strand; PAM type: YTN; PAM sequence: TTT
ttaattgtaacgaagcccag

SEQ ID NO: 389930 - DNA, 20 bp, Artificial Sequence
  Description of Artificial Sequence: Synthetic oligonucleotide
  Target: LAMA2; (+) strand; PAM type: YTN; PAM sequence: TTT
taattgtaacgaagcccagc

SEQ ID NO: 389931 - DNA, 20 bp, Artificial Sequence
  Description of Artificial Sequence: Synthetic oligonucleotide
  Target: LAMA2; (+) strand; PAM type: YTN; PAM sequence: TTT
aattgtaacgaagcccagct

SEQ ID NO: 389932 - DNA, 20 bp, Artificial Sequence
  Description of Artificial Sequence: Synthetic oligonucleotide
  Target: LAMA2; (+) strand; PAM type: YTN; PAM sequence: TTA
attgtaacgaagcccagctt

SEQ ID NO: 389933 - DNA, 20 bp, Artificial Sequence
  Description of Artificial Sequence: Synthetic oligonucleotide
  Target: LAMA2; (+) strand; PAM type: YTN; PAM sequence: TTG
taacgaagcccagcttatca

SEQ ID NO: 389934 - DNA, 20 bp, Artificial Sequence
  Description of Artificial Sequence: Synthetic oligonucleotide
  Target: LAMA2; (+) strand; PAM type: YTN; PAM sequence: CTT
atcaattaggtttctccttg

SEQ ID NO: 389935 - DNA, 20 bp, Artificial Sequence
  Description of Artificial Sequence: Synthetic oligonucleotide
  Target: LAMA2; (+) strand; PAM type: YTN; PAM sequence: TTA
tcaattaggtttctccttgt

SEQ ID NO: 389936 - DNA, 20 bp, Artificial Sequence
  Description of Artificial Sequence: Synthetic oligonucleotide
  Target: LAMA2; (+) strand; PAM type: YTN; PAM sequence: TTA
ggtttctccttgttgagcct

SEQ ID NO: 389937 - DNA, 20 bp, Artificial Sequence
  Description of Artificial Sequence: Synthetic oligonucleotide
  Target: LAMA2; (+) strand; PAM type: YTN; PAM sequence: TTT
ctccttgttgagcctttggt

SEQ ID NO: 389938 - DNA, 20 bp, Artificial Sequence
  Description of Artificial Sequence: Synthetic oligonucleotide
  Target: LAMA2; (+) strand; PAM type: YTN; PAM sequence: TTC
tccttgttgagcctttggtg

SEQ ID NO: 389939 - DNA, 20 bp, Artificial Sequence
  Description of Artificial Sequence: Synthetic oligonucleotide
  Target: LAMA2; (+) strand; PAM type: YTN; PAM sequence: CTC
cttgttgagcctttggtgtt

SEQ ID NO: 389940 - DNA, 20 bp, Artificial Sequence
  Description of Artificial Sequence: Synthetic oligonucleotide
  Target: LAMA2; (+) strand; PAM type: YTN; PAM sequence: CTT
gttgagcctttggtgttgta

SEQ ID NO: 389941 - DNA, 20 bp, Artificial Sequence
  Description of Artificial Sequence: Synthetic oligonucleotide
  Target: LAMA2; (+) strand; PAM type: YTN; PAM sequence: TTG
ttgagcctttggtgttgtat

SEQ ID NO: 389942 - DNA, 20 bp, Artificial Sequence
  Description of Artificial Sequence: Synthetic oligonucleotide
  Target: LAMA2; (+) strand; PAM type: YTN; PAM sequence: TTG
agcctttggtgttgtatcta

SEQ ID NO: 389943 - DNA, 20 bp, Artificial Sequence
  Description of Artificial Sequence: Synthetic oligonucleotide
  Target: LAMA2; (+) strand; PAM type: YTN; PAM sequence: CTT
tggtgttgtatctaaagact

SEQ ID NO: 389944 - DNA, 20 bp, Artificial Sequence
  Description of Artificial Sequence: Synthetic oligonucleotide
  Target: LAMA2; (+) strand; PAM type: YTN; PAM sequence: TTT
ggtgttgtatctaaagactc

SEQ ID NO: 389945 - DNA, 20 bp, Artificial Sequence
  Description of Artificial Sequence: Synthetic oligonucleotide
  Target: LAMA2; (+) strand; PAM type: YTN; PAM sequence: TTG
gtgttgtatctaaagactca

SEQ ID NO: 389946 - DNA, 20 bp, Artificial Sequence
  Description of Artificial Sequence: Synthetic oligonucleotide
  Target: LAMA2; (+) strand; PAM type: YTN; PAM sequence: TTG
tatctaaagactcattgcca

SEQ ID NO: 389947 - DNA, 20 bp, Artificial Sequence
  Description of Artificial Sequence: Synthetic oligonucleotide
  Target: LAMA2; (+) strand; PAM type: YTN; PAM sequence: CTA
aagactcattgccatatcca

SEQ ID NO: 389948 - DNA, 20 bp, Artificial Sequence
  Description of Artificial Sequence: Synthetic oligonucleotide
  Target: LAMA2; (+) strand; PAM type: YTN; PAM sequence: CTC
attgccatatccacggtcat

SEQ ID NO: 389949 - DNA, 20 bp, Artificial Sequence
  Description of Artificial Sequence: Synthetic oligonucleotide
  Target: LAMA2; (+) strand; PAM type: YTN; PAM sequence: TTG
ccatatccacggtcatctag

SEQ ID NO: 389950 - DNA, 20 bp, Artificial Sequence
  Description of Artificial Sequence: Synthetic oligonucleotide
  Target: LAMA2; (+) strand; PAM type: YTN; PAM sequence: CTA
gattttctcctatgctatct

SEQ ID NO: 389951 - DNA, 20 bp, Artificial Sequence
  Description of Artificial Sequence: Synthetic oligonucleotide
  Target: LAMA2; (+) strand; PAM type: YTN; PAM sequence: TTT
tctcctatgctatcttctag

SEQ ID NO: 389952 - DNA, 20 bp, Artificial Sequence
  Description of Artificial Sequence: Synthetic oligonucleotide
  Target: LAMA2; (+) strand; PAM type: YTN; PAM sequence: TTT
ctcctatgctatcttctagg

SEQ ID NO: 389953 - DNA, 20 bp, Artificial Sequence
  Description of Artificial Sequence: Synthetic oligonucleotide
  Target: LAMA2; (+) strand; PAM type: YTN; PAM sequence: TTC
tcctatgctatcttctagga

SEQ ID NO: 389954 - DNA, 20 bp, Artificial Sequence
  Description of Artificial Sequence: Synthetic oligonucleotide
  Target: LAMA2; (+) strand; PAM type: YTN; PAM sequence: CTC
ctatgctatcttctaggagc

SEQ ID NO: 389955 - DNA, 20 bp, Artificial Sequence
  Description of Artificial Sequence: Synthetic oligonucleotide
  Target: LAMA2; (+) strand; PAM type: YTN; PAM sequence: CTA
tgctatcttctaggagcgtt

SEQ ID NO: 389956 - DNA, 20 bp, Artificial Sequence
  Description of Artificial Sequence: Synthetic oligonucleotide
  Target: LAMA2; (+) strand; PAM type: YTN; PAM sequence: CTA
tcttctaggagcgttacagt

SEQ ID NO: 389957 - DNA, 20 bp, Artificial Sequence
  Description of Artificial Sequence: Synthetic oligonucleotide
  Target: LAMA2; (+) strand; PAM type: YTN; PAM sequence: CTT
ctaggagcgttacagttttg

SEQ ID NO: 389958 - DNA, 20 bp, Artificial Sequence
  Description of Artificial Sequence: Synthetic oligonucleotide
  Target: LAMA2; (+) strand; PAM type: YTN; PAM sequence: TTC
taggagcgttacagttttgc

SEQ ID NO: 389959 - DNA, 20 bp, Artificial Sequence
  Description of Artificial Sequence: Synthetic oligonucleotide
  Target: LAMA2; (+) strand; PAM type: YTN; PAM sequence: CTA
ggagcgttacagttttgcat

SEQ ID NO: 389960 - DNA, 20 bp, Artificial Sequence
  Description of Artificial Sequence: Synthetic oligonucleotide
  Target: LAMA2; (+) strand; PAM type: YTN; PAM sequence: TTA
cagttttgcattttacactt

SEQ ID NO: 389961 - DNA, 20 bp, Artificial Sequence
  Description of Artificial Sequence: Synthetic oligonucleotide
  Target: LAMA2; (+) strand; PAM type: YTN; PAM sequence: TTT
tgcattttacacttaggtct

SEQ ID NO: 389962 - DNA, 20 bp, Artificial Sequence
  Description of Artificial Sequence: Synthetic oligonucleotide
  Target: LAMA2; (+) strand; PAM type: YTN; PAM sequence: TTT
gcattttacacttaggtcta

SEQ ID NO: 389963 - DNA, 20 bp, Artificial Sequence
  Description of Artificial Sequence: Synthetic oligonucleotide
  Target: LAMA2; (+) strand; PAM type: YTN; PAM sequence: TTG
cattttacacttaggtctat

SEQ ID NO: 389964 - DNA, 20 bp, Artificial Sequence
  Description of Artificial Sequence: Synthetic oligonucleotide
  Target: LAMA2; (+) strand; PAM type: YTN; PAM sequence: TTT
tacacttaggtctataatcc

SEQ ID NO: 389965 - DNA, 20 bp, Artificial Sequence
  Description of Artificial Sequence: Synthetic oligonucleotide
  Target: LAMA2; (+) strand; PAM type: YTN; PAM sequence: TTT
acacttaggtctataatcca

SEQ ID NO: 389966 - DNA, 20 bp, Artificial Sequence
  Description of Artificial Sequence: Synthetic oligonucleotide
  Target: LAMA2; (+) strand; PAM type: YTN; PAM sequence: TTA
cacttaggtctataatccat

SEQ ID NO: 389967 - DNA, 20 bp, Artificial Sequence
  Description of Artificial Sequence: Synthetic oligonucleotide
  Target: LAMA2; (+) strand; PAM type: YTN; PAM sequence: CTT
aggtctataatccattttta

SEQ ID NO: 389968 - DNA, 20 bp, Artificial Sequence
  Description of Artificial Sequence: Synthetic oligonucleotide
  Target: LAMA2; (+) strand; PAM type: YTN; PAM sequence: TTA
ggtctataatccatttttag

SEQ ID NO: 389969 - DNA, 20 bp, Artificial Sequence
  Description of Artificial Sequence: Synthetic oligonucleotide
  Target: LAMA2; (+) strand; PAM type: YTN; PAM sequence: CTA
taatccatttttagttaatt

SEQ ID NO: 389970 - DNA, 20 bp, Artificial Sequence
  Description of Artificial Sequence: Synthetic oligonucleotide
  Target: LAMA2; (+) strand; PAM type: YTN; PAM sequence: TTT
ttagttaattccaatactat

SEQ ID NO: 389971 - DNA, 20 bp, Artificial Sequence
  Description of Artificial Sequence: Synthetic oligonucleotide
  Target: LAMA2; (+) strand; PAM type: YTN; PAM sequence: TTT
tagttaattccaatactatt

SEQ ID NO: 389972 - DNA, 20 bp, Artificial Sequence
  Description of Artificial Sequence: Synthetic oligonucleotide
  Target: LAMA2; (+) strand; PAM type: YTN; PAM sequence: TTT
agttaattccaatactattt

SEQ ID NO: 389973 - DNA, 20 bp, Artificial Sequence
  Description of Artificial Sequence: Synthetic oligonucleotide
  Target: LAMA2; (+) strand; PAM type: YTN; PAM sequence: TTA
gttaattccaatactatttt

SEQ ID NO: 389974 - DNA, 20 bp, Artificial Sequence
  Description of Artificial Sequence: Synthetic oligonucleotide
  Target: LAMA2; (+) strand; PAM type: YTN; PAM sequence: TTA
attccaatactattttaaaa

SEQ ID NO: 389975 - DNA, 20 bp, Artificial Sequence
  Description of Artificial Sequence: Synthetic oligonucleotide
  Target: LAMA2; (+) strand; PAM type: YTN; PAM sequence: TTC
caatactattttaaaataaa

SEQ ID NO: 389976 - DNA, 20 bp, Artificial Sequence
  Description of Artificial Sequence: Synthetic oligonucleotide
  Target: LAMA2; (+) strand; PAM type: YTN; PAM sequence: CTA
ttttaaaataaactttttac

SEQ ID NO: 389977 - DNA, 20 bp, Artificial Sequence
  Description of Artificial Sequence: Synthetic oligonucleotide
  Target: LAMA2; (+) strand; PAM type: YTN; PAM sequence: TTT
taaaataaactttttacttt

SEQ ID NO: 389978 - DNA, 20 bp, Artificial Sequence
  Description of Artificial Sequence: Synthetic oligonucleotide
  Target: LAMA2; (+) strand; PAM type: YTN; PAM sequence: TTT
aaaataaactttttacttta

SEQ ID NO: 389979 - DNA, 20 bp, Artificial Sequence
  Description of Artificial Sequence: Synthetic oligonucleotide
  Target: LAMA2; (+) strand; PAM type: YTN; PAM sequence: TTA
aaataaactttttactttac

SEQ ID NO: 389980 - DNA, 20 bp, Artificial Sequence
  Description of Artificial Sequence: Synthetic oligonucleotide
  Target: LAMA2; (+) strand; PAM type: YTN; PAM sequence: CTT
tttactttacagtagtttta

SEQ ID NO: 389981 - DNA, 20 bp, Artificial Sequence
  Description of Artificial Sequence: Synthetic oligonucleotide
  Target: LAMA2; (+) strand; PAM type: YTN; PAM sequence: TTT
ttactttacagtagttttag

SEQ ID NO: 389982 - DNA, 20 bp, Artificial Sequence
  Description of Artificial Sequence: Synthetic oligonucleotide
  Target: LAMA2; (+) strand; PAM type: YTN; PAM sequence: TTT
tactttacagtagttttaga

SEQ ID NO: 389983 - DNA, 20 bp, Artificial Sequence
  Description of Artificial Sequence: Synthetic oligonucleotide
  Target: LAMA2; (+) strand; PAM type: YTN; PAM sequence: TTT
actttacagtagttttagat

SEQ ID NO: 389984 - DNA, 20 bp, Artificial Sequence
  Description of Artificial Sequence: Synthetic oligonucleotide
  Target: LAMA2; (+) strand; PAM type: YTN; PAM sequence: TTA
ctttacagtagttttagatt

SEQ ID NO: 389985 - DNA, 20 bp, Artificial Sequence
  Description of Artificial Sequence: Synthetic oligonucleotide
  Target: LAMA2; (+) strand; PAM type: YTN; PAM sequence: CTT
tacagtagttttagatttca

SEQ ID NO: 389986 - DNA, 20 bp, Artificial Sequence
  Description of Artificial Sequence: Synthetic oligonucleotide
  Target: LAMA2; (+) strand; PAM type: YTN; PAM sequence: TTT
acagtagttttagatttcaa

SEQ ID NO: 389987 - DNA, 20 bp, Artificial Sequence
  Description of Artificial Sequence: Synthetic oligonucleotide
  Target: LAMA2; (+) strand; PAM type: YTN; PAM sequence: TTA
cagtagttttagatttcaaa

SEQ ID NO: 389988 - DNA, 20 bp, Artificial Sequence
  Description of Artificial Sequence: Synthetic oligonucleotide
  Target: LAMA2; (+) strand; PAM type: YTN; PAM sequence: TTT
tagatttcaaaaaacttgca

SEQ ID NO: 389989 - DNA, 20 bp, Artificial Sequence
  Description of Artificial Sequence: Synthetic oligonucleotide
  Target: LAMA2; (+) strand; PAM type: YTN; PAM sequence: TTT
agatttcaaaaaacttgcaa

SEQ ID NO: 389990 - DNA, 20 bp, Artificial Sequence
  Description of Artificial Sequence: Synthetic oligonucleotide
  Target: LAMA2; (+) strand; PAM type: YTN; PAM sequence: TTA
gatttcaaaaaacttgcaaa

SEQ ID NO: 389991 - DNA, 20 bp, Artificial Sequence
  Description of Artificial Sequence: Synthetic oligonucleotide
  Target: LAMA2; (+) strand; PAM type: YTN; PAM sequence: TTT
caaaaaacttgcaaagagag

SEQ ID NO: 389992 - DNA, 20 bp, Artificial Sequence
  Description of Artificial Sequence: Synthetic oligonucleotide
  Target: LAMA2; (+) strand; PAM type: YTN; PAM sequence: TTC
aaaaaacttgcaaagagagt

SEQ ID NO: 389993 - DNA, 20 bp, Artificial Sequence
  Description of Artificial Sequence: Synthetic oligonucleotide
  Target: LAMA2; (+) strand; PAM type: YTN; PAM sequence: CTT
gcaaagagagtaccaagagc

SEQ ID NO: 389994 - DNA, 20 bp, Artificial Sequence
  Description of Artificial Sequence: Synthetic oligonucleotide
  Target: LAMA2; (+) strand; PAM type: YTN; PAM sequence: TTG
caaagagagtaccaagagcc

SEQ ID NO: 389995 - DNA, 20 bp, Artificial Sequence
  Description of Artificial Sequence: Synthetic oligonucleotide
  Target: LAMA2; (+) strand; PAM type: YTN; PAM sequence: CTT
cacatactccattcccagtc

SEQ ID NO: 389996 - DNA, 20 bp, Artificial Sequence
  Description of Artificial Sequence: Synthetic oligonucleotide
  Target: LAMA2; (+) strand; PAM type: YTN; PAM sequence: TTC
acatactccattcccagtct

SEQ ID NO: 389997 - DNA, 20 bp, Artificial Sequence
  Description of Artificial Sequence: Synthetic oligonucleotide
  Target: LAMA2; (+) strand; PAM type: YTN; PAM sequence: CTC
cattcccagtctccccattg

SEQ ID NO: 389998 - DNA, 20 bp, Artificial Sequence
  Description of Artificial Sequence: Synthetic oligonucleotide
  Target: LAMA2; (+) strand; PAM type: YTN; PAM sequence: TTC
ccagtctccccattgttaac

SEQ ID NO: 389999 - DNA, 20 bp, Artificial Sequence
  Description of Artificial Sequence: Synthetic oligonucleotide
  Target: LAMA2; (+) strand; PAM type: YTN; PAM sequence: CTC
cccattgttaacatcttaca

SEQ ID NO: 390000 - DNA, 20 bp, Artificial Sequence
  Description of Artificial Sequence: Synthetic oligonucleotide
  Target: LAMA2; (+) strand; PAM type: YTN; PAM sequence: TTG
ttaacatcttacattagcat

SEQ ID NO: 390001 - DNA, 20 bp, Artificial Sequence
  Description of Artificial Sequence: Synthetic oligonucleotide
  Target: LAMA2; (+) strand; PAM type: YTN; PAM sequence: TTA
acatcttacattagcatggt

SEQ ID NO: 390002 - DNA, 20 bp, Artificial Sequence
  Description of Artificial Sequence: Synthetic oligonucleotide
  Target: LAMA2; (+) strand; PAM type: YTN; PAM sequence: CTT
acattagcatggtacatgtg

SEQ ID NO: 390003 - DNA, 20 bp, Artificial Sequence
  Description of Artificial Sequence: Synthetic oligonucleotide
  Target: LAMA2; (+) strand; PAM type: YTN; PAM sequence: TTA
cattagcatggtacatgtgt

SEQ ID NO: 390004 - DNA, 20 bp, Artificial Sequence
  Description of Artificial Sequence: Synthetic oligonucleotide
  Target: LAMA2; (+) strand; PAM type: YTN; PAM sequence: TTA
gcatggtacatgtgtcatat

SEQ ID NO: 390005 - DNA, 20 bp, Artificial Sequence
  Description of Artificial Sequence: Synthetic oligonucleotide
  Target: LAMA2; (+) strand; PAM type: YTN; PAM sequence: TTA
tatacatgtgtcatatacat

SEQ ID NO: 390006 - DNA, 20 bp, Artificial Sequence
  Description of Artificial Sequence: Synthetic oligonucleotide
  Target: LAMA2; (+) strand; PAM type: YTN; PAM sequence: TTA
gctcatatacatgagctaat

SEQ ID NO: 390007 - DNA, 20 bp, Artificial Sequence
  Description of Artificial Sequence: Synthetic oligonucleotide
  Target: LAMA2; (+) strand; PAM type: YTN; PAM sequence: CTC
atatacatgagctaataata

SEQ ID NO: 390008 - DNA, 20 bp, Artificial Sequence
  Description of Artificial Sequence: Synthetic oligonucleotide
  Target: LAMA2; (+) strand; PAM type: YTN; PAM sequence: CTA
ataatattgaaatattacca

SEQ ID NO: 390009 - DNA, 20 bp, Artificial Sequence
  Description of Artificial Sequence: Synthetic oligonucleotide
  Target: LAMA2; (+) strand; PAM type: YTN; PAM sequence: TTG
aaatattaccattaacccaa

SEQ ID NO: 390010 - DNA, 20 bp, Artificial Sequence
  Description of Artificial Sequence: Synthetic oligonucleotide
  Target: LAMA2; (+) strand; PAM type: YTN; PAM sequence: TTA
ccattaacccaagactgtat

SEQ ID NO: 390011 - DNA, 20 bp, Artificial Sequence
  Description of Artificial Sequence: Synthetic oligonucleotide
  Target: LAMA2; (+) strand; PAM type: YTN; PAM sequence: TTA
acccaagactgtattcatat

SEQ ID NO: 390012 - DNA, 20 bp, Artificial Sequence
  Description of Artificial Sequence: Synthetic oligonucleotide
  Target: LAMA2; (+) strand; PAM type: YTN; PAM sequence: CTG
tattcatattttttcagtgt

SEQ ID NO: 390013 - DNA, 20 bp, Artificial Sequence
  Description of Artificial Sequence: Synthetic oligonucleotide
  Target: LAMA2; (+) strand; PAM type: YTN; PAM sequence: TTC
atattttttcagtgtttact

SEQ ID NO: 390014 - DNA, 20 bp, Artificial Sequence
  Description of Artificial Sequence: Synthetic oligonucleotide
  Target: LAMA2; (+) strand; PAM type: YTN; PAM sequence: TTT
tttcagtgtttactgaatgt

SEQ ID NO: 390015 - DNA, 20 bp, Artificial Sequence
  Description of Artificial Sequence: Synthetic oligonucleotide
  Target: LAMA2; (+) strand; PAM type: YTN; PAM sequence: TTT
ttcagtgtttactgaatgtt

SEQ ID NO: 390016 - DNA, 20 bp, Artificial Sequence
  Description of Artificial Sequence: Synthetic oligonucleotide
  Target: LAMA2; (+) strand; PAM type: YTN; PAM sequence: TTT
tcagtgtttactgaatgttt

SEQ ID NO: 390017 - DNA, 20 bp, Artificial Sequence
  Description of Artificial Sequence: Synthetic oligonucleotide
  Target: LAMA2; (+) strand; PAM type: YTN; PAM sequence: TTT
cagtgtttactgaatgtttt

SEQ ID NO: 390018 - DNA, 20 bp, Artificial Sequence
  Description of Artificial Sequence: Synthetic oligonucleotide
  Target: LAMA2; (+) strand; PAM type: YTN; PAM sequence: TTC
agtgtttactgaatgttttt

SEQ ID NO: 390019 - DNA, 20 bp, Artificial Sequence
  Description of Artificial Sequence: Synthetic oligonucleotide
  Target: LAMA2; (+) strand; PAM type: YTN; PAM sequence: TTT
actgaatgtttttttactgt

SEQ ID NO: 390020 - DNA, 20 bp, Artificial Sequence
  Description of Artificial Sequence: Synthetic oligonucleotide
  Target: LAMA2; (+) strand; PAM type: YTN; PAM sequence: TTA
ctgaatgtttttttactgtt

SEQ ID NO: 390021 - DNA, 20 bp, Artificial Sequence
  Description of Artificial Sequence: Synthetic oligonucleotide
  Target: LAMA2; (+) strand; PAM type: YTN; PAM sequence: CTG
aatgtttttttactgtttca

SEQ ID NO: 390022 - DNA, 20 bp, Artificial Sequence
  Description of Artificial Sequence: Synthetic oligonucleotide
  Target: LAMA2; (+) strand; PAM type: YTN; PAM sequence: TTT
ttttactgtttcaggatccc

SEQ ID NO: 390023 - DNA, 20 bp, Artificial Sequence
  Description of Artificial Sequence: Synthetic oligonucleotide
  Target: LAMA2; (+) strand; PAM type: YTN; PAM sequence: TTT
tttactgtttcaggatccca

SEQ ID NO: 390024 - DNA, 20 bp, Artificial Sequence
  Description of Artificial Sequence: Synthetic oligonucleotide
  Target: LAMA2; (+) strand; PAM type: YTN; PAM sequence: TTT
ttactgtttcaggatcccat

SEQ ID NO: 390025 - DNA, 20 bp, Artificial Sequence
  Description of Artificial Sequence: Synthetic oligonucleotide
  Target: LAMA2; (+) strand; PAM type: YTN; PAM sequence: TTT
tactgtttcaggatcccatg

SEQ ID NO: 390026 - DNA, 20 bp, Artificial Sequence
  Description of Artificial Sequence: Synthetic oligonucleotide
  Target: LAMA2; (+) strand; PAM type: YTN; PAM sequence: TTT
actgtttcaggatcccatgc

SEQ ID NO: 390027 - DNA, 20 bp, Artificial Sequence
  Description of Artificial Sequence: Synthetic oligonucleotide
  Target: LAMA2; (+) strand; PAM type: YTN; PAM sequence: TTA
ctgtttcaggatcccatgca

SEQ ID NO: 390028 - DNA, 20 bp, Artificial Sequence
  Description of Artificial Sequence: Synthetic oligonucleotide
  Target: LAMA2; (+) strand; PAM type: YTN; PAM sequence: CTG
tttcaggatcccatgcagga

SEQ ID NO: 390029 - DNA, 20 bp, Artificial Sequence
  Description of Artificial Sequence: Synthetic oligonucleotide
  Target: LAMA2; (+) strand; PAM type: YTN; PAM sequence: TTT
caggatcccatgcaggatac

SEQ ID NO: 390030 - DNA, 20 bp, Artificial Sequence
  Description of Artificial Sequence: Synthetic oligonucleotide
  Target: LAMA2; (+) strand; PAM type: YTN; PAM sequence: TTC
aggatcccatgcaggatact

SEQ ID NO: 390031 - DNA, 20 bp, Artificial Sequence
  Description of Artificial Sequence: Synthetic oligonucleotide
  Target: LAMA2; (+) strand; PAM type: YTN; PAM sequence: CTA
cattacatttagccattgtg

SEQ ID NO: 390032 - DNA, 20 bp, Artificial Sequence
  Description of Artificial Sequence: Synthetic oligonucleotide
  Target: LAMA2; (+) strand; PAM type: YTN; PAM sequence: TTA
catttagccattgtgtcttc

SEQ ID NO: 390033 - DNA, 20 bp, Artificial Sequence
  Description of Artificial Sequence: Synthetic oligonucleotide
  Target: LAMA2; (+) strand; PAM type: YTN; PAM sequence: TTT
agccattgtgtcttcttagg

SEQ ID NO: 390034 - DNA, 20 bp, Artificial Sequence
  Description of Artificial Sequence: Synthetic oligonucleotide
  Target: LAMA2; (+) strand; PAM type: YTN; PAM sequence: TTA
gccattgtgtcttcttaggg

SEQ ID NO: 390035 - DNA, 20 bp, Artificial Sequence
  Description of Artificial Sequence: Synthetic oligonucleotide
  Target: LAMA2; (+) strand; PAM type: YTN; PAM sequence: TTG
tgtcttcttagggttcctct

SEQ ID NO: 390036 - DNA, 20 bp, Artificial Sequence
  Description of Artificial Sequence: Synthetic oligonucleotide
  Target: LAMA2; (+) strand; PAM type: YTN; PAM sequence: CTT
cttagggttcctctagactg

SEQ ID NO: 390037 - DNA, 20 bp, Artificial Sequence
  Description of Artificial Sequence: Synthetic oligonucleotide
  Target: LAMA2; (+) strand; PAM type: YTN; PAM sequence: TTC
ttagggttcctctagactgt

SEQ ID NO: 390038 - DNA, 20 bp, Artificial Sequence
  Description of Artificial Sequence: Synthetic oligonucleotide
  Target: LAMA2; (+) strand; PAM type: YTN; PAM sequence: CTT
agggttcctctagactgtga

SEQ ID NO: 390039 - DNA, 20 bp, Artificial Sequence
  Description of Artificial Sequence: Synthetic oligonucleotide
  Target: LAMA2; (+) strand; PAM type: YTN; PAM sequence: TTA
gggttcctctagactgtgac

SEQ ID NO: 390040 - DNA, 20 bp, Artificial Sequence
  Description of Artificial Sequence: Synthetic oligonucleotide
  Target: LAMA2; (+) strand; PAM type: YTN; PAM sequence: TTC
ctctagactgtgacgacact

SEQ ID NO: 390041 - DNA, 20 bp, Artificial Sequence
  Description of Artificial Sequence: Synthetic oligonucleotide
  Target: LAMA2; (+) strand; PAM type: YTN; PAM sequence: CTC
tagactgtgacgacactgtc

SEQ ID NO: 390042 - DNA, 20 bp, Artificial Sequence
  Description of Artificial Sequence: Synthetic oligonucleotide
  Target: LAMA2; (+) strand; PAM type: YTN; PAM sequence: CTA
gactgtgacgacactgtcaa

SEQ ID NO: 390043 - DNA, 20 bp, Artificial Sequence
  Description of Artificial Sequence: Synthetic oligonucleotide
  Target: LAMA2; (+) strand; PAM type: YTN; PAM sequence: CTG
tgacgacactgtcaaaaata

SEQ ID NO: 390044 - DNA, 20 bp, Artificial Sequence
  Description of Artificial Sequence: Synthetic oligonucleotide
  Target: LAMA2; (+) strand; PAM type: YTN; PAM sequence: CTG
tcaaaaatactgtaacagtg

SEQ ID NO: 390045 - DNA, 20 bp, Artificial Sequence
  Description of Artificial Sequence: Synthetic oligonucleotide
  Target: LAMA2; (+) strand; PAM type: YTN; PAM sequence: CTG
taacagtgtttctgatgact

SEQ ID NO: 390046 - DNA, 20 bp, Artificial Sequence
  Description of Artificial Sequence: Synthetic oligonucleotide
  Target: LAMA2; (+) strand; PAM type: YTN; PAM sequence: TTT
ctgatgactttgagagtttg

SEQ ID NO: 390047 - DNA, 20 bp, Artificial Sequence
  Description of Artificial Sequence: Synthetic oligonucleotide
  Target: LAMA2; (+) strand; PAM type: YTN; PAM sequence: TTC
tgatgactttgagagtttgg

SEQ ID NO: 390048 - DNA, 20 bp, Artificial Sequence
  Description of Artificial Sequence: Synthetic oligonucleotide
  Target: LAMA2; (+) strand; PAM type: YTN; PAM sequence: CTG
atgactttgagagtttggac

SEQ ID NO: 390049 - DNA, 20 bp, Artificial Sequence
  Description of Artificial Sequence: Synthetic oligonucleotide
  Target: LAMA2; (+) strand; PAM type: YTN; PAM sequence: CTT
tgagagtttggacaggttca

SEQ ID NO: 390050 - DNA, 20 bp, Artificial Sequence
  Description of Artificial Sequence: Synthetic oligonucleotide
  Target: LAMA2; (+) strand; PAM type: YTN; PAM sequence: TTT
gagagtttggacaggttcat

SEQ ID NO: 390051 - DNA, 20 bp, Artificial Sequence
  Description of Artificial Sequence: Synthetic oligonucleotide
  Target: LAMA2; (+) strand; PAM type: YTN; PAM sequence: TTG
agagtttggacaggttcatg

SEQ ID NO: 390052 - DNA, 20 bp, Artificial Sequence
  Description of Artificial Sequence: Synthetic oligonucleotide
  Target: LAMA2; (+) strand; PAM type: YTN; PAM sequence: TTT
ggacaggttcatgtgtttgg

SEQ ID NO: 390053 - DNA, 20 bp, Artificial Sequence
  Description of Artificial Sequence: Synthetic oligonucleotide
  Target: LAMA2; (+) strand; PAM type: YTN; PAM sequence: TTG
gacaggttcatgtgtttggt

SEQ ID NO: 390054 - DNA, 20 bp, Artificial Sequence
  Description of Artificial Sequence: Synthetic oligonucleotide
  Target: LAMA2; (+) strand; PAM type: YTN; PAM sequence: TTC
atgtgtttggtaagctgtcc

SEQ ID NO: 390055 - DNA, 20 bp, Artificial Sequence
  Description of Artificial Sequence: Synthetic oligonucleotide
  Target: LAMA2; (+) strand; PAM type: YTN; PAM sequence: TTT
ggtaagctgtccctcaattg

SEQ ID NO: 390056 - DNA, 20 bp, Artificial Sequence
  Description of Artificial Sequence: Synthetic oligonucleotide
  Target: LAMA2; (+) strand; PAM type: YTN; PAM sequence: TTG
gtaagctgtccctcaattgg

SEQ ID NO: 390057 - DNA, 20 bp, Artificial Sequence
  Description of Artificial Sequence: Synthetic oligonucleotide
  Target: LAMA2; (+) strand; PAM type: YTN; PAM sequence: CTG
tccctcaattggggtttgcc

SEQ ID NO: 390058 - DNA, 20 bp, Artificial Sequence
  Description of Artificial Sequence: Synthetic oligonucleotide
  Target: LAMA2; (+) strand; PAM type: YTN; PAM sequence: CTC
aattggggtttgcctcatat

SEQ ID NO: 390059 - DNA, 20 bp, Artificial Sequence
  Description of Artificial Sequence: Synthetic oligonucleotide
  Target: LAMA2; (+) strand; PAM type: YTN; PAM sequence: TTG
gggtttgcctcatatctttc

SEQ ID NO: 390060 - DNA, 20 bp, Artificial Sequence
  Description of Artificial Sequence: Synthetic oligonucleotide
  Target: LAMA2; (+) strand; PAM type: YTN; PAM sequence: TTT
gcctcatatctttctcatga

SEQ ID NO: 390061 - DNA, 20 bp, Artificial Sequence
  Description of Artificial Sequence: Synthetic oligonucleotide
  Target: LAMA2; (+) strand; PAM type: YTN; PAM sequence: TTG
cctcatatctttctcatgat

SEQ ID NO: 390062 - DNA, 20 bp, Artificial Sequence
  Description of Artificial Sequence: Synthetic oligonucleotide
  Target: LAMA2; (+) strand; PAM type: YTN; PAM sequence: CTC
atatctttctcatgattaga

SEQ ID NO: 390063 - DNA, 20 bp, Artificial Sequence
  Description of Artificial Sequence: Synthetic oligonucleotide
  Target: LAMA2; (+) strand; PAM type: YTN; PAM sequence: CTT
tctcatgattagaatggaat

SEQ ID NO: 390064 - DNA, 20 bp, Artificial Sequence
  Description of Artificial Sequence: Synthetic oligonucleotide
  Target: LAMA2; (+) strand; PAM type: YTN; PAM sequence: TTT
ctcatgattagaatggaatt

SEQ ID NO: 390065 - DNA, 20 bp, Artificial Sequence
  Description of Artificial Sequence: Synthetic oligonucleotide
  Target: LAMA2; (+) strand; PAM type: YTN; PAM sequence: TTC
tcatgattagaatggaatta

SEQ ID NO: 390066 - DNA, 20 bp, Artificial Sequence
  Description of Artificial Sequence: Synthetic oligonucleotide
  Target: LAMA2; (+) strand; PAM type: YTN; PAM sequence: CTC
atgattagaatggaattatg

SEQ ID NO: 390067 - DNA, 20 bp, Artificial Sequence
  Description of Artificial Sequence: Synthetic oligonucleotide
  Target: LAMA2; (+) strand; PAM type: YTN; PAM sequence: TTA
gaatggaattatgagttttt

SEQ ID NO: 390068 - DNA, 20 bp, Artificial Sequence
  Description of Artificial Sequence: Synthetic oligonucleotide
  Target: LAMA2; (+) strand; PAM type: YTN; PAM sequence: TTA
tgagtttttgtgggaaaaac

SEQ ID NO: 390069 - DNA, 20 bp, Artificial Sequence
  Description of Artificial Sequence: Synthetic oligonucleotide
  Target: LAMA2; (+) strand; PAM type: YTN; PAM sequence: TTT
ttgtgggaaaaacttcagag

SEQ ID NO: 390070 - DNA, 20 bp, Artificial Sequence
  Description of Artificial Sequence: Synthetic oligonucleotide
  Target: LAMA2; (+) strand; PAM type: YTN; PAM sequence: TTT
tgtgggaaaaacttcagagg

SEQ ID NO: 390071 - DNA, 20 bp, Artificial Sequence
  Description of Artificial Sequence: Synthetic oligonucleotide
  Target: LAMA2; (+) strand; PAM type: YTN; PAM sequence: TTT
gtgggaaaaacttcagaggt

SEQ ID NO: 390072 - DNA, 20 bp, Artificial Sequence
  Description of Artificial Sequence: Synthetic oligonucleotide
  Target: LAMA2; (+) strand; PAM type: YTN; PAM sequence: TTG
tgggaaaaacttcagaggta

SEQ ID NO: 390073 - DNA, 20 bp, Artificial Sequence
  Description of Artificial Sequence: Synthetic oligonucleotide
  Target: LAMA2; (+) strand; PAM type: YTN; PAM sequence: CTT
cagaggtaaagtaccatttt

SEQ ID NO: 390074 - DNA, 20 bp, Artificial Sequence
  Description of Artificial Sequence: Synthetic oligonucleotide
  Target: LAMA2; (+) strand; PAM type: YTN; PAM sequence: TTC
agaggtaaagtaccattttc

SEQ ID NO: 390075 - DNA, 20 bp, Artificial Sequence
  Description of Artificial Sequence: Synthetic oligonucleotide
  Target: LAMA2; (+) strand; PAM type: YTN; PAM sequence: TTT
tcatcacatcaagaacccat

SEQ ID NO: 390076 - DNA, 20 bp, Artificial Sequence
  Description of Artificial Sequence: Synthetic oligonucleotide
  Target: LAMA2; (+) strand; PAM type: YTN; PAM sequence: TTT
catcacatcaagaacccatg

SEQ ID NO: 390077 - DNA, 20 bp, Artificial Sequence
  Description of Artificial Sequence: Synthetic oligonucleotide
  Target: LAMA2; (+) strand; PAM type: YTN; PAM sequence: TTC
atcacatcaagaacccatgt

SEQ ID NO: 390078 - DNA, 20 bp, Artificial Sequence
  Description of Artificial Sequence: Synthetic oligonucleotide
  Target: LAMA2; (+) strand; PAM type: YTN; PAM sequence: CTT
attactgtggatattgaccc

SEQ ID NO: 390079 - DNA, 20 bp, Artificial Sequence
  Description of Artificial Sequence: Synthetic oligonucleotide
  Target: LAMA2; (+) strand; PAM type: YTN; PAM sequence: TTA
ttactgtggatattgaccct

SEQ ID NO: 390080 - DNA, 20 bp, Artificial Sequence
  Description of Artificial Sequence: Synthetic oligonucleotide
  Target: LAMA2; (+) strand; PAM type: YTN; PAM sequence: TTA
ctgtggatattgaccctgat

SEQ ID NO: 390081 - DNA, 20 bp, Artificial Sequence
  Description of Artificial Sequence: Synthetic oligonucleotide
  Target: LAMA2; (+) strand; PAM type: YTN; PAM sequence: CTG
tggatattgaccctgatcac

SEQ ID NO: 390082 - DNA, 20 bp, Artificial Sequence
  Description of Artificial Sequence: Synthetic oligonucleotide
  Target: LAMA2; (+) strand; PAM type: YTN; PAM sequence: TTG
accctgatcacctgactaac

SEQ ID NO: 390083 - DNA, 20 bp, Artificial Sequence
  Description of Artificial Sequence: Synthetic oligonucleotide
  Target: LAMA2; (+) strand; PAM type: YTN; PAM sequence: CTG
atcacctgactaacatagtg

SEQ ID NO: 390084 - DNA, 20 bp, Artificial Sequence
  Description of Artificial Sequence: Synthetic oligonucleotide
  Target: LAMA2; (+) strand; PAM type: YTN; PAM sequence: CTG
actaacatagtgtttgccag

SEQ ID NO: 390085 - DNA, 20 bp, Artificial Sequence
  Description of Artificial Sequence: Synthetic oligonucleotide
  Target: LAMA2; (+) strand; PAM type: YTN; PAM sequence: CTA
acatagtgtttgccagattt

SEQ ID NO: 390086 - DNA, 20 bp, Artificial Sequence
  Description of Artificial Sequence: Synthetic oligonucleotide
  Target: LAMA2; (+) strand; PAM type: YTN; PAM sequence: TTT
gccagatttttccactgtaa

SEQ ID NO: 390087 - DNA, 20 bp, Artificial Sequence
  Description of Artificial Sequence: Synthetic oligonucleotide
  Target: LAMA2; (+) strand; PAM type: YTN; PAM sequence: TTG
ccagatttttccactgtaaa

SEQ ID NO: 390088 - DNA, 20 bp, Artificial Sequence
  Description of Artificial Sequence: Synthetic oligonucleotide
  Target: LAMA2; (+) strand; PAM type: YTN; PAM sequence: TTT
ttccactgtaaagttactct

SEQ ID NO: 390089 - DNA, 20 bp, Artificial Sequence
  Description of Artificial Sequence: Synthetic oligonucleotide
  Target: LAMA2; (+) strand; PAM type: YTN; PAM sequence: TTT
tccactgtaaagttactctt

SEQ ID NO: 390090 - DNA, 20 bp, Artificial Sequence
  Description of Artificial Sequence: Synthetic oligonucleotide
  Target: LAMA2; (+) strand; PAM type: YTN; PAM sequence: TTT
ccactgtaaagttactcttt

SEQ ID NO: 390091 - DNA, 20 bp, Artificial Sequence
  Description of Artificial Sequence: Synthetic oligonucleotide
  Target: LAMA2; (+) strand; PAM type: YTN; PAM sequence: TTC
cactgtaaagttactctttt

SEQ ID NO: 390092 - DNA, 20 bp, Artificial Sequence
  Description of Artificial Sequence: Synthetic oligonucleotide
  Target: LAMA2; (+) strand; PAM type: YTN; PAM sequence: CTG
taaagttactcttttatgcc

SEQ ID NO: 390093 - DNA, 20 bp, Artificial Sequence
  Description of Artificial Sequence: Synthetic oligonucleotide
  Target: LAMA2; (+) strand; PAM type: YTN; PAM sequence: TTA
ctcttttatgcccttttcat

SEQ ID NO: 390094 - DNA, 20 bp, Artificial Sequence
  Description of Artificial Sequence: Synthetic oligonucleotide
  Target: LAMA2; (+) strand; PAM type: YTN; PAM sequence: CTC
ttttatgcccttttcatact

SEQ ID NO: 390095 - DNA, 20 bp, Artificial Sequence
  Description of Artificial Sequence: Synthetic oligonucleotide
  Target: LAMA2; (+) strand; PAM type: YTN; PAM sequence: CTT
ttatgcccttttcatactct

SEQ ID NO: 390096 - DNA, 20 bp, Artificial Sequence
  Description of Artificial Sequence: Synthetic oligonucleotide
  Target: LAMA2; (+) strand; PAM type: YTN; PAM sequence: TTT
tatgcccttttcatactcta

SEQ ID NO: 390097 - DNA, 20 bp, Artificial Sequence
  Description of Artificial Sequence: Synthetic oligonucleotide
  Target: LAMA2; (+) strand; PAM type: YTN; PAM sequence: TTT
atgcccttttcatactctaa

SEQ ID NO: 390098 - DNA, 20 bp, Artificial Sequence
  Description of Artificial Sequence: Synthetic oligonucleotide
  Target: LAMA2; (+) strand; PAM type: YTN; PAM sequence: TTA
tgcccttttcatactctaat

SEQ ID NO: 390099 - DNA, 20 bp, Artificial Sequence
  Description of Artificial Sequence: Synthetic oligonucleotide
  Target: LAMA2; (+) strand; PAM type: YTN; PAM sequence: CTT
ttcatactctaatactattt

SEQ ID NO: 390100 - DNA, 20 bp, Artificial Sequence
  Description of Artificial Sequence: Synthetic oligonucleotide
  Target: LAMA2; (+) strand; PAM type: YTN; PAM sequence: TTT
tcatactctaatactatttt

SEQ ID NO: 390101 - DNA, 20 bp, Artificial Sequence
  Description of Artificial Sequence: Synthetic oligonucleotide
  Target: LAMA2; (+) strand; PAM type: YTN; PAM sequence: TTT
catactctaatactattttt

SEQ ID NO: 390102 - DNA, 20 bp, Artificial Sequence
  Description of Artificial Sequence: Synthetic oligonucleotide
  Target: LAMA2; (+) strand; PAM type: YTN; PAM sequence: TTC
atactctaatactattttta

SEQ ID NO: 390103 - DNA, 20 bp, Artificial Sequence
  Description of Artificial Sequence: Synthetic oligonucleotide
  Target: LAMA2; (+) strand; PAM type: YTN; PAM sequence: CTC
taatactatttttatctgcc

SEQ ID NO: 390104 - DNA, 20 bp, Artificial Sequence
  Description of Artificial Sequence: Synthetic oligonucleotide
  Target: LAMA2; (+) strand; PAM type: YTN; PAM sequence: CTA
atactatttttatctgccca

SEQ ID NO: 390105 - DNA, 20 bp, Artificial Sequence
  Description of Artificial Sequence: Synthetic oligonucleotide
  Target: LAMA2; (+) strand; PAM type: YTN; PAM sequence: CTA
tttttatctgcccattcttc

SEQ ID NO: 390106 - DNA, 20 bp, Artificial Sequence
  Description of Artificial Sequence: Synthetic oligonucleotide
  Target: LAMA2; (+) strand; PAM type: YTN; PAM sequence: TTT
ttatctgcccattcttcaga

SEQ ID NO: 390107 - DNA, 20 bp, Artificial Sequence
  Description of Artificial Sequence: Synthetic oligonucleotide
  Target: LAMA2; (+) strand; PAM type: YTN; PAM sequence: TTT
tatctgcccattcttcagat

SEQ ID NO: 390108 - DNA, 20 bp, Artificial Sequence
  Description of Artificial Sequence: Synthetic oligonucleotide
  Target: LAMA2; (+) strand; PAM type: YTN; PAM sequence: TTT
atctgcccattcttcagatt

SEQ ID NO: 390109 - DNA, 20 bp, Artificial Sequence
  Description of Artificial Sequence: Synthetic oligonucleotide
  Target: LAMA2; (+) strand; PAM type: YTN; PAM sequence: TTA
tctgcccattcttcagattc

SEQ ID NO: 390110 - DNA, 20 bp, Artificial Sequence
  Description of Artificial Sequence: Synthetic oligonucleotide
  Target: LAMA2; (+) strand; PAM type: YTN; PAM sequence: CTG
cccattcttcagattcagta

SEQ ID NO: 390111 - DNA, 20 bp, Artificial Sequence
  Description of Artificial Sequence: Synthetic oligonucleotide
  Target: LAMA2; (+) strand; PAM type: YTN; PAM sequence: TTC
ttcagattcagtaacataaa

SEQ ID NO: 390112 - DNA, 20 bp, Artificial Sequence
  Description of Artificial Sequence: Synthetic oligonucleotide
  Target: LAMA2; (+) strand; PAM type: YTN; PAM sequence: CTT
cagattcagtaacataaaag

SEQ ID NO: 390113 - DNA, 20 bp, Artificial Sequence
  Description of Artificial Sequence: Synthetic oligonucleotide
  Target: LAMA2; (+) strand; PAM type: YTN; PAM sequence: TTC
agattcagtaacataaaagg

SEQ ID NO: 390114 - DNA, 20 bp, Artificial Sequence
  Description of Artificial Sequence: Synthetic oligonucleotide
  Target: LAMA2; (+) strand; PAM type: YTN; PAM sequence: TTC
agtaacataaaaggcgcaga

SEQ ID NO: 390115 - DNA, 20 bp, Artificial Sequence
  Description of Artificial Sequence: Synthetic oligonucleotide
  Target: LAMA2; (+) strand; PAM type: YTN; PAM sequence: CTA
ctgaaagcaaagatcacttt

SEQ ID NO: 390116 - DNA, 20 bp, Artificial Sequence
  Description of Artificial Sequence: Synthetic oligonucleotide
  Target: LAMA2; (+) strand; PAM type: YTN; PAM sequence: CTG
aaagcaaagatcactttgat

SEQ ID NO: 390117 - DNA, 20 bp, Artificial Sequence
  Description of Artificial Sequence: Synthetic oligonucleotide
  Target: LAMA2; (+) strand; PAM type: YTN; PAM sequence: CTT
tgatgggttgagaaggggga

SEQ ID NO: 390118 - DNA, 20 bp, Artificial Sequence
  Description of Artificial Sequence: Synthetic oligonucleotide
  Target: LAMA2; (+) strand; PAM type: YTN; PAM sequence: TTT
gatgggttgagaagggggag

SEQ ID NO: 390119 - DNA, 20 bp, Artificial Sequence
  Description of Artificial Sequence: Synthetic oligonucleotide
  Target: LAMA2; (+) strand; PAM type: YTN; PAM sequence: TTG
atgggttgagaagggggagg

SEQ ID NO: 390120 - DNA, 20 bp, Artificial Sequence
  Description of Artificial Sequence: Synthetic oligonucleotide
  Target: LAMA2; (+) strand; PAM type: YTN; PAM sequence: TTG
agaagggggaggaaatgtaa

SEQ ID NO: 390121 - DNA, 20 bp, Artificial Sequence
  Description of Artificial Sequence: Synthetic oligonucleotide
  Target: LAMA2; (+) strand; PAM type: YTN; PAM sequence: CTC
attaattacttttttcctac

SEQ ID NO: 390122 - DNA, 20 bp, Artificial Sequence
  Description of Artificial Sequence: Synthetic oligonucleotide
  Target: LAMA2; (+) strand; PAM type: YTN; PAM sequence: TTA
attacttttttcctaccata

SEQ ID NO: 390123 - DNA, 20 bp, Artificial Sequence
  Description of Artificial Sequence: Synthetic oligonucleotide
  Target: LAMA2; (+) strand; PAM type: YTN; PAM sequence: TTA
cttttttcctaccatattta

SEQ ID NO: 390124 - DNA, 20 bp, Artificial Sequence
  Description of Artificial Sequence: Synthetic oligonucleotide
  Target: LAMA2; (+) strand; PAM type: YTN; PAM sequence: CTT
ttttcctaccatatttataa

SEQ ID NO: 390125 - DNA, 20 bp, Artificial Sequence
  Description of Artificial Sequence: Synthetic oligonucleotide
  Target: LAMA2; (+) strand; PAM type: YTN; PAM sequence: TTT
tttcctaccatatttataat

SEQ ID NO: 390126 - DNA, 20 bp, Artificial Sequence
  Description of Artificial Sequence: Synthetic oligonucleotide
  Target: LAMA2; (+) strand; PAM type: YTN; PAM sequence: TTT
ttcctaccatatttataatt

SEQ ID NO: 390127 - DNA, 20 bp, Artificial Sequence
  Description of Artificial Sequence: Synthetic oligonucleotide
  Target: LAMA2; (+) strand; PAM type: YTN; PAM sequence: TTT
tcctaccatatttataatta

SEQ ID NO: 390128 - DNA, 20 bp, Artificial Sequence
  Description of Artificial Sequence: Synthetic oligonucleotide
  Target: LAMA2; (+) strand; PAM type: YTN; PAM sequence: TTT
cctaccatatttataattac

SEQ ID NO: 390129 - DNA, 20 bp, Artificial Sequence
  Description of Artificial Sequence: Synthetic oligonucleotide
  Target: LAMA2; (+) strand; PAM type: YTN; PAM sequence: TTC
ctaccatatttataattaca

SEQ ID NO: 390130 - DNA, 20 bp, Artificial Sequence
  Description of Artificial Sequence: Synthetic oligonucleotide
  Target: LAMA2; (+) strand; PAM type: YTN; PAM sequence: CTA
ccatatttataattacaaat

SEQ ID NO: 390131 - DNA, 20 bp, Artificial Sequence
  Description of Artificial Sequence: Synthetic oligonucleotide
  Target: LAMA2; (+) strand; PAM type: YTN; PAM sequence: TTT
ataattacaaatatatcttc

SEQ ID NO: 390132 - DNA, 20 bp, Artificial Sequence
  Description of Artificial Sequence: Synthetic oligonucleotide
  Target: LAMA2; (+) strand; PAM type: YTN; PAM sequence: TTA
taattacaaatatatcttcc

SEQ ID NO: 390133 - DNA, 20 bp, Artificial Sequence
  Description of Artificial Sequence: Synthetic oligonucleotide
  Target: LAMA2; (+) strand; PAM type: YTN; PAM sequence: TTA
caaatatatcttccatgcag

SEQ ID NO: 390134 - DNA, 20 bp, Artificial Sequence
  Description of Artificial Sequence: Synthetic oligonucleotide
  Target: LAMA2; (+) strand; PAM type: YTN; PAM sequence: CTT
ccatgcagaccataaatact

SEQ ID NO: 390135 - DNA, 20 bp, Artificial Sequence
  Description of Artificial Sequence: Synthetic oligonucleotide
  Target: LAMA2; (+) strand; PAM type: YTN; PAM sequence: TTC
catgcagaccataaatactc

SEQ ID NO: 390136 - DNA, 20 bp, Artificial Sequence
  Description of Artificial Sequence: Synthetic oligonucleotide
  Target: LAMA2; (+) strand; PAM type: YTN; PAM sequence: CTC
aagtcaacatgaccaattct

SEQ ID NO: 390137 - DNA, 20 bp, Artificial Sequence
  Description of Artificial Sequence: Synthetic oligonucleotide
  Target: LAMA2; (+) strand; PAM type: YTN; PAM sequence: TTC
tctctttccctgtggtcaag

SEQ ID NO: 390138 - DNA, 20 bp, Artificial Sequence
  Description of Artificial Sequence: Synthetic oligonucleotide
  Target: LAMA2; (+) strand; PAM type: YTN; PAM sequence: CTC
tctttccctgtggtcaagct

SEQ ID NO: 390139 - DNA, 20 bp, Artificial Sequence
  Description of Artificial Sequence: Synthetic oligonucleotide
  Target: LAMA2; (+) strand; PAM type: YTN; PAM sequence: CTC
tttccctgtggtcaagctgc

SEQ ID NO: 390140 - DNA, 20 bp, Artificial Sequence
  Description of Artificial Sequence: Synthetic oligonucleotide
  Target: LAMA2; (+) strand; PAM type: YTN; PAM sequence: CTT
tccctgtggtcaagctgcat

SEQ ID NO: 390141 - DNA, 20 bp, Artificial Sequence
  Description of Artificial Sequence: Synthetic oligonucleotide
  Target: LAMA2; (+) strand; PAM type: YTN; PAM sequence: TTT
ccctgtggtcaagctgcatg

SEQ ID NO: 390142 - DNA, 20 bp, Artificial Sequence
  Description of Artificial Sequence: Synthetic oligonucleotide
  Target: LAMA2; (+) strand; PAM type: YTN; PAM sequence: TTC
cctgtggtcaagctgcatga

SEQ ID NO: 390143 - DNA, 20 bp, Artificial Sequence
  Description of Artificial Sequence: Synthetic oligonucleotide
  Target: LAMA2; (+) strand; PAM type: YTN; PAM sequence: CTG
tggtcaagctgcatgacaat

SEQ ID NO: 390144 - DNA, 20 bp, Artificial Sequence
  Description of Artificial Sequence: Synthetic oligonucleotide
  Target: LAMA2; (+) strand; PAM type: YTN; PAM sequence: CTG
catgacaatcaaaaggtgaa

SEQ ID NO: 390145 - DNA, 20 bp, Artificial Sequence
  Description of Artificial Sequence: Synthetic oligonucleotide
  Target: LAMA2; (+) strand; PAM type: YTN; PAM sequence: TTA
atacagatggaattataatt

SEQ ID NO: 390146 - DNA, 20 bp, Artificial Sequence
  Description of Artificial Sequence: Synthetic oligonucleotide
  Target: LAMA2; (+) strand; PAM type: YTN; PAM sequence: TTA
taattagagagttagatggt

SEQ ID NO: 390147 - DNA, 20 bp, Artificial Sequence
  Description of Artificial Sequence: Synthetic oligonucleotide
  Target: LAMA2; (+) strand; PAM type: YTN; PAM sequence: TTA
gagagttagatggtttcatt

SEQ ID NO: 390148 - DNA, 20 bp, Artificial Sequence
  Description of Artificial Sequence: Synthetic oligonucleotide
  Target: LAMA2; (+) strand; PAM type: YTN; PAM sequence: TTA
gatggtttcattatccaaaa

SEQ ID NO: 390149 - DNA, 20 bp, Artificial Sequence
  Description of Artificial Sequence: Synthetic oligonucleotide
  Target: LAMA2; (+) strand; PAM type: YTN; PAM sequence: TTT
cattatccaaaatcaggcta

SEQ ID NO: 390150 - DNA, 20 bp, Artificial Sequence
  Description of Artificial Sequence: Synthetic oligonucleotide
  Target: LAMA2; (+) strand; PAM type: YTN; PAM sequence: TTC
attatccaaaatcaggctaa

SEQ ID NO: 390151 - DNA, 20 bp, Artificial Sequence
  Description of Artificial Sequence: Synthetic oligonucleotide
  Target: LAMA2; (+) strand; PAM type: YTN; PAM sequence: TTA
tccaaaatcaggctaagcac

SEQ ID NO: 390152 - DNA, 20 bp, Artificial Sequence
  Description of Artificial Sequence: Synthetic oligonucleotide
  Target: LAMA2; (+) strand; PAM type: YTN; PAM sequence: CTA
agcacgctaatgcctctatc

SEQ ID NO: 390153 - DNA, 20 bp, Artificial Sequence
  Description of Artificial Sequence: Synthetic oligonucleotide
  Target: LAMA2; (+) strand; PAM type: YTN; PAM sequence: CTA
atgcctctatctcagagtca

SEQ ID NO: 390154 - DNA, 20 bp, Artificial Sequence
  Description of Artificial Sequence: Synthetic oligonucleotide
  Target: LAMA2; (+) strand; PAM type: YTN; PAM sequence: CTC
tatctcagagtcatgaatga

SEQ ID NO: 390155 - DNA, 20 bp, Artificial Sequence
  Description of Artificial Sequence: Synthetic oligonucleotide
  Target: LAMA2; (+) strand; PAM type: YTN; PAM sequence: CTA
tctcagagtcatgaatgatc

SEQ ID NO: 390156 - DNA, 20 bp, Artificial Sequence
  Description of Artificial Sequence: Synthetic oligonucleotide
  Target: LAMA2; (+) strand; PAM type: YTN; PAM sequence: CTC
agagtcatgaatgatcctgc

SEQ ID NO: 390157 - DNA, 20 bp, Artificial Sequence
  Description of Artificial Sequence: Synthetic oligonucleotide
  Target: LAMA2; (+) strand; PAM type: YTN; PAM sequence: CTG
cagttgtgaccagggtatga

SEQ ID NO: 390158 - DNA, 20 bp, Artificial Sequence
  Description of Artificial Sequence: Synthetic oligonucleotide
  Target: LAMA2; (+) strand; PAM type: YTN; PAM sequence: TTG
tgaccagggtatgagaaatg

SEQ ID NO: 390159 - DNA, 20 bp, Artificial Sequence
  Description of Artificial Sequence: Synthetic oligonucleotide
  Target: LAMA2; (+) strand; PAM type: YTN; PAM sequence: CTT
ccaattacccatgactacat

SEQ ID NO: 390160 - DNA, 20 bp, Artificial Sequence
  Description of Artificial Sequence: Synthetic oligonucleotide
  Target: LAMA2; (+) strand; PAM type: YTN; PAM sequence: TTC
caattacccatgactacatt

SEQ ID NO: 390161 - DNA, 20 bp, Artificial Sequence
  Description of Artificial Sequence: Synthetic oligonucleotide
  Target: LAMA2; (+) strand; PAM type: YTN; PAM sequence: TTA
cccatgactacattagagga

SEQ ID NO: 390162 - DNA, 20 bp, Artificial Sequence
  Description of Artificial Sequence: Synthetic oligonucleotide
  Target: LAMA2; (+) strand; PAM type: YTN; PAM sequence: CTA
cattagaggagacagtgctc

SEQ ID NO: 390163 - DNA, 20 bp, Artificial Sequence
  Description of Artificial Sequence: Synthetic oligonucleotide
  Target: LAMA2; (+) strand; PAM type: YTN; PAM sequence: TTA
gaggagacagtgctctagac

SEQ ID NO: 390164 - DNA, 20 bp, Artificial Sequence
  Description of Artificial Sequence: Synthetic oligonucleotide
  Target: LAMA2; (+) strand; PAM type: YTN; PAM sequence: CTC
tagactaggactgcacattg

SEQ ID NO: 390165 - DNA, 20 bp, Artificial Sequence
  Description of Artificial Sequence: Synthetic oligonucleotide
  Target: LAMA2; (+) strand; PAM type: YTN; PAM sequence: CTA
gactaggactgcacattgga

SEQ ID NO: 390166 - DNA, 20 bp, Artificial Sequence
  Description of Artificial Sequence: Synthetic oligonucleotide
  Target: LAMA2; (+) strand; PAM type: YTN; PAM sequence: CTA
ggactgcacattggaattac

SEQ ID NO: 390167 - DNA, 20 bp, Artificial Sequence
  Description of Artificial Sequence: Synthetic oligonucleotide
  Target: LAMA2; (+) strand; PAM type: YTN; PAM sequence: CTG
cacattggaattaccaggag

SEQ ID NO: 390168 - DNA, 20 bp, Artificial Sequence
  Description of Artificial Sequence: Synthetic oligonucleotide
  Target: LAMA2; (+) strand; PAM type: YTN; PAM sequence: TTG
gaattaccaggagccctatc

SEQ ID NO: 390169 - DNA, 20 bp, Artificial Sequence
  Description of Artificial Sequence: Synthetic oligonucleotide
  Target: LAMA2; (+) strand; PAM type: YTN; PAM sequence: TTA
ccaggagccctatctcacac

SEQ ID NO: 390170 - DNA, 20 bp, Artificial Sequence
  Description of Artificial Sequence: Synthetic oligonucleotide
  Target: LAMA2; (+) strand; PAM type: YTN; PAM sequence: CTA
tctcacacccataggttgtg

SEQ ID NO: 390171 - DNA, 20 bp, Artificial Sequence
  Description of Artificial Sequence: Synthetic oligonucleotide
  Target: LAMA2; (+) strand; PAM type: YTN; PAM sequence: CTC
acacccataggttgtgatgc

SEQ ID NO: 390172 - DNA, 20 bp, Artificial Sequence
  Description of Artificial Sequence: Synthetic oligonucleotide
  Target: LAMA2; (+) strand; PAM type: YTN; PAM sequence: TTG
tgatgcagttggtctggggt

SEQ ID NO: 390173 - DNA, 20 bp, Artificial Sequence
  Description of Artificial Sequence: Synthetic oligonucleotide
  Target: LAMA2; (+) strand; PAM type: YTN; PAM sequence: TTG
gtctggggtagagtcagacc

SEQ ID NO: 390174 - DNA, 20 bp, Artificial Sequence
  Description of Artificial Sequence: Synthetic oligonucleotide
  Target: LAMA2; (+) strand; PAM type: YTN; PAM sequence: CTG
gggtagagtcagaccactgg

SEQ ID NO: 390175 - DNA, 20 bp, Artificial Sequence
  Description of Artificial Sequence: Synthetic oligonucleotide
  Target: LAMA2; (+) strand; PAM type: YTN; PAM sequence: CTG
ggatattcaagaactcccca

SEQ ID NO: 390176 - DNA, 20 bp, Artificial Sequence
  Description of Artificial Sequence: Synthetic oligonucleotide
  Target: LAMA2; (+) strand; PAM type: YTN; PAM sequence: TTC
aagaactccccagattatac

SEQ ID NO: 390177 - DNA, 20 bp, Artificial Sequence
  Description of Artificial Sequence: Synthetic oligonucleotide
  Target: LAMA2; (+) strand; PAM type: YTN; PAM sequence: CTC
cccagattatactgataaag

SEQ ID NO: 390178 - DNA, 20 bp, Artificial Sequence
  Description of Artificial Sequence: Synthetic oligonucleotide
  Target: LAMA2; (+) strand; PAM type: YTN; PAM sequence: TTA
tactgataaagaattactgt

SEQ ID NO: 390179 - DNA, 20 bp, Artificial Sequence
  Description of Artificial Sequence: Synthetic oligonucleotide
  Target: LAMA2; (+) strand; PAM type: YTN; PAM sequence: CTG
ataaagaattactgtgatcc

SEQ ID NO: 390180 - DNA, 20 bp, Artificial Sequence
  Description of Artificial Sequence: Synthetic oligonucleotide
  Target: LAMA2; (+) strand; PAM type: YTN; PAM sequence: TTA
ctgtgatcctgtagttacct

SEQ ID NO: 390181 - DNA, 20 bp, Artificial Sequence
  Description of Artificial Sequence: Synthetic oligonucleotide
  Target: LAMA2; (+) strand; PAM type: YTN; PAM sequence: CTG
tgatcctgtagttacctaat

SEQ ID NO: 390182 - DNA, 20 bp, Artificial Sequence
  Description of Artificial Sequence: Synthetic oligonucleotide
  Target: LAMA2; (+) strand; PAM type: YTN; PAM sequence: CTG
tagttacctaatagctaaga

SEQ ID NO: 390183 - DNA, 20 bp, Artificial Sequence
  Description of Artificial Sequence: Synthetic oligonucleotide
  Target: LAMA2; (+) strand; PAM type: YTN; PAM sequence: TTA
cctaatagctaagactctct

SEQ ID NO: 390184 - DNA, 20 bp, Artificial Sequence
  Description of Artificial Sequence: Synthetic oligonucleotide
  Target: LAMA2; (+) strand; PAM type: YTN; PAM sequence: CTA
atagctaagactctcttccc

SEQ ID NO: 390185 - DNA, 20 bp, Artificial Sequence
  Description of Artificial Sequence: Synthetic oligonucleotide
  Target: LAMA2; (+) strand; PAM type: YTN; PAM sequence: CTA
agactctcttccctctggaa

SEQ ID NO: 390186 - DNA, 20 bp, Artificial Sequence
  Description of Artificial Sequence: Synthetic oligonucleotide
  Target: LAMA2; (+) strand; PAM type: YTN; PAM sequence: CTC
tcttccctctggaaaatgcc

SEQ ID NO: 390187 - DNA, 20 bp, Artificial Sequence
  Description of Artificial Sequence: Synthetic oligonucleotide
  Target: LAMA2; (+) strand; PAM type: YTN; PAM sequence: CTC
ttccctctggaaaatgcctt

SEQ ID NO: 390188 - DNA, 20 bp, Artificial Sequence
  Description of Artificial Sequence: Synthetic oligonucleotide
  Target: LAMA2; (+) strand; PAM type: YTN; PAM sequence: CTT
ccctctggaaaatgccttaa

SEQ ID NO: 390189 - DNA, 20 bp, Artificial Sequence
  Description of Artificial Sequence: Synthetic oligonucleotide
  Target: LAMA2; (+) strand; PAM type: YTN; PAM sequence: TTC
cctctggaaaatgccttaat

SEQ ID NO: 390190 - DNA, 20 bp, Artificial Sequence
  Description of Artificial Sequence: Synthetic oligonucleotide
  Target: LAMA2; (+) strand; PAM type: YTN; PAM sequence: CTC
tggaaaatgccttaattggt

SEQ ID NO: 390191 - DNA, 20 bp, Artificial Sequence
  Description of Artificial Sequence: Synthetic oligonucleotide
  Target: LAMA2; (+) strand; PAM type: YTN; PAM sequence: CTG
gaaaatgccttaattggtac

SEQ ID NO: 390192 - DNA, 20 bp, Artificial Sequence
  Description of Artificial Sequence: Synthetic oligonucleotide
  Target: LAMA2; (+) strand; PAM type: YTN; PAM sequence: CTT
aattggtactgccaatcttt

SEQ ID NO: 390193 - DNA, 20 bp, Artificial Sequence
  Description of Artificial Sequence: Synthetic oligonucleotide
  Target: LAMA2; (+) strand; PAM type: YTN; PAM sequence: TTA
attggtactgccaatctttt

SEQ ID NO: 390194 - DNA, 20 bp, Artificial Sequence
  Description of Artificial Sequence: Synthetic oligonucleotide
  Target: LAMA2; (+) strand; PAM type: YTN; PAM sequence: TTG
gtactgccaatctttttttt

SEQ ID NO: 390195 - DNA, 20 bp, Artificial Sequence
  Description of Artificial Sequence: Synthetic oligonucleotide
  Target: LAMA2; (+) strand; PAM type: YTN; PAM sequence: CTG
ccaatctttttttttttttt

SEQ ID NO: 390196 - DNA, 20 bp, Artificial Sequence
  Description of Artificial Sequence: Synthetic oligonucleotide
  Target: LAMA2; (+) strand; PAM type: YTN; PAM sequence: CTT
ttttttttttttttaaacag

SEQ ID NO: 390197 - DNA, 20 bp, Artificial Sequence
  Description of Artificial Sequence: Synthetic oligonucleotide
  Target: LAMA2; (+) strand; PAM type: YTN; PAM sequence: TTT
tttttttttttttaaacaga

SEQ ID NO: 390198 - DNA, 20 bp, Artificial Sequence
  Description of Artificial Sequence: Synthetic oligonucleotide
  Target: LAMA2; (+) strand; PAM type: YTN; PAM sequence: TTT
ttttttttttttaaacagag

SEQ ID NO: 390199 - DNA, 20 bp, Artificial Sequence
  Description of Artificial Sequence: Synthetic oligonucleotide
  Target: LAMA2; (+) strand; PAM type: YTN; PAM sequence: TTT
tttttttttttaaacagagt

SEQ ID NO: 390200 - DNA, 20 bp, Artificial Sequence
  Description of Artificial Sequence: Synthetic oligonucleotide
  Target: LAMA2; (+) strand; PAM type: YTN; PAM sequence: TTT
ttttttttttaaacagagtt

SEQ ID NO: 390201 - DNA, 20 bp, Artificial Sequence
  Description of Artificial Sequence: Synthetic oligonucleotide
  Target: LAMA2; (+) strand; PAM type: YTN; PAM sequence: TTT
tttttttttaaacagagttt

SEQ ID NO: 390202 - DNA, 20 bp, Artificial Sequence
  Description of Artificial Sequence: Synthetic oligonucleotide
  Target: LAMA2; (+) strand; PAM type: YTN; PAM sequence: TTT
ttttttttaaacagagtttc

SEQ ID NO: 390203 - DNA, 20 bp, Artificial Sequence
  Description of Artificial Sequence: Synthetic oligonucleotide
  Target: LAMA2; (+) strand; PAM type: YTN; PAM sequence: TTT
tttttttaaacagagtttca

SEQ ID NO: 390204 - DNA, 20 bp, Artificial Sequence
  Description of Artificial Sequence: Synthetic oligonucleotide
  Target: LAMA2; (+) strand; PAM type: YTN; PAM sequence: TTT
ttttttaaacagagtttcac

SEQ ID NO: 390205 - DNA, 20 bp, Artificial Sequence
  Description of Artificial Sequence: Synthetic oligonucleotide
  Target: LAMA2; (+) strand; PAM type: YTN; PAM sequence: TTT
tttttaaacagagtttcacc

SEQ ID NO: 390206 - DNA, 20 bp, Artificial Sequence
  Description of Artificial Sequence: Synthetic oligonucleotide
  Target: LAMA2; (+) strand; PAM type: YTN; PAM sequence: TTT
ttttaaacagagtttcaccc

SEQ ID NO: 390207 - DNA, 20 bp, Artificial Sequence
  Description of Artificial Sequence: Synthetic oligonucleotide
  Target: LAMA2; (+) strand; PAM type: YTN; PAM sequence: TTT
tttaaacagagtttcaccct

SEQ ID NO: 390208 - DNA, 20 bp, Artificial Sequence
  Description of Artificial Sequence: Synthetic oligonucleotide
  Target: LAMA2; (+) strand; PAM type: YTN; PAM sequence: TTT
ttaaacagagtttcaccctt

SEQ ID NO: 390209 - DNA, 20 bp, Artificial Sequence
  Description of Artificial Sequence: Synthetic oligonucleotide
  Target: LAMA2; (+) strand; PAM type: YTN; PAM sequence: TTT
taaacagagtttcacccttg

SEQ ID NO: 390210 - DNA, 20 bp, Artificial Sequence
  Description of Artificial Sequence: Synthetic oligonucleotide
  Target: LAMA2; (+) strand; PAM type: YTN; PAM sequence: TTT
aaacagagtttcacccttgt

SEQ ID NO: 390211 - DNA, 20 bp, Artificial Sequence
  Description of Artificial Sequence: Synthetic oligonucleotide
  Target: LAMA2; (+) strand; PAM type: YTN; PAM sequence: TTA
aacagagtttcacccttgtt

SEQ ID NO: 390212 - DNA, 20 bp, Artificial Sequence
  Description of Artificial Sequence: Synthetic oligonucleotide
  Target: LAMA2; (+) strand; PAM type: YTN; PAM sequence: TTT
cacccttgttgtccaggctg

SEQ ID NO: 390213 - DNA, 20 bp, Artificial Sequence
  Description of Artificial Sequence: Synthetic oligonucleotide
  Target: LAMA2; (+) strand; PAM type: YTN; PAM sequence: TTC
acccttgttgtccaggctgg

SEQ ID NO: 390214 - DNA, 20 bp, Artificial Sequence
  Description of Artificial Sequence: Synthetic oligonucleotide
  Target: LAMA2; (+) strand; PAM type: YTN; PAM sequence: CTT
gttgtccaggctggagtaca

SEQ ID NO: 390215 - DNA, 20 bp, Artificial Sequence
  Description of Artificial Sequence: Synthetic oligonucleotide
  Target: LAMA2; (+) strand; PAM type: YTN; PAM sequence: TTG
ttgtccaggctggagtacaa

SEQ ID NO: 390216 - DNA, 20 bp, Artificial Sequence
  Description of Artificial Sequence: Synthetic oligonucleotide
  Target: LAMA2; (+) strand; PAM type: YTN; PAM sequence: TTG
tccaggctggagtacaatgg

SEQ ID NO: 390217 - DNA, 20 bp, Artificial Sequence
  Description of Artificial Sequence: Synthetic oligonucleotide
  Target: LAMA2; (+) strand; PAM type: YTN; PAM sequence: CTG
gagtacaatggtgtgaactc

SEQ ID NO: 390218 - DNA, 20 bp, Artificial Sequence
  Description of Artificial Sequence: Synthetic oligonucleotide
  Target: LAMA2; (+) strand; PAM type: YTN; PAM sequence: CTC
agctcactgcaacctccacc

SEQ ID NO: 390219 - DNA, 20 bp, Artificial Sequence
  Description of Artificial Sequence: Synthetic oligonucleotide
  Target: LAMA2; (+) strand; PAM type: YTN; PAM sequence: CTC
actgcaacctccacctccta

SEQ ID NO: 390220 - DNA, 20 bp, Artificial Sequence
  Description of Artificial Sequence: Synthetic oligonucleotide
  Target: LAMA2; (+) strand; PAM type: YTN; PAM sequence: CTG
caacctccacctcctaggtt

SEQ ID NO: 390221 - DNA, 20 bp, Artificial Sequence
  Description of Artificial Sequence: Synthetic oligonucleotide
  Target: LAMA2; (+) strand; PAM type: YTN; PAM sequence: CTC
cacctcctaggttcaagcaa

SEQ ID NO: 390222 - DNA, 20 bp, Artificial Sequence
  Description of Artificial Sequence: Synthetic oligonucleotide
  Target: LAMA2; (+) strand; PAM type: YTN; PAM sequence: CTC
ctaggttcaagcaattctcc

SEQ ID NO: 390223 - DNA, 20 bp, Artificial Sequence
  Description of Artificial Sequence: Synthetic oligonucleotide
  Target: LAMA2; (+) strand; PAM type: YTN; PAM sequence: CTA
ggttcaagcaattctcctgc

SEQ ID NO: 390224 - DNA, 20 bp, Artificial Sequence
  Description of Artificial Sequence: Synthetic oligonucleotide
  Target: LAMA2; (+) strand; PAM type: YTN; PAM sequence: TTC
aagcaattctcctgcttcag

SEQ ID NO: 390225 - DNA, 20 bp, Artificial Sequence
  Description of Artificial Sequence: Synthetic oligonucleotide
  Target: LAMA2; (+) strand; PAM type: YTN; PAM sequence: TTC
tcctgcttcagcctcccaag

SEQ ID NO: 390226 - DNA, 20 bp, Artificial Sequence
  Description of Artificial Sequence: Synthetic oligonucleotide
  Target: LAMA2; (+) strand; PAM type: YTN; PAM sequence: CTC
ctgcttcagcctcccaagta

SEQ ID NO: 390227 - DNA, 20 bp, Artificial Sequence
  Description of Artificial Sequence: Synthetic oligonucleotide
  Target: LAMA2; (+) strand; PAM type: YTN; PAM sequence: CTG
cttcagcctcccaagtagct

SEQ ID NO: 390228 - DNA, 20 bp, Artificial Sequence
  Description of Artificial Sequence: Synthetic oligonucleotide
  Target: LAMA2; (+) strand; PAM type: YTN; PAM sequence: CTT
cagcctcccaagtagctggg

SEQ ID NO: 390229 - DNA, 20 bp, Artificial Sequence
  Description of Artificial Sequence: Synthetic oligonucleotide
  Target: LAMA2; (+) strand; PAM type: YTN; PAM sequence: TTC
agcctcccaagtagctggga

SEQ ID NO: 390230 - DNA, 20 bp, Artificial Sequence
  Description of Artificial Sequence: Synthetic oligonucleotide
  Target: LAMA2; (+) strand; PAM type: YTN; PAM sequence: CTC
ccaagtagctgggattgcag

SEQ ID NO: 390231 - DNA, 20 bp, Artificial Sequence
  Description of Artificial Sequence: Synthetic oligonucleotide
  Target: LAMA2; (+) strand; PAM type: YTN; PAM sequence: CTG
ggattgcaggcacctgctac

SEQ ID NO: 390232 - DNA, 20 bp, Artificial Sequence
  Description of Artificial Sequence: Synthetic oligonucleotide
  Target: LAMA2; (+) strand; PAM type: YTN; PAM sequence: TTG
caggcacctgctaccatgcc

SEQ ID NO: 390233 - DNA, 20 bp, Artificial Sequence
  Description of Artificial Sequence: Synthetic oligonucleotide
  Target: LAMA2; (+) strand; PAM type: YTN; PAM sequence: CTG
ctaccatgcccagctaattt

SEQ ID NO: 390234 - DNA, 20 bp, Artificial Sequence
  Description of Artificial Sequence: Synthetic oligonucleotide
  Target: LAMA2; (+) strand; PAM type: YTN; PAM sequence: CTA
ccatgcccagctaatttttt

SEQ ID NO: 390235 - DNA, 20 bp, Artificial Sequence
  Description of Artificial Sequence: Synthetic oligonucleotide
  Target: LAMA2; (+) strand; PAM type: YTN; PAM sequence: CTA
attttttttttttttttttt

SEQ ID NO: 390236 - DNA, 20 bp, Artificial Sequence
  Description of Artificial Sequence: Synthetic oligonucleotide
  Target: LAMA2; (+) strand; PAM type: YTN; PAM sequence: TTT
ttttttttttttttttaagt

SEQ ID NO: 390237 - DNA, 20 bp, Artificial Sequence
  Description of Artificial Sequence: Synthetic oligonucleotide
  Target: LAMA2; (+) strand; PAM type: YTN; PAM sequence: TTT
tttttttttttttttaagta

SEQ ID NO: 390238 - DNA, 20 bp, Artificial Sequence
  Description of Artificial Sequence: Synthetic oligonucleotide
  Target: LAMA2; (+) strand; PAM type: YTN; PAM sequence: TTT
ttttttttttttttaagtag

SEQ ID NO: 390239 - DNA, 20 bp, Artificial Sequence
  Description of Artificial Sequence: Synthetic oligonucleotide
  Target: LAMA2; (+) strand; PAM type: YTN; PAM sequence: TTT
tttttttttttttaagtaga

SEQ ID NO: 390240 - DNA, 20 bp, Artificial Sequence
  Description of Artificial Sequence: Synthetic oligonucleotide
  Target: LAMA2; (+) strand; PAM type: YTN; PAM sequence: TTT
ttttttttttttaagtagag

SEQ ID NO: 390241 - DNA, 20 bp, Artificial Sequence
  Description of Artificial Sequence: Synthetic oligonucleotide
  Target: LAMA2; (+) strand; PAM type: YTN; PAM sequence: TTT
tttttttttttaagtagaga

SEQ ID NO: 390242 - DNA, 20 bp, Artificial Sequence
  Description of Artificial Sequence: Synthetic oligonucleotide
  Target: LAMA2; (+) strand; PAM type: YTN; PAM sequence: TTT
ttttttttttaagtagagac

SEQ ID NO: 390243 - DNA, 20 bp, Artificial Sequence
  Description of Artificial Sequence: Synthetic oligonucleotide
  Target: LAMA2; (+) strand; PAM type: YTN; PAM sequence: TTT
tttttttttaagtagagaca

SEQ ID NO: 390244 - DNA, 20 bp, Artificial Sequence
  Description of Artificial Sequence: Synthetic oligonucleotide
  Target: LAMA2; (+) strand; PAM type: YTN; PAM sequence: TTT
ttttttttaagtagagacag

SEQ ID NO: 390245 - DNA, 20 bp, Artificial Sequence
  Description of Artificial Sequence: Synthetic oligonucleotide
  Target: LAMA2; (+) strand; PAM type: YTN; PAM sequence: TTT
tttttttaagtagagacagg

SEQ ID NO: 390246 - DNA, 20 bp, Artificial Sequence
  Description of Artificial Sequence: Synthetic oligonucleotide
  Target: LAMA2; (+) strand; PAM type: YTN; PAM sequence: TTT
ttttttaagtagagacaggg

SEQ ID NO: 390247 - DNA, 20 bp, Artificial Sequence
  Description of Artificial Sequence: Synthetic oligonucleotide
  Target: LAMA2; (+) strand; PAM type: YTN; PAM sequence: TTT
tttttaagtagagacagggt

SEQ ID NO: 390248 - DNA, 20 bp, Artificial Sequence
  Description of Artificial Sequence: Synthetic oligonucleotide
  Target: LAMA2; (+) strand; PAM type: YTN; PAM sequence: TTT
ttttaagtagagacagggtt

SEQ ID NO: 390249 - DNA, 20 bp, Artificial Sequence
  Description of Artificial Sequence: Synthetic oligonucleotide
  Target: LAMA2; (+) strand; PAM type: YTN; PAM sequence: TTT
tttaagtagagacagggttt

SEQ ID NO: 390250 - DNA, 20 bp, Artificial Sequence
  Description of Artificial Sequence: Synthetic oligonucleotide
  Target: LAMA2; (+) strand; PAM type: YTN; PAM sequence: TTT
ttaagtagagacagggtttc

SEQ ID NO: 390251 - DNA, 20 bp, Artificial Sequence
  Description of Artificial Sequence: Synthetic oligonucleotide
  Target: LAMA2; (+) strand; PAM type: YTN; PAM sequence: TTT
taagtagagacagggtttca

SEQ ID NO: 390252 - DNA, 20 bp, Artificial Sequence
  Description of Artificial Sequence: Synthetic oligonucleotide
  Target: LAMA2; (+) strand; PAM type: YTN; PAM sequence: TTT
aagtagagacagggtttcat

SEQ ID NO: 390253 - DNA, 20 bp, Artificial Sequence
  Description of Artificial Sequence: Synthetic oligonucleotide
  Target: LAMA2; (+) strand; PAM type: YTN; PAM sequence: TTA
agtagagacagggtttcatc

SEQ ID NO: 390254 - DNA, 20 bp, Artificial Sequence
  Description of Artificial Sequence: Synthetic oligonucleotide
  Target: LAMA2; (+) strand; PAM type: YTN; PAM sequence: TTT
catcatgttggccaggctgg

SEQ ID NO: 390255 - DNA, 20 bp, Artificial Sequence
  Description of Artificial Sequence: Synthetic oligonucleotide
  Target: LAMA2; (+) strand; PAM type: YTN; PAM sequence: TTC
atcatgttggccaggctggt

SEQ ID NO: 390256 - DNA, 20 bp, Artificial Sequence
  Description of Artificial Sequence: Synthetic oligonucleotide
  Target: LAMA2; (+) strand; PAM type: YTN; PAM sequence: TTG
gccaggctggtctcgaaccc

SEQ ID NO: 390257 - DNA, 20 bp, Artificial Sequence
  Description of Artificial Sequence: Synthetic oligonucleotide
  Target: LAMA2; (+) strand; PAM type: YTN; PAM sequence: CTG
gtctcgaacccctgacctcg

SEQ ID NO: 390258 - DNA, 20 bp, Artificial Sequence
  Description of Artificial Sequence: Synthetic oligonucleotide
  Target: LAMA2; (+) strand; PAM type: YTN; PAM sequence: CTC
gaacccctgacctcgggtga

SEQ ID NO: 390259 - DNA, 20 bp, Artificial Sequence
  Description of Artificial Sequence: Synthetic oligonucleotide
  Target: LAMA2; (+) strand; PAM type: YTN; PAM sequence: CTG
acctcgggtgatccacccgc

SEQ ID NO: 390260 - DNA, 20 bp, Artificial Sequence
  Description of Artificial Sequence: Synthetic oligonucleotide
  Target: LAMA2; (+) strand; PAM type: YTN; PAM sequence: CTC
gggtgatccacccgcctcag

SEQ ID NO: 390261 - DNA, 20 bp, Artificial Sequence
  Description of Artificial Sequence: Synthetic oligonucleotide
  Target: LAMA2; (+) strand; PAM type: YTN; PAM sequence: CTC
agcctcccaaagtgctggga

SEQ ID NO: 390262 - DNA, 20 bp, Artificial Sequence
  Description of Artificial Sequence: Synthetic oligonucleotide
  Target: LAMA2; (+) strand; PAM type: YTN; PAM sequence: CTC
ccaaagtgctgggattacag

SEQ ID NO: 390263 - DNA, 20 bp, Artificial Sequence
  Description of Artificial Sequence: Synthetic oligonucleotide
  Target: LAMA2; (+) strand; PAM type: YTN; PAM sequence: CTG
ggattacaggcgtgagccac

SEQ ID NO: 390264 - DNA, 20 bp, Artificial Sequence
  Description of Artificial Sequence: Synthetic oligonucleotide
  Target: LAMA2; (+) strand; PAM type: YTN; PAM sequence: TTA
caggcgtgagccaccatgcc

SEQ ID NO: 390265 - DNA, 20 bp, Artificial Sequence
  Description of Artificial Sequence: Synthetic oligonucleotide
  Target: LAMA2; (+) strand; PAM type: YTN; PAM sequence: CTA
ctgccaatctttgttatgct

SEQ ID NO: 390266 - DNA, 20 bp, Artificial Sequence
  Description of Artificial Sequence: Synthetic oligonucleotide
  Target: LAMA2; (+) strand; PAM type: YTN; PAM sequence: CTG
ccaatctttgttatgctcct

SEQ ID NO: 390267 - DNA, 20 bp, Artificial Sequence
  Description of Artificial Sequence: Synthetic oligonucleotide
  Target: LAMA2; (+) strand; PAM type: YTN; PAM sequence: CTT
tgttatgctcctttttctct

SEQ ID NO: 390268 - DNA, 20 bp, Artificial Sequence
  Description of Artificial Sequence: Synthetic oligonucleotide
  Target: LAMA2; (+) strand; PAM type: YTN; PAM sequence: TTT
gttatgctcctttttctctg

SEQ ID NO: 390269 - DNA, 20 bp, Artificial Sequence
  Description of Artificial Sequence: Synthetic oligonucleotide
  Target: LAMA2; (+) strand; PAM type: YTN; PAM sequence: TTG
ttatgctcctttttctctgc

SEQ ID NO: 390270 - DNA, 20 bp, Artificial Sequence
  Description of Artificial Sequence: Synthetic oligonucleotide
  Target: LAMA2; (+) strand; PAM type: YTN; PAM sequence: TTA
tgctcctttttctctgcttg

SEQ ID NO: 390271 - DNA, 20 bp, Artificial Sequence
  Description of Artificial Sequence: Synthetic oligonucleotide
  Target: LAMA2; (+) strand; PAM type: YTN; PAM sequence: CTC
ctttttctctgcttggttgg

SEQ ID NO: 390272 - DNA, 20 bp, Artificial Sequence
  Description of Artificial Sequence: Synthetic oligonucleotide
  Target: LAMA2; (+) strand; PAM type: YTN; PAM sequence: CTT
tttctctgcttggttggctc

SEQ ID NO: 390273 - DNA, 20 bp, Artificial Sequence
  Description of Artificial Sequence: Synthetic oligonucleotide
  Target: LAMA2; (+) strand; PAM type: YTN; PAM sequence: TTT
ttctctgcttggttggctca

SEQ ID NO: 390274 - DNA, 20 bp, Artificial Sequence
  Description of Artificial Sequence: Synthetic oligonucleotide
  Target: LAMA2; (+) strand; PAM type: YTN; PAM sequence: TTT
tctctgcttggttggctcac

SEQ ID NO: 390275 - DNA, 20 bp, Artificial Sequence
  Description of Artificial Sequence: Synthetic oligonucleotide
  Target: LAMA2; (+) strand; PAM type: YTN; PAM sequence: TTT
ctctgcttggttggctcacc

SEQ ID NO: 390276 - DNA, 20 bp, Artificial Sequence
  Description of Artificial Sequence: Synthetic oligonucleotide
  Target: LAMA2; (+) strand; PAM type: YTN; PAM sequence: TTC
tctgcttggttggctcacca

SEQ ID NO: 390277 - DNA, 20 bp, Artificial Sequence
  Description of Artificial Sequence: Synthetic oligonucleotide
  Target: LAMA2; (+) strand; PAM type: YTN; PAM sequence: CTC
tgcttggttggctcaccagt

SEQ ID NO: 390278 - DNA, 20 bp, Artificial Sequence
  Description of Artificial Sequence: Synthetic oligonucleotide
  Target: LAMA2; (+) strand; PAM type: YTN; PAM sequence: CTG
cttggttggctcaccagtca

SEQ ID NO: 390279 - DNA, 20 bp, Artificial Sequence
  Description of Artificial Sequence: Synthetic oligonucleotide
  Target: LAMA2; (+) strand; PAM type: YTN; PAM sequence: CTT
ggttggctcaccagtcactt

SEQ ID NO: 390280 - DNA, 20 bp, Artificial Sequence
  Description of Artificial Sequence: Synthetic oligonucleotide
  Target: LAMA2; (+) strand; PAM type: YTN; PAM sequence: TTG
gttggctcaccagtcacttg

SEQ ID NO: 390281 - DNA, 20 bp, Artificial Sequence
  Description of Artificial Sequence: Synthetic oligonucleotide
  Target: LAMA2; (+) strand; PAM type: YTN; PAM sequence: TTG
gctcaccagtcacttgatac

SEQ ID NO: 390282 - DNA, 20 bp, Artificial Sequence
  Description of Artificial Sequence: Synthetic oligonucleotide
  Target: LAMA2; (+) strand; PAM type: YTN; PAM sequence: CTC
accagtcacttgatacagtc

SEQ ID NO: 390283 - DNA, 20 bp, Artificial Sequence
  Description of Artificial Sequence: Synthetic oligonucleotide
  Target: LAMA2; (+) strand; PAM type: YTN; PAM sequence: CTT
gatacagtctttagatttaa

SEQ ID NO: 390284 - DNA, 20 bp, Artificial Sequence
  Description of Artificial Sequence: Synthetic oligonucleotide
  Target: LAMA2; (+) strand; PAM type: YTN; PAM sequence: TTG
atacagtctttagatttaag

SEQ ID NO: 390285 - DNA, 20 bp, Artificial Sequence
  Description of Artificial Sequence: Synthetic oligonucleotide
  Target: LAMA2; (+) strand; PAM type: YTN; PAM sequence: CTT
tagatttaagagcacatgtc

SEQ ID NO: 390286 - DNA, 20 bp, Artificial Sequence
  Description of Artificial Sequence: Synthetic oligonucleotide
  Target: LAMA2; (+) strand; PAM type: YTN; PAM sequence: TTT
agatttaagagcacatgtca

SEQ ID NO: 390287 - DNA, 20 bp, Artificial Sequence
  Description of Artificial Sequence: Synthetic oligonucleotide
  Target: LAMA2; (+) strand; PAM type: YTN; PAM sequence: TTA
gatttaagagcacatgtcaa

SEQ ID NO: 390288 - DNA, 20 bp, Artificial Sequence
  Description of Artificial Sequence: Synthetic oligonucleotide
  Target: LAMA2; (+) strand; PAM type: YTN; PAM sequence: TTT
aagagcacatgtcaaggttg

SEQ ID NO: 390289 - DNA, 20 bp, Artificial Sequence
  Description of Artificial Sequence: Synthetic oligonucleotide
  Target: LAMA2; (+) strand; PAM type: YTN; PAM sequence: TTA
agagcacatgtcaaggttga

SEQ ID NO: 390290 - DNA, 20 bp, Artificial Sequence
  Description of Artificial Sequence: Synthetic oligonucleotide
  Target: LAMA2; (+) strand; PAM type: YTN; PAM sequence: TTG
atcctgcatgactgctgtag

SEQ ID NO: 390291 - DNA, 20 bp, Artificial Sequence
  Description of Artificial Sequence: Synthetic oligonucleotide
  Target: LAMA2; (+) strand; PAM type: YTN; PAM sequence: CTG
catgactgctgtaggagcta

SEQ ID NO: 390292 - DNA, 20 bp, Artificial Sequence
  Description of Artificial Sequence: Synthetic oligonucleotide
  Target: LAMA2; (+) strand; PAM type: YTN; PAM sequence: CTG
ctgtaggagctaccctctct

SEQ ID NO: 390293 - DNA, 20 bp, Artificial Sequence
  Description of Artificial Sequence: Synthetic oligonucleotide
  Target: LAMA2; (+) strand; PAM type: YTN; PAM sequence: CTG
taggagctaccctctcttct

SEQ ID NO: 390294 - DNA, 20 bp, Artificial Sequence
  Description of Artificial Sequence: Synthetic oligonucleotide
  Target: LAMA2; (+) strand; PAM type: YTN; PAM sequence: CTA
ccctctcttctttaagggct

SEQ ID NO: 390295 - DNA, 20 bp, Artificial Sequence
  Description of Artificial Sequence: Synthetic oligonucleotide
  Target: LAMA2; (+) strand; PAM type: YTN; PAM sequence: CTC
tcttctttaagggcttttat

SEQ ID NO: 390296 - DNA, 20 bp, Artificial Sequence
  Description of Artificial Sequence: Synthetic oligonucleotide
  Target: LAMA2; (+) strand; PAM type: YTN; PAM sequence: CTC
ttctttaagggcttttatat

SEQ ID NO: 390297 - DNA, 20 bp, Artificial Sequence
  Description of Artificial Sequence: Synthetic oligonucleotide
  Target: LAMA2; (+) strand; PAM type: YTN; PAM sequence: CTT
ctttaagggcttttatattt

SEQ ID NO: 390298 - DNA, 20 bp, Artificial Sequence
  Description of Artificial Sequence: Synthetic oligonucleotide
  Target: LAMA2; (+) strand; PAM type: YTN; PAM sequence: TTC
tttaagggcttttatatttt

SEQ ID NO: 390299 - DNA, 20 bp, Artificial Sequence
  Description of Artificial Sequence: Synthetic oligonucleotide
  Target: LAMA2; (+) strand; PAM type: YTN; PAM sequence: CTT
taagggcttttatattttat

SEQ ID NO: 390300 - DNA, 20 bp, Artificial Sequence
  Description of Artificial Sequence: Synthetic oligonucleotide
  Target: LAMA2; (+) strand; PAM type: YTN; PAM sequence: TTT
aagggcttttatattttata

SEQ ID NO: 390301 - DNA, 20 bp, Artificial Sequence
  Description of Artificial Sequence: Synthetic oligonucleotide
  Target: LAMA2; (+) strand; PAM type: YTN; PAM sequence: TTA
agggcttttatattttatac

SEQ ID NO: 390302 - DNA, 20 bp, Artificial Sequence
  Description of Artificial Sequence: Synthetic oligonucleotide
  Target: LAMA2; (+) strand; PAM type: YTN; PAM sequence: CTT
ttatattttatactcattgt

SEQ ID NO: 390303 - DNA, 20 bp, Artificial Sequence
  Description of Artificial Sequence: Synthetic oligonucleotide
  Target: LAMA2; (+) strand; PAM type: YTN; PAM sequence: TTT
tatattttatactcattgtt

SEQ ID NO: 390304 - DNA, 20 bp, Artificial Sequence
  Description of Artificial Sequence: Synthetic oligonucleotide
  Target: LAMA2; (+) strand; PAM type: YTN; PAM sequence: TTT
atattttatactcattgttt

SEQ ID NO: 390305 - DNA, 20 bp, Artificial Sequence
  Description of Artificial Sequence: Synthetic oligonucleotide
  Target: LAMA2; (+) strand; PAM type: YTN; PAM sequence: TTA
tattttatactcattgtttt

SEQ ID NO: 390306 - DNA, 20 bp, Artificial Sequence
  Description of Artificial Sequence: Synthetic oligonucleotide
  Target: LAMA2; (+) strand; PAM type: YTN; PAM sequence: TTT
tatactcattgtttttaaat

SEQ ID NO: 390307 - DNA, 20 bp, Artificial Sequence
  Description of Artificial Sequence: Synthetic oligonucleotide
  Target: LAMA2; (+) strand; PAM type: YTN; PAM sequence: TTT
atactcattgtttttaaatg

SEQ ID NO: 390308 - DNA, 20 bp, Artificial Sequence
  Description of Artificial Sequence: Synthetic oligonucleotide
  Target: LAMA2; (+) strand; PAM type: YTN; PAM sequence: TTA
tactcattgtttttaaatgg

SEQ ID NO: 390309 - DNA, 20 bp, Artificial Sequence
  Description of Artificial Sequence: Synthetic oligonucleotide
  Target: LAMA2; (+) strand; PAM type: YTN; PAM sequence: CTC
attgtttttaaatggagaaa

SEQ ID NO: 390310 - DNA, 20 bp, Artificial Sequence
  Description of Artificial Sequence: Synthetic oligonucleotide
  Target: LAMA2; (+) strand; PAM type: YTN; PAM sequence: TTG
tttttaaatggagaaatcta

SEQ ID NO: 390311 - DNA, 20 bp, Artificial Sequence
  Description of Artificial Sequence: Synthetic oligonucleotide
  Target: LAMA2; (+) strand; PAM type: YTN; PAM sequence: TTT
ttaaatggagaaatctaatt

SEQ ID NO: 390312 - DNA, 20 bp, Artificial Sequence
  Description of Artificial Sequence: Synthetic oligonucleotide
  Target: LAMA2; (+) strand; PAM type: YTN; PAM sequence: TTT
taaatggagaaatctaattc

SEQ ID NO: 390313 - DNA, 20 bp, Artificial Sequence
  Description of Artificial Sequence: Synthetic oligonucleotide
  Target: LAMA2; (+) strand; PAM type: YTN; PAM sequence: TTT
aaatggagaaatctaattcc

SEQ ID NO: 390314 - DNA, 20 bp, Artificial Sequence
  Description of Artificial Sequence: Synthetic oligonucleotide
  Target: LAMA2; (+) strand; PAM type: YTN; PAM sequence: TTA
aatggagaaatctaattccc

SEQ ID NO: 390315 - DNA, 20 bp, Artificial Sequence
  Description of Artificial Sequence: Synthetic oligonucleotide
  Target: LAMA2; (+) strand; PAM type: YTN; PAM sequence: CTA
attccctaatatccctgggt

SEQ ID NO: 390316 - DNA, 20 bp, Artificial Sequence
  Description of Artificial Sequence: Synthetic oligonucleotide
  Target: LAMA2; (+) strand; PAM type: YTN; PAM sequence: TTC
cctaatatccctgggtaaag

SEQ ID NO: 390317 - DNA, 20 bp, Artificial Sequence
  Description of Artificial Sequence: Synthetic oligonucleotide
  Target: LAMA2; (+) strand; PAM type: YTN; PAM sequence: CTA
atatccctgggtaaagaaga

SEQ ID NO: 390318 - DNA, 20 bp, Artificial Sequence
  Description of Artificial Sequence: Synthetic oligonucleotide
  Target: LAMA2; (+) strand; PAM type: YTN; PAM sequence: CTG
ggtaaagaagacattattcc

SEQ ID NO: 390319 - DNA, 20 bp, Artificial Sequence
  Description of Artificial Sequence: Synthetic oligonucleotide
  Target: LAMA2; (+) strand; PAM type: YTN; PAM sequence: TTA
ttccacccaagaactcatat

SEQ ID NO: 390320 - DNA, 20 bp, Artificial Sequence
  Description of Artificial Sequence: Synthetic oligonucleotide
  Target: LAMA2; (+) strand; PAM type: YTN; PAM sequence: TTC
cacccaagaactcatattta

SEQ ID NO: 390321 - DNA, 20 bp, Artificial Sequence
  Description of Artificial Sequence: Synthetic oligonucleotide
  Target: LAMA2; (+) strand; PAM type: YTN; PAM sequence: CTC
atatttaaaatgtattttga

SEQ ID NO: 390322 - DNA, 20 bp, Artificial Sequence
  Description of Artificial Sequence: Synthetic oligonucleotide
  Target: LAMA2; (+) strand; PAM type: YTN; PAM sequence: TTT
aaaatgtattttgatatatt

SEQ ID NO: 390323 - DNA, 20 bp, Artificial Sequence
  Description of Artificial Sequence: Synthetic oligonucleotide
  Target: LAMA2; (+) strand; PAM type: YTN; PAM sequence: TTA
aaatgtattttgatatattt

SEQ ID NO: 390324 - DNA, 20 bp, Artificial Sequence
  Description of Artificial Sequence: Synthetic oligonucleotide
  Target: LAMA2; (+) strand; PAM type: YTN; PAM sequence: TTT
tgatatattttaattcatgt

SEQ ID NO: 390325 - DNA, 20 bp, Artificial Sequence
  Description of Artificial Sequence: Synthetic oligonucleotide
  Target: LAMA2; (+) strand; PAM type: YTN; PAM sequence: TTT
gatatattttaattcatgta

SEQ ID NO: 390326 - DNA, 20 bp, Artificial Sequence
  Description of Artificial Sequence: Synthetic oligonucleotide
  Target: LAMA2; (+) strand; PAM type: YTN; PAM sequence: TTG
atatattttaattcatgtat

SEQ ID NO: 390327 - DNA, 20 bp, Artificial Sequence
  Description of Artificial Sequence: Synthetic oligonucleotide
  Target: LAMA2; (+) strand; PAM type: YTN; PAM sequence: TTT
taattcatgtataaatataa

SEQ ID NO: 390328 - DNA, 20 bp, Artificial Sequence
  Description of Artificial Sequence: Synthetic oligonucleotide
  Target: LAMA2; (+) strand; PAM type: YTN; PAM sequence: TTT
aattcatgtataaatataaa

SEQ ID NO: 390329 - DNA, 20 bp, Artificial Sequence
  Description of Artificial Sequence: Synthetic oligonucleotide
  Target: LAMA2; (+) strand; PAM type: YTN; PAM sequence: TTA
attcatgtataaatataaag

SEQ ID NO: 390330 - DNA, 20 bp, Artificial Sequence
  Description of Artificial Sequence: Synthetic oligonucleotide
  Target: LAMA2; (+) strand; PAM type: YTN; PAM sequence: TTC
atgtataaatataaagtaaa

SEQ ID NO: 390331 - DNA, 20 bp, Artificial Sequence
  Description of Artificial Sequence: Synthetic oligonucleotide
  Target: LAMA2; (+) strand; PAM type: YTN; PAM sequence: TTA
cataatcatatatctctttc

SEQ ID NO: 390332 - DNA, 20 bp, Artificial Sequence
  Description of Artificial Sequence: Synthetic oligonucleotide
  Target: LAMA2; (+) strand; PAM type: YTN; PAM sequence: CTC
tttcaatgcattttgatttg

SEQ ID NO: 390333 - DNA, 20 bp, Artificial Sequence
  Description of Artificial Sequence: Synthetic oligonucleotide
  Target: LAMA2; (+) strand; PAM type: YTN; PAM sequence: CTT
tcaatgcattttgatttgtt

SEQ ID NO: 390334 - DNA, 20 bp, Artificial Sequence
  Description of Artificial Sequence: Synthetic oligonucleotide
  Target: LAMA2; (+) strand; PAM type: YTN; PAM sequence: TTT
caatgcattttgatttgttg

SEQ ID NO: 390335 - DNA, 20 bp, Artificial Sequence
  Description of Artificial Sequence: Synthetic oligonucleotide
  Target: LAMA2; (+) strand; PAM type: YTN; PAM sequence: TTC
aatgcattttgatttgttgc

SEQ ID NO: 390336 - DNA, 20 bp, Artificial Sequence
  Description of Artificial Sequence: Synthetic oligonucleotide
  Target: LAMA2; (+) strand; PAM type: YTN; PAM sequence: TTT
tgatttgttgccattttatt

SEQ ID NO: 390337 - DNA, 20 bp, Artificial Sequence
  Description of Artificial Sequence: Synthetic oligonucleotide
  Target: LAMA2; (+) strand; PAM type: YTN; PAM sequence: TTT
gatttgttgccattttattt

SEQ ID NO: 390338 - DNA, 20 bp, Artificial Sequence
  Description of Artificial Sequence: Synthetic oligonucleotide
  Target: LAMA2; (+) strand; PAM type: YTN; PAM sequence: TTG
atttgttgccattttatttt

SEQ ID NO: 390339 - DNA, 20 bp, Artificial Sequence
  Description of Artificial Sequence: Synthetic oligonucleotide
  Target: LAMA2; (+) strand; PAM type: YTN; PAM sequence: TTT
gttgccattttattttactc

SEQ ID NO: 390340 - DNA, 20 bp, Artificial Sequence
  Description of Artificial Sequence: Synthetic oligonucleotide
  Target: LAMA2; (+) strand; PAM type: YTN; PAM sequence: TTG
ttgccattttattttactca

SEQ ID NO: 390341 - DNA, 20 bp, Artificial Sequence
  Description of Artificial Sequence: Synthetic oligonucleotide
  Target: LAMA2; (+) strand; PAM type: YTN; PAM sequence: TTG
ccattttattttactcactg

SEQ ID NO: 390342 - DNA, 20 bp, Artificial Sequence
  Description of Artificial Sequence: Synthetic oligonucleotide
  Target: LAMA2; (+) strand; PAM type: YTN; PAM sequence: TTT
tattttactcactggaagaa

SEQ ID NO: 390343 - DNA, 20 bp, Artificial Sequence
  Description of Artificial Sequence: Synthetic oligonucleotide
  Target: LAMA2; (+) strand; PAM type: YTN; PAM sequence: TTT
attttactcactggaagaac

SEQ ID NO: 390344 - DNA, 20 bp, Artificial Sequence
  Description of Artificial Sequence: Synthetic oligonucleotide
  Target: LAMA2; (+) strand; PAM type: YTN; PAM sequence: TTA
ttttactcactggaagaacc

SEQ ID NO: 390345 - DNA, 20 bp, Artificial Sequence
  Description of Artificial Sequence: Synthetic oligonucleotide
  Target: LAMA2; (+) strand; PAM type: YTN; PAM sequence: TTT
tactcactggaagaacccaa

SEQ ID NO: 390346 - DNA, 20 bp, Artificial Sequence
  Description of Artificial Sequence: Synthetic oligonucleotide
  Target: LAMA2; (+) strand; PAM type: YTN; PAM sequence: TTT
actcactggaagaacccaag

SEQ ID NO: 390347 - DNA, 20 bp, Artificial Sequence
  Description of Artificial Sequence: Synthetic oligonucleotide
  Target: LAMA2; (+) strand; PAM type: YTN; PAM sequence: TTA
ctcactggaagaacccaagt

SEQ ID NO: 390348 - DNA, 20 bp, Artificial Sequence
  Description of Artificial Sequence: Synthetic oligonucleotide
  Target: LAMA2; (+) strand; PAM type: YTN; PAM sequence: CTC
actggaagaacccaagttcc

SEQ ID NO: 390349 - DNA, 20 bp, Artificial Sequence
  Description of Artificial Sequence: Synthetic oligonucleotide
  Target: LAMA2; (+) strand; PAM type: YTN; PAM sequence: CTG
gaagaacccaagttcctcac

SEQ ID NO: 390350 - DNA, 20 bp, Artificial Sequence
  Description of Artificial Sequence: Synthetic oligonucleotide
  Target: LAMA2; (+) strand; PAM type: YTN; PAM sequence: TTC
ctcacatatgagaatcatgt

SEQ ID NO: 390351 - DNA, 20 bp, Artificial Sequence
  Description of Artificial Sequence: Synthetic oligonucleotide
  Target: LAMA2; (+) strand; PAM type: YTN; PAM sequence: CTC
acatatgagaatcatgttta

SEQ ID NO: 390352 - DNA, 20 bp, Artificial Sequence
  Description of Artificial Sequence: Synthetic oligonucleotide
  Target: LAMA2; (+) strand; PAM type: YTN; PAM sequence: TTT
aacatattcaaactgcccta

SEQ ID NO: 390353 - DNA, 20 bp, Artificial Sequence
  Description of Artificial Sequence: Synthetic oligonucleotide
  Target: LAMA2; (+) strand; PAM type: YTN; PAM sequence: TTA
acatattcaaactgccctac

SEQ ID NO: 390354 - DNA, 20 bp, Artificial Sequence
  Description of Artificial Sequence: Synthetic oligonucleotide
  Target: LAMA2; (+) strand; PAM type: YTN; PAM sequence: TTC
aaactgccctacagtatgtg

SEQ ID NO: 390355 - DNA, 20 bp, Artificial Sequence
  Description of Artificial Sequence: Synthetic oligonucleotide
  Target: LAMA2; (+) strand; PAM type: YTN; PAM sequence: CTG
ccctacagtatgtgtgaaat

SEQ ID NO: 390356 - DNA, 20 bp, Artificial Sequence
  Description of Artificial Sequence: Synthetic oligonucleotide
  Target: LAMA2; (+) strand; PAM type: YTN; PAM sequence: CTA
cagtatgtgtgaaatattaa

SEQ ID NO: 390357 - DNA, 20 bp, Artificial Sequence
  Description of Artificial Sequence: Synthetic oligonucleotide
  Target: LAMA2; (+) strand; PAM type: YTN; PAM sequence: TTA
agatgctttttgatgatgac

SEQ ID NO: 390358 - DNA, 20 bp, Artificial Sequence
  Description of Artificial Sequence: Synthetic oligonucleotide
  Target: LAMA2; (+) strand; PAM type: YTN; PAM sequence: CTT
tttgatgatgactctactta

SEQ ID NO: 390359 - DNA, 20 bp, Artificial Sequence
  Description of Artificial Sequence: Synthetic oligonucleotide
  Target: LAMA2; (+) strand; PAM type: YTN; PAM sequence: TTT
ttgatgatgactctacttac

SEQ ID NO: 390360 - DNA, 20 bp, Artificial Sequence
  Description of Artificial Sequence: Synthetic oligonucleotide
  Target: LAMA2; (+) strand; PAM type: YTN; PAM sequence: TTT
tgatgatgactctacttacc

SEQ ID NO: 390361 - DNA, 20 bp, Artificial Sequence
  Description of Artificial Sequence: Synthetic oligonucleotide
  Target: LAMA2; (+) strand; PAM type: YTN; PAM sequence: TTT
gatgatgactctacttacct

SEQ ID NO: 390362 - DNA, 20 bp, Artificial Sequence
  Description of Artificial Sequence: Synthetic oligonucleotide
  Target: LAMA2; (+) strand; PAM type: YTN; PAM sequence: TTG
atgatgactctacttacctc

SEQ ID NO: 390363 - DNA, 20 bp, Artificial Sequence
  Description of Artificial Sequence: Synthetic oligonucleotide
  Target: LAMA2; (+) strand; PAM type: YTN; PAM sequence: CTC
tacttacctctatagctatt

SEQ ID NO: 390364 - DNA, 20 bp, Artificial Sequence
  Description of Artificial Sequence: Synthetic oligonucleotide
  Target: LAMA2; (+) strand; PAM type: YTN; PAM sequence: CTA
cttacctctatagctattgt

SEQ ID NO: 390365 - DNA, 20 bp, Artificial Sequence
  Description of Artificial Sequence: Synthetic oligonucleotide
  Target: LAMA2; (+) strand; PAM type: YTN; PAM sequence: CTT
acctctatagctattgtcct

SEQ ID NO: 390366 - DNA, 20 bp, Artificial Sequence
  Description of Artificial Sequence: Synthetic oligonucleotide
  Target: LAMA2; (+) strand; PAM type: YTN; PAM sequence: TTA
cctctatagctattgtcctt

SEQ ID NO: 390367 - DNA, 20 bp, Artificial Sequence
  Description of Artificial Sequence: Synthetic oligonucleotide
  Target: LAMA2; (+) strand; PAM type: YTN; PAM sequence: CTC
tatagctattgtccttagct

SEQ ID NO: 390368 - DNA, 20 bp, Artificial Sequence
  Description of Artificial Sequence: Synthetic oligonucleotide
  Target: LAMA2; (+) strand; PAM type: YTN; PAM sequence: CTA
tagctattgtccttagctcc

SEQ ID NO: 390369 - DNA, 20 bp, Artificial Sequence
  Description of Artificial Sequence: Synthetic oligonucleotide
  Target: LAMA2; (+) strand; PAM type: YTN; PAM sequence: CTA
ttgtccttagctcctttctt

SEQ ID NO: 390370 - DNA, 20 bp, Artificial Sequence
  Description of Artificial Sequence: Synthetic oligonucleotide
  Target: LAMA2; (+) strand; PAM type: YTN; PAM sequence: TTG
tccttagctcctttcttttt

SEQ ID NO: 390371 - DNA, 20 bp, Artificial Sequence
  Description of Artificial Sequence: Synthetic oligonucleotide
  Target: LAMA2; (+) strand; PAM type: YTN; PAM sequence: CTT
agctcctttcttttttcaga

SEQ ID NO: 390372 - DNA, 20 bp, Artificial Sequence
  Description of Artificial Sequence: Synthetic oligonucleotide
  Target: LAMA2; (+) strand; PAM type: YTN; PAM sequence: TTA
gctcctttcttttttcagag

SEQ ID NO: 390373 - DNA, 20 bp, Artificial Sequence
  Description of Artificial Sequence: Synthetic oligonucleotide
  Target: LAMA2; (+) strand; PAM type: YTN; PAM sequence: CTC
ctttcttttttcagagccaa

SEQ ID NO: 390374 - DNA, 20 bp, Artificial Sequence
  Description of Artificial Sequence: Synthetic oligonucleotide
  Target: LAMA2; (+) strand; PAM type: YTN; PAM sequence: CTT
tcttttttcagagccaaaat

SEQ ID NO: 390375 - DNA, 20 bp, Artificial Sequence
  Description of Artificial Sequence: Synthetic oligonucleotide
  Target: LAMA2; (+) strand; PAM type: YTN; PAM sequence: TTT
cttttttcagagccaaaatt

SEQ ID NO: 390376 - DNA, 20 bp, Artificial Sequence
  Description of Artificial Sequence: Synthetic oligonucleotide
  Target: LAMA2; (+) strand; PAM type: YTN; PAM sequence: TTC
ttttttcagagccaaaattt

SEQ ID NO: 390377 - DNA, 20 bp, Artificial Sequence
  Description of Artificial Sequence: Synthetic oligonucleotide
  Target: LAMA2; (+) strand; PAM type: YTN; PAM sequence: CTT
ttttcagagccaaaattttt

SEQ ID NO: 390378 - DNA, 20 bp, Artificial Sequence
  Description of Artificial Sequence: Synthetic oligonucleotide
  Target: LAMA2; (+) strand; PAM type: YTN; PAM sequence: TTT
tttcagagccaaaatttttt

SEQ ID NO: 390379 - DNA, 20 bp, Artificial Sequence
  Description of Artificial Sequence: Synthetic oligonucleotide
  Target: LAMA2; (+) strand; PAM type: YTN; PAM sequence: TTT
ttcagagccaaaatttttta

SEQ ID NO: 390380 - DNA, 20 bp, Artificial Sequence
  Description of Artificial Sequence: Synthetic oligonucleotide
  Target: LAMA2; (+) strand; PAM type: YTN; PAM sequence: TTT
tcagagccaaaattttttaa

SEQ ID NO: 390381 - DNA, 20 bp, Artificial Sequence
  Description of Artificial Sequence: Synthetic oligonucleotide
  Target: LAMA2; (+) strand; PAM type: YTN; PAM sequence: TTT
cagagccaaaattttttaaa

SEQ ID NO: 390382 - DNA, 20 bp, Artificial Sequence
  Description of Artificial Sequence: Synthetic oligonucleotide
  Target: LAMA2; (+) strand; PAM type: YTN; PAM sequence: TTC
agagccaaaattttttaaag

SEQ ID NO: 390383 - DNA, 20 bp, Artificial Sequence
  Description of Artificial Sequence: Synthetic oligonucleotide
  Target: LAMA2; (+) strand; PAM type: YTN; PAM sequence: TTT
tttaaagacttggagacaag

SEQ ID NO: 390384 - DNA, 20 bp, Artificial Sequence
  Description of Artificial Sequence: Synthetic oligonucleotide
  Target: LAMA2; (+) strand; PAM type: YTN; PAM sequence: TTT
ttaaagacttggagacaagt

SEQ ID NO: 390385 - DNA, 20 bp, Artificial Sequence
  Description of Artificial Sequence: Synthetic oligonucleotide
  Target: LAMA2; (+) strand; PAM type: YTN; PAM sequence: TTT
taaagacttggagacaagtc

SEQ ID NO: 390386 - DNA, 20 bp, Artificial Sequence
  Description of Artificial Sequence: Synthetic oligonucleotide
  Target: LAMA2; (+) strand; PAM type: YTN; PAM sequence: TTT
aaagacttggagacaagtct

SEQ ID NO: 390387 - DNA, 20 bp, Artificial Sequence
  Description of Artificial Sequence: Synthetic oligonucleotide
  Target: LAMA2; (+) strand; PAM type: YTN; PAM sequence: TTA
aagacttggagacaagtctg

SEQ ID NO: 390388 - DNA, 20 bp, Artificial Sequence
  Description of Artificial Sequence: Synthetic oligonucleotide
  Target: LAMA2; (+) strand; PAM type: YTN; PAM sequence: CTT
ggagacaagtctgtatttat

SEQ ID NO: 390389 - DNA, 20 bp, Artificial Sequence
  Description of Artificial Sequence: Synthetic oligonucleotide
  Target: LAMA2; (+) strand; PAM type: YTN; PAM sequence: TTG
gagacaagtctgtatttatt

SEQ ID NO: 390390 - DNA, 20 bp, Artificial Sequence
  Description of Artificial Sequence: Synthetic oligonucleotide
  Target: LAMA2; (+) strand; PAM type: YTN; PAM sequence: CTG
tatttatttctcactccact

SEQ ID NO: 390391 - DNA, 20 bp, Artificial Sequence
  Description of Artificial Sequence: Synthetic oligonucleotide
  Target: LAMA2; (+) strand; PAM type: YTN; PAM sequence: TTT
atttctcactccactgctgc

SEQ ID NO: 390392 - DNA, 20 bp, Artificial Sequence
  Description of Artificial Sequence: Synthetic oligonucleotide
  Target: LAMA2; (+) strand; PAM type: YTN; PAM sequence: TTA
tttctcactccactgctgcc

SEQ ID NO: 390393 - DNA, 20 bp, Artificial Sequence
  Description of Artificial Sequence: Synthetic oligonucleotide
  Target: LAMA2; (+) strand; PAM type: YTN; PAM sequence: TTT
ctcactccactgctgcctgg

SEQ ID NO: 390394 - DNA, 20 bp, Artificial Sequence
  Description of Artificial Sequence: Synthetic oligonucleotide
  Target: LAMA2; (+) strand; PAM type: YTN; PAM sequence: TTC
tcactccactgctgcctgga

SEQ ID NO: 390395 - DNA, 20 bp, Artificial Sequence
  Description of Artificial Sequence: Synthetic oligonucleotide
  Target: LAMA2; (+) strand; PAM type: YTN; PAM sequence: CTC
actccactgctgcctggatt

SEQ ID NO: 390396 - DNA, 20 bp, Artificial Sequence
  Description of Artificial Sequence: Synthetic oligonucleotide
  Target: LAMA2; (+) strand; PAM type: YTN; PAM sequence: CTC
cactgctgcctggattttca

SEQ ID NO: 390397 - DNA, 20 bp, Artificial Sequence
  Description of Artificial Sequence: Synthetic oligonucleotide
  Target: LAMA2; (+) strand; PAM type: YTN; PAM sequence: CTG
ctgcctggattttcactccc

SEQ ID NO: 390398 - DNA, 20 bp, Artificial Sequence
  Description of Artificial Sequence: Synthetic oligonucleotide
  Target: LAMA2; (+) strand; PAM type: YTN; PAM sequence: CTG
cctggattttcactcccagc

SEQ ID NO: 390399 - DNA, 20 bp, Artificial Sequence
  Description of Artificial Sequence: Synthetic oligonucleotide
  Target: LAMA2; (+) strand; PAM type: YTN; PAM sequence: CTG
gattttcactcccagcccac

SEQ ID NO: 390400 - DNA, 20 bp, Artificial Sequence
  Description of Artificial Sequence: Synthetic oligonucleotide
  Target: LAMA2; (+) strand; PAM type: YTN; PAM sequence: TTT
tcactcccagcccactactg

SEQ ID NO: 390401 - DNA, 20 bp, Artificial Sequence
  Description of Artificial Sequence: Synthetic oligonucleotide
  Target: LAMA2; (+) strand; PAM type: YTN; PAM sequence: TTT
cactcccagcccactactga

SEQ ID NO: 390402 - DNA, 20 bp, Artificial Sequence
  Description of Artificial Sequence: Synthetic oligonucleotide
  Target: LAMA2; (+) strand; PAM type: YTN; PAM sequence: TTC
actcccagcccactactgaa

SEQ ID NO: 390403 - DNA, 20 bp, Artificial Sequence
  Description of Artificial Sequence: Synthetic oligonucleotide
  Target: LAMA2; (+) strand; PAM type: YTN; PAM sequence: CTC
ccagcccactactgaaactg

SEQ ID NO: 390404 - DNA, 20 bp, Artificial Sequence
  Description of Artificial Sequence: Synthetic oligonucleotide
  Target: LAMA2; (+) strand; PAM type: YTN; PAM sequence: CTA
ctgaaactgtttttataaga

SEQ ID NO: 390405 - DNA, 20 bp, Artificial Sequence
  Description of Artificial Sequence: Synthetic oligonucleotide
  Target: LAMA2; (+) strand; PAM type: YTN; PAM sequence: CTG
aaactgtttttataagataa

SEQ ID NO: 390406 - DNA, 20 bp, Artificial Sequence
  Description of Artificial Sequence: Synthetic oligonucleotide
  Target: LAMA2; (+) strand; PAM type: YTN; PAM sequence: CTG
tttttataagataaccaatg

SEQ ID NO: 390407 - DNA, 20 bp, Artificial Sequence
  Description of Artificial Sequence: Synthetic oligonucleotide
  Target: LAMA2; (+) strand; PAM type: YTN; PAM sequence: TTT
ttataagataaccaatgaca

SEQ ID NO: 390408 - DNA, 20 bp, Artificial Sequence
  Description of Artificial Sequence: Synthetic oligonucleotide
  Target: LAMA2; (+) strand; PAM type: YTN; PAM sequence: TTT
tataagataaccaatgacaa

SEQ ID NO: 390409 - DNA, 20 bp, Artificial Sequence
  Description of Artificial Sequence: Synthetic oligonucleotide
  Target: LAMA2; (+) strand; PAM type: YTN; PAM sequence: TTT
ataagataaccaatgacaat

SEQ ID NO: 390410 - DNA, 20 bp, Artificial Sequence
  Description of Artificial Sequence: Synthetic oligonucleotide
  Target: LAMA2; (+) strand; PAM type: YTN; PAM sequence: TTA
taagataaccaatgacaatc

SEQ ID NO: 390411 - DNA, 20 bp, Artificial Sequence
  Description of Artificial Sequence: Synthetic oligonucleotide
  Target: LAMA2; (+) strand; PAM type: YTN; PAM sequence: CTG
gtaactaaatccactggata

SEQ ID NO: 390412 - DNA, 20 bp, Artificial Sequence
  Description of Artificial Sequence: Synthetic oligonucleotide
  Target: LAMA2; (+) strand; PAM type: YTN; PAM sequence: CTA
aatccactggatacttatta

SEQ ID NO: 390413 - DNA, 20 bp, Artificial Sequence
  Description of Artificial Sequence: Synthetic oligonucleotide
  Target: LAMA2; (+) strand; PAM type: YTN; PAM sequence: CTG
gatacttattaattttactt

SEQ ID NO: 390414 - DNA, 20 bp, Artificial Sequence
  Description of Artificial Sequence: Synthetic oligonucleotide
  Target: LAMA2; (+) strand; PAM type: YTN; PAM sequence: CTT
attaattttacttgaaatct

SEQ ID NO: 390415 - DNA, 20 bp, Artificial Sequence
  Description of Artificial Sequence: Synthetic oligonucleotide
  Target: LAMA2; (+) strand; PAM type: YTN; PAM sequence: TTA
ttaattttacttgaaatctc

SEQ ID NO: 390416 - DNA, 20 bp, Artificial Sequence
  Description of Artificial Sequence: Synthetic oligonucleotide
  Target: LAMA2; (+) strand; PAM type: YTN; PAM sequence: TTA
attttacttgaaatctctgc

SEQ ID NO: 390417 - DNA, 20 bp, Artificial Sequence
  Description of Artificial Sequence: Synthetic oligonucleotide
  Target: LAMA2; (+) strand; PAM type: YTN; PAM sequence: TTT
tacttgaaatctctgcagct

SEQ ID NO: 390418 - DNA, 20 bp, Artificial Sequence
  Description of Artificial Sequence: Synthetic oligonucleotide
  Target: LAMA2; (+) strand; PAM type: YTN; PAM sequence: TTT
acttgaaatctctgcagctt

SEQ ID NO: 390419 - DNA, 20 bp, Artificial Sequence
  Description of Artificial Sequence: Synthetic oligonucleotide
  Target: LAMA2; (+) strand; PAM type: YTN; PAM sequence: TTA
cttgaaatctctgcagcttt

SEQ ID NO: 390420 - DNA, 20 bp, Artificial Sequence
  Description of Artificial Sequence: Synthetic oligonucleotide
  Target: LAMA2; (+) strand; PAM type: YTN; PAM sequence: CTT
gaaatctctgcagctttgat

SEQ ID NO: 390421 - DNA, 20 bp, Artificial Sequence
  Description of Artificial Sequence: Synthetic oligonucleotide
  Target: LAMA2; (+) strand; PAM type: YTN; PAM sequence: TTG
aaatctctgcagctttgatc

SEQ ID NO: 390422 - DNA, 20 bp, Artificial Sequence
  Description of Artificial Sequence: Synthetic oligonucleotide
  Target: LAMA2; (+) strand; PAM type: YTN; PAM sequence: CTC
tgcagctttgatctttcctt

SEQ ID NO: 390423 - DNA, 20 bp, Artificial Sequence
  Description of Artificial Sequence: Synthetic oligonucleotide
  Target: LAMA2; (+) strand; PAM type: YTN; PAM sequence: CTG
cagctttgatctttccttcc

SEQ ID NO: 390424 - DNA, 20 bp, Artificial Sequence
  Description of Artificial Sequence: Synthetic oligonucleotide
  Target: LAMA2; (+) strand; PAM type: YTN; PAM sequence: CTT
tgatctttccttccttctta

SEQ ID NO: 390425 - DNA, 20 bp, Artificial Sequence
  Description of Artificial Sequence: Synthetic oligonucleotide
  Target: LAMA2; (+) strand; PAM type: YTN; PAM sequence: TTT
gatctttccttccttcttaa

SEQ ID NO: 390426 - DNA, 20 bp, Artificial Sequence
  Description of Artificial Sequence: Synthetic oligonucleotide
  Target: LAMA2; (+) strand; PAM type: YTN; PAM sequence: TTG
atctttccttccttcttaac

SEQ ID NO: 390427 - DNA, 20 bp, Artificial Sequence
  Description of Artificial Sequence: Synthetic oligonucleotide
  Target: LAMA2; (+) strand; PAM type: YTN; PAM sequence: CTT
tccttccttcttaacatact

SEQ ID NO: 390428 - DNA, 20 bp, Artificial Sequence
  Description of Artificial Sequence: Synthetic oligonucleotide
  Target: LAMA2; (+) strand; PAM type: YTN; PAM sequence: TTT
ccttccttcttaacatactg

SEQ ID NO: 390429 - DNA, 20 bp, Artificial Sequence
  Description of Artificial Sequence: Synthetic oligonucleotide
  Target: LAMA2; (+) strand; PAM type: YTN; PAM sequence: TTC
cttccttcttaacatactgt

SEQ ID NO: 390430 - DNA, 20 bp, Artificial Sequence
  Description of Artificial Sequence: Synthetic oligonucleotide
  Target: LAMA2; (+) strand; PAM type: YTN; PAM sequence: CTT
ccttcttaacatactgtcct

SEQ ID NO: 390431 - DNA, 20 bp, Artificial Sequence
  Description of Artificial Sequence: Synthetic oligonucleotide
  Target: LAMA2; (+) strand; PAM type: YTN; PAM sequence: TTC
cttcttaacatactgtcctc

SEQ ID NO: 390432 - DNA, 20 bp, Artificial Sequence
  Description of Artificial Sequence: Synthetic oligonucleotide
  Target: LAMA2; (+) strand; PAM type: YTN; PAM sequence: CTT
cttaacatactgtcctctct

SEQ ID NO: 390433 - DNA, 20 bp, Artificial Sequence
  Description of Artificial Sequence: Synthetic oligonucleotide
  Target: LAMA2; (+) strand; PAM type: YTN; PAM sequence: TTC
ttaacatactgtcctctctc

SEQ ID NO: 390434 - DNA, 20 bp, Artificial Sequence
  Description of Artificial Sequence: Synthetic oligonucleotide
  Target: LAMA2; (+) strand; PAM type: YTN; PAM sequence: CTT
aacatactgtcctctctctg

SEQ ID NO: 390435 - DNA, 20 bp, Artificial Sequence
  Description of Artificial Sequence: Synthetic oligonucleotide
  Target: LAMA2; (+) strand; PAM type: YTN; PAM sequence: TTA
acatactgtcctctctctgt

SEQ ID NO: 390436 - DNA, 20 bp, Artificial Sequence
  Description of Artificial Sequence: Synthetic oligonucleotide
  Target: LAMA2; (+) strand; PAM type: YTN; PAM sequence: CTG
tcctctctctgtttttctct

SEQ ID NO: 390437 - DNA, 20 bp, Artificial Sequence
  Description of Artificial Sequence: Synthetic oligonucleotide
  Target: LAMA2; (+) strand; PAM type: YTN; PAM sequence: CTC
tctctgtttttctcttaatt

SEQ ID NO: 390438 - DNA, 20 bp, Artificial Sequence
  Description of Artificial Sequence: Synthetic oligonucleotide
  Target: LAMA2; (+) strand; PAM type: YTN; PAM sequence: CTC
tctgtttttctcttaattct

SEQ ID NO: 390439 - DNA, 20 bp, Artificial Sequence
  Description of Artificial Sequence: Synthetic oligonucleotide
  Target: LAMA2; (+) strand; PAM type: YTN; PAM sequence: CTC
tgtttttctcttaattctcc

SEQ ID NO: 390440 - DNA, 20 bp, Artificial Sequence
  Description of Artificial Sequence: Synthetic oligonucleotide
  Target: LAMA2; (+) strand; PAM type: YTN; PAM sequence: CTG
tttttctcttaattctccaa

SEQ ID NO: 390441 - DNA, 20 bp, Artificial Sequence
  Description of Artificial Sequence: Synthetic oligonucleotide
  Target: LAMA2; (+) strand; PAM type: YTN; PAM sequence: TTT
ttctcttaattctccaacct

SEQ ID NO: 390442 - DNA, 20 bp, Artificial Sequence
  Description of Artificial Sequence: Synthetic oligonucleotide
  Target: LAMA2; (+) strand; PAM type: YTN; PAM sequence: TTT
tctcttaattctccaacctt

SEQ ID NO: 390443 - DNA, 20 bp, Artificial Sequence
  Description of Artificial Sequence: Synthetic oligonucleotide
  Target: LAMA2; (+) strand; PAM type: YTN; PAM sequence: TTT
ctcttaattctccaaccttt

SEQ ID NO: 390444 - DNA, 20 bp, Artificial Sequence
  Description of Artificial Sequence: Synthetic oligonucleotide
  Target: LAMA2; (+) strand; PAM type: YTN; PAM sequence: TTC
tcttaattctccaacctttc

SEQ ID NO: 390445 - DNA, 20 bp, Artificial Sequence
  Description of Artificial Sequence: Synthetic oligonucleotide
  Target: LAMA2; (+) strand; PAM type: YTN; PAM sequence: CTC
ttaattctccaacctttcat

SEQ ID NO: 390446 - DNA, 20 bp, Artificial Sequence
  Description of Artificial Sequence: Synthetic oligonucleotide
  Target: LAMA2; (+) strand; PAM type: YTN; PAM sequence: CTT
aattctccaacctttcattc

SEQ ID NO: 390447 - DNA, 20 bp, Artificial Sequence
  Description of Artificial Sequence: Synthetic oligonucleotide
  Target: LAMA2; (+) strand; PAM type: YTN; PAM sequence: TTA
attctccaacctttcattct

SEQ ID NO: 390448 - DNA, 20 bp, Artificial Sequence
  Description of Artificial Sequence: Synthetic oligonucleotide
  Target: LAMA2; (+) strand; PAM type: YTN; PAM sequence: TTC
tccaacctttcattctaagg

SEQ ID NO: 390449 - DNA, 20 bp, Artificial Sequence
  Description of Artificial Sequence: Synthetic oligonucleotide
  Target: LAMA2; (+) strand; PAM type: YTN; PAM sequence: CTC
caacctttcattctaaggct

SEQ ID NO: 390450 - DNA, 20 bp, Artificial Sequence
  Description of Artificial Sequence: Synthetic oligonucleotide
  Target: LAMA2; (+) strand; PAM type: YTN; PAM sequence: CTT
tcattctaaggctcttcctc

SEQ ID NO: 390451 - DNA, 20 bp, Artificial Sequence
  Description of Artificial Sequence: Synthetic oligonucleotide
  Target: LAMA2; (+) strand; PAM type: YTN; PAM sequence: TTT
cattctaaggctcttcctct

SEQ ID NO: 390452 - DNA, 20 bp, Artificial Sequence
  Description of Artificial Sequence: Synthetic oligonucleotide
  Target: LAMA2; (+) strand; PAM type: YTN; PAM sequence: TTC
attctaaggctcttcctctc

SEQ ID NO: 390453 - DNA, 20 bp, Artificial Sequence
  Description of Artificial Sequence: Synthetic oligonucleotide
  Target: LAMA2; (+) strand; PAM type: YTN; PAM sequence: TTC
taaggctcttcctctcatca

SEQ ID NO: 390454 - DNA, 20 bp, Artificial Sequence
  Description of Artificial Sequence: Synthetic oligonucleotide
  Target: LAMA2; (+) strand; PAM type: YTN; PAM sequence: CTA
aggctcttcctctcatcatc

SEQ ID NO: 390455 - DNA, 20 bp, Artificial Sequence
  Description of Artificial Sequence: Synthetic oligonucleotide
  Target: LAMA2; (+) strand; PAM type: YTN; PAM sequence: CTC
ttcctctcatcatcccttca

SEQ ID NO: 390456 - DNA, 20 bp, Artificial Sequence
  Description of Artificial Sequence: Synthetic oligonucleotide
  Target: LAMA2; (+) strand; PAM type: YTN; PAM sequence: CTT
cctctcatcatcccttcaaa

SEQ ID NO: 390457 - DNA, 20 bp, Artificial Sequence
  Description of Artificial Sequence: Synthetic oligonucleotide
  Target: LAMA2; (+) strand; PAM type: YTN; PAM sequence: TTC
ctctcatcatcccttcaaag

SEQ ID NO: 390458 - DNA, 20 bp, Artificial Sequence
  Description of Artificial Sequence: Synthetic oligonucleotide
  Target: LAMA2; (+) strand; PAM type: YTN; PAM sequence: CTC
tcatcatcccttcaaagtcg

SEQ ID NO: 390459 - DNA, 20 bp, Artificial Sequence
  Description of Artificial Sequence: Synthetic oligonucleotide
  Target: LAMA2; (+) strand; PAM type: YTN; PAM sequence: CTC
atcatcccttcaaagtcggt

SEQ ID NO: 390460 - DNA, 20 bp, Artificial Sequence
  Description of Artificial Sequence: Synthetic oligonucleotide
  Target: LAMA2; (+) strand; PAM type: YTN; PAM sequence: CTT
caaagtcggtgttccttggg

SEQ ID NO: 390461 - DNA, 20 bp, Artificial Sequence
  Description of Artificial Sequence: Synthetic oligonucleotide
  Target: LAMA2; (+) strand; PAM type: YTN; PAM sequence: TTC
aaagtcggtgttccttgggg

SEQ ID NO: 390462 - DNA, 20 bp, Artificial Sequence
  Description of Artificial Sequence: Synthetic oligonucleotide
  Target: LAMA2; (+) strand; PAM type: YTN; PAM sequence: TTC
cttggggactaggcctcagt

SEQ ID NO: 390463 - DNA, 20 bp, Artificial Sequence
  Description of Artificial Sequence: Synthetic oligonucleotide
  Target: LAMA2; (+) strand; PAM type: YTN; PAM sequence: CTT
ggggactaggcctcagtcca

SEQ ID NO: 390464 - DNA, 20 bp, Artificial Sequence
  Description of Artificial Sequence: Synthetic oligonucleotide
  Target: LAMA2; (+) strand; PAM type: YTN; PAM sequence: TTG
gggactaggcctcagtccat

SEQ ID NO: 390465 - DNA, 20 bp, Artificial Sequence
  Description of Artificial Sequence: Synthetic oligonucleotide
  Target: LAMA2; (+) strand; PAM type: YTN; PAM sequence: CTA
ggcctcagtccatgttttcc

SEQ ID NO: 390466 - DNA, 20 bp, Artificial Sequence
  Description of Artificial Sequence: Synthetic oligonucleotide
  Target: LAMA2; (+) strand; PAM type: YTN; PAM sequence: CTC
agtccatgttttccctcact

SEQ ID NO: 390467 - DNA, 20 bp, Artificial Sequence
  Description of Artificial Sequence: Synthetic oligonucleotide
  Target: LAMA2; (+) strand; PAM type: YTN; PAM sequence: TTT
tccctcactgtataacactt

SEQ ID NO: 390468 - DNA, 20 bp, Artificial Sequence
  Description of Artificial Sequence: Synthetic oligonucleotide
  Target: LAMA2; (+) strand; PAM type: YTN; PAM sequence: TTT
ccctcactgtataacacttt

SEQ ID NO: 390469 - DNA, 20 bp, Artificial Sequence
  Description of Artificial Sequence: Synthetic oligonucleotide
  Target: LAMA2; (+) strand; PAM type: YTN; PAM sequence: TTC
cctcactgtataacactttc

SEQ ID NO: 390470 - DNA, 20 bp, Artificial Sequence
  Description of Artificial Sequence: Synthetic oligonucleotide
  Target: LAMA2; (+) strand; PAM type: YTN; PAM sequence: CTC
actgtataacactttctttg

SEQ ID NO: 390471 - DNA, 20 bp, Artificial Sequence
  Description of Artificial Sequence: Synthetic oligonucleotide
  Target: LAMA2; (+) strand; PAM type: YTN; PAM sequence: CTG
tataacactttctttggtct

SEQ ID NO: 390472 - DNA, 20 bp, Artificial Sequence
  Description of Artificial Sequence: Synthetic oligonucleotide
  Target: LAMA2; (+) strand; PAM type: YTN; PAM sequence: CTT
tctttggtcttcaattgcca

SEQ ID NO: 390473 - DNA, 20 bp, Artificial Sequence
  Description of Artificial Sequence: Synthetic oligonucleotide
  Target: LAMA2; (+) strand; PAM type: YTN; PAM sequence: TTT
ctttggtcttcaattgccat

SEQ ID NO: 390474 - DNA, 20 bp, Artificial Sequence
  Description of Artificial Sequence: Synthetic oligonucleotide
  Target: LAMA2; (+) strand; PAM type: YTN; PAM sequence: TTC
tttggtcttcaattgccatg

SEQ ID NO: 390475 - DNA, 20 bp, Artificial Sequence
  Description of Artificial Sequence: Synthetic oligonucleotide
  Target: LAMA2; (+) strand; PAM type: YTN; PAM sequence: CTT
tggtcttcaattgccatgta

SEQ ID NO: 390476 - DNA, 20 bp, Artificial Sequence
  Description of Artificial Sequence: Synthetic oligonucleotide
  Target: LAMA2; (+) strand; PAM type: YTN; PAM sequence: TTT
ggtcttcaattgccatgtac

SEQ ID NO: 390477 - DNA, 20 bp, Artificial Sequence
  Description of Artificial Sequence: Synthetic oligonucleotide
  Target: LAMA2; (+) strand; PAM type: YTN; PAM sequence: TTG
gtcttcaattgccatgtaca

SEQ ID NO: 390478 - DNA, 20 bp, Artificial Sequence
  Description of Artificial Sequence: Synthetic oligonucleotide
  Target: LAMA2; (+) strand; PAM type: YTN; PAM sequence: CTT
caattgccatgtacaagctg

SEQ ID NO: 390479 - DNA, 20 bp, Artificial Sequence
  Description of Artificial Sequence: Synthetic oligonucleotide
  Target: LAMA2; (+) strand; PAM type: YTN; PAM sequence: TTC
aattgccatgtacaagctgt

SEQ ID NO: 390480 - DNA, 20 bp, Artificial Sequence
  Description of Artificial Sequence: Synthetic oligonucleotide
  Target: LAMA2; (+) strand; PAM type: YTN; PAM sequence: TTG
ccatgtacaagctgttaatt

SEQ ID NO: 390481 - DNA, 20 bp, Artificial Sequence
  Description of Artificial Sequence: Synthetic oligonucleotide
  Target: LAMA2; (+) strand; PAM type: YTN; PAM sequence: CTG
ttaattcataaatctatatt

SEQ ID NO: 390482 - DNA, 20 bp, Artificial Sequence
  Description of Artificial Sequence: Synthetic oligonucleotide
  Target: LAMA2; (+) strand; PAM type: YTN; PAM sequence: TTA
attcataaatctatattttc

SEQ ID NO: 390483 - DNA, 20 bp, Artificial Sequence
  Description of Artificial Sequence: Synthetic oligonucleotide
  Target: LAMA2; (+) strand; PAM type: YTN; PAM sequence: TTC
ataaatctatattttcaagg

SEQ ID NO: 390484 - DNA, 20 bp, Artificial Sequence
  Description of Artificial Sequence: Synthetic oligonucleotide
  Target: LAMA2; (+) strand; PAM type: YTN; PAM sequence: CTA
tattttcaaggctgacttca

SEQ ID NO: 390485 - DNA, 20 bp, Artificial Sequence
  Description of Artificial Sequence: Synthetic oligonucleotide
  Target: LAMA2; (+) strand; PAM type: YTN; PAM sequence: TTT
tcaaggctgacttcattctc

SEQ ID NO: 390486 - DNA, 20 bp, Artificial Sequence
  Description of Artificial Sequence: Synthetic oligonucleotide
  Target: LAMA2; (+) strand; PAM type: YTN; PAM sequence: TTT
caaggctgacttcattctca

SEQ ID NO: 390487 - DNA, 20 bp, Artificial Sequence
  Description of Artificial Sequence: Synthetic oligonucleotide
  Target: LAMA2; (+) strand; PAM type: YTN; PAM sequence: TTC
aaggctgacttcattctcat

SEQ ID NO: 390488 - DNA, 20 bp, Artificial Sequence
  Description of Artificial Sequence: Synthetic oligonucleotide
  Target: LAMA2; (+) strand; PAM type: YTN; PAM sequence: CTG
acttcattctcatgctttgg

SEQ ID NO: 390489 - DNA, 20 bp, Artificial Sequence
  Description of Artificial Sequence: Synthetic oligonucleotide
  Target: LAMA2; (+) strand; PAM type: YTN; PAM sequence: CTT
cattctcatgctttggtcct

SEQ ID NO: 390490 - DNA, 20 bp, Artificial Sequence
  Description of Artificial Sequence: Synthetic oligonucleotide
  Target: LAMA2; (+) strand; PAM type: YTN; PAM sequence: TTC
attctcatgctttggtccta

SEQ ID NO: 390491 - DNA, 20 bp, Artificial Sequence
  Description of Artificial Sequence: Synthetic oligonucleotide
  Target: LAMA2; (+) strand; PAM type: YTN; PAM sequence: TTC
tcatgctttggtcctatgtg

SEQ ID NO: 390492 - DNA, 20 bp, Artificial Sequence
  Description of Artificial Sequence: Synthetic oligonucleotide
  Target: LAMA2; (+) strand; PAM type: YTN; PAM sequence: CTC
atgctttggtcctatgtgcc

SEQ ID NO: 390493 - DNA, 20 bp, Artificial Sequence
  Description of Artificial Sequence: Synthetic oligonucleotide
  Target: LAMA2; (+) strand; PAM type: YTN; PAM sequence: CTT
tggtcctatgtgccttacta

SEQ ID NO: 390494 - DNA, 20 bp, Artificial Sequence
  Description of Artificial Sequence: Synthetic oligonucleotide
  Target: LAMA2; (+) strand; PAM type: YTN; PAM sequence: TTT
ggtcctatgtgccttactat

SEQ ID NO: 390495 - DNA, 20 bp, Artificial Sequence
  Description of Artificial Sequence: Synthetic oligonucleotide
  Target: LAMA2; (+) strand; PAM type: YTN; PAM sequence: TTG
gtcctatgtgccttactatg

SEQ ID NO: 390496 - DNA, 20 bp, Artificial Sequence
  Description of Artificial Sequence: Synthetic oligonucleotide
  Target: LAMA2; (+) strand; PAM type: YTN; PAM sequence: CTA
tgtgccttactatggattgg

SEQ ID NO: 390497 - DNA, 20 bp, Artificial Sequence
  Description of Artificial Sequence: Synthetic oligonucleotide
  Target: LAMA2; (+) strand; PAM type: YTN; PAM sequence: CTT
actatggattggacatctca

SEQ ID NO: 390498 - DNA, 20 bp, Artificial Sequence
  Description of Artificial Sequence: Synthetic oligonucleotide
  Target: LAMA2; (+) strand; PAM type: YTN; PAM sequence: TTA
ctatggattggacatctcaa

SEQ ID NO: 390499 - DNA, 20 bp, Artificial Sequence
  Description of Artificial Sequence: Synthetic oligonucleotide
  Target: LAMA2; (+) strand; PAM type: YTN; PAM sequence: CTA
tggattggacatctcaaact

SEQ ID NO: 390500 - DNA, 20 bp, Artificial Sequence
  Description of Artificial Sequence: Synthetic oligonucleotide
  Target: LAMA2; (+) strand; PAM type: YTN; PAM sequence: TTG
gacatctcaaactaaactca

SEQ ID NO: 390501 - DNA, 20 bp, Artificial Sequence
  Description of Artificial Sequence: Synthetic oligonucleotide
  Target: LAMA2; (+) strand; PAM type: YTN; PAM sequence: CTC
aaactaaactcatcatttcc

SEQ ID NO: 390502 - DNA, 20 bp, Artificial Sequence
  Description of Artificial Sequence: Synthetic oligonucleotide
  Target: LAMA2; (+) strand; PAM type: YTN; PAM sequence: CTA
aactcatcatttcctcttaa

SEQ ID NO: 390503 - DNA, 20 bp, Artificial Sequence
  Description of Artificial Sequence: Synthetic oligonucleotide
  Target: LAMA2; (+) strand; PAM type: YTN; PAM sequence: CTC
atcatttcctcttaaagccc

SEQ ID NO: 390504 - DNA, 20 bp, Artificial Sequence
  Description of Artificial Sequence: Synthetic oligonucleotide
  Target: LAMA2; (+) strand; PAM type: YTN; PAM sequence: TTT
cctcttaaagcccattattt

SEQ ID NO: 390505 - DNA, 20 bp, Artificial Sequence
  Description of Artificial Sequence: Synthetic oligonucleotide
  Target: LAMA2; (+) strand; PAM type: YTN; PAM sequence: TTC
ctcttaaagcccattatttc

SEQ ID NO: 390506 - DNA, 20 bp, Artificial Sequence
  Description of Artificial Sequence: Synthetic oligonucleotide
  Target: LAMA2; (+) strand; PAM type: YTN; PAM sequence: CTC
ttaaagcccattatttctcc

SEQ ID NO: 390507 - DNA, 20 bp, Artificial Sequence
  Description of Artificial Sequence: Synthetic oligonucleotide
  Target: LAMA2; (+) strand; PAM type: YTN; PAM sequence: CTT
aaagcccattatttctcctg

SEQ ID NO: 390508 - DNA, 20 bp, Artificial Sequence
  Description of Artificial Sequence: Synthetic oligonucleotide
  Target: LAMA2; (+) strand; PAM type: YTN; PAM sequence: TTA
aagcccattatttctcctgt

SEQ ID NO: 390509 - DNA, 20 bp, Artificial Sequence
  Description of Artificial Sequence: Synthetic oligonucleotide
  Target: LAMA2; (+) strand; PAM type: YTN; PAM sequence: TTA
tttctcctgtgtagaacatc

SEQ ID NO: 390510 - DNA, 20 bp, Artificial Sequence
  Description of Artificial Sequence: Synthetic oligonucleotide
  Target: LAMA2; (+) strand; PAM type: YTN; PAM sequence: TTT
ctcctgtgtagaacatctca

SEQ ID NO: 390511 - DNA, 20 bp, Artificial Sequence
  Description of Artificial Sequence: Synthetic oligonucleotide
  Target: LAMA2; (+) strand; PAM type: YTN; PAM sequence: TTC
tcctgtgtagaacatctcag

SEQ ID NO: 390512 - DNA, 20 bp, Artificial Sequence
  Description of Artificial Sequence: Synthetic oligonucleotide
  Target: LAMA2; (+) strand; PAM type: YTN; PAM sequence: CTC
ctgtgtagaacatctcagtg

SEQ ID NO: 390513 - DNA, 20 bp, Artificial Sequence
  Description of Artificial Sequence: Synthetic oligonucleotide
  Target: LAMA2; (+) strand; PAM type: YTN; PAM sequence: CTG
tgtagaacatctcagtgttt

SEQ ID NO: 390514 - DNA, 20 bp, Artificial Sequence
  Description of Artificial Sequence: Synthetic oligonucleotide
  Target: LAMA2; (+) strand; PAM type: YTN; PAM sequence: CTC
agtgttttatccgccagtat

SEQ ID NO: 390515 - DNA, 20 bp, Artificial Sequence
  Description of Artificial Sequence: Synthetic oligonucleotide
  Target: LAMA2; (+) strand; PAM type: YTN; PAM sequence: TTT
tatccgccagtatatgccca

SEQ ID NO: 390516 - DNA, 20 bp, Artificial Sequence
  Description of Artificial Sequence: Synthetic oligonucleotide
  Target: LAMA2; (+) strand; PAM type: YTN; PAM sequence: TTT
atccgccagtatatgcccag

SEQ ID NO: 390517 - DNA, 20 bp, Artificial Sequence
  Description of Artificial Sequence: Synthetic oligonucleotide
  Target: LAMA2; (+) strand; PAM type: YTN; PAM sequence: TTA
tccgccagtatatgcccagt

SEQ ID NO: 390518 - DNA, 20 bp, Artificial Sequence
  Description of Artificial Sequence: Synthetic oligonucleotide
  Target: LAMA2; (+) strand; PAM type: YTN; PAM sequence: CTC
ccaaagagaaattagcaggt

SEQ ID NO: 390519 - DNA, 20 bp, Artificial Sequence
  Description of Artificial Sequence: Synthetic oligonucleotide
  Target: LAMA2; (+) strand; PAM type: YTN; PAM sequence: TTA
gcaggttgcccttcactcta

SEQ ID NO: 390520 - DNA, 20 bp, Artificial Sequence
  Description of Artificial Sequence: Synthetic oligonucleotide
  Target: LAMA2; (+) strand; PAM type: YTN; PAM sequence: TTG
cccttcactctactccctct

SEQ ID NO: 390521 - DNA, 20 bp, Artificial Sequence
  Description of Artificial Sequence: Synthetic oligonucleotide
  Target: LAMA2; (+) strand; PAM type: YTN; PAM sequence: CTT
cactctactccctctttcat

SEQ ID NO: 390522 - DNA, 20 bp, Artificial Sequence
  Description of Artificial Sequence: Synthetic oligonucleotide
  Target: LAMA2; (+) strand; PAM type: YTN; PAM sequence: TTC
actctactccctctttcatc

SEQ ID NO: 390523 - DNA, 20 bp, Artificial Sequence
  Description of Artificial Sequence: Synthetic oligonucleotide
  Target: LAMA2; (+) strand; PAM type: YTN; PAM sequence: CTC
tactccctctttcatccttc

SEQ ID NO: 390524 - DNA, 20 bp, Artificial Sequence
  Description of Artificial Sequence: Synthetic oligonucleotide
  Target: LAMA2; (+) strand; PAM type: YTN; PAM sequence: CTA
ctccctctttcatccttcat

SEQ ID NO: 390525 - DNA, 20 bp, Artificial Sequence
  Description of Artificial Sequence: Synthetic oligonucleotide
  Target: LAMA2; (+) strand; PAM type: YTN; PAM sequence: CTC
cctctttcatccttcatcaa

SEQ ID NO: 390526 - DNA, 20 bp, Artificial Sequence
  Description of Artificial Sequence: Synthetic oligonucleotide
  Target: LAMA2; (+) strand; PAM type: YTN; PAM sequence: CTC
tttcatccttcatcaaattc

SEQ ID NO: 390527 - DNA, 20 bp, Artificial Sequence
  Description of Artificial Sequence: Synthetic oligonucleotide
  Target: LAMA2; (+) strand; PAM type: YTN; PAM sequence: CTT
tcatccttcatcaaattcag

SEQ ID NO: 390528 - DNA, 20 bp, Artificial Sequence
  Description of Artificial Sequence: Synthetic oligonucleotide
  Target: LAMA2; (+) strand; PAM type: YTN; PAM sequence: TTT
catccttcatcaaattcagt

SEQ ID NO: 390529 - DNA, 20 bp, Artificial Sequence
  Description of Artificial Sequence: Synthetic oligonucleotide
  Target: LAMA2; (+) strand; PAM type: YTN; PAM sequence: TTC
atccttcatcaaattcagtt

SEQ ID NO: 390530 - DNA, 20 bp, Artificial Sequence
  Description of Artificial Sequence: Synthetic oligonucleotide
  Target: LAMA2; (+) strand; PAM type: YTN; PAM sequence: CTT
catcaaattcagtttccttc

SEQ ID NO: 390531 - DNA, 20 bp, Artificial Sequence
  Description of Artificial Sequence: Synthetic oligonucleotide
  Target: LAMA2; (+) strand; PAM type: YTN; PAM sequence: TTC
atcaaattcagtttccttct

SEQ ID NO: 390532 - DNA, 20 bp, Artificial Sequence
  Description of Artificial Sequence: Synthetic oligonucleotide
  Target: LAMA2; (+) strand; PAM type: YTN; PAM sequence: TTC
agtttccttctatggtgact

SEQ ID NO: 390533 - DNA, 20 bp, Artificial Sequence
  Description of Artificial Sequence: Synthetic oligonucleotide
  Target: LAMA2; (+) strand; PAM type: YTN; PAM sequence: TTT
ccttctatggtgactctttg

SEQ ID NO: 390534 - DNA, 20 bp, Artificial Sequence
  Description of Artificial Sequence: Synthetic oligonucleotide
  Target: LAMA2; (+) strand; PAM type: YTN; PAM sequence: TTC
cttctatggtgactctttgt

SEQ ID NO: 390535 - DNA, 20 bp, Artificial Sequence
  Description of Artificial Sequence: Synthetic oligonucleotide
  Target: LAMA2; (+) strand; PAM type: YTN; PAM sequence: CTT
ctatggtgactctttgtaag

SEQ ID NO: 390536 - DNA, 20 bp, Artificial Sequence
  Description of Artificial Sequence: Synthetic oligonucleotide
  Target: LAMA2; (+) strand; PAM type: YTN; PAM sequence: TTC
tatggtgactctttgtaagc

SEQ ID NO: 390537 - DNA, 20 bp, Artificial Sequence
  Description of Artificial Sequence: Synthetic oligonucleotide
  Target: LAMA2; (+) strand; PAM type: YTN; PAM sequence: CTA
tggtgactctttgtaagcct

SEQ ID NO: 390538 - DNA, 20 bp, Artificial Sequence
  Description of Artificial Sequence: Synthetic oligonucleotide
  Target: LAMA2; (+) strand; PAM type: YTN; PAM sequence: CTC
tttgtaagccttatccaact

SEQ ID NO: 390539 - DNA, 20 bp, Artificial Sequence
  Description of Artificial Sequence: Synthetic oligonucleotide
  Target: LAMA2; (+) strand; PAM type: YTN; PAM sequence: CTT
tgtaagccttatccaactct

SEQ ID NO: 390540 - DNA, 20 bp, Artificial Sequence
  Description of Artificial Sequence: Synthetic oligonucleotide
  Target: LAMA2; (+) strand; PAM type: YTN; PAM sequence: TTT
gtaagccttatccaactcta

SEQ ID NO: 390541 - DNA, 20 bp, Artificial Sequence
  Description of Artificial Sequence: Synthetic oligonucleotide
  Target: LAMA2; (+) strand; PAM type: YTN; PAM sequence: TTG
taagccttatccaactctaa

SEQ ID NO: 390542 - DNA, 20 bp, Artificial Sequence
  Description of Artificial Sequence: Synthetic oligonucleotide
  Target: LAMA2; (+) strand; PAM type: YTN; PAM sequence: CTT
atccaactctaacctgttgt

SEQ ID NO: 390543 - DNA, 20 bp, Artificial Sequence
  Description of Artificial Sequence: Synthetic oligonucleotide
  Target: LAMA2; (+) strand; PAM type: YTN; PAM sequence: TTA
tccaactctaacctgttgtt

SEQ ID NO: 390544 - DNA, 20 bp, Artificial Sequence
  Description of Artificial Sequence: Synthetic oligonucleotide
  Target: LAMA2; (+) strand; PAM type: YTN; PAM sequence: CTC
taacctgttgttatttatat

SEQ ID NO: 390545 - DNA, 20 bp, Artificial Sequence
  Description of Artificial Sequence: Synthetic oligonucleotide
  Target: LAMA2; (+) strand; PAM type: YTN; PAM sequence: CTA
acctgttgttatttatatgg

SEQ ID NO: 390546 - DNA, 20 bp, Artificial Sequence
  Description of Artificial Sequence: Synthetic oligonucleotide
  Target: LAMA2; (+) strand; PAM type: YTN; PAM sequence: CTG
ttgttatttatatggcagag

SEQ ID NO: 390547 - DNA, 20 bp, Artificial Sequence
  Description of Artificial Sequence: Synthetic oligonucleotide
  Target: LAMA2; (+) strand; PAM type: YTN; PAM sequence: TTG
ttatttatatggcagagtga

SEQ ID NO: 390548 - DNA, 20 bp, Artificial Sequence
  Description of Artificial Sequence: Synthetic oligonucleotide
  Target: LAMA2; (+) strand; PAM type: YTN; PAM sequence: TTA
tttatatggcagagtgaaca

SEQ ID NO: 390549 - DNA, 20 bp, Artificial Sequence
  Description of Artificial Sequence: Synthetic oligonucleotide
  Target: LAMA2; (+) strand; PAM type: YTN; PAM sequence: TTT
atatggcagagtgaacattc

SEQ ID NO: 390550 - DNA, 20 bp, Artificial Sequence
  Description of Artificial Sequence: Synthetic oligonucleotide
  Target: LAMA2; (+) strand; PAM type: YTN; PAM sequence: TTA
tatggcagagtgaacattct

SEQ ID NO: 390551 - DNA, 20 bp, Artificial Sequence
  Description of Artificial Sequence: Synthetic oligonucleotide
  Target: LAMA2; (+) strand; PAM type: YTN; PAM sequence: TTC
taaattgcagatcctatcat

SEQ ID NO: 390552 - DNA, 20 bp, Artificial Sequence
  Description of Artificial Sequence: Synthetic oligonucleotide
  Target: LAMA2; (+) strand; PAM type: YTN; PAM sequence: CTA
aattgcagatcctatcatgt

SEQ ID NO: 390553 - DNA, 20 bp, Artificial Sequence
  Description of Artificial Sequence: Synthetic oligonucleotide
  Target: LAMA2; (+) strand; PAM type: YTN; PAM sequence: TTG
cagatcctatcatgtcattc

SEQ ID NO: 390554 - DNA, 20 bp, Artificial Sequence
  Description of Artificial Sequence: Synthetic oligonucleotide
  Target: LAMA2; (+) strand; PAM type: YTN; PAM sequence: CTA
tcatgtcattctcttcctta

SEQ ID NO: 390555 - DNA, 20 bp, Artificial Sequence
  Description of Artificial Sequence: Synthetic oligonucleotide
  Target: LAMA2; (+) strand; PAM type: YTN; PAM sequence: TTC
tcttccttaaattgtactat

SEQ ID NO: 390556 - DNA, 20 bp, Artificial Sequence
  Description of Artificial Sequence: Synthetic oligonucleotide
  Target: LAMA2; (+) strand; PAM type: YTN; PAM sequence: CTC
ttccttaaattgtactatgg

SEQ ID NO: 390557 - DNA, 20 bp, Artificial Sequence
  Description of Artificial Sequence: Synthetic oligonucleotide
  Target: LAMA2; (+) strand; PAM type: YTN; PAM sequence: CTT
ccttaaattgtactatggct

SEQ ID NO: 390558 - DNA, 20 bp, Artificial Sequence
  Description of Artificial Sequence: Synthetic oligonucleotide
  Target: LAMA2; (+) strand; PAM type: YTN; PAM sequence: TTC
cttaaattgtactatggctt

SEQ ID NO: 390559 - DNA, 20 bp, Artificial Sequence
  Description of Artificial Sequence: Synthetic oligonucleotide
  Target: LAMA2; (+) strand; PAM type: YTN; PAM sequence: CTT
aaattgtactatggctttcc

SEQ ID NO: 390560 - DNA, 20 bp, Artificial Sequence
  Description of Artificial Sequence: Synthetic oligonucleotide
  Target: LAMA2; (+) strand; PAM type: YTN; PAM sequence: TTA
aattgtactatggctttcca

SEQ ID NO: 390561 - DNA, 20 bp, Artificial Sequence
  Description of Artificial Sequence: Synthetic oligonucleotide
  Target: LAMA2; (+) strand; PAM type: YTN; PAM sequence: TTG
tactatggctttccactttt

SEQ ID NO: 390562 - DNA, 20 bp, Artificial Sequence
  Description of Artificial Sequence: Synthetic oligonucleotide
  Target: LAMA2; (+) strand; PAM type: YTN; PAM sequence: CTA
tggctttccacttttttcag

SEQ ID NO: 390563 - DNA, 20 bp, Artificial Sequence
  Description of Artificial Sequence: Synthetic oligonucleotide
  Target: LAMA2; (+) strand; PAM type: YTN; PAM sequence: CTT
tccacttttttcaggatgac

SEQ ID NO: 390564 - DNA, 20 bp, Artificial Sequence
  Description of Artificial Sequence: Synthetic oligonucleotide
  Target: LAMA2; (+) strand; PAM type: YTN; PAM sequence: TTT
ccacttttttcaggatgaca

SEQ ID NO: 390565 - DNA, 20 bp, Artificial Sequence
  Description of Artificial Sequence: Synthetic oligonucleotide
  Target: LAMA2; (+) strand; PAM type: YTN; PAM sequence: TTC
cacttttttcaggatgacat

SEQ ID NO: 390566 - DNA, 20 bp, Artificial Sequence
  Description of Artificial Sequence: Synthetic oligonucleotide
  Target: LAMA2; (+) strand; PAM type: YTN; PAM sequence: CTT
ttttcaggatgacatacagt

SEQ ID NO: 390567 - DNA, 20 bp, Artificial Sequence
  Description of Artificial Sequence: Synthetic oligonucleotide
  Target: LAMA2; (+) strand; PAM type: YTN; PAM sequence: TTT
tttcaggatgacatacagtg

SEQ ID NO: 390568 - DNA, 20 bp, Artificial Sequence
  Description of Artificial Sequence: Synthetic oligonucleotide
  Target: LAMA2; (+) strand; PAM type: YTN; PAM sequence: TTT
ttcaggatgacatacagtgc

SEQ ID NO: 390569 - DNA, 20 bp, Artificial Sequence
  Description of Artificial Sequence: Synthetic oligonucleotide
  Target: LAMA2; (+) strand; PAM type: YTN; PAM sequence: TTT
tcaggatgacatacagtgct

SEQ ID NO: 390570 - DNA, 20 bp, Artificial Sequence
  Description of Artificial Sequence: Synthetic oligonucleotide
  Target: LAMA2; (+) strand; PAM type: YTN; PAM sequence: TTT
caggatgacatacagtgctc

SEQ ID NO: 390571 - DNA, 20 bp, Artificial Sequence
  Description of Artificial Sequence: Synthetic oligonucleotide
  Target: LAMA2; (+) strand; PAM type: YTN; PAM sequence: TTC
aggatgacatacagtgctct

SEQ ID NO: 390572 - DNA, 20 bp, Artificial Sequence
  Description of Artificial Sequence: Synthetic oligonucleotide
  Target: LAMA2; (+) strand; PAM type: YTN; PAM sequence: CTC
tcccaccatgatctaatctc

SEQ ID NO: 390573 - DNA, 20 bp, Artificial Sequence
  Description of Artificial Sequence: Synthetic oligonucleotide
  Target: LAMA2; (+) strand; PAM type: YTN; PAM sequence: CTC
ccaccatgatctaatctctg

SEQ ID NO: 390574 - DNA, 20 bp, Artificial Sequence
  Description of Artificial Sequence: Synthetic oligonucleotide
  Target: LAMA2; (+) strand; PAM type: YTN; PAM sequence: CTA
atctctgcttctctctcatc

SEQ ID NO: 390575 - DNA, 20 bp, Artificial Sequence
  Description of Artificial Sequence: Synthetic oligonucleotide
  Target: LAMA2; (+) strand; PAM type: YTN; PAM sequence: CTC
tgcttctctctcatctctcc

SEQ ID NO: 390576 - DNA, 20 bp, Artificial Sequence
  Description of Artificial Sequence: Synthetic oligonucleotide
  Target: LAMA2; (+) strand; PAM type: YTN; PAM sequence: CTG
cttctctctcatctctcccc

SEQ ID NO: 390577 - DNA, 20 bp, Artificial Sequence
  Description of Artificial Sequence: Synthetic oligonucleotide
  Target: LAMA2; (+) strand; PAM type: YTN; PAM sequence: CTT
ctctctcatctctccccact

SEQ ID NO: 390578 - DNA, 20 bp, Artificial Sequence
  Description of Artificial Sequence: Synthetic oligonucleotide
  Target: LAMA2; (+) strand; PAM type: YTN; PAM sequence: TTC
tctctcatctctccccacta

SEQ ID NO: 390579 - DNA, 20 bp, Artificial Sequence
  Description of Artificial Sequence: Synthetic oligonucleotide
  Target: LAMA2; (+) strand; PAM type: YTN; PAM sequence: CTC
tctcatctctccccactact

SEQ ID NO: 390580 - DNA, 20 bp, Artificial Sequence
  Description of Artificial Sequence: Synthetic oligonucleotide
  Target: LAMA2; (+) strand; PAM type: YTN; PAM sequence: CTC
tcatctctccccactactca

SEQ ID NO: 390581 - DNA, 20 bp, Artificial Sequence
  Description of Artificial Sequence: Synthetic oligonucleotide
  Target: LAMA2; (+) strand; PAM type: YTN; PAM sequence: CTC
atctctccccactactcatg

SEQ ID NO: 390582 - DNA, 20 bp, Artificial Sequence
  Description of Artificial Sequence: Synthetic oligonucleotide
  Target: LAMA2; (+) strand; PAM type: YTN; PAM sequence: CTC
tccccactactcatggtctg

SEQ ID NO: 390583 - DNA, 20 bp, Artificial Sequence
  Description of Artificial Sequence: Synthetic oligonucleotide
  Target: LAMA2; (+) strand; PAM type: YTN; PAM sequence: CTC
cccactactcatggtctggt

SEQ ID NO: 390584 - DNA, 20 bp, Artificial Sequence
  Description of Artificial Sequence: Synthetic oligonucleotide
  Target: LAMA2; (+) strand; PAM type: YTN; PAM sequence: CTA
ctcatggtctggtcatctgg

SEQ ID NO: 390585 - DNA, 20 bp, Artificial Sequence
  Description of Artificial Sequence: Synthetic oligonucleotide
  Target: LAMA2; (+) strand; PAM type: YTN; PAM sequence: CTC
atggtctggtcatctggacc

SEQ ID NO: 390586 - DNA, 20 bp, Artificial Sequence
  Description of Artificial Sequence: Synthetic oligonucleotide
  Target: LAMA2; (+) strand; PAM type: YTN; PAM sequence: CTG
gtcatctggacccctacgga

SEQ ID NO: 390587 - DNA, 20 bp, Artificial Sequence
  Description of Artificial Sequence: Synthetic oligonucleotide
  Target: LAMA2; (+) strand; PAM type: YTN; PAM sequence: CTG
gacccctacggattgagggt

SEQ ID NO: 390588 - DNA, 20 bp, Artificial Sequence
  Description of Artificial Sequence: Synthetic oligonucleotide
  Target: LAMA2; (+) strand; PAM type: YTN; PAM sequence: CTA
cggattgagggtataagcca

SEQ ID NO: 390589 - DNA, 20 bp, Artificial Sequence
  Description of Artificial Sequence: Synthetic oligonucleotide
  Target: LAMA2; (+) strand; PAM type: YTN; PAM sequence: TTG
agggtataagccagaaacct

SEQ ID NO: 390590 - DNA, 20 bp, Artificial Sequence
  Description of Artificial Sequence: Synthetic oligonucleotide
  Target: LAMA2; (+) strand; PAM type: YTN; PAM sequence: CTA
caaattttctttggtgcctc

SEQ ID NO: 390591 - DNA, 20 bp, Artificial Sequence
  Description of Artificial Sequence: Synthetic oligonucleotide
  Target: LAMA2; (+) strand; PAM type: YTN; PAM sequence: TTT
tctttggtgcctctttcttc

SEQ ID NO: 390592 - DNA, 20 bp, Artificial Sequence
  Description of Artificial Sequence: Synthetic oligonucleotide
  Target: LAMA2; (+) strand; PAM type: YTN; PAM sequence: TTT
ctttggtgcctctttcttcc

SEQ ID NO: 390593 - DNA, 20 bp, Artificial Sequence
  Description of Artificial Sequence: Synthetic oligonucleotide
  Target: LAMA2; (+) strand; PAM type: YTN; PAM sequence: TTC
tttggtgcctctttcttcct

SEQ ID NO: 390594 - DNA, 20 bp, Artificial Sequence
  Description of Artificial Sequence: Synthetic oligonucleotide
  Target: LAMA2; (+) strand; PAM type: YTN; PAM sequence: CTT
tggtgcctctttcttcctca

SEQ ID NO: 390595 - DNA, 20 bp, Artificial Sequence
  Description of Artificial Sequence: Synthetic oligonucleotide
  Target: LAMA2; (+) strand; PAM type: YTN; PAM sequence: TTT
ggtgcctctttcttcctcat

SEQ ID NO: 390596 - DNA, 20 bp, Artificial Sequence
  Description of Artificial Sequence: Synthetic oligonucleotide
  Target: LAMA2; (+) strand; PAM type: YTN; PAM sequence: TTG
gtgcctctttcttcctcatg

SEQ ID NO: 390597 - DNA, 20 bp, Artificial Sequence
  Description of Artificial Sequence: Synthetic oligonucleotide
  Target: LAMA2; (+) strand; PAM type: YTN; PAM sequence: CTC
tttcttcctcatgatgctcc

SEQ ID NO: 390598 - DNA, 20 bp, Artificial Sequence
  Description of Artificial Sequence: Synthetic oligonucleotide
  Target: LAMA2; (+) strand; PAM type: YTN; PAM sequence: CTT
tcttcctcatgatgctcctg

SEQ ID NO: 390599 - DNA, 20 bp, Artificial Sequence
  Description of Artificial Sequence: Synthetic oligonucleotide
  Target: LAMA2; (+) strand; PAM type: YTN; PAM sequence: TTT
cttcctcatgatgctcctgc

SEQ ID NO: 390600 - DNA, 20 bp, Artificial Sequence
  Description of Artificial Sequence: Synthetic oligonucleotide
  Target: LAMA2; (+) strand; PAM type: YTN; PAM sequence: TTC
ttcctcatgatgctcctgct

SEQ ID NO: 390601 - DNA, 20 bp, Artificial Sequence
  Description of Artificial Sequence: Synthetic oligonucleotide
  Target: LAMA2; (+) strand; PAM type: YTN; PAM sequence: CTT
cctcatgatgctcctgctta

SEQ ID NO: 390602 - DNA, 20 bp, Artificial Sequence
  Description of Artificial Sequence: Synthetic oligonucleotide
  Target: LAMA2; (+) strand; PAM type: YTN; PAM sequence: TTC
ctcatgatgctcctgcttat

SEQ ID NO: 390603 - DNA, 20 bp, Artificial Sequence
  Description of Artificial Sequence: Synthetic oligonucleotide
  Target: LAMA2; (+) strand; PAM type: YTN; PAM sequence: CTC
atgatgctcctgcttatcca

SEQ ID NO: 390604 - DNA, 20 bp, Artificial Sequence
  Description of Artificial Sequence: Synthetic oligonucleotide
  Target: LAMA2; (+) strand; PAM type: YTN; PAM sequence: CTC
ctgcttatccaattcattac

SEQ ID NO: 390605 - DNA, 20 bp, Artificial Sequence
  Description of Artificial Sequence: Synthetic oligonucleotide
  Target: LAMA2; (+) strand; PAM type: YTN; PAM sequence: CTG
cttatccaattcattaccac

SEQ ID NO: 390606 - DNA, 20 bp, Artificial Sequence
  Description of Artificial Sequence: Synthetic oligonucleotide
  Target: LAMA2; (+) strand; PAM type: YTN; PAM sequence: CTT
atccaattcattaccacaca

SEQ ID NO: 390607 - DNA, 20 bp, Artificial Sequence
  Description of Artificial Sequence: Synthetic oligonucleotide
  Target: LAMA2; (+) strand; PAM type: YTN; PAM sequence: TTA
tccaattcattaccacacac

SEQ ID NO: 390608 - DNA, 20 bp, Artificial Sequence
  Description of Artificial Sequence: Synthetic oligonucleotide
  Target: LAMA2; (+) strand; PAM type: YTN; PAM sequence: TTC
attaccacacactgggcttc

SEQ ID NO: 390609 - DNA, 20 bp, Artificial Sequence
  Description of Artificial Sequence: Synthetic oligonucleotide
  Target: LAMA2; (+) strand; PAM type: YTN; PAM sequence: TTA
ccacacactgggcttccact

SEQ ID NO: 390610 - DNA, 20 bp, Artificial Sequence
  Description of Artificial Sequence: Synthetic oligonucleotide
  Target: LAMA2; (+) strand; PAM type: YTN; PAM sequence: CTG
ggcttccacttgtgtgtatg

SEQ ID NO: 390611 - DNA, 20 bp, Artificial Sequence
  Description of Artificial Sequence: Synthetic oligonucleotide
  Target: LAMA2; (+) strand; PAM type: YTN; PAM sequence: CTT
ccacttgtgtgtatggcatt

SEQ ID NO: 390612 - DNA, 20 bp, Artificial Sequence
  Description of Artificial Sequence: Synthetic oligonucleotide
  Target: LAMA2; (+) strand; PAM type: YTN; PAM sequence: TTC
cacttgtgtgtatggcattc

SEQ ID NO: 390613 - DNA, 20 bp, Artificial Sequence
  Description of Artificial Sequence: Synthetic oligonucleotide
  Target: LAMA2; (+) strand; PAM type: YTN; PAM sequence: CTT
gtgtgtatggcattcatctc

SEQ ID NO: 390614 - DNA, 20 bp, Artificial Sequence
  Description of Artificial Sequence: Synthetic oligonucleotide
  Target: LAMA2; (+) strand; PAM type: YTN; PAM sequence: TTG
tgtgtatggcattcatctct

SEQ ID NO: 390615 - DNA, 20 bp, Artificial Sequence
  Description of Artificial Sequence: Synthetic oligonucleotide
  Target: LAMA2; (+) strand; PAM type: YTN; PAM sequence: TTC
atctctactaccccactctc

SEQ ID NO: 390616 - DNA, 20 bp, Artificial Sequence
  Description of Artificial Sequence: Synthetic oligonucleotide
  Target: LAMA2; (+) strand; PAM type: YTN; PAM sequence: CTC
tactaccccactctcatcca

SEQ ID NO: 390617 - DNA, 20 bp, Artificial Sequence
  Description of Artificial Sequence: Synthetic oligonucleotide
  Target: LAMA2; (+) strand; PAM type: YTN; PAM sequence: CTA
ctaccccactctcatccaat

SEQ ID NO: 390618 - DNA, 20 bp, Artificial Sequence
  Description of Artificial Sequence: Synthetic oligonucleotide
  Target: LAMA2; (+) strand; PAM type: YTN; PAM sequence: CTA
ccccactctcatccaatctc

SEQ ID NO: 390619 - DNA, 20 bp, Artificial Sequence
  Description of Artificial Sequence: Synthetic oligonucleotide
  Target: LAMA2; (+) strand; PAM type: YTN; PAM sequence: CTC
tcatccaatctcatattgtg

SEQ ID NO: 390620 - DNA, 20 bp, Artificial Sequence
  Description of Artificial Sequence: Synthetic oligonucleotide
  Target: LAMA2; (+) strand; PAM type: YTN; PAM sequence: CTC
atccaatctcatattgtgta

SEQ ID NO: 390621 - DNA, 20 bp, Artificial Sequence
  Description of Artificial Sequence: Synthetic oligonucleotide
  Target: LAMA2; (+) strand; PAM type: YTN; PAM sequence: CTC
atattgtgtagtttgggatt

SEQ ID NO: 390622 - DNA, 20 bp, Artificial Sequence
  Description of Artificial Sequence: Synthetic oligonucleotide
  Target: LAMA2; (+) strand; PAM type: YTN; PAM sequence: TTG
tgtagtttgggattaccaca

SEQ ID NO: 390623 - DNA, 20 bp, Artificial Sequence
  Description of Artificial Sequence: Synthetic oligonucleotide
  Target: LAMA2; (+) strand; PAM type: YTN; PAM sequence: TTT
gggattaccacatttgtttt

SEQ ID NO: 390624 - DNA, 20 bp, Artificial Sequence
  Description of Artificial Sequence: Synthetic oligonucleotide
  Target: LAMA2; (+) strand; PAM type: YTN; PAM sequence: TTG
ggattaccacatttgttttt

SEQ ID NO: 390625 - DNA, 20 bp, Artificial Sequence
  Description of Artificial Sequence: Synthetic oligonucleotide
  Target: LAMA2; (+) strand; PAM type: YTN; PAM sequence: TTA
ccacatttgttttttagctg

SEQ ID NO: 390626 - DNA, 20 bp, Artificial Sequence
  Description of Artificial Sequence: Synthetic oligonucleotide
  Target: LAMA2; (+) strand; PAM type: YTN; PAM sequence: TTT
gttttttagctggtctctct

SEQ ID NO: 390627 - DNA, 20 bp, Artificial Sequence
  Description of Artificial Sequence: Synthetic oligonucleotide
  Target: LAMA2; (+) strand; PAM type: YTN; PAM sequence: TTG
ttttttagctggtctctctg

SEQ ID NO: 390628 - DNA, 20 bp, Artificial Sequence
  Description of Artificial Sequence: Synthetic oligonucleotide
  Target: LAMA2; (+) strand; PAM type: YTN; PAM sequence: TTT
tttagctggtctctctgctt

SEQ ID NO: 390629 - DNA, 20 bp, Artificial Sequence
  Description of Artificial Sequence: Synthetic oligonucleotide
  Target: LAMA2; (+) strand; PAM type: YTN; PAM sequence: TTT
ttagctggtctctctgcttt

SEQ ID NO: 390630 - DNA, 20 bp, Artificial Sequence
  Description of Artificial Sequence: Synthetic oligonucleotide
  Target: LAMA2; (+) strand; PAM type: YTN; PAM sequence: TTT
tagctggtctctctgctttt

SEQ ID NO: 390631 - DNA, 20 bp, Artificial Sequence
  Description of Artificial Sequence: Synthetic oligonucleotide
  Target: LAMA2; (+) strand; PAM type: YTN; PAM sequence: TTT
agctggtctctctgctttta

SEQ ID NO: 390632 - DNA, 20 bp, Artificial Sequence
  Description of Artificial Sequence: Synthetic oligonucleotide
  Target: LAMA2; (+) strand; PAM type: YTN; PAM sequence: TTA
gctggtctctctgcttttac

SEQ ID NO: 390633 - DNA, 20 bp, Artificial Sequence
  Description of Artificial Sequence: Synthetic oligonucleotide
  Target: LAMA2; (+) strand; PAM type: YTN; PAM sequence: CTG
gtctctctgcttttactctt

SEQ ID NO: 390634 - DNA, 20 bp, Artificial Sequence
  Description of Artificial Sequence: Synthetic oligonucleotide
  Target: LAMA2; (+) strand; PAM type: YTN; PAM sequence: CTC
tctgcttttactcttgttct

SEQ ID NO: 390635 - DNA, 20 bp, Artificial Sequence
  Description of Artificial Sequence: Synthetic oligonucleotide
  Target: LAMA2; (+) strand; PAM type: YTN; PAM sequence: CTC
tgcttttactcttgttctcc

SEQ ID NO: 390636 - DNA, 20 bp, Artificial Sequence
  Description of Artificial Sequence: Synthetic oligonucleotide
  Target: LAMA2; (+) strand; PAM type: YTN; PAM sequence: CTG
cttttactcttgttctcctc

SEQ ID NO: 390637 - DNA, 20 bp, Artificial Sequence
  Description of Artificial Sequence: Synthetic oligonucleotide
  Target: LAMA2; (+) strand; PAM type: YTN; PAM sequence: CTT
ttactcttgttctcctccaa

SEQ ID NO: 390638 - DNA, 20 bp, Artificial Sequence
  Description of Artificial Sequence: Synthetic oligonucleotide
  Target: LAMA2; (+) strand; PAM type: YTN; PAM sequence: TTT
tactcttgttctcctccaaa

SEQ ID NO: 390639 - DNA, 20 bp, Artificial Sequence
  Description of Artificial Sequence: Synthetic oligonucleotide
  Target: LAMA2; (+) strand; PAM type: YTN; PAM sequence: TTT
actcttgttctcctccaaat

SEQ ID NO: 390640 - DNA, 20 bp, Artificial Sequence
  Description of Artificial Sequence: Synthetic oligonucleotide
  Target: LAMA2; (+) strand; PAM type: YTN; PAM sequence: TTA
ctcttgttctcctccaaatc

SEQ ID NO: 390641 - DNA, 20 bp, Artificial Sequence
  Description of Artificial Sequence: Synthetic oligonucleotide
  Target: LAMA2; (+) strand; PAM type: YTN; PAM sequence: CTC
ttgttctcctccaaatctgt

SEQ ID NO: 390642 - DNA, 20 bp, Artificial Sequence
  Description of Artificial Sequence: Synthetic oligonucleotide
  Target: LAMA2; (+) strand; PAM type: YTN; PAM sequence: CTT
gttctcctccaaatctgttc

SEQ ID NO: 390643 - DNA, 20 bp, Artificial Sequence
  Description of Artificial Sequence: Synthetic oligonucleotide
  Target: LAMA2; (+) strand; PAM type: YTN; PAM sequence: TTG
ttctcctccaaatctgttct

SEQ ID NO: 390644 - DNA, 20 bp, Artificial Sequence
  Description of Artificial Sequence: Synthetic oligonucleotide
  Target: LAMA2; (+) strand; PAM type: YTN; PAM sequence: TTC
tcctccaaatctgttctccg

SEQ ID NO: 390645 - DNA, 20 bp, Artificial Sequence
  Description of Artificial Sequence: Synthetic oligonucleotide
  Target: LAMA2; (+) strand; PAM type: YTN; PAM sequence: CTC
ctccaaatctgttctccgta

SEQ ID NO: 390646 - DNA, 20 bp, Artificial Sequence
  Description of Artificial Sequence: Synthetic oligonucleotide
  Target: LAMA2; (+) strand; PAM type: YTN; PAM sequence: CTC
caaatctgttctccgtaacg

SEQ ID NO: 390647 - DNA, 20 bp, Artificial Sequence
  Description of Artificial Sequence: Synthetic oligonucleotide
  Target: LAMA2; (+) strand; PAM type: YTN; PAM sequence: CTG
ttctccgtaacgtagccaga

SEQ ID NO: 390648 - DNA, 20 bp, Artificial Sequence
  Description of Artificial Sequence: Synthetic oligonucleotide
  Target: LAMA2; (+) strand; PAM type: YTN; PAM sequence: TTC
tccgtaacgtagccagaatg

SEQ ID NO: 390649 - DNA, 20 bp, Artificial Sequence
  Description of Artificial Sequence: Synthetic oligonucleotide
  Target: LAMA2; (+) strand; PAM type: YTN; PAM sequence: CTC
cgtaacgtagccagaatgaa

SEQ ID NO: 390650 - DNA, 20 bp, Artificial Sequence
  Description of Artificial Sequence: Synthetic oligonucleotide
  Target: LAMA2; (+) strand; PAM type: YTN; PAM sequence: TTT
gctattccaaatgtgaatac

SEQ ID NO: 390651 - DNA, 20 bp, Artificial Sequence
  Description of Artificial Sequence: Synthetic oligonucleotide
  Target: LAMA2; (+) strand; PAM type: YTN; PAM sequence: TTG
ctattccaaatgtgaatacg

SEQ ID NO: 390652 - DNA, 20 bp, Artificial Sequence
  Description of Artificial Sequence: Synthetic oligonucleotide
  Target: LAMA2; (+) strand; PAM type: YTN; PAM sequence: CTA
ttccaaatgtgaatacgtca

SEQ ID NO: 390653 - DNA, 20 bp, Artificial Sequence
  Description of Artificial Sequence: Synthetic oligonucleotide
  Target: LAMA2; (+) strand; PAM type: YTN; PAM sequence: TTC
caaatgtgaatacgtcatcg

SEQ ID NO: 390654 - DNA, 20 bp, Artificial Sequence
  Description of Artificial Sequence: Synthetic oligonucleotide
  Target: LAMA2; (+) strand; PAM type: YTN; PAM sequence: CTT
acaaactcttcccctgactt

SEQ ID NO: 390655 - DNA, 20 bp, Artificial Sequence
  Description of Artificial Sequence: Synthetic oligonucleotide
  Target: LAMA2; (+) strand; PAM type: YTN; PAM sequence: TTA
caaactcttcccctgacttc

SEQ ID NO: 390656 - DNA, 20 bp, Artificial Sequence
  Description of Artificial Sequence: Synthetic oligonucleotide
  Target: LAMA2; (+) strand; PAM type: YTN; PAM sequence: CTC
ttcccctgacttcccttagg

SEQ ID NO: 390657 - DNA, 20 bp, Artificial Sequence
  Description of Artificial Sequence: Synthetic oligonucleotide
  Target: LAMA2; (+) strand; PAM type: YTN; PAM sequence: CTT
cccctgacttcccttaggct

SEQ ID NO: 390658 - DNA, 20 bp, Artificial Sequence
  Description of Artificial Sequence: Synthetic oligonucleotide
  Target: LAMA2; (+) strand; PAM type: YTN; PAM sequence: TTC
ccctgacttcccttaggctc

SEQ ID NO: 390659 - DNA, 20 bp, Artificial Sequence
  Description of Artificial Sequence: Synthetic oligonucleotide
  Target: LAMA2; (+) strand; PAM type: YTN; PAM sequence: CTG
acttcccttaggctcgtagg

SEQ ID NO: 390660 - DNA, 20 bp, Artificial Sequence
  Description of Artificial Sequence: Synthetic oligonucleotide
  Target: LAMA2; (+) strand; PAM type: YTN; PAM sequence: CTT
cccttaggctcgtaggataa

SEQ ID NO: 390661 - DNA, 20 bp, Artificial Sequence
  Description of Artificial Sequence: Synthetic oligonucleotide
  Target: LAMA2; (+) strand; PAM type: YTN; PAM sequence: TTC
ccttaggctcgtaggataaa

SEQ ID NO: 390662 - DNA, 20 bp, Artificial Sequence
  Description of Artificial Sequence: Synthetic oligonucleotide
  Target: LAMA2; (+) strand; PAM type: YTN; PAM sequence: CTT
aggctcgtaggataaagacc

SEQ ID NO: 390663 - DNA, 20 bp, Artificial Sequence
  Description of Artificial Sequence: Synthetic oligonucleotide
  Target: LAMA2; (+) strand; PAM type: YTN; PAM sequence: TTA
ggctcgtaggataaagacca

SEQ ID NO: 390664 - DNA, 20 bp, Artificial Sequence
  Description of Artificial Sequence: Synthetic oligonucleotide
  Target: LAMA2; (+) strand; PAM type: YTN; PAM sequence: CTC
gtaggataaagaccaaaatt

SEQ ID NO: 390665 - DNA, 20 bp, Artificial Sequence
  Description of Artificial Sequence: Synthetic oligonucleotide
  Target: LAMA2; (+) strand; PAM type: YTN; PAM sequence: TTC
tccccttggccacatctccc

SEQ ID NO: 390666 - DNA, 20 bp, Artificial Sequence
  Description of Artificial Sequence: Synthetic oligonucleotide
  Target: LAMA2; (+) strand; PAM type: YTN; PAM sequence: CTC
cccttggccacatctcccat

SEQ ID NO: 390667 - DNA, 20 bp, Artificial Sequence
  Description of Artificial Sequence: Synthetic oligonucleotide
  Target: LAMA2; (+) strand; PAM type: YTN; PAM sequence: CTT
ggccacatctcccatcactt

SEQ ID NO: 390668 - DNA, 20 bp, Artificial Sequence
  Description of Artificial Sequence: Synthetic oligonucleotide
  Target: LAMA2; (+) strand; PAM type: YTN; PAM sequence: TTG
gccacatctcccatcacttg

SEQ ID NO: 390669 - DNA, 20 bp, Artificial Sequence
  Description of Artificial Sequence: Synthetic oligonucleotide
  Target: LAMA2; (+) strand; PAM type: YTN; PAM sequence: CTC
ccatcacttgtgcccctggc

SEQ ID NO: 390670 - DNA, 20 bp, Artificial Sequence
  Description of Artificial Sequence: Synthetic oligonucleotide
  Target: LAMA2; (+) strand; PAM type: YTN; PAM sequence: CTT
gtgcccctggccatctgcac

SEQ ID NO: 390671 - DNA, 20 bp, Artificial Sequence
  Description of Artificial Sequence: Synthetic oligonucleotide
  Target: LAMA2; (+) strand; PAM type: YTN; PAM sequence: TTG
tgcccctggccatctgcact

SEQ ID NO: 390672 - DNA, 20 bp, Artificial Sequence
  Description of Artificial Sequence: Synthetic oligonucleotide
  Target: LAMA2; (+) strand; PAM type: YTN; PAM sequence: CTG
gccatctgcactccagccat

SEQ ID NO: 390673 - DNA, 20 bp, Artificial Sequence
  Description of Artificial Sequence: Synthetic oligonucleotide
  Target: LAMA2; (+) strand; PAM type: YTN; PAM sequence: CTG
cactccagccatactgtccc

SEQ ID NO: 390674 - DNA, 20 bp, Artificial Sequence
  Description of Artificial Sequence: Synthetic oligonucleotide
  Target: LAMA2; (+) strand; PAM type: YTN; PAM sequence: CTC
cagccatactgtcccccagc

SEQ ID NO: 390675 - DNA, 20 bp, Artificial Sequence
  Description of Artificial Sequence: Synthetic oligonucleotide
  Target: LAMA2; (+) strand; PAM type: YTN; PAM sequence: CTG
tcccccagccactttgtccc

SEQ ID NO: 390676 - DNA, 20 bp, Artificial Sequence
  Description of Artificial Sequence: Synthetic oligonucleotide
  Target: LAMA2; (+) strand; PAM type: YTN; PAM sequence: CTT
tgtcccaccacaaagcattg

SEQ ID NO: 390677 - DNA, 20 bp, Artificial Sequence
  Description of Artificial Sequence: Synthetic oligonucleotide
  Target: LAMA2; (+) strand; PAM type: YTN; PAM sequence: TTT
gtcccaccacaaagcattgc

SEQ ID NO: 390678 - DNA, 20 bp, Artificial Sequence
  Description of Artificial Sequence: Synthetic oligonucleotide
  Target: LAMA2; (+) strand; PAM type: YTN; PAM sequence: TTG
tcccaccacaaagcattgcc

SEQ ID NO: 390679 - DNA, 20 bp, Artificial Sequence
  Description of Artificial Sequence: Synthetic oligonucleotide
  Target: LAMA2; (+) strand; PAM type: YTN; PAM sequence: TTG
ccacacatttctttattttg

SEQ ID NO: 390680 - DNA, 20 bp, Artificial Sequence
  Description of Artificial Sequence: Synthetic oligonucleotide
  Target: LAMA2; (+) strand; PAM type: YTN; PAM sequence: TTT
ctttattttgccttaaaggt

SEQ ID NO: 390681 - DNA, 20 bp, Artificial Sequence
  Description of Artificial Sequence: Synthetic oligonucleotide
  Target: LAMA2; (+) strand; PAM type: YTN; PAM sequence: TTC
tttattttgccttaaaggta

SEQ ID NO: 390682 - DNA, 20 bp, Artificial Sequence
  Description of Artificial Sequence: Synthetic oligonucleotide
  Target: LAMA2; (+) strand; PAM type: YTN; PAM sequence: CTT
tattttgccttaaaggtaat

SEQ ID NO: 390683 - DNA, 20 bp, Artificial Sequence
  Description of Artificial Sequence: Synthetic oligonucleotide
  Target: LAMA2; (+) strand; PAM type: YTN; PAM sequence: TTT
attttgccttaaaggtaatc

SEQ ID NO: 390684 - DNA, 20 bp, Artificial Sequence
  Description of Artificial Sequence: Synthetic oligonucleotide
  Target: LAMA2; (+) strand; PAM type: YTN; PAM sequence: TTA
ttttgccttaaaggtaatct

SEQ ID NO: 390685 - DNA, 20 bp, Artificial Sequence
  Description of Artificial Sequence: Synthetic oligonucleotide
  Target: LAMA2; (+) strand; PAM type: YTN; PAM sequence: TTT
tgccttaaaggtaatctacc

SEQ ID NO: 390686 - DNA, 20 bp, Artificial Sequence
  Description of Artificial Sequence: Synthetic oligonucleotide
  Target: LAMA2; (+) strand; PAM type: YTN; PAM sequence: TTT
gccttaaaggtaatctacct

SEQ ID NO: 390687 - DNA, 20 bp, Artificial Sequence
  Description of Artificial Sequence: Synthetic oligonucleotide
  Target: LAMA2; (+) strand; PAM type: YTN; PAM sequence: TTG
ccttaaaggtaatctacctc

SEQ ID NO: 390688 - DNA, 20 bp, Artificial Sequence
  Description of Artificial Sequence: Synthetic oligonucleotide
  Target: LAMA2; (+) strand; PAM type: YTN; PAM sequence: CTT
aaaggtaatctacctctccc

SEQ ID NO: 390689 - DNA, 20 bp, Artificial Sequence
  Description of Artificial Sequence: Synthetic oligonucleotide
  Target: LAMA2; (+) strand; PAM type: YTN; PAM sequence: TTA
aaggtaatctacctctccct

SEQ ID NO: 390690 - DNA, 20 bp, Artificial Sequence
  Description of Artificial Sequence: Synthetic oligonucleotide
  Target: LAMA2; (+) strand; PAM type: YTN; PAM sequence: CTA
cctctccctacattttgtta

SEQ ID NO: 390691 - DNA, 20 bp, Artificial Sequence
  Description of Artificial Sequence: Synthetic oligonucleotide
  Target: LAMA2; (+) strand; PAM type: YTN; PAM sequence: CTC
tccctacattttgttaattt

SEQ ID NO: 390692 - DNA, 20 bp, Artificial Sequence
  Description of Artificial Sequence: Synthetic oligonucleotide
  Target: LAMA2; (+) strand; PAM type: YTN; PAM sequence: CTC
cctacattttgttaatttct

SEQ ID NO: 390693 - DNA, 20 bp, Artificial Sequence
  Description of Artificial Sequence: Synthetic oligonucleotide
  Target: LAMA2; (+) strand; PAM type: YTN; PAM sequence: CTA
cattttgttaatttctgtta

SEQ ID NO: 390694 - DNA, 20 bp, Artificial Sequence
  Description of Artificial Sequence: Synthetic oligonucleotide
  Target: LAMA2; (+) strand; PAM type: YTN; PAM sequence: TTT
tgttaatttctgttaactcc

SEQ ID NO: 390695 - DNA, 20 bp, Artificial Sequence
  Description of Artificial Sequence: Synthetic oligonucleotide
  Target: LAMA2; (+) strand; PAM type: YTN; PAM sequence: TTT
gttaatttctgttaactcca

SEQ ID NO: 390696 - DNA, 20 bp, Artificial Sequence
  Description of Artificial Sequence: Synthetic oligonucleotide
  Target: LAMA2; (+) strand; PAM type: YTN; PAM sequence: TTG
ttaatttctgttaactccaa

SEQ ID NO: 390697 - DNA, 20 bp, Artificial Sequence
  Description of Artificial Sequence: Synthetic oligonucleotide
  Target: LAMA2; (+) strand; PAM type: YTN; PAM sequence: TTA
atttctgttaactccaattt

SEQ ID NO: 390698 - DNA, 20 bp, Artificial Sequence
  Description of Artificial Sequence: Synthetic oligonucleotide
  Target: LAMA2; (+) strand; PAM type: YTN; PAM sequence: TTT
ctgttaactccaatttacct

SEQ ID NO: 390699 - DNA, 20 bp, Artificial Sequence
  Description of Artificial Sequence: Synthetic oligonucleotide
  Target: LAMA2; (+) strand; PAM type: YTN; PAM sequence: TTC
tgttaactccaatttacctt

SEQ ID NO: 390700 - DNA, 20 bp, Artificial Sequence
  Description of Artificial Sequence: Synthetic oligonucleotide
  Target: LAMA2; (+) strand; PAM type: YTN; PAM sequence: CTG
ttaactccaatttacctttc

SEQ ID NO: 390701 - DNA, 20 bp, Artificial Sequence
  Description of Artificial Sequence: Synthetic oligonucleotide
  Target: LAMA2; (+) strand; PAM type: YTN; PAM sequence: TTA
actccaatttacctttcaaa

SEQ ID NO: 390702 - DNA, 20 bp, Artificial Sequence
  Description of Artificial Sequence: Synthetic oligonucleotide
  Target: LAMA2; (+) strand; PAM type: YTN; PAM sequence: CTC
caatttacctttcaaatctc

SEQ ID NO: 390703 - DNA, 20 bp, Artificial Sequence
  Description of Artificial Sequence: Synthetic oligonucleotide
  Target: LAMA2; (+) strand; PAM type: YTN; PAM sequence: TTT
acctttcaaatctcagctcg

SEQ ID NO: 390704 - DNA, 20 bp, Artificial Sequence
  Description of Artificial Sequence: Synthetic oligonucleotide
  Target: LAMA2; (+) strand; PAM type: YTN; PAM sequence: TTA
cctttcaaatctcagctcgt

SEQ ID NO: 390705 - DNA, 20 bp, Artificial Sequence
  Description of Artificial Sequence: Synthetic oligonucleotide
  Target: LAMA2; (+) strand; PAM type: YTN; PAM sequence: CTT
tcaaatctcagctcgtgaaa

SEQ ID NO: 390706 - DNA, 20 bp, Artificial Sequence
  Description of Artificial Sequence: Synthetic oligonucleotide
  Target: LAMA2; (+) strand; PAM type: YTN; PAM sequence: TTT
caaatctcagctcgtgaaag

SEQ ID NO: 390707 - DNA, 20 bp, Artificial Sequence
  Description of Artificial Sequence: Synthetic oligonucleotide
  Target: LAMA2; (+) strand; PAM type: YTN; PAM sequence: TTC
aaatctcagctcgtgaaagc

SEQ ID NO: 390708 - DNA, 20 bp, Artificial Sequence
  Description of Artificial Sequence: Synthetic oligonucleotide
  Target: LAMA2; (+) strand; PAM type: YTN; PAM sequence: CTC
agctcgtgaaagccctctgt

SEQ ID NO: 390709 - DNA, 20 bp, Artificial Sequence
  Description of Artificial Sequence: Synthetic oligonucleotide
  Target: LAMA2; (+) strand; PAM type: YTN; PAM sequence: CTC
gtgaaagccctctgtgccat

SEQ ID NO: 390710 - DNA, 20 bp, Artificial Sequence
  Description of Artificial Sequence: Synthetic oligonucleotide
  Target: LAMA2; (+) strand; PAM type: YTN; PAM sequence: CTC
tgtgccatcgcaggggttcc

SEQ ID NO: 390711 - DNA, 20 bp, Artificial Sequence
  Description of Artificial Sequence: Synthetic oligonucleotide
  Target: LAMA2; (+) strand; PAM type: YTN; PAM sequence: CTG
tgccatcgcaggggttccaa

SEQ ID NO: 390712 - DNA, 20 bp, Artificial Sequence
  Description of Artificial Sequence: Synthetic oligonucleotide
  Target: LAMA2; (+) strand; PAM type: YTN; PAM sequence: TTC
caagattcctcctgtgctta

SEQ ID NO: 390713 - DNA, 20 bp, Artificial Sequence
  Description of Artificial Sequence: Synthetic oligonucleotide
  Target: LAMA2; (+) strand; PAM type: YTN; PAM sequence: TTC
ctcctgtgcttatcttatac

SEQ ID NO: 390714 - DNA, 20 bp, Artificial Sequence
  Description of Artificial Sequence: Synthetic oligonucleotide
  Target: LAMA2; (+) strand; PAM type: YTN; PAM sequence: CTC
ctgtgcttatcttataccac

SEQ ID NO: 390715 - DNA, 20 bp, Artificial Sequence
  Description of Artificial Sequence: Synthetic oligonucleotide
  Target: LAMA2; (+) strand; PAM type: YTN; PAM sequence: CTG
tgcttatcttataccactat

SEQ ID NO: 390716 - DNA, 20 bp, Artificial Sequence
  Description of Artificial Sequence: Synthetic oligonucleotide
  Target: LAMA2; (+) strand; PAM type: YTN; PAM sequence: CTT
atcttataccactatttttc

SEQ ID NO: 390717 - DNA, 20 bp, Artificial Sequence
  Description of Artificial Sequence: Synthetic oligonucleotide
  Target: LAMA2; (+) strand; PAM type: YTN; PAM sequence: TTA
tcttataccactatttttcc

SEQ ID NO: 390718 - DNA, 20 bp, Artificial Sequence
  Description of Artificial Sequence: Synthetic oligonucleotide
  Target: LAMA2; (+) strand; PAM type: YTN; PAM sequence: CTT
ataccactatttttcctcta

SEQ ID NO: 390719 - DNA, 20 bp, Artificial Sequence
  Description of Artificial Sequence: Synthetic oligonucleotide
  Target: LAMA2; (+) strand; PAM type: YTN; PAM sequence: TTA
taccactatttttcctctag

SEQ ID NO: 390720 - DNA, 20 bp, Artificial Sequence
  Description of Artificial Sequence: Synthetic oligonucleotide
  Target: LAMA2; (+) strand; PAM type: YTN; PAM sequence: CTA
tttttcctctagtttgtagt

SEQ ID NO: 390721 - DNA, 20 bp, Artificial Sequence
  Description of Artificial Sequence: Synthetic oligonucleotide
  Target: LAMA2; (+) strand; PAM type: YTN; PAM sequence: TTT
ttcctctagtttgtagttat

SEQ ID NO: 390722 - DNA, 20 bp, Artificial Sequence
  Description of Artificial Sequence: Synthetic oligonucleotide
  Target: LAMA2; (+) strand; PAM type: YTN; PAM sequence: TTT
tcctctagtttgtagttata

SEQ ID NO: 390723 - DNA, 20 bp, Artificial Sequence
  Description of Artificial Sequence: Synthetic oligonucleotide
  Target: LAMA2; (+) strand; PAM type: YTN; PAM sequence: TTT
cctctagtttgtagttataa

SEQ ID NO: 390724 - DNA, 20 bp, Artificial Sequence
  Description of Artificial Sequence: Synthetic oligonucleotide
  Target: LAMA2; (+) strand; PAM type: YTN; PAM sequence: TTC
ctctagtttgtagttataaa

SEQ ID NO: 390725 - DNA, 20 bp, Artificial Sequence
  Description of Artificial Sequence: Synthetic oligonucleotide
  Target: LAMA2; (+) strand; PAM type: YTN; PAM sequence: CTC
tagtttgtagttataaattt

SEQ ID NO: 390726 - DNA, 20 bp, Artificial Sequence
  Description of Artificial Sequence: Synthetic oligonucleotide
  Target: LAMA2; (+) strand; PAM type: YTN; PAM sequence: CTA
gtttgtagttataaatttat

SEQ ID NO: 390727 - DNA, 20 bp, Artificial Sequence
  Description of Artificial Sequence: Synthetic oligonucleotide
  Target: LAMA2; (+) strand; PAM type: YTN; PAM sequence: TTT
gtagttataaatttatctac

SEQ ID NO: 390728 - DNA, 20 bp, Artificial Sequence
  Description of Artificial Sequence: Synthetic oligonucleotide
  Target: LAMA2; (+) strand; PAM type: YTN; PAM sequence: TTG
tagttataaatttatctaca

SEQ ID NO: 390729 - DNA, 20 bp, Artificial Sequence
  Description of Artificial Sequence: Synthetic oligonucleotide
  Target: LAMA2; (+) strand; PAM type: YTN; PAM sequence: TTA
taaatttatctacatgatca

SEQ ID NO: 390730 - DNA, 20 bp, Artificial Sequence
  Description of Artificial Sequence: Synthetic oligonucleotide
  Target: LAMA2; (+) strand; PAM type: YTN; PAM sequence: TTT
atctacatgatcatttgaca

SEQ ID NO: 390731 - DNA, 20 bp, Artificial Sequence
  Description of Artificial Sequence: Synthetic oligonucleotide
  Target: LAMA2; (+) strand; PAM type: YTN; PAM sequence: TTA
tctacatgatcatttgacaa

SEQ ID NO: 390732 - DNA, 20 bp, Artificial Sequence
  Description of Artificial Sequence: Synthetic oligonucleotide
  Target: LAMA2; (+) strand; PAM type: YTN; PAM sequence: CTA
catgatcatttgacaaataa

SEQ ID NO: 390733 - DNA, 20 bp, Artificial Sequence
  Description of Artificial Sequence: Synthetic oligonucleotide
  Target: LAMA2; (+) strand; PAM type: YTN; PAM sequence: TTT
gacaaataactatatagtcc

SEQ ID NO: 390734 - DNA, 20 bp, Artificial Sequence
  Description of Artificial Sequence: Synthetic oligonucleotide
  Target: LAMA2; (+) strand; PAM type: YTN; PAM sequence: TTG
acaaataactatatagtcca

SEQ ID NO: 390735 - DNA, 20 bp, Artificial Sequence
  Description of Artificial Sequence: Synthetic oligonucleotide
  Target: LAMA2; (+) strand; PAM type: YTN; PAM sequence: CTA
tatagtccaccagactatag

SEQ ID NO: 390736 - DNA, 20 bp, Artificial Sequence
  Description of Artificial Sequence: Synthetic oligonucleotide
  Target: LAMA2; (+) strand; PAM type: YTN; PAM sequence: CTA
tagactccaaatgggcaaga

SEQ ID NO: 390737 - DNA, 20 bp, Artificial Sequence
  Description of Artificial Sequence: Synthetic oligonucleotide
  Target: LAMA2; (+) strand; PAM type: YTN; PAM sequence: CTC
caaatgggcaagaaaccttt

SEQ ID NO: 390738 - DNA, 20 bp, Artificial Sequence
  Description of Artificial Sequence: Synthetic oligonucleotide
  Target: LAMA2; (+) strand; PAM type: YTN; PAM sequence: CTT
tttgtttcttaccacagtat

SEQ ID NO: 390739 - DNA, 20 bp, Artificial Sequence
  Description of Artificial Sequence: Synthetic oligonucleotide
  Target: LAMA2; (+) strand; PAM type: YTN; PAM sequence: TTT
ttgtttcttaccacagtatc

SEQ ID NO: 390740 - DNA, 20 bp, Artificial Sequence
  Description of Artificial Sequence: Synthetic oligonucleotide
  Target: LAMA2; (+) strand; PAM type: YTN; PAM sequence: TTT
tgtttcttaccacagtatca

SEQ ID NO: 390741 - DNA, 20 bp, Artificial Sequence
  Description of Artificial Sequence: Synthetic oligonucleotide
  Target: LAMA2; (+) strand; PAM type: YTN; PAM sequence: TTT
gtttcttaccacagtatcac

SEQ ID NO: 390742 - DNA, 20 bp, Artificial Sequence
  Description of Artificial Sequence: Synthetic oligonucleotide
  Target: LAMA2; (+) strand; PAM type: YTN; PAM sequence: TTG
tttcttaccacagtatcacc

SEQ ID NO: 390743 - DNA, 20 bp, Artificial Sequence
  Description of Artificial Sequence: Synthetic oligonucleotide
  Target: LAMA2; (+) strand; PAM type: YTN; PAM sequence: TTT
cttaccacagtatcaccaat

SEQ ID NO: 390744 - DNA, 20 bp, Artificial Sequence
  Description of Artificial Sequence: Synthetic oligonucleotide
  Target: LAMA2; (+) strand; PAM type: YTN; PAM sequence: TTC
ttaccacagtatcaccaata

SEQ ID NO: 390745 - DNA, 20 bp, Artificial Sequence
  Description of Artificial Sequence: Synthetic oligonucleotide
  Target: LAMA2; (+) strand; PAM type: YTN; PAM sequence: CTT
accacagtatcaccaatatt

SEQ ID NO: 390746 - DNA, 20 bp, Artificial Sequence
  Description of Artificial Sequence: Synthetic oligonucleotide
  Target: LAMA2; (+) strand; PAM type: YTN; PAM sequence: TTA
ccacagtatcaccaatattg

SEQ ID NO: 390747 - DNA, 20 bp, Artificial Sequence
  Description of Artificial Sequence: Synthetic oligonucleotide
  Target: LAMA2; (+) strand; PAM type: YTN; PAM sequence: TTG
tacacataataggtgttaag

SEQ ID NO: 390748 - DNA, 20 bp, Artificial Sequence
  Description of Artificial Sequence: Synthetic oligonucleotide
  Target: LAMA2; (+) strand; PAM type: YTN; PAM sequence: TTA
agtcaatatttgtttaatta

SEQ ID NO: 390749 - DNA, 20 bp, Artificial Sequence
  Description of Artificial Sequence: Synthetic oligonucleotide
  Target: LAMA2; (+) strand; PAM type: YTN; PAM sequence: TTT
gtttaattaattgtgaatga

SEQ ID NO: 390750 - DNA, 20 bp, Artificial Sequence
  Description of Artificial Sequence: Synthetic oligonucleotide
  Target: LAMA2; (+) strand; PAM type: YTN; PAM sequence: TTG
tttaattaattgtgaatgat

SEQ ID NO: 390751 - DNA, 20 bp, Artificial Sequence
  Description of Artificial Sequence: Synthetic oligonucleotide
  Target: LAMA2; (+) strand; PAM type: YTN; PAM sequence: TTT
aattaattgtgaatgatttt

SEQ ID NO: 390752 - DNA, 20 bp, Artificial Sequence
  Description of Artificial Sequence: Synthetic oligonucleotide
  Target: LAMA2; (+) strand; PAM type: YTN; PAM sequence: TTA
attaattgtgaatgatttta

SEQ ID NO: 390753 - DNA, 20 bp, Artificial Sequence
  Description of Artificial Sequence: Synthetic oligonucleotide
  Target: LAMA2; (+) strand; PAM type: YTN; PAM sequence: TTA
attgtgaatgattttaaaag

SEQ ID NO: 390754 - DNA, 20 bp, Artificial Sequence
  Description of Artificial Sequence: Synthetic oligonucleotide
  Target: LAMA2; (+) strand; PAM type: YTN; PAM sequence: TTG
tgaatgattttaaaagcatt

SEQ ID NO: 390755 - DNA, 20 bp, Artificial Sequence
  Description of Artificial Sequence: Synthetic oligonucleotide
  Target: LAMA2; (+) strand; PAM type: YTN; PAM sequence: TTT
taaaagcatttgaacaacaa

SEQ ID NO: 390756 - DNA, 20 bp, Artificial Sequence
  Description of Artificial Sequence: Synthetic oligonucleotide
  Target: LAMA2; (+) strand; PAM type: YTN; PAM sequence: TTT
aaaagcatttgaacaacaag

SEQ ID NO: 390757 - DNA, 20 bp, Artificial Sequence
  Description of Artificial Sequence: Synthetic oligonucleotide
  Target: LAMA2; (+) strand; PAM type: YTN; PAM sequence: TTA
aaagcatttgaacaacaaga

SEQ ID NO: 390758 - DNA, 20 bp, Artificial Sequence
  Description of Artificial Sequence: Synthetic oligonucleotide
  Target: LAMA2; (+) strand; PAM type: YTN; PAM sequence: TTT
gaacaacaagatggaaatgt

SEQ ID NO: 390759 - DNA, 20 bp, Artificial Sequence
  Description of Artificial Sequence: Synthetic oligonucleotide
  Target: LAMA2; (+) strand; PAM type: YTN; PAM sequence: TTG
aacaacaagatggaaatgta

SEQ ID NO: 390760 - DNA, 20 bp, Artificial Sequence
  Description of Artificial Sequence: Synthetic oligonucleotide
  Target: LAMA2; (+) strand; PAM type: YTN; PAM sequence: TTT
attttgcactctttaaaatg

SEQ ID NO: 390761 - DNA, 20 bp, Artificial Sequence
  Description of Artificial Sequence: Synthetic oligonucleotide
  Target: LAMA2; (+) strand; PAM type: YTN; PAM sequence: TTA
ttttgcactctttaaaatgt

SEQ ID NO: 390762 - DNA, 20 bp, Artificial Sequence
  Description of Artificial Sequence: Synthetic oligonucleotide
  Target: LAMA2; (+) strand; PAM type: YTN; PAM sequence: TTT
tgcactctttaaaatgtgtt

SEQ ID NO: 390763 - DNA, 20 bp, Artificial Sequence
  Description of Artificial Sequence: Synthetic oligonucleotide
  Target: LAMA2; (+) strand; PAM type: YTN; PAM sequence: TTT
gcactctttaaaatgtgtta

SEQ ID NO: 390764 - DNA, 20 bp, Artificial Sequence
  Description of Artificial Sequence: Synthetic oligonucleotide
  Target: LAMA2; (+) strand; PAM type: YTN; PAM sequence: TTG
cactctttaaaatgtgttaa

SEQ ID NO: 390765 - DNA, 20 bp, Artificial Sequence
  Description of Artificial Sequence: Synthetic oligonucleotide
  Target: LAMA2; (+) strand; PAM type: YTN; PAM sequence: CTC
tttaaaatgtgttaaaatca

SEQ ID NO: 390766 - DNA, 20 bp, Artificial Sequence
  Description of Artificial Sequence: Synthetic oligonucleotide
  Target: LAMA2; (+) strand; PAM type: YTN; PAM sequence: CTT
taaaatgtgttaaaatcagg

SEQ ID NO: 390767 - DNA, 20 bp, Artificial Sequence
  Description of Artificial Sequence: Synthetic oligonucleotide
  Target: LAMA2; (+) strand; PAM type: YTN; PAM sequence: TTT
aaaatgtgttaaaatcaggc

SEQ ID NO: 390768 - DNA, 20 bp, Artificial Sequence
  Description of Artificial Sequence: Synthetic oligonucleotide
  Target: LAMA2; (+) strand; PAM type: YTN; PAM sequence: TTA
aaatgtgttaaaatcaggca

SEQ ID NO: 390769 - DNA, 20 bp, Artificial Sequence
  Description of Artificial Sequence: Synthetic oligonucleotide
  Target: LAMA2; (+) strand; PAM type: YTN; PAM sequence: TTA
aaatcaggcatatatttata

SEQ ID NO: 390770 - DNA, 20 bp, Artificial Sequence
  Description of Artificial Sequence: Synthetic oligonucleotide
  Target: LAMA2; (+) strand; PAM type: YTN; PAM sequence: TTT
ataattatattgttgaatat

SEQ ID NO: 390771 - DNA, 20 bp, Artificial Sequence
  Description of Artificial Sequence: Synthetic oligonucleotide
  Target: LAMA2; (+) strand; PAM type: YTN; PAM sequence: TTA
taattatattgttgaatatt

SEQ ID NO: 390772 - DNA, 20 bp, Artificial Sequence
  Description of Artificial Sequence: Synthetic oligonucleotide
  Target: LAMA2; (+) strand; PAM type: YTN; PAM sequence: TTA
tattgttgaatattttgttt

SEQ ID NO: 390773 - DNA, 20 bp, Artificial Sequence
  Description of Artificial Sequence: Synthetic oligonucleotide
  Target: LAMA2; (+) strand; PAM type: YTN; PAM sequence: TTG
ttgaatattttgttttcatt

SEQ ID NO: 390774 - DNA, 20 bp, Artificial Sequence
  Description of Artificial Sequence: Synthetic oligonucleotide
  Target: LAMA2; (+) strand; PAM type: YTN; PAM sequence: TTG
aatattttgttttcattgat

SEQ ID NO: 390775 - DNA, 20 bp, Artificial Sequence
  Description of Artificial Sequence: Synthetic oligonucleotide
  Target: LAMA2; (+) strand; PAM type: YTN; PAM sequence: TTT
tgttttcattgataaacacc

SEQ ID NO: 390776 - DNA, 20 bp, Artificial Sequence
  Description of Artificial Sequence: Synthetic oligonucleotide
  Target: LAMA2; (+) strand; PAM type: YTN; PAM sequence: TTT
gttttcattgataaacacct

SEQ ID NO: 390777 - DNA, 20 bp, Artificial Sequence
  Description of Artificial Sequence: Synthetic oligonucleotide
  Target: LAMA2; (+) strand; PAM type: YTN; PAM sequence: TTG
ttttcattgataaacacctc

SEQ ID NO: 390778 - DNA, 20 bp, Artificial Sequence
  Description of Artificial Sequence: Synthetic oligonucleotide
  Target: LAMA2; (+) strand; PAM type: YTN; PAM sequence: TTT
tcattgataaacacctctta

SEQ ID NO: 390779 - DNA, 20 bp, Artificial Sequence
  Description of Artificial Sequence: Synthetic oligonucleotide
  Target: LAMA2; (+) strand; PAM type: YTN; PAM sequence: TTT
cattgataaacacctcttaa

SEQ ID NO: 390780 - DNA, 20 bp, Artificial Sequence
  Description of Artificial Sequence: Synthetic oligonucleotide
  Target: LAMA2; (+) strand; PAM type: YTN; PAM sequence: TTC
attgataaacacctcttaac

SEQ ID NO: 390781 - DNA, 20 bp, Artificial Sequence
  Description of Artificial Sequence: Synthetic oligonucleotide
  Target: LAMA2; (+) strand; PAM type: YTN; PAM sequence: TTG
ataaacacctcttaactatt

SEQ ID NO: 390782 - DNA, 20 bp, Artificial Sequence
  Description of Artificial Sequence: Synthetic oligonucleotide
  Target: LAMA2; (+) strand; PAM type: YTN; PAM sequence: CTC
ttaactatttatattctgta

SEQ ID NO: 390783 - DNA, 20 bp, Artificial Sequence
  Description of Artificial Sequence: Synthetic oligonucleotide
  Target: LAMA2; (+) strand; PAM type: YTN; PAM sequence: CTT
aactatttatattctgtaag

SEQ ID NO: 390784 - DNA, 20 bp, Artificial Sequence
  Description of Artificial Sequence: Synthetic oligonucleotide
  Target: LAMA2; (+) strand; PAM type: YTN; PAM sequence: TTA
actatttatattctgtaagg

SEQ ID NO: 390785 - DNA, 20 bp, Artificial Sequence
  Description of Artificial Sequence: Synthetic oligonucleotide
  Target: LAMA2; (+) strand; PAM type: YTN; PAM sequence: CTA
tttatattctgtaaggggag

SEQ ID NO: 390786 - DNA, 20 bp, Artificial Sequence
  Description of Artificial Sequence: Synthetic oligonucleotide
  Target: LAMA2; (+) strand; PAM type: YTN; PAM sequence: TTT
atattctgtaaggggagaat

SEQ ID NO: 390787 - DNA, 20 bp, Artificial Sequence
  Description of Artificial Sequence: Synthetic oligonucleotide
  Target: LAMA2; (+) strand; PAM type: YTN; PAM sequence: TTA
tattctgtaaggggagaatg

SEQ ID NO: 390788 - DNA, 20 bp, Artificial Sequence
  Description of Artificial Sequence: Synthetic oligonucleotide
  Target: LAMA2; (+) strand; PAM type: YTN; PAM sequence: TTC
tgtaaggggagaatgctatg

SEQ ID NO: 390789 - DNA, 20 bp, Artificial Sequence
  Description of Artificial Sequence: Synthetic oligonucleotide
  Target: LAMA2; (+) strand; PAM type: YTN; PAM sequence: CTG
taaggggagaatgctatgta

SEQ ID NO: 390790 - DNA, 20 bp, Artificial Sequence
  Description of Artificial Sequence: Synthetic oligonucleotide
  Target: LAMA2; (+) strand; PAM type: YTN; PAM sequence: CTA
tgtagtagattgaactgtat

SEQ ID NO: 390791 - DNA, 20 bp, Artificial Sequence
  Description of Artificial Sequence: Synthetic oligonucleotide
  Target: LAMA2; (+) strand; PAM type: YTN; PAM sequence: TTG
aactgtataaaatattaaaa

SEQ ID NO: 390792 - DNA, 20 bp, Artificial Sequence
  Description of Artificial Sequence: Synthetic oligonucleotide
  Target: LAMA2; (+) strand; PAM type: YTN; PAM sequence: CTG
tataaaatattaaaattttg

SEQ ID NO: 390793 - DNA, 20 bp, Artificial Sequence
  Description of Artificial Sequence: Synthetic oligonucleotide
  Target: LAMA2; (+) strand; PAM type: YTN; PAM sequence: TTA
aaattttgtttcacttatat

SEQ ID NO: 390794 - DNA, 20 bp, Artificial Sequence
  Description of Artificial Sequence: Synthetic oligonucleotide
  Target: LAMA2; (+) strand; PAM type: YTN; PAM sequence: TTT
tgtttcacttatattgtatt

SEQ ID NO: 390795 - DNA, 20 bp, Artificial Sequence
  Description of Artificial Sequence: Synthetic oligonucleotide
  Target: LAMA2; (+) strand; PAM type: YTN; PAM sequence: TTT
gtttcacttatattgtattt

SEQ ID NO: 390796 - DNA, 20 bp, Artificial Sequence
  Description of Artificial Sequence: Synthetic oligonucleotide
  Target: LAMA2; (+) strand; PAM type: YTN; PAM sequence: TTG
tttcacttatattgtatttt

SEQ ID NO: 390797 - DNA, 20 bp, Artificial Sequence
  Description of Artificial Sequence: Synthetic oligonucleotide
  Target: LAMA2; (+) strand; PAM type: YTN; PAM sequence: TTT
cacttatattgtattttatt

SEQ ID NO: 390798 - DNA, 20 bp, Artificial Sequence
  Description of Artificial Sequence: Synthetic oligonucleotide
  Target: LAMA2; (+) strand; PAM type: YTN; PAM sequence: TTC
acttatattgtattttattg

SEQ ID NO: 390799 - DNA, 20 bp, Artificial Sequence
  Description of Artificial Sequence: Synthetic oligonucleotide
  Target: LAMA2; (+) strand; PAM type: YTN; PAM sequence: CTT
atattgtattttattgccta

SEQ ID NO: 390800 - DNA, 20 bp, Artificial Sequence
  Description of Artificial Sequence: Synthetic oligonucleotide
  Target: LAMA2; (+) strand; PAM type: YTN; PAM sequence: TTA
tattgtattttattgcctat

SEQ ID NO: 390801 - DNA, 20 bp, Artificial Sequence
  Description of Artificial Sequence: Synthetic oligonucleotide
  Target: LAMA2; (+) strand; PAM type: YTN; PAM sequence: TTG
tattttattgcctattgaat

SEQ ID NO: 390802 - DNA, 20 bp, Artificial Sequence
  Description of Artificial Sequence: Synthetic oligonucleotide
  Target: LAMA2; (+) strand; PAM type: YTN; PAM sequence: TTT
tattgcctattgaatatcaa

SEQ ID NO: 390803 - DNA, 20 bp, Artificial Sequence
  Description of Artificial Sequence: Synthetic oligonucleotide
  Target: LAMA2; (+) strand; PAM type: YTN; PAM sequence: TTT
attgcctattgaatatcaaa

SEQ ID NO: 390804 - DNA, 20 bp, Artificial Sequence
  Description of Artificial Sequence: Synthetic oligonucleotide
  Target: LAMA2; (+) strand; PAM type: YTN; PAM sequence: TTA
ttgcctattgaatatcaaat

SEQ ID NO: 390805 - DNA, 20 bp, Artificial Sequence
  Description of Artificial Sequence: Synthetic oligonucleotide
  Target: LAMA2; (+) strand; PAM type: YTN; PAM sequence: TTG
cctattgaatatcaaattta

SEQ ID NO: 390806 - DNA, 20 bp, Artificial Sequence
  Description of Artificial Sequence: Synthetic oligonucleotide
  Target: LAMA2; (+) strand; PAM type: YTN; PAM sequence: CTA
ttgaatatcaaatttaatga

SEQ ID NO: 390807 - DNA, 20 bp, Artificial Sequence
  Description of Artificial Sequence: Synthetic oligonucleotide
  Target: LAMA2; (+) strand; PAM type: YTN; PAM sequence: TTG
aatatcaaatttaatgaaaa

SEQ ID NO: 390808 - DNA, 20 bp, Artificial Sequence
  Description of Artificial Sequence: Synthetic oligonucleotide
  Target: LAMA2; (+) strand; PAM type: YTN; PAM sequence: TTT
aatgaaaatgaaacatttcc

SEQ ID NO: 390809 - DNA, 20 bp, Artificial Sequence
  Description of Artificial Sequence: Synthetic oligonucleotide
  Target: LAMA2; (+) strand; PAM type: YTN; PAM sequence: TTA
atgaaaatgaaacatttcca

SEQ ID NO: 390810 - DNA, 20 bp, Artificial Sequence
  Description of Artificial Sequence: Synthetic oligonucleotide
  Target: LAMA2; (+) strand; PAM type: YTN; PAM sequence: TTT
ccaaaaggatgaaactagtt

SEQ ID NO: 390811 - DNA, 20 bp, Artificial Sequence
  Description of Artificial Sequence: Synthetic oligonucleotide
  Target: LAMA2; (+) strand; PAM type: YTN; PAM sequence: TTC
caaaaggatgaaactagttt

SEQ ID NO: 390812 - DNA, 20 bp, Artificial Sequence
  Description of Artificial Sequence: Synthetic oligonucleotide
  Target: LAMA2; (+) strand; PAM type: YTN; PAM sequence: CTA
gtttttaaacgatttaagtg

SEQ ID NO: 390813 - DNA, 20 bp, Artificial Sequence
  Description of Artificial Sequence: Synthetic oligonucleotide
  Target: LAMA2; (+) strand; PAM type: YTN; PAM sequence: TTT
ttaaacgatttaagtgccaa

SEQ ID NO: 390814 - DNA, 20 bp, Artificial Sequence
  Description of Artificial Sequence: Synthetic oligonucleotide
  Target: LAMA2; (+) strand; PAM type: YTN; PAM sequence: TTT
taaacgatttaagtgccaat

SEQ ID NO: 390815 - DNA, 20 bp, Artificial Sequence
  Description of Artificial Sequence: Synthetic oligonucleotide
  Target: LAMA2; (+) strand; PAM type: YTN; PAM sequence: TTT
aaacgatttaagtgccaata

SEQ ID NO: 390816 - DNA, 20 bp, Artificial Sequence
  Description of Artificial Sequence: Synthetic oligonucleotide
  Target: LAMA2; (+) strand; PAM type: YTN; PAM sequence: TTA
aacgatttaagtgccaatat

SEQ ID NO: 390817 - DNA, 20 bp, Artificial Sequence
  Description of Artificial Sequence: Synthetic oligonucleotide
  Target: LAMA2; (+) strand; PAM type: YTN; PAM sequence: TTT
aagtgccaatattataagtt

SEQ ID NO: 390818 - DNA, 20 bp, Artificial Sequence
  Description of Artificial Sequence: Synthetic oligonucleotide
  Target: LAMA2; (+) strand; PAM type: YTN; PAM sequence: TTA
agtgccaatattataagttt

SEQ ID NO: 390819 - DNA, 20 bp, Artificial Sequence
  Description of Artificial Sequence: Synthetic oligonucleotide
  Target: LAMA2; (+) strand; PAM type: YTN; PAM sequence: TTA
taagtttacaagattttatt

SEQ ID NO: 390820 - DNA, 20 bp, Artificial Sequence
  Description of Artificial Sequence: Synthetic oligonucleotide
  Target: LAMA2; (+) strand; PAM type: YTN; PAM sequence: TTT
acaagattttatttatagtt

SEQ ID NO: 390821 - DNA, 20 bp, Artificial Sequence
  Description of Artificial Sequence: Synthetic oligonucleotide
  Target: LAMA2; (+) strand; PAM type: YTN; PAM sequence: TTA
caagattttatttatagttt

SEQ ID NO: 390822 - DNA, 20 bp, Artificial Sequence
  Description of Artificial Sequence: Synthetic oligonucleotide
  Target: LAMA2; (+) strand; PAM type: YTN; PAM sequence: TTT
tatttatagtttttaaaaga

SEQ ID NO: 390823 - DNA, 20 bp, Artificial Sequence
  Description of Artificial Sequence: Synthetic oligonucleotide
  Target: LAMA2; (+) strand; PAM type: YTN; PAM sequence: TTT
atttatagtttttaaaagat

SEQ ID NO: 390824 - DNA, 20 bp, Artificial Sequence
  Description of Artificial Sequence: Synthetic oligonucleotide
  Target: LAMA2; (+) strand; PAM type: YTN; PAM sequence: TTA
tttatagtttttaaaagatt

SEQ ID NO: 390825 - DNA, 20 bp, Artificial Sequence
  Description of Artificial Sequence: Synthetic oligonucleotide
  Target: LAMA2; (+) strand; PAM type: YTN; PAM sequence: TTT
atagtttttaaaagatttca

SEQ ID NO: 390826 - DNA, 20 bp, Artificial Sequence
  Description of Artificial Sequence: Synthetic oligonucleotide
  Target: LAMA2; (+) strand; PAM type: YTN; PAM sequence: TTA
tagtttttaaaagatttcaa

SEQ ID NO: 390827 - DNA, 20 bp, Artificial Sequence
  Description of Artificial Sequence: Synthetic oligonucleotide
  Target: LAMA2; (+) strand; PAM type: YTN; PAM sequence: TTT
ttaaaagatttcaactgcta

SEQ ID NO: 390828 - DNA, 20 bp, Artificial Sequence
  Description of Artificial Sequence: Synthetic oligonucleotide
  Target: LAMA2; (+) strand; PAM type: YTN; PAM sequence: TTT
taaaagatttcaactgctaa

SEQ ID NO: 390829 - DNA, 20 bp, Artificial Sequence
  Description of Artificial Sequence: Synthetic oligonucleotide
  Target: LAMA2; (+) strand; PAM type: YTN; PAM sequence: TTT
aaaagatttcaactgctaac

SEQ ID NO: 390830 - DNA, 20 bp, Artificial Sequence
  Description of Artificial Sequence: Synthetic oligonucleotide
  Target: LAMA2; (+) strand; PAM type: YTN; PAM sequence: TTA
aaagatttcaactgctaaca

SEQ ID NO: 390831 - DNA, 20 bp, Artificial Sequence
  Description of Artificial Sequence: Synthetic oligonucleotide
  Target: LAMA2; (+) strand; PAM type: YTN; PAM sequence: TTT
caactgctaacagtgttttt

SEQ ID NO: 390832 - DNA, 20 bp, Artificial Sequence
  Description of Artificial Sequence: Synthetic oligonucleotide
  Target: LAMA2; (+) strand; PAM type: YTN; PAM sequence: TTC
aactgctaacagtgtttttt

SEQ ID NO: 390833 - DNA, 20 bp, Artificial Sequence
  Description of Artificial Sequence: Synthetic oligonucleotide
  Target: LAMA2; (+) strand; PAM type: YTN; PAM sequence: CTG
ctaacagtgttttttatttc

SEQ ID NO: 390834 - DNA, 20 bp, Artificial Sequence
  Description of Artificial Sequence: Synthetic oligonucleotide
  Target: LAMA2; (+) strand; PAM type: YTN; PAM sequence: CTA
acagtgttttttatttctcc

SEQ ID NO: 390835 - DNA, 20 bp, Artificial Sequence
  Description of Artificial Sequence: Synthetic oligonucleotide
  Target: LAMA2; (+) strand; PAM type: YTN; PAM sequence: TTT
tttatttctccttttatatt

SEQ ID NO: 390836 - DNA, 20 bp, Artificial Sequence
  Description of Artificial Sequence: Synthetic oligonucleotide
  Target: LAMA2; (+) strand; PAM type: YTN; PAM sequence: TTT
ttatttctccttttatattt

SEQ ID NO: 390837 - DNA, 20 bp, Artificial Sequence
  Description of Artificial Sequence: Synthetic oligonucleotide
  Target: LAMA2; (+) strand; PAM type: YTN; PAM sequence: TTT
tatttctccttttatatttt

SEQ ID NO: 390838 - DNA, 20 bp, Artificial Sequence
  Description of Artificial Sequence: Synthetic oligonucleotide
  Target: LAMA2; (+) strand; PAM type: YTN; PAM sequence: TTT
atttctccttttatattttt

SEQ ID NO: 390839 - DNA, 20 bp, Artificial Sequence
  Description of Artificial Sequence: Synthetic oligonucleotide
  Target: LAMA2; (+) strand; PAM type: YTN; PAM sequence: TTA
tttctccttttatattttta

SEQ ID NO: 390840 - DNA, 20 bp, Artificial Sequence
  Description of Artificial Sequence: Synthetic oligonucleotide
  Target: LAMA2; (+) strand; PAM type: YTN; PAM sequence: TTT
ctccttttatatttttaaaa

SEQ ID NO: 390841 - DNA, 20 bp, Artificial Sequence
  Description of Artificial Sequence: Synthetic oligonucleotide
  Target: LAMA2; (+) strand; PAM type: YTN; PAM sequence: TTC
tccttttatatttttaaaag

SEQ ID NO: 390842 - DNA, 20 bp, Artificial Sequence
  Description of Artificial Sequence: Synthetic oligonucleotide
  Target: LAMA2; (+) strand; PAM type: YTN; PAM sequence: CTC
cttttatatttttaaaagat

SEQ ID NO: 390843 - DNA, 20 bp, Artificial Sequence
  Description of Artificial Sequence: Synthetic oligonucleotide
  Target: LAMA2; (+) strand; PAM type: YTN; PAM sequence: CTT
ttatatttttaaaagatata

SEQ ID NO: 390844 - DNA, 20 bp, Artificial Sequence
  Description of Artificial Sequence: Synthetic oligonucleotide
  Target: LAMA2; (+) strand; PAM type: YTN; PAM sequence: TTT
tatatttttaaaagatatat

SEQ ID NO: 390845 - DNA, 20 bp, Artificial Sequence
  Description of Artificial Sequence: Synthetic oligonucleotide
  Target: LAMA2; (+) strand; PAM type: YTN; PAM sequence: TTT
atatttttaaaagatatata

SEQ ID NO: 390846 - DNA, 20 bp, Artificial Sequence
  Description of Artificial Sequence: Synthetic oligonucleotide
  Target: LAMA2; (+) strand; PAM type: YTN; PAM sequence: TTA
tatttttaaaagatatatat

SEQ ID NO: 390847 - DNA, 20 bp, Artificial Sequence
  Description of Artificial Sequence: Synthetic oligonucleotide
  Target: LAMA2; (+) strand; PAM type: YTN; PAM sequence: TTT
ttaaaagatatatatataat

SEQ ID NO: 390848 - DNA, 20 bp, Artificial Sequence
  Description of Artificial Sequence: Synthetic oligonucleotide
  Target: LAMA2; (+) strand; PAM type: YTN; PAM sequence: TTT
taaaagatatatatataata

SEQ ID NO: 390849 - DNA, 20 bp, Artificial Sequence
  Description of Artificial Sequence: Synthetic oligonucleotide
  Target: LAMA2; (+) strand; PAM type: YTN; PAM sequence: TTT
aaaagatatatatataatat

SEQ ID NO: 390850 - DNA, 20 bp, Artificial Sequence
  Description of Artificial Sequence: Synthetic oligonucleotide
  Target: LAMA2; (+) strand; PAM type: YTN; PAM sequence: TTA
aaagatatatatataatata

SEQ ID NO: 390851 - DNA, 20 bp, Artificial Sequence
  Description of Artificial Sequence: Synthetic oligonucleotide
  Target: LAMA2; (+) strand; PAM type: YTN; PAM sequence: CTT
tttggtttggaacttttaaa

SEQ ID NO: 390852 - DNA, 20 bp, Artificial Sequence
  Description of Artificial Sequence: Synthetic oligonucleotide
  Target: LAMA2; (+) strand; PAM type: YTN; PAM sequence: TTT
ttggtttggaacttttaaaa

SEQ ID NO: 390853 - DNA, 20 bp, Artificial Sequence
  Description of Artificial Sequence: Synthetic oligonucleotide
  Target: LAMA2; (+) strand; PAM type: YTN; PAM sequence: TTT
tggtttggaacttttaaaat

SEQ ID NO: 390854 - DNA, 20 bp, Artificial Sequence
  Description of Artificial Sequence: Synthetic oligonucleotide
  Target: LAMA2; (+) strand; PAM type: YTN; PAM sequence: TTT
ggtttggaacttttaaaatt

SEQ ID NO: 390855 - DNA, 20 bp, Artificial Sequence
  Description of Artificial Sequence: Synthetic oligonucleotide
  Target: LAMA2; (+) strand; PAM type: YTN; PAM sequence: TTG
gtttggaacttttaaaattg

SEQ ID NO: 390856 - DNA, 20 bp, Artificial Sequence
  Description of Artificial Sequence: Synthetic oligonucleotide
  Target: LAMA2; (+) strand; PAM type: YTN; PAM sequence: TTT
ggaacttttaaaattggcac

SEQ ID NO: 390857 - DNA, 20 bp, Artificial Sequence
  Description of Artificial Sequence: Synthetic oligonucleotide
  Target: LAMA2; (+) strand; PAM type: YTN; PAM sequence: TTG
gaacttttaaaattggcacg

SEQ ID NO: 390858 - DNA, 20 bp, Artificial Sequence
  Description of Artificial Sequence: Synthetic oligonucleotide
  Target: LAMA2; (+) strand; PAM type: YTN; PAM sequence: CTT
ttaaaattggcacgtgaaat

SEQ ID NO: 390859 - DNA, 20 bp, Artificial Sequence
  Description of Artificial Sequence: Synthetic oligonucleotide
  Target: LAMA2; (+) strand; PAM type: YTN; PAM sequence: TTT
taaaattggcacgtgaaata

SEQ ID NO: 390860 - DNA, 20 bp, Artificial Sequence
  Description of Artificial Sequence: Synthetic oligonucleotide
  Target: LAMA2; (+) strand; PAM type: YTN; PAM sequence: TTT
aaaattggcacgtgaaatat

SEQ ID NO: 390861 - DNA, 20 bp, Artificial Sequence
  Description of Artificial Sequence: Synthetic oligonucleotide
  Target: LAMA2; (+) strand; PAM type: YTN; PAM sequence: TTA
aaattggcacgtgaaatatt

SEQ ID NO: 390862 - DNA, 20 bp, Artificial Sequence
  Description of Artificial Sequence: Synthetic oligonucleotide
  Target: LAMA2; (+) strand; PAM type: YTN; PAM sequence: TTG
gcacgtgaaatatttaggaa

SEQ ID NO: 390863 - DNA, 20 bp, Artificial Sequence
  Description of Artificial Sequence: Synthetic oligonucleotide
  Target: LAMA2; (+) strand; PAM type: YTN; PAM sequence: TTT
aggaagaaattccacatgga

SEQ ID NO: 390864 - DNA, 20 bp, Artificial Sequence
  Description of Artificial Sequence: Synthetic oligonucleotide
  Target: LAMA2; (+) strand; PAM type: YTN; PAM sequence: TTA
ggaagaaattccacatggaa

SEQ ID NO: 390865 - DNA, 20 bp, Artificial Sequence
  Description of Artificial Sequence: Synthetic oligonucleotide
  Target: LAMA2; (+) strand; PAM type: YTN; PAM sequence: TTC
cacatggaactggctcattg

SEQ ID NO: 390866 - DNA, 20 bp, Artificial Sequence
  Description of Artificial Sequence: Synthetic oligonucleotide
  Target: LAMA2; (+) strand; PAM type: YTN; PAM sequence: CTG
gctcattgtcattccacggg

SEQ ID NO: 390867 - DNA, 20 bp, Artificial Sequence
  Description of Artificial Sequence: Synthetic oligonucleotide
  Target: LAMA2; (+) strand; PAM type: YTN; PAM sequence: CTC
attgtcattccacggggtca

SEQ ID NO: 390868 - DNA, 20 bp, Artificial Sequence
  Description of Artificial Sequence: Synthetic oligonucleotide
  Target: LAMA2; (+) strand; PAM type: YTN; PAM sequence: TTG
tcattccacggggtcagctg

SEQ ID NO: 390869 - DNA, 20 bp, Artificial Sequence
  Description of Artificial Sequence: Synthetic oligonucleotide
  Target: LAMA2; (+) strand; PAM type: YTN; PAM sequence: TTC
cacggggtcagctggttgct

SEQ ID NO: 390870 - DNA, 20 bp, Artificial Sequence
  Description of Artificial Sequence: Synthetic oligonucleotide
  Target: LAMA2; (+) strand; PAM type: YTN; PAM sequence: CTG
gttgctccttctttccttgt

SEQ ID NO: 390871 - DNA, 20 bp, Artificial Sequence
  Description of Artificial Sequence: Synthetic oligonucleotide
  Target: LAMA2; (+) strand; PAM type: YTN; PAM sequence: TTG
ctccttctttccttgtgtgt

SEQ ID NO: 390872 - DNA, 20 bp, Artificial Sequence
  Description of Artificial Sequence: Synthetic oligonucleotide
  Target: LAMA2; (+) strand; PAM type: YTN; PAM sequence: CTC
cttctttccttgtgtgttgt

SEQ ID NO: 390873 - DNA, 20 bp, Artificial Sequence
  Description of Artificial Sequence: Synthetic oligonucleotide
  Target: LAMA2; (+) strand; PAM type: YTN; PAM sequence: CTT
ctttccttgtgtgttgttgg

SEQ ID NO: 390874 - DNA, 20 bp, Artificial Sequence
  Description of Artificial Sequence: Synthetic oligonucleotide
  Target: LAMA2; (+) strand; PAM type: YTN; PAM sequence: TTC
tttccttgtgtgttgttggt

SEQ ID NO: 390875 - DNA, 20 bp, Artificial Sequence
  Description of Artificial Sequence: Synthetic oligonucleotide
  Target: LAMA2; (+) strand; PAM type: YTN; PAM sequence: CTT
tccttgtgtgttgttggtcc

SEQ ID NO: 390876 - DNA, 20 bp, Artificial Sequence
  Description of Artificial Sequence: Synthetic oligonucleotide
  Target: LAMA2; (+) strand; PAM type: YTN; PAM sequence: TTT
ccttgtgtgttgttggtcct

SEQ ID NO: 390877 - DNA, 20 bp, Artificial Sequence
  Description of Artificial Sequence: Synthetic oligonucleotide
  Target: LAMA2; (+) strand; PAM type: YTN; PAM sequence: TTC
cttgtgtgttgttggtcctt

SEQ ID NO: 390878 - DNA, 20 bp, Artificial Sequence
  Description of Artificial Sequence: Synthetic oligonucleotide
  Target: LAMA2; (+) strand; PAM type: YTN; PAM sequence: CTT
gtgtgttgttggtccttatg

SEQ ID NO: 390879 - DNA, 20 bp, Artificial Sequence
  Description of Artificial Sequence: Synthetic oligonucleotide
  Target: LAMA2; (+) strand; PAM type: YTN; PAM sequence: TTG
tgtgttgttggtccttatgg

SEQ ID NO: 390880 - DNA, 20 bp, Artificial Sequence
  Description of Artificial Sequence: Synthetic oligonucleotide
  Target: LAMA2; (+) strand; PAM type: YTN; PAM sequence: TTG
ttggtccttatggcttgcct

SEQ ID NO: 390881 - DNA, 20 bp, Artificial Sequence
  Description of Artificial Sequence: Synthetic oligonucleotide
  Target: LAMA2; (+) strand; PAM type: YTN; PAM sequence: TTG
gtccttatggcttgcctgat

SEQ ID NO: 390882 - DNA, 20 bp, Artificial Sequence
  Description of Artificial Sequence: Synthetic oligonucleotide
  Target: LAMA2; (+) strand; PAM type: YTN; PAM sequence: CTT
atggcttgcctgatgagtgc

SEQ ID NO: 390883 - DNA, 20 bp, Artificial Sequence
  Description of Artificial Sequence: Synthetic oligonucleotide
  Target: LAMA2; (+) strand; PAM type: YTN; PAM sequence: TTA
tggcttgcctgatgagtgct

SEQ ID NO: 390884 - DNA, 20 bp, Artificial Sequence
  Description of Artificial Sequence: Synthetic oligonucleotide
  Target: LAMA2; (+) strand; PAM type: YTN; PAM sequence: CTT
gcctgatgagtgcttcacta

SEQ ID NO: 390885 - DNA, 20 bp, Artificial Sequence
  Description of Artificial Sequence: Synthetic oligonucleotide
  Target: LAMA2; (+) strand; PAM type: YTN; PAM sequence: TTG
cctgatgagtgcttcactac

SEQ ID NO: 390886 - DNA, 20 bp, Artificial Sequence
  Description of Artificial Sequence: Synthetic oligonucleotide
  Target: LAMA2; (+) strand; PAM type: YTN; PAM sequence: CTG
atgagtgcttcactaccact

SEQ ID NO: 390887 - DNA, 20 bp, Artificial Sequence
  Description of Artificial Sequence: Synthetic oligonucleotide
  Target: LAMA2; (+) strand; PAM type: YTN; PAM sequence: CTT
cactaccacttagacatatg

SEQ ID NO: 390888 - DNA, 20 bp, Artificial Sequence
  Description of Artificial Sequence: Synthetic oligonucleotide
  Target: LAMA2; (+) strand; PAM type: YTN; PAM sequence: TTC
actaccacttagacatatgg

SEQ ID NO: 390889 - DNA, 20 bp, Artificial Sequence
  Description of Artificial Sequence: Synthetic oligonucleotide
  Target: LAMA2; (+) strand; PAM type: YTN; PAM sequence: CTA
ccacttagacatatggagct

SEQ ID NO: 390890 - DNA, 20 bp, Artificial Sequence
  Description of Artificial Sequence: Synthetic oligonucleotide
  Target: LAMA2; (+) strand; PAM type: YTN; PAM sequence: CTT
agacatatggagctggtaat

SEQ ID NO: 390891 - DNA, 20 bp, Artificial Sequence
  Description of Artificial Sequence: Synthetic oligonucleotide
  Target: LAMA2; (+) strand; PAM type: YTN; PAM sequence: TTA
gacatatggagctggtaata

SEQ ID NO: 390892 - DNA, 20 bp, Artificial Sequence
  Description of Artificial Sequence: Synthetic oligonucleotide
  Target: LAMA2; (+) strand; PAM type: YTN; PAM sequence: CTG
gtaatattggaagatgaccc

SEQ ID NO: 390893 - DNA, 20 bp, Artificial Sequence
  Description of Artificial Sequence: Synthetic oligonucleotide
  Target: LAMA2; (+) strand; PAM type: YTN; PAM sequence: TTG
gaagatgacccttgagagta

SEQ ID NO: 390894 - DNA, 20 bp, Artificial Sequence
  Description of Artificial Sequence: Synthetic oligonucleotide
  Target: LAMA2; (+) strand; PAM type: YTN; PAM sequence: CTT
gagagtatcatataaatgat

SEQ ID NO: 390895 - DNA, 20 bp, Artificial Sequence
  Description of Artificial Sequence: Synthetic oligonucleotide
  Target: LAMA2; (+) strand; PAM type: YTN; PAM sequence: TTG
agagtatcatataaatgatt

SEQ ID NO: 390896 - DNA, 20 bp, Artificial Sequence
  Description of Artificial Sequence: Synthetic oligonucleotide
  Target: LAMA2; (+) strand; PAM type: YTN; PAM sequence: TTT
gatctgaaatctaattttag

SEQ ID NO: 390897 - DNA, 20 bp, Artificial Sequence
  Description of Artificial Sequence: Synthetic oligonucleotide
  Target: LAMA2; (+) strand; PAM type: YTN; PAM sequence: TTG
atctgaaatctaattttagc

SEQ ID NO: 390898 - DNA, 20 bp, Artificial Sequence
  Description of Artificial Sequence: Synthetic oligonucleotide
  Target: LAMA2; (+) strand; PAM type: YTN; PAM sequence: CTG
aaatctaattttagcaggaa

SEQ ID NO: 390899 - DNA, 20 bp, Artificial Sequence
  Description of Artificial Sequence: Synthetic oligonucleotide
  Target: LAMA2; (+) strand; PAM type: YTN; PAM sequence: CTA
attttagcaggaaaccatat

SEQ ID NO: 390900 - DNA, 20 bp, Artificial Sequence
  Description of Artificial Sequence: Synthetic oligonucleotide
  Target: LAMA2; (+) strand; PAM type: YTN; PAM sequence: TTT
tagcaggaaaccatatgagt

SEQ ID NO: 390901 - DNA, 20 bp, Artificial Sequence
  Description of Artificial Sequence: Synthetic oligonucleotide
  Target: LAMA2; (+) strand; PAM type: YTN; PAM sequence: TTT
agcaggaaaccatatgagtc

SEQ ID NO: 390902 - DNA, 20 bp, Artificial Sequence
  Description of Artificial Sequence: Synthetic oligonucleotide
  Target: LAMA2; (+) strand; PAM type: YTN; PAM sequence: TTA
gcaggaaaccatatgagtcc

SEQ ID NO: 390903 - DNA, 20 bp, Artificial Sequence
  Description of Artificial Sequence: Synthetic oligonucleotide
  Target: LAMA2; (+) strand; PAM type: YTN; PAM sequence: CTA
agcaatgttatctattcagt

SEQ ID NO: 390904 - DNA, 20 bp, Artificial Sequence
  Description of Artificial Sequence: Synthetic oligonucleotide
  Target: LAMA2; (+) strand; PAM type: YTN; PAM sequence: TTA
tctattcagtagttaggttt

SEQ ID NO: 390905 - DNA, 20 bp, Artificial Sequence
  Description of Artificial Sequence: Synthetic oligonucleotide
  Target: LAMA2; (+) strand; PAM type: YTN; PAM sequence: CTA
ttcagtagttaggtttgctc

SEQ ID NO: 390906 - DNA, 20 bp, Artificial Sequence
  Description of Artificial Sequence: Synthetic oligonucleotide
  Target: LAMA2; (+) strand; PAM type: YTN; PAM sequence: TTC
agtagttaggtttgctccat

SEQ ID NO: 390907 - DNA, 20 bp, Artificial Sequence
  Description of Artificial Sequence: Synthetic oligonucleotide
  Target: LAMA2; (+) strand; PAM type: YTN; PAM sequence: TTA
ggtttgctccattagattct

SEQ ID NO: 390908 - DNA, 20 bp, Artificial Sequence
  Description of Artificial Sequence: Synthetic oligonucleotide
  Target: LAMA2; (+) strand; PAM type: YTN; PAM sequence: TTT
gctccattagattctagttt

SEQ ID NO: 390909 - DNA, 20 bp, Artificial Sequence
  Description of Artificial Sequence: Synthetic oligonucleotide
  Target: LAMA2; (+) strand; PAM type: YTN; PAM sequence: TTG
ctccattagattctagtttt

SEQ ID NO: 390910 - DNA, 20 bp, Artificial Sequence
  Description of Artificial Sequence: Synthetic oligonucleotide
  Target: LAMA2; (+) strand; PAM type: YTN; PAM sequence: CTC
cattagattctagttttaac

SEQ ID NO: 390911 - DNA, 20 bp, Artificial Sequence
  Description of Artificial Sequence: Synthetic oligonucleotide
  Target: LAMA2; (+) strand; PAM type: YTN; PAM sequence: TTA
gattctagttttaacataaa

SEQ ID NO: 390912 - DNA, 20 bp, Artificial Sequence
  Description of Artificial Sequence: Synthetic oligonucleotide
  Target: LAMA2; (+) strand; PAM type: YTN; PAM sequence: TTC
tagttttaacataaagaagg

SEQ ID NO: 390913 - DNA, 20 bp, Artificial Sequence
  Description of Artificial Sequence: Synthetic oligonucleotide
  Target: LAMA2; (+) strand; PAM type: YTN; PAM sequence: CTA
gttttaacataaagaaggca

SEQ ID NO: 390914 - DNA, 20 bp, Artificial Sequence
  Description of Artificial Sequence: Synthetic oligonucleotide
  Target: LAMA2; (+) strand; PAM type: YTN; PAM sequence: TTT
taacataaagaaggcagaaa

SEQ ID NO: 390915 - DNA, 20 bp, Artificial Sequence
  Description of Artificial Sequence: Synthetic oligonucleotide
  Target: LAMA2; (+) strand; PAM type: YTN; PAM sequence: TTT
aacataaagaaggcagaaaa

SEQ ID NO: 390916 - DNA, 20 bp, Artificial Sequence
  Description of Artificial Sequence: Synthetic oligonucleotide
  Target: LAMA2; (+) strand; PAM type: YTN; PAM sequence: TTA
acataaagaaggcagaaaat

SEQ ID NO: 390917 - DNA, 20 bp, Artificial Sequence
  Description of Artificial Sequence: Synthetic oligonucleotide
  Target: LAMA2; (+) strand; PAM type: YTN; PAM sequence: CTG
gtcatatccaaccaagaaaa

SEQ ID NO: 390918 - DNA, 20 bp, Artificial Sequence
  Description of Artificial Sequence: Synthetic oligonucleotide
  Target: LAMA2; (+) strand; PAM type: YTN; PAM sequence: TTA
tgtgcagattttaagaggca

SEQ ID NO: 390919 - DNA, 20 bp, Artificial Sequence
  Description of Artificial Sequence: Synthetic oligonucleotide
  Target: LAMA2; (+) strand; PAM type: YTN; PAM sequence: TTT
taagaggcacagtagaactg

SEQ ID NO: 390920 - DNA, 20 bp, Artificial Sequence
  Description of Artificial Sequence: Synthetic oligonucleotide
  Target: LAMA2; (+) strand; PAM type: YTN; PAM sequence: TTT
aagaggcacagtagaactgc

SEQ ID NO: 390921 - DNA, 20 bp, Artificial Sequence
  Description of Artificial Sequence: Synthetic oligonucleotide
  Target: LAMA2; (+) strand; PAM type: YTN; PAM sequence: TTA
agaggcacagtagaactgct

SEQ ID NO: 390922 - DNA, 20 bp, Artificial Sequence
  Description of Artificial Sequence: Synthetic oligonucleotide
  Target: LAMA2; (+) strand; PAM type: YTN; PAM sequence: CTG
cttgagctaaagcaggaaag

SEQ ID NO: 390923 - DNA, 20 bp, Artificial Sequence
  Description of Artificial Sequence: Synthetic oligonucleotide
  Target: LAMA2; (+) strand; PAM type: YTN; PAM sequence: CTT
gagctaaagcaggaaagtaa

SEQ ID NO: 390924 - DNA, 20 bp, Artificial Sequence
  Description of Artificial Sequence: Synthetic oligonucleotide
  Target: LAMA2; (+) strand; PAM type: YTN; PAM sequence: TTG
agctaaagcaggaaagtaac

SEQ ID NO: 390925 - DNA, 20 bp, Artificial Sequence
  Description of Artificial Sequence: Synthetic oligonucleotide
  Target: LAMA2; (+) strand; PAM type: YTN; PAM sequence: CTA
aagcaggaaagtaacagcta

SEQ ID NO: 390926 - DNA, 20 bp, Artificial Sequence
  Description of Artificial Sequence: Synthetic oligonucleotide
  Target: LAMA2; (+) strand; PAM type: YTN; PAM sequence: CTA
cattgttcagaagtaaatta

SEQ ID NO: 390927 - DNA, 20 bp, Artificial Sequence
  Description of Artificial Sequence: Synthetic oligonucleotide
  Target: LAMA2; (+) strand; PAM type: YTN; PAM sequence: TTG
ttcagaagtaaattaacgtg

SEQ ID NO: 390928 - DNA, 20 bp, Artificial Sequence
  Description of Artificial Sequence: Synthetic oligonucleotide
  Target: LAMA2; (+) strand; PAM type: YTN; PAM sequence: TTC
agaagtaaattaacgtgtgc

SEQ ID NO: 390929 - DNA, 20 bp, Artificial Sequence
  Description of Artificial Sequence: Synthetic oligonucleotide
  Target: LAMA2; (+) strand; PAM type: YTN; PAM sequence: TTA
acgtgtgcctaatggtaatg

SEQ ID NO: 390930 - DNA, 20 bp, Artificial Sequence
  Description of Artificial Sequence: Synthetic oligonucleotide
  Target: LAMA2; (+) strand; PAM type: YTN; PAM sequence: CTA
atggtaatgcatgctgccta

SEQ ID NO: 390931 - DNA, 20 bp, Artificial Sequence
  Description of Artificial Sequence: Synthetic oligonucleotide
  Target: LAMA2; (+) strand; PAM type: YTN; PAM sequence: CTG
cctagacataaatactctaa

SEQ ID NO: 390932 - DNA, 20 bp, Artificial Sequence
  Description of Artificial Sequence: Synthetic oligonucleotide
  Target: LAMA2; (+) strand; PAM type: YTN; PAM sequence: CTA
gacataaatactctaaaaaa

SEQ ID NO: 390933 - DNA, 20 bp, Artificial Sequence
  Description of Artificial Sequence: Synthetic oligonucleotide
  Target: LAMA2; (+) strand; PAM type: YTN; PAM sequence: CTC
taaaaaacaaaacaagaaaa

SEQ ID NO: 390934 - DNA, 20 bp, Artificial Sequence
  Description of Artificial Sequence: Synthetic oligonucleotide
  Target: LAMA2; (+) strand; PAM type: YTN; PAM sequence: CTA
aaaaacaaaacaagaaaaaa

SEQ ID NO: 390935 - DNA, 20 bp, Artificial Sequence
  Description of Artificial Sequence: Synthetic oligonucleotide
  Target: LAMA2; (+) strand; PAM type: YTN; PAM sequence: CTA
gttgagtgaatgtcaacata

SEQ ID NO: 390936 - DNA, 20 bp, Artificial Sequence
  Description of Artificial Sequence: Synthetic oligonucleotide
  Target: LAMA2; (+) strand; PAM type: YTN; PAM sequence: TTG
agtgaatgtcaacataaaag

SEQ ID NO: 390937 - DNA, 20 bp, Artificial Sequence
  Description of Artificial Sequence: Synthetic oligonucleotide
  Target: LAMA2; (+) strand; PAM type: YTN; PAM sequence: CTG
tgtaaggcatcatttacaaa

SEQ ID NO: 390938 - DNA, 20 bp, Artificial Sequence
  Description of Artificial Sequence: Synthetic oligonucleotide
  Target: LAMA2; (+) strand; PAM type: YTN; PAM sequence: TTT
acaaaggaacactgtaaaga

SEQ ID NO: 390939 - DNA, 20 bp, Artificial Sequence
  Description of Artificial Sequence: Synthetic oligonucleotide
  Target: LAMA2; (+) strand; PAM type: YTN; PAM sequence: TTA
caaaggaacactgtaaagat

SEQ ID NO: 390940 - DNA, 20 bp, Artificial Sequence
  Description of Artificial Sequence: Synthetic oligonucleotide
  Target: LAMA2; (+) strand; PAM type: YTN; PAM sequence: CTG
taaagattgcagaatagagg

SEQ ID NO: 390941 - DNA, 20 bp, Artificial Sequence
  Description of Artificial Sequence: Synthetic oligonucleotide
  Target: LAMA2; (+) strand; PAM type: YTN; PAM sequence: TTG
cagaatagaggtaagagaat

SEQ ID NO: 390942 - DNA, 20 bp, Artificial Sequence
  Description of Artificial Sequence: Synthetic oligonucleotide
  Target: LAMA2; (+) strand; PAM type: YTN; PAM sequence: TTA
aaataagaaaatccaagata

SEQ ID NO: 390943 - DNA, 20 bp, Artificial Sequence
  Description of Artificial Sequence: Synthetic oligonucleotide
  Target: LAMA2; (+) strand; PAM type: YTN; PAM sequence: TTG
tacaacatattaggataaat

SEQ ID NO: 390944 - DNA, 20 bp, Artificial Sequence
  Description of Artificial Sequence: Synthetic oligonucleotide
  Target: LAMA2; (+) strand; PAM type: YTN; PAM sequence: TTA
ggataaatgagaagttattt

SEQ ID NO: 390945 - DNA, 20 bp, Artificial Sequence
  Description of Artificial Sequence: Synthetic oligonucleotide
  Target: LAMA2; (+) strand; PAM type: YTN; PAM sequence: TTA
tttgtcaaatactcaaagga

SEQ ID NO: 390946 - DNA, 20 bp, Artificial Sequence
  Description of Artificial Sequence: Synthetic oligonucleotide
  Target: LAMA2; (+) strand; PAM type: YTN; PAM sequence: TTT
gtcaaatactcaaaggacaa

SEQ ID NO: 390947 - DNA, 20 bp, Artificial Sequence
  Description of Artificial Sequence: Synthetic oligonucleotide
  Target: LAMA2; (+) strand; PAM type: YTN; PAM sequence: TTG
tcaaatactcaaaggacaag

SEQ ID NO: 390948 - DNA, 20 bp, Artificial Sequence
  Description of Artificial Sequence: Synthetic oligonucleotide
  Target: LAMA2; (+) strand; PAM type: YTN; PAM sequence: CTC
aaaggacaagataatagtga

SEQ ID NO: 390949 - DNA, 20 bp, Artificial Sequence
  Description of Artificial Sequence: Synthetic oligonucleotide
  Target: LAMA2; (+) strand; PAM type: YTN; PAM sequence: CTA
agagatggagatggtaattt

SEQ ID NO: 390950 - DNA, 20 bp, Artificial Sequence
  Description of Artificial Sequence: Synthetic oligonucleotide
  Target: LAMA2; (+) strand; PAM type: YTN; PAM sequence: TTT
aataaaacacagaaagagcc

SEQ ID NO: 390951 - DNA, 20 bp, Artificial Sequence
  Description of Artificial Sequence: Synthetic oligonucleotide
  Target: LAMA2; (+) strand; PAM type: YTN; PAM sequence: TTA
ataaaacacagaaagagcca

SEQ ID NO: 390952 - DNA, 20 bp, Artificial Sequence
  Description of Artificial Sequence: Synthetic oligonucleotide
  Target: LAMA2; (+) strand; PAM type: YTN; PAM sequence: CTG
aatcagacagatagttccta

SEQ ID NO: 390953 - DNA, 20 bp, Artificial Sequence
  Description of Artificial Sequence: Synthetic oligonucleotide
  Target: LAMA2; (+) strand; PAM type: YTN; PAM sequence: TTC
ctatcatgtagtatttagca

SEQ ID NO: 390954 - DNA, 20 bp, Artificial Sequence
  Description of Artificial Sequence: Synthetic oligonucleotide
  Target: LAMA2; (+) strand; PAM type: YTN; PAM sequence: CTA
tcatgtagtatttagcattc

SEQ ID NO: 390955 - DNA, 20 bp, Artificial Sequence
  Description of Artificial Sequence: Synthetic oligonucleotide
  Target: LAMA2; (+) strand; PAM type: YTN; PAM sequence: TTT
agcattcattcataacatta

SEQ ID NO: 390956 - DNA, 20 bp, Artificial Sequence
  Description of Artificial Sequence: Synthetic oligonucleotide
  Target: LAMA2; (+) strand; PAM type: YTN; PAM sequence: TTA
gcattcattcataacattat

SEQ ID NO: 390957 - DNA, 20 bp, Artificial Sequence
  Description of Artificial Sequence: Synthetic oligonucleotide
  Target: LAMA2; (+) strand; PAM type: YTN; PAM sequence: TTC
attcataacattatcaatag

SEQ ID NO: 390958 - DNA, 20 bp, Artificial Sequence
  Description of Artificial Sequence: Synthetic oligonucleotide
  Target: LAMA2; (+) strand; PAM type: YTN; PAM sequence: TTC
ataacattatcaatagcctg

SEQ ID NO: 390959 - DNA, 20 bp, Artificial Sequence
  Description of Artificial Sequence: Synthetic oligonucleotide
  Target: LAMA2; (+) strand; PAM type: YTN; PAM sequence: TTA
tcaatagcctgtcctgggtg

SEQ ID NO: 390960 - DNA, 20 bp, Artificial Sequence
  Description of Artificial Sequence: Synthetic oligonucleotide
  Target: LAMA2; (+) strand; PAM type: YTN; PAM sequence: CTG
tcctgggtgagattgatttt

SEQ ID NO: 390961 - DNA, 20 bp, Artificial Sequence
  Description of Artificial Sequence: Synthetic oligonucleotide
  Target: LAMA2; (+) strand; PAM type: YTN; PAM sequence: CTG
ggtgagattgatttttgtga

SEQ ID NO: 390962 - DNA, 20 bp, Artificial Sequence
  Description of Artificial Sequence: Synthetic oligonucleotide
  Target: LAMA2; (+) strand; PAM type: YTN; PAM sequence: TTG
atttttgtgaattttgcttt

SEQ ID NO: 390963 - DNA, 20 bp, Artificial Sequence
  Description of Artificial Sequence: Synthetic oligonucleotide
  Target: LAMA2; (+) strand; PAM type: YTN; PAM sequence: TTT
ttgtgaattttgctttggca

SEQ ID NO: 390964 - DNA, 20 bp, Artificial Sequence
  Description of Artificial Sequence: Synthetic oligonucleotide
  Target: LAMA2; (+) strand; PAM type: YTN; PAM sequence: TTT
tgtgaattttgctttggcag

SEQ ID NO: 390965 - DNA, 20 bp, Artificial Sequence
  Description of Artificial Sequence: Synthetic oligonucleotide
  Target: LAMA2; (+) strand; PAM type: YTN; PAM sequence: TTT
gtgaattttgctttggcagt

SEQ ID NO: 390966 - DNA, 20 bp, Artificial Sequence
  Description of Artificial Sequence: Synthetic oligonucleotide
  Target: LAMA2; (+) strand; PAM type: YTN; PAM sequence: TTG
tgaattttgctttggcagtg

SEQ ID NO: 390967 - DNA, 20 bp, Artificial Sequence
  Description of Artificial Sequence: Synthetic oligonucleotide
  Target: LAMA2; (+) strand; PAM type: YTN; PAM sequence: TTT
tgctttggcagtgataccac

SEQ ID NO: 390968 - DNA, 20 bp, Artificial Sequence
  Description of Artificial Sequence: Synthetic oligonucleotide
  Target: LAMA2; (+) strand; PAM type: YTN; PAM sequence: TTT
gctttggcagtgataccact

SEQ ID NO: 390969 - DNA, 20 bp, Artificial Sequence
  Description of Artificial Sequence: Synthetic oligonucleotide
  Target: LAMA2; (+) strand; PAM type: YTN; PAM sequence: TTG
ctttggcagtgataccacta

SEQ ID NO: 390970 - DNA, 20 bp, Artificial Sequence
  Description of Artificial Sequence: Synthetic oligonucleotide
  Target: LAMA2; (+) strand; PAM type: YTN; PAM sequence: CTT
tggcagtgataccactatct

SEQ ID NO: 390971 - DNA, 20 bp, Artificial Sequence
  Description of Artificial Sequence: Synthetic oligonucleotide
  Target: LAMA2; (+) strand; PAM type: YTN; PAM sequence: TTT
ggcagtgataccactatcta

SEQ ID NO: 390972 - DNA, 20 bp, Artificial Sequence
  Description of Artificial Sequence: Synthetic oligonucleotide
  Target: LAMA2; (+) strand; PAM type: YTN; PAM sequence: TTG
gcagtgataccactatctat

SEQ ID NO: 390973 - DNA, 20 bp, Artificial Sequence
  Description of Artificial Sequence: Synthetic oligonucleotide
  Target: LAMA2; (+) strand; PAM type: YTN; PAM sequence: CTA
tctatcaccactacccatag

SEQ ID NO: 390974 - DNA, 20 bp, Artificial Sequence
  Description of Artificial Sequence: Synthetic oligonucleotide
  Target: LAMA2; (+) strand; PAM type: YTN; PAM sequence: CTA
tcaccactacccataggtga

SEQ ID NO: 390975 - DNA, 20 bp, Artificial Sequence
  Description of Artificial Sequence: Synthetic oligonucleotide
  Target: LAMA2; (+) strand; PAM type: YTN; PAM sequence: CTA
cccataggtgatagtgcatt

SEQ ID NO: 390976 - DNA, 20 bp, Artificial Sequence
  Description of Artificial Sequence: Synthetic oligonucleotide
  Target: LAMA2; (+) strand; PAM type: YTN; PAM sequence: TTT
gtcataggcttctttatgaa

SEQ ID NO: 390977 - DNA, 20 bp, Artificial Sequence
  Description of Artificial Sequence: Synthetic oligonucleotide
  Target: LAMA2; (+) strand; PAM type: YTN; PAM sequence: TTG
tcataggcttctttatgaag

SEQ ID NO: 390978 - DNA, 20 bp, Artificial Sequence
  Description of Artificial Sequence: Synthetic oligonucleotide
  Target: LAMA2; (+) strand; PAM type: YTN; PAM sequence: CTT
ctttatgaagtctctcgtgg

SEQ ID NO: 390979 - DNA, 20 bp, Artificial Sequence
  Description of Artificial Sequence: Synthetic oligonucleotide
  Target: LAMA2; (+) strand; PAM type: YTN; PAM sequence: TTC
tttatgaagtctctcgtggg

SEQ ID NO: 390980 - DNA, 20 bp, Artificial Sequence
  Description of Artificial Sequence: Synthetic oligonucleotide
  Target: LAMA2; (+) strand; PAM type: YTN; PAM sequence: CTT
tatgaagtctctcgtgggta

SEQ ID NO: 390981 - DNA, 20 bp, Artificial Sequence
  Description of Artificial Sequence: Synthetic oligonucleotide
  Target: LAMA2; (+) strand; PAM type: YTN; PAM sequence: TTT
atgaagtctctcgtgggtat

SEQ ID NO: 390982 - DNA, 20 bp, Artificial Sequence
  Description of Artificial Sequence: Synthetic oligonucleotide
  Target: LAMA2; (+) strand; PAM type: YTN; PAM sequence: TTA
tgaagtctctcgtgggtatt

SEQ ID NO: 390983 - DNA, 20 bp, Artificial Sequence
  Description of Artificial Sequence: Synthetic oligonucleotide
  Target: LAMA2; (+) strand; PAM type: YTN; PAM sequence: CTC
tcgtgggtatttttgaccag

SEQ ID NO: 390984 - DNA, 20 bp, Artificial Sequence
  Description of Artificial Sequence: Synthetic oligonucleotide
  Target: LAMA2; (+) strand; PAM type: YTN; PAM sequence: CTC
gtgggtatttttgaccaggg

SEQ ID NO: 390985 - DNA, 20 bp, Artificial Sequence
  Description of Artificial Sequence: Synthetic oligonucleotide
  Target: LAMA2; (+) strand; PAM type: YTN; PAM sequence: TTT
ttgaccagggtgaatcttca

SEQ ID NO: 390986 - DNA, 20 bp, Artificial Sequence
  Description of Artificial Sequence: Synthetic oligonucleotide
  Target: LAMA2; (+) strand; PAM type: YTN; PAM sequence: TTT
tgaccagggtgaatcttcaa

SEQ ID NO: 390987 - DNA, 20 bp, Artificial Sequence
  Description of Artificial Sequence: Synthetic oligonucleotide
  Target: LAMA2; (+) strand; PAM type: YTN; PAM sequence: TTT
gaccagggtgaatcttcaac

SEQ ID NO: 390988 - DNA, 20 bp, Artificial Sequence
  Description of Artificial Sequence: Synthetic oligonucleotide
  Target: LAMA2; (+) strand; PAM type: YTN; PAM sequence: TTG
accagggtgaatcttcaact

SEQ ID NO: 390989 - DNA, 20 bp, Artificial Sequence
  Description of Artificial Sequence: Synthetic oligonucleotide
  Target: LAMA2; (+) strand; PAM type: YTN; PAM sequence: CTT
caacttaattactgtgtaat

SEQ ID NO: 390990 - DNA, 20 bp, Artificial Sequence
  Description of Artificial Sequence: Synthetic oligonucleotide
  Target: LAMA2; (+) strand; PAM type: YTN; PAM sequence: TTC
aacttaattactgtgtaatg

SEQ ID NO: 390991 - DNA, 20 bp, Artificial Sequence
  Description of Artificial Sequence: Synthetic oligonucleotide
  Target: LAMA2; (+) strand; PAM type: YTN; PAM sequence: CTT
aattactgtgtaatgagaca

SEQ ID NO: 390992 - DNA, 20 bp, Artificial Sequence
  Description of Artificial Sequence: Synthetic oligonucleotide
  Target: LAMA2; (+) strand; PAM type: YTN; PAM sequence: TTA
attactgtgtaatgagacat

SEQ ID NO: 390993 - DNA, 20 bp, Artificial Sequence
  Description of Artificial Sequence: Synthetic oligonucleotide
  Target: LAMA2; (+) strand; PAM type: YTN; PAM sequence: TTA
ctgtgtaatgagacatgatt

SEQ ID NO: 390994 - DNA, 20 bp, Artificial Sequence
  Description of Artificial Sequence: Synthetic oligonucleotide
  Target: LAMA2; (+) strand; PAM type: YTN; PAM sequence: CTG
tgtaatgagacatgattttt

SEQ ID NO: 390995 - DNA, 20 bp, Artificial Sequence
  Description of Artificial Sequence: Synthetic oligonucleotide
  Target: LAMA2; (+) strand; PAM type: YTN; PAM sequence: TTT
ttaaaaatatatctagatga

SEQ ID NO: 390996 - DNA, 20 bp, Artificial Sequence
  Description of Artificial Sequence: Synthetic oligonucleotide
  Target: LAMA2; (+) strand; PAM type: YTN; PAM sequence: TTT
taaaaatatatctagatgat

SEQ ID NO: 390997 - DNA, 20 bp, Artificial Sequence
  Description of Artificial Sequence: Synthetic oligonucleotide
  Target: LAMA2; (+) strand; PAM type: YTN; PAM sequence: TTT
aaaaatatatctagatgatg

SEQ ID NO: 390998 - DNA, 20 bp, Artificial Sequence
  Description of Artificial Sequence: Synthetic oligonucleotide
  Target: LAMA2; (+) strand; PAM type: YTN; PAM sequence: TTA
aaaatatatctagatgatgt

SEQ ID NO: 390999 - DNA, 20 bp, Artificial Sequence
  Description of Artificial Sequence: Synthetic oligonucleotide
  Target: LAMA2; (+) strand; PAM type: YTN; PAM sequence: CTA
gatgatgttctgatatgatt

SEQ ID NO: 391000 - DNA, 20 bp, Artificial Sequence
  Description of Artificial Sequence: Synthetic oligonucleotide
  Target: LAMA2; (+) strand; PAM type: YTN; PAM sequence: TTC
tgatatgattttgaaatgtg

SEQ ID NO: 391001 - DNA, 20 bp, Artificial Sequence
  Description of Artificial Sequence: Synthetic oligonucleotide
  Target: LAMA2; (+) strand; PAM type: YTN; PAM sequence: CTG
atatgattttgaaatgtgtt

SEQ ID NO: 391002 - DNA, 20 bp, Artificial Sequence
  Description of Artificial Sequence: Synthetic oligonucleotide
  Target: LAMA2; (+) strand; PAM type: YTN; PAM sequence: TTT
tgaaatgtgttaattgactg

SEQ ID NO: 391003 - DNA, 20 bp, Artificial Sequence
  Description of Artificial Sequence: Synthetic oligonucleotide
  Target: LAMA2; (+) strand; PAM type: YTN; PAM sequence: TTT
gaaatgtgttaattgactga

SEQ ID NO: 391004 - DNA, 20 bp, Artificial Sequence
  Description of Artificial Sequence: Synthetic oligonucleotide
  Target: LAMA2; (+) strand; PAM type: YTN; PAM sequence: TTG
aaatgtgttaattgactgaa

SEQ ID NO: 391005 - DNA, 20 bp, Artificial Sequence
  Description of Artificial Sequence: Synthetic oligonucleotide
  Target: LAMA2; (+) strand; PAM type: YTN; PAM sequence: TTA
attgactgaaagtcaaaact

SEQ ID NO: 391006 - DNA, 20 bp, Artificial Sequence
  Description of Artificial Sequence: Synthetic oligonucleotide
  Target: LAMA2; (+) strand; PAM type: YTN; PAM sequence: TTG
actgaaagtcaaaacttata

SEQ ID NO: 391007 - DNA, 20 bp, Artificial Sequence
  Description of Artificial Sequence: Synthetic oligonucleotide
  Target: LAMA2; (+) strand; PAM type: YTN; PAM sequence: CTG
aaagtcaaaacttatatact

SEQ ID NO: 391008 - DNA, 20 bp, Artificial Sequence
  Description of Artificial Sequence: Synthetic oligonucleotide
  Target: LAMA2; (+) strand; PAM type: YTN; PAM sequence: CTT
atatacttaaagtatacatt

SEQ ID NO: 391009 - DNA, 20 bp, Artificial Sequence
  Description of Artificial Sequence: Synthetic oligonucleotide
  Target: LAMA2; (+) strand; PAM type: YTN; PAM sequence: TTA
tatacttaaagtatacatta

SEQ ID NO: 391010 - DNA, 20 bp, Artificial Sequence
  Description of Artificial Sequence: Synthetic oligonucleotide
  Target: LAMA2; (+) strand; PAM type: YTN; PAM sequence: CTT
aaagtatacattaactggag

SEQ ID NO: 391011 - DNA, 20 bp, Artificial Sequence
  Description of Artificial Sequence: Synthetic oligonucleotide
  Target: LAMA2; (+) strand; PAM type: YTN; PAM sequence: TTA
aagtatacattaactggagc

SEQ ID NO: 391012 - DNA, 20 bp, Artificial Sequence
  Description of Artificial Sequence: Synthetic oligonucleotide
  Target: LAMA2; (+) strand; PAM type: YTN; PAM sequence: TTA
actggagcagtgtcctccac

SEQ ID NO: 391013 - DNA, 20 bp, Artificial Sequence
  Description of Artificial Sequence: Synthetic oligonucleotide
  Target: LAMA2; (+) strand; PAM type: YTN; PAM sequence: CTG
gagcagtgtcctccactcac

SEQ ID NO: 391014 - DNA, 20 bp, Artificial Sequence
  Description of Artificial Sequence: Synthetic oligonucleotide
  Target: LAMA2; (+) strand; PAM type: YTN; PAM sequence: CTC
cactcacctagaatactcca

SEQ ID NO: 391015 - DNA, 20 bp, Artificial Sequence
  Description of Artificial Sequence: Synthetic oligonucleotide
  Target: LAMA2; (+) strand; PAM type: YTN; PAM sequence: CTC
acctagaatactccagtttt

SEQ ID NO: 391016 - DNA, 20 bp, Artificial Sequence
  Description of Artificial Sequence: Synthetic oligonucleotide
  Target: LAMA2; (+) strand; PAM type: YTN; PAM sequence: CTA
gaatactccagtttttcatg

SEQ ID NO: 391017 - DNA, 20 bp, Artificial Sequence
  Description of Artificial Sequence: Synthetic oligonucleotide
  Target: LAMA2; (+) strand; PAM type: YTN; PAM sequence: CTC
cagtttttcatgtattttac

SEQ ID NO: 391018 - DNA, 20 bp, Artificial Sequence
  Description of Artificial Sequence: Synthetic oligonucleotide
  Target: LAMA2; (+) strand; PAM type: YTN; PAM sequence: TTT
ttcatgtattttactactct

SEQ ID NO: 391019 - DNA, 20 bp, Artificial Sequence
  Description of Artificial Sequence: Synthetic oligonucleotide
  Target: LAMA2; (+) strand; PAM type: YTN; PAM sequence: TTT
tcatgtattttactactctt

SEQ ID NO: 391020 - DNA, 20 bp, Artificial Sequence
  Description of Artificial Sequence: Synthetic oligonucleotide
  Target: LAMA2; (+) strand; PAM type: YTN; PAM sequence: TTT
catgtattttactactcttt

SEQ ID NO: 391021 - DNA, 20 bp, Artificial Sequence
  Description of Artificial Sequence: Synthetic oligonucleotide
  Target: LAMA2; (+) strand; PAM type: YTN; PAM sequence: TTC
atgtattttactactctttc

SEQ ID NO: 391022 - DNA, 20 bp, Artificial Sequence
  Description of Artificial Sequence: Synthetic oligonucleotide
  Target: LAMA2; (+) strand; PAM type: YTN; PAM sequence: TTT
tactactctttctggatgtt

SEQ ID NO: 391023 - DNA, 20 bp, Artificial Sequence
  Description of Artificial Sequence: Synthetic oligonucleotide
  Target: LAMA2; (+) strand; PAM type: YTN; PAM sequence: TTT
actactctttctggatgtta

SEQ ID NO: 391024 - DNA, 20 bp, Artificial Sequence
  Description of Artificial Sequence: Synthetic oligonucleotide
  Target: LAMA2; (+) strand; PAM type: YTN; PAM sequence: TTA
ctactctttctggatgttag

SEQ ID NO: 391025 - DNA, 20 bp, Artificial Sequence
  Description of Artificial Sequence: Synthetic oligonucleotide
  Target: LAMA2; (+) strand; PAM type: YTN; PAM sequence: CTA
ctctttctggatgttagcca

SEQ ID NO: 391026 - DNA, 20 bp, Artificial Sequence
  Description of Artificial Sequence: Synthetic oligonucleotide
  Target: LAMA2; (+) strand; PAM type: YTN; PAM sequence: CTC
tttctggatgttagccaaac

SEQ ID NO: 391027 - DNA, 20 bp, Artificial Sequence
  Description of Artificial Sequence: Synthetic oligonucleotide
  Target: LAMA2; (+) strand; PAM type: YTN; PAM sequence: CTT
tctggatgttagccaaacac

SEQ ID NO: 391028 - DNA, 20 bp, Artificial Sequence
  Description of Artificial Sequence: Synthetic oligonucleotide
  Target: LAMA2; (+) strand; PAM type: YTN; PAM sequence: TTT
ctggatgttagccaaacaca

SEQ ID NO: 391029 - DNA, 20 bp, Artificial Sequence
  Description of Artificial Sequence: Synthetic oligonucleotide
  Target: LAMA2; (+) strand; PAM type: YTN; PAM sequence: TTC
tggatgttagccaaacacaa

SEQ ID NO: 391030 - DNA, 20 bp, Artificial Sequence
  Description of Artificial Sequence: Synthetic oligonucleotide
  Target: LAMA2; (+) strand; PAM type: YTN; PAM sequence: CTG
gatgttagccaaacacaaaa

SEQ ID NO: 391031 - DNA, 20 bp, Artificial Sequence
  Description of Artificial Sequence: Synthetic oligonucleotide
  Target: LAMA2; (+) strand; PAM type: YTN; PAM sequence: TTA
gccaaacacaaaatagtgtt

SEQ ID NO: 391032 - DNA, 20 bp, Artificial Sequence
  Description of Artificial Sequence: Synthetic oligonucleotide
  Target: LAMA2; (+) strand; PAM type: YTN; PAM sequence: TTG
ggtacaaacaaaatataagt

SEQ ID NO: 391033 - DNA, 20 bp, Artificial Sequence
  Description of Artificial Sequence: Synthetic oligonucleotide
  Target: LAMA2; (+) strand; PAM type: YTN; PAM sequence: CTG
tgagacaaaaaaaaagtgta

SEQ ID NO: 391034 - DNA, 20 bp, Artificial Sequence
  Description of Artificial Sequence: Synthetic oligonucleotide
  Target: LAMA2; (+) strand; PAM type: YTN; PAM sequence: TTT
catctccaattccctgtaca

SEQ ID NO: 391035 - DNA, 20 bp, Artificial Sequence
  Description of Artificial Sequence: Synthetic oligonucleotide
  Target: LAMA2; (+) strand; PAM type: YTN; PAM sequence: TTC
atctccaattccctgtacat

SEQ ID NO: 391036 - DNA, 20 bp, Artificial Sequence
  Description of Artificial Sequence: Synthetic oligonucleotide
  Target: LAMA2; (+) strand; PAM type: YTN; PAM sequence: CTC
caattccctgtacatgtaag

SEQ ID NO: 391037 - DNA, 20 bp, Artificial Sequence
  Description of Artificial Sequence: Synthetic oligonucleotide
  Target: LAMA2; (+) strand; PAM type: YTN; PAM sequence: TTC
cctgtacatgtaagttcaga

SEQ ID NO: 391038 - DNA, 20 bp, Artificial Sequence
  Description of Artificial Sequence: Synthetic oligonucleotide
  Target: LAMA2; (+) strand; PAM type: YTN; PAM sequence: CTG
tacatgtaagttcagataag

SEQ ID NO: 391039 - DNA, 20 bp, Artificial Sequence
  Description of Artificial Sequence: Synthetic oligonucleotide
  Target: LAMA2; (+) strand; PAM type: YTN; PAM sequence: TTC
agataagttacttaacctcc

SEQ ID NO: 391040 - DNA, 20 bp, Artificial Sequence
  Description of Artificial Sequence: Synthetic oligonucleotide
  Target: LAMA2; (+) strand; PAM type: YTN; PAM sequence: TTA
cttaacctcctcataccttc

SEQ ID NO: 391041 - DNA, 20 bp, Artificial Sequence
  Description of Artificial Sequence: Synthetic oligonucleotide
  Target: LAMA2; (+) strand; PAM type: YTN; PAM sequence: CTT
aacctcctcataccttcctt

SEQ ID NO: 391042 - DNA, 20 bp, Artificial Sequence
  Description of Artificial Sequence: Synthetic oligonucleotide
  Target: LAMA2; (+) strand; PAM type: YTN; PAM sequence: TTA
acctcctcataccttccttt

SEQ ID NO: 391043 - DNA, 20 bp, Artificial Sequence
  Description of Artificial Sequence: Synthetic oligonucleotide
  Target: LAMA2; (+) strand; PAM type: YTN; PAM sequence: CTC
ctcataccttccttttcacc

SEQ ID NO: 391044 - DNA, 20 bp, Artificial Sequence
  Description of Artificial Sequence: Synthetic oligonucleotide
  Target: LAMA2; (+) strand; PAM type: YTN; PAM sequence: CTC
ataccttccttttcacctgt

SEQ ID NO: 391045 - DNA, 20 bp, Artificial Sequence
  Description of Artificial Sequence: Synthetic oligonucleotide
  Target: LAMA2; (+) strand; PAM type: YTN; PAM sequence: CTT
ccttttcacctgtgtaaaaa

SEQ ID NO: 391046 - DNA, 20 bp, Artificial Sequence
  Description of Artificial Sequence: Synthetic oligonucleotide
  Target: LAMA2; (+) strand; PAM type: YTN; PAM sequence: TTC
cttttcacctgtgtaaaaag

SEQ ID NO: 391047 - DNA, 20 bp, Artificial Sequence
  Description of Artificial Sequence: Synthetic oligonucleotide
  Target: LAMA2; (+) strand; PAM type: YTN; PAM sequence: CTT
ttcacctgtgtaaaaagagg

SEQ ID NO: 391048 - DNA, 20 bp, Artificial Sequence
  Description of Artificial Sequence: Synthetic oligonucleotide
  Target: LAMA2; (+) strand; PAM type: YTN; PAM sequence: TTT
tcacctgtgtaaaaagaggg

SEQ ID NO: 391049 - DNA, 20 bp, Artificial Sequence
  Description of Artificial Sequence: Synthetic oligonucleotide
  Target: LAMA2; (+) strand; PAM type: YTN; PAM sequence: TTT
cacctgtgtaaaaagaggga

SEQ ID NO: 391050 - DNA, 20 bp, Artificial Sequence
  Description of Artificial Sequence: Synthetic oligonucleotide
  Target: LAMA2; (+) strand; PAM type: YTN; PAM sequence: TTC
acctgtgtaaaaagagggat

SEQ ID NO: 391051 - DNA, 20 bp, Artificial Sequence
  Description of Artificial Sequence: Synthetic oligonucleotide
  Target: LAMA2; (+) strand; PAM type: YTN; PAM sequence: CTG
tgtaaaaagagggatgatgc

SEQ ID NO: 391052 - DNA, 20 bp, Artificial Sequence
  Description of Artificial Sequence: Synthetic oligonucleotide
  Target: LAMA2; (+) strand; PAM type: YTN; PAM sequence: CTT
ctatatatctctaaattcag

SEQ ID NO: 391053 - DNA, 20 bp, Artificial Sequence
  Description of Artificial Sequence: Synthetic oligonucleotide
  Target: LAMA2; (+) strand; PAM type: YTN; PAM sequence: TTC
tatatatctctaaattcagg

SEQ ID NO: 391054 - DNA, 20 bp, Artificial Sequence
  Description of Artificial Sequence: Synthetic oligonucleotide
  Target: LAMA2; (+) strand; PAM type: YTN; PAM sequence: CTA
tatatctctaaattcaggaa

SEQ ID NO: 391055 - DNA, 20 bp, Artificial Sequence
  Description of Artificial Sequence: Synthetic oligonucleotide
  Target: LAMA2; (+) strand; PAM type: YTN; PAM sequence: CTC
taaattcaggaagagtaagt

SEQ ID NO: 391056 - DNA, 20 bp, Artificial Sequence
  Description of Artificial Sequence: Synthetic oligonucleotide
  Target: LAMA2; (+) strand; PAM type: YTN; PAM sequence: CTA
aattcaggaagagtaagtga

SEQ ID NO: 391057 - DNA, 20 bp, Artificial Sequence
  Description of Artificial Sequence: Synthetic oligonucleotide
  Target: LAMA2; (+) strand; PAM type: YTN; PAM sequence: TTC
aggaagagtaagtgagacac

SEQ ID NO: 391058 - DNA, 20 bp, Artificial Sequence
  Description of Artificial Sequence: Synthetic oligonucleotide
  Target: LAMA2; (+) strand; PAM type: YTN; PAM sequence: CTG
taagcctttgcaaacatgta

SEQ ID NO: 391059 - DNA, 20 bp, Artificial Sequence
  Description of Artificial Sequence: Synthetic oligonucleotide
  Target: LAMA2; (+) strand; PAM type: YTN; PAM sequence: CTT
tgcaaacatgtatataaatt

SEQ ID NO: 391060 - DNA, 20 bp, Artificial Sequence
  Description of Artificial Sequence: Synthetic oligonucleotide
  Target: LAMA2; (+) strand; PAM type: YTN; PAM sequence: TTT
gcaaacatgtatataaattt

SEQ ID NO: 391061 - DNA, 20 bp, Artificial Sequence
  Description of Artificial Sequence: Synthetic oligonucleotide
  Target: LAMA2; (+) strand; PAM type: YTN; PAM sequence: TTG
caaacatgtatataaatttg

SEQ ID NO: 391062 - DNA, 20 bp, Artificial Sequence
  Description of Artificial Sequence: Synthetic oligonucleotide
  Target: LAMA2; (+) strand; PAM type: YTN; PAM sequence: TTT
ggcataactattcacaatag

SEQ ID NO: 391063 - DNA, 20 bp, Artificial Sequence
  Description of Artificial Sequence: Synthetic oligonucleotide
  Target: LAMA2; (+) strand; PAM type: YTN; PAM sequence: TTG
gcataactattcacaatagc

SEQ ID NO: 391064 - DNA, 20 bp, Artificial Sequence
  Description of Artificial Sequence: Synthetic oligonucleotide
  Target: LAMA2; (+) strand; PAM type: YTN; PAM sequence: CTA
ttcacaatagcaaagacatg

SEQ ID NO: 391065 - DNA, 20 bp, Artificial Sequence
  Description of Artificial Sequence: Synthetic oligonucleotide
  Target: LAMA2; (+) strand; PAM type: YTN; PAM sequence: TTC
acaatagcaaagacatggaa

SEQ ID NO: 391066 - DNA, 20 bp, Artificial Sequence
  Description of Artificial Sequence: Synthetic oligonucleotide
  Target: LAMA2; (+) strand; PAM type: YTN; PAM sequence: CTA
agtgcccatcaataatagac

SEQ ID NO: 391067 - DNA, 20 bp, Artificial Sequence
  Description of Artificial Sequence: Synthetic oligonucleotide
  Target: LAMA2; (+) strand; PAM type: YTN; PAM sequence: CTG
gctaaagaaaatgtggtaca

SEQ ID NO: 391068 - DNA, 20 bp, Artificial Sequence
  Description of Artificial Sequence: Synthetic oligonucleotide
  Target: LAMA2; (+) strand; PAM type: YTN; PAM sequence: CTA
aagaaaatgtggtacataca

SEQ ID NO: 391069 - DNA, 20 bp, Artificial Sequence
  Description of Artificial Sequence: Synthetic oligonucleotide
  Target: LAMA2; (+) strand; PAM type: YTN; PAM sequence: CTA
tgcagccataaaaaagaatg

SEQ ID NO: 391070 - DNA, 20 bp, Artificial Sequence
  Description of Artificial Sequence: Synthetic oligonucleotide
  Target: LAMA2; (+) strand; PAM type: YTN; PAM sequence: TTC
atgtcctttgcagggacatg

SEQ ID NO: 391071 - DNA, 20 bp, Artificial Sequence
  Description of Artificial Sequence: Synthetic oligonucleotide
  Target: LAMA2; (+) strand; PAM type: YTN; PAM sequence: CTT
tgcagggacatggatggagc

SEQ ID NO: 391072 - DNA, 20 bp, Artificial Sequence
  Description of Artificial Sequence: Synthetic oligonucleotide
  Target: LAMA2; (+) strand; PAM type: YTN; PAM sequence: TTT
gcagggacatggatggagct

SEQ ID NO: 391073 - DNA, 20 bp, Artificial Sequence
  Description of Artificial Sequence: Synthetic oligonucleotide
  Target: LAMA2; (+) strand; PAM type: YTN; PAM sequence: TTG
cagggacatggatggagctg

SEQ ID NO: 391074 - DNA, 20 bp, Artificial Sequence
  Description of Artificial Sequence: Synthetic oligonucleotide
  Target: LAMA2; (+) strand; PAM type: YTN; PAM sequence: CTG
gaggacattacccttagcaa

SEQ ID NO: 391075 - DNA, 20 bp, Artificial Sequence
  Description of Artificial Sequence: Synthetic oligonucleotide
  Target: LAMA2; (+) strand; PAM type: YTN; PAM sequence: TTA
cccttagcaaactaacacag

SEQ ID NO: 391076 - DNA, 20 bp, Artificial Sequence
  Description of Artificial Sequence: Synthetic oligonucleotide
  Target: LAMA2; (+) strand; PAM type: YTN; PAM sequence: CTT
agcaaactaacacaggaaca

SEQ ID NO: 391077 - DNA, 20 bp, Artificial Sequence
  Description of Artificial Sequence: Synthetic oligonucleotide
  Target: LAMA2; (+) strand; PAM type: YTN; PAM sequence: TTA
gcaaactaacacaggaacag

SEQ ID NO: 391078 - DNA, 20 bp, Artificial Sequence
  Description of Artificial Sequence: Synthetic oligonucleotide
  Target: LAMA2; (+) strand; PAM type: YTN; PAM sequence: CTA
acacaggaacagaaaatcaa

SEQ ID NO: 391079 - DNA, 20 bp, Artificial Sequence
  Description of Artificial Sequence: Synthetic oligonucleotide
  Target: LAMA2; (+) strand; PAM type: YTN; PAM sequence: CTG
tatgtcccacttataaatgg

SEQ ID NO: 391080 - DNA, 20 bp, Artificial Sequence
  Description of Artificial Sequence: Synthetic oligonucleotide
  Target: LAMA2; (+) strand; PAM type: YTN; PAM sequence: CTT
ataaatgggagttaaatgat

SEQ ID NO: 391081 - DNA, 20 bp, Artificial Sequence
  Description of Artificial Sequence: Synthetic oligonucleotide
  Target: LAMA2; (+) strand; PAM type: YTN; PAM sequence: TTA
taaatgggagttaaatgatg

SEQ ID NO: 391082 - DNA, 20 bp, Artificial Sequence
  Description of Artificial Sequence: Synthetic oligonucleotide
  Target: LAMA2; (+) strand; PAM type: YTN; PAM sequence: TTA
aatgatgagaacacatagac

SEQ ID NO: 391083 - DNA, 20 bp, Artificial Sequence
  Description of Artificial Sequence: Synthetic oligonucleotide
  Target: LAMA2; (+) strand; PAM type: YTN; PAM sequence: TTC
actggggcctaccagagggc

SEQ ID NO: 391084 - DNA, 20 bp, Artificial Sequence
  Description of Artificial Sequence: Synthetic oligonucleotide
  Target: LAMA2; (+) strand; PAM type: YTN; PAM sequence: CTG
gggcctaccagagggcggag

SEQ ID NO: 391085 - DNA, 20 bp, Artificial Sequence
  Description of Artificial Sequence: Synthetic oligonucleotide
  Target: LAMA2; (+) strand; PAM type: YTN; PAM sequence: CTA
ccagagggcggaggatggga

SEQ ID NO: 391086 - DNA, 20 bp, Artificial Sequence
  Description of Artificial Sequence: Synthetic oligonucleotide
  Target: LAMA2; (+) strand; PAM type: YTN; PAM sequence: TTA
ggaagaataacttatgggca

SEQ ID NO: 391087 - DNA, 20 bp, Artificial Sequence
  Description of Artificial Sequence: Synthetic oligonucleotide
  Target: LAMA2; (+) strand; PAM type: YTN; PAM sequence: CTT
atgggcactgggcttaatac

SEQ ID NO: 391088 - DNA, 20 bp, Artificial Sequence
  Description of Artificial Sequence: Synthetic oligonucleotide
  Target: LAMA2; (+) strand; PAM type: YTN; PAM sequence: TTA
tgggcactgggcttaatacc

SEQ ID NO: 391089 - DNA, 20 bp, Artificial Sequence
  Description of Artificial Sequence: Synthetic oligonucleotide
  Target: LAMA2; (+) strand; PAM type: YTN; PAM sequence: CTG
ggcttaatacctgggtgatg

SEQ ID NO: 391090 - DNA, 20 bp, Artificial Sequence
  Description of Artificial Sequence: Synthetic oligonucleotide
  Target: LAMA2; (+) strand; PAM type: YTN; PAM sequence: CTT
aatacctgggtgatgaaata

SEQ ID NO: 391091 - DNA, 20 bp, Artificial Sequence
  Description of Artificial Sequence: Synthetic oligonucleotide
  Target: LAMA2; (+) strand; PAM type: YTN; PAM sequence: TTA
atacctgggtgatgaaataa

SEQ ID NO: 391092 - DNA, 20 bp, Artificial Sequence
  Description of Artificial Sequence: Synthetic oligonucleotide
  Target: LAMA2; (+) strand; PAM type: YTN; PAM sequence: CTG
ggtgatgaaataatctgtgc

SEQ ID NO: 391093 - DNA, 20 bp, Artificial Sequence
  Description of Artificial Sequence: Synthetic oligonucleotide
  Target: LAMA2; (+) strand; PAM type: YTN; PAM sequence: CTG
tgcaacaaaccccattatgc

SEQ ID NO: 391094 - DNA, 20 bp, Artificial Sequence
  Description of Artificial Sequence: Synthetic oligonucleotide
  Target: LAMA2; (+) strand; PAM type: YTN; PAM sequence: TTA
tgcatgggtttttttttttt

SEQ ID NO: 391095 - DNA, 20 bp, Artificial Sequence
  Description of Artificial Sequence: Synthetic oligonucleotide
  Target: LAMA2; (+) strand; PAM type: YTN; PAM sequence: TTT
tttttttttaacctgtgtaa

SEQ ID NO: 391096 - DNA, 20 bp, Artificial Sequence
  Description of Artificial Sequence: Synthetic oligonucleotide
  Target: LAMA2; (+) strand; PAM type: YTN; PAM sequence: TTT
ttttttttaacctgtgtaac

SEQ ID NO: 391097 - DNA, 20 bp, Artificial Sequence
  Description of Artificial Sequence: Synthetic oligonucleotide
  Target: LAMA2; (+) strand; PAM type: YTN; PAM sequence: TTT
tttttttaacctgtgtaaca

SEQ ID NO: 391098 - DNA, 20 bp, Artificial Sequence
  Description of Artificial Sequence: Synthetic oligonucleotide
  Target: LAMA2; (+) strand; PAM type: YTN; PAM sequence: TTT
ttttttaacctgtgtaacaa

SEQ ID NO: 391099 - DNA, 20 bp, Artificial Sequence
  Description of Artificial Sequence: Synthetic oligonucleotide
  Target: LAMA2; (+) strand; PAM type: YTN; PAM sequence: TTT
tttttaacctgtgtaacaaa

SEQ ID NO: 391100 - DNA, 20 bp, Artificial Sequence
  Description of Artificial Sequence: Synthetic oligonucleotide
  Target: LAMA2; (+) strand; PAM type: YTN; PAM sequence: TTT
ttttaacctgtgtaacaaat

SEQ ID NO: 391101 - DNA, 20 bp, Artificial Sequence
  Description of Artificial Sequence: Synthetic oligonucleotide
  Target: LAMA2; (+) strand; PAM type: YTN; PAM sequence: TTT
tttaacctgtgtaacaaatc

SEQ ID NO: 391102 - DNA, 20 bp, Artificial Sequence
  Description of Artificial Sequence: Synthetic oligonucleotide
  Target: LAMA2; (+) strand; PAM type: YTN; PAM sequence: TTT
ttaacctgtgtaacaaatct

SEQ ID NO: 391103 - DNA, 20 bp, Artificial Sequence
  Description of Artificial Sequence: Synthetic oligonucleotide
  Target: LAMA2; (+) strand; PAM type: YTN; PAM sequence: TTT
taacctgtgtaacaaatctg

SEQ ID NO: 391104 - DNA, 20 bp, Artificial Sequence
  Description of Artificial Sequence: Synthetic oligonucleotide
  Target: LAMA2; (+) strand; PAM type: YTN; PAM sequence: TTT
aacctgtgtaacaaatctgc

SEQ ID NO: 391105 - DNA, 20 bp, Artificial Sequence
  Description of Artificial Sequence: Synthetic oligonucleotide
  Target: LAMA2; (+) strand; PAM type: YTN; PAM sequence: TTA
acctgtgtaacaaatctgca

SEQ ID NO: 391106 - DNA, 20 bp, Artificial Sequence
  Description of Artificial Sequence: Synthetic oligonucleotide
  Target: LAMA2; (+) strand; PAM type: YTN; PAM sequence: CTG
tgtaacaaatctgcacatcc

SEQ ID NO: 391107 - DNA, 20 bp, Artificial Sequence
  Description of Artificial Sequence: Synthetic oligonucleotide
  Target: LAMA2; (+) strand; PAM type: YTN; PAM sequence: CTG
cacatcctgcacatgtatcc

SEQ ID NO: 391108 - DNA, 20 bp, Artificial Sequence
  Description of Artificial Sequence: Synthetic oligonucleotide
  Target: LAMA2; (+) strand; PAM type: YTN; PAM sequence: CTG
cacatgtatccctgaactta

SEQ ID NO: 391109 - DNA, 20 bp, Artificial Sequence
  Description of Artificial Sequence: Synthetic oligonucleotide
  Target: LAMA2; (+) strand; PAM type: YTN; PAM sequence: CTG
aacttaaaagttaaaaaaat

SEQ ID NO: 391110 - DNA, 20 bp, Artificial Sequence
  Description of Artificial Sequence: Synthetic oligonucleotide
  Target: LAMA2; (+) strand; PAM type: YTN; PAM sequence: CTT
aaaagttaaaaaaatataaa

SEQ ID NO: 391111 - DNA, 20 bp, Artificial Sequence
  Description of Artificial Sequence: Synthetic oligonucleotide
  Target: LAMA2; (+) strand; PAM type: YTN; PAM sequence: TTA
aaagttaaaaaaatataaaa

SEQ ID NO: 391112 - DNA, 20 bp, Artificial Sequence
  Description of Artificial Sequence: Synthetic oligonucleotide
  Target: LAMA2; (+) strand; PAM type: YTN; PAM sequence: TTA
aaaaaatataaaaaatacaa

SEQ ID NO: 391113 - DNA, 20 bp, Artificial Sequence
  Description of Artificial Sequence: Synthetic oligonucleotide
  Target: LAMA2; (+) strand; PAM type: YTN; PAM sequence: TTC
tgaggtacagatgagcctga

SEQ ID NO: 391114 - DNA, 20 bp, Artificial Sequence
  Description of Artificial Sequence: Synthetic oligonucleotide
  Target: LAMA2; (+) strand; PAM type: YTN; PAM sequence: CTG
aggtacagatgagcctgact

SEQ ID NO: 391115 - DNA, 20 bp, Artificial Sequence
  Description of Artificial Sequence: Synthetic oligonucleotide
  Target: LAMA2; (+) strand; PAM type: YTN; PAM sequence: CTG
actgtgtaactcatccttta

SEQ ID NO: 391116 - DNA, 20 bp, Artificial Sequence
  Description of Artificial Sequence: Synthetic oligonucleotide
  Target: LAMA2; (+) strand; PAM type: YTN; PAM sequence: CTG
tgtaactcatcctttagcat

SEQ ID NO: 391117 - DNA, 20 bp, Artificial Sequence
  Description of Artificial Sequence: Synthetic oligonucleotide
  Target: LAMA2; (+) strand; PAM type: YTN; PAM sequence: CTC
atcctttagcatgctaaccc

SEQ ID NO: 391118 - DNA, 20 bp, Artificial Sequence
  Description of Artificial Sequence: Synthetic oligonucleotide
  Target: LAMA2; (+) strand; PAM type: YTN; PAM sequence: CTT
tagcatgctaacccgcatta

SEQ ID NO: 391119 - DNA, 20 bp, Artificial Sequence
  Description of Artificial Sequence: Synthetic oligonucleotide
  Target: LAMA2; (+) strand; PAM type: YTN; PAM sequence: TTT
agcatgctaacccgcattaa

SEQ ID NO: 391120 - DNA, 20 bp, Artificial Sequence
  Description of Artificial Sequence: Synthetic oligonucleotide
  Target: LAMA2; (+) strand; PAM type: YTN; PAM sequence: TTA
gcatgctaacccgcattaag

SEQ ID NO: 391121 - DNA, 20 bp, Artificial Sequence
  Description of Artificial Sequence: Synthetic oligonucleotide
  Target: LAMA2; (+) strand; PAM type: YTN; PAM sequence: CTA
acccgcattaagttgatgct

SEQ ID NO: 391122 - DNA, 20 bp, Artificial Sequence
  Description of Artificial Sequence: Synthetic oligonucleotide
  Target: LAMA2; (+) strand; PAM type: YTN; PAM sequence: TTA
agttgatgcttttggtgccg

SEQ ID NO: 391123 - DNA, 20 bp, Artificial Sequence
  Description of Artificial Sequence: Synthetic oligonucleotide
  Target: LAMA2; (+) strand; PAM type: YTN; PAM sequence: TTG
atgcttttggtgccgggaac

SEQ ID NO: 391124 - DNA, 20 bp, Artificial Sequence
  Description of Artificial Sequence: Synthetic oligonucleotide
  Target: LAMA2; (+) strand; PAM type: YTN; PAM sequence: CTT
ttggtgccgggaacctcacg

SEQ ID NO: 391125 - DNA, 20 bp, Artificial Sequence
  Description of Artificial Sequence: Synthetic oligonucleotide
  Target: LAMA2; (+) strand; PAM type: YTN; PAM sequence: TTT
tggtgccgggaacctcacgt

SEQ ID NO: 391126 - DNA, 20 bp, Artificial Sequence
  Description of Artificial Sequence: Synthetic oligonucleotide
  Target: LAMA2; (+) strand; PAM type: YTN; PAM sequence: TTT
ggtgccgggaacctcacgtc

SEQ ID NO: 391127 - DNA, 20 bp, Artificial Sequence
  Description of Artificial Sequence: Synthetic oligonucleotide
  Target: LAMA2; (+) strand; PAM type: YTN; PAM sequence: TTG
gtgccgggaacctcacgtct

SEQ ID NO: 391128 - DNA, 20 bp, Artificial Sequence
  Description of Artificial Sequence: Synthetic oligonucleotide
  Target: LAMA2; (+) strand; PAM type: YTN; PAM sequence: CTC
acgtctcctcctcttctgga

SEQ ID NO: 391129 - DNA, 20 bp, Artificial Sequence
  Description of Artificial Sequence: Synthetic oligonucleotide
  Target: LAMA2; (+) strand; PAM type: YTN; PAM sequence: CTC
ctcctcttctggaatagcct

SEQ ID NO: 391130 - DNA, 20 bp, Artificial Sequence
  Description of Artificial Sequence: Synthetic oligonucleotide
  Target: LAMA2; (+) strand; PAM type: YTN; PAM sequence: CTC
ctcttctggaatagcctaga

SEQ ID NO: 391131 - DNA, 20 bp, Artificial Sequence
  Description of Artificial Sequence: Synthetic oligonucleotide
  Target: LAMA2; (+) strand; PAM type: YTN; PAM sequence: CTC
ttctggaatagcctagagag

SEQ ID NO: 391132 - DNA, 20 bp, Artificial Sequence
  Description of Artificial Sequence: Synthetic oligonucleotide
  Target: LAMA2; (+) strand; PAM type: YTN; PAM sequence: CTT
ctggaatagcctagagagga

SEQ ID NO: 391133 - DNA, 20 bp, Artificial Sequence
  Description of Artificial Sequence: Synthetic oligonucleotide
  Target: LAMA2; (+) strand; PAM type: YTN; PAM sequence: TTC
tggaatagcctagagaggaa

SEQ ID NO: 391134 - DNA, 20 bp, Artificial Sequence
  Description of Artificial Sequence: Synthetic oligonucleotide
  Target: LAMA2; (+) strand; PAM type: YTN; PAM sequence: CTG
gaatagcctagagaggaagc

SEQ ID NO: 391135 - DNA, 20 bp, Artificial Sequence
  Description of Artificial Sequence: Synthetic oligonucleotide
  Target: LAMA2; (+) strand; PAM type: YTN; PAM sequence: CTA
gagaggaagctcttcttctg

SEQ ID NO: 391136 - DNA, 20 bp, Artificial Sequence
  Description of Artificial Sequence: Synthetic oligonucleotide
  Target: LAMA2; (+) strand; PAM type: YTN; PAM sequence: CTC
ttcttctgtgtttagaggga

SEQ ID NO: 391137 - DNA, 20 bp, Artificial Sequence
  Description of Artificial Sequence: Synthetic oligonucleotide
  Target: LAMA2; (+) strand; PAM type: YTN; PAM sequence: CTT
cttctgtgtttagagggaag

SEQ ID NO: 391138 - DNA, 20 bp, Artificial Sequence
  Description of Artificial Sequence: Synthetic oligonucleotide
  Target: LAMA2; (+) strand; PAM type: YTN; PAM sequence: TTC
ttctgtgtttagagggaagg

SEQ ID NO: 391139 - DNA, 20 bp, Artificial Sequence
  Description of Artificial Sequence: Synthetic oligonucleotide
  Target: LAMA2; (+) strand; PAM type: YTN; PAM sequence: CTT
ctgtgtttagagggaaggta

SEQ ID NO: 391140 - DNA, 20 bp, Artificial Sequence
  Description of Artificial Sequence: Synthetic oligonucleotide
  Target: LAMA2; (+) strand; PAM type: YTN; PAM sequence: TTC
tgtgtttagagggaaggtat

SEQ ID NO: 391141 - DNA, 20 bp, Artificial Sequence
  Description of Artificial Sequence: Synthetic oligonucleotide
  Target: LAMA2; (+) strand; PAM type: YTN; PAM sequence: CTG
tgtttagagggaaggtatct

SEQ ID NO: 391142 - DNA, 20 bp, Artificial Sequence
  Description of Artificial Sequence: Synthetic oligonucleotide
  Target: LAMA2; (+) strand; PAM type: YTN; PAM sequence: TTT
agagggaaggtatctccttc

SEQ ID NO: 391143 - DNA, 20 bp, Artificial Sequence
  Description of Artificial Sequence: Synthetic oligonucleotide
  Target: LAMA2; (+) strand; PAM type: YTN; PAM sequence: TTA
gagggaaggtatctccttca

SEQ ID NO: 391144 - DNA, 20 bp, Artificial Sequence
  Description of Artificial Sequence: Synthetic oligonucleotide
  Target: LAMA2; (+) strand; PAM type: YTN; PAM sequence: CTC
cttcagtaagcactgtgctg

SEQ ID NO: 391145 - DNA, 20 bp, Artificial Sequence
  Description of Artificial Sequence: Synthetic oligonucleotide
  Target: LAMA2; (+) strand; PAM type: YTN; PAM sequence: CTT
cagtaagcactgtgctggcc

SEQ ID NO: 391146 - DNA, 20 bp, Artificial Sequence
  Description of Artificial Sequence: Synthetic oligonucleotide
  Target: LAMA2; (+) strand; PAM type: YTN; PAM sequence: TTC
agtaagcactgtgctggccc

SEQ ID NO: 391147 - DNA, 20 bp, Artificial Sequence
  Description of Artificial Sequence: Synthetic oligonucleotide
  Target: LAMA2; (+) strand; PAM type: YTN; PAM sequence: CTG
tgctggccctgaagagtctt

SEQ ID NO: 391148 - DNA, 20 bp, Artificial Sequence
  Description of Artificial Sequence: Synthetic oligonucleotide
  Target: LAMA2; (+) strand; PAM type: YTN; PAM sequence: CTG
gccctgaagagtcttcctac

SEQ ID NO: 391149 - DNA, 20 bp, Artificial Sequence
  Description of Artificial Sequence: Synthetic oligonucleotide
  Target: LAMA2; (+) strand; PAM type: YTN; PAM sequence: CTG
aagagtcttcctaccctctt

SEQ ID NO: 391150 - DNA, 20 bp, Artificial Sequence
  Description of Artificial Sequence: Synthetic oligonucleotide
  Target: LAMA2; (+) strand; PAM type: YTN; PAM sequence: CTT
cctaccctcttcctgccccc

SEQ ID NO: 391151 - DNA, 20 bp, Artificial Sequence
  Description of Artificial Sequence: Synthetic oligonucleotide
  Target: LAMA2; (+) strand; PAM type: YTN; PAM sequence: TTC
ctaccctcttcctgccccct

SEQ ID NO: 391152 - DNA, 20 bp, Artificial Sequence
  Description of Artificial Sequence: Synthetic oligonucleotide
  Target: LAMA2; (+) strand; PAM type: YTN; PAM sequence: CTA
ccctcttcctgccccctact

SEQ ID NO: 391153 - DNA, 20 bp, Artificial Sequence
  Description of Artificial Sequence: Synthetic oligonucleotide
  Target: LAMA2; (+) strand; PAM type: YTN; PAM sequence: CTC
ttcctgccccctactgccac

SEQ ID NO: 391154 - DNA, 20 bp, Artificial Sequence
  Description of Artificial Sequence: Synthetic oligonucleotide
  Target: LAMA2; (+) strand; PAM type: YTN; PAM sequence: CTT
cctgccccctactgccactc

SEQ ID NO: 391155 - DNA, 20 bp, Artificial Sequence
  Description of Artificial Sequence: Synthetic oligonucleotide
  Target: LAMA2; (+) strand; PAM type: YTN; PAM sequence: TTC
ctgccccctactgccactcc

SEQ ID NO: 391156 - DNA, 20 bp, Artificial Sequence
  Description of Artificial Sequence: Synthetic oligonucleotide
  Target: LAMA2; (+) strand; PAM type: YTN; PAM sequence: CTG
ccccctactgccactcccac

SEQ ID NO: 391157 - DNA, 20 bp, Artificial Sequence
  Description of Artificial Sequence: Synthetic oligonucleotide
  Target: LAMA2; (+) strand; PAM type: YTN; PAM sequence: CTA
ctgccactcccaccccacca

SEQ ID NO: 391158 - DNA, 20 bp, Artificial Sequence
  Description of Artificial Sequence: Synthetic oligonucleotide
  Target: LAMA2; (+) strand; PAM type: YTN; PAM sequence: CTG
ccactcccaccccaccagcg

SEQ ID NO: 391159 - DNA, 20 bp, Artificial Sequence
  Description of Artificial Sequence: Synthetic oligonucleotide
  Target: LAMA2; (+) strand; PAM type: YTN; PAM sequence: CTC
ccaccccaccagcgtggaac

SEQ ID NO: 391160 - DNA, 20 bp, Artificial Sequence
  Description of Artificial Sequence: Synthetic oligonucleotide
  Target: LAMA2; (+) strand; PAM type: YTN; PAM sequence: CTT
cgtgtgtattcaaaggtcca

SEQ ID NO: 391161 - DNA, 20 bp, Artificial Sequence
  Description of Artificial Sequence: Synthetic oligonucleotide
  Target: LAMA2; (+) strand; PAM type: YTN; PAM sequence: TTC
gtgtgtattcaaaggtccag

SEQ ID NO: 391162 - DNA, 20 bp, Artificial Sequence
  Description of Artificial Sequence: Synthetic oligonucleotide
  Target: LAMA2; (+) strand; PAM type: YTN; PAM sequence: TTC
aaaggtccagtttgaattac

SEQ ID NO: 391163 - DNA, 20 bp, Artificial Sequence
  Description of Artificial Sequence: Synthetic oligonucleotide
  Target: LAMA2; (+) strand; PAM type: YTN; PAM sequence: TTT
gaattactgtgaggccagtg

SEQ ID NO: 391164 - DNA, 20 bp, Artificial Sequence
  Description of Artificial Sequence: Synthetic oligonucleotide
  Target: LAMA2; (+) strand; PAM type: YTN; PAM sequence: TTG
aattactgtgaggccagtgg

SEQ ID NO: 391165 - DNA, 20 bp, Artificial Sequence
  Description of Artificial Sequence: Synthetic oligonucleotide
  Target: LAMA2; (+) strand; PAM type: YTN; PAM sequence: TTA
ctgtgaggccagtggctaga

SEQ ID NO: 391166 - DNA, 20 bp, Artificial Sequence
  Description of Artificial Sequence: Synthetic oligonucleotide
  Target: LAMA2; (+) strand; PAM type: YTN; PAM sequence: CTG
tgaggccagtggctagaaag

SEQ ID NO: 391167 - DNA, 20 bp, Artificial Sequence
  Description of Artificial Sequence: Synthetic oligonucleotide
  Target: LAMA2; (+) strand; PAM type: YTN; PAM sequence: CTA
gaaagcagtgtagttgggac

SEQ ID NO: 391168 - DNA, 20 bp, Artificial Sequence
  Description of Artificial Sequence: Synthetic oligonucleotide
  Target: LAMA2; (+) strand; PAM type: YTN; PAM sequence: TTG
ggactggagattcacatgcc

SEQ ID NO: 391169 - DNA, 20 bp, Artificial Sequence
  Description of Artificial Sequence: Synthetic oligonucleotide
  Target: LAMA2; (+) strand; PAM type: YTN; PAM sequence: CTG
gagattcacatgcctggctc

SEQ ID NO: 391170 - DNA, 20 bp, Artificial Sequence
  Description of Artificial Sequence: Synthetic oligonucleotide
  Target: LAMA2; (+) strand; PAM type: YTN; PAM sequence: TTC
acatgcctggctcttctccc

SEQ ID NO: 391171 - DNA, 20 bp, Artificial Sequence
  Description of Artificial Sequence: Synthetic oligonucleotide
  Target: LAMA2; (+) strand; PAM type: YTN; PAM sequence: CTG
gctcttctcccaagcttcaa

SEQ ID NO: 391172 - DNA, 20 bp, Artificial Sequence
  Description of Artificial Sequence: Synthetic oligonucleotide
  Target: LAMA2; (+) strand; PAM type: YTN; PAM sequence: CTC
ttctcccaagcttcaactgt

SEQ ID NO: 391173 - DNA, 20 bp, Artificial Sequence
  Description of Artificial Sequence: Synthetic oligonucleotide
  Target: LAMA2; (+) strand; PAM type: YTN; PAM sequence: CTT
ctcccaagcttcaactgtag

SEQ ID NO: 391174 - DNA, 20 bp, Artificial Sequence
  Description of Artificial Sequence: Synthetic oligonucleotide
  Target: LAMA2; (+) strand; PAM type: YTN; PAM sequence: TTC
tcccaagcttcaactgtagc

SEQ ID NO: 391175 - DNA, 20 bp, Artificial Sequence
  Description of Artificial Sequence: Synthetic oligonucleotide
  Target: LAMA2; (+) strand; PAM type: YTN; PAM sequence: CTC
ccaagcttcaactgtagctc

SEQ ID NO: 391176 - DNA, 20 bp, Artificial Sequence
  Description of Artificial Sequence: Synthetic oligonucleotide
  Target: LAMA2; (+) strand; PAM type: YTN; PAM sequence: CTT
caactgtagctcttgagcag

SEQ ID NO: 391177 - DNA, 20 bp, Artificial Sequence
  Description of Artificial Sequence: Synthetic oligonucleotide
  Target: LAMA2; (+) strand; PAM type: YTN; PAM sequence: TTC
aactgtagctcttgagcagc

SEQ ID NO: 391178 - DNA, 20 bp, Artificial Sequence
  Description of Artificial Sequence: Synthetic oligonucleotide
  Target: LAMA2; (+) strand; PAM type: YTN; PAM sequence: CTG
tagctcttgagcagcagctt

SEQ ID NO: 391179 - DNA, 20 bp, Artificial Sequence
  Description of Artificial Sequence: Synthetic oligonucleotide
  Target: LAMA2; (+) strand; PAM type: YTN; PAM sequence: CTC
ttgagcagcagcttcctctg

SEQ ID NO: 391180 - DNA, 20 bp, Artificial Sequence
  Description of Artificial Sequence: Synthetic oligonucleotide
  Target: LAMA2; (+) strand; PAM type: YTN; PAM sequence: CTT
gagcagcagcttcctctgag

SEQ ID NO: 391181 - DNA, 20 bp, Artificial Sequence
  Description of Artificial Sequence: Synthetic oligonucleotide
  Target: LAMA2; (+) strand; PAM type: YTN; PAM sequence: TTG
agcagcagcttcctctgagc

SEQ ID NO: 391182 - DNA, 20 bp, Artificial Sequence
  Description of Artificial Sequence: Synthetic oligonucleotide
  Target: LAMA2; (+) strand; PAM type: YTN; PAM sequence: CTT
cctctgagcttctaaaaaat

SEQ ID NO: 391183 - DNA, 20 bp, Artificial Sequence
  Description of Artificial Sequence: Synthetic oligonucleotide
  Target: LAMA2; (+) strand; PAM type: YTN; PAM sequence: TTC
ctctgagcttctaaaaaatg

SEQ ID NO: 391184 - DNA, 20 bp, Artificial Sequence
  Description of Artificial Sequence: Synthetic oligonucleotide
  Target: LAMA2; (+) strand; PAM type: YTN; PAM sequence: CTC
tgagcttctaaaaaatgccc

SEQ ID NO: 391185 - DNA, 20 bp, Artificial Sequence
  Description of Artificial Sequence: Synthetic oligonucleotide
  Target: LAMA2; (+) strand; PAM type: YTN; PAM sequence: CTG
agcttctaaaaaatgcccag

SEQ ID NO: 391186 - DNA, 20 bp, Artificial Sequence
  Description of Artificial Sequence: Synthetic oligonucleotide
  Target: LAMA2; (+) strand; PAM type: YTN; PAM sequence: CTT
ctaaaaaatgcccagaaaat

SEQ ID NO: 391187 - DNA, 20 bp, Artificial Sequence
  Description of Artificial Sequence: Synthetic oligonucleotide
  Target: LAMA2; (+) strand; PAM type: YTN; PAM sequence: TTC
taaaaaatgcccagaaaatt

SEQ ID NO: 391188 - DNA, 20 bp, Artificial Sequence
  Description of Artificial Sequence: Synthetic oligonucleotide
  Target: LAMA2; (+) strand; PAM type: YTN; PAM sequence: CTA
aaaaatgcccagaaaattgc

SEQ ID NO: 391189 - DNA, 20 bp, Artificial Sequence
  Description of Artificial Sequence: Synthetic oligonucleotide
  Target: LAMA2; (+) strand; PAM type: YTN; PAM sequence: TTG
cccagccaaccacatttcct

SEQ ID NO: 391190 - DNA, 20 bp, Artificial Sequence
  Description of Artificial Sequence: Synthetic oligonucleotide
  Target: LAMA2; (+) strand; PAM type: YTN; PAM sequence: TTT
cctggcaagcatagcaccag

SEQ ID NO: 391191 - DNA, 20 bp, Artificial Sequence
  Description of Artificial Sequence: Synthetic oligonucleotide
  Target: LAMA2; (+) strand; PAM type: YTN; PAM sequence: TTC
ctggcaagcatagcaccagg

SEQ ID NO: 391192 - DNA, 20 bp, Artificial Sequence
  Description of Artificial Sequence: Synthetic oligonucleotide
  Target: LAMA2; (+) strand; PAM type: YTN; PAM sequence: CTG
gcaagcatagcaccaggcat

SEQ ID NO: 391193 - DNA, 20 bp, Artificial Sequence
  Description of Artificial Sequence: Synthetic oligonucleotide
  Target: LAMA2; (+) strand; PAM type: YTN; PAM sequence: TTT
gagtgctattagataggctt

SEQ ID NO: 391194 - DNA, 20 bp, Artificial Sequence
  Description of Artificial Sequence: Synthetic oligonucleotide
  Target: LAMA2; (+) strand; PAM type: YTN; PAM sequence: TTG
agtgctattagataggcttt

SEQ ID NO: 391195 - DNA, 20 bp, Artificial Sequence
  Description of Artificial Sequence: Synthetic oligonucleotide
  Target: LAMA2; (+) strand; PAM type: YTN; PAM sequence: CTA
ttagataggctttagaactt

SEQ ID NO: 391196 - DNA, 20 bp, Artificial Sequence
  Description of Artificial Sequence: Synthetic oligonucleotide
  Target: LAMA2; (+) strand; PAM type: YTN; PAM sequence: TTA
gataggctttagaacttcca

SEQ ID NO: 391197 - DNA, 20 bp, Artificial Sequence
  Description of Artificial Sequence: Synthetic oligonucleotide
  Target: LAMA2; (+) strand; PAM type: YTN; PAM sequence: CTT
tagaacttccaagggatcat

SEQ ID NO: 391198 - DNA, 20 bp, Artificial Sequence
  Description of Artificial Sequence: Synthetic oligonucleotide
  Target: LAMA2; (+) strand; PAM type: YTN; PAM sequence: TTT
agaacttccaagggatcatt

SEQ ID NO: 391199 - DNA, 20 bp, Artificial Sequence
  Description of Artificial Sequence: Synthetic oligonucleotide
  Target: LAMA2; (+) strand; PAM type: YTN; PAM sequence: TTA
gaacttccaagggatcattg

SEQ ID NO: 391200 - DNA, 20 bp, Artificial Sequence
  Description of Artificial Sequence: Synthetic oligonucleotide
  Target: LAMA2; (+) strand; PAM type: YTN; PAM sequence: CTT
ccaagggatcattggtttga

SEQ ID NO: 391201 - DNA, 20 bp, Artificial Sequence
  Description of Artificial Sequence: Synthetic oligonucleotide
  Target: LAMA2; (+) strand; PAM type: YTN; PAM sequence: TTC
caagggatcattggtttgat

SEQ ID NO: 391202 - DNA, 20 bp, Artificial Sequence
  Description of Artificial Sequence: Synthetic oligonucleotide
  Target: LAMA2; (+) strand; PAM type: YTN; PAM sequence: TTG
gtttgattgtcattgtatcc

SEQ ID NO: 391203 - DNA, 20 bp, Artificial Sequence
  Description of Artificial Sequence: Synthetic oligonucleotide
  Target: LAMA2; (+) strand; PAM type: YTN; PAM sequence: TTT
gattgtcattgtatccacca

SEQ ID NO: 391204 - DNA, 20 bp, Artificial Sequence
  Description of Artificial Sequence: Synthetic oligonucleotide
  Target: LAMA2; (+) strand; PAM type: YTN; PAM sequence: TTG
attgtcattgtatccaccaa

SEQ ID NO: 391205 - DNA, 20 bp, Artificial Sequence
  Description of Artificial Sequence: Synthetic oligonucleotide
  Target: LAMA2; (+) strand; PAM type: YTN; PAM sequence: TTG
tcattgtatccaccaatcac

SEQ ID NO: 391206 - DNA, 20 bp, Artificial Sequence
  Description of Artificial Sequence: Synthetic oligonucleotide
  Target: LAMA2; (+) strand; PAM type: YTN; PAM sequence: TTG
tatccaccaatcacccaaca

SEQ ID NO: 391207 - DNA, 20 bp, Artificial Sequence
  Description of Artificial Sequence: Synthetic oligonucleotide
  Target: LAMA2; (+) strand; PAM type: YTN; PAM sequence: CTA
tgacccacgacaatttgcca

SEQ ID NO: 391208 - DNA, 20 bp, Artificial Sequence
  Description of Artificial Sequence: Synthetic oligonucleotide
  Target: LAMA2; (+) strand; PAM type: YTN; PAM sequence: TTT
gccagacactatgcttggca

SEQ ID NO: 391209 - DNA, 20 bp, Artificial Sequence
  Description of Artificial Sequence: Synthetic oligonucleotide
  Target: LAMA2; (+) strand; PAM type: YTN; PAM sequence: TTG
ccagacactatgcttggcac

SEQ ID NO: 391210 - DNA, 20 bp, Artificial Sequence
  Description of Artificial Sequence: Synthetic oligonucleotide
  Target: LAMA2; (+) strand; PAM type: YTN; PAM sequence: CTA
tgcttggcactctgaggaat

SEQ ID NO: 391211 - DNA, 20 bp, Artificial Sequence
  Description of Artificial Sequence: Synthetic oligonucleotide
  Target: LAMA2; (+) strand; PAM type: YTN; PAM sequence: CTT
ggcactctgaggaataaaaa

SEQ ID NO: 391212 - DNA, 20 bp, Artificial Sequence
  Description of Artificial Sequence: Synthetic oligonucleotide
  Target: LAMA2; (+) strand; PAM type: YTN; PAM sequence: TTG
gcactctgaggaataaaaag

SEQ ID NO: 391213 - DNA, 20 bp, Artificial Sequence
  Description of Artificial Sequence: Synthetic oligonucleotide
  Target: LAMA2; (+) strand; PAM type: YTN; PAM sequence: CTC
tgaggaataaaaagagtaag

SEQ ID NO: 391214 - DNA, 20 bp, Artificial Sequence
  Description of Artificial Sequence: Synthetic oligonucleotide
  Target: LAMA2; (+) strand; PAM type: YTN; PAM sequence: CTG
aggaataaaaagagtaagac

SEQ ID NO: 391215 - DNA, 20 bp, Artificial Sequence
  Description of Artificial Sequence: Synthetic oligonucleotide
  Target: LAMA2; (+) strand; PAM type: YTN; PAM sequence: CTA
gccttttctaatctatctat

SEQ ID NO: 391216 - DNA, 20 bp, Artificial Sequence
  Description of Artificial Sequence: Synthetic oligonucleotide
  Target: LAMA2; (+) strand; PAM type: YTN; PAM sequence: CTT
ttctaatctatctatctaat

SEQ ID NO: 391217 - DNA, 20 bp, Artificial Sequence
  Description of Artificial Sequence: Synthetic oligonucleotide
  Target: LAMA2; (+) strand; PAM type: YTN; PAM sequence: TTT
tctaatctatctatctaatg

SEQ ID NO: 391218 - DNA, 20 bp, Artificial Sequence
  Description of Artificial Sequence: Synthetic oligonucleotide
  Target: LAMA2; (+) strand; PAM type: YTN; PAM sequence: TTT
ctaatctatctatctaatgg

SEQ ID NO: 391219 - DNA, 20 bp, Artificial Sequence
  Description of Artificial Sequence: Synthetic oligonucleotide
  Target: LAMA2; (+) strand; PAM type: YTN; PAM sequence: TTC
taatctatctatctaatgga

SEQ ID NO: 391220 - DNA, 20 bp, Artificial Sequence
  Description of Artificial Sequence: Synthetic oligonucleotide
  Target: LAMA2; (+) strand; PAM type: YTN; PAM sequence: CTA
atctatctatctaatggaga

SEQ ID NO: 391221 - DNA, 20 bp, Artificial Sequence
  Description of Artificial Sequence: Synthetic oligonucleotide
  Target: LAMA2; (+) strand; PAM type: YTN; PAM sequence: CTA
tctatctaatggagatatgg

SEQ ID NO: 391222 - DNA, 20 bp, Artificial Sequence
  Description of Artificial Sequence: Synthetic oligonucleotide
  Target: LAMA2; (+) strand; PAM type: YTN; PAM sequence: CTA
tctaatggagatatggcaaa

SEQ ID NO: 391223 - DNA, 20 bp, Artificial Sequence
  Description of Artificial Sequence: Synthetic oligonucleotide
  Target: LAMA2; (+) strand; PAM type: YTN; PAM sequence: CTA
atggagatatggcaaagcac

SEQ ID NO: 391224 - DNA, 20 bp, Artificial Sequence
  Description of Artificial Sequence: Synthetic oligonucleotide
  Target: LAMA2; (+) strand; PAM type: YTN; PAM sequence: CTA
acaaagtcactacccattag

SEQ ID NO: 391225 - DNA, 20 bp, Artificial Sequence
  Description of Artificial Sequence: Synthetic oligonucleotide
  Target: LAMA2; (+) strand; PAM type: YTN; PAM sequence: CTA
cccattagagttgtgaatag

SEQ ID NO: 391226 - DNA, 20 bp, Artificial Sequence
  Description of Artificial Sequence: Synthetic oligonucleotide
  Target: LAMA2; (+) strand; PAM type: YTN; PAM sequence: TTA
gagttgtgaatagtggtaat

SEQ ID NO: 391227 - DNA, 20 bp, Artificial Sequence
  Description of Artificial Sequence: Synthetic oligonucleotide
  Target: LAMA2; (+) strand; PAM type: YTN; PAM sequence: TTG
tgaatagtggtaataataat

SEQ ID NO: 391228 - DNA, 20 bp, Artificial Sequence
  Description of Artificial Sequence: Synthetic oligonucleotide
  Target: LAMA2; (+) strand; PAM type: YTN; PAM sequence: TTA
tttttgaaaatctaagaaaa

SEQ ID NO: 391229 - DNA, 20 bp, Artificial Sequence
  Description of Artificial Sequence: Synthetic oligonucleotide
  Target: LAMA2; (+) strand; PAM type: YTN; PAM sequence: TTT
ttgaaaatctaagaaaagag

SEQ ID NO: 391230 - DNA, 20 bp, Artificial Sequence
  Description of Artificial Sequence: Synthetic oligonucleotide
  Target: LAMA2; (+) strand; PAM type: YTN; PAM sequence: TTT
tgaaaatctaagaaaagaga

SEQ ID NO: 391231 - DNA, 20 bp, Artificial Sequence
  Description of Artificial Sequence: Synthetic oligonucleotide
  Target: LAMA2; (+) strand; PAM type: YTN; PAM sequence: TTT
gaaaatctaagaaaagagag

SEQ ID NO: 391232 - DNA, 20 bp, Artificial Sequence
  Description of Artificial Sequence: Synthetic oligonucleotide
  Target: LAMA2; (+) strand; PAM type: YTN; PAM sequence: TTG
aaaatctaagaaaagagagc

SEQ ID NO: 391233 - DNA, 20 bp, Artificial Sequence
  Description of Artificial Sequence: Synthetic oligonucleotide
  Target: LAMA2; (+) strand; PAM type: YTN; PAM sequence: CTA
agaaaagagagcatgtgcta

SEQ ID NO: 391234 - DNA, 20 bp, Artificial Sequence
  Description of Artificial Sequence: Synthetic oligonucleotide
  Target: LAMA2; (+) strand; PAM type: YTN; PAM sequence: CTA
gaataggtaaggagggcttc

SEQ ID NO: 391235 - DNA, 20 bp, Artificial Sequence
  Description of Artificial Sequence: Synthetic oligonucleotide
  Target: LAMA2; (+) strand; PAM type: YTN; PAM sequence: CTT
cactgagaagatggagttgg

SEQ ID NO: 391236 - DNA, 20 bp, Artificial Sequence
  Description of Artificial Sequence: Synthetic oligonucleotide
  Target: LAMA2; (+) strand; PAM type: YTN; PAM sequence: TTC
actgagaagatggagttgga

SEQ ID NO: 391237 - DNA, 20 bp, Artificial Sequence
  Description of Artificial Sequence: Synthetic oligonucleotide
  Target: LAMA2; (+) strand; PAM type: YTN; PAM sequence: CTG
agaagatggagttggaattg

SEQ ID NO: 391238 - DNA, 20 bp, Artificial Sequence
  Description of Artificial Sequence: Synthetic oligonucleotide
  Target: LAMA2; (+) strand; PAM type: YTN; PAM sequence: TTG
gaattgaatctcgaaagctg

SEQ ID NO: 391239 - DNA, 20 bp, Artificial Sequence
  Description of Artificial Sequence: Synthetic oligonucleotide
  Target: LAMA2; (+) strand; PAM type: YTN; PAM sequence: TTG
aatctcgaaagctggatttg

SEQ ID NO: 391240 - DNA, 20 bp, Artificial Sequence
  Description of Artificial Sequence: Synthetic oligonucleotide
  Target: LAMA2; (+) strand; PAM type: YTN; PAM sequence: CTC
gaaagctggatttgttttgg

SEQ ID NO: 391241 - DNA, 20 bp, Artificial Sequence
  Description of Artificial Sequence: Synthetic oligonucleotide
  Target: LAMA2; (+) strand; PAM type: YTN; PAM sequence: CTG
gatttgttttggataagtag

SEQ ID NO: 391242 - DNA, 20 bp, Artificial Sequence
  Description of Artificial Sequence: Synthetic oligonucleotide
  Target: LAMA2; (+) strand; PAM type: YTN; PAM sequence: TTT
gttttggataagtagagaag

SEQ ID NO: 391243 - DNA, 20 bp, Artificial Sequence
  Description of Artificial Sequence: Synthetic oligonucleotide
  Target: LAMA2; (+) strand; PAM type: YTN; PAM sequence: TTG
ttttggataagtagagaaga

SEQ ID NO: 391244 - DNA, 20 bp, Artificial Sequence
  Description of Artificial Sequence: Synthetic oligonucleotide
  Target: LAMA2; (+) strand; PAM type: YTN; PAM sequence: TTT
tggataagtagagaagagtt

SEQ ID NO: 391245 - DNA, 20 bp, Artificial Sequence
  Description of Artificial Sequence: Synthetic oligonucleotide
  Target: LAMA2; (+) strand; PAM type: YTN; PAM sequence: TTT
ggataagtagagaagagtta

SEQ ID NO: 391246 - DNA, 20 bp, Artificial Sequence
  Description of Artificial Sequence: Synthetic oligonucleotide
  Target: LAMA2; (+) strand; PAM type: YTN; PAM sequence: TTG
gataagtagagaagagttaa

SEQ ID NO: 391247 - DNA, 20 bp, Artificial Sequence
  Description of Artificial Sequence: Synthetic oligonucleotide
  Target: LAMA2; (+) strand; PAM type: YTN; PAM sequence: TTA
agaagcaaaagtatgaacaa

SEQ ID NO: 391248 - DNA, 20 bp, Artificial Sequence
  Description of Artificial Sequence: Synthetic oligonucleotide
  Target: LAMA2; (+) strand; PAM type: YTN; PAM sequence: CTT
tttttgagaatgttccaaaa

SEQ ID NO: 391249 - DNA, 20 bp, Artificial Sequence
  Description of Artificial Sequence: Synthetic oligonucleotide
  Target: LAMA2; (+) strand; PAM type: YTN; PAM sequence: TTT
ttttgagaatgttccaaaag

SEQ ID NO: 391250 - DNA, 20 bp, Artificial Sequence
  Description of Artificial Sequence: Synthetic oligonucleotide
  Target: LAMA2; (+) strand; PAM type: YTN; PAM sequence: TTT
tttgagaatgttccaaaagg

SEQ ID NO: 391251 - DNA, 20 bp, Artificial Sequence
  Description of Artificial Sequence: Synthetic oligonucleotide
  Target: LAMA2; (+) strand; PAM type: YTN; PAM sequence: TTT
ttgagaatgttccaaaagga

SEQ ID NO: 391252 - DNA, 20 bp, Artificial Sequence
  Description of Artificial Sequence: Synthetic oligonucleotide
  Target: LAMA2; (+) strand; PAM type: YTN; PAM sequence: TTT
tgagaatgttccaaaaggaa

SEQ ID NO: 391253 - DNA, 20 bp, Artificial Sequence
  Description of Artificial Sequence: Synthetic oligonucleotide
  Target: LAMA2; (+) strand; PAM type: YTN; PAM sequence: TTT
gagaatgttccaaaaggaag

SEQ ID NO: 391254 - DNA, 20 bp, Artificial Sequence
  Description of Artificial Sequence: Synthetic oligonucleotide
  Target: LAMA2; (+) strand; PAM type: YTN; PAM sequence: TTG
agaatgttccaaaaggaagt

SEQ ID NO: 391255 - DNA, 20 bp, Artificial Sequence
  Description of Artificial Sequence: Synthetic oligonucleotide
  Target: LAMA2; (+) strand; PAM type: YTN; PAM sequence: TTC
caaaaggaagtaggcaagaa

SEQ ID NO: 391256 - DNA, 20 bp, Artificial Sequence
  Description of Artificial Sequence: Synthetic oligonucleotide
  Target: LAMA2; (+) strand; PAM type: YTN; PAM sequence: TTG
gcaagattggttaggaaaat

SEQ ID NO: 391257 - DNA, 20 bp, Artificial Sequence
  Description of Artificial Sequence: Synthetic oligonucleotide
  Target: LAMA2; (+) strand; PAM type: YTN; PAM sequence: TTG
gttaggaaaattgtttttta

SEQ ID NO: 391258 - DNA, 20 bp, Artificial Sequence
  Description of Artificial Sequence: Synthetic oligonucleotide
  Target: LAMA2; (+) strand; PAM type: YTN; PAM sequence: TTA
ggaaaattgttttttagtcc

SEQ ID NO: 391259 - DNA, 20 bp, Artificial Sequence
  Description of Artificial Sequence: Synthetic oligonucleotide
  Target: LAMA2; (+) strand; PAM type: YTN; PAM sequence: TTG
ttttttagtcctgtatataa

SEQ ID NO: 391260 - DNA, 20 bp, Artificial Sequence
  Description of Artificial Sequence: Synthetic oligonucleotide
  Target: LAMA2; (+) strand; PAM type: YTN; PAM sequence: TTT
tttagtcctgtatataacaa

SEQ ID NO: 391261 - DNA, 20 bp, Artificial Sequence
  Description of Artificial Sequence: Synthetic oligonucleotide
  Target: LAMA2; (+) strand; PAM type: YTN; PAM sequence: TTT
ttagtcctgtatataacaac

SEQ ID NO: 391262 - DNA, 20 bp, Artificial Sequence
  Description of Artificial Sequence: Synthetic oligonucleotide
  Target: LAMA2; (+) strand; PAM type: YTN; PAM sequence: TTT
tagtcctgtatataacaact

SEQ ID NO: 391263 - DNA, 20 bp, Artificial Sequence
  Description of Artificial Sequence: Synthetic oligonucleotide
  Target: LAMA2; (+) strand; PAM type: YTN; PAM sequence: TTT
agtcctgtatataacaactt

SEQ ID NO: 391264 - DNA, 20 bp, Artificial Sequence
  Description of Artificial Sequence: Synthetic oligonucleotide
  Target: LAMA2; (+) strand; PAM type: YTN; PAM sequence: TTA
gtcctgtatataacaacttt

SEQ ID NO: 391265 - DNA, 20 bp, Artificial Sequence
  Description of Artificial Sequence: Synthetic oligonucleotide
  Target: LAMA2; (+) strand; PAM type: YTN; PAM sequence: CTG
tatataacaactttagagaa

SEQ ID NO: 391266 - DNA, 20 bp, Artificial Sequence
  Description of Artificial Sequence: Synthetic oligonucleotide
  Target: LAMA2; (+) strand; PAM type: YTN; PAM sequence: CTT
tagagaatatttactataag

SEQ ID NO: 391267 - DNA, 20 bp, Artificial Sequence
  Description of Artificial Sequence: Synthetic oligonucleotide
  Target: LAMA2; (+) strand; PAM type: YTN; PAM sequence: TTT
agagaatatttactataagt

SEQ ID NO: 391268 - DNA, 20 bp, Artificial Sequence
  Description of Artificial Sequence: Synthetic oligonucleotide
  Target: LAMA2; (+) strand; PAM type: YTN; PAM sequence: TTA
gagaatatttactataagtt

SEQ ID NO: 391269 - DNA, 20 bp, Artificial Sequence
  Description of Artificial Sequence: Synthetic oligonucleotide
  Target: LAMA2; (+) strand; PAM type: YTN; PAM sequence: TTT
actataagttaggcatcata

SEQ ID NO: 391270 - DNA, 20 bp, Artificial Sequence
  Description of Artificial Sequence: Synthetic oligonucleotide
  Target: LAMA2; (+) strand; PAM type: YTN; PAM sequence: TTA
ctataagttaggcatcatac

SEQ ID NO: 391271 - DNA, 20 bp, Artificial Sequence
  Description of Artificial Sequence: Synthetic oligonucleotide
  Target: LAMA2; (+) strand; PAM type: YTN; PAM sequence: CTA
taagttaggcatcatactag

SEQ ID NO: 391272 - DNA, 20 bp, Artificial Sequence
  Description of Artificial Sequence: Synthetic oligonucleotide
  Target: LAMA2; (+) strand; PAM type: YTN; PAM sequence: TTA
ggcatcatactaggagctgg

SEQ ID NO: 391273 - DNA, 20 bp, Artificial Sequence
  Description of Artificial Sequence: Synthetic oligonucleotide
  Target: LAMA2; (+) strand; PAM type: YTN; PAM sequence: CTA
ggagctggatatatgataaa

SEQ ID NO: 391274 - DNA, 20 bp, Artificial Sequence
  Description of Artificial Sequence: Synthetic oligonucleotide
  Target: LAMA2; (+) strand; PAM type: YTN; PAM sequence: CTG
gatatatgataaacaaaaca

SEQ ID NO: 391275 - DNA, 20 bp, Artificial Sequence
  Description of Artificial Sequence: Synthetic oligonucleotide
  Target: LAMA2; (+) strand; PAM type: YTN; PAM sequence: TTC
tcacccccttagagcttacc

SEQ ID NO: 391276 - DNA, 20 bp, Artificial Sequence
  Description of Artificial Sequence: Synthetic oligonucleotide
  Target: LAMA2; (+) strand; PAM type: YTN; PAM sequence: CTC
acccccttagagcttacctt

SEQ ID NO: 391277 - DNA, 20 bp, Artificial Sequence
  Description of Artificial Sequence: Synthetic oligonucleotide
  Target: LAMA2; (+) strand; PAM type: YTN; PAM sequence: CTT
agagcttaccttacagttgg

SEQ ID NO: 391278 - DNA, 20 bp, Artificial Sequence
  Description of Artificial Sequence: Synthetic oligonucleotide
  Target: LAMA2; (+) strand; PAM type: YTN; PAM sequence: TTA
gagcttaccttacagttgga

SEQ ID NO: 391279 - DNA, 20 bp, Artificial Sequence
  Description of Artificial Sequence: Synthetic oligonucleotide
  Target: LAMA2; (+) strand; PAM type: YTN; PAM sequence: CTT
accttacagttggagaggtt

SEQ ID NO: 391280 - DNA, 20 bp, Artificial Sequence
  Description of Artificial Sequence: Synthetic oligonucleotide
  Target: LAMA2; (+) strand; PAM type: YTN; PAM sequence: TTA
ccttacagttggagaggttg

SEQ ID NO: 391281 - DNA, 20 bp, Artificial Sequence
  Description of Artificial Sequence: Synthetic oligonucleotide
  Target: LAMA2; (+) strand; PAM type: YTN; PAM sequence: CTT
acagttggagaggttgtcaa

SEQ ID NO: 391282 - DNA, 20 bp, Artificial Sequence
  Description of Artificial Sequence: Synthetic oligonucleotide
  Target: LAMA2; (+) strand; PAM type: YTN; PAM sequence: TTA
cagttggagaggttgtcaat

SEQ ID NO: 391283 - DNA, 20 bp, Artificial Sequence
  Description of Artificial Sequence: Synthetic oligonucleotide
  Target: LAMA2; (+) strand; PAM type: YTN; PAM sequence: TTG
gagaggttgtcaataaatag

SEQ ID NO: 391284 - DNA, 20 bp, Artificial Sequence
  Description of Artificial Sequence: Synthetic oligonucleotide
  Target: LAMA2; (+) strand; PAM type: YTN; PAM sequence: TTG
tcaataaataggtgagccaa

SEQ ID NO: 391285 - DNA, 20 bp, Artificial Sequence
  Description of Artificial Sequence: Synthetic oligonucleotide
  Target: LAMA2; (+) strand; PAM type: YTN; PAM sequence: TTA
ctaagtaattctcaaatcca

SEQ ID NO: 391286 - DNA, 20 bp, Artificial Sequence
  Description of Artificial Sequence: Synthetic oligonucleotide
  Target: LAMA2; (+) strand; PAM type: YTN; PAM sequence: CTA
agtaattctcaaatccatgg

SEQ ID NO: 391287 - DNA, 20 bp, Artificial Sequence
  Description of Artificial Sequence: Synthetic oligonucleotide
  Target: LAMA2; (+) strand; PAM type: YTN; PAM sequence: TTC
tcaaatccatggtgctatga

SEQ ID NO: 391288 - DNA, 20 bp, Artificial Sequence
  Description of Artificial Sequence: Synthetic oligonucleotide
  Target: LAMA2; (+) strand; PAM type: YTN; PAM sequence: CTC
aaatccatggtgctatgaag

SEQ ID NO: 391289 - DNA, 20 bp, Artificial Sequence
  Description of Artificial Sequence: Synthetic oligonucleotide
  Target: LAMA2; (+) strand; PAM type: YTN; PAM sequence: CTA
tgaaggaaacgtcctgctgc

SEQ ID NO: 391290 - DNA, 20 bp, Artificial Sequence
  Description of Artificial Sequence: Synthetic oligonucleotide
  Target: LAMA2; (+) strand; PAM type: YTN; PAM sequence: CTG
ctgcaggaagtgtggaaacc

SEQ ID NO: 391291 - DNA, 20 bp, Artificial Sequence
  Description of Artificial Sequence: Synthetic oligonucleotide
  Target: LAMA2; (+) strand; PAM type: YTN; PAM sequence: CTG
caggaagtgtggaaacctag

SEQ ID NO: 391292 - DNA, 20 bp, Artificial Sequence
  Description of Artificial Sequence: Synthetic oligonucleotide
  Target: LAMA2; (+) strand; PAM type: YTN; PAM sequence: CTA
ggtagcaccctgggaatggc

SEQ ID NO: 391293 - DNA, 20 bp, Artificial Sequence
  Description of Artificial Sequence: Synthetic oligonucleotide
  Target: LAMA2; (+) strand; PAM type: YTN; PAM sequence: CTG
ggaatggccacgctaaggag

SEQ ID NO: 391294 - DNA, 20 bp, Artificial Sequence
  Description of Artificial Sequence: Synthetic oligonucleotide
  Target: LAMA2; (+) strand; PAM type: YTN; PAM sequence: CTA
aggagaagcacttaaactga

SEQ ID NO: 391295 - DNA, 20 bp, Artificial Sequence
  Description of Artificial Sequence: Synthetic oligonucleotide
  Target: LAMA2; (+) strand; PAM type: YTN; PAM sequence: CTT
aaactgaaagctgatgggta

SEQ ID NO: 391296 - DNA, 20 bp, Artificial Sequence
  Description of Artificial Sequence: Synthetic oligonucleotide
  Target: LAMA2; (+) strand; PAM type: YTN; PAM sequence: TTA
aactgaaagctgatgggtaa

SEQ ID NO: 391297 - DNA, 20 bp, Artificial Sequence
  Description of Artificial Sequence: Synthetic oligonucleotide
  Target: LAMA2; (+) strand; PAM type: YTN; PAM sequence: CTG
aaagctgatgggtaacaagg

SEQ ID NO: 391298 - DNA, 20 bp, Artificial Sequence
  Description of Artificial Sequence: Synthetic oligonucleotide
  Target: LAMA2; (+) strand; PAM type: YTN; PAM sequence: CTG
atgggtaacaaggacccagt

SEQ ID NO: 391299 - DNA, 20 bp, Artificial Sequence
  Description of Artificial Sequence: Synthetic oligonucleotide
  Target: LAMA2; (+) strand; PAM type: YTN; PAM sequence: CTT
tacaggtgttgaggagaagc

SEQ ID NO: 391300 - DNA, 20 bp, Artificial Sequence
  Description of Artificial Sequence: Synthetic oligonucleotide
  Target: LAMA2; (+) strand; PAM type: YTN; PAM sequence: TTT
acaggtgttgaggagaagct

SEQ ID NO: 391301 - DNA, 20 bp, Artificial Sequence
  Description of Artificial Sequence: Synthetic oligonucleotide
  Target: LAMA2; (+) strand; PAM type: YTN; PAM sequence: TTA
caggtgttgaggagaagctc

SEQ ID NO: 391302 - DNA, 20 bp, Artificial Sequence
  Description of Artificial Sequence: Synthetic oligonucleotide
  Target: LAMA2; (+) strand; PAM type: YTN; PAM sequence: TTG
aggagaagctcattctaggt

SEQ ID NO: 391303 - DNA, 20 bp, Artificial Sequence
  Description of Artificial Sequence: Synthetic oligonucleotide
  Target: LAMA2; (+) strand; PAM type: YTN; PAM sequence: CTC
attctaggtaaagacaatgg

SEQ ID NO: 391304 - DNA, 20 bp, Artificial Sequence
  Description of Artificial Sequence: Synthetic oligonucleotide
  Target: LAMA2; (+) strand; PAM type: YTN; PAM sequence: TTC
taggtaaagacaatgggata

SEQ ID NO: 391305 - DNA, 20 bp, Artificial Sequence
  Description of Artificial Sequence: Synthetic oligonucleotide
  Target: LAMA2; (+) strand; PAM type: YTN; PAM sequence: CTA
ggtaaagacaatgggataca

SEQ ID NO: 391306 - DNA, 20 bp, Artificial Sequence
  Description of Artificial Sequence: Synthetic oligonucleotide
  Target: LAMA2; (+) strand; PAM type: YTN; PAM sequence: CTA
agaagggatgagttttgcat

SEQ ID NO: 391307 - DNA, 20 bp, Artificial Sequence
  Description of Artificial Sequence: Synthetic oligonucleotide
  Target: LAMA2; (+) strand; PAM type: YTN; PAM sequence: TTT
tgcatatttaatatactaaa

SEQ ID NO: 391308 - DNA, 20 bp, Artificial Sequence
  Description of Artificial Sequence: Synthetic oligonucleotide
  Target: LAMA2; (+) strand; PAM type: YTN; PAM sequence: TTT
gcatatttaatatactaaaa

SEQ ID NO: 391309 - DNA, 20 bp, Artificial Sequence
  Description of Artificial Sequence: Synthetic oligonucleotide
  Target: LAMA2; (+) strand; PAM type: YTN; PAM sequence: TTG
catatttaatatactaaaac

SEQ ID NO: 391310 - DNA, 20 bp, Artificial Sequence
  Description of Artificial Sequence: Synthetic oligonucleotide
  Target: LAMA2; (+) strand; PAM type: YTN; PAM sequence: TTT
aatatactaaaactatgcca

SEQ ID NO: 391311 - DNA, 20 bp, Artificial Sequence
  Description of Artificial Sequence: Synthetic oligonucleotide
  Target: LAMA2; (+) strand; PAM type: YTN; PAM sequence: TTA
atatactaaaactatgccag

SEQ ID NO: 391312 - DNA, 20 bp, Artificial Sequence
  Description of Artificial Sequence: Synthetic oligonucleotide
  Target: LAMA2; (+) strand; PAM type: YTN; PAM sequence: CTA
aaactatgccagggaggttg

SEQ ID NO: 391313 - DNA, 20 bp, Artificial Sequence
  Description of Artificial Sequence: Synthetic oligonucleotide
  Target: LAMA2; (+) strand; PAM type: YTN; PAM sequence: CTA
tgccagggaggttgattgca

SEQ ID NO: 391314 - DNA, 20 bp, Artificial Sequence
  Description of Artificial Sequence: Synthetic oligonucleotide
  Target: LAMA2; (+) strand; PAM type: YTN; PAM sequence: TTG
attgcatagggtcttagtgc

SEQ ID NO: 391315 - DNA, 20 bp, Artificial Sequence
  Description of Artificial Sequence: Synthetic oligonucleotide
  Target: LAMA2; (+) strand; PAM type: YTN; PAM sequence: TTG
catagggtcttagtgctaat

SEQ ID NO: 391316 - DNA, 20 bp, Artificial Sequence
  Description of Artificial Sequence: Synthetic oligonucleotide
  Target: LAMA2; (+) strand; PAM type: YTN; PAM sequence: CTT
agtgctaattgttttaactt

SEQ ID NO: 391317 - DNA, 20 bp, Artificial Sequence
  Description of Artificial Sequence: Synthetic oligonucleotide
  Target: LAMA2; (+) strand; PAM type: YTN; PAM sequence: TTA
gtgctaattgttttaacttc

SEQ ID NO: 391318 - DNA, 20 bp, Artificial Sequence
  Description of Artificial Sequence: Synthetic oligonucleotide
  Target: LAMA2; (+) strand; PAM type: YTN; PAM sequence: CTA
attgttttaacttctttctt

SEQ ID NO: 391319 - DNA, 20 bp, Artificial Sequence
  Description of Artificial Sequence: Synthetic oligonucleotide
  Target: LAMA2; (+) strand; PAM type: YTN; PAM sequence: TTG
ttttaacttctttcttatca

SEQ ID NO: 391320 - DNA, 20 bp, Artificial Sequence
  Description of Artificial Sequence: Synthetic oligonucleotide
  Target: LAMA2; (+) strand; PAM type: YTN; PAM sequence: TTT
taacttctttcttatcatgg

SEQ ID NO: 391321 - DNA, 20 bp, Artificial Sequence
  Description of Artificial Sequence: Synthetic oligonucleotide
  Target: LAMA2; (+) strand; PAM type: YTN; PAM sequence: TTT
aacttctttcttatcatgga

SEQ ID NO: 391322 - DNA, 20 bp, Artificial Sequence
  Description of Artificial Sequence: Synthetic oligonucleotide
  Target: LAMA2; (+) strand; PAM type: YTN; PAM sequence: TTA
acttctttcttatcatggag

SEQ ID NO: 391323 - DNA, 20 bp, Artificial Sequence
  Description of Artificial Sequence: Synthetic oligonucleotide
  Target: LAMA2; (+) strand; PAM type: YTN; PAM sequence: CTT
ctttcttatcatggagtttg

SEQ ID NO: 391324 - DNA, 20 bp, Artificial Sequence
  Description of Artificial Sequence: Synthetic oligonucleotide
  Target: LAMA2; (+) strand; PAM type: YTN; PAM sequence: TTC
tttcttatcatggagtttgt

SEQ ID NO: 391325 - DNA, 20 bp, Artificial Sequence
  Description of Artificial Sequence: Synthetic oligonucleotide
  Target: LAMA2; (+) strand; PAM type: YTN; PAM sequence: CTT
tcttatcatggagtttgtag

SEQ ID NO: 391326 - DNA, 20 bp, Artificial Sequence
  Description of Artificial Sequence: Synthetic oligonucleotide
  Target: LAMA2; (+) strand; PAM type: YTN; PAM sequence: TTT
cttatcatggagtttgtagg

SEQ ID NO: 391327 - DNA, 20 bp, Artificial Sequence
  Description of Artificial Sequence: Synthetic oligonucleotide
  Target: LAMA2; (+) strand; PAM type: YTN; PAM sequence: TTC
ttatcatggagtttgtagga

SEQ ID NO: 391328 - DNA, 20 bp, Artificial Sequence
  Description of Artificial Sequence: Synthetic oligonucleotide
  Target: LAMA2; (+) strand; PAM type: YTN; PAM sequence: CTT
atcatggagtttgtaggatt

SEQ ID NO: 391329 - DNA, 20 bp, Artificial Sequence
  Description of Artificial Sequence: Synthetic oligonucleotide
  Target: LAMA2; (+) strand; PAM type: YTN; PAM sequence: TTA
tcatggagtttgtaggattc

SEQ ID NO: 391330 - DNA, 20 bp, Artificial Sequence
  Description of Artificial Sequence: Synthetic oligonucleotide
  Target: LAMA2; (+) strand; PAM type: YTN; PAM sequence: TTT
gtaggattcttgacaattta

SEQ ID NO: 391331 - DNA, 20 bp, Artificial Sequence
  Description of Artificial Sequence: Synthetic oligonucleotide
  Target: LAMA2; (+) strand; PAM type: YTN; PAM sequence: TTG
taggattcttgacaatttag

SEQ ID NO: 391332 - DNA, 20 bp, Artificial Sequence
  Description of Artificial Sequence: Synthetic oligonucleotide
  Target: LAMA2; (+) strand; PAM type: YTN; PAM sequence: TTC
ttgacaatttagtattgaag

SEQ ID NO: 391333 - DNA, 20 bp, Artificial Sequence
  Description of Artificial Sequence: Synthetic oligonucleotide
  Target: LAMA2; (+) strand; PAM type: YTN; PAM sequence: CTT
gacaatttagtattgaagta

SEQ ID NO: 391334 - DNA, 20 bp, Artificial Sequence
  Description of Artificial Sequence: Synthetic oligonucleotide
  Target: LAMA2; (+) strand; PAM type: YTN; PAM sequence: TTG
acaatttagtattgaagtaa

SEQ ID NO: 391335 - DNA, 20 bp, Artificial Sequence
  Description of Artificial Sequence: Synthetic oligonucleotide
  Target: LAMA2; (+) strand; PAM type: YTN; PAM sequence: TTT
agtattgaagtaatcatata

SEQ ID NO: 391336 - DNA, 20 bp, Artificial Sequence
  Description of Artificial Sequence: Synthetic oligonucleotide
  Target: LAMA2; (+) strand; PAM type: YTN; PAM sequence: TTA
gtattgaagtaatcatataa

SEQ ID NO: 391337 - DNA, 20 bp, Artificial Sequence
  Description of Artificial Sequence: Synthetic oligonucleotide
  Target: LAMA2; (+) strand; PAM type: YTN; PAM sequence: TTG
aagtaatcatataatcaata

SEQ ID NO: 391338 - DNA, 20 bp, Artificial Sequence
  Description of Artificial Sequence: Synthetic oligonucleotide
  Target: LAMA2; (+) strand; PAM type: YTN; PAM sequence: CTA
agaataaaatgcatgtgaat

SEQ ID NO: 391339 - DNA, 20 bp, Artificial Sequence
  Description of Artificial Sequence: Synthetic oligonucleotide
  Target: LAMA2; (+) strand; PAM type: YTN; PAM sequence: CTC
ttacacattactacgtaaat

SEQ ID NO: 391340 - DNA, 20 bp, Artificial Sequence
  Description of Artificial Sequence: Synthetic oligonucleotide
  Target: LAMA2; (+) strand; PAM type: YTN; PAM sequence: CTT
acacattactacgtaaatga

SEQ ID NO: 391341 - DNA, 20 bp, Artificial Sequence
  Description of Artificial Sequence: Synthetic oligonucleotide
  Target: LAMA2; (+) strand; PAM type: YTN; PAM sequence: TTA
cacattactacgtaaatgaa

SEQ ID NO: 391342 - DNA, 20 bp, Artificial Sequence
  Description of Artificial Sequence: Synthetic oligonucleotide
  Target: LAMA2; (+) strand; PAM type: YTN; PAM sequence: TTA
ctacgtaaatgaaataacct

SEQ ID NO: 391343 - DNA, 20 bp, Artificial Sequence
  Description of Artificial Sequence: Synthetic oligonucleotide
  Target: LAMA2; (+) strand; PAM type: YTN; PAM sequence: CTA
cgtaaatgaaataacctgta

SEQ ID NO: 391344 - DNA, 20 bp, Artificial Sequence
  Description of Artificial Sequence: Synthetic oligonucleotide
  Target: LAMA2; (+) strand; PAM type: YTN; PAM sequence: CTG
tacaacagatcataagccag

SEQ ID NO: 391345 - DNA, 20 bp, Artificial Sequence
  Description of Artificial Sequence: Synthetic oligonucleotide
  Target: LAMA2; (+) strand; PAM type: YTN; PAM sequence: TTA
agacaatgaatatgatcttg

SEQ ID NO: 391346 - DNA, 20 bp, Artificial Sequence
  Description of Artificial Sequence: Synthetic oligonucleotide
  Target: LAMA2; (+) strand; PAM type: YTN; PAM sequence: CTT
gatcatccagaatttaaaag

SEQ ID NO: 391347 - DNA, 20 bp, Artificial Sequence
  Description of Artificial Sequence: Synthetic oligonucleotide
  Target: LAMA2; (+) strand; PAM type: YTN; PAM sequence: TTG
atcatccagaatttaaaaga

SEQ ID NO: 391348 - DNA, 20 bp, Artificial Sequence
  Description of Artificial Sequence: Synthetic oligonucleotide
  Target: LAMA2; (+) strand; PAM type: YTN; PAM sequence: TTT
aaaagagacagtgtatgata

SEQ ID NO: 391349 - DNA, 20 bp, Artificial Sequence
  Description of Artificial Sequence: Synthetic oligonucleotide
  Target: LAMA2; (+) strand; PAM type: YTN; PAM sequence: TTA
aaagagacagtgtatgatat

SEQ ID NO: 391350 - DNA, 20 bp, Artificial Sequence
  Description of Artificial Sequence: Synthetic oligonucleotide
  Target: LAMA2; (+) strand; PAM type: YTN; PAM sequence: TTT
actttttaaaatttagacac

SEQ ID NO: 391351 - DNA, 20 bp, Artificial Sequence
  Description of Artificial Sequence: Synthetic oligonucleotide
  Target: LAMA2; (+) strand; PAM type: YTN; PAM sequence: TTA
ctttttaaaatttagacact

SEQ ID NO: 391352 - DNA, 20 bp, Artificial Sequence
  Description of Artificial Sequence: Synthetic oligonucleotide
  Target: LAMA2; (+) strand; PAM type: YTN; PAM sequence: CTT
tttaaaatttagacactttg

SEQ ID NO: 391353 - DNA, 20 bp, Artificial Sequence
  Description of Artificial Sequence: Synthetic oligonucleotide
  Target: LAMA2; (+) strand; PAM type: YTN; PAM sequence: TTT
ttaaaatttagacactttga

SEQ ID NO: 391354 - DNA, 20 bp, Artificial Sequence
  Description of Artificial Sequence: Synthetic oligonucleotide
  Target: LAMA2; (+) strand; PAM type: YTN; PAM sequence: TTT
taaaatttagacactttgag

SEQ ID NO: 391355 - DNA, 20 bp, Artificial Sequence
  Description of Artificial Sequence: Synthetic oligonucleotide
  Target: LAMA2; (+) strand; PAM type: YTN; PAM sequence: TTT
aaaatttagacactttgagt

SEQ ID NO: 391356 - DNA, 20 bp, Artificial Sequence
  Description of Artificial Sequence: Synthetic oligonucleotide
  Target: LAMA2; (+) strand; PAM type: YTN; PAM sequence: TTA
aaatttagacactttgagtt

SEQ ID NO: 391357 - DNA, 20 bp, Artificial Sequence
  Description of Artificial Sequence: Synthetic oligonucleotide
  Target: LAMA2; (+) strand; PAM type: YTN; PAM sequence: TTT
agacactttgagttataaat

SEQ ID NO: 391358 - DNA, 20 bp, Artificial Sequence
  Description of Artificial Sequence: Synthetic oligonucleotide
  Target: LAMA2; (+) strand; PAM type: YTN; PAM sequence: TTA
gacactttgagttataaata

SEQ ID NO: 391359 - DNA, 20 bp, Artificial Sequence
  Description of Artificial Sequence: Synthetic oligonucleotide
  Target: LAMA2; (+) strand; PAM type: YTN; PAM sequence: CTT
tgagttataaataagaattg

SEQ ID NO: 391360 - DNA, 20 bp, Artificial Sequence
  Description of Artificial Sequence: Synthetic oligonucleotide
  Target: LAMA2; (+) strand; PAM type: YTN; PAM sequence: TTT
gagttataaataagaattgg

SEQ ID NO: 391361 - DNA, 20 bp, Artificial Sequence
  Description of Artificial Sequence: Synthetic oligonucleotide
  Target: LAMA2; (+) strand; PAM type: YTN; PAM sequence: TTG
agttataaataagaattggt

SEQ ID NO: 391362 - DNA, 20 bp, Artificial Sequence
  Description of Artificial Sequence: Synthetic oligonucleotide
  Target: LAMA2; (+) strand; PAM type: YTN; PAM sequence: TTA
taaataagaattggtccact

SEQ ID NO: 391363 - DNA, 20 bp, Artificial Sequence
  Description of Artificial Sequence: Synthetic oligonucleotide
  Target: LAMA2; (+) strand; PAM type: YTN; PAM sequence: TTG
gtccacttggtgtgaaatta

SEQ ID NO: 391364 - DNA, 20 bp, Artificial Sequence
  Description of Artificial Sequence: Synthetic oligonucleotide
  Target: LAMA2; (+) strand; PAM type: YTN; PAM sequence: CTT
ggtgtgaaattatgatcttt

SEQ ID NO: 391365 - DNA, 20 bp, Artificial Sequence
  Description of Artificial Sequence: Synthetic oligonucleotide
  Target: LAMA2; (+) strand; PAM type: YTN; PAM sequence: TTG
gtgtgaaattatgatctttt

SEQ ID NO: 391366 - DNA, 20 bp, Artificial Sequence
  Description of Artificial Sequence: Synthetic oligonucleotide
  Target: LAMA2; (+) strand; PAM type: YTN; PAM sequence: TTA
tgatcttttggtaatacaga

SEQ ID NO: 391367 - DNA, 20 bp, Artificial Sequence
  Description of Artificial Sequence: Synthetic oligonucleotide
  Target: LAMA2; (+) strand; PAM type: YTN; PAM sequence: CTT
ttggtaatacagaaaatata

SEQ ID NO: 391368 - DNA, 20 bp, Artificial Sequence
  Description of Artificial Sequence: Synthetic oligonucleotide
  Target: LAMA2; (+) strand; PAM type: YTN; PAM sequence: TTT
tggtaatacagaaaatatat

SEQ ID NO: 391369 - DNA, 20 bp, Artificial Sequence
  Description of Artificial Sequence: Synthetic oligonucleotide
  Target: LAMA2; (+) strand; PAM type: YTN; PAM sequence: TTT
ggtaatacagaaaatatatt

SEQ ID NO: 391370 - DNA, 20 bp, Artificial Sequence
  Description of Artificial Sequence: Synthetic oligonucleotide
  Target: LAMA2; (+) strand; PAM type: YTN; PAM sequence: TTG
gtaatacagaaaatatattg

SEQ ID NO: 391371 - DNA, 20 bp, Artificial Sequence
  Description of Artificial Sequence: Synthetic oligonucleotide
  Target: LAMA2; (+) strand; PAM type: YTN; PAM sequence: TTG
atgaagaaaaagaatatatt

SEQ ID NO: 391372 - DNA, 20 bp, Artificial Sequence
  Description of Artificial Sequence: Synthetic oligonucleotide
  Target: LAMA2; (+) strand; PAM type: YTN; PAM sequence: TTT
taagtttaaattataatgta

SEQ ID NO: 391373 - DNA, 20 bp, Artificial Sequence
  Description of Artificial Sequence: Synthetic oligonucleotide
  Target: LAMA2; (+) strand; PAM type: YTN; PAM sequence: TTT
aagtttaaattataatgtac

SEQ ID NO: 391374 - DNA, 20 bp, Artificial Sequence
  Description of Artificial Sequence: Synthetic oligonucleotide
  Target: LAMA2; (+) strand; PAM type: YTN; PAM sequence: TTA
agtttaaattataatgtaca

SEQ ID NO: 391375 - DNA, 20 bp, Artificial Sequence
  Description of Artificial Sequence: Synthetic oligonucleotide
  Target: LAMA2; (+) strand; PAM type: YTN; PAM sequence: TTT
aaattataatgtacattttc

SEQ ID NO: 391376 - DNA, 20 bp, Artificial Sequence
  Description of Artificial Sequence: Synthetic oligonucleotide
  Target: LAMA2; (+) strand; PAM type: YTN; PAM sequence: TTA
aattataatgtacattttct

SEQ ID NO: 391377 - DNA, 20 bp, Artificial Sequence
  Description of Artificial Sequence: Synthetic oligonucleotide
  Target: LAMA2; (+) strand; PAM type: YTN; PAM sequence: TTA
taatgtacattttctgtacc

SEQ ID NO: 391378 - DNA, 20 bp, Artificial Sequence
  Description of Artificial Sequence: Synthetic oligonucleotide
  Target: LAMA2; (+) strand; PAM type: YTN; PAM sequence: TTT
tctgtaccataagagacact

SEQ ID NO: 391379 - DNA, 20 bp, Artificial Sequence
  Description of Artificial Sequence: Synthetic oligonucleotide
  Target: LAMA2; (+) strand; PAM type: YTN; PAM sequence: TTT
ctgtaccataagagacacta

SEQ ID NO: 391380 - DNA, 20 bp, Artificial Sequence
  Description of Artificial Sequence: Synthetic oligonucleotide
  Target: LAMA2; (+) strand; PAM type: YTN; PAM sequence: TTC
tgtaccataagagacactag

SEQ ID NO: 391381 - DNA, 20 bp, Artificial Sequence
  Description of Artificial Sequence: Synthetic oligonucleotide
  Target: LAMA2; (+) strand; PAM type: YTN; PAM sequence: CTG
taccataagagacactagtg

SEQ ID NO: 391382 - DNA, 20 bp, Artificial Sequence
  Description of Artificial Sequence: Synthetic oligonucleotide
  Target: LAMA2; (+) strand; PAM type: YTN; PAM sequence: CTA
gtggtattgatacattaatc

SEQ ID NO: 391383 - DNA, 20 bp, Artificial Sequence
  Description of Artificial Sequence: Synthetic oligonucleotide
  Target: LAMA2; (+) strand; PAM type: YTN; PAM sequence: TTG
atacattaatccgtaaggta

SEQ ID NO: 391384 - DNA, 20 bp, Artificial Sequence
  Description of Artificial Sequence: Synthetic oligonucleotide
  Target: LAMA2; (+) strand; PAM type: YTN; PAM sequence: TTA
atccgtaaggtaagatattg

SEQ ID NO: 391385 - DNA, 20 bp, Artificial Sequence
  Description of Artificial Sequence: Synthetic oligonucleotide
  Target: LAMA2; (+) strand; PAM type: YTN; PAM sequence: TTG
gaagatgaccaaaatataga

SEQ ID NO: 391386 - DNA, 20 bp, Artificial Sequence
  Description of Artificial Sequence: Synthetic oligonucleotide
  Target: LAMA2; (+) strand; PAM type: YTN; PAM sequence: TTC
cttattatggtgttcagtaa

SEQ ID NO: 391387 - DNA, 20 bp, Artificial Sequence
  Description of Artificial Sequence: Synthetic oligonucleotide
  Target: LAMA2; (+) strand; PAM type: YTN; PAM sequence: CTT
attatggtgttcagtaatat

SEQ ID NO: 391388 - DNA, 20 bp, Artificial Sequence
  Description of Artificial Sequence: Synthetic oligonucleotide
  Target: LAMA2; (+) strand; PAM type: YTN; PAM sequence: TTA
ttatggtgttcagtaatatg

SEQ ID NO: 391389 - DNA, 20 bp, Artificial Sequence
  Description of Artificial Sequence: Synthetic oligonucleotide
  Target: LAMA2; (+) strand; PAM type: YTN; PAM sequence: TTA
tggtgttcagtaatatgtga

SEQ ID NO: 391390 - DNA, 20 bp, Artificial Sequence
  Description of Artificial Sequence: Synthetic oligonucleotide
  Target: LAMA2; (+) strand; PAM type: YTN; PAM sequence: TTC
agtaatatgtgaaagtaaga

SEQ ID NO: 391391 - DNA, 20 bp, Artificial Sequence
  Description of Artificial Sequence: Synthetic oligonucleotide
  Target: LAMA2; (+) strand; PAM type: YTN; PAM sequence: TTC
agtcaagtctagactagaaa

SEQ ID NO: 391392 - DNA, 20 bp, Artificial Sequence
  Description of Artificial Sequence: Synthetic oligonucleotide
  Target: LAMA2; (+) strand; PAM type: YTN; PAM sequence: CTA
gactagaaaaatatccaaag

SEQ ID NO: 391393 - DNA, 20 bp, Artificial Sequence
  Description of Artificial Sequence: Synthetic oligonucleotide
  Target: LAMA2; (+) strand; PAM type: YTN; PAM sequence: CTA
gaaaaatatccaaagcagtt

SEQ ID NO: 391394 - DNA, 20 bp, Artificial Sequence
  Description of Artificial Sequence: Synthetic oligonucleotide
  Target: LAMA2; (+) strand; PAM type: YTN; PAM sequence: TTT
agactacgaacatctttttt

SEQ ID NO: 391395 - DNA, 20 bp, Artificial Sequence
  Description of Artificial Sequence: Synthetic oligonucleotide
  Target: LAMA2; (+) strand; PAM type: YTN; PAM sequence: TTA
gactacgaacatcttttttt

SEQ ID NO: 391396 - DNA, 20 bp, Artificial Sequence
  Description of Artificial Sequence: Synthetic oligonucleotide
  Target: LAMA2; (+) strand; PAM type: YTN; PAM sequence: CTA
cgaacatctttttttttctt

SEQ ID NO: 391397 - DNA, 20 bp, Artificial Sequence
  Description of Artificial Sequence: Synthetic oligonucleotide
  Target: LAMA2; (+) strand; PAM type: YTN; PAM sequence: CTT
tttttttcttttcttttctt

SEQ ID NO: 391398 - DNA, 20 bp, Artificial Sequence
  Description of Artificial Sequence: Synthetic oligonucleotide
  Target: LAMA2; (+) strand; PAM type: YTN; PAM sequence: TTT
ttttttcttttcttttcttt

SEQ ID NO: 391399 - DNA, 20 bp, Artificial Sequence
  Description of Artificial Sequence: Synthetic oligonucleotide
  Target: LAMA2; (+) strand; PAM type: YTN; PAM sequence: TTT
tttttcttttcttttctttt

SEQ ID NO: 391400 - DNA, 20 bp, Artificial Sequence
  Description of Artificial Sequence: Synthetic oligonucleotide
  Target: LAMA2; (+) strand; PAM type: YTN; PAM sequence: TTT
ttttcttttcttttcttttt

SEQ ID NO: 391401 - DNA, 20 bp, Artificial Sequence
  Description of Artificial Sequence: Synthetic oligonucleotide
  Target: LAMA2; (+) strand; PAM type: YTN; PAM sequence: TTT
tttcttttcttttctttttt

SEQ ID NO: 391402 - DNA, 20 bp, Artificial Sequence
  Description of Artificial Sequence: Synthetic oligonucleotide
  Target: LAMA2; (+) strand; PAM type: YTN; PAM sequence: TTT
ttcttttcttttcttttttt

SEQ ID NO: 391403 - DNA, 20 bp, Artificial Sequence
  Description of Artificial Sequence: Synthetic oligonucleotide
  Target: LAMA2; (+) strand; PAM type: YTN; PAM sequence: TTT
tcttttcttttctttttttt

SEQ ID NO: 391404 - DNA, 20 bp, Artificial Sequence
  Description of Artificial Sequence: Synthetic oligonucleotide
  Target: LAMA2; (+) strand; PAM type: YTN; PAM sequence: TTT
cttttcttttcttttttttt

SEQ ID NO: 391405 - DNA, 20 bp, Artificial Sequence
  Description of Artificial Sequence: Synthetic oligonucleotide
  Target: LAMA2; (+) strand; PAM type: YTN; PAM sequence: TTC
ttttcttttctttttttttg

SEQ ID NO: 391406 - DNA, 20 bp, Artificial Sequence
  Description of Artificial Sequence: Synthetic oligonucleotide
  Target: LAMA2; (+) strand; PAM type: YTN; PAM sequence: CTT
ttcttttctttttttttgag

SEQ ID NO: 391407 - DNA, 20 bp, Artificial Sequence
  Description of Artificial Sequence: Synthetic oligonucleotide
  Target: LAMA2; (+) strand; PAM type: YTN; PAM sequence: TTT
tcttttctttttttttgaga

SEQ ID NO: 391408 - DNA, 20 bp, Artificial Sequence
  Description of Artificial Sequence: Synthetic oligonucleotide
  Target: LAMA2; (+) strand; PAM type: YTN; PAM sequence: TTT
cttttctttttttttgagac

SEQ ID NO: 391409 - DNA, 20 bp, Artificial Sequence
  Description of Artificial Sequence: Synthetic oligonucleotide
  Target: LAMA2; (+) strand; PAM type: YTN; PAM sequence: TTC
ttttctttttttttgagaca

SEQ ID NO: 391410 - DNA, 20 bp, Artificial Sequence
  Description of Artificial Sequence: Synthetic oligonucleotide
  Target: LAMA2; (+) strand; PAM type: YTN; PAM sequence: CTT
ttctttttttttgagacaga

SEQ ID NO: 391411 - DNA, 20 bp, Artificial Sequence
  Description of Artificial Sequence: Synthetic oligonucleotide
  Target: LAMA2; (+) strand; PAM type: YTN; PAM sequence: TTT
tctttttttttgagacagag

SEQ ID NO: 391412 - DNA, 20 bp, Artificial Sequence
  Description of Artificial Sequence: Synthetic oligonucleotide
  Target: LAMA2; (+) strand; PAM type: YTN; PAM sequence: TTT
ctttttttttgagacagagg

SEQ ID NO: 391413 - DNA, 20 bp, Artificial Sequence
  Description of Artificial Sequence: Synthetic oligonucleotide
  Target: LAMA2; (+) strand; PAM type: YTN; PAM sequence: TTC
tttttttttgagacagaggc

SEQ ID NO: 391414 - DNA, 20 bp, Artificial Sequence
  Description of Artificial Sequence: Synthetic oligonucleotide
  Target: LAMA2; (+) strand; PAM type: YTN; PAM sequence: CTT
tttttttgagacagaggctc

SEQ ID NO: 391415 - DNA, 20 bp, Artificial Sequence
  Description of Artificial Sequence: Synthetic oligonucleotide
  Target: LAMA2; (+) strand; PAM type: YTN; PAM sequence: TTT
ttttttgagacagaggctcg

SEQ ID NO: 391416 - DNA, 20 bp, Artificial Sequence
  Description of Artificial Sequence: Synthetic oligonucleotide
  Target: LAMA2; (+) strand; PAM type: YTN; PAM sequence: TTT
tttttgagacagaggctcgc

SEQ ID NO: 391417 - DNA, 20 bp, Artificial Sequence
  Description of Artificial Sequence: Synthetic oligonucleotide
  Target: LAMA2; (+) strand; PAM type: YTN; PAM sequence: TTT
ttttgagacagaggctcgct

SEQ ID NO: 391418 - DNA, 20 bp, Artificial Sequence
  Description of Artificial Sequence: Synthetic oligonucleotide
  Target: LAMA2; (+) strand; PAM type: YTN; PAM sequence: TTT
tttgagacagaggctcgctc

SEQ ID NO: 391419 - DNA, 20 bp, Artificial Sequence
  Description of Artificial Sequence: Synthetic oligonucleotide
  Target: LAMA2; (+) strand; PAM type: YTN; PAM sequence: TTT
ttgagacagaggctcgctct

SEQ ID NO: 391420 - DNA, 20 bp, Artificial Sequence
  Description of Artificial Sequence: Synthetic oligonucleotide
  Target: LAMA2; (+) strand; PAM type: YTN; PAM sequence: TTT
tgagacagaggctcgctctg

SEQ ID NO: 391421 - DNA, 20 bp, Artificial Sequence
  Description of Artificial Sequence: Synthetic oligonucleotide
  Target: LAMA2; (+) strand; PAM type: YTN; PAM sequence: TTT
gagacagaggctcgctctgt

SEQ ID NO: 391422 - DNA, 20 bp, Artificial Sequence
  Description of Artificial Sequence: Synthetic oligonucleotide
  Target: LAMA2; (+) strand; PAM type: YTN; PAM sequence: TTG
agacagaggctcgctctgtc

SEQ ID NO: 391423 - DNA, 20 bp, Artificial Sequence
  Description of Artificial Sequence: Synthetic oligonucleotide
  Target: LAMA2; (+) strand; PAM type: YTN; PAM sequence: CTC
gctctgtcgccaggctggag

SEQ ID NO: 391424 - DNA, 20 bp, Artificial Sequence
  Description of Artificial Sequence: Synthetic oligonucleotide
  Target: LAMA2; (+) strand; PAM type: YTN; PAM sequence: CTC
tgtcgccaggctggagtgca

SEQ ID NO: 391425 - DNA, 20 bp, Artificial Sequence
  Description of Artificial Sequence: Synthetic oligonucleotide
  Target: LAMA2; (+) strand; PAM type: YTN; PAM sequence: CTG
tcgccaggctggagtgcagt

SEQ ID NO: 391426 - DNA, 20 bp, Artificial Sequence
  Description of Artificial Sequence: Synthetic oligonucleotide
  Target: LAMA2; (+) strand; PAM type: YTN; PAM sequence: CTG
gagtgcagtggcgtgatctc

SEQ ID NO: 391427 - DNA, 20 bp, Artificial Sequence
  Description of Artificial Sequence: Synthetic oligonucleotide
  Target: LAMA2; (+) strand; PAM type: YTN; PAM sequence: CTC
ggctcactgccaagctgttg

SEQ ID NO: 391428 - DNA, 20 bp, Artificial Sequence
  Description of Artificial Sequence: Synthetic oligonucleotide
  Target: LAMA2; (+) strand; PAM type: YTN; PAM sequence: CTC
actgccaagctgttgacctt

SEQ ID NO: 391429 - DNA, 20 bp, Artificial Sequence
  Description of Artificial Sequence: Synthetic oligonucleotide
  Target: LAMA2; (+) strand; PAM type: YTN; PAM sequence: CTG
ccaagctgttgaccttagtt

SEQ ID NO: 391430 - DNA, 20 bp, Artificial Sequence
  Description of Artificial Sequence: Synthetic oligonucleotide
  Target: LAMA2; (+) strand; PAM type: YTN; PAM sequence: CTG
ttgaccttagttagtgattc

SEQ ID NO: 391431 - DNA, 20 bp, Artificial Sequence
  Description of Artificial Sequence: Synthetic oligonucleotide
  Target: LAMA2; (+) strand; PAM type: YTN; PAM sequence: TTG
accttagttagtgattcaga

SEQ ID NO: 391432 - DNA, 20 bp, Artificial Sequence
  Description of Artificial Sequence: Synthetic oligonucleotide
  Target: LAMA2; (+) strand; PAM type: YTN; PAM sequence: CTT
agttagtgattcagaagtaa

SEQ ID NO: 391433 - DNA, 20 bp, Artificial Sequence
  Description of Artificial Sequence: Synthetic oligonucleotide
  Target: LAMA2; (+) strand; PAM type: YTN; PAM sequence: TTA
gttagtgattcagaagtaac

SEQ ID NO: 391434 - DNA, 20 bp, Artificial Sequence
  Description of Artificial Sequence: Synthetic oligonucleotide
  Target: LAMA2; (+) strand; PAM type: YTN; PAM sequence: TTA
gtgattcagaagtaacattt

SEQ ID NO: 391435 - DNA, 20 bp, Artificial Sequence
  Description of Artificial Sequence: Synthetic oligonucleotide
  Target: LAMA2; (+) strand; PAM type: YTN; PAM sequence: TTC
agaagtaacatttaaataat

SEQ ID NO: 391436 - DNA, 20 bp, Artificial Sequence
  Description of Artificial Sequence: Synthetic oligonucleotide
  Target: LAMA2; (+) strand; PAM type: YTN; PAM sequence: TTT
aaataattgggtatgagtat

SEQ ID NO: 391437 - DNA, 20 bp, Artificial Sequence
  Description of Artificial Sequence: Synthetic oligonucleotide
  Target: LAMA2; (+) strand; PAM type: YTN; PAM sequence: TTA
aataattgggtatgagtatg

SEQ ID NO: 391438 - DNA, 20 bp, Artificial Sequence
  Description of Artificial Sequence: Synthetic oligonucleotide
  Target: LAMA2; (+) strand; PAM type: YTN; PAM sequence: TTG
ggtatgagtatgtgtgtgtg

SEQ ID NO: 391439 - DNA, 20 bp, Artificial Sequence
  Description of Artificial Sequence: Synthetic oligonucleotide
  Target: LAMA2; (+) strand; PAM type: YTN; PAM sequence: TTT
atgtatatgtgtctgtgtgt

SEQ ID NO: 391440 - DNA, 20 bp, Artificial Sequence
  Description of Artificial Sequence: Synthetic oligonucleotide
  Target: LAMA2; (+) strand; PAM type: YTN; PAM sequence: TTA
tgtatatgtgtctgtgtgta

SEQ ID NO: 391441 - DNA, 20 bp, Artificial Sequence
  Description of Artificial Sequence: Synthetic oligonucleotide
  Target: LAMA2; (+) strand; PAM type: YTN; PAM sequence: CTG
tgtgtaaaaagttatttgac

SEQ ID NO: 391442 - DNA, 20 bp, Artificial Sequence
  Description of Artificial Sequence: Synthetic oligonucleotide
  Target: LAMA2; (+) strand; PAM type: YTN; PAM sequence: TTA
tttgacccatcagacctttg

SEQ ID NO: 391443 - DNA, 20 bp, Artificial Sequence
  Description of Artificial Sequence: Synthetic oligonucleotide
  Target: LAMA2; (+) strand; PAM type: YTN; PAM sequence: TTT
gacccatcagacctttgagt

SEQ ID NO: 391444 - DNA, 20 bp, Artificial Sequence
  Description of Artificial Sequence: Synthetic oligonucleotide
  Target: LAMA2; (+) strand; PAM type: YTN; PAM sequence: TTG
acccatcagacctttgagtg

SEQ ID NO: 391445 - DNA, 20 bp, Artificial Sequence
  Description of Artificial Sequence: Synthetic oligonucleotide
  Target: LAMA2; (+) strand; PAM type: YTN; PAM sequence: CTT
tgagtgcaaacacgtgcagg

SEQ ID NO: 391446 - DNA, 20 bp, Artificial Sequence
  Description of Artificial Sequence: Synthetic oligonucleotide
  Target: LAMA2; (+) strand; PAM type: YTN; PAM sequence: TTT
gagtgcaaacacgtgcagga

SEQ ID NO: 391447 - DNA, 20 bp, Artificial Sequence
  Description of Artificial Sequence: Synthetic oligonucleotide
  Target: LAMA2; (+) strand; PAM type: YTN; PAM sequence: TTG
agtgcaaacacgtgcaggaa

SEQ ID NO: 391448 - DNA, 20 bp, Artificial Sequence
  Description of Artificial Sequence: Synthetic oligonucleotide
  Target: LAMA2; (+) strand; PAM type: YTN; PAM sequence: TTT
aaggaaattaatggaacata

SEQ ID NO: 391449 - DNA, 20 bp, Artificial Sequence
  Description of Artificial Sequence: Synthetic oligonucleotide
  Target: LAMA2; (+) strand; PAM type: YTN; PAM sequence: TTA
aggaaattaatggaacataa

SEQ ID NO: 391450 - DNA, 20 bp, Artificial Sequence
  Description of Artificial Sequence: Synthetic oligonucleotide
  Target: LAMA2; (+) strand; PAM type: YTN; PAM sequence: TTA
atggaacataattacaacac

SEQ ID NO: 391451 - DNA, 20 bp, Artificial Sequence
  Description of Artificial Sequence: Synthetic oligonucleotide
  Target: LAMA2; (+) strand; PAM type: YTN; PAM sequence: TTA
caacactcaccagaaaagca

SEQ ID NO: 391452 - DNA, 20 bp, Artificial Sequence
  Description of Artificial Sequence: Synthetic oligonucleotide
  Target: LAMA2; (+) strand; PAM type: YTN; PAM sequence: CTC
accagaaaagcaaggatttg

SEQ ID NO: 391453 - DNA, 20 bp, Artificial Sequence
  Description of Artificial Sequence: Synthetic oligonucleotide
  Target: LAMA2; (+) strand; PAM type: YTN; PAM sequence: TTT
gagtaacctagggactggat

SEQ ID NO: 391454 - DNA, 20 bp, Artificial Sequence
  Description of Artificial Sequence: Synthetic oligonucleotide
  Target: LAMA2; (+) strand; PAM type: YTN; PAM sequence: TTG
agtaacctagggactggatg

SEQ ID NO: 391455 - DNA, 20 bp, Artificial Sequence
  Description of Artificial Sequence: Synthetic oligonucleotide
  Target: LAMA2; (+) strand; PAM type: YTN; PAM sequence: CTA
gggactggatgcacagttta

SEQ ID NO: 391456 - DNA, 20 bp, Artificial Sequence
  Description of Artificial Sequence: Synthetic oligonucleotide
  Target: LAMA2; (+) strand; PAM type: YTN; PAM sequence: CTG
gatgcacagtttatcccaaa

SEQ ID NO: 391457 - DNA, 20 bp, Artificial Sequence
  Description of Artificial Sequence: Synthetic oligonucleotide
  Target: LAMA2; (+) strand; PAM type: YTN; PAM sequence: TTT
atcccaaaaaaatttttaaa

SEQ ID NO: 391458 - DNA, 20 bp, Artificial Sequence
  Description of Artificial Sequence: Synthetic oligonucleotide
  Target: LAMA2; (+) strand; PAM type: YTN; PAM sequence: TTA
tcccaaaaaaatttttaaat

SEQ ID NO: 391459 - DNA, 20 bp, Artificial Sequence
  Description of Artificial Sequence: Synthetic oligonucleotide
  Target: LAMA2; (+) strand; PAM type: YTN; PAM sequence: TTT
ttaaatccaaaagtgaaaat

SEQ ID NO: 391460 - DNA, 20 bp, Artificial Sequence
  Description of Artificial Sequence: Synthetic oligonucleotide
  Target: LAMA2; (+) strand; PAM type: YTN; PAM sequence: TTT
taaatccaaaagtgaaaata

SEQ ID NO: 391461 - DNA, 20 bp, Artificial Sequence
  Description of Artificial Sequence: Synthetic oligonucleotide
  Target: LAMA2; (+) strand; PAM type: YTN; PAM sequence: TTT
aaatccaaaagtgaaaataa

SEQ ID NO: 391462 - DNA, 20 bp, Artificial Sequence
  Description of Artificial Sequence: Synthetic oligonucleotide
  Target: LAMA2; (+) strand; PAM type: YTN; PAM sequence: TTA
aatccaaaagtgaaaataat

SEQ ID NO: 391463 - DNA, 20 bp, Artificial Sequence
  Description of Artificial Sequence: Synthetic oligonucleotide
  Target: LAMA2; (+) strand; PAM type: YTN; PAM sequence: TTC
cattattaatgttttagaag

SEQ ID NO: 391464 - DNA, 20 bp, Artificial Sequence
  Description of Artificial Sequence: Synthetic oligonucleotide
  Target: LAMA2; (+) strand; PAM type: YTN; PAM sequence: TTA
ttaatgttttagaagaataa

SEQ ID NO: 391465 - DNA, 20 bp, Artificial Sequence
  Description of Artificial Sequence: Synthetic oligonucleotide
  Target: LAMA2; (+) strand; PAM type: YTN; PAM sequence: TTA
atgttttagaagaataaatc

SEQ ID NO: 391466 - DNA, 20 bp, Artificial Sequence
  Description of Artificial Sequence: Synthetic oligonucleotide
  Target: LAMA2; (+) strand; PAM type: YTN; PAM sequence: TTT
tagaagaataaatccagagc

SEQ ID NO: 391467 - DNA, 20 bp, Artificial Sequence
  Description of Artificial Sequence: Synthetic oligonucleotide
  Target: LAMA2; (+) strand; PAM type: YTN; PAM sequence: TTT
agaagaataaatccagagca

SEQ ID NO: 391468 - DNA, 20 bp, Artificial Sequence
  Description of Artificial Sequence: Synthetic oligonucleotide
  Target: LAMA2; (+) strand; PAM type: YTN; PAM sequence: TTA
gaagaataaatccagagcat

SEQ ID NO: 391469 - DNA, 20 bp, Artificial Sequence
  Description of Artificial Sequence: Synthetic oligonucleotide
  Target: LAMA2; (+) strand; PAM type: YTN; PAM sequence: TTA
taatactttggttaatactc

SEQ ID NO: 391470 - DNA, 20 bp, Artificial Sequence
  Description of Artificial Sequence: Synthetic oligonucleotide
  Target: LAMA2; (+) strand; PAM type: YTN; PAM sequence: CTT
tggttaatactctccaaatt

SEQ ID NO: 391471 - DNA, 20 bp, Artificial Sequence
  Description of Artificial Sequence: Synthetic oligonucleotide
  Target: LAMA2; (+) strand; PAM type: YTN; PAM sequence: TTT
ggttaatactctccaaatta

SEQ ID NO: 391472 - DNA, 20 bp, Artificial Sequence
  Description of Artificial Sequence: Synthetic oligonucleotide
  Target: LAMA2; (+) strand; PAM type: YTN; PAM sequence: TTG
gttaatactctccaaattat

SEQ ID NO: 391473 - DNA, 20 bp, Artificial Sequence
  Description of Artificial Sequence: Synthetic oligonucleotide
  Target: LAMA2; (+) strand; PAM type: YTN; PAM sequence: TTA
atactctccaaattattgtg

SEQ ID NO: 391474 - DNA, 20 bp, Artificial Sequence
  Description of Artificial Sequence: Synthetic oligonucleotide
  Target: LAMA2; (+) strand; PAM type: YTN; PAM sequence: CTC
tccaaattattgtgtatatg

SEQ ID NO: 391475 - DNA, 20 bp, Artificial Sequence
  Description of Artificial Sequence: Synthetic oligonucleotide
  Target: LAMA2; (+) strand; PAM type: YTN; PAM sequence: CTC
caaattattgtgtatatgta

SEQ ID NO: 391476 - DNA, 20 bp, Artificial Sequence
  Description of Artificial Sequence: Synthetic oligonucleotide
  Target: LAMA2; (+) strand; PAM type: YTN; PAM sequence: TTA
ttgtgtatatgtactgcaaa

SEQ ID NO: 391477 - DNA, 20 bp, Artificial Sequence
  Description of Artificial Sequence: Synthetic oligonucleotide
  Target: LAMA2; (+) strand; PAM type: YTN; PAM sequence: TTG
tgtatatgtactgcaaatta

SEQ ID NO: 391478 - DNA, 20 bp, Artificial Sequence
  Description of Artificial Sequence: Synthetic oligonucleotide
  Target: LAMA2; (+) strand; PAM type: YTN; PAM sequence: CTG
caaattatacagaaaaaaat

SEQ ID NO: 391479 - DNA, 20 bp, Artificial Sequence
  Description of Artificial Sequence: Synthetic oligonucleotide
  Target: LAMA2; (+) strand; PAM type: YTN; PAM sequence: TTA
tacagaaaaaaattttaatt

SEQ ID NO: 391480 - DNA, 20 bp, Artificial Sequence
  Description of Artificial Sequence: Synthetic oligonucleotide
  Target: LAMA2; (+) strand; PAM type: YTN; PAM sequence: TTT
taattttccaatggattctt

SEQ ID NO: 391481 - DNA, 20 bp, Artificial Sequence
  Description of Artificial Sequence: Synthetic oligonucleotide
  Target: LAMA2; (+) strand; PAM type: YTN; PAM sequence: TTT
aattttccaatggattctta

SEQ ID NO: 391482 - DNA, 20 bp, Artificial Sequence
  Description of Artificial Sequence: Synthetic oligonucleotide
  Target: LAMA2; (+) strand; PAM type: YTN; PAM sequence: TTA
attttccaatggattcttat

SEQ ID NO: 391483 - DNA, 20 bp, Artificial Sequence
  Description of Artificial Sequence: Synthetic oligonucleotide
  Target: LAMA2; (+) strand; PAM type: YTN; PAM sequence: TTT
tccaatggattcttatcctt

SEQ ID NO: 391484 - DNA, 20 bp, Artificial Sequence
  Description of Artificial Sequence: Synthetic oligonucleotide
  Target: LAMA2; (+) strand; PAM type: YTN; PAM sequence: TTT
ccaatggattcttatccttt

SEQ ID NO: 391485 - DNA, 20 bp, Artificial Sequence
  Description of Artificial Sequence: Synthetic oligonucleotide
  Target: LAMA2; (+) strand; PAM type: YTN; PAM sequence: TTC
caatggattcttatcctttc

SEQ ID NO: 391486 - DNA, 20 bp, Artificial Sequence
  Description of Artificial Sequence: Synthetic oligonucleotide
  Target: LAMA2; (+) strand; PAM type: YTN; PAM sequence: TTC
ttatcctttcatcctttcat

SEQ ID NO: 391487 - DNA, 20 bp, Artificial Sequence
  Description of Artificial Sequence: Synthetic oligonucleotide
  Target: LAMA2; (+) strand; PAM type: YTN; PAM sequence: CTT
atcctttcatcctttcattt

SEQ ID NO: 391488 - DNA, 20 bp, Artificial Sequence
  Description of Artificial Sequence: Synthetic oligonucleotide
  Target: LAMA2; (+) strand; PAM type: YTN; PAM sequence: TTA
tcctttcatcctttcatttg

SEQ ID NO: 391489 - DNA, 20 bp, Artificial Sequence
  Description of Artificial Sequence: Synthetic oligonucleotide
  Target: LAMA2; (+) strand; PAM type: YTN; PAM sequence: CTT
tcatcctttcatttgtgatg

SEQ ID NO: 391490 - DNA, 20 bp, Artificial Sequence
  Description of Artificial Sequence: Synthetic oligonucleotide
  Target: LAMA2; (+) strand; PAM type: YTN; PAM sequence: TTT
catcctttcatttgtgatgt

SEQ ID NO: 391491 - DNA, 20 bp, Artificial Sequence
  Description of Artificial Sequence: Synthetic oligonucleotide
  Target: LAMA2; (+) strand; PAM type: YTN; PAM sequence: TTC
atcctttcatttgtgatgtt

SEQ ID NO: 391492 - DNA, 20 bp, Artificial Sequence
  Description of Artificial Sequence: Synthetic oligonucleotide
  Target: LAMA2; (+) strand; PAM type: YTN; PAM sequence: CTT
tcatttgtgatgttaacact

SEQ ID NO: 391493 - DNA, 20 bp, Artificial Sequence
  Description of Artificial Sequence: Synthetic oligonucleotide
  Target: LAMA2; (+) strand; PAM type: YTN; PAM sequence: TTT
catttgtgatgttaacactt

SEQ ID NO: 391494 - DNA, 20 bp, Artificial Sequence
  Description of Artificial Sequence: Synthetic oligonucleotide
  Target: LAMA2; (+) strand; PAM type: YTN; PAM sequence: TTC
atttgtgatgttaacacttg

SEQ ID NO: 391495 - DNA, 20 bp, Artificial Sequence
  Description of Artificial Sequence: Synthetic oligonucleotide
  Target: LAMA2; (+) strand; PAM type: YTN; PAM sequence: TTT
gtgatgttaacacttgcagg

SEQ ID NO: 391496 - DNA, 20 bp, Artificial Sequence
  Description of Artificial Sequence: Synthetic oligonucleotide
  Target: LAMA2; (+) strand; PAM type: YTN; PAM sequence: TTG
tgatgttaacacttgcagga

SEQ ID NO: 391497 - DNA, 20 bp, Artificial Sequence
  Description of Artificial Sequence: Synthetic oligonucleotide
  Target: LAMA2; (+) strand; PAM type: YTN; PAM sequence: TTA
acacttgcaggatgagaagt

SEQ ID NO: 391498 - DNA, 20 bp, Artificial Sequence
  Description of Artificial Sequence: Synthetic oligonucleotide
  Target: LAMA2; (+) strand; PAM type: YTN; PAM sequence: CTT
gcaggatgagaagttagatg

SEQ ID NO: 391499 - DNA, 20 bp, Artificial Sequence
  Description of Artificial Sequence: Synthetic oligonucleotide
  Target: LAMA2; (+) strand; PAM type: YTN; PAM sequence: TTG
caggatgagaagttagatga

SEQ ID NO: 391500 - DNA, 20 bp, Artificial Sequence
  Description of Artificial Sequence: Synthetic oligonucleotide
  Target: LAMA2; (+) strand; PAM type: YTN; PAM sequence: TTA
gatgataatagttggacttt

SEQ ID NO: 391501 - DNA, 20 bp, Artificial Sequence
  Description of Artificial Sequence: Synthetic oligonucleotide
  Target: LAMA2; (+) strand; PAM type: YTN; PAM sequence: TTG
gactttatattccttcattt

SEQ ID NO: 391502 - DNA, 20 bp, Artificial Sequence
  Description of Artificial Sequence: Synthetic oligonucleotide
  Target: LAMA2; (+) strand; PAM type: YTN; PAM sequence: CTT
tatattccttcatttgtgca

SEQ ID NO: 391503 - DNA, 20 bp, Artificial Sequence
  Description of Artificial Sequence: Synthetic oligonucleotide
  Target: LAMA2; (+) strand; PAM type: YTN; PAM sequence: TTT
atattccttcatttgtgcaa

SEQ ID NO: 391504 - DNA, 20 bp, Artificial Sequence
  Description of Artificial Sequence: Synthetic oligonucleotide
  Target: LAMA2; (+) strand; PAM type: YTN; PAM sequence: TTA
tattccttcatttgtgcaaa

SEQ ID NO: 391505 - DNA, 20 bp, Artificial Sequence
  Description of Artificial Sequence: Synthetic oligonucleotide
  Target: LAMA2; (+) strand; PAM type: YTN; PAM sequence: TTC
cttcatttgtgcaaaacctt

SEQ ID NO: 391506 - DNA, 20 bp, Artificial Sequence
  Description of Artificial Sequence: Synthetic oligonucleotide
  Target: LAMA2; (+) strand; PAM type: YTN; PAM sequence: CTT
catttgtgcaaaaccttgaa

SEQ ID NO: 391507 - DNA, 20 bp, Artificial Sequence
  Description of Artificial Sequence: Synthetic oligonucleotide
  Target: LAMA2; (+) strand; PAM type: YTN; PAM sequence: TTC
atttgtgcaaaaccttgaaa

SEQ ID NO: 391508 - DNA, 20 bp, Artificial Sequence
  Description of Artificial Sequence: Synthetic oligonucleotide
  Target: LAMA2; (+) strand; PAM type: YTN; PAM sequence: TTT
gtgcaaaaccttgaaaactt

SEQ ID NO: 391509 - DNA, 20 bp, Artificial Sequence
  Description of Artificial Sequence: Synthetic oligonucleotide
  Target: LAMA2; (+) strand; PAM type: YTN; PAM sequence: TTG
tgcaaaaccttgaaaacttt

SEQ ID NO: 391510 - DNA, 20 bp, Artificial Sequence
  Description of Artificial Sequence: Synthetic oligonucleotide
  Target: LAMA2; (+) strand; PAM type: YTN; PAM sequence: CTT
gaaaactttcataaattaaa

SEQ ID NO: 391511 - DNA, 20 bp, Artificial Sequence
  Description of Artificial Sequence: Synthetic oligonucleotide
  Target: LAMA2; (+) strand; PAM type: YTN; PAM sequence: TTG
aaaactttcataaattaaac

SEQ ID NO: 391512 - DNA, 20 bp, Artificial Sequence
  Description of Artificial Sequence: Synthetic oligonucleotide
  Target: LAMA2; (+) strand; PAM type: YTN; PAM sequence: CTT
tcataaattaaacctcttgc

SEQ ID NO: 391513 - DNA, 20 bp, Artificial Sequence
  Description of Artificial Sequence: Synthetic oligonucleotide
  Target: LAMA2; (+) strand; PAM type: YTN; PAM sequence: TTT
cataaattaaacctcttgct

SEQ ID NO: 391514 - DNA, 20 bp, Artificial Sequence
  Description of Artificial Sequence: Synthetic oligonucleotide
  Target: LAMA2; (+) strand; PAM type: YTN; PAM sequence: TTC
ataaattaaacctcttgctg

SEQ ID NO: 391515 - DNA, 20 bp, Artificial Sequence
  Description of Artificial Sequence: Synthetic oligonucleotide
  Target: LAMA2; (+) strand; PAM type: YTN; PAM sequence: TTA
aacctcttgctgcccttgga

SEQ ID NO: 391516 - DNA, 20 bp, Artificial Sequence
  Description of Artificial Sequence: Synthetic oligonucleotide
  Target: LAMA2; (+) strand; PAM type: YTN; PAM sequence: CTC
ttgctgcccttggaaaatca

SEQ ID NO: 391517 - DNA, 20 bp, Artificial Sequence
  Description of Artificial Sequence: Synthetic oligonucleotide
  Target: LAMA2; (+) strand; PAM type: YTN; PAM sequence: CTT
gctgcccttggaaaatcaca

SEQ ID NO: 391518 - DNA, 20 bp, Artificial Sequence
  Description of Artificial Sequence: Synthetic oligonucleotide
  Target: LAMA2; (+) strand; PAM type: YTN; PAM sequence: TTG
ctgcccttggaaaatcacaa

SEQ ID NO: 391519 - DNA, 20 bp, Artificial Sequence
  Description of Artificial Sequence: Synthetic oligonucleotide
  Target: LAMA2; (+) strand; PAM type: YTN; PAM sequence: CTG
cccttggaaaatcacaaaat

SEQ ID NO: 391520 - DNA, 20 bp, Artificial Sequence
  Description of Artificial Sequence: Synthetic oligonucleotide
  Target: LAMA2; (+) strand; PAM type: YTN; PAM sequence: CTT
ggaaaatcacaaaatgcagt

SEQ ID NO: 391521 - DNA, 20 bp, Artificial Sequence
  Description of Artificial Sequence: Synthetic oligonucleotide
  Target: LAMA2; (+) strand; PAM type: YTN; PAM sequence: TTG
gaaaatcacaaaatgcagta

SEQ ID NO: 391522 - DNA, 20 bp, Artificial Sequence
  Description of Artificial Sequence: Synthetic oligonucleotide
  Target: LAMA2; (+) strand; PAM type: YTN; PAM sequence: TTC
ctctagcgtcttttaccatg

SEQ ID NO: 391523 - DNA, 20 bp, Artificial Sequence
  Description of Artificial Sequence: Synthetic oligonucleotide
  Target: LAMA2; (+) strand; PAM type: YTN; PAM sequence: CTC
tagcgtcttttaccatgttc

SEQ ID NO: 391524 - DNA, 20 bp, Artificial Sequence
  Description of Artificial Sequence: Synthetic oligonucleotide
  Target: LAMA2; (+) strand; PAM type: YTN; PAM sequence: CTA
gcgtcttttaccatgttctg

SEQ ID NO: 391525 - DNA, 20 bp, Artificial Sequence
  Description of Artificial Sequence: Synthetic oligonucleotide
  Target: LAMA2; (+) strand; PAM type: YTN; PAM sequence: CTT
ttaccatgttctgtgctggc

SEQ ID NO: 391526 - DNA, 20 bp, Artificial Sequence
  Description of Artificial Sequence: Synthetic oligonucleotide
  Target: LAMA2; (+) strand; PAM type: YTN; PAM sequence: TTT
taccatgttctgtgctggcc

SEQ ID NO: 391527 - DNA, 20 bp, Artificial Sequence
  Description of Artificial Sequence: Synthetic oligonucleotide
  Target: LAMA2; (+) strand; PAM type: YTN; PAM sequence: TTT
accatgttctgtgctggcca

SEQ ID NO: 391528 - DNA, 20 bp, Artificial Sequence
  Description of Artificial Sequence: Synthetic oligonucleotide
  Target: LAMA2; (+) strand; PAM type: YTN; PAM sequence: TTA
ccatgttctgtgctggccag

SEQ ID NO: 391529 - DNA, 20 bp, Artificial Sequence
  Description of Artificial Sequence: Synthetic oligonucleotide
  Target: LAMA2; (+) strand; PAM type: YTN; PAM sequence: TTC
tgtgctggccagacatttag

SEQ ID NO: 391530 - DNA, 20 bp, Artificial Sequence
  Description of Artificial Sequence: Synthetic oligonucleotide
  Target: LAMA2; (+) strand; PAM type: YTN; PAM sequence: CTG
tgctggccagacatttagtt

SEQ ID NO: 391531 - DNA, 20 bp, Artificial Sequence
  Description of Artificial Sequence: Synthetic oligonucleotide
  Target: LAMA2; (+) strand; PAM type: YTN; PAM sequence: CTG
gccagacatttagttctatt

SEQ ID NO: 391532 - DNA, 20 bp, Artificial Sequence
  Description of Artificial Sequence: Synthetic oligonucleotide
  Target: LAMA2; (+) strand; PAM type: YTN; PAM sequence: TTT
agttctatttaaaatccact

SEQ ID NO: 391533 - DNA, 20 bp, Artificial Sequence
  Description of Artificial Sequence: Synthetic oligonucleotide
  Target: LAMA2; (+) strand; PAM type: YTN; PAM sequence: TTA
gttctatttaaaatccactt

SEQ ID NO: 391534 - DNA, 20 bp, Artificial Sequence
  Description of Artificial Sequence: Synthetic oligonucleotide
  Target: LAMA2; (+) strand; PAM type: YTN; PAM sequence: TTC
tatttaaaatccacttacgt

SEQ ID NO: 391535 - DNA, 20 bp, Artificial Sequence
  Description of Artificial Sequence: Synthetic oligonucleotide
  Target: LAMA2; (+) strand; PAM type: YTN; PAM sequence: CTA
tttaaaatccacttacgtat

SEQ ID NO: 391536 - DNA, 20 bp, Artificial Sequence
  Description of Artificial Sequence: Synthetic oligonucleotide
  Target: LAMA2; (+) strand; PAM type: YTN; PAM sequence: TTT
aaaatccacttacgtatatt

SEQ ID NO: 391537 - DNA, 20 bp, Artificial Sequence
  Description of Artificial Sequence: Synthetic oligonucleotide
  Target: LAMA2; (+) strand; PAM type: YTN; PAM sequence: TTA
aaatccacttacgtatattt

SEQ ID NO: 391538 - DNA, 20 bp, Artificial Sequence
  Description of Artificial Sequence: Synthetic oligonucleotide
  Target: LAMA2; (+) strand; PAM type: YTN; PAM sequence: CTT
acgtatattttaaatattaa

SEQ ID NO: 391539 - DNA, 20 bp, Artificial Sequence
  Description of Artificial Sequence: Synthetic oligonucleotide
  Target: LAMA2; (+) strand; PAM type: YTN; PAM sequence: TTA
cgtatattttaaatattaat

SEQ ID NO: 391540 - DNA, 20 bp, Artificial Sequence
  Description of Artificial Sequence: Synthetic oligonucleotide
  Target: LAMA2; (+) strand; PAM type: YTN; PAM sequence: TTT
taaatattaattctctggcc

SEQ ID NO: 391541 - DNA, 20 bp, Artificial Sequence
  Description of Artificial Sequence: Synthetic oligonucleotide
  Target: LAMA2; (+) strand; PAM type: YTN; PAM sequence: TTT
aaatattaattctctggcca

SEQ ID NO: 391542 - DNA, 20 bp, Artificial Sequence
  Description of Artificial Sequence: Synthetic oligonucleotide
  Target: LAMA2; (+) strand; PAM type: YTN; PAM sequence: TTA
aatattaattctctggccat

SEQ ID NO: 391543 - DNA, 20 bp, Artificial Sequence
  Description of Artificial Sequence: Synthetic oligonucleotide
  Target: LAMA2; (+) strand; PAM type: YTN; PAM sequence: TTA
attctctggccatgcctagt

SEQ ID NO: 391544 - DNA, 20 bp, Artificial Sequence
  Description of Artificial Sequence: Synthetic oligonucleotide
  Target: LAMA2; (+) strand; PAM type: YTN; PAM sequence: TTC
tctggccatgcctagtatgc

SEQ ID NO: 391545 - DNA, 20 bp, Artificial Sequence
  Description of Artificial Sequence: Synthetic oligonucleotide
  Target: LAMA2; (+) strand; PAM type: YTN; PAM sequence: CTC
tggccatgcctagtatgcaa

SEQ ID NO: 391546 - DNA, 20 bp, Artificial Sequence
  Description of Artificial Sequence: Synthetic oligonucleotide
  Target: LAMA2; (+) strand; PAM type: YTN; PAM sequence: CTG
gccatgcctagtatgcaagc

SEQ ID NO: 391547 - DNA, 20 bp, Artificial Sequence
  Description of Artificial Sequence: Synthetic oligonucleotide
  Target: LAMA2; (+) strand; PAM type: YTN; PAM sequence: CTA
gtatgcaagcactctggtac

SEQ ID NO: 391548 - DNA, 20 bp, Artificial Sequence
  Description of Artificial Sequence: Synthetic oligonucleotide
  Target: LAMA2; (+) strand; PAM type: YTN; PAM sequence: CTC
tggtacaagattctagagtg

SEQ ID NO: 391549 - DNA, 20 bp, Artificial Sequence
  Description of Artificial Sequence: Synthetic oligonucleotide
  Target: LAMA2; (+) strand; PAM type: YTN; PAM sequence: CTG
gtacaagattctagagtgtt

SEQ ID NO: 391550 - DNA, 20 bp, Artificial Sequence
  Description of Artificial Sequence: Synthetic oligonucleotide
  Target: LAMA2; (+) strand; PAM type: YTN; PAM sequence: TTC
tagagtgttaatatgctgcc

SEQ ID NO: 391551 - DNA, 20 bp, Artificial Sequence
  Description of Artificial Sequence: Synthetic oligonucleotide
  Target: LAMA2; (+) strand; PAM type: YTN; PAM sequence: CTA
gagtgttaatatgctgccaa

SEQ ID NO: 391552 - DNA, 20 bp, Artificial Sequence
  Description of Artificial Sequence: Synthetic oligonucleotide
  Target: LAMA2; (+) strand; PAM type: YTN; PAM sequence: TTA
atatgctgccaacttggacc

SEQ ID NO: 391553 - DNA, 20 bp, Artificial Sequence
  Description of Artificial Sequence: Synthetic oligonucleotide
  Target: LAMA2; (+) strand; PAM type: YTN; PAM sequence: CTG
ccaacttggaccttattcaa

SEQ ID NO: 391554 - DNA, 20 bp, Artificial Sequence
  Description of Artificial Sequence: Synthetic oligonucleotide
  Target: LAMA2; (+) strand; PAM type: YTN; PAM sequence: CTT
ggaccttattcaaaactata

SEQ ID NO: 391555 - DNA, 20 bp, Artificial Sequence
  Description of Artificial Sequence: Synthetic oligonucleotide
  Target: LAMA2; (+) strand; PAM type: YTN; PAM sequence: TTG
gaccttattcaaaactatat

SEQ ID NO: 391556 - DNA, 20 bp, Artificial Sequence
  Description of Artificial Sequence: Synthetic oligonucleotide
  Target: LAMA2; (+) strand; PAM type: YTN; PAM sequence: CTT
attcaaaactatattgagac

SEQ ID NO: 391557 - DNA, 20 bp, Artificial Sequence
  Description of Artificial Sequence: Synthetic oligonucleotide
  Target: LAMA2; (+) strand; PAM type: YTN; PAM sequence: TTA
ttcaaaactatattgagaca

SEQ ID NO: 391558 - DNA, 20 bp, Artificial Sequence
  Description of Artificial Sequence: Synthetic oligonucleotide
  Target: LAMA2; (+) strand; PAM type: YTN; PAM sequence: TTC
aaaactatattgagacagtt

SEQ ID NO: 391559 - DNA, 20 bp, Artificial Sequence
  Description of Artificial Sequence: Synthetic oligonucleotide
  Target: LAMA2; (+) strand; PAM type: YTN; PAM sequence: CTA
tattgagacagtttgtgatt

SEQ ID NO: 391560 - DNA, 20 bp, Artificial Sequence
  Description of Artificial Sequence: Synthetic oligonucleotide
  Target: LAMA2; (+) strand; PAM type: YTN; PAM sequence: TTG
agacagtttgtgattctcta

SEQ ID NO: 391561 - DNA, 20 bp, Artificial Sequence
  Description of Artificial Sequence: Synthetic oligonucleotide
  Target: LAMA2; (+) strand; PAM type: YTN; PAM sequence: TTT
gtgattctctaattcattat

SEQ ID NO: 391562 - DNA, 20 bp, Artificial Sequence
  Description of Artificial Sequence: Synthetic oligonucleotide
  Target: LAMA2; (+) strand; PAM type: YTN; PAM sequence: TTG
tgattctctaattcattatc

SEQ ID NO: 391563 - DNA, 20 bp, Artificial Sequence
  Description of Artificial Sequence: Synthetic oligonucleotide
  Target: LAMA2; (+) strand; PAM type: YTN; PAM sequence: TTC
tctaattcattatctgtagt

SEQ ID NO: 391564 - DNA, 20 bp, Artificial Sequence
  Description of Artificial Sequence: Synthetic oligonucleotide
  Target: LAMA2; (+) strand; PAM type: YTN; PAM sequence: CTC
taattcattatctgtagtta

SEQ ID NO: 391565 - DNA, 20 bp, Artificial Sequence
  Description of Artificial Sequence: Synthetic oligonucleotide
  Target: LAMA2; (+) strand; PAM type: YTN; PAM sequence: CTA
attcattatctgtagttaga

SEQ ID NO: 391566 - DNA, 20 bp, Artificial Sequence
  Description of Artificial Sequence: Synthetic oligonucleotide
  Target: LAMA2; (+) strand; PAM type: YTN; PAM sequence: TTC
attatctgtagttagactat

SEQ ID NO: 391567 - DNA, 20 bp, Artificial Sequence
  Description of Artificial Sequence: Synthetic oligonucleotide
  Target: LAMA2; (+) strand; PAM type: YTN; PAM sequence: TTA
tctgtagttagactatccat

SEQ ID NO: 391568 - DNA, 20 bp, Artificial Sequence
  Description of Artificial Sequence: Synthetic oligonucleotide
  Target: LAMA2; (+) strand; PAM type: YTN; PAM sequence: CTG
tagttagactatccatatct

SEQ ID NO: 391569 - DNA, 20 bp, Artificial Sequence
  Description of Artificial Sequence: Synthetic oligonucleotide
  Target: LAMA2; (+) strand; PAM type: YTN; PAM sequence: TTA
gactatccatatctttttag

SEQ ID NO: 391570 - DNA, 20 bp, Artificial Sequence
  Description of Artificial Sequence: Synthetic oligonucleotide
  Target: LAMA2; (+) strand; PAM type: YTN; PAM sequence: CTA
tccatatctttttagtaaaa

SEQ ID NO: 391571 - DNA, 20 bp, Artificial Sequence
  Description of Artificial Sequence: Synthetic oligonucleotide
  Target: LAMA2; (+) strand; PAM type: YTN; PAM sequence: CTT
tttagtaaaagagaagaagg

SEQ ID NO: 391572 - DNA, 20 bp, Artificial Sequence
  Description of Artificial Sequence: Synthetic oligonucleotide
  Target: LAMA2; (+) strand; PAM type: YTN; PAM sequence: TTT
ttagtaaaagagaagaaggc

SEQ ID NO: 391573 - DNA, 20 bp, Artificial Sequence
  Description of Artificial Sequence: Synthetic oligonucleotide
  Target: LAMA2; (+) strand; PAM type: YTN; PAM sequence: TTT
tagtaaaagagaagaaggct

SEQ ID NO: 391574 - DNA, 20 bp, Artificial Sequence
  Description of Artificial Sequence: Synthetic oligonucleotide
  Target: LAMA2; (+) strand; PAM type: YTN; PAM sequence: TTT
agtaaaagagaagaaggctt

SEQ ID NO: 391575 - DNA, 20 bp, Artificial Sequence
  Description of Artificial Sequence: Synthetic oligonucleotide
  Target: LAMA2; (+) strand; PAM type: YTN; PAM sequence: TTA
gtaaaagagaagaaggctta

SEQ ID NO: 391576 - DNA, 20 bp, Artificial Sequence
  Description of Artificial Sequence: Synthetic oligonucleotide
  Target: LAMA2; (+) strand; PAM type: YTN; PAM sequence: CTT
atatattagcatatgcaaca

SEQ ID NO: 391577 - DNA, 20 bp, Artificial Sequence
  Description of Artificial Sequence: Synthetic oligonucleotide
  Target: LAMA2; (+) strand; PAM type: YTN; PAM sequence: TTA
tatattagcatatgcaacac

SEQ ID NO: 391578 - DNA, 20 bp, Artificial Sequence
  Description of Artificial Sequence: Synthetic oligonucleotide
  Target: LAMA2; (+) strand; PAM type: YTN; PAM sequence: TTA
gcatatgcaacacatagaaa

SEQ ID NO: 391579 - DNA, 20 bp, Artificial Sequence
  Description of Artificial Sequence: Synthetic oligonucleotide
  Target: LAMA2; (+) strand; PAM type: YTN; PAM sequence: CTT
tcagggtactctaaaccttg

SEQ ID NO: 391580 - DNA, 20 bp, Artificial Sequence
  Description of Artificial Sequence: Synthetic oligonucleotide
  Target: LAMA2; (+) strand; PAM type: YTN; PAM sequence: TTT
cagggtactctaaaccttgt

SEQ ID NO: 391581 - DNA, 20 bp, Artificial Sequence
  Description of Artificial Sequence: Synthetic oligonucleotide
  Target: LAMA2; (+) strand; PAM type: YTN; PAM sequence: TTC
agggtactctaaaccttgta

SEQ ID NO: 391582 - DNA, 20 bp, Artificial Sequence
  Description of Artificial Sequence: Synthetic oligonucleotide
  Target: LAMA2; (+) strand; PAM type: YTN; PAM sequence: CTC
taaaccttgtaatttttaaa

SEQ ID NO: 391583 - DNA, 20 bp, Artificial Sequence
  Description of Artificial Sequence: Synthetic oligonucleotide
  Target: LAMA2; (+) strand; PAM type: YTN; PAM sequence: CTA
aaccttgtaatttttaaaga

SEQ ID NO: 391584 - DNA, 20 bp, Artificial Sequence
  Description of Artificial Sequence: Synthetic oligonucleotide
  Target: LAMA2; (+) strand; PAM type: YTN; PAM sequence: CTT
gtaatttttaaagaaacaat

SEQ ID NO: 391585 - DNA, 20 bp, Artificial Sequence
  Description of Artificial Sequence: Synthetic oligonucleotide
  Target: LAMA2; (+) strand; PAM type: YTN; PAM sequence: TTG
taatttttaaagaaacaatg

SEQ ID NO: 391586 - DNA, 20 bp, Artificial Sequence
  Description of Artificial Sequence: Synthetic oligonucleotide
  Target: LAMA2; (+) strand; PAM type: YTN; PAM sequence: TTT
ttaaagaaacaatgttatac

SEQ ID NO: 391587 - DNA, 20 bp, Artificial Sequence
  Description of Artificial Sequence: Synthetic oligonucleotide
  Target: LAMA2; (+) strand; PAM type: YTN; PAM sequence: TTT
taaagaaacaatgttataca

SEQ ID NO: 391588 - DNA, 20 bp, Artificial Sequence
  Description of Artificial Sequence: Synthetic oligonucleotide
  Target: LAMA2; (+) strand; PAM type: YTN; PAM sequence: TTT
aaagaaacaatgttatacac

SEQ ID NO: 391589 - DNA, 20 bp, Artificial Sequence
  Description of Artificial Sequence: Synthetic oligonucleotide
  Target: LAMA2; (+) strand; PAM type: YTN; PAM sequence: TTA
aagaaacaatgttatacaca

SEQ ID NO: 391590 - DNA, 20 bp, Artificial Sequence
  Description of Artificial Sequence: Synthetic oligonucleotide
  Target: LAMA2; (+) strand; PAM type: YTN; PAM sequence: TTA
tacacacaccatttttgttt

SEQ ID NO: 391591 - DNA, 20 bp, Artificial Sequence
  Description of Artificial Sequence: Synthetic oligonucleotide
  Target: LAMA2; (+) strand; PAM type: YTN; PAM sequence: TTT
ttgtttgactaaatatggta

SEQ ID NO: 391592 - DNA, 20 bp, Artificial Sequence
  Description of Artificial Sequence: Synthetic oligonucleotide
  Target: LAMA2; (+) strand; PAM type: YTN; PAM sequence: TTT
tgtttgactaaatatggtat

SEQ ID NO: 391593 - DNA, 20 bp, Artificial Sequence
  Description of Artificial Sequence: Synthetic oligonucleotide
  Target: LAMA2; (+) strand; PAM type: YTN; PAM sequence: TTT
gtttgactaaatatggtata

SEQ ID NO: 391594 - DNA, 20 bp, Artificial Sequence
  Description of Artificial Sequence: Synthetic oligonucleotide
  Target: LAMA2; (+) strand; PAM type: YTN; PAM sequence: TTG
tttgactaaatatggtatat

SEQ ID NO: 391595 - DNA, 20 bp, Artificial Sequence
  Description of Artificial Sequence: Synthetic oligonucleotide
  Target: LAMA2; (+) strand; PAM type: YTN; PAM sequence: TTT
gactaaatatggtatatttt

SEQ ID NO: 391596 - DNA, 20 bp, Artificial Sequence
  Description of Artificial Sequence: Synthetic oligonucleotide
  Target: LAMA2; (+) strand; PAM type: YTN; PAM sequence: TTG
actaaatatggtatatttta

SEQ ID NO: 391597 - DNA, 20 bp, Artificial Sequence
  Description of Artificial Sequence: Synthetic oligonucleotide
  Target: LAMA2; (+) strand; PAM type: YTN; PAM sequence: CTA
aatatggtatattttaaccg

SEQ ID NO: 391598 - DNA, 20 bp, Artificial Sequence
  Description of Artificial Sequence: Synthetic oligonucleotide
  Target: LAMA2; (+) strand; PAM type: YTN; PAM sequence: TTT
taaccgtgaacacgttgaat

SEQ ID NO: 391599 - DNA, 20 bp, Artificial Sequence
  Description of Artificial Sequence: Synthetic oligonucleotide
  Target: LAMA2; (+) strand; PAM type: YTN; PAM sequence: TTT
aaccgtgaacacgttgaatg

SEQ ID NO: 391600 - DNA, 20 bp, Artificial Sequence
  Description of Artificial Sequence: Synthetic oligonucleotide
  Target: LAMA2; (+) strand; PAM type: YTN; PAM sequence: TTA
accgtgaacacgttgaatgc

SEQ ID NO: 391601 - DNA, 20 bp, Artificial Sequence
  Description of Artificial Sequence: Synthetic oligonucleotide
  Target: LAMA2; (+) strand; PAM type: YTN; PAM sequence: TTG
aatgcattccagtgtgtcaa

SEQ ID NO: 391602 - DNA, 20 bp, Artificial Sequence
  Description of Artificial Sequence: Synthetic oligonucleotide
  Target: LAMA2; (+) strand; PAM type: YTN; PAM sequence: TTC
cagtgtgtcaaatgatattt

SEQ ID NO: 391603 - DNA, 20 bp, Artificial Sequence
  Description of Artificial Sequence: Synthetic oligonucleotide
  Target: LAMA2; (+) strand; PAM type: YTN; PAM sequence: TTT
taaatgtaaatagaggtgaa

SEQ ID NO: 391604 - DNA, 20 bp, Artificial Sequence
  Description of Artificial Sequence: Synthetic oligonucleotide
  Target: LAMA2; (+) strand; PAM type: YTN; PAM sequence: TTT
aaatgtaaatagaggtgaat

SEQ ID NO: 391605 - DNA, 20 bp, Artificial Sequence
  Description of Artificial Sequence: Synthetic oligonucleotide
  Target: LAMA2; (+) strand; PAM type: YTN; PAM sequence: TTA
aatgtaaatagaggtgaatg

SEQ ID NO: 391606 - DNA, 20 bp, Artificial Sequence
  Description of Artificial Sequence: Synthetic oligonucleotide
  Target: LAMA2; (+) strand; PAM type: YTN; PAM sequence: CTG
agaatactctttgggaggtg

SEQ ID NO: 391607 - DNA, 20 bp, Artificial Sequence
  Description of Artificial Sequence: Synthetic oligonucleotide
  Target: LAMA2; (+) strand; PAM type: YTN; PAM sequence: CTC
tttgggaggtggggctgttt

SEQ ID NO: 391608 - DNA, 20 bp, Artificial Sequence
  Description of Artificial Sequence: Synthetic oligonucleotide
  Target: LAMA2; (+) strand; PAM type: YTN; PAM sequence: CTT
tgggaggtggggctgttttg

SEQ ID NO: 391609 - DNA, 20 bp, Artificial Sequence
  Description of Artificial Sequence: Synthetic oligonucleotide
  Target: LAMA2; (+) strand; PAM type: YTN; PAM sequence: TTT
gggaggtggggctgttttgg

SEQ ID NO: 391610 - DNA, 20 bp, Artificial Sequence
  Description of Artificial Sequence: Synthetic oligonucleotide
  Target: LAMA2; (+) strand; PAM type: YTN; PAM sequence: TTG
ggaggtggggctgttttggg

SEQ ID NO: 391611 - DNA, 20 bp, Artificial Sequence
  Description of Artificial Sequence: Synthetic oligonucleotide
  Target: LAMA2; (+) strand; PAM type: YTN; PAM sequence: CTG
ttttggggttctgttttact

SEQ ID NO: 391612 - DNA, 20 bp, Artificial Sequence
  Description of Artificial Sequence: Synthetic oligonucleotide
  Target: LAMA2; (+) strand; PAM type: YTN; PAM sequence: TTT
tggggttctgttttactttg

SEQ ID NO: 391613 - DNA, 20 bp, Artificial Sequence
  Description of Artificial Sequence: Synthetic oligonucleotide
  Target: LAMA2; (+) strand; PAM type: YTN; PAM sequence: TTT
ggggttctgttttactttgc

SEQ ID NO: 391614 - DNA, 20 bp, Artificial Sequence
  Description of Artificial Sequence: Synthetic oligonucleotide
  Target: LAMA2; (+) strand; PAM type: YTN; PAM sequence: TTG
gggttctgttttactttgct

SEQ ID NO: 391615 - DNA, 20 bp, Artificial Sequence
  Description of Artificial Sequence: Synthetic oligonucleotide
  Target: LAMA2; (+) strand; PAM type: YTN; PAM sequence: TTC
tgttttactttgctgacact

SEQ ID NO: 391616 - DNA, 20 bp, Artificial Sequence
  Description of Artificial Sequence: Synthetic oligonucleotide
  Target: LAMA2; (+) strand; PAM type: YTN; PAM sequence: CTG
ttttactttgctgacactgc

SEQ ID NO: 391617 - DNA, 20 bp, Artificial Sequence
  Description of Artificial Sequence: Synthetic oligonucleotide
  Target: LAMA2; (+) strand; PAM type: YTN; PAM sequence: TTT
tactttgctgacactgctgc

SEQ ID NO: 391618 - DNA, 20 bp, Artificial Sequence
  Description of Artificial Sequence: Synthetic oligonucleotide
  Target: LAMA2; (+) strand; PAM type: YTN; PAM sequence: TTT
actttgctgacactgctgca

SEQ ID NO: 391619 - DNA, 20 bp, Artificial Sequence
  Description of Artificial Sequence: Synthetic oligonucleotide
  Target: LAMA2; (+) strand; PAM type: YTN; PAM sequence: TTA
ctttgctgacactgctgcat

SEQ ID NO: 391620 - DNA, 20 bp, Artificial Sequence
  Description of Artificial Sequence: Synthetic oligonucleotide
  Target: LAMA2; (+) strand; PAM type: YTN; PAM sequence: CTT
tgctgacactgctgcatgat

SEQ ID NO: 391621 - DNA, 20 bp, Artificial Sequence
  Description of Artificial Sequence: Synthetic oligonucleotide
  Target: LAMA2; (+) strand; PAM type: YTN; PAM sequence: TTT
gctgacactgctgcatgatt

SEQ ID NO: 391622 - DNA, 20 bp, Artificial Sequence
  Description of Artificial Sequence: Synthetic oligonucleotide
  Target: LAMA2; (+) strand; PAM type: YTN; PAM sequence: TTG
ctgacactgctgcatgattc

SEQ ID NO: 391623 - DNA, 20 bp, Artificial Sequence
  Description of Artificial Sequence: Synthetic oligonucleotide
  Target: LAMA2; (+) strand; PAM type: YTN; PAM sequence: CTG
acactgctgcatgattctgt

SEQ ID NO: 391624 - DNA, 20 bp, Artificial Sequence
  Description of Artificial Sequence: Synthetic oligonucleotide
  Target: LAMA2; (+) strand; PAM type: YTN; PAM sequence: CTG
ctgcatgattctgtgattaa

SEQ ID NO: 391625 - DNA, 20 bp, Artificial Sequence
  Description of Artificial Sequence: Synthetic oligonucleotide
  Target: LAMA2; (+) strand; PAM type: YTN; PAM sequence: CTG
catgattctgtgattaacaa

SEQ ID NO: 391626 - DNA, 20 bp, Artificial Sequence
  Description of Artificial Sequence: Synthetic oligonucleotide
  Target: LAMA2; (+) strand; PAM type: YTN; PAM sequence: TTC
tgtgattaacaagcatattt

SEQ ID NO: 391627 - DNA, 20 bp, Artificial Sequence
  Description of Artificial Sequence: Synthetic oligonucleotide
  Target: LAMA2; (+) strand; PAM type: YTN; PAM sequence: CTG
tgattaacaagcatatttct

SEQ ID NO: 391628 - DNA, 20 bp, Artificial Sequence
  Description of Artificial Sequence: Synthetic oligonucleotide
  Target: LAMA2; (+) strand; PAM type: YTN; PAM sequence: TTA
acaagcatatttctggtgct

SEQ ID NO: 391629 - DNA, 20 bp, Artificial Sequence
  Description of Artificial Sequence: Synthetic oligonucleotide
  Target: LAMA2; (+) strand; PAM type: YTN; PAM sequence: TTT
ctggtgctatcatatggaaa

SEQ ID NO: 391630 - DNA, 20 bp, Artificial Sequence
  Description of Artificial Sequence: Synthetic oligonucleotide
  Target: LAMA2; (+) strand; PAM type: YTN; PAM sequence: TTC
tggtgctatcatatggaaaa

SEQ ID NO: 391631 - DNA, 20 bp, Artificial Sequence
  Description of Artificial Sequence: Synthetic oligonucleotide
  Target: LAMA2; (+) strand; PAM type: YTN; PAM sequence: CTG
gtgctatcatatggaaaagt

SEQ ID NO: 391632 - DNA, 20 bp, Artificial Sequence
  Description of Artificial Sequence: Synthetic oligonucleotide
  Target: LAMA2; (+) strand; PAM type: YTN; PAM sequence: CTA
tcatatggaaaagttagcat

SEQ ID NO: 391633 - DNA, 20 bp, Artificial Sequence
  Description of Artificial Sequence: Synthetic oligonucleotide
  Target: LAMA2; (+) strand; PAM type: YTN; PAM sequence: TTA
gcatttattctcccttaaca

SEQ ID NO: 391634 - DNA, 20 bp, Artificial Sequence
  Description of Artificial Sequence: Synthetic oligonucleotide
  Target: LAMA2; (+) strand; PAM type: YTN; PAM sequence: TTT
attctcccttaacattttat

SEQ ID NO: 391635 - DNA, 20 bp, Artificial Sequence
  Description of Artificial Sequence: Synthetic oligonucleotide
  Target: LAMA2; (+) strand; PAM type: YTN; PAM sequence: TTA
ttctcccttaacattttatt

SEQ ID NO: 391636 - DNA, 20 bp, Artificial Sequence
  Description of Artificial Sequence: Synthetic oligonucleotide
  Target: LAMA2; (+) strand; PAM type: YTN; PAM sequence: TTC
tcccttaacattttattggc

SEQ ID NO: 391637 - DNA, 20 bp, Artificial Sequence
  Description of Artificial Sequence: Synthetic oligonucleotide
  Target: LAMA2; (+) strand; PAM type: YTN; PAM sequence: CTC
ccttaacattttattggcat

SEQ ID NO: 391638 - DNA, 20 bp, Artificial Sequence
  Description of Artificial Sequence: Synthetic oligonucleotide
  Target: LAMA2; (+) strand; PAM type: YTN; PAM sequence: CTT
aacattttattggcatcttt

SEQ ID NO: 391639 - DNA, 20 bp, Artificial Sequence
  Description of Artificial Sequence: Synthetic oligonucleotide
  Target: LAMA2; (+) strand; PAM type: YTN; PAM sequence: TTA
acattttattggcatctttg

SEQ ID NO: 391640 - DNA, 20 bp, Artificial Sequence
  Description of Artificial Sequence: Synthetic oligonucleotide
  Target: LAMA2; (+) strand; PAM type: YTN; PAM sequence: TTT
tattggcatctttgatgtgt

SEQ ID NO: 391641 - DNA, 20 bp, Artificial Sequence
  Description of Artificial Sequence: Synthetic oligonucleotide
  Target: LAMA2; (+) strand; PAM type: YTN; PAM sequence: TTT
attggcatctttgatgtgtt

SEQ ID NO: 391642 - DNA, 20 bp, Artificial Sequence
  Description of Artificial Sequence: Synthetic oligonucleotide
  Target: LAMA2; (+) strand; PAM type: YTN; PAM sequence: TTA
ttggcatctttgatgtgtta

SEQ ID NO: 391643 - DNA, 20 bp, Artificial Sequence
  Description of Artificial Sequence: Synthetic oligonucleotide
  Target: LAMA2; (+) strand; PAM type: YTN; PAM sequence: TTG
gcatctttgatgtgttataa

SEQ ID NO: 391644 - DNA, 20 bp, Artificial Sequence
  Description of Artificial Sequence: Synthetic oligonucleotide
  Target: LAMA2; (+) strand; PAM type: YTN; PAM sequence: CTT
tgatgtgttataaaacaggc

SEQ ID NO: 391645 - DNA, 20 bp, Artificial Sequence
  Description of Artificial Sequence: Synthetic oligonucleotide
  Target: LAMA2; (+) strand; PAM type: YTN; PAM sequence: TTT
gatgtgttataaaacaggca

SEQ ID NO: 391646 - DNA, 20 bp, Artificial Sequence
  Description of Artificial Sequence: Synthetic oligonucleotide
  Target: LAMA2; (+) strand; PAM type: YTN; PAM sequence: TTG
atgtgttataaaacaggcat

SEQ ID NO: 391647 - DNA, 20 bp, Artificial Sequence
  Description of Artificial Sequence: Synthetic oligonucleotide
  Target: LAMA2; (+) strand; PAM type: YTN; PAM sequence: TTA
taaaacaggcatttactact

SEQ ID NO: 391648 - DNA, 20 bp, Artificial Sequence
  Description of Artificial Sequence: Synthetic oligonucleotide
  Target: LAMA2; (+) strand; PAM type: YTN; PAM sequence: TTT
actactgagtagctaagcat

SEQ ID NO: 391649 - DNA, 20 bp, Artificial Sequence
  Description of Artificial Sequence: Synthetic oligonucleotide
  Target: LAMA2; (+) strand; PAM type: YTN; PAM sequence: TTA
ctactgagtagctaagcatt

SEQ ID NO: 391650 - DNA, 20 bp, Artificial Sequence
  Description of Artificial Sequence: Synthetic oligonucleotide
  Target: LAMA2; (+) strand; PAM type: YTN; PAM sequence: CTA
ctgagtagctaagcatttct

SEQ ID NO: 391651 - DNA, 20 bp, Artificial Sequence
  Description of Artificial Sequence: Synthetic oligonucleotide
  Target: LAMA2; (+) strand; PAM type: YTN; PAM sequence: CTG
agtagctaagcatttctccc

SEQ ID NO: 391652 - DNA, 20 bp, Artificial Sequence
  Description of Artificial Sequence: Synthetic oligonucleotide
  Target: LAMA2; (+) strand; PAM type: YTN; PAM sequence: CTA
agcatttctccctctttgtt

SEQ ID NO: 391653 - DNA, 20 bp, Artificial Sequence
  Description of Artificial Sequence: Synthetic oligonucleotide
  Target: LAMA2; (+) strand; PAM type: YTN; PAM sequence: TTT
ctccctctttgtttctttaa

SEQ ID NO: 391654 - DNA, 20 bp, Artificial Sequence
  Description of Artificial Sequence: Synthetic oligonucleotide
  Target: LAMA2; (+) strand; PAM type: YTN; PAM sequence: TTC
tccctctttgtttctttaat

SEQ ID NO: 391655 - DNA, 20 bp, Artificial Sequence
  Description of Artificial Sequence: Synthetic oligonucleotide
  Target: LAMA2; (+) strand; PAM type: YTN; PAM sequence: CTC
cctctttgtttctttaatta

SEQ ID NO: 391656 - DNA, 20 bp, Artificial Sequence
  Description of Artificial Sequence: Synthetic oligonucleotide
  Target: LAMA2; (+) strand; PAM type: YTN; PAM sequence: CTC
tttgtttctttaattaacgt

SEQ ID NO: 391657 - DNA, 20 bp, Artificial Sequence
  Description of Artificial Sequence: Synthetic oligonucleotide
  Target: LAMA2; (+) strand; PAM type: YTN; PAM sequence: CTT
tgtttctttaattaacgtat

SEQ ID NO: 391658 - DNA, 20 bp, Artificial Sequence
  Description of Artificial Sequence: Synthetic oligonucleotide
  Target: LAMA2; (+) strand; PAM type: YTN; PAM sequence: TTT
gtttctttaattaacgtatt

SEQ ID NO: 391659 - DNA, 20 bp, Artificial Sequence
  Description of Artificial Sequence: Synthetic oligonucleotide
  Target: LAMA2; (+) strand; PAM type: YTN; PAM sequence: TTG
tttctttaattaacgtattg

SEQ ID NO: 391660 - DNA, 20 bp, Artificial Sequence
  Description of Artificial Sequence: Synthetic oligonucleotide
  Target: LAMA2; (+) strand; PAM type: YTN; PAM sequence: TTT
ctttaattaacgtattgatc

SEQ ID NO: 391661 - DNA, 20 bp, Artificial Sequence
  Description of Artificial Sequence: Synthetic oligonucleotide
  Target: LAMA2; (+) strand; PAM type: YTN; PAM sequence: TTC
tttaattaacgtattgatct

SEQ ID NO: 391662 - DNA, 20 bp, Artificial Sequence
  Description of Artificial Sequence: Synthetic oligonucleotide
  Target: LAMA2; (+) strand; PAM type: YTN; PAM sequence: CTT
taattaacgtattgatctaa

SEQ ID NO: 391663 - DNA, 20 bp, Artificial Sequence
  Description of Artificial Sequence: Synthetic oligonucleotide
  Target: LAMA2; (+) strand; PAM type: YTN; PAM sequence: TTT
aattaacgtattgatctaaa

SEQ ID NO: 391664 - DNA, 20 bp, Artificial Sequence
  Description of Artificial Sequence: Synthetic oligonucleotide
  Target: LAMA2; (+) strand; PAM type: YTN; PAM sequence: TTA
attaacgtattgatctaaaa

SEQ ID NO: 391665 - DNA, 20 bp, Artificial Sequence
  Description of Artificial Sequence: Synthetic oligonucleotide
  Target: LAMA2; (+) strand; PAM type: YTN; PAM sequence: TTA
acgtattgatctaaaacaaa

SEQ ID NO: 391666 - DNA, 20 bp, Artificial Sequence
  Description of Artificial Sequence: Synthetic oligonucleotide
  Target: LAMA2; (+) strand; PAM type: YTN; PAM sequence: TTG
atctaaaacaaatctatagg

SEQ ID NO: 391667 - DNA, 20 bp, Artificial Sequence
  Description of Artificial Sequence: Synthetic oligonucleotide
  Target: LAMA2; (+) strand; PAM type: YTN; PAM sequence: CTA
aaacaaatctataggatcaa

SEQ ID NO: 391668 - DNA, 20 bp, Artificial Sequence
  Description of Artificial Sequence: Synthetic oligonucleotide
  Target: LAMA2; (+) strand; PAM type: YTN; PAM sequence: CTA
taggatcaagcttattgagg

SEQ ID NO: 391669 - DNA, 20 bp, Artificial Sequence
  Description of Artificial Sequence: Synthetic oligonucleotide
  Target: LAMA2; (+) strand; PAM type: YTN; PAM sequence: CTT
attgaggcagacagcctgtt

SEQ ID NO: 391670 - DNA, 20 bp, Artificial Sequence
  Description of Artificial Sequence: Synthetic oligonucleotide
  Target: LAMA2; (+) strand; PAM type: YTN; PAM sequence: TTA
ttgaggcagacagcctgttt

SEQ ID NO: 391671 - DNA, 20 bp, Artificial Sequence
  Description of Artificial Sequence: Synthetic oligonucleotide
  Target: LAMA2; (+) strand; PAM type: YTN; PAM sequence: TTG
aggcagacagcctgtttgtc

SEQ ID NO: 391672 - DNA, 20 bp, Artificial Sequence
  Description of Artificial Sequence: Synthetic oligonucleotide
  Target: LAMA2; (+) strand; PAM type: YTN; PAM sequence: CTG
tttgtctctcaagagatcat

SEQ ID NO: 391673 - DNA, 20 bp, Artificial Sequence
  Description of Artificial Sequence: Synthetic oligonucleotide
  Target: LAMA2; (+) strand; PAM type: YTN; PAM sequence: TTT
gtctctcaagagatcattgc

SEQ ID NO: 391674 - DNA, 20 bp, Artificial Sequence
  Description of Artificial Sequence: Synthetic oligonucleotide
  Target: LAMA2; (+) strand; PAM type: YTN; PAM sequence: TTG
tctctcaagagatcattgct

SEQ ID NO: 391675 - DNA, 20 bp, Artificial Sequence
  Description of Artificial Sequence: Synthetic oligonucleotide
  Target: LAMA2; (+) strand; PAM type: YTN; PAM sequence: CTC
tcaagagatcattgctgcac

SEQ ID NO: 391676 - DNA, 20 bp, Artificial Sequence
  Description of Artificial Sequence: Synthetic oligonucleotide
  Target: LAMA2; (+) strand; PAM type: YTN; PAM sequence: CTC
aagagatcattgctgcactc

SEQ ID NO: 391677 - DNA, 20 bp, Artificial Sequence
  Description of Artificial Sequence: Synthetic oligonucleotide
  Target: LAMA2; (+) strand; PAM type: YTN; PAM sequence: TTG
ctgcactccacacacttttt

SEQ ID NO: 391678 - DNA, 20 bp, Artificial Sequence
  Description of Artificial Sequence: Synthetic oligonucleotide
  Target: LAMA2; (+) strand; PAM type: YTN; PAM sequence: CTG
cactccacacactttttcag

SEQ ID NO: 391679 - DNA, 20 bp, Artificial Sequence
  Description of Artificial Sequence: Synthetic oligonucleotide
  Target: LAMA2; (+) strand; PAM type: YTN; PAM sequence: CTC
cacacactttttcagtaaat

SEQ ID NO: 391680 - DNA, 20 bp, Artificial Sequence
  Description of Artificial Sequence: Synthetic oligonucleotide
  Target: LAMA2; (+) strand; PAM type: YTN; PAM sequence: CTT
tttcagtaaataaaatatgg

SEQ ID NO: 391681 - DNA, 20 bp, Artificial Sequence
  Description of Artificial Sequence: Synthetic oligonucleotide
  Target: LAMA2; (+) strand; PAM type: YTN; PAM sequence: TTT
ttcagtaaataaaatatgga

SEQ ID NO: 391682 - DNA, 20 bp, Artificial Sequence
  Description of Artificial Sequence: Synthetic oligonucleotide
  Target: LAMA2; (+) strand; PAM type: YTN; PAM sequence: TTT
tcagtaaataaaatatggac

SEQ ID NO: 391683 - DNA, 20 bp, Artificial Sequence
  Description of Artificial Sequence: Synthetic oligonucleotide
  Target: LAMA2; (+) strand; PAM type: YTN; PAM sequence: TTT
cagtaaataaaatatggaca

SEQ ID NO: 391684 - DNA, 20 bp, Artificial Sequence
  Description of Artificial Sequence: Synthetic oligonucleotide
  Target: LAMA2; (+) strand; PAM type: YTN; PAM sequence: TTC
agtaaataaaatatggacaa

SEQ ID NO: 391685 - DNA, 20 bp, Artificial Sequence
  Description of Artificial Sequence: Synthetic oligonucleotide
  Target: LAMA2; (+) strand; PAM type: YTN; PAM sequence: CTG
caacatgtggaggctgaaga

SEQ ID NO: 391686 - DNA, 20 bp, Artificial Sequence
  Description of Artificial Sequence: Synthetic oligonucleotide
  Target: LAMA2; (+) strand; PAM type: YTN; PAM sequence: CTG
aagattccattaaggacttt

SEQ ID NO: 391687 - DNA, 20 bp, Artificial Sequence
  Description of Artificial Sequence: Synthetic oligonucleotide
  Target: LAMA2; (+) strand; PAM type: YTN; PAM sequence: TTC
cattaaggacttttggcatc

SEQ ID NO: 391688 - DNA, 20 bp, Artificial Sequence
  Description of Artificial Sequence: Synthetic oligonucleotide
  Target: LAMA2; (+) strand; PAM type: YTN; PAM sequence: TTA
aggacttttggcatctgtac

SEQ ID NO: 391689 - DNA, 20 bp, Artificial Sequence
  Description of Artificial Sequence: Synthetic oligonucleotide
  Target: LAMA2; (+) strand; PAM type: YTN; PAM sequence: CTT
ttggcatctgtaccttaaag

SEQ ID NO: 391690 - DNA, 20 bp, Artificial Sequence
  Description of Artificial Sequence: Synthetic oligonucleotide
  Target: LAMA2; (+) strand; PAM type: YTN; PAM sequence: TTT
tggcatctgtaccttaaaga

SEQ ID NO: 391691 - DNA, 20 bp, Artificial Sequence
  Description of Artificial Sequence: Synthetic oligonucleotide
  Target: LAMA2; (+) strand; PAM type: YTN; PAM sequence: TTT
ggcatctgtaccttaaagat

SEQ ID NO: 391692 - DNA, 20 bp, Artificial Sequence
  Description of Artificial Sequence: Synthetic oligonucleotide
  Target: LAMA2; (+) strand; PAM type: YTN; PAM sequence: TTG
gcatctgtaccttaaagata

SEQ ID NO: 391693 - DNA, 20 bp, Artificial Sequence
  Description of Artificial Sequence: Synthetic oligonucleotide
  Target: LAMA2; (+) strand; PAM type: YTN; PAM sequence: CTG
taccttaaagatatttcaaa

SEQ ID NO: 391694 - DNA, 20 bp, Artificial Sequence
  Description of Artificial Sequence: Synthetic oligonucleotide
  Target: LAMA2; (+) strand; PAM type: YTN; PAM sequence: CTT
aaagatatttcaaaaataat

SEQ ID NO: 391695 - DNA, 20 bp, Artificial Sequence
  Description of Artificial Sequence: Synthetic oligonucleotide
  Target: LAMA2; (+) strand; PAM type: YTN; PAM sequence: TTA
aagatatttcaaaaataatt

SEQ ID NO: 391696 - DNA, 20 bp, Artificial Sequence
  Description of Artificial Sequence: Synthetic oligonucleotide
  Target: LAMA2; (+) strand; PAM type: YTN; PAM sequence: TTT
caaaaataattgtgctttat

SEQ ID NO: 391697 - DNA, 20 bp, Artificial Sequence
  Description of Artificial Sequence: Synthetic oligonucleotide
  Target: LAMA2; (+) strand; PAM type: YTN; PAM sequence: TTC
aaaaataattgtgctttatt

SEQ ID NO: 391698 - DNA, 20 bp, Artificial Sequence
  Description of Artificial Sequence: Synthetic oligonucleotide
  Target: LAMA2; (+) strand; PAM type: YTN; PAM sequence: TTG
tgctttattgcttcttctct

SEQ ID NO: 391699 - DNA, 20 bp, Artificial Sequence
  Description of Artificial Sequence: Synthetic oligonucleotide
  Target: LAMA2; (+) strand; PAM type: YTN; PAM sequence: CTT
tattgcttcttctctgccat

SEQ ID NO: 391700 - DNA, 20 bp, Artificial Sequence
  Description of Artificial Sequence: Synthetic oligonucleotide
  Target: LAMA2; (+) strand; PAM type: YTN; PAM sequence: TTT
attgcttcttctctgccata

SEQ ID NO: 391701 - DNA, 20 bp, Artificial Sequence
  Description of Artificial Sequence: Synthetic oligonucleotide
  Target: LAMA2; (+) strand; PAM type: YTN; PAM sequence: TTA
ttgcttcttctctgccatag

SEQ ID NO: 391702 - DNA, 20 bp, Artificial Sequence
  Description of Artificial Sequence: Synthetic oligonucleotide
  Target: LAMA2; (+) strand; PAM type: YTN; PAM sequence: TTG
cttcttctctgccatagcat

SEQ ID NO: 391703 - DNA, 20 bp, Artificial Sequence
  Description of Artificial Sequence: Synthetic oligonucleotide
  Target: LAMA2; (+) strand; PAM type: YTN; PAM sequence: CTT
cttctctgccatagcatata

SEQ ID NO: 391704 - DNA, 20 bp, Artificial Sequence
  Description of Artificial Sequence: Synthetic oligonucleotide
  Target: LAMA2; (+) strand; PAM type: YTN; PAM sequence: TTC
ttctctgccatagcatataa

SEQ ID NO: 391705 - DNA, 20 bp, Artificial Sequence
  Description of Artificial Sequence: Synthetic oligonucleotide
  Target: LAMA2; (+) strand; PAM type: YTN; PAM sequence: CTT
ctctgccatagcatataaca

SEQ ID NO: 391706 - DNA, 20 bp, Artificial Sequence
  Description of Artificial Sequence: Synthetic oligonucleotide
  Target: LAMA2; (+) strand; PAM type: YTN; PAM sequence: TTC
tctgccatagcatataacaa

SEQ ID NO: 391707 - DNA, 20 bp, Artificial Sequence
  Description of Artificial Sequence: Synthetic oligonucleotide
  Target: LAMA2; (+) strand; PAM type: YTN; PAM sequence: CTC
tgccatagcatataacaagc

SEQ ID NO: 391708 - DNA, 20 bp, Artificial Sequence
  Description of Artificial Sequence: Synthetic oligonucleotide
  Target: LAMA2; (+) strand; PAM type: YTN; PAM sequence: CTG
ccatagcatataacaagcgt

SEQ ID NO: 391709 - DNA, 20 bp, Artificial Sequence
  Description of Artificial Sequence: Synthetic oligonucleotide
  Target: LAMA2; (+) strand; PAM type: YTN; PAM sequence: TTT
tttaaaagaccaaatacagc

SEQ ID NO: 391710 - DNA, 20 bp, Artificial Sequence
  Description of Artificial Sequence: Synthetic oligonucleotide
  Target: LAMA2; (+) strand; PAM type: YTN; PAM sequence: TTT
ttaaaagaccaaatacagct

SEQ ID NO: 391711 - DNA, 20 bp, Artificial Sequence
  Description of Artificial Sequence: Synthetic oligonucleotide
  Target: LAMA2; (+) strand; PAM type: YTN; PAM sequence: TTT
taaaagaccaaatacagctc

SEQ ID NO: 391712 - DNA, 20 bp, Artificial Sequence
  Description of Artificial Sequence: Synthetic oligonucleotide
  Target: LAMA2; (+) strand; PAM type: YTN; PAM sequence: TTT
aaaagaccaaatacagctct

SEQ ID NO: 391713 - DNA, 20 bp, Artificial Sequence
  Description of Artificial Sequence: Synthetic oligonucleotide
  Target: LAMA2; (+) strand; PAM type: YTN; PAM sequence: TTA
aaagaccaaatacagctctc

SEQ ID NO: 391714 - DNA, 20 bp, Artificial Sequence
  Description of Artificial Sequence: Synthetic oligonucleotide
  Target: LAMA2; (+) strand; PAM type: YTN; PAM sequence: CTC
tctgatttccatttaatgga

SEQ ID NO: 391715 - DNA, 20 bp, Artificial Sequence
  Description of Artificial Sequence: Synthetic oligonucleotide
  Target: LAMA2; (+) strand; PAM type: YTN; PAM sequence: CTC
tgatttccatttaatggaag

SEQ ID NO: 391716 - DNA, 20 bp, Artificial Sequence
  Description of Artificial Sequence: Synthetic oligonucleotide
  Target: LAMA2; (+) strand; PAM type: YTN; PAM sequence: CTG
atttccatttaatggaagaa

SEQ ID NO: 391717 - DNA, 20 bp, Artificial Sequence
  Description of Artificial Sequence: Synthetic oligonucleotide
  Target: LAMA2; (+) strand; PAM type: YTN; PAM sequence: TTT
ccatttaatggaagaagtaa

SEQ ID NO: 391718 - DNA, 20 bp, Artificial Sequence
  Description of Artificial Sequence: Synthetic oligonucleotide
  Target: LAMA2; (+) strand; PAM type: YTN; PAM sequence: TTC
catttaatggaagaagtaat

SEQ ID NO: 391719 - DNA, 20 bp, Artificial Sequence
  Description of Artificial Sequence: Synthetic oligonucleotide
  Target: LAMA2; (+) strand; PAM type: YTN; PAM sequence: TTT
aatggaagaagtaataaagt

SEQ ID NO: 391720 - DNA, 20 bp, Artificial Sequence
  Description of Artificial Sequence: Synthetic oligonucleotide
  Target: LAMA2; (+) strand; PAM type: YTN; PAM sequence: TTA
atggaagaagtaataaagtt

SEQ ID NO: 391721 - DNA, 20 bp, Artificial Sequence
  Description of Artificial Sequence: Synthetic oligonucleotide
  Target: LAMA2; (+) strand; PAM type: YTN; PAM sequence: TTT
aattgtatacgtgagcatgg

SEQ ID NO: 391722 - DNA, 20 bp, Artificial Sequence
  Description of Artificial Sequence: Synthetic oligonucleotide
  Target: LAMA2; (+) strand; PAM type: YTN; PAM sequence: TTA
attgtatacgtgagcatggg

SEQ ID NO: 391723 - DNA, 20 bp, Artificial Sequence
  Description of Artificial Sequence: Synthetic oligonucleotide
  Target: LAMA2; (+) strand; PAM type: YTN; PAM sequence: TTG
tatacgtgagcatggggcat

SEQ ID NO: 391724 - DNA, 20 bp, Artificial Sequence
  Description of Artificial Sequence: Synthetic oligonucleotide
  Target: LAMA2; (+) strand; PAM type: YTN; PAM sequence: TTT
gcaatacatctgatcaataa

SEQ ID NO: 391725 - DNA, 20 bp, Artificial Sequence
  Description of Artificial Sequence: Synthetic oligonucleotide
  Target: LAMA2; (+) strand; PAM type: YTN; PAM sequence: TTG
caatacatctgatcaataat

SEQ ID NO: 391726 - DNA, 20 bp, Artificial Sequence
  Description of Artificial Sequence: Synthetic oligonucleotide
  Target: LAMA2; (+) strand; PAM type: YTN; PAM sequence: CTG
atcaataattcatcgattgc

SEQ ID NO: 391727 - DNA, 20 bp, Artificial Sequence
  Description of Artificial Sequence: Synthetic oligonucleotide
  Target: LAMA2; (+) strand; PAM type: YTN; PAM sequence: TTC
atcgattgccgttggctcaa

SEQ ID NO: 391728 - DNA, 20 bp, Artificial Sequence
  Description of Artificial Sequence: Synthetic oligonucleotide
  Target: LAMA2; (+) strand; PAM type: YTN; PAM sequence: TTG
ccgttggctcaaagtaatat

SEQ ID NO: 391729 - DNA, 20 bp, Artificial Sequence
  Description of Artificial Sequence: Synthetic oligonucleotide
  Target: LAMA2; (+) strand; PAM type: YTN; PAM sequence: TTG
gctcaaagtaatatttgaaa

SEQ ID NO: 391730 - DNA, 20 bp, Artificial Sequence
  Description of Artificial Sequence: Synthetic oligonucleotide
  Target: LAMA2; (+) strand; PAM type: YTN; PAM sequence: CTC
aaagtaatatttgaaagaaa

SEQ ID NO: 391731 - DNA, 20 bp, Artificial Sequence
  Description of Artificial Sequence: Synthetic oligonucleotide
  Target: LAMA2; (+) strand; PAM type: YTN; PAM sequence: TTT
gaaagaaaatgcagccagtg

SEQ ID NO: 391732 - DNA, 20 bp, Artificial Sequence
  Description of Artificial Sequence: Synthetic oligonucleotide
  Target: LAMA2; (+) strand; PAM type: YTN; PAM sequence: TTG
aaagaaaatgcagccagtgg

SEQ ID NO: 391733 - DNA, 20 bp, Artificial Sequence
  Description of Artificial Sequence: Synthetic oligonucleotide
  Target: LAMA2; (+) strand; PAM type: YTN; PAM sequence: CTT
atctagctgtagcttcatca

SEQ ID NO: 391734 - DNA, 20 bp, Artificial Sequence
  Description of Artificial Sequence: Synthetic oligonucleotide
  Target: LAMA2; (+) strand; PAM type: YTN; PAM sequence: TTA
tctagctgtagcttcatcat

SEQ ID NO: 391735 - DNA, 20 bp, Artificial Sequence
  Description of Artificial Sequence: Synthetic oligonucleotide
  Target: LAMA2; (+) strand; PAM type: YTN; PAM sequence: CTA
gctgtagcttcatcatctct

SEQ ID NO: 391736 - DNA, 20 bp, Artificial Sequence
  Description of Artificial Sequence: Synthetic oligonucleotide
  Target: LAMA2; (+) strand; PAM type: YTN; PAM sequence: CTG
tagcttcatcatctctatta

SEQ ID NO: 391737 - DNA, 20 bp, Artificial Sequence
  Description of Artificial Sequence: Synthetic oligonucleotide
  Target: LAMA2; (+) strand; PAM type: YTN; PAM sequence: CTT
catcatctctattaattatg

SEQ ID NO: 391738 - DNA, 20 bp, Artificial Sequence
  Description of Artificial Sequence: Synthetic oligonucleotide
  Target: LAMA2; (+) strand; PAM type: YTN; PAM sequence: TTC
atcatctctattaattatgt

SEQ ID NO: 391739 - DNA, 20 bp, Artificial Sequence
  Description of Artificial Sequence: Synthetic oligonucleotide
  Target: LAMA2; (+) strand; PAM type: YTN; PAM sequence: CTC
tattaattatgtgtttcccg

SEQ ID NO: 391740 - DNA, 20 bp, Artificial Sequence
  Description of Artificial Sequence: Synthetic oligonucleotide
  Target: LAMA2; (+) strand; PAM type: YTN; PAM sequence: CTA
ttaattatgtgtttcccgaa

SEQ ID NO: 391741 - DNA, 20 bp, Artificial Sequence
  Description of Artificial Sequence: Synthetic oligonucleotide
  Target: LAMA2; (+) strand; PAM type: YTN; PAM sequence: TTA
attatgtgtttcccgaattt

SEQ ID NO: 391742 - DNA, 20 bp, Artificial Sequence
  Description of Artificial Sequence: Synthetic oligonucleotide
  Target: LAMA2; (+) strand; PAM type: YTN; PAM sequence: TTA
tgtgtttcccgaatttggat

SEQ ID NO: 391743 - DNA, 20 bp, Artificial Sequence
  Description of Artificial Sequence: Synthetic oligonucleotide
  Target: LAMA2; (+) strand; PAM type: YTN; PAM sequence: TTT
cccgaatttggatcattagg

SEQ ID NO: 391744 - DNA, 20 bp, Artificial Sequence
  Description of Artificial Sequence: Synthetic oligonucleotide
  Target: LAMA2; (+) strand; PAM type: YTN; PAM sequence: TTC
ccgaatttggatcattaggc

SEQ ID NO: 391745 - DNA, 20 bp, Artificial Sequence
  Description of Artificial Sequence: Synthetic oligonucleotide
  Target: LAMA2; (+) strand; PAM type: YTN; PAM sequence: TTT
ggatcattaggctaccaaag

SEQ ID NO: 391746 - DNA, 20 bp, Artificial Sequence
  Description of Artificial Sequence: Synthetic oligonucleotide
  Target: LAMA2; (+) strand; PAM type: YTN; PAM sequence: TTG
gatcattaggctaccaaagt

SEQ ID NO: 391747 - DNA, 20 bp, Artificial Sequence
  Description of Artificial Sequence: Synthetic oligonucleotide
  Target: LAMA2; (+) strand; PAM type: YTN; PAM sequence: TTA
ggctaccaaagtgacagcag

SEQ ID NO: 391748 - DNA, 20 bp, Artificial Sequence
  Description of Artificial Sequence: Synthetic oligonucleotide
  Target: LAMA2; (+) strand; PAM type: YTN; PAM sequence: CTA
ccaaagtgacagcagatggc

SEQ ID NO: 391749 - DNA, 20 bp, Artificial Sequence
  Description of Artificial Sequence: Synthetic oligonucleotide
  Target: LAMA2; (+) strand; PAM type: YTN; PAM sequence: CTG
agaggaccaacacaagagca

SEQ ID NO: 391750 - DNA, 20 bp, Artificial Sequence
  Description of Artificial Sequence: Synthetic oligonucleotide
  Target: LAMA2; (+) strand; PAM type: YTN; PAM sequence: CTG
ggagaattcattaaggagct

SEQ ID NO: 391751 - DNA, 20 bp, Artificial Sequence
  Description of Artificial Sequence: Synthetic oligonucleotide
  Target: LAMA2; (+) strand; PAM type: YTN; PAM sequence: TTC
attaaggagcttgcccggga

SEQ ID NO: 391752 - DNA, 20 bp, Artificial Sequence
  Description of Artificial Sequence: Synthetic oligonucleotide
  Target: LAMA2; (+) strand; PAM type: YTN; PAM sequence: TTA
aggagcttgcccgggatgca

SEQ ID NO: 391753 - DNA, 20 bp, Artificial Sequence
  Description of Artificial Sequence: Synthetic oligonucleotide
  Target: LAMA2; (+) strand; PAM type: YTN; PAM sequence: CTT
gcccgggatgcagaaggtat

SEQ ID NO: 391754 - DNA, 20 bp, Artificial Sequence
  Description of Artificial Sequence: Synthetic oligonucleotide
  Target: LAMA2; (+) strand; PAM type: YTN; PAM sequence: TTG
cccgggatgcagaaggtatt

SEQ ID NO: 391755 - DNA, 20 bp, Artificial Sequence
  Description of Artificial Sequence: Synthetic oligonucleotide
  Target: LAMA2; (+) strand; PAM type: YTN; PAM sequence: TTA
gaaagaatcacattttaatc

SEQ ID NO: 391756 - DNA, 20 bp, Artificial Sequence
  Description of Artificial Sequence: Synthetic oligonucleotide
  Target: LAMA2; (+) strand; PAM type: YTN; PAM sequence: TTT
taatcatcatttctcccaac

SEQ ID NO: 391757 - DNA, 20 bp, Artificial Sequence
  Description of Artificial Sequence: Synthetic oligonucleotide
  Target: LAMA2; (+) strand; PAM type: YTN; PAM sequence: TTT
aatcatcatttctcccaaca

SEQ ID NO: 391758 - DNA, 20 bp, Artificial Sequence
  Description of Artificial Sequence: Synthetic oligonucleotide
  Target: LAMA2; (+) strand; PAM type: YTN; PAM sequence: TTA
atcatcatttctcccaacag

SEQ ID NO: 391759 - DNA, 20 bp, Artificial Sequence
  Description of Artificial Sequence: Synthetic oligonucleotide
  Target: LAMA2; (+) strand; PAM type: YTN; PAM sequence: TTT
ctcccaacagaaaaacacag

SEQ ID NO: 391760 - DNA, 20 bp, Artificial Sequence
  Description of Artificial Sequence: Synthetic oligonucleotide
  Target: LAMA2; (+) strand; PAM type: YTN; PAM sequence: TTC
tcccaacagaaaaacacaga

SEQ ID NO: 391761 - DNA, 20 bp, Artificial Sequence
  Description of Artificial Sequence: Synthetic oligonucleotide
  Target: LAMA2; (+) strand; PAM type: YTN; PAM sequence: CTC
ccaacagaaaaacacagaaa

SEQ ID NO: 391762 - DNA, 20 bp, Artificial Sequence
  Description of Artificial Sequence: Synthetic oligonucleotide
  Target: LAMA2; (+) strand; PAM type: YTN; PAM sequence: CTG
gaatttctcttgttataagt

SEQ ID NO: 391763 - DNA, 20 bp, Artificial Sequence
  Description of Artificial Sequence: Synthetic oligonucleotide
  Target: LAMA2; (+) strand; PAM type: YTN; PAM sequence: TTT
ctcttgttataagtgacatc

SEQ ID NO: 391764 - DNA, 20 bp, Artificial Sequence
  Description of Artificial Sequence: Synthetic oligonucleotide
  Target: LAMA2; (+) strand; PAM type: YTN; PAM sequence: TTC
tcttgttataagtgacatct

SEQ ID NO: 391765 - DNA, 20 bp, Artificial Sequence
  Description of Artificial Sequence: Synthetic oligonucleotide
  Target: LAMA2; (+) strand; PAM type: YTN; PAM sequence: CTC
ttgttataagtgacatctgt

SEQ ID NO: 391766 - DNA, 20 bp, Artificial Sequence
  Description of Artificial Sequence: Synthetic oligonucleotide
  Target: LAMA2; (+) strand; PAM type: YTN; PAM sequence: CTT
gttataagtgacatctgtaa

SEQ ID NO: 391767 - DNA, 20 bp, Artificial Sequence
  Description of Artificial Sequence: Synthetic oligonucleotide
  Target: LAMA2; (+) strand; PAM type: YTN; PAM sequence: TTG
ttataagtgacatctgtaaa

SEQ ID NO: 391768 - DNA, 20 bp, Artificial Sequence
  Description of Artificial Sequence: Synthetic oligonucleotide
  Target: LAMA2; (+) strand; PAM type: YTN; PAM sequence: TTA
taagtgacatctgtaaaatc

SEQ ID NO: 391769 - DNA, 20 bp, Artificial Sequence
  Description of Artificial Sequence: Synthetic oligonucleotide
  Target: LAMA2; (+) strand; PAM type: YTN; PAM sequence: CTG
taaaatcaaaggtagagttt

SEQ ID NO: 391770 - DNA, 20 bp, Artificial Sequence
  Description of Artificial Sequence: Synthetic oligonucleotide
  Target: LAMA2; (+) strand; PAM type: YTN; PAM sequence: TTT
caaaaagtagtgtggttaag

SEQ ID NO: 391771 - DNA, 20 bp, Artificial Sequence
  Description of Artificial Sequence: Synthetic oligonucleotide
  Target: LAMA2; (+) strand; PAM type: YTN; PAM sequence: TTC
aaaaagtagtgtggttaaga

SEQ ID NO: 391772 - DNA, 20 bp, Artificial Sequence
  Description of Artificial Sequence: Synthetic oligonucleotide
  Target: LAMA2; (+) strand; PAM type: YTN; PAM sequence: TTA
agatattcaagggtattatc

SEQ ID NO: 391773 - DNA, 20 bp, Artificial Sequence
  Description of Artificial Sequence: Synthetic oligonucleotide
  Target: LAMA2; (+) strand; PAM type: YTN; PAM sequence: TTC
aagggtattatctgctgaga

SEQ ID NO: 391774 - DNA, 20 bp, Artificial Sequence
  Description of Artificial Sequence: Synthetic oligonucleotide
  Target: LAMA2; (+) strand; PAM type: YTN; PAM sequence: TTA
tctgctgagaacctgtgacc

SEQ ID NO: 391775 - DNA, 20 bp, Artificial Sequence
  Description of Artificial Sequence: Synthetic oligonucleotide
  Target: LAMA2; (+) strand; PAM type: YTN; PAM sequence: CTG
ctgagaacctgtgacctgca

SEQ ID NO: 391776 - DNA, 20 bp, Artificial Sequence
  Description of Artificial Sequence: Synthetic oligonucleotide
  Target: LAMA2; (+) strand; PAM type: YTN; PAM sequence: CTG
agaacctgtgacctgcagtg

SEQ ID NO: 391777 - DNA, 20 bp, Artificial Sequence
  Description of Artificial Sequence: Synthetic oligonucleotide
  Target: LAMA2; (+) strand; PAM type: YTN; PAM sequence: CTG
tgacctgcagtgttaaatta

SEQ ID NO: 391778 - DNA, 20 bp, Artificial Sequence
  Description of Artificial Sequence: Synthetic oligonucleotide
  Target: LAMA2; (+) strand; PAM type: YTN; PAM sequence: CTG
cagtgttaaattagcgacaa

SEQ ID NO: 391779 - DNA, 20 bp, Artificial Sequence
  Description of Artificial Sequence: Synthetic oligonucleotide
  Target: LAMA2; (+) strand; PAM type: YTN; PAM sequence: TTA
aattagcgacaatagtgaat

SEQ ID NO: 391780 - DNA, 20 bp, Artificial Sequence
  Description of Artificial Sequence: Synthetic oligonucleotide
  Target: LAMA2; (+) strand; PAM type: YTN; PAM sequence: TTA
gcgacaatagtgaattagcg

SEQ ID NO: 391781 - DNA, 20 bp, Artificial Sequence
  Description of Artificial Sequence: Synthetic oligonucleotide
  Target: LAMA2; (+) strand; PAM type: YTN; PAM sequence: TTA
gcgacaatgagggcagaata

SEQ ID NO: 391782 - DNA, 20 bp, Artificial Sequence
  Description of Artificial Sequence: Synthetic oligonucleotide
  Target: LAMA2; (+) strand; PAM type: YTN; PAM sequence: TTC
ttgtaacatggctattataa

SEQ ID NO: 391783 - DNA, 20 bp, Artificial Sequence
  Description of Artificial Sequence: Synthetic oligonucleotide
  Target: LAMA2; (+) strand; PAM type: YTN; PAM sequence: CTT
gtaacatggctattataatt

SEQ ID NO: 391784 - DNA, 20 bp, Artificial Sequence
  Description of Artificial Sequence: Synthetic oligonucleotide
  Target: LAMA2; (+) strand; PAM type: YTN; PAM sequence: TTG
taacatggctattataatta

SEQ ID NO: 391785 - DNA, 20 bp, Artificial Sequence
  Description of Artificial Sequence: Synthetic oligonucleotide
  Target: LAMA2; (+) strand; PAM type: YTN; PAM sequence: CTA
ttataattacataagaatag

SEQ ID NO: 391786 - DNA, 20 bp, Artificial Sequence
  Description of Artificial Sequence: Synthetic oligonucleotide
  Target: LAMA2; (+) strand; PAM type: YTN; PAM sequence: TTA
taattacataagaataggca

SEQ ID NO: 391787 - DNA, 20 bp, Artificial Sequence
  Description of Artificial Sequence: Synthetic oligonucleotide
  Target: LAMA2; (+) strand; PAM type: YTN; PAM sequence: TTA
cataagaataggcaactttt

SEQ ID NO: 391788 - DNA, 20 bp, Artificial Sequence
  Description of Artificial Sequence: Synthetic oligonucleotide
  Target: LAMA2; (+) strand; PAM type: YTN; PAM sequence: CTT
ttgttttgttattgttttta

SEQ ID NO: 391789 - DNA, 20 bp, Artificial Sequence
  Description of Artificial Sequence: Synthetic oligonucleotide
  Target: LAMA2; (+) strand; PAM type: YTN; PAM sequence: TTT
tgttttgttattgtttttat

SEQ ID NO: 391790 - DNA, 20 bp, Artificial Sequence
  Description of Artificial Sequence: Synthetic oligonucleotide
  Target: LAMA2; (+) strand; PAM type: YTN; PAM sequence: TTT
gttttgttattgtttttatt

SEQ ID NO: 391791 - DNA, 20 bp, Artificial Sequence
  Description of Artificial Sequence: Synthetic oligonucleotide
  Target: LAMA2; (+) strand; PAM type: YTN; PAM sequence: TTG
ttttgttattgtttttattt

SEQ ID NO: 391792 - DNA, 20 bp, Artificial Sequence
  Description of Artificial Sequence: Synthetic oligonucleotide
  Target: LAMA2; (+) strand; PAM type: YTN; PAM sequence: TTT
tgttattgtttttatttgaa

SEQ ID NO: 391793 - DNA, 20 bp, Artificial Sequence
  Description of Artificial Sequence: Synthetic oligonucleotide
  Target: LAMA2; (+) strand; PAM type: YTN; PAM sequence: TTT
gttattgtttttatttgaaa

SEQ ID NO: 391794 - DNA, 20 bp, Artificial Sequence
  Description of Artificial Sequence: Synthetic oligonucleotide
  Target: LAMA2; (+) strand; PAM type: YTN; PAM sequence: TTG
ttattgtttttatttgaaag

SEQ ID NO: 391795 - DNA, 20 bp, Artificial Sequence
  Description of Artificial Sequence: Synthetic oligonucleotide
  Target: LAMA2; (+) strand; PAM type: YTN; PAM sequence: TTA
ttgtttttatttgaaagtat

SEQ ID NO: 391796 - DNA, 20 bp, Artificial Sequence
  Description of Artificial Sequence: Synthetic oligonucleotide
  Target: LAMA2; (+) strand; PAM type: YTN; PAM sequence: TTG
tttttatttgaaagtattta

SEQ ID NO: 391797 - DNA, 20 bp, Artificial Sequence
  Description of Artificial Sequence: Synthetic oligonucleotide
  Target: LAMA2; (+) strand; PAM type: YTN; PAM sequence: TTT
ttatttgaaagtatttaaag

SEQ ID NO: 391798 - DNA, 20 bp, Artificial Sequence
  Description of Artificial Sequence: Synthetic oligonucleotide
  Target: LAMA2; (+) strand; PAM type: YTN; PAM sequence: TTT
tatttgaaagtatttaaagt

SEQ ID NO: 391799 - DNA, 20 bp, Artificial Sequence
  Description of Artificial Sequence: Synthetic oligonucleotide
  Target: LAMA2; (+) strand; PAM type: YTN; PAM sequence: TTT
atttgaaagtatttaaagta

SEQ ID NO: 391800 - DNA, 20 bp, Artificial Sequence
  Description of Artificial Sequence: Synthetic oligonucleotide
  Target: LAMA2; (+) strand; PAM type: YTN; PAM sequence: TTA
tttgaaagtatttaaagtat

SEQ ID NO: 391801 - DNA, 20 bp, Artificial Sequence
  Description of Artificial Sequence: Synthetic oligonucleotide
  Target: LAMA2; (+) strand; PAM type: YTN; PAM sequence: TTT
gaaagtatttaaagtatttt

SEQ ID NO: 391802 - DNA, 20 bp, Artificial Sequence
  Description of Artificial Sequence: Synthetic oligonucleotide
  Target: LAMA2; (+) strand; PAM type: YTN; PAM sequence: TTG
aaagtatttaaagtattttt

SEQ ID NO: 391803 - DNA, 20 bp, Artificial Sequence
  Description of Artificial Sequence: Synthetic oligonucleotide
  Target: LAMA2; (+) strand; PAM type: YTN; PAM sequence: TTT
aaagtatttttcattttcaa

SEQ ID NO: 391804 - DNA, 20 bp, Artificial Sequence
  Description of Artificial Sequence: Synthetic oligonucleotide
  Target: LAMA2; (+) strand; PAM type: YTN; PAM sequence: TTA
aagtatttttcattttcaag

SEQ ID NO: 391805 - DNA, 20 bp, Artificial Sequence
  Description of Artificial Sequence: Synthetic oligonucleotide
  Target: LAMA2; (+) strand; PAM type: YTN; PAM sequence: TTT
ttcattttcaagcaagctaa

SEQ ID NO: 391806 - DNA, 20 bp, Artificial Sequence
  Description of Artificial Sequence: Synthetic oligonucleotide
  Target: LAMA2; (+) strand; PAM type: YTN; PAM sequence: TTT
tcattttcaagcaagctaat

SEQ ID NO: 391807 - DNA, 20 bp, Artificial Sequence
  Description of Artificial Sequence: Synthetic oligonucleotide
  Target: LAMA2; (+) strand; PAM type: YTN; PAM sequence: TTT
cattttcaagcaagctaatg

SEQ ID NO: 391808 - DNA, 20 bp, Artificial Sequence
  Description of Artificial Sequence: Synthetic oligonucleotide
  Target: LAMA2; (+) strand; PAM type: YTN; PAM sequence: TTC
attttcaagcaagctaatgt

SEQ ID NO: 391809 - DNA, 20 bp, Artificial Sequence
  Description of Artificial Sequence: Synthetic oligonucleotide
  Target: LAMA2; (+) strand; PAM type: YTN; PAM sequence: TTT
tcaagcaagctaatgtcatc

SEQ ID NO: 391810 - DNA, 20 bp, Artificial Sequence
  Description of Artificial Sequence: Synthetic oligonucleotide
  Target: LAMA2; (+) strand; PAM type: YTN; PAM sequence: TTT
caagcaagctaatgtcatca

SEQ ID NO: 391811 - DNA, 20 bp, Artificial Sequence
  Description of Artificial Sequence: Synthetic oligonucleotide
  Target: LAMA2; (+) strand; PAM type: YTN; PAM sequence: TTC
aagcaagctaatgtcatcat

SEQ ID NO: 391812 - DNA, 20 bp, Artificial Sequence
  Description of Artificial Sequence: Synthetic oligonucleotide
  Target: LAMA2; (+) strand; PAM type: YTN; PAM sequence: CTA
atgtcatcattccacttgat

SEQ ID NO: 391813 - DNA, 20 bp, Artificial Sequence
  Description of Artificial Sequence: Synthetic oligonucleotide
  Target: LAMA2; (+) strand; PAM type: YTN; PAM sequence: TTC
cacttgatacattaaagcag

SEQ ID NO: 391814 - DNA, 20 bp, Artificial Sequence
  Description of Artificial Sequence: Synthetic oligonucleotide
  Target: LAMA2; (+) strand; PAM type: YTN; PAM sequence: CTT
gatacattaaagcagcactt

SEQ ID NO: 391815 - DNA, 20 bp, Artificial Sequence
  Description of Artificial Sequence: Synthetic oligonucleotide
  Target: LAMA2; (+) strand; PAM type: YTN; PAM sequence: TTG
atacattaaagcagcacttt

SEQ ID NO: 391816 - DNA, 20 bp, Artificial Sequence
  Description of Artificial Sequence: Synthetic oligonucleotide
  Target: LAMA2; (+) strand; PAM type: YTN; PAM sequence: TTA
aagcagcactttagtttctc

SEQ ID NO: 391817 - DNA, 20 bp, Artificial Sequence
  Description of Artificial Sequence: Synthetic oligonucleotide
  Target: LAMA2; (+) strand; PAM type: YTN; PAM sequence: CTT
tagtttctccaaatggcttt

SEQ ID NO: 391818 - DNA, 20 bp, Artificial Sequence
  Description of Artificial Sequence: Synthetic oligonucleotide
  Target: LAMA2; (+) strand; PAM type: YTN; PAM sequence: TTT
agtttctccaaatggctttt

SEQ ID NO: 391819 - DNA, 20 bp, Artificial Sequence
  Description of Artificial Sequence: Synthetic oligonucleotide
  Target: LAMA2; (+) strand; PAM type: YTN; PAM sequence: TTA
gtttctccaaatggcttttc

SEQ ID NO: 391820 - DNA, 20 bp, Artificial Sequence
  Description of Artificial Sequence: Synthetic oligonucleotide
  Target: LAMA2; (+) strand; PAM type: YTN; PAM sequence: TTT
ctccaaatggcttttcaaat

SEQ ID NO: 391821 - DNA, 20 bp, Artificial Sequence
  Description of Artificial Sequence: Synthetic oligonucleotide
  Target: LAMA2; (+) strand; PAM type: YTN; PAM sequence: TTC
tccaaatggcttttcaaata

SEQ ID NO: 391822 - DNA, 20 bp, Artificial Sequence
  Description of Artificial Sequence: Synthetic oligonucleotide
  Target: LAMA2; (+) strand; PAM type: YTN; PAM sequence: CTC
caaatggcttttcaaatact

SEQ ID NO: 391823 - DNA, 20 bp, Artificial Sequence
  Description of Artificial Sequence: Synthetic oligonucleotide
  Target: LAMA2; (+) strand; PAM type: YTN; PAM sequence: CTT
ttcaaatactggggactggt

SEQ ID NO: 391824 - DNA, 20 bp, Artificial Sequence
  Description of Artificial Sequence: Synthetic oligonucleotide
  Target: LAMA2; (+) strand; PAM type: YTN; PAM sequence: TTT
tcaaatactggggactggtt

SEQ ID NO: 391825 - DNA, 20 bp, Artificial Sequence
  Description of Artificial Sequence: Synthetic oligonucleotide
  Target: LAMA2; (+) strand; PAM type: YTN; PAM sequence: TTT
caaatactggggactggttt

SEQ ID NO: 391826 - DNA, 20 bp, Artificial Sequence
  Description of Artificial Sequence: Synthetic oligonucleotide
  Target: LAMA2; (+) strand; PAM type: YTN; PAM sequence: TTC
aaatactggggactggtttt

SEQ ID NO: 391827 - DNA, 20 bp, Artificial Sequence
  Description of Artificial Sequence: Synthetic oligonucleotide
  Target: LAMA2; (+) strand; PAM type: YTN; PAM sequence: CTG
gggactggtttttaatgaac

SEQ ID NO: 391828 - DNA, 20 bp, Artificial Sequence
  Description of Artificial Sequence: Synthetic oligonucleotide
  Target: LAMA2; (+) strand; PAM type: YTN; PAM sequence: CTG
gtttttaatgaacatctgtt

SEQ ID NO: 391829 - DNA, 20 bp, Artificial Sequence
  Description of Artificial Sequence: Synthetic oligonucleotide
  Target: LAMA2; (+) strand; PAM type: YTN; PAM sequence: TTT
ttaatgaacatctgttgctt

SEQ ID NO: 391830 - DNA, 20 bp, Artificial Sequence
  Description of Artificial Sequence: Synthetic oligonucleotide
  Target: LAMA2; (+) strand; PAM type: YTN; PAM sequence: TTT
taatgaacatctgttgcttg

SEQ ID NO: 391831 - DNA, 20 bp, Artificial Sequence
  Description of Artificial Sequence: Synthetic oligonucleotide
  Target: LAMA2; (+) strand; PAM type: YTN; PAM sequence: TTT
aatgaacatctgttgcttgg

SEQ ID NO: 391832 - DNA, 20 bp, Artificial Sequence
  Description of Artificial Sequence: Synthetic oligonucleotide
  Target: LAMA2; (+) strand; PAM type: YTN; PAM sequence: TTA
atgaacatctgttgcttggg

SEQ ID NO: 391833 - DNA, 20 bp, Artificial Sequence
  Description of Artificial Sequence: Synthetic oligonucleotide
  Target: LAMA2; (+) strand; PAM type: YTN; PAM sequence: CTG
ttgcttgggatttggatgtg

SEQ ID NO: 391834 - DNA, 20 bp, Artificial Sequence
  Description of Artificial Sequence: Synthetic oligonucleotide
  Target: LAMA2; (+) strand; PAM type: YTN; PAM sequence: TTG
cttgggatttggatgtgcta

SEQ ID NO: 391835 - DNA, 20 bp, Artificial Sequence
  Description of Artificial Sequence: Synthetic oligonucleotide
  Target: LAMA2; (+) strand; PAM type: YTN; PAM sequence: CTT
gggatttggatgtgctactt

SEQ ID NO: 391836 - DNA, 20 bp, Artificial Sequence
  Description of Artificial Sequence: Synthetic oligonucleotide
  Target: LAMA2; (+) strand; PAM type: YTN; PAM sequence: TTG
ggatttggatgtgctacttt

SEQ ID NO: 391837 - DNA, 20 bp, Artificial Sequence
  Description of Artificial Sequence: Synthetic oligonucleotide
  Target: LAMA2; (+) strand; PAM type: YTN; PAM sequence: TTT
ggatgtgctactttatgaga

SEQ ID NO: 391838 - DNA, 20 bp, Artificial Sequence
  Description of Artificial Sequence: Synthetic oligonucleotide
  Target: LAMA2; (+) strand; PAM type: YTN; PAM sequence: TTG
gatgtgctactttatgagaa

SEQ ID NO: 391839 - DNA, 20 bp, Artificial Sequence
  Description of Artificial Sequence: Synthetic oligonucleotide
  Target: LAMA2; (+) strand; PAM type: YTN; PAM sequence: CTA
ctttatgagaagctctggtg

SEQ ID NO: 391840 - DNA, 20 bp, Artificial Sequence
  Description of Artificial Sequence: Synthetic oligonucleotide
  Target: LAMA2; (+) strand; PAM type: YTN; PAM sequence: CTT
tatgagaagctctggtgcat

SEQ ID NO: 391841 - DNA, 20 bp, Artificial Sequence
  Description of Artificial Sequence: Synthetic oligonucleotide
  Target: LAMA2; (+) strand; PAM type: YTN; PAM sequence: TTT
atgagaagctctggtgcatt

SEQ ID NO: 391842 - DNA, 20 bp, Artificial Sequence
  Description of Artificial Sequence: Synthetic oligonucleotide
  Target: LAMA2; (+) strand; PAM type: YTN; PAM sequence: TTA
tgagaagctctggtgcattt

SEQ ID NO: 391843 - DNA, 20 bp, Artificial Sequence
  Description of Artificial Sequence: Synthetic oligonucleotide
  Target: LAMA2; (+) strand; PAM type: YTN; PAM sequence: CTC
tggtgcatttagctcacaat

SEQ ID NO: 391844 - DNA, 20 bp, Artificial Sequence
  Description of Artificial Sequence: Synthetic oligonucleotide
  Target: LAMA2; (+) strand; PAM type: YTN; PAM sequence: CTG
gtgcatttagctcacaattc

SEQ ID NO: 391845 - DNA, 20 bp, Artificial Sequence
  Description of Artificial Sequence: Synthetic oligonucleotide
  Target: LAMA2; (+) strand; PAM type: YTN; PAM sequence: TTT
agctcacaattctctaggag

SEQ ID NO: 391846 - DNA, 20 bp, Artificial Sequence
  Description of Artificial Sequence: Synthetic oligonucleotide
  Target: LAMA2; (+) strand; PAM type: YTN; PAM sequence: TTA
gctcacaattctctaggagt

SEQ ID NO: 391847 - DNA, 20 bp, Artificial Sequence
  Description of Artificial Sequence: Synthetic oligonucleotide
  Target: LAMA2; (+) strand; PAM type: YTN; PAM sequence: CTC
acaattctctaggagttagt

SEQ ID NO: 391848 - DNA, 20 bp, Artificial Sequence
  Description of Artificial Sequence: Synthetic oligonucleotide
  Target: LAMA2; (+) strand; PAM type: YTN; PAM sequence: TTC
tctaggagttagttcttgcc

SEQ ID NO: 391849 - DNA, 20 bp, Artificial Sequence
  Description of Artificial Sequence: Synthetic oligonucleotide
  Target: LAMA2; (+) strand; PAM type: YTN; PAM sequence: CTC
taggagttagttcttgccat

SEQ ID NO: 391850 - DNA, 20 bp, Artificial Sequence
  Description of Artificial Sequence: Synthetic oligonucleotide
  Target: LAMA2; (+) strand; PAM type: YTN; PAM sequence: CTA
ggagttagttcttgccatct

SEQ ID NO: 391851 - DNA, 20 bp, Artificial Sequence
  Description of Artificial Sequence: Synthetic oligonucleotide
  Target: LAMA2; (+) strand; PAM type: YTN; PAM sequence: TTA
gttcttgccatctactaaca

SEQ ID NO: 391852 - DNA, 20 bp, Artificial Sequence
  Description of Artificial Sequence: Synthetic oligonucleotide
  Target: LAMA2; (+) strand; PAM type: YTN; PAM sequence: TTC
ttgccatctactaacatgaa

SEQ ID NO: 391853 - DNA, 20 bp, Artificial Sequence
  Description of Artificial Sequence: Synthetic oligonucleotide
  Target: LAMA2; (+) strand; PAM type: YTN; PAM sequence: CTT
gccatctactaacatgaatg

SEQ ID NO: 391854 - DNA, 20 bp, Artificial Sequence
  Description of Artificial Sequence: Synthetic oligonucleotide
  Target: LAMA2; (+) strand; PAM type: YTN; PAM sequence: TTG
ccatctactaacatgaatga

SEQ ID NO: 391855 - DNA, 20 bp, Artificial Sequence
  Description of Artificial Sequence: Synthetic oligonucleotide
  Target: LAMA2; (+) strand; PAM type: YTN; PAM sequence: CTA
ctaacatgaatgagaaagtg

SEQ ID NO: 391856 - DNA, 20 bp, Artificial Sequence
  Description of Artificial Sequence: Synthetic oligonucleotide
  Target: LAMA2; (+) strand; PAM type: YTN; PAM sequence: CTA
acatgaatgagaaagtggaa

SEQ ID NO: 391857 - DNA, 20 bp, Artificial Sequence
  Description of Artificial Sequence: Synthetic oligonucleotide
  Target: LAMA2; (+) strand; PAM type: YTN; PAM sequence: TTT
tttggcaaaagcccaaatta

SEQ ID NO: 391858 - DNA, 20 bp, Artificial Sequence
  Description of Artificial Sequence: Synthetic oligonucleotide
  Target: LAMA2; (+) strand; PAM type: YTN; PAM sequence: TTT
ttggcaaaagcccaaattaa

SEQ ID NO: 391859 - DNA, 20 bp, Artificial Sequence
  Description of Artificial Sequence: Synthetic oligonucleotide
  Target: LAMA2; (+) strand; PAM type: YTN; PAM sequence: TTT
tggcaaaagcccaaattaag

SEQ ID NO: 391860 - DNA, 20 bp, Artificial Sequence
  Description of Artificial Sequence: Synthetic oligonucleotide
  Target: LAMA2; (+) strand; PAM type: YTN; PAM sequence: TTT
ggcaaaagcccaaattaaga

SEQ ID NO: 391861 - DNA, 20 bp, Artificial Sequence
  Description of Artificial Sequence: Synthetic oligonucleotide
  Target: LAMA2; (+) strand; PAM type: YTN; PAM sequence: TTG
gcaaaagcccaaattaagaa

SEQ ID NO: 391862 - DNA, 20 bp, Artificial Sequence
  Description of Artificial Sequence: Synthetic oligonucleotide
  Target: LAMA2; (+) strand; PAM type: YTN; PAM sequence: TTA
agaaacttaaagaatacaga

SEQ ID NO: 391863 - DNA, 20 bp, Artificial Sequence
  Description of Artificial Sequence: Synthetic oligonucleotide
  Target: LAMA2; (+) strand; PAM type: YTN; PAM sequence: CTT
aaagaatacagataatgccc

SEQ ID NO: 391864 - DNA, 20 bp, Artificial Sequence
  Description of Artificial Sequence: Synthetic oligonucleotide
  Target: LAMA2; (+) strand; PAM type: YTN; PAM sequence: TTA
aagaatacagataatgcccc

SEQ ID NO: 391865 - DNA, 20 bp, Artificial Sequence
  Description of Artificial Sequence: Synthetic oligonucleotide
  Target: LAMA2; (+) strand; PAM type: YTN; PAM sequence: CTC
gccccccaaaaaaacctagt

SEQ ID NO: 391866 - DNA, 20 bp, Artificial Sequence
  Description of Artificial Sequence: Synthetic oligonucleotide
  Target: LAMA2; (+) strand; PAM type: YTN; PAM sequence: CTA
gtccttaaatatctgttaaa

SEQ ID NO: 391867 - DNA, 20 bp, Artificial Sequence
  Description of Artificial Sequence: Synthetic oligonucleotide
  Target: LAMA2; (+) strand; PAM type: YTN; PAM sequence: CTT
aaatatctgttaaaatataa

SEQ ID NO: 391868 - DNA, 20 bp, Artificial Sequence
  Description of Artificial Sequence: Synthetic oligonucleotide
  Target: LAMA2; (+) strand; PAM type: YTN; PAM sequence: TTA
aatatctgttaaaatataat

SEQ ID NO: 391869 - DNA, 20 bp, Artificial Sequence
  Description of Artificial Sequence: Synthetic oligonucleotide
  Target: LAMA2; (+) strand; PAM type: YTN; PAM sequence: CTG
ttaaaatataataaacgtgc

SEQ ID NO: 391870 - DNA, 20 bp, Artificial Sequence
  Description of Artificial Sequence: Synthetic oligonucleotide
  Target: LAMA2; (+) strand; PAM type: YTN; PAM sequence: TTA
aaatataataaacgtgcatg

SEQ ID NO: 391871 - DNA, 20 bp, Artificial Sequence
  Description of Artificial Sequence: Synthetic oligonucleotide
  Target: LAMA2; (+) strand; PAM type: YTN; PAM sequence: TTT
agaaattgggaaaaatgctt

SEQ ID NO: 391872 - DNA, 20 bp, Artificial Sequence
  Description of Artificial Sequence: Synthetic oligonucleotide
  Target: LAMA2; (+) strand; PAM type: YTN; PAM sequence: TTA
gaaattgggaaaaatgcttt

SEQ ID NO: 391873 - DNA, 20 bp, Artificial Sequence
  Description of Artificial Sequence: Synthetic oligonucleotide
  Target: LAMA2; (+) strand; PAM type: YTN; PAM sequence: TTG
ggaaaaatgctttttgttgt

SEQ ID NO: 391874 - DNA, 20 bp, Artificial Sequence
  Description of Artificial Sequence: Synthetic oligonucleotide
  Target: LAMA2; (+) strand; PAM type: YTN; PAM sequence: CTT
tttgttgttttttgcttgaa

SEQ ID NO: 391875 - DNA, 20 bp, Artificial Sequence
  Description of Artificial Sequence: Synthetic oligonucleotide
  Target: LAMA2; (+) strand; PAM type: YTN; PAM sequence: TTT
ttgttgttttttgcttgaag

SEQ ID NO: 391876 - DNA, 20 bp, Artificial Sequence
  Description of Artificial Sequence: Synthetic oligonucleotide
  Target: LAMA2; (+) strand; PAM type: YTN; PAM sequence: TTT
tgttgttttttgcttgaagc

SEQ ID NO: 391877 - DNA, 20 bp, Artificial Sequence
  Description of Artificial Sequence: Synthetic oligonucleotide
  Target: LAMA2; (+) strand; PAM type: YTN; PAM sequence: TTT
gttgttttttgcttgaagca

SEQ ID NO: 391878 - DNA, 20 bp, Artificial Sequence
  Description of Artificial Sequence: Synthetic oligonucleotide
  Target: LAMA2; (+) strand; PAM type: YTN; PAM sequence: TTG
ttgttttttgcttgaagcag

SEQ ID NO: 391879 - DNA, 20 bp, Artificial Sequence
  Description of Artificial Sequence: Synthetic oligonucleotide
  Target: LAMA2; (+) strand; PAM type: YTN; PAM sequence: TTG
ttttttgcttgaagcagtaa

SEQ ID NO: 391880 - DNA, 20 bp, Artificial Sequence
  Description of Artificial Sequence: Synthetic oligonucleotide
  Target: LAMA2; (+) strand; PAM type: YTN; PAM sequence: TTT
tttgcttgaagcagtaaaac

SEQ ID NO: 391881 - DNA, 20 bp, Artificial Sequence
  Description of Artificial Sequence: Synthetic oligonucleotide
  Target: LAMA2; (+) strand; PAM type: YTN; PAM sequence: TTT
ttgcttgaagcagtaaaaca

SEQ ID NO: 391882 - DNA, 20 bp, Artificial Sequence
  Description of Artificial Sequence: Synthetic oligonucleotide
  Target: LAMA2; (+) strand; PAM type: YTN; PAM sequence: TTT
tgcttgaagcagtaaaacat

SEQ ID NO: 391883 - DNA, 20 bp, Artificial Sequence
  Description of Artificial Sequence: Synthetic oligonucleotide
  Target: LAMA2; (+) strand; PAM type: YTN; PAM sequence: TTT
gcttgaagcagtaaaacatt

SEQ ID NO: 391884 - DNA, 20 bp, Artificial Sequence
  Description of Artificial Sequence: Synthetic oligonucleotide
  Target: LAMA2; (+) strand; PAM type: YTN; PAM sequence: TTG
cttgaagcagtaaaacattt

SEQ ID NO: 391885 - DNA, 20 bp, Artificial Sequence
  Description of Artificial Sequence: Synthetic oligonucleotide
  Target: LAMA2; (+) strand; PAM type: YTN; PAM sequence: CTT
gaagcagtaaaacatttttc

SEQ ID NO: 391886 - DNA, 20 bp, Artificial Sequence
  Description of Artificial Sequence: Synthetic oligonucleotide
  Target: LAMA2; (+) strand; PAM type: YTN; PAM sequence: TTG
aagcagtaaaacatttttct

SEQ ID NO: 391887 - DNA, 20 bp, Artificial Sequence
  Description of Artificial Sequence: Synthetic oligonucleotide
  Target: LAMA2; (+) strand; PAM type: YTN; PAM sequence: TTT
ttcttgctctgcaatattat

SEQ ID NO: 391888 - DNA, 20 bp, Artificial Sequence
  Description of Artificial Sequence: Synthetic oligonucleotide
  Target: LAMA2; (+) strand; PAM type: YTN; PAM sequence: TTT
tcttgctctgcaatattatg

SEQ ID NO: 391889 - DNA, 20 bp, Artificial Sequence
  Description of Artificial Sequence: Synthetic oligonucleotide
  Target: LAMA2; (+) strand; PAM type: YTN; PAM sequence: TTT
cttgctctgcaatattatgc

SEQ ID NO: 391890 - DNA, 20 bp, Artificial Sequence
  Description of Artificial Sequence: Synthetic oligonucleotide
  Target: LAMA2; (+) strand; PAM type: YTN; PAM sequence: TTC
ttgctctgcaatattatgca

SEQ ID NO: 391891 - DNA, 20 bp, Artificial Sequence
  Description of Artificial Sequence: Synthetic oligonucleotide
  Target: LAMA2; (+) strand; PAM type: YTN; PAM sequence: CTT
gctctgcaatattatgcatt

SEQ ID NO: 391892 - DNA, 20 bp, Artificial Sequence
  Description of Artificial Sequence: Synthetic oligonucleotide
  Target: LAMA2; (+) strand; PAM type: YTN; PAM sequence: TTG
ctctgcaatattatgcattt

SEQ ID NO: 391893 - DNA, 20 bp, Artificial Sequence
  Description of Artificial Sequence: Synthetic oligonucleotide
  Target: LAMA2; (+) strand; PAM type: YTN; PAM sequence: CTC
tgcaatattatgcattttag

SEQ ID NO: 391894 - DNA, 20 bp, Artificial Sequence
  Description of Artificial Sequence: Synthetic oligonucleotide
  Target: LAMA2; (+) strand; PAM type: YTN; PAM sequence: CTG
caatattatgcattttagat

SEQ ID NO: 391895 - DNA, 20 bp, Artificial Sequence
  Description of Artificial Sequence: Synthetic oligonucleotide
  Target: LAMA2; (+) strand; PAM type: YTN; PAM sequence: TTA
tgcattttagatactttgct

SEQ ID NO: 391896 - DNA, 20 bp, Artificial Sequence
  Description of Artificial Sequence: Synthetic oligonucleotide
  Target: LAMA2; (+) strand; PAM type: YTN; PAM sequence: TTT
tagatactttgcttcataat

SEQ ID NO: 391897 - DNA, 20 bp, Artificial Sequence
  Description of Artificial Sequence: Synthetic oligonucleotide
  Target: LAMA2; (+) strand; PAM type: YTN; PAM sequence: TTT
agatactttgcttcataatg

SEQ ID NO: 391898 - DNA, 20 bp, Artificial Sequence
  Description of Artificial Sequence: Synthetic oligonucleotide
  Target: LAMA2; (+) strand; PAM type: YTN; PAM sequence: TTA
gatactttgcttcataatgt

SEQ ID NO: 391899 - DNA, 20 bp, Artificial Sequence
  Description of Artificial Sequence: Synthetic oligonucleotide
  Target: LAMA2; (+) strand; PAM type: YTN; PAM sequence: CTT
tgcttcataatgtagccaaa

SEQ ID NO: 391900 - DNA, 20 bp, Artificial Sequence
  Description of Artificial Sequence: Synthetic oligonucleotide
  Target: LAMA2; (+) strand; PAM type: YTN; PAM sequence: TTT
gcttcataatgtagccaaat

SEQ ID NO: 391901 - DNA, 20 bp, Artificial Sequence
  Description of Artificial Sequence: Synthetic oligonucleotide
  Target: LAMA2; (+) strand; PAM type: YTN; PAM sequence: TTG
cttcataatgtagccaaata

SEQ ID NO: 391902 - DNA, 20 bp, Artificial Sequence
  Description of Artificial Sequence: Synthetic oligonucleotide
  Target: LAMA2; (+) strand; PAM type: YTN; PAM sequence: CTT
cataatgtagccaaataaat

SEQ ID NO: 391903 - DNA, 20 bp, Artificial Sequence
  Description of Artificial Sequence: Synthetic oligonucleotide
  Target: LAMA2; (+) strand; PAM type: YTN; PAM sequence: TTC
ataatgtagccaaataaata

SEQ ID NO: 391904 - DNA, 20 bp, Artificial Sequence
  Description of Artificial Sequence: Synthetic oligonucleotide
  Target: LAMA2; (+) strand; PAM type: YTN; PAM sequence: CTT
caaggcagattctgactgat

SEQ ID NO: 391905 - DNA, 20 bp, Artificial Sequence
  Description of Artificial Sequence: Synthetic oligonucleotide
  Target: LAMA2; (+) strand; PAM type: YTN; PAM sequence: TTC
aaggcagattctgactgata

SEQ ID NO: 391906 - DNA, 20 bp, Artificial Sequence
  Description of Artificial Sequence: Synthetic oligonucleotide
  Target: LAMA2; (+) strand; PAM type: YTN; PAM sequence: TTC
tgactgataattcttaggca

SEQ ID NO: 391907 - DNA, 20 bp, Artificial Sequence
  Description of Artificial Sequence: Synthetic oligonucleotide
  Target: LAMA2; (+) strand; PAM type: YTN; PAM sequence: CTG
actgataattcttaggcatc

SEQ ID NO: 391908 - DNA, 20 bp, Artificial Sequence
  Description of Artificial Sequence: Synthetic oligonucleotide
  Target: LAMA2; (+) strand; PAM type: YTN; PAM sequence: CTG
ataattcttaggcatcactg

SEQ ID NO: 391909 - DNA, 20 bp, Artificial Sequence
  Description of Artificial Sequence: Synthetic oligonucleotide
  Target: LAMA2; (+) strand; PAM type: YTN; PAM sequence: TTC
ttaggcatcactggccaaga

SEQ ID NO: 391910 - DNA, 20 bp, Artificial Sequence
  Description of Artificial Sequence: Synthetic oligonucleotide
  Target: LAMA2; (+) strand; PAM type: YTN; PAM sequence: CTT
aggcatcactggccaagaag

SEQ ID NO: 391911 - DNA, 20 bp, Artificial Sequence
  Description of Artificial Sequence: Synthetic oligonucleotide
  Target: LAMA2; (+) strand; PAM type: YTN; PAM sequence: TTA
ggcatcactggccaagaaga

SEQ ID NO: 391912 - DNA, 20 bp, Artificial Sequence
  Description of Artificial Sequence: Synthetic oligonucleotide
  Target: LAMA2; (+) strand; PAM type: YTN; PAM sequence: CTG
gccaagaagagacaaactcc

SEQ ID NO: 391913 - DNA, 20 bp, Artificial Sequence
  Description of Artificial Sequence: Synthetic oligonucleotide
  Target: LAMA2; (+) strand; PAM type: YTN; PAM sequence: CTC
ccaaatgttcaccactgcaa

SEQ ID NO: 391914 - DNA, 20 bp, Artificial Sequence
  Description of Artificial Sequence: Synthetic oligonucleotide
  Target: LAMA2; (+) strand; PAM type: YTN; PAM sequence: TTC
accactgcaagaagcaacag

SEQ ID NO: 391915 - DNA, 20 bp, Artificial Sequence
  Description of Artificial Sequence: Synthetic oligonucleotide
  Target: LAMA2; (+) strand; PAM type: YTN; PAM sequence: CTG
caagaagcaacagggtttta

SEQ ID NO: 391916 - DNA, 20 bp, Artificial Sequence
  Description of Artificial Sequence: Synthetic oligonucleotide
  Target: LAMA2; (+) strand; PAM type: YTN; PAM sequence: TTT
taatttgagagctaatttga

SEQ ID NO: 391917 - DNA, 20 bp, Artificial Sequence
  Description of Artificial Sequence: Synthetic oligonucleotide
  Target: LAMA2; (+) strand; PAM type: YTN; PAM sequence: TTT
aatttgagagctaatttgag

SEQ ID NO: 391918 - DNA, 20 bp, Artificial Sequence
  Description of Artificial Sequence: Synthetic oligonucleotide
  Target: LAMA2; (+) strand; PAM type: YTN; PAM sequence: TTA
atttgagagctaatttgagg

SEQ ID NO: 391919 - DNA, 20 bp, Artificial Sequence
  Description of Artificial Sequence: Synthetic oligonucleotide
  Target: LAMA2; (+) strand; PAM type: YTN; PAM sequence: TTT
gagagctaatttgaggcaaa

SEQ ID NO: 391920 - DNA, 20 bp, Artificial Sequence
  Description of Artificial Sequence: Synthetic oligonucleotide
  Target: LAMA2; (+) strand; PAM type: YTN; PAM sequence: TTG
agagctaatttgaggcaaag

SEQ ID NO: 391921 - DNA, 20 bp, Artificial Sequence
  Description of Artificial Sequence: Synthetic oligonucleotide
  Target: LAMA2; (+) strand; PAM type: YTN; PAM sequence: CTA
atttgaggcaaaggtgtgag

SEQ ID NO: 391922 - DNA, 20 bp, Artificial Sequence
  Description of Artificial Sequence: Synthetic oligonucleotide
  Target: LAMA2; (+) strand; PAM type: YTN; PAM sequence: TTT
gaggcaaaggtgtgaggttc

SEQ ID NO: 391923 - DNA, 20 bp, Artificial Sequence
  Description of Artificial Sequence: Synthetic oligonucleotide
  Target: LAMA2; (+) strand; PAM type: YTN; PAM sequence: TTG
aggcaaaggtgtgaggttct

SEQ ID NO: 391924 - DNA, 20 bp, Artificial Sequence
  Description of Artificial Sequence: Synthetic oligonucleotide
  Target: LAMA2; (+) strand; PAM type: YTN; PAM sequence: TTC
tgaaacagaaattatttctg

SEQ ID NO: 391925 - DNA, 20 bp, Artificial Sequence
  Description of Artificial Sequence: Synthetic oligonucleotide
  Target: LAMA2; (+) strand; PAM type: YTN; PAM sequence: CTG
aaacagaaattatttctgcc

SEQ ID NO: 391926 - DNA, 20 bp, Artificial Sequence
  Description of Artificial Sequence: Synthetic oligonucleotide
  Target: LAMA2; (+) strand; PAM type: YTN; PAM sequence: TTA
tttctgccagaaaaatctca

SEQ ID NO: 391927 - DNA, 20 bp, Artificial Sequence
  Description of Artificial Sequence: Synthetic oligonucleotide
  Target: LAMA2; (+) strand; PAM type: YTN; PAM sequence: TTT
ctgccagaaaaatctcagtt

SEQ ID NO: 391928 - DNA, 20 bp, Artificial Sequence
  Description of Artificial Sequence: Synthetic oligonucleotide
  Target: LAMA2; (+) strand; PAM type: YTN; PAM sequence: TTC
tgccagaaaaatctcagtta

SEQ ID NO: 391929 - DNA, 20 bp, Artificial Sequence
  Description of Artificial Sequence: Synthetic oligonucleotide
  Target: LAMA2; (+) strand; PAM type: YTN; PAM sequence: CTG
ccagaaaaatctcagttaat

SEQ ID NO: 391930 - DNA, 20 bp, Artificial Sequence
  Description of Artificial Sequence: Synthetic oligonucleotide
  Target: LAMA2; (+) strand; PAM type: YTN; PAM sequence: CTC
agttaattcattgtggttta

SEQ ID NO: 391931 - DNA, 20 bp, Artificial Sequence
  Description of Artificial Sequence: Synthetic oligonucleotide
  Target: LAMA2; (+) strand; PAM type: YTN; PAM sequence: TTA
attcattgtggtttatcctc

SEQ ID NO: 391932 - DNA, 20 bp, Artificial Sequence
  Description of Artificial Sequence: Synthetic oligonucleotide
  Target: LAMA2; (+) strand; PAM type: YTN; PAM sequence: TTC
attgtggtttatcctctgct

SEQ ID NO: 391933 - DNA, 20 bp, Artificial Sequence
  Description of Artificial Sequence: Synthetic oligonucleotide
  Target: LAMA2; (+) strand; PAM type: YTN; PAM sequence: TTG
tggtttatcctctgctagat

SEQ ID NO: 391934 - DNA, 20 bp, Artificial Sequence
  Description of Artificial Sequence: Synthetic oligonucleotide
  Target: LAMA2; (+) strand; PAM type: YTN; PAM sequence: TTT
atcctctgctagatgaagct

SEQ ID NO: 391935 - DNA, 20 bp, Artificial Sequence
  Description of Artificial Sequence: Synthetic oligonucleotide
  Target: LAMA2; (+) strand; PAM type: YTN; PAM sequence: TTA
tcctctgctagatgaagctg

SEQ ID NO: 391936 - DNA, 20 bp, Artificial Sequence
  Description of Artificial Sequence: Synthetic oligonucleotide
  Target: LAMA2; (+) strand; PAM type: YTN; PAM sequence: CTC
tgctagatgaagctgttgta

SEQ ID NO: 391937 - DNA, 20 bp, Artificial Sequence
  Description of Artificial Sequence: Synthetic oligonucleotide
  Target: LAMA2; (+) strand; PAM type: YTN; PAM sequence: CTG
ctagatgaagctgttgtact

SEQ ID NO: 391938 - DNA, 20 bp, Artificial Sequence
  Description of Artificial Sequence: Synthetic oligonucleotide
  Target: LAMA2; (+) strand; PAM type: YTN; PAM sequence: CTA
gatgaagctgttgtactttc

SEQ ID NO: 391939 - DNA, 20 bp, Artificial Sequence
  Description of Artificial Sequence: Synthetic oligonucleotide
  Target: LAMA2; (+) strand; PAM type: YTN; PAM sequence: CTG
ttgtactttccctagtatta

SEQ ID NO: 391940 - DNA, 20 bp, Artificial Sequence
  Description of Artificial Sequence: Synthetic oligonucleotide
  Target: LAMA2; (+) strand; PAM type: YTN; PAM sequence: TTG
tactttccctagtattattt

SEQ ID NO: 391941 - DNA, 20 bp, Artificial Sequence
  Description of Artificial Sequence: Synthetic oligonucleotide
  Target: LAMA2; (+) strand; PAM type: YTN; PAM sequence: CTT
tccctagtattattttccat

SEQ ID NO: 391942 - DNA, 20 bp, Artificial Sequence
  Description of Artificial Sequence: Synthetic oligonucleotide
  Target: LAMA2; (+) strand; PAM type: YTN; PAM sequence: TTT
ccctagtattattttccatt

SEQ ID NO: 391943 - DNA, 20 bp, Artificial Sequence
  Description of Artificial Sequence: Synthetic oligonucleotide
  Target: LAMA2; (+) strand; PAM type: YTN; PAM sequence: TTC
cctagtattattttccatta

SEQ ID NO: 391944 - DNA, 20 bp, Artificial Sequence
  Description of Artificial Sequence: Synthetic oligonucleotide
  Target: LAMA2; (+) strand; PAM type: YTN; PAM sequence: CTA
gtattattttccattaatgc

SEQ ID NO: 391945 - DNA, 20 bp, Artificial Sequence
  Description of Artificial Sequence: Synthetic oligonucleotide
  Target: LAMA2; (+) strand; PAM type: YTN; PAM sequence: TTA
ttttccattaatgctacttg

SEQ ID NO: 391946 - DNA, 20 bp, Artificial Sequence
  Description of Artificial Sequence: Synthetic oligonucleotide
  Target: LAMA2; (+) strand; PAM type: YTN; PAM sequence: TTT
tccattaatgctacttgaag

SEQ ID NO: 391947 - DNA, 20 bp, Artificial Sequence
  Description of Artificial Sequence: Synthetic oligonucleotide
  Target: LAMA2; (+) strand; PAM type: YTN; PAM sequence: TTT
ccattaatgctacttgaagt

SEQ ID NO: 391948 - DNA, 20 bp, Artificial Sequence
  Description of Artificial Sequence: Synthetic oligonucleotide
  Target: LAMA2; (+) strand; PAM type: YTN; PAM sequence: TTC
cattaatgctacttgaagtg

SEQ ID NO: 391949 - DNA, 20 bp, Artificial Sequence
  Description of Artificial Sequence: Synthetic oligonucleotide
  Target: LAMA2; (+) strand; PAM type: YTN; PAM sequence: TTA
atgctacttgaagtgtcccc

SEQ ID NO: 391950 - DNA, 20 bp, Artificial Sequence
  Description of Artificial Sequence: Synthetic oligonucleotide
  Target: LAMA2; (+) strand; PAM type: YTN; PAM sequence: CTA
cttgaagtgtccccctccaa

SEQ ID NO: 391951 - DNA, 20 bp, Artificial Sequence
  Description of Artificial Sequence: Synthetic oligonucleotide
  Target: LAMA2; (+) strand; PAM type: YTN; PAM sequence: CTT
gaagtgtccccctccaaccc

SEQ ID NO: 391952 - DNA, 20 bp, Artificial Sequence
  Description of Artificial Sequence: Synthetic oligonucleotide
  Target: LAMA2; (+) strand; PAM type: YTN; PAM sequence: TTG
aagtgtccccctccaaccca

SEQ ID NO: 391953 - DNA, 20 bp, Artificial Sequence
  Description of Artificial Sequence: Synthetic oligonucleotide
  Target: LAMA2; (+) strand; PAM type: YTN; PAM sequence: CTC
caacccaaaacaacaacaac

SEQ ID NO: 391954 - DNA, 20 bp, Artificial Sequence
  Description of Artificial Sequence: Synthetic oligonucleotide
  Target: LAMA2; (+) strand; PAM type: YTN; PAM sequence: CTG
caggtagagcaccttcactc

SEQ ID NO: 391955 - DNA, 20 bp, Artificial Sequence
  Description of Artificial Sequence: Synthetic oligonucleotide
  Target: LAMA2; (+) strand; PAM type: YTN; PAM sequence: CTT
cactctgagcggatccccaa

SEQ ID NO: 391956 - DNA, 20 bp, Artificial Sequence
  Description of Artificial Sequence: Synthetic oligonucleotide
  Target: LAMA2; (+) strand; PAM type: YTN; PAM sequence: TTC
actctgagcggatccccaaa

SEQ ID NO: 391957 - DNA, 20 bp, Artificial Sequence
  Description of Artificial Sequence: Synthetic oligonucleotide
  Target: LAMA2; (+) strand; PAM type: YTN; PAM sequence: CTC
tgagcggatccccaaaggcc

SEQ ID NO: 391958 - DNA, 20 bp, Artificial Sequence
  Description of Artificial Sequence: Synthetic oligonucleotide
  Target: LAMA2; (+) strand; PAM type: YTN; PAM sequence: CTG
agcggatccccaaaggccct

SEQ ID NO: 391959 - DNA, 20 bp, Artificial Sequence
  Description of Artificial Sequence: Synthetic oligonucleotide
  Target: LAMA2; (+) strand; PAM type: YTN; PAM sequence: CTA
gtcaatgctccaggaacttt

SEQ ID NO: 391960 - DNA, 20 bp, Artificial Sequence
  Description of Artificial Sequence: Synthetic oligonucleotide
  Target: LAMA2; (+) strand; PAM type: YTN; PAM sequence: CTC
caggaactttccttttcttt

SEQ ID NO: 391961 - DNA, 20 bp, Artificial Sequence
  Description of Artificial Sequence: Synthetic oligonucleotide
  Target: LAMA2; (+) strand; PAM type: YTN; PAM sequence: CTT
tccttttctttccattgaca

SEQ ID NO: 391962 - DNA, 20 bp, Artificial Sequence
  Description of Artificial Sequence: Synthetic oligonucleotide
  Target: LAMA2; (+) strand; PAM type: YTN; PAM sequence: TTT
ccttttctttccattgacat

SEQ ID NO: 391963 - DNA, 20 bp, Artificial Sequence
  Description of Artificial Sequence: Synthetic oligonucleotide
  Target: LAMA2; (+) strand; PAM type: YTN; PAM sequence: TTC
cttttctttccattgacatt

SEQ ID NO: 391964 - DNA, 20 bp, Artificial Sequence
  Description of Artificial Sequence: Synthetic oligonucleotide
  Target: LAMA2; (+) strand; PAM type: YTN; PAM sequence: CTT
ttctttccattgacatttca

SEQ ID NO: 391965 - DNA, 20 bp, Artificial Sequence
  Description of Artificial Sequence: Synthetic oligonucleotide
  Target: LAMA2; (+) strand; PAM type: YTN; PAM sequence: TTT
tctttccattgacatttcaa

SEQ ID NO: 391966 - DNA, 20 bp, Artificial Sequence
  Description of Artificial Sequence: Synthetic oligonucleotide
  Target: LAMA2; (+) strand; PAM type: YTN; PAM sequence: TTT
ctttccattgacatttcaaa

SEQ ID NO: 391967 - DNA, 20 bp, Artificial Sequence
  Description of Artificial Sequence: Synthetic oligonucleotide
  Target: LAMA2; (+) strand; PAM type: YTN; PAM sequence: TTC
tttccattgacatttcaaac

SEQ ID NO: 391968 - DNA, 20 bp, Artificial Sequence
  Description of Artificial Sequence: Synthetic oligonucleotide
  Target: LAMA2; (+) strand; PAM type: YTN; PAM sequence: CTT
tccattgacatttcaaacac

SEQ ID NO: 391969 - DNA, 20 bp, Artificial Sequence
  Description of Artificial Sequence: Synthetic oligonucleotide
  Target: LAMA2; (+) strand; PAM type: YTN; PAM sequence: TTT
ccattgacatttcaaacacc

SEQ ID NO: 391970 - DNA, 20 bp, Artificial Sequence
  Description of Artificial Sequence: Synthetic oligonucleotide
  Target: LAMA2; (+) strand; PAM type: YTN; PAM sequence: TTC
cattgacatttcaaacaccc

SEQ ID NO: 391971 - DNA, 20 bp, Artificial Sequence
  Description of Artificial Sequence: Synthetic oligonucleotide
  Target: LAMA2; (+) strand; PAM type: YTN; PAM sequence: TTG
acatttcaaacacccaacac

SEQ ID NO: 391972 - DNA, 20 bp, Artificial Sequence
  Description of Artificial Sequence: Synthetic oligonucleotide
  Target: LAMA2; (+) strand; PAM type: YTN; PAM sequence: TTT
caaacacccaacacctagca

SEQ ID NO: 391973 - DNA, 20 bp, Artificial Sequence
  Description of Artificial Sequence: Synthetic oligonucleotide
  Target: LAMA2; (+) strand; PAM type: YTN; PAM sequence: TTC
aaacacccaacacctagcag

SEQ ID NO: 391974 - DNA, 20 bp, Artificial Sequence
  Description of Artificial Sequence: Synthetic oligonucleotide
  Target: LAMA2; (+) strand; PAM type: YTN; PAM sequence: CTA
gcagcccatcctggggactc

SEQ ID NO: 391975 - DNA, 20 bp, Artificial Sequence
  Description of Artificial Sequence: Synthetic oligonucleotide
  Target: LAMA2; (+) strand; PAM type: YTN; PAM sequence: CTG
gggactcattttcaatttgt

SEQ ID NO: 391976 - DNA, 20 bp, Artificial Sequence
  Description of Artificial Sequence: Synthetic oligonucleotide
  Target: LAMA2; (+) strand; PAM type: YTN; PAM sequence: CTC
attttcaatttgtttcaatc

SEQ ID NO: 391977 - DNA, 20 bp, Artificial Sequence
  Description of Artificial Sequence: Synthetic oligonucleotide
  Target: LAMA2; (+) strand; PAM type: YTN; PAM sequence: TTT
tcaatttgtttcaatcaaac

SEQ ID NO: 391978 - DNA, 20 bp, Artificial Sequence
  Description of Artificial Sequence: Synthetic oligonucleotide
  Target: LAMA2; (+) strand; PAM type: YTN; PAM sequence: TTT
caatttgtttcaatcaaaca

SEQ ID NO: 391979 - DNA, 20 bp, Artificial Sequence
  Description of Artificial Sequence: Synthetic oligonucleotide
  Target: LAMA2; (+) strand; PAM type: YTN; PAM sequence: TTC
aatttgtttcaatcaaacac

SEQ ID NO: 391980 - DNA, 20 bp, Artificial Sequence
  Description of Artificial Sequence: Synthetic oligonucleotide
  Target: LAMA2; (+) strand; PAM type: YTN; PAM sequence: TTT
gtttcaatcaaacactggta

SEQ ID NO: 391981 - DNA, 20 bp, Artificial Sequence
  Description of Artificial Sequence: Synthetic oligonucleotide
  Target: LAMA2; (+) strand; PAM type: YTN; PAM sequence: TTG
tttcaatcaaacactggtat

SEQ ID NO: 391982 - DNA, 20 bp, Artificial Sequence
  Description of Artificial Sequence: Synthetic oligonucleotide
  Target: LAMA2; (+) strand; PAM type: YTN; PAM sequence: TTT
caatcaaacactggtatgag

SEQ ID NO: 391983 - DNA, 20 bp, Artificial Sequence
  Description of Artificial Sequence: Synthetic oligonucleotide
  Target: LAMA2; (+) strand; PAM type: YTN; PAM sequence: TTC
aatcaaacactggtatgaga

SEQ ID NO: 391984 - DNA, 20 bp, Artificial Sequence
  Description of Artificial Sequence: Synthetic oligonucleotide
  Target: LAMA2; (+) strand; PAM type: YTN; PAM sequence: CTG
gtatgagaataaatgctagc

SEQ ID NO: 391985 - DNA, 20 bp, Artificial Sequence
  Description of Artificial Sequence: Synthetic oligonucleotide
  Target: LAMA2; (+) strand; PAM type: YTN; PAM sequence: CTA
gcatatgttttagtagatcc

SEQ ID NO: 391986 - DNA, 20 bp, Artificial Sequence
  Description of Artificial Sequence: Synthetic oligonucleotide
  Target: LAMA2; (+) strand; PAM type: YTN; PAM sequence: TTT
tagtagatcctattatcaac

SEQ ID NO: 391987 - DNA, 20 bp, Artificial Sequence
  Description of Artificial Sequence: Synthetic oligonucleotide
  Target: LAMA2; (+) strand; PAM type: YTN; PAM sequence: TTT
agtagatcctattatcaaca

SEQ ID NO: 391988 - DNA, 20 bp, Artificial Sequence
  Description of Artificial Sequence: Synthetic oligonucleotide
  Target: LAMA2; (+) strand; PAM type: YTN; PAM sequence: TTA
gtagatcctattatcaacac

SEQ ID NO: 391989 - DNA, 20 bp, Artificial Sequence
  Description of Artificial Sequence: Synthetic oligonucleotide
  Target: LAMA2; (+) strand; PAM type: YTN; PAM sequence: CTA
ttatcaacactgcttacttt

SEQ ID NO: 391990 - DNA, 20 bp, Artificial Sequence
  Description of Artificial Sequence: Synthetic oligonucleotide
  Target: LAMA2; (+) strand; PAM type: YTN; PAM sequence: TTA
tcaacactgcttactttgtt

SEQ ID NO: 391991 - DNA, 20 bp, Artificial Sequence
  Description of Artificial Sequence: Synthetic oligonucleotide
  Target: LAMA2; (+) strand; PAM type: YTN; PAM sequence: CTG
cttactttgttctctgcaat

SEQ ID NO: 391992 - DNA, 20 bp, Artificial Sequence
  Description of Artificial Sequence: Synthetic oligonucleotide
  Target: LAMA2; (+) strand; PAM type: YTN; PAM sequence: CTT
actttgttctctgcaatgaa

SEQ ID NO: 391993 - DNA, 20 bp, Artificial Sequence
  Description of Artificial Sequence: Synthetic oligonucleotide
  Target: LAMA2; (+) strand; PAM type: YTN; PAM sequence: TTA
ctttgttctctgcaatgaac

SEQ ID NO: 391994 - DNA, 20 bp, Artificial Sequence
  Description of Artificial Sequence: Synthetic oligonucleotide
  Target: LAMA2; (+) strand; PAM type: YTN; PAM sequence: CTT
tgttctctgcaatgaacctt

SEQ ID NO: 391995 - DNA, 20 bp, Artificial Sequence
  Description of Artificial Sequence: Synthetic oligonucleotide
  Target: LAMA2; (+) strand; PAM type: YTN; PAM sequence: TTT
gttctctgcaatgaaccttc

SEQ ID NO: 391996 - DNA, 20 bp, Artificial Sequence
  Description of Artificial Sequence: Synthetic oligonucleotide
  Target: LAMA2; (+) strand; PAM type: YTN; PAM sequence: TTG
ttctctgcaatgaaccttcc

SEQ ID NO: 391997 - DNA, 20 bp, Artificial Sequence
  Description of Artificial Sequence: Synthetic oligonucleotide
  Target: LAMA2; (+) strand; PAM type: YTN; PAM sequence: TTC
tctgcaatgaaccttccatc

SEQ ID NO: 391998 - DNA, 20 bp, Artificial Sequence
  Description of Artificial Sequence: Synthetic oligonucleotide
  Target: LAMA2; (+) strand; PAM type: YTN; PAM sequence: CTC
tgcaatgaaccttccatctc

SEQ ID NO: 391999 - DNA, 20 bp, Artificial Sequence
  Description of Artificial Sequence: Synthetic oligonucleotide
  Target: LAMA2; (+) strand; PAM type: YTN; PAM sequence: CTG
caatgaaccttccatctccc

SEQ ID NO: 392000 - DNA, 20 bp, Artificial Sequence
  Description of Artificial Sequence: Synthetic oligonucleotide
  Target: LAMA2; (+) strand; PAM type: YTN; PAM sequence: CTT
ccatctcccaccaaagagag

SEQ ID NO: 392001 - DNA, 20 bp, Artificial Sequence
  Description of Artificial Sequence: Synthetic oligonucleotide
  Target: LAMA2; (+) strand; PAM type: YTN; PAM sequence: TTC
catctcccaccaaagagaga

SEQ ID NO: 392002 - DNA, 20 bp, Artificial Sequence
  Description of Artificial Sequence: Synthetic oligonucleotide
  Target: LAMA2; (+) strand; PAM type: YTN; PAM sequence: CTC
ccaccaaagagagatgcata

SEQ ID NO: 392003 - DNA, 20 bp, Artificial Sequence
  Description of Artificial Sequence: Synthetic oligonucleotide
  Target: LAMA2; (+) strand; PAM type: YTN; PAM sequence: TTC
atggttacctctttggtcaa

SEQ ID NO: 392004 - DNA, 20 bp, Artificial Sequence
  Description of Artificial Sequence: Synthetic oligonucleotide
  Target: LAMA2; (+) strand; PAM type: YTN; PAM sequence: TTA
cctctttggtcaatatgaat

SEQ ID NO: 392005 - DNA, 20 bp, Artificial Sequence
  Description of Artificial Sequence: Synthetic oligonucleotide
  Target: LAMA2; (+) strand; PAM type: YTN; PAM sequence: CTC
tttggtcaatatgaatattt

SEQ ID NO: 392006 - DNA, 20 bp, Artificial Sequence
  Description of Artificial Sequence: Synthetic oligonucleotide
  Target: LAMA2; (+) strand; PAM type: YTN; PAM sequence: CTT
tggtcaatatgaatatttgc

SEQ ID NO: 392007 - DNA, 20 bp, Artificial Sequence
  Description of Artificial Sequence: Synthetic oligonucleotide
  Target: LAMA2; (+) strand; PAM type: YTN; PAM sequence: TTT
ggtcaatatgaatatttgct

SEQ ID NO: 392008 - DNA, 20 bp, Artificial Sequence
  Description of Artificial Sequence: Synthetic oligonucleotide
  Target: LAMA2; (+) strand; PAM type: YTN; PAM sequence: TTG
gtcaatatgaatatttgctt

SEQ ID NO: 392009 - DNA, 20 bp, Artificial Sequence
  Description of Artificial Sequence: Synthetic oligonucleotide
  Target: LAMA2; (+) strand; PAM type: YTN; PAM sequence: TTT
gcttcttctgggtgcctagg

SEQ ID NO: 392010 - DNA, 20 bp, Artificial Sequence
  Description of Artificial Sequence: Synthetic oligonucleotide
  Target: LAMA2; (+) strand; PAM type: YTN; PAM sequence: TTG
cttcttctgggtgcctaggg

SEQ ID NO: 392011 - DNA, 20 bp, Artificial Sequence
  Description of Artificial Sequence: Synthetic oligonucleotide
  Target: LAMA2; (+) strand; PAM type: YTN; PAM sequence: CTT
cttctgggtgcctagggcct

SEQ ID NO: 392012 - DNA, 20 bp, Artificial Sequence
  Description of Artificial Sequence: Synthetic oligonucleotide
  Target: LAMA2; (+) strand; PAM type: YTN; PAM sequence: TTC
ttctgggtgcctagggcctc

SEQ ID NO: 392013 - DNA, 20 bp, Artificial Sequence
  Description of Artificial Sequence: Synthetic oligonucleotide
  Target: LAMA2; (+) strand; PAM type: YTN; PAM sequence: CTT
ctgggtgcctagggcctcta

SEQ ID NO: 392014 - DNA, 20 bp, Artificial Sequence
  Description of Artificial Sequence: Synthetic oligonucleotide
  Target: LAMA2; (+) strand; PAM type: YTN; PAM sequence: TTC
tgggtgcctagggcctctag

SEQ ID NO: 392015 - DNA, 20 bp, Artificial Sequence
  Description of Artificial Sequence: Synthetic oligonucleotide
  Target: LAMA2; (+) strand; PAM type: YTN; PAM sequence: CTG
ggtgcctagggcctctaggt

SEQ ID NO: 392016 - DNA, 20 bp, Artificial Sequence
  Description of Artificial Sequence: Synthetic oligonucleotide
  Target: LAMA2; (+) strand; PAM type: YTN; PAM sequence: CTA
gggcctctaggtactatttg

SEQ ID NO: 392017 - DNA, 20 bp, Artificial Sequence
  Description of Artificial Sequence: Synthetic oligonucleotide
  Target: LAMA2; (+) strand; PAM type: YTN; PAM sequence: CTC
taggtactatttgtacaatt

SEQ ID NO: 392018 - DNA, 20 bp, Artificial Sequence
  Description of Artificial Sequence: Synthetic oligonucleotide
  Target: LAMA2; (+) strand; PAM type: YTN; PAM sequence: CTA
ggtactatttgtacaatttg

SEQ ID NO: 392019 - DNA, 20 bp, Artificial Sequence
  Description of Artificial Sequence: Synthetic oligonucleotide
  Target: LAMA2; (+) strand; PAM type: YTN; PAM sequence: CTA
tttgtacaatttgtggacca

SEQ ID NO: 392020 - DNA, 20 bp, Artificial Sequence
  Description of Artificial Sequence: Synthetic oligonucleotide
  Target: LAMA2; (+) strand; PAM type: YTN; PAM sequence: TTT
gtacaatttgtggaccaaca

SEQ ID NO: 392021 - DNA, 20 bp, Artificial Sequence
  Description of Artificial Sequence: Synthetic oligonucleotide
  Target: LAMA2; (+) strand; PAM type: YTN; PAM sequence: TTG
tacaatttgtggaccaacag

SEQ ID NO: 392022 - DNA, 20 bp, Artificial Sequence
  Description of Artificial Sequence: Synthetic oligonucleotide
  Target: LAMA2; (+) strand; PAM type: YTN; PAM sequence: TTT
gtggaccaacaggggtagac

SEQ ID NO: 392023 - DNA, 20 bp, Artificial Sequence
  Description of Artificial Sequence: Synthetic oligonucleotide
  Target: LAMA2; (+) strand; PAM type: YTN; PAM sequence: TTG
tggaccaacaggggtagact

SEQ ID NO: 392024 - DNA, 20 bp, Artificial Sequence
  Description of Artificial Sequence: Synthetic oligonucleotide
  Target: LAMA2; (+) strand; PAM type: YTN; PAM sequence: CTG
gagatggagatttatcccag

SEQ ID NO: 392025 - DNA, 20 bp, Artificial Sequence
  Description of Artificial Sequence: Synthetic oligonucleotide
  Target: LAMA2; (+) strand; PAM type: YTN; PAM sequence: TTT
atcccaggcttgctcaccac

SEQ ID NO: 392026 - DNA, 20 bp, Artificial Sequence
  Description of Artificial Sequence: Synthetic oligonucleotide
  Target: LAMA2; (+) strand; PAM type: YTN; PAM sequence: TTA
tcccaggcttgctcaccacc

SEQ ID NO: 392027 - DNA, 20 bp, Artificial Sequence
  Description of Artificial Sequence: Synthetic oligonucleotide
  Target: LAMA2; (+) strand; PAM type: YTN; PAM sequence: CTT
gctcaccaccccaaatccca

SEQ ID NO: 392028 - DNA, 20 bp, Artificial Sequence
  Description of Artificial Sequence: Synthetic oligonucleotide
  Target: LAMA2; (+) strand; PAM type: YTN; PAM sequence: TTG
ctcaccaccccaaatcccac

SEQ ID NO: 392029 - DNA, 20 bp, Artificial Sequence
  Description of Artificial Sequence: Synthetic oligonucleotide
  Target: LAMA2; (+) strand; PAM type: YTN; PAM sequence: CTC
accaccccaaatcccacgtc

SEQ ID NO: 392030 - DNA, 20 bp, Artificial Sequence
  Description of Artificial Sequence: Synthetic oligonucleotide
  Target: LAMA2; (+) strand; PAM type: YTN; PAM sequence: CTA
tacaccagagaaaggattac

SEQ ID NO: 392031 - DNA, 20 bp, Artificial Sequence
  Description of Artificial Sequence: Synthetic oligonucleotide
  Target: LAMA2; (+) strand; PAM type: YTN; PAM sequence: TTA
cccatcaccaaaggtgtctc

SEQ ID NO: 392032 - DNA, 20 bp, Artificial Sequence
  Description of Artificial Sequence: Synthetic oligonucleotide
  Target: LAMA2; (+) strand; PAM type: YTN; PAM sequence: CTC
tcgttccctaaattatgcat

SEQ ID NO: 392033 - DNA, 20 bp, Artificial Sequence
  Description of Artificial Sequence: Synthetic oligonucleotide
  Target: LAMA2; (+) strand; PAM type: YTN; PAM sequence: CTC
gttccctaaattatgcatag

SEQ ID NO: 392034 - DNA, 20 bp, Artificial Sequence
  Description of Artificial Sequence: Synthetic oligonucleotide
  Target: LAMA2; (+) strand; PAM type: YTN; PAM sequence: TTC
cctaaattatgcatagatca

SEQ ID NO: 392035 - DNA, 20 bp, Artificial Sequence
  Description of Artificial Sequence: Synthetic oligonucleotide
  Target: LAMA2; (+) strand; PAM type: YTN; PAM sequence: CTA
aattatgcatagatcaggtg

SEQ ID NO: 392036 - DNA, 20 bp, Artificial Sequence
  Description of Artificial Sequence: Synthetic oligonucleotide
  Target: LAMA2; (+) strand; PAM type: YTN; PAM sequence: TTA
tgcatagatcaggtggtctg

SEQ ID NO: 392037 - DNA, 20 bp, Artificial Sequence
  Description of Artificial Sequence: Synthetic oligonucleotide
  Target: LAMA2; (+) strand; PAM type: YTN; PAM sequence: CTG
attgtgtctgtccagatagg

SEQ ID NO: 392038 - DNA, 20 bp, Artificial Sequence
  Description of Artificial Sequence: Synthetic oligonucleotide
  Target: LAMA2; (+) strand; PAM type: YTN; PAM sequence: TTG
tgtctgtccagatagggcac

SEQ ID NO: 392039 - DNA, 20 bp, Artificial Sequence
  Description of Artificial Sequence: Synthetic oligonucleotide
  Target: LAMA2; (+) strand; PAM type: YTN; PAM sequence: CTG
tccagatagggcaccctttt

SEQ ID NO: 392040 - DNA, 20 bp, Artificial Sequence
  Description of Artificial Sequence: Synthetic oligonucleotide
  Target: LAMA2; (+) strand; PAM type: YTN; PAM sequence: CTT
ttctaatttatgtgaagtgc

SEQ ID NO: 392041 - DNA, 20 bp, Artificial Sequence
  Description of Artificial Sequence: Synthetic oligonucleotide
  Target: LAMA2; (+) strand; PAM type: YTN; PAM sequence: TTT
tctaatttatgtgaagtgcc

SEQ ID NO: 392042 - DNA, 20 bp, Artificial Sequence
  Description of Artificial Sequence: Synthetic oligonucleotide
  Target: LAMA2; (+) strand; PAM type: YTN; PAM sequence: TTT
ctaatttatgtgaagtgcca

SEQ ID NO: 392043 - DNA, 20 bp, Artificial Sequence
  Description of Artificial Sequence: Synthetic oligonucleotide
  Target: LAMA2; (+) strand; PAM type: YTN; PAM sequence: TTC
taatttatgtgaagtgccat

SEQ ID NO: 392044 - DNA, 20 bp, Artificial Sequence
  Description of Artificial Sequence: Synthetic oligonucleotide
  Target: LAMA2; (+) strand; PAM type: YTN; PAM sequence: CTA
atttatgtgaagtgccatgt

SEQ ID NO: 392045 - DNA, 20 bp, Artificial Sequence
  Description of Artificial Sequence: Synthetic oligonucleotide
  Target: LAMA2; (+) strand; PAM type: YTN; PAM sequence: TTT
atgtgaagtgccatgtggga

SEQ ID NO: 392046 - DNA, 20 bp, Artificial Sequence
  Description of Artificial Sequence: Synthetic oligonucleotide
  Target: LAMA2; (+) strand; PAM type: YTN; PAM sequence: TTA
tgtgaagtgccatgtgggat

SEQ ID NO: 392047 - DNA, 20 bp, Artificial Sequence
  Description of Artificial Sequence: Synthetic oligonucleotide
  Target: LAMA2; (+) strand; PAM type: YTN; PAM sequence: CTA
tactttagggaaataagaac

SEQ ID NO: 392048 - DNA, 20 bp, Artificial Sequence
  Description of Artificial Sequence: Synthetic oligonucleotide
  Target: LAMA2; (+) strand; PAM type: YTN; PAM sequence: CTT
tagggaaataagaacaccac

SEQ ID NO: 392049 - DNA, 20 bp, Artificial Sequence
  Description of Artificial Sequence: Synthetic oligonucleotide
  Target: LAMA2; (+) strand; PAM type: YTN; PAM sequence: TTT
agggaaataagaacaccact

SEQ ID NO: 392050 - DNA, 20 bp, Artificial Sequence
  Description of Artificial Sequence: Synthetic oligonucleotide
  Target: LAMA2; (+) strand; PAM type: YTN; PAM sequence: TTA
gggaaataagaacaccactc

SEQ ID NO: 392051 - DNA, 20 bp, Artificial Sequence
  Description of Artificial Sequence: Synthetic oligonucleotide
  Target: LAMA2; (+) strand; PAM type: YTN; PAM sequence: CTC
acttttgcctgcaggcacta

SEQ ID NO: 392052 - DNA, 20 bp, Artificial Sequence
  Description of Artificial Sequence: Synthetic oligonucleotide
  Target: LAMA2; (+) strand; PAM type: YTN; PAM sequence: CTT
ttgcctgcaggcactatttg

SEQ ID NO: 392053 - DNA, 20 bp, Artificial Sequence
  Description of Artificial Sequence: Synthetic oligonucleotide
  Target: LAMA2; (+) strand; PAM type: YTN; PAM sequence: TTT
tgcctgcaggcactatttgg

SEQ ID NO: 392054 - DNA, 20 bp, Artificial Sequence
  Description of Artificial Sequence: Synthetic oligonucleotide
  Target: LAMA2; (+) strand; PAM type: YTN; PAM sequence: TTT
gcctgcaggcactatttggt

SEQ ID NO: 392055 - DNA, 20 bp, Artificial Sequence
  Description of Artificial Sequence: Synthetic oligonucleotide
  Target: LAMA2; (+) strand; PAM type: YTN; PAM sequence: TTG
cctgcaggcactatttggta

SEQ ID NO: 392056 - DNA, 20 bp, Artificial Sequence
  Description of Artificial Sequence: Synthetic oligonucleotide
  Target: LAMA2; (+) strand; PAM type: YTN; PAM sequence: CTG
caggcactatttggtagaat

SEQ ID NO: 392057 - DNA, 20 bp, Artificial Sequence
  Description of Artificial Sequence: Synthetic oligonucleotide
  Target: LAMA2; (+) strand; PAM type: YTN; PAM sequence: CTA
tttggtagaattaatccaac

SEQ ID NO: 392058 - DNA, 20 bp, Artificial Sequence
  Description of Artificial Sequence: Synthetic oligonucleotide
  Target: LAMA2; (+) strand; PAM type: YTN; PAM sequence: TTT
ggtagaattaatccaactgt

SEQ ID NO: 392059 - DNA, 20 bp, Artificial Sequence
  Description of Artificial Sequence: Synthetic oligonucleotide
  Target: LAMA2; (+) strand; PAM type: YTN; PAM sequence: TTG
gtagaattaatccaactgtt

SEQ ID NO: 392060 - DNA, 20 bp, Artificial Sequence
  Description of Artificial Sequence: Synthetic oligonucleotide
  Target: LAMA2; (+) strand; PAM type: YTN; PAM sequence: TTA
atccaactgttaaaattgaa

SEQ ID NO: 392061 - DNA, 20 bp, Artificial Sequence
  Description of Artificial Sequence: Synthetic oligonucleotide
  Target: LAMA2; (+) strand; PAM type: YTN; PAM sequence: CTG
ttaaaattgaatgaaaggtc

SEQ ID NO: 392062 - DNA, 20 bp, Artificial Sequence
  Description of Artificial Sequence: Synthetic oligonucleotide
  Target: LAMA2; (+) strand; PAM type: YTN; PAM sequence: TTA
aaattgaatgaaaggtcaaa

SEQ ID NO: 392063 - DNA, 20 bp, Artificial Sequence
  Description of Artificial Sequence: Synthetic oligonucleotide
  Target: LAMA2; (+) strand; PAM type: YTN; PAM sequence: TTG
aatgaaaggtcaaatttaaa

SEQ ID NO: 392064 - DNA, 20 bp, Artificial Sequence
  Description of Artificial Sequence: Synthetic oligonucleotide
  Target: LAMA2; (+) strand; PAM type: YTN; PAM sequence: TTT
aaattgtaccagagcaacac

SEQ ID NO: 392065 - DNA, 20 bp, Artificial Sequence
  Description of Artificial Sequence: Synthetic oligonucleotide
  Target: LAMA2; (+) strand; PAM type: YTN; PAM sequence: TTA
aattgtaccagagcaacact

SEQ ID NO: 392066 - DNA, 20 bp, Artificial Sequence
  Description of Artificial Sequence: Synthetic oligonucleotide
  Target: LAMA2; (+) strand; PAM type: YTN; PAM sequence: TTG
taccagagcaacactaaatg

SEQ ID NO: 392067 - DNA, 20 bp, Artificial Sequence
  Description of Artificial Sequence: Synthetic oligonucleotide
  Target: LAMA2; (+) strand; PAM type: YTN; PAM sequence: CTA
aatgttcattgagatgtaat

SEQ ID NO: 392068 - DNA, 20 bp, Artificial Sequence
  Description of Artificial Sequence: Synthetic oligonucleotide
  Target: LAMA2; (+) strand; PAM type: YTN; PAM sequence: TTC
attgagatgtaatacaaagc

SEQ ID NO: 392069 - DNA, 20 bp, Artificial Sequence
  Description of Artificial Sequence: Synthetic oligonucleotide
  Target: LAMA2; (+) strand; PAM type: YTN; PAM sequence: TTG
agatgtaatacaaagcttgg

SEQ ID NO: 392070 - DNA, 20 bp, Artificial Sequence
  Description of Artificial Sequence: Synthetic oligonucleotide
  Target: LAMA2; (+) strand; PAM type: YTN; PAM sequence: CTT
ggcagtttaatggagaaaaa

SEQ ID NO: 392071 - DNA, 20 bp, Artificial Sequence
  Description of Artificial Sequence: Synthetic oligonucleotide
  Target: LAMA2; (+) strand; PAM type: YTN; PAM sequence: TTG
gcagtttaatggagaaaaaa

SEQ ID NO: 392072 - DNA, 20 bp, Artificial Sequence
  Description of Artificial Sequence: Synthetic oligonucleotide
  Target: LAMA2; (+) strand; PAM type: YTN; PAM sequence: TTT
aatggagaaaaaaagagaaa

SEQ ID NO: 392073 - DNA, 20 bp, Artificial Sequence
  Description of Artificial Sequence: Synthetic oligonucleotide
  Target: LAMA2; (+) strand; PAM type: YTN; PAM sequence: TTA
atggagaaaaaaagagaaag

SEQ ID NO: 392074 - DNA, 20 bp, Artificial Sequence
  Description of Artificial Sequence: Synthetic oligonucleotide
  Target: LAMA2; (+) strand; PAM type: YTN; PAM sequence: CTC
accaaaggctttaaagtagg

SEQ ID NO: 392075 - DNA, 20 bp, Artificial Sequence
  Description of Artificial Sequence: Synthetic oligonucleotide
  Target: LAMA2; (+) strand; PAM type: YTN; PAM sequence: CTT
taaagtaggttatactgtat

SEQ ID NO: 392076 - DNA, 20 bp, Artificial Sequence
  Description of Artificial Sequence: Synthetic oligonucleotide
  Target: LAMA2; (+) strand; PAM type: YTN; PAM sequence: TTT
aaagtaggttatactgtata

SEQ ID NO: 392077 - DNA, 20 bp, Artificial Sequence
  Description of Artificial Sequence: Synthetic oligonucleotide
  Target: LAMA2; (+) strand; PAM type: YTN; PAM sequence: TTA
aagtaggttatactgtatat

SEQ ID NO: 392078 - DNA, 20 bp, Artificial Sequence
  Description of Artificial Sequence: Synthetic oligonucleotide
  Target: LAMA2; (+) strand; PAM type: YTN; PAM sequence: TTA
tactgtatatccacacctct

SEQ ID NO: 392079 - DNA, 20 bp, Artificial Sequence
  Description of Artificial Sequence: Synthetic oligonucleotide
  Target: LAMA2; (+) strand; PAM type: YTN; PAM sequence: CTG
tatatccacacctctttttc

SEQ ID NO: 392080 - DNA, 20 bp, Artificial Sequence
  Description of Artificial Sequence: Synthetic oligonucleotide
  Target: LAMA2; (+) strand; PAM type: YTN; PAM sequence: CTC
tttttctctctctctaaact

SEQ ID NO: 392081 - DNA, 20 bp, Artificial Sequence
  Description of Artificial Sequence: Synthetic oligonucleotide
  Target: LAMA2; (+) strand; PAM type: YTN; PAM sequence: CTT
tttctctctctctaaactat

SEQ ID NO: 392082 - DNA, 20 bp, Artificial Sequence
  Description of Artificial Sequence: Synthetic oligonucleotide
  Target: LAMA2; (+) strand; PAM type: YTN; PAM sequence: TTT
ttctctctctctaaactata

SEQ ID NO: 392083 - DNA, 20 bp, Artificial Sequence
  Description of Artificial Sequence: Synthetic oligonucleotide
  Target: LAMA2; (+) strand; PAM type: YTN; PAM sequence: TTT
tctctctctctaaactataa

SEQ ID NO: 392084 - DNA, 20 bp, Artificial Sequence
  Description of Artificial Sequence: Synthetic oligonucleotide
  Target: LAMA2; (+) strand; PAM type: YTN; PAM sequence: TTT
ctctctctctaaactataat

SEQ ID NO: 392085 - DNA, 20 bp, Artificial Sequence
  Description of Artificial Sequence: Synthetic oligonucleotide
  Target: LAMA2; (+) strand; PAM type: YTN; PAM sequence: TTC
tctctctctaaactataata

SEQ ID NO: 392086 - DNA, 20 bp, Artificial Sequence
  Description of Artificial Sequence: Synthetic oligonucleotide
  Target: LAMA2; (+) strand; PAM type: YTN; PAM sequence: CTC
tctctctaaactataataat

SEQ ID NO: 392087 - DNA, 20 bp, Artificial Sequence
  Description of Artificial Sequence: Synthetic oligonucleotide
  Target: LAMA2; (+) strand; PAM type: YTN; PAM sequence: CTC
tctctaaactataataatga

SEQ ID NO: 392088 - DNA, 20 bp, Artificial Sequence
  Description of Artificial Sequence: Synthetic oligonucleotide
  Target: LAMA2; (+) strand; PAM type: YTN; PAM sequence: CTC
tctaaactataataatgagg

SEQ ID NO: 392089 - DNA, 20 bp, Artificial Sequence
  Description of Artificial Sequence: Synthetic oligonucleotide
  Target: LAMA2; (+) strand; PAM type: YTN; PAM sequence: CTC
taaactataataatgaggga

SEQ ID NO: 392090 - DNA, 20 bp, Artificial Sequence
  Description of Artificial Sequence: Synthetic oligonucleotide
  Target: LAMA2; (+) strand; PAM type: YTN; PAM sequence: CTA
aactataataatgagggata

SEQ ID NO: 392091 - DNA, 20 bp, Artificial Sequence
  Description of Artificial Sequence: Synthetic oligonucleotide
  Target: LAMA2; (+) strand; PAM type: YTN; PAM sequence: CTA
taataatgagggataaccat

SEQ ID NO: 392092 - DNA, 20 bp, Artificial Sequence
  Description of Artificial Sequence: Synthetic oligonucleotide
  Target: LAMA2; (+) strand; PAM type: YTN; PAM sequence: CTT
ttacatttttgtttgtcagt

SEQ ID NO: 392093 - DNA, 20 bp, Artificial Sequence
  Description of Artificial Sequence: Synthetic oligonucleotide
  Target: LAMA2; (+) strand; PAM type: YTN; PAM sequence: TTT
tacatttttgtttgtcagtt

SEQ ID NO: 392094 - DNA, 20 bp, Artificial Sequence
  Description of Artificial Sequence: Synthetic oligonucleotide
  Target: LAMA2; (+) strand; PAM type: YTN; PAM sequence: TTT
acatttttgtttgtcagttg

SEQ ID NO: 392095 - DNA, 20 bp, Artificial Sequence
  Description of Artificial Sequence: Synthetic oligonucleotide
  Target: LAMA2; (+) strand; PAM type: YTN; PAM sequence: TTA
catttttgtttgtcagttgt

SEQ ID NO: 392096 - DNA, 20 bp, Artificial Sequence
  Description of Artificial Sequence: Synthetic oligonucleotide
  Target: LAMA2; (+) strand; PAM type: YTN; PAM sequence: TTT
ttgtttgtcagttgtaataa

SEQ ID NO: 392097 - DNA, 20 bp, Artificial Sequence
  Description of Artificial Sequence: Synthetic oligonucleotide
  Target: LAMA2; (+) strand; PAM type: YTN; PAM sequence: TTT
tgtttgtcagttgtaataaa

SEQ ID NO: 392098 - DNA, 20 bp, Artificial Sequence
  Description of Artificial Sequence: Synthetic oligonucleotide
  Target: LAMA2; (+) strand; PAM type: YTN; PAM sequence: TTT
gtttgtcagttgtaataaat

SEQ ID NO: 392099 - DNA, 20 bp, Artificial Sequence
  Description of Artificial Sequence: Synthetic oligonucleotide
  Target: LAMA2; (+) strand; PAM type: YTN; PAM sequence: TTG
tttgtcagttgtaataaatt

SEQ ID NO: 392100 - DNA, 20 bp, Artificial Sequence
  Description of Artificial Sequence: Synthetic oligonucleotide
  Target: LAMA2; (+) strand; PAM type: YTN; PAM sequence: TTT
gtcagttgtaataaattgct

SEQ ID NO: 392101 - DNA, 20 bp, Artificial Sequence
  Description of Artificial Sequence: Synthetic oligonucleotide
  Target: LAMA2; (+) strand; PAM type: YTN; PAM sequence: TTG
tcagttgtaataaattgctg

SEQ ID NO: 392102 - DNA, 20 bp, Artificial Sequence
  Description of Artificial Sequence: Synthetic oligonucleotide
  Target: LAMA2; (+) strand; PAM type: YTN; PAM sequence: TTG
taataaattgctgtgggaaa

SEQ ID NO: 392103 - DNA, 20 bp, Artificial Sequence
  Description of Artificial Sequence: Synthetic oligonucleotide
  Target: LAMA2; (+) strand; PAM type: YTN; PAM sequence: TTG
ctgtgggaaaagtaaatgct

SEQ ID NO: 392104 - DNA, 20 bp, Artificial Sequence
  Description of Artificial Sequence: Synthetic oligonucleotide
  Target: LAMA2; (+) strand; PAM type: YTN; PAM sequence: CTG
tgggaaaagtaaatgcttca

SEQ ID NO: 392105 - DNA, 20 bp, Artificial Sequence
  Description of Artificial Sequence: Synthetic oligonucleotide
  Target: LAMA2; (+) strand; PAM type: YTN; PAM sequence: CTT
cagactgacatttatctatt

SEQ ID NO: 392106 - DNA, 20 bp, Artificial Sequence
  Description of Artificial Sequence: Synthetic oligonucleotide
  Target: LAMA2; (+) strand; PAM type: YTN; PAM sequence: TTC
agactgacatttatctattt

SEQ ID NO: 392107 - DNA, 20 bp, Artificial Sequence
  Description of Artificial Sequence: Synthetic oligonucleotide
  Target: LAMA2; (+) strand; PAM type: YTN; PAM sequence: CTG
acatttatctatttcagctt

SEQ ID NO: 392108 - DNA, 20 bp, Artificial Sequence
  Description of Artificial Sequence: Synthetic oligonucleotide
  Target: LAMA2; (+) strand; PAM type: YTN; PAM sequence: TTT
atctatttcagctttatgtt

SEQ ID NO: 392109 - DNA, 20 bp, Artificial Sequence
  Description of Artificial Sequence: Synthetic oligonucleotide
  Target: LAMA2; (+) strand; PAM type: YTN; PAM sequence: TTA
tctatttcagctttatgttt

SEQ ID NO: 392110 - DNA, 20 bp, Artificial Sequence
  Description of Artificial Sequence: Synthetic oligonucleotide
  Target: LAMA2; (+) strand; PAM type: YTN; PAM sequence: CTA
tttcagctttatgtttggat

SEQ ID NO: 392111 - DNA, 20 bp, Artificial Sequence
  Description of Artificial Sequence: Synthetic oligonucleotide
  Target: LAMA2; (+) strand; PAM type: YTN; PAM sequence: TTT
cagctttatgtttggataga

SEQ ID NO: 392112 - DNA, 20 bp, Artificial Sequence
  Description of Artificial Sequence: Synthetic oligonucleotide
  Target: LAMA2; (+) strand; PAM type: YTN; PAM sequence: TTC
agctttatgtttggatagat

SEQ ID NO: 392113 - DNA, 20 bp, Artificial Sequence
  Description of Artificial Sequence: Synthetic oligonucleotide
  Target: LAMA2; (+) strand; PAM type: YTN; PAM sequence: CTT
tatgtttggatagatgtact

SEQ ID NO: 392114 - DNA, 20 bp, Artificial Sequence
  Description of Artificial Sequence: Synthetic oligonucleotide
  Target: LAMA2; (+) strand; PAM type: YTN; PAM sequence: TTT
atgtttggatagatgtacta

SEQ ID NO: 392115 - DNA, 20 bp, Artificial Sequence
  Description of Artificial Sequence: Synthetic oligonucleotide
  Target: LAMA2; (+) strand; PAM type: YTN; PAM sequence: TTA
tgtttggatagatgtactat

SEQ ID NO: 392116 - DNA, 20 bp, Artificial Sequence
  Description of Artificial Sequence: Synthetic oligonucleotide
  Target: LAMA2; (+) strand; PAM type: YTN; PAM sequence: TTT
ggatagatgtactattcatc

SEQ ID NO: 392117 - DNA, 20 bp, Artificial Sequence
  Description of Artificial Sequence: Synthetic oligonucleotide
  Target: LAMA2; (+) strand; PAM type: YTN; PAM sequence: TTG
gatagatgtactattcatcc

SEQ ID NO: 392118 - DNA, 20 bp, Artificial Sequence
  Description of Artificial Sequence: Synthetic oligonucleotide
  Target: LAMA2; (+) strand; PAM type: YTN; PAM sequence: CTA
ttcatcctatctttcattat

SEQ ID NO: 392119 - DNA, 20 bp, Artificial Sequence
  Description of Artificial Sequence: Synthetic oligonucleotide
  Target: LAMA2; (+) strand; PAM type: YTN; PAM sequence: TTC
atcctatctttcattatgag

SEQ ID NO: 392120 - DNA, 20 bp, Artificial Sequence
  Description of Artificial Sequence: Synthetic oligonucleotide
  Target: LAMA2; (+) strand; PAM type: YTN; PAM sequence: CTA
tctttcattatgagtcatga

SEQ ID NO: 392121 - DNA, 20 bp, Artificial Sequence
  Description of Artificial Sequence: Synthetic oligonucleotide
  Target: LAMA2; (+) strand; PAM type: YTN; PAM sequence: CTT
tcattatgagtcatgacctc

SEQ ID NO: 392122 - DNA, 20 bp, Artificial Sequence
  Description of Artificial Sequence: Synthetic oligonucleotide
  Target: LAMA2; (+) strand; PAM type: YTN; PAM sequence: TTT
cattatgagtcatgacctcg

SEQ ID NO: 392123 - DNA, 20 bp, Artificial Sequence
  Description of Artificial Sequence: Synthetic oligonucleotide
  Target: LAMA2; (+) strand; PAM type: YTN; PAM sequence: TTC
attatgagtcatgacctcgt

SEQ ID NO: 392124 - DNA, 20 bp, Artificial Sequence
  Description of Artificial Sequence: Synthetic oligonucleotide
  Target: LAMA2; (+) strand; PAM type: YTN; PAM sequence: TTA
tgagtcatgacctcgttata

SEQ ID NO: 392125 - DNA, 20 bp, Artificial Sequence
  Description of Artificial Sequence: Synthetic oligonucleotide
  Target: LAMA2; (+) strand; PAM type: YTN; PAM sequence: CTC
gttatagataatcaccttct

SEQ ID NO: 392126 - DNA, 20 bp, Artificial Sequence
  Description of Artificial Sequence: Synthetic oligonucleotide
  Target: LAMA2; (+) strand; PAM type: YTN; PAM sequence: TTA
tagataatcaccttctattc

SEQ ID NO: 392127 - DNA, 20 bp, Artificial Sequence
  Description of Artificial Sequence: Synthetic oligonucleotide
  Target: LAMA2; (+) strand; PAM type: YTN; PAM sequence: CTT
ctattcatctaaggcattct

SEQ ID NO: 392128 - DNA, 20 bp, Artificial Sequence
  Description of Artificial Sequence: Synthetic oligonucleotide
  Target: LAMA2; (+) strand; PAM type: YTN; PAM sequence: TTC
tattcatctaaggcattctt

SEQ ID NO: 392129 - DNA, 20 bp, Artificial Sequence
  Description of Artificial Sequence: Synthetic oligonucleotide
  Target: LAMA2; (+) strand; PAM type: YTN; PAM sequence: CTA
ttcatctaaggcattcttat

SEQ ID NO: 392130 - DNA, 20 bp, Artificial Sequence
  Description of Artificial Sequence: Synthetic oligonucleotide
  Target: LAMA2; (+) strand; PAM type: YTN; PAM sequence: TTC
atctaaggcattcttatctc

SEQ ID NO: 392131 - DNA, 20 bp, Artificial Sequence
  Description of Artificial Sequence: Synthetic oligonucleotide
  Target: LAMA2; (+) strand; PAM type: YTN; PAM sequence: CTA
aggcattcttatctcactat

SEQ ID NO: 392132 - DNA, 20 bp, Artificial Sequence
  Description of Artificial Sequence: Synthetic oligonucleotide
  Target: LAMA2; (+) strand; PAM type: YTN; PAM sequence: TTC
ttatctcactataattttat

SEQ ID NO: 392133 - DNA, 20 bp, Artificial Sequence
  Description of Artificial Sequence: Synthetic oligonucleotide
  Target: LAMA2; (+) strand; PAM type: YTN; PAM sequence: CTT
atctcactataattttataa

SEQ ID NO: 392134 - DNA, 20 bp, Artificial Sequence
  Description of Artificial Sequence: Synthetic oligonucleotide
  Target: LAMA2; (+) strand; PAM type: YTN; PAM sequence: TTA
tctcactataattttataat

SEQ ID NO: 392135 - DNA, 20 bp, Artificial Sequence
  Description of Artificial Sequence: Synthetic oligonucleotide
  Target: LAMA2; (+) strand; PAM type: YTN; PAM sequence: CTC
actataattttataatatct

SEQ ID NO: 392136 - DNA, 20 bp, Artificial Sequence
  Description of Artificial Sequence: Synthetic oligonucleotide
  Target: LAMA2; (+) strand; PAM type: YTN; PAM sequence: CTA
taattttataatatctaccg

SEQ ID NO: 392137 - DNA, 20 bp, Artificial Sequence
  Description of Artificial Sequence: Synthetic oligonucleotide
  Target: LAMA2; (+) strand; PAM type: YTN; PAM sequence: TTT
tataatatctaccgtgctat

SEQ ID NO: 392138 - DNA, 20 bp, Artificial Sequence
  Description of Artificial Sequence: Synthetic oligonucleotide
  Target: LAMA2; (+) strand; PAM type: YTN; PAM sequence: TTT
ataatatctaccgtgctatg

SEQ ID NO: 392139 - DNA, 20 bp, Artificial Sequence
  Description of Artificial Sequence: Synthetic oligonucleotide
  Target: LAMA2; (+) strand; PAM type: YTN; PAM sequence: TTA
taatatctaccgtgctatga

SEQ ID NO: 392140 - DNA, 20 bp, Artificial Sequence
  Description of Artificial Sequence: Synthetic oligonucleotide
  Target: LAMA2; (+) strand; PAM type: YTN; PAM sequence: CTA
ccgtgctatgactcctgatt

SEQ ID NO: 392141 - DNA, 20 bp, Artificial Sequence
  Description of Artificial Sequence: Synthetic oligonucleotide
  Target: LAMA2; (+) strand; PAM type: YTN; PAM sequence: CTA
tgactcctgattagttcata

SEQ ID NO: 392142 - DNA, 20 bp, Artificial Sequence
  Description of Artificial Sequence: Synthetic oligonucleotide
  Target: LAMA2; (+) strand; PAM type: YTN; PAM sequence: CTC
ctgattagttcataaataaa

SEQ ID NO: 392143 - DNA, 20 bp, Artificial Sequence
  Description of Artificial Sequence: Synthetic oligonucleotide
  Target: LAMA2; (+) strand; PAM type: YTN; PAM sequence: CTG
attagttcataaataaactg

SEQ ID NO: 392144 - DNA, 20 bp, Artificial Sequence
  Description of Artificial Sequence: Synthetic oligonucleotide
  Target: LAMA2; (+) strand; PAM type: YTN; PAM sequence: TTA
gttcataaataaactgtttt

SEQ ID NO: 392145 - DNA, 20 bp, Artificial Sequence
  Description of Artificial Sequence: Synthetic oligonucleotide
  Target: LAMA2; (+) strand; PAM type: YTN; PAM sequence: TTC
ataaataaactgttttattc

SEQ ID NO: 392146 - DNA, 20 bp, Artificial Sequence
  Description of Artificial Sequence: Synthetic oligonucleotide
  Target: LAMA2; (+) strand; PAM type: YTN; PAM sequence: CTG
ttttattccacgcattatta

SEQ ID NO: 392147 - DNA, 20 bp, Artificial Sequence
  Description of Artificial Sequence: Synthetic oligonucleotide
  Target: LAMA2; (+) strand; PAM type: YTN; PAM sequence: TTT
tattccacgcattattagaa

SEQ ID NO: 392148 - DNA, 20 bp, Artificial Sequence
  Description of Artificial Sequence: Synthetic oligonucleotide
  Target: LAMA2; (+) strand; PAM type: YTN; PAM sequence: TTT
attccacgcattattagaat

SEQ ID NO: 392149 - DNA, 20 bp, Artificial Sequence
  Description of Artificial Sequence: Synthetic oligonucleotide
  Target: LAMA2; (+) strand; PAM type: YTN; PAM sequence: TTA
ttccacgcattattagaatt

SEQ ID NO: 392150 - DNA, 20 bp, Artificial Sequence
  Description of Artificial Sequence: Synthetic oligonucleotide
  Target: LAMA2; (+) strand; PAM type: YTN; PAM sequence: TTC
cacgcattattagaattaat

SEQ ID NO: 392151 - DNA, 20 bp, Artificial Sequence
  Description of Artificial Sequence: Synthetic oligonucleotide
  Target: LAMA2; (+) strand; PAM type: YTN; PAM sequence: TTA
ttagaattaatgagtggaca

SEQ ID NO: 392152 - DNA, 20 bp, Artificial Sequence
  Description of Artificial Sequence: Synthetic oligonucleotide
  Target: LAMA2; (+) strand; PAM type: YTN; PAM sequence: TTA
gaattaatgagtggacatag

SEQ ID NO: 392153 - DNA, 20 bp, Artificial Sequence
  Description of Artificial Sequence: Synthetic oligonucleotide
  Target: LAMA2; (+) strand; PAM type: YTN; PAM sequence: TTA
atgagtggacataggtaaac

SEQ ID NO: 392154 - DNA, 20 bp, Artificial Sequence
  Description of Artificial Sequence: Synthetic oligonucleotide
  Target: LAMA2; (+) strand; PAM type: YTN; PAM sequence: TTA
gtgtttatttcctgacatac

SEQ ID NO: 392155 - DNA, 20 bp, Artificial Sequence
  Description of Artificial Sequence: Synthetic oligonucleotide
  Target: LAMA2; (+) strand; PAM type: YTN; PAM sequence: TTT
atttcctgacatacaatagg

SEQ ID NO: 392156 - DNA, 20 bp, Artificial Sequence
  Description of Artificial Sequence: Synthetic oligonucleotide
  Target: LAMA2; (+) strand; PAM type: YTN; PAM sequence: TTA
tttcctgacatacaatagga

SEQ ID NO: 392157 - DNA, 20 bp, Artificial Sequence
  Description of Artificial Sequence: Synthetic oligonucleotide
  Target: LAMA2; (+) strand; PAM type: YTN; PAM sequence: TTT
cctgacatacaataggactt

SEQ ID NO: 392158 - DNA, 20 bp, Artificial Sequence
  Description of Artificial Sequence: Synthetic oligonucleotide
  Target: LAMA2; (+) strand; PAM type: YTN; PAM sequence: TTC
ctgacatacaataggactta

SEQ ID NO: 392159 - DNA, 20 bp, Artificial Sequence
  Description of Artificial Sequence: Synthetic oligonucleotide
  Target: LAMA2; (+) strand; PAM type: YTN; PAM sequence: CTG
acatacaataggacttaatc

SEQ ID NO: 392160 - DNA, 20 bp, Artificial Sequence
  Description of Artificial Sequence: Synthetic oligonucleotide
  Target: LAMA2; (+) strand; PAM type: YTN; PAM sequence: CTT
aatcaatgatagacaccttt

SEQ ID NO: 392161 - DNA, 20 bp, Artificial Sequence
  Description of Artificial Sequence: Synthetic oligonucleotide
  Target: LAMA2; (+) strand; PAM type: YTN; PAM sequence: TTA
atcaatgatagacacctttc

SEQ ID NO: 392162 - DNA, 20 bp, Artificial Sequence
  Description of Artificial Sequence: Synthetic oligonucleotide
  Target: LAMA2; (+) strand; PAM type: YTN; PAM sequence: CTT
tccttcctgtttctcagatc

SEQ ID NO: 392163 - DNA, 20 bp, Artificial Sequence
  Description of Artificial Sequence: Synthetic oligonucleotide
  Target: LAMA2; (+) strand; PAM type: YTN; PAM sequence: TTT
ccttcctgtttctcagatca

SEQ ID NO: 392164 - DNA, 20 bp, Artificial Sequence
  Description of Artificial Sequence: Synthetic oligonucleotide
  Target: LAMA2; (+) strand; PAM type: YTN; PAM sequence: TTC
cttcctgtttctcagatcag

SEQ ID NO: 392165 - DNA, 20 bp, Artificial Sequence
  Description of Artificial Sequence: Synthetic oligonucleotide
  Target: LAMA2; (+) strand; PAM type: YTN; PAM sequence: CTT
cctgtttctcagatcagagt

SEQ ID NO: 392166 - DNA, 20 bp, Artificial Sequence
  Description of Artificial Sequence: Synthetic oligonucleotide
  Target: LAMA2; (+) strand; PAM type: YTN; PAM sequence: TTC
ctgtttctcagatcagagta

SEQ ID NO: 392167 - DNA, 20 bp, Artificial Sequence
  Description of Artificial Sequence: Synthetic oligonucleotide
  Target: LAMA2; (+) strand; PAM type: YTN; PAM sequence: CTG
tttctcagatcagagtatta

SEQ ID NO: 392168 - DNA, 20 bp, Artificial Sequence
  Description of Artificial Sequence: Synthetic oligonucleotide
  Target: LAMA2; (+) strand; PAM type: YTN; PAM sequence: TTT
ctcagatcagagtattactt

SEQ ID NO: 392169 - DNA, 20 bp, Artificial Sequence
  Description of Artificial Sequence: Synthetic oligonucleotide
  Target: LAMA2; (+) strand; PAM type: YTN; PAM sequence: TTC
tcagatcagagtattacttt

SEQ ID NO: 392170 - DNA, 20 bp, Artificial Sequence
  Description of Artificial Sequence: Synthetic oligonucleotide
  Target: LAMA2; (+) strand; PAM type: YTN; PAM sequence: CTC
agatcagagtattactttct

SEQ ID NO: 392171 - DNA, 20 bp, Artificial Sequence
  Description of Artificial Sequence: Synthetic oligonucleotide
  Target: LAMA2; (+) strand; PAM type: YTN; PAM sequence: TTA
ctttctattcttaataaatt

SEQ ID NO: 392172 - DNA, 20 bp, Artificial Sequence
  Description of Artificial Sequence: Synthetic oligonucleotide
  Target: LAMA2; (+) strand; PAM type: YTN; PAM sequence: CTT
tctattcttaataaatttac

SEQ ID NO: 392173 - DNA, 20 bp, Artificial Sequence
  Description of Artificial Sequence: Synthetic oligonucleotide
  Target: LAMA2; (+) strand; PAM type: YTN; PAM sequence: TTT
ctattcttaataaatttacc

SEQ ID NO: 392174 - DNA, 20 bp, Artificial Sequence
  Description of Artificial Sequence: Synthetic oligonucleotide
  Target: LAMA2; (+) strand; PAM type: YTN; PAM sequence: TTC
tattcttaataaatttaccc

SEQ ID NO: 392175 - DNA, 20 bp, Artificial Sequence
  Description of Artificial Sequence: Synthetic oligonucleotide
  Target: LAMA2; (+) strand; PAM type: YTN; PAM sequence: CTA
ttcttaataaatttacccat

SEQ ID NO: 392176 - DNA, 20 bp, Artificial Sequence
  Description of Artificial Sequence: Synthetic oligonucleotide
  Target: LAMA2; (+) strand; PAM type: YTN; PAM sequence: TTC
ttaataaatttacccatcag

SEQ ID NO: 392177 - DNA, 20 bp, Artificial Sequence
  Description of Artificial Sequence: Synthetic oligonucleotide
  Target: LAMA2; (+) strand; PAM type: YTN; PAM sequence: CTT
aataaatttacccatcagag

SEQ ID NO: 392178 - DNA, 20 bp, Artificial Sequence
  Description of Artificial Sequence: Synthetic oligonucleotide
  Target: LAMA2; (+) strand; PAM type: YTN; PAM sequence: TTA
ataaatttacccatcagagg

SEQ ID NO: 392179 - DNA, 20 bp, Artificial Sequence
  Description of Artificial Sequence: Synthetic oligonucleotide
  Target: LAMA2; (+) strand; PAM type: YTN; PAM sequence: TTT
acccatcagaggattttgtt

SEQ ID NO: 392180 - DNA, 20 bp, Artificial Sequence
  Description of Artificial Sequence: Synthetic oligonucleotide
  Target: LAMA2; (+) strand; PAM type: YTN; PAM sequence: TTA
cccatcagaggattttgttt

SEQ ID NO: 392181 - DNA, 20 bp, Artificial Sequence
  Description of Artificial Sequence: Synthetic oligonucleotide
  Target: LAMA2; (+) strand; PAM type: YTN; PAM sequence: TTT
tgttttcagtcttagtatga

SEQ ID NO: 392182 - DNA, 20 bp, Artificial Sequence
  Description of Artificial Sequence: Synthetic oligonucleotide
  Target: LAMA2; (+) strand; PAM type: YTN; PAM sequence: TTT
gttttcagtcttagtatgaa

SEQ ID NO: 392183 - DNA, 20 bp, Artificial Sequence
  Description of Artificial Sequence: Synthetic oligonucleotide
  Target: LAMA2; (+) strand; PAM type: YTN; PAM sequence: TTG
ttttcagtcttagtatgaaa

SEQ ID NO: 392184 - DNA, 20 bp, Artificial Sequence
  Description of Artificial Sequence: Synthetic oligonucleotide
  Target: LAMA2; (+) strand; PAM type: YTN; PAM sequence: TTT
tcagtcttagtatgaaaaca

SEQ ID NO: 392185 - DNA, 20 bp, Artificial Sequence
  Description of Artificial Sequence: Synthetic oligonucleotide
  Target: LAMA2; (+) strand; PAM type: YTN; PAM sequence: TTT
cagtcttagtatgaaaacag

SEQ ID NO: 392186 - DNA, 20 bp, Artificial Sequence
  Description of Artificial Sequence: Synthetic oligonucleotide
  Target: LAMA2; (+) strand; PAM type: YTN; PAM sequence: TTC
agtcttagtatgaaaacagt

SEQ ID NO: 392187 - DNA, 20 bp, Artificial Sequence
  Description of Artificial Sequence: Synthetic oligonucleotide
  Target: LAMA2; (+) strand; PAM type: YTN; PAM sequence: CTT
agtatgaaaacagttttgct

SEQ ID NO: 392188 - DNA, 20 bp, Artificial Sequence
  Description of Artificial Sequence: Synthetic oligonucleotide
  Target: LAMA2; (+) strand; PAM type: YTN; PAM sequence: TTA
gtatgaaaacagttttgctt

SEQ ID NO: 392189 - DNA, 20 bp, Artificial Sequence
  Description of Artificial Sequence: Synthetic oligonucleotide
  Target: LAMA2; (+) strand; PAM type: YTN; PAM sequence: TTT
tgcttctcctgaggaatttt

SEQ ID NO: 392190 - DNA, 20 bp, Artificial Sequence
  Description of Artificial Sequence: Synthetic oligonucleotide
  Target: LAMA2; (+) strand; PAM type: YTN; PAM sequence: TTT
gcttctcctgaggaattttt

SEQ ID NO: 392191 - DNA, 20 bp, Artificial Sequence
  Description of Artificial Sequence: Synthetic oligonucleotide
  Target: LAMA2; (+) strand; PAM type: YTN; PAM sequence: TTG
cttctcctgaggaattttta

SEQ ID NO: 392192 - DNA, 20 bp, Artificial Sequence
  Description of Artificial Sequence: Synthetic oligonucleotide
  Target: LAMA2; (+) strand; PAM type: YTN; PAM sequence: CTT
ctcctgaggaatttttactt

SEQ ID NO: 392193 - DNA, 20 bp, Artificial Sequence
  Description of Artificial Sequence: Synthetic oligonucleotide
  Target: LAMA2; (+) strand; PAM type: YTN; PAM sequence: TTC
tcctgaggaatttttactta

SEQ ID NO: 392194 - DNA, 20 bp, Artificial Sequence
  Description of Artificial Sequence: Synthetic oligonucleotide
  Target: LAMA2; (+) strand; PAM type: YTN; PAM sequence: CTC
ctgaggaatttttacttacc

SEQ ID NO: 392195 - DNA, 20 bp, Artificial Sequence
  Description of Artificial Sequence: Synthetic oligonucleotide
  Target: LAMA2; (+) strand; PAM type: YTN; PAM sequence: CTG
aggaatttttacttaccttt

SEQ ID NO: 392196 - DNA, 20 bp, Artificial Sequence
  Description of Artificial Sequence: Synthetic oligonucleotide
  Target: LAMA2; (+) strand; PAM type: YTN; PAM sequence: TTT
ttacttacctttatagatac

SEQ ID NO: 392197 - DNA, 20 bp, Artificial Sequence
  Description of Artificial Sequence: Synthetic oligonucleotide
  Target: LAMA2; (+) strand; PAM type: YTN; PAM sequence: TTT
tacttacctttatagatact

SEQ ID NO: 392198 - DNA, 20 bp, Artificial Sequence
  Description of Artificial Sequence: Synthetic oligonucleotide
  Target: LAMA2; (+) strand; PAM type: YTN; PAM sequence: TTT
acttacctttatagatactg

SEQ ID NO: 392199 - DNA, 20 bp, Artificial Sequence
  Description of Artificial Sequence: Synthetic oligonucleotide
  Target: LAMA2; (+) strand; PAM type: YTN; PAM sequence: TTA
cttacctttatagatactgt

SEQ ID NO: 392200 - DNA, 20 bp, Artificial Sequence
  Description of Artificial Sequence: Synthetic oligonucleotide
  Target: LAMA2; (+) strand; PAM type: YTN; PAM sequence: CTT
acctttatagatactgtatg

SEQ ID NO: 392201 - DNA, 20 bp, Artificial Sequence
  Description of Artificial Sequence: Synthetic oligonucleotide
  Target: LAMA2; (+) strand; PAM type: YTN; PAM sequence: TTA
cctttatagatactgtatgc

SEQ ID NO: 392202 - DNA, 20 bp, Artificial Sequence
  Description of Artificial Sequence: Synthetic oligonucleotide
  Target: LAMA2; (+) strand; PAM type: YTN; PAM sequence: CTT
tatagatactgtatgcctct

SEQ ID NO: 392203 - DNA, 20 bp, Artificial Sequence
  Description of Artificial Sequence: Synthetic oligonucleotide
  Target: LAMA2; (+) strand; PAM type: YTN; PAM sequence: TTT
atagatactgtatgcctctt

SEQ ID NO: 392204 - DNA, 20 bp, Artificial Sequence
  Description of Artificial Sequence: Synthetic oligonucleotide
  Target: LAMA2; (+) strand; PAM type: YTN; PAM sequence: TTA
tagatactgtatgcctctta

SEQ ID NO: 392205 - DNA, 20 bp, Artificial Sequence
  Description of Artificial Sequence: Synthetic oligonucleotide
  Target: LAMA2; (+) strand; PAM type: YTN; PAM sequence: CTG
tatgcctcttaagaatccta

SEQ ID NO: 392206 - DNA, 20 bp, Artificial Sequence
  Description of Artificial Sequence: Synthetic oligonucleotide
  Target: LAMA2; (+) strand; PAM type: YTN; PAM sequence: CTC
ttaagaatcctatttgtatt

SEQ ID NO: 392207 - DNA, 20 bp, Artificial Sequence
  Description of Artificial Sequence: Synthetic oligonucleotide
  Target: LAMA2; (+) strand; PAM type: YTN; PAM sequence: CTT
aagaatcctatttgtattcc

SEQ ID NO: 392208 - DNA, 20 bp, Artificial Sequence
  Description of Artificial Sequence: Synthetic oligonucleotide
  Target: LAMA2; (+) strand; PAM type: YTN; PAM sequence: TTA
agaatcctatttgtattccc

SEQ ID NO: 392209 - DNA, 20 bp, Artificial Sequence
  Description of Artificial Sequence: Synthetic oligonucleotide
  Target: LAMA2; (+) strand; PAM type: YTN; PAM sequence: CTA
tttgtattccctgctacgcg

SEQ ID NO: 392210 - DNA, 20 bp, Artificial Sequence
  Description of Artificial Sequence: Synthetic oligonucleotide
  Target: LAMA2; (+) strand; PAM type: YTN; PAM sequence: TTT
gtattccctgctacgcgtag

SEQ ID NO: 392211 - DNA, 20 bp, Artificial Sequence
  Description of Artificial Sequence: Synthetic oligonucleotide
  Target: LAMA2; (+) strand; PAM type: YTN; PAM sequence: TTG
tattccctgctacgcgtagt

SEQ ID NO: 392212 - DNA, 20 bp, Artificial Sequence
  Description of Artificial Sequence: Synthetic oligonucleotide
  Target: LAMA2; (+) strand; PAM type: YTN; PAM sequence: TTC
cctgctacgcgtagtctact

SEQ ID NO: 392213 - DNA, 20 bp, Artificial Sequence
  Description of Artificial Sequence: Synthetic oligonucleotide
  Target: LAMA2; (+) strand; PAM type: YTN; PAM sequence: CTG
ctacgcgtagtctactaaga

SEQ ID NO: 392214 - DNA, 20 bp, Artificial Sequence
  Description of Artificial Sequence: Synthetic oligonucleotide
  Target: LAMA2; (+) strand; PAM type: YTN; PAM sequence: CTA
cgcgtagtctactaagatgc

SEQ ID NO: 392215 - DNA, 20 bp, Artificial Sequence
  Description of Artificial Sequence: Synthetic oligonucleotide
  Target: LAMA2; (+) strand; PAM type: YTN; PAM sequence: CTA
ctaagatgcttagtagtgga

SEQ ID NO: 392216 - DNA, 20 bp, Artificial Sequence
  Description of Artificial Sequence: Synthetic oligonucleotide
  Target: LAMA2; (+) strand; PAM type: YTN; PAM sequence: CTA
agatgcttagtagtggactt

SEQ ID NO: 392217 - DNA, 20 bp, Artificial Sequence
  Description of Artificial Sequence: Synthetic oligonucleotide
  Target: LAMA2; (+) strand; PAM type: YTN; PAM sequence: CTT
agtagtggacttaggatgca

SEQ ID NO: 392218 - DNA, 20 bp, Artificial Sequence
  Description of Artificial Sequence: Synthetic oligonucleotide
  Target: LAMA2; (+) strand; PAM type: YTN; PAM sequence: TTA
gtagtggacttaggatgcac

SEQ ID NO: 392219 - DNA, 20 bp, Artificial Sequence
  Description of Artificial Sequence: Synthetic oligonucleotide
  Target: LAMA2; (+) strand; PAM type: YTN; PAM sequence: CTT
aggatgcactgcattgaacg

SEQ ID NO: 392220 - DNA, 20 bp, Artificial Sequence
  Description of Artificial Sequence: Synthetic oligonucleotide
  Target: LAMA2; (+) strand; PAM type: YTN; PAM sequence: TTA
ggatgcactgcattgaacgt

SEQ ID NO: 392221 - DNA, 20 bp, Artificial Sequence
  Description of Artificial Sequence: Synthetic oligonucleotide
  Target: LAMA2; (+) strand; PAM type: YTN; PAM sequence: CTG
cattgaacgttatggcatgg

SEQ ID NO: 392222 - DNA, 20 bp, Artificial Sequence
  Description of Artificial Sequence: Synthetic oligonucleotide
  Target: LAMA2; (+) strand; PAM type: YTN; PAM sequence: TTG
aacgttatggcatggttttc

SEQ ID NO: 392223 - DNA, 20 bp, Artificial Sequence
  Description of Artificial Sequence: Synthetic oligonucleotide
  Target: LAMA2; (+) strand; PAM type: YTN; PAM sequence: TTA
tggcatggttttctgtctac

SEQ ID NO: 392224 - DNA, 20 bp, Artificial Sequence
  Description of Artificial Sequence: Synthetic oligonucleotide
  Target: LAMA2; (+) strand; PAM type: YTN; PAM sequence: TTT
tctgtctactaattctttcc

SEQ ID NO: 392225 - DNA, 20 bp, Artificial Sequence
  Description of Artificial Sequence: Synthetic oligonucleotide
  Target: LAMA2; (+) strand; PAM type: YTN; PAM sequence: TTT
ctgtctactaattctttccc

SEQ ID NO: 392226 - DNA, 20 bp, Artificial Sequence
  Description of Artificial Sequence: Synthetic oligonucleotide
  Target: LAMA2; (+) strand; PAM type: YTN; PAM sequence: TTC
tgtctactaattctttccct

SEQ ID NO: 392227 - DNA, 20 bp, Artificial Sequence
  Description of Artificial Sequence: Synthetic oligonucleotide
  Target: LAMA2; (+) strand; PAM type: YTN; PAM sequence: CTG
tctactaattctttccctaa

SEQ ID NO: 392228 - DNA, 20 bp, Artificial Sequence
  Description of Artificial Sequence: Synthetic oligonucleotide
  Target: LAMA2; (+) strand; PAM type: YTN; PAM sequence: CTA
ctaattctttccctaattta

SEQ ID NO: 392229 - DNA, 20 bp, Artificial Sequence
  Description of Artificial Sequence: Synthetic oligonucleotide
  Target: LAMA2; (+) strand; PAM type: YTN; PAM sequence: CTA
attctttccctaatttatac

SEQ ID NO: 392230 - DNA, 20 bp, Artificial Sequence
  Description of Artificial Sequence: Synthetic oligonucleotide
  Target: LAMA2; (+) strand; PAM type: YTN; PAM sequence: TTC
tttccctaatttatacaact

SEQ ID NO: 392231 - DNA, 20 bp, Artificial Sequence
  Description of Artificial Sequence: Synthetic oligonucleotide
  Target: LAMA2; (+) strand; PAM type: YTN; PAM sequence: CTT
tccctaatttatacaacttt

SEQ ID NO: 392232 - DNA, 20 bp, Artificial Sequence
  Description of Artificial Sequence: Synthetic oligonucleotide
  Target: LAMA2; (+) strand; PAM type: YTN; PAM sequence: TTT
ccctaatttatacaactttt

SEQ ID NO: 392233 - DNA, 20 bp, Artificial Sequence
  Description of Artificial Sequence: Synthetic oligonucleotide
  Target: LAMA2; (+) strand; PAM type: YTN; PAM sequence: TTC
cctaatttatacaacttttt

SEQ ID NO: 392234 - DNA, 20 bp, Artificial Sequence
  Description of Artificial Sequence: Synthetic oligonucleotide
  Target: LAMA2; (+) strand; PAM type: YTN; PAM sequence: CTA
atttatacaacttttttttt

SEQ ID NO: 392235 - DNA, 20 bp, Artificial Sequence
  Description of Artificial Sequence: Synthetic oligonucleotide
  Target: LAMA2; (+) strand; PAM type: YTN; PAM sequence: TTT
atacaacttttttttttacc

SEQ ID NO: 392236 - DNA, 20 bp, Artificial Sequence
  Description of Artificial Sequence: Synthetic oligonucleotide
  Target: LAMA2; (+) strand; PAM type: YTN; PAM sequence: TTA
tacaacttttttttttacct

SEQ ID NO: 392237 - DNA, 20 bp, Artificial Sequence
  Description of Artificial Sequence: Synthetic oligonucleotide
  Target: LAMA2; (+) strand; PAM type: YTN; PAM sequence: CTT
ttttttttacctgtagtgct

SEQ ID NO: 392238 - DNA, 20 bp, Artificial Sequence
  Description of Artificial Sequence: Synthetic oligonucleotide
  Target: LAMA2; (+) strand; PAM type: YTN; PAM sequence: TTT
tttttttacctgtagtgcta

SEQ ID NO: 392239 - DNA, 20 bp, Artificial Sequence
  Description of Artificial Sequence: Synthetic oligonucleotide
  Target: LAMA2; (+) strand; PAM type: YTN; PAM sequence: TTT
ttttttacctgtagtgctat

SEQ ID NO: 392240 - DNA, 20 bp, Artificial Sequence
  Description of Artificial Sequence: Synthetic oligonucleotide
  Target: LAMA2; (+) strand; PAM type: YTN; PAM sequence: TTT
tttttacctgtagtgctatt

SEQ ID NO: 392241 - DNA, 20 bp, Artificial Sequence
  Description of Artificial Sequence: Synthetic oligonucleotide
  Target: LAMA2; (+) strand; PAM type: YTN; PAM sequence: TTT
ttttacctgtagtgctattt

SEQ ID NO: 392242 - DNA, 20 bp, Artificial Sequence
  Description of Artificial Sequence: Synthetic oligonucleotide
  Target: LAMA2; (+) strand; PAM type: YTN; PAM sequence: TTT
tttacctgtagtgctatttc

SEQ ID NO: 392243 - DNA, 20 bp, Artificial Sequence
  Description of Artificial Sequence: Synthetic oligonucleotide
  Target: LAMA2; (+) strand; PAM type: YTN; PAM sequence: TTT
ttacctgtagtgctatttcc

SEQ ID NO: 392244 - DNA, 20 bp, Artificial Sequence
  Description of Artificial Sequence: Synthetic oligonucleotide
  Target: LAMA2; (+) strand; PAM type: YTN; PAM sequence: TTT
tacctgtagtgctatttcct

SEQ ID NO: 392245 - DNA, 20 bp, Artificial Sequence
  Description of Artificial Sequence: Synthetic oligonucleotide
  Target: LAMA2; (+) strand; PAM type: YTN; PAM sequence: TTT
acctgtagtgctatttcctt

SEQ ID NO: 392246 - DNA, 20 bp, Artificial Sequence
  Description of Artificial Sequence: Synthetic oligonucleotide
  Target: LAMA2; (+) strand; PAM type: YTN; PAM sequence: TTA
cctgtagtgctatttccttt

SEQ ID NO: 392247 - DNA, 20 bp, Artificial Sequence
  Description of Artificial Sequence: Synthetic oligonucleotide
  Target: LAMA2; (+) strand; PAM type: YTN; PAM sequence: CTG
tagtgctatttccttttatt

SEQ ID NO: 392248 - DNA, 20 bp, Artificial Sequence
  Description of Artificial Sequence: Synthetic oligonucleotide
  Target: LAMA2; (+) strand; PAM type: YTN; PAM sequence: CTA
tttccttttattttaatttt

SEQ ID NO: 392249 - DNA, 20 bp, Artificial Sequence
  Description of Artificial Sequence: Synthetic oligonucleotide
  Target: LAMA2; (+) strand; PAM type: YTN; PAM sequence: TTT
ccttttattttaattttatc

SEQ ID NO: 392250 - DNA, 20 bp, Artificial Sequence
  Description of Artificial Sequence: Synthetic oligonucleotide
  Target: LAMA2; (+) strand; PAM type: YTN; PAM sequence: TTC
cttttattttaattttatct

SEQ ID NO: 392251 - DNA, 20 bp, Artificial Sequence
  Description of Artificial Sequence: Synthetic oligonucleotide
  Target: LAMA2; (+) strand; PAM type: YTN; PAM sequence: CTT
ttattttaattttatctgat

SEQ ID NO: 392252 - DNA, 20 bp, Artificial Sequence
  Description of Artificial Sequence: Synthetic oligonucleotide
  Target: LAMA2; (+) strand; PAM type: YTN; PAM sequence: TTT
tattttaattttatctgata

SEQ ID NO: 392253 - DNA, 20 bp, Artificial Sequence
  Description of Artificial Sequence: Synthetic oligonucleotide
  Target: LAMA2; (+) strand; PAM type: YTN; PAM sequence: TTT
attttaattttatctgatat

SEQ ID NO: 392254 - DNA, 20 bp, Artificial Sequence
  Description of Artificial Sequence: Synthetic oligonucleotide
  Target: LAMA2; (+) strand; PAM type: YTN; PAM sequence: TTA
ttttaattttatctgatatt

SEQ ID NO: 392255 - DNA, 20 bp, Artificial Sequence
  Description of Artificial Sequence: Synthetic oligonucleotide
  Target: LAMA2; (+) strand; PAM type: YTN; PAM sequence: TTT
taattttatctgatattagg

SEQ ID NO: 392256 - DNA, 20 bp, Artificial Sequence
  Description of Artificial Sequence: Synthetic oligonucleotide
  Target: LAMA2; (+) strand; PAM type: YTN; PAM sequence: TTT
aattttatctgatattagga

SEQ ID NO: 392257 - DNA, 20 bp, Artificial Sequence
  Description of Artificial Sequence: Synthetic oligonucleotide
  Target: LAMA2; (+) strand; PAM type: YTN; PAM sequence: TTA
attttatctgatattaggat

SEQ ID NO: 392258 - DNA, 20 bp, Artificial Sequence
  Description of Artificial Sequence: Synthetic oligonucleotide
  Target: LAMA2; (+) strand; PAM type: YTN; PAM sequence: TTT
tatctgatattaggattttt

SEQ ID NO: 392259 - DNA, 20 bp, Artificial Sequence
  Description of Artificial Sequence: Synthetic oligonucleotide
  Target: LAMA2; (+) strand; PAM type: YTN; PAM sequence: TTT
atctgatattaggattttta

SEQ ID NO: 392260 - DNA, 20 bp, Artificial Sequence
  Description of Artificial Sequence: Synthetic oligonucleotide
  Target: LAMA2; (+) strand; PAM type: YTN; PAM sequence: TTA
tctgatattaggatttttaa

SEQ ID NO: 392261 - DNA, 20 bp, Artificial Sequence
  Description of Artificial Sequence: Synthetic oligonucleotide
  Target: LAMA2; (+) strand; PAM type: YTN; PAM sequence: CTG
atattaggatttttaaaaaa

SEQ ID NO: 392262 - DNA, 20 bp, Artificial Sequence
  Description of Artificial Sequence: Synthetic oligonucleotide
  Target: LAMA2; (+) strand; PAM type: YTN; PAM sequence: TTA
ggatttttaaaaaattacct

SEQ ID NO: 392263 - DNA, 20 bp, Artificial Sequence
  Description of Artificial Sequence: Synthetic oligonucleotide
  Target: LAMA2; (+) strand; PAM type: YTN; PAM sequence: TTT
ttaaaaaattacctaaatcc

SEQ ID NO: 392264 - DNA, 20 bp, Artificial Sequence
  Description of Artificial Sequence: Synthetic oligonucleotide
  Target: LAMA2; (+) strand; PAM type: YTN; PAM sequence: TTT
taaaaaattacctaaatcct

SEQ ID NO: 392265 - DNA, 20 bp, Artificial Sequence
  Description of Artificial Sequence: Synthetic oligonucleotide
  Target: LAMA2; (+) strand; PAM type: YTN; PAM sequence: TTT
aaaaaattacctaaatcctc

SEQ ID NO: 392266 - DNA, 20 bp, Artificial Sequence
  Description of Artificial Sequence: Synthetic oligonucleotide
  Target: LAMA2; (+) strand; PAM type: YTN; PAM sequence: TTA
aaaaattacctaaatcctcc

SEQ ID NO: 392267 - DNA, 20 bp, Artificial Sequence
  Description of Artificial Sequence: Synthetic oligonucleotide
  Target: LAMA2; (+) strand; PAM type: YTN; PAM sequence: TTA
cctaaatcctcctttgaatt

SEQ ID NO: 392268 - DNA, 20 bp, Artificial Sequence
  Description of Artificial Sequence: Synthetic oligonucleotide
  Target: LAMA2; (+) strand; PAM type: YTN; PAM sequence: CTA
aatcctcctttgaattaagt

SEQ ID NO: 392269 - DNA, 20 bp, Artificial Sequence
  Description of Artificial Sequence: Synthetic oligonucleotide
  Target: LAMA2; (+) strand; PAM type: YTN; PAM sequence: CTC
ctttgaattaagttggaaat

SEQ ID NO: 392270 - DNA, 20 bp, Artificial Sequence
  Description of Artificial Sequence: Synthetic oligonucleotide
  Target: LAMA2; (+) strand; PAM type: YTN; PAM sequence: CTT
tgaattaagttggaaataaa

SEQ ID NO: 392271 - DNA, 20 bp, Artificial Sequence
  Description of Artificial Sequence: Synthetic oligonucleotide
  Target: LAMA2; (+) strand; PAM type: YTN; PAM sequence: TTT
gaattaagttggaaataaat

SEQ ID NO: 392272 - DNA, 20 bp, Artificial Sequence
  Description of Artificial Sequence: Synthetic oligonucleotide
  Target: LAMA2; (+) strand; PAM type: YTN; PAM sequence: TTG
aattaagttggaaataaata

SEQ ID NO: 392273 - DNA, 20 bp, Artificial Sequence
  Description of Artificial Sequence: Synthetic oligonucleotide
  Target: LAMA2; (+) strand; PAM type: YTN; PAM sequence: TTA
agttggaaataaataagtaa

SEQ ID NO: 392274 - DNA, 20 bp, Artificial Sequence
  Description of Artificial Sequence: Synthetic oligonucleotide
  Target: LAMA2; (+) strand; PAM type: YTN; PAM sequence: TTG
gaaataaataagtaaattcc

SEQ ID NO: 392275 - DNA, 20 bp, Artificial Sequence
  Description of Artificial Sequence: Synthetic oligonucleotide
  Target: LAMA2; (+) strand; PAM type: YTN; PAM sequence: TTC
caaagatacatcttttacaa

SEQ ID NO: 392276 - DNA, 20 bp, Artificial Sequence
  Description of Artificial Sequence: Synthetic oligonucleotide
  Target: LAMA2; (+) strand; PAM type: YTN; PAM sequence: CTT
ttacaatcattttcaatact

SEQ ID NO: 392277 - DNA, 20 bp, Artificial Sequence
  Description of Artificial Sequence: Synthetic oligonucleotide
  Target: LAMA2; (+) strand; PAM type: YTN; PAM sequence: TTT
tacaatcattttcaatactg

SEQ ID NO: 392278 - DNA, 20 bp, Artificial Sequence
  Description of Artificial Sequence: Synthetic oligonucleotide
  Target: LAMA2; (+) strand; PAM type: YTN; PAM sequence: TTT
acaatcattttcaatactgt

SEQ ID NO: 392279 - DNA, 20 bp, Artificial Sequence
  Description of Artificial Sequence: Synthetic oligonucleotide
  Target: LAMA2; (+) strand; PAM type: YTN; PAM sequence: TTA
caatcattttcaatactgtg

SEQ ID NO: 392280 - DNA, 20 bp, Artificial Sequence
  Description of Artificial Sequence: Synthetic oligonucleotide
  Target: LAMA2; (+) strand; PAM type: YTN; PAM sequence: TTT
tcaatactgtgggaaagaaa

SEQ ID NO: 392281 - DNA, 20 bp, Artificial Sequence
  Description of Artificial Sequence: Synthetic oligonucleotide
  Target: LAMA2; (+) strand; PAM type: YTN; PAM sequence: TTT
caatactgtgggaaagaaaa

SEQ ID NO: 392282 - DNA, 20 bp, Artificial Sequence
  Description of Artificial Sequence: Synthetic oligonucleotide
  Target: LAMA2; (+) strand; PAM type: YTN; PAM sequence: TTC
aatactgtgggaaagaaaat

SEQ ID NO: 392283 - DNA, 20 bp, Artificial Sequence
  Description of Artificial Sequence: Synthetic oligonucleotide
  Target: LAMA2; (+) strand; PAM type: YTN; PAM sequence: CTG
tgggaaagaaaatatattga

SEQ ID NO: 392284 - DNA, 20 bp, Artificial Sequence
  Description of Artificial Sequence: Synthetic oligonucleotide
  Target: LAMA2; (+) strand; PAM type: YTN; PAM sequence: TTG
aagtgatagtgcatactttt

SEQ ID NO: 392285 - DNA, 20 bp, Artificial Sequence
  Description of Artificial Sequence: Synthetic oligonucleotide
  Target: LAMA2; (+) strand; PAM type: YTN; PAM sequence: CTT
ttgaataagagatgaaaaac

SEQ ID NO: 392286 - DNA, 20 bp, Artificial Sequence
  Description of Artificial Sequence: Synthetic oligonucleotide
  Target: LAMA2; (+) strand; PAM type: YTN; PAM sequence: TTT
tgaataagagatgaaaaaca

SEQ ID NO: 392287 - DNA, 20 bp, Artificial Sequence
  Description of Artificial Sequence: Synthetic oligonucleotide
  Target: LAMA2; (+) strand; PAM type: YTN; PAM sequence: TTT
gaataagagatgaaaaacac

SEQ ID NO: 392288 - DNA, 20 bp, Artificial Sequence
  Description of Artificial Sequence: Synthetic oligonucleotide
  Target: LAMA2; (+) strand; PAM type: YTN; PAM sequence: TTG
aataagagatgaaaaacaca

SEQ ID NO: 392289 - DNA, 20 bp, Artificial Sequence
  Description of Artificial Sequence: Synthetic oligonucleotide
  Target: LAMA2; (+) strand; PAM type: YTN; PAM sequence: TTC
atctttaagaatgctcagag

SEQ ID NO: 392290 - DNA, 20 bp, Artificial Sequence
  Description of Artificial Sequence: Synthetic oligonucleotide
  Target: LAMA2; (+) strand; PAM type: YTN; PAM sequence: CTT
taagaatgctcagagaagtt

SEQ ID NO: 392291 - DNA, 20 bp, Artificial Sequence
  Description of Artificial Sequence: Synthetic oligonucleotide
  Target: LAMA2; (+) strand; PAM type: YTN; PAM sequence: TTT
aagaatgctcagagaagttc

SEQ ID NO: 392292 - DNA, 20 bp, Artificial Sequence
  Description of Artificial Sequence: Synthetic oligonucleotide
  Target: LAMA2; (+) strand; PAM type: YTN; PAM sequence: TTA
agaatgctcagagaagttcc

SEQ ID NO: 392293 - DNA, 20 bp, Artificial Sequence
  Description of Artificial Sequence: Synthetic oligonucleotide
  Target: LAMA2; (+) strand; PAM type: YTN; PAM sequence: CTC
agagaagttccagatcctat

SEQ ID NO: 392294 - DNA, 20 bp, Artificial Sequence
  Description of Artificial Sequence: Synthetic oligonucleotide
  Target: LAMA2; (+) strand; PAM type: YTN; PAM sequence: TTC
cagatcctatttatacatag

SEQ ID NO: 392295 - DNA, 20 bp, Artificial Sequence
  Description of Artificial Sequence: Synthetic oligonucleotide
  Target: LAMA2; (+) strand; PAM type: YTN; PAM sequence: CTA
tttatacataggatctggaa

SEQ ID NO: 392296 - DNA, 20 bp, Artificial Sequence
  Description of Artificial Sequence: Synthetic oligonucleotide
  Target: LAMA2; (+) strand; PAM type: YTN; PAM sequence: TTT
atacataggatctggaacta

SEQ ID NO: 392297 - DNA, 20 bp, Artificial Sequence
  Description of Artificial Sequence: Synthetic oligonucleotide
  Target: LAMA2; (+) strand; PAM type: YTN; PAM sequence: TTA
tacataggatctggaactat

SEQ ID NO: 392298 - DNA, 20 bp, Artificial Sequence
  Description of Artificial Sequence: Synthetic oligonucleotide
  Target: LAMA2; (+) strand; PAM type: YTN; PAM sequence: CTG
gaactatatatatgtatata

SEQ ID NO: 392299 - DNA, 20 bp, Artificial Sequence
  Description of Artificial Sequence: Synthetic oligonucleotide
  Target: LAMA2; (+) strand; PAM type: YTN; PAM sequence: CTA
tatatatgtatataaacata

SEQ ID NO: 392300 - DNA, 20 bp, Artificial Sequence
  Description of Artificial Sequence: Synthetic oligonucleotide
  Target: LAMA2; (+) strand; PAM type: YTN; PAM sequence: CTG
tatgtttatatatgtctata

SEQ ID NO: 392301 - DNA, 20 bp, Artificial Sequence
  Description of Artificial Sequence: Synthetic oligonucleotide
  Target: LAMA2; (+) strand; PAM type: YTN; PAM sequence: TTT
atatatgtctataaagagtg

SEQ ID NO: 392302 - DNA, 20 bp, Artificial Sequence
  Description of Artificial Sequence: Synthetic oligonucleotide
  Target: LAMA2; (+) strand; PAM type: YTN; PAM sequence: TTA
tatatgtctataaagagtga

SEQ ID NO: 392303 - DNA, 20 bp, Artificial Sequence
  Description of Artificial Sequence: Synthetic oligonucleotide
  Target: LAMA2; (+) strand; PAM type: YTN; PAM sequence: CTA
taaagagtgaaacagacttc

SEQ ID NO: 392304 - DNA, 20 bp, Artificial Sequence
  Description of Artificial Sequence: Synthetic oligonucleotide
  Target: LAMA2; (+) strand; PAM type: YTN; PAM sequence: CTT
ctattaaaatgatgcttcct

SEQ ID NO: 392305 - DNA, 20 bp, Artificial Sequence
  Description of Artificial Sequence: Synthetic oligonucleotide
  Target: LAMA2; (+) strand; PAM type: YTN; PAM sequence: TTC
tattaaaatgatgcttcctt

SEQ ID NO: 392306 - DNA, 20 bp, Artificial Sequence
  Description of Artificial Sequence: Synthetic oligonucleotide
  Target: LAMA2; (+) strand; PAM type: YTN; PAM sequence: CTA
ttaaaatgatgcttcctttc

SEQ ID NO: 392307 - DNA, 20 bp, Artificial Sequence
  Description of Artificial Sequence: Synthetic oligonucleotide
  Target: LAMA2; (+) strand; PAM type: YTN; PAM sequence: TTA
aaatgatgcttcctttcctt

SEQ ID NO: 392308 - DNA, 20 bp, Artificial Sequence
  Description of Artificial Sequence: Synthetic oligonucleotide
  Target: LAMA2; (+) strand; PAM type: YTN; PAM sequence: CTT
cctttccttttttggtgggg

SEQ ID NO: 392309 - DNA, 20 bp, Artificial Sequence
  Description of Artificial Sequence: Synthetic oligonucleotide
  Target: LAMA2; (+) strand; PAM type: YTN; PAM sequence: TTC
ctttccttttttggtggggg

SEQ ID NO: 392310 - DNA, 20 bp, Artificial Sequence
  Description of Artificial Sequence: Synthetic oligonucleotide
  Target: LAMA2; (+) strand; PAM type: YTN; PAM sequence: CTT
tccttttttggtgggggaga

SEQ ID NO: 392311 - DNA, 20 bp, Artificial Sequence
  Description of Artificial Sequence: Synthetic oligonucleotide
  Target: LAMA2; (+) strand; PAM type: YTN; PAM sequence: TTT
ccttttttggtgggggagat

SEQ ID NO: 392312 - DNA, 20 bp, Artificial Sequence
  Description of Artificial Sequence: Synthetic oligonucleotide
  Target: LAMA2; (+) strand; PAM type: YTN; PAM sequence: TTC
cttttttggtgggggagatt

SEQ ID NO: 392313 - DNA, 20 bp, Artificial Sequence
  Description of Artificial Sequence: Synthetic oligonucleotide
  Target: LAMA2; (+) strand; PAM type: YTN; PAM sequence: CTT
ttttggtgggggagatttct

SEQ ID NO: 392314 - DNA, 20 bp, Artificial Sequence
  Description of Artificial Sequence: Synthetic oligonucleotide
  Target: LAMA2; (+) strand; PAM type: YTN; PAM sequence: TTT
tttggtgggggagatttcta

SEQ ID NO: 392315 - DNA, 20 bp, Artificial Sequence
  Description of Artificial Sequence: Synthetic oligonucleotide
  Target: LAMA2; (+) strand; PAM type: YTN; PAM sequence: TTT
ttggtgggggagatttctaa

SEQ ID NO: 392316 - DNA, 20 bp, Artificial Sequence
  Description of Artificial Sequence: Synthetic oligonucleotide
  Target: LAMA2; (+) strand; PAM type: YTN; PAM sequence: TTT
tggtgggggagatttctaag

SEQ ID NO: 392317 - DNA, 20 bp, Artificial Sequence
  Description of Artificial Sequence: Synthetic oligonucleotide
  Target: LAMA2; (+) strand; PAM type: YTN; PAM sequence: TTT
ggtgggggagatttctaaga

SEQ ID NO: 392318 - DNA, 20 bp, Artificial Sequence
  Description of Artificial Sequence: Synthetic oligonucleotide
  Target: LAMA2; (+) strand; PAM type: YTN; PAM sequence: TTG
gtgggggagatttctaagaa

SEQ ID NO: 392319 - DNA, 20 bp, Artificial Sequence
  Description of Artificial Sequence: Synthetic oligonucleotide
  Target: LAMA2; (+) strand; PAM type: YTN; PAM sequence: TTT
ctaagaaaatcatattgcct

SEQ ID NO: 392320 - DNA, 20 bp, Artificial Sequence
  Description of Artificial Sequence: Synthetic oligonucleotide
  Target: LAMA2; (+) strand; PAM type: YTN; PAM sequence: TTC
taagaaaatcatattgccta

SEQ ID NO: 392321 - DNA, 20 bp, Artificial Sequence
  Description of Artificial Sequence: Synthetic oligonucleotide
  Target: LAMA2; (+) strand; PAM type: YTN; PAM sequence: CTA
agaaaatcatattgcctagc

SEQ ID NO: 392322 - DNA, 20 bp, Artificial Sequence
  Description of Artificial Sequence: Synthetic oligonucleotide
  Target: LAMA2; (+) strand; PAM type: YTN; PAM sequence: TTG
cctagcaagtgatagatgcc

SEQ ID NO: 392323 - DNA, 20 bp, Artificial Sequence
  Description of Artificial Sequence: Synthetic oligonucleotide
  Target: LAMA2; (+) strand; PAM type: YTN; PAM sequence: CTA
gcaagtgatagatgcctatg

SEQ ID NO: 392324 - DNA, 20 bp, Artificial Sequence
  Description of Artificial Sequence: Synthetic oligonucleotide
  Target: LAMA2; (+) strand; PAM type: YTN; PAM sequence: CTA
tgagagaaatggaaaatgac

SEQ ID NO: 392325 - DNA, 20 bp, Artificial Sequence
  Description of Artificial Sequence: Synthetic oligonucleotide
  Target: LAMA2; (+) strand; PAM type: YTN; PAM sequence: TTT
taaaatttaactttcagtag

SEQ ID NO: 392326 - DNA, 20 bp, Artificial Sequence
  Description of Artificial Sequence: Synthetic oligonucleotide
  Target: LAMA2; (+) strand; PAM type: YTN; PAM sequence: TTT
aaaatttaactttcagtaga

SEQ ID NO: 392327 - DNA, 20 bp, Artificial Sequence
  Description of Artificial Sequence: Synthetic oligonucleotide
  Target: LAMA2; (+) strand; PAM type: YTN; PAM sequence: TTA
aaatttaactttcagtagaa

SEQ ID NO: 392328 - DNA, 20 bp, Artificial Sequence
  Description of Artificial Sequence: Synthetic oligonucleotide
  Target: LAMA2; (+) strand; PAM type: YTN; PAM sequence: TTT
aactttcagtagaaaaataa

SEQ ID NO: 392329 - DNA, 20 bp, Artificial Sequence
  Description of Artificial Sequence: Synthetic oligonucleotide
  Target: LAMA2; (+) strand; PAM type: YTN; PAM sequence: TTA
actttcagtagaaaaataat

SEQ ID NO: 392330 - DNA, 20 bp, Artificial Sequence
  Description of Artificial Sequence: Synthetic oligonucleotide
  Target: LAMA2; (+) strand; PAM type: YTN; PAM sequence: CTT
tcagtagaaaaataatggaa

SEQ ID NO: 392331 - DNA, 20 bp, Artificial Sequence
  Description of Artificial Sequence: Synthetic oligonucleotide
  Target: LAMA2; (+) strand; PAM type: YTN; PAM sequence: TTT
cagtagaaaaataatggaaa

SEQ ID NO: 392332 - DNA, 20 bp, Artificial Sequence
  Description of Artificial Sequence: Synthetic oligonucleotide
  Target: LAMA2; (+) strand; PAM type: YTN; PAM sequence: TTC
agtagaaaaataatggaaat

SEQ ID NO: 392333 - DNA, 20 bp, Artificial Sequence
  Description of Artificial Sequence: Synthetic oligonucleotide
  Target: LAMA2; (+) strand; PAM type: YTN; PAM sequence: TTA
aactagacagttcaccatac

SEQ ID NO: 392334 - DNA, 20 bp, Artificial Sequence
  Description of Artificial Sequence: Synthetic oligonucleotide
  Target: LAMA2; (+) strand; PAM type: YTN; PAM sequence: CTA
gacagttcaccatacaaaaa

SEQ ID NO: 392335 - DNA, 20 bp, Artificial Sequence
  Description of Artificial Sequence: Synthetic oligonucleotide
  Target: LAMA2; (+) strand; PAM type: YTN; PAM sequence: TTC
accatacaaaaataatgtta

SEQ ID NO: 392336 - DNA, 20 bp, Artificial Sequence
  Description of Artificial Sequence: Synthetic oligonucleotide
  Target: LAMA2; (+) strand; PAM type: YTN; PAM sequence: TTA
aatgagggtaagtaaagcgc

SEQ ID NO: 392337 - DNA, 20 bp, Artificial Sequence
  Description of Artificial Sequence: Synthetic oligonucleotide
  Target: LAMA2; (+) strand; PAM type: YTN; PAM sequence: CTG
gaaaataactataaaacttt

SEQ ID NO: 392338 - DNA, 20 bp, Artificial Sequence
  Description of Artificial Sequence: Synthetic oligonucleotide
  Target: LAMA2; (+) strand; PAM type: YTN; PAM sequence: CTA
taaaactttaaaacactaat

SEQ ID NO: 392339 - DNA, 20 bp, Artificial Sequence
  Description of Artificial Sequence: Synthetic oligonucleotide
  Target: LAMA2; (+) strand; PAM type: YTN; PAM sequence: CTT
taaaacactaataataaata

SEQ ID NO: 392340 - DNA, 20 bp, Artificial Sequence
  Description of Artificial Sequence: Synthetic oligonucleotide
  Target: LAMA2; (+) strand; PAM type: YTN; PAM sequence: TTT
aaaacactaataataaataa

SEQ ID NO: 392341 - DNA, 20 bp, Artificial Sequence
  Description of Artificial Sequence: Synthetic oligonucleotide
  Target: LAMA2; (+) strand; PAM type: YTN; PAM sequence: TTA
aaacactaataataaataaa

SEQ ID NO: 392342 - DNA, 20 bp, Artificial Sequence
  Description of Artificial Sequence: Synthetic oligonucleotide
  Target: LAMA2; (+) strand; PAM type: YTN; PAM sequence: CTA
ataataaataaatgttatcc

SEQ ID NO: 392343 - DNA, 20 bp, Artificial Sequence
  Description of Artificial Sequence: Synthetic oligonucleotide
  Target: LAMA2; (+) strand; PAM type: YTN; PAM sequence: TTA
tccaaattaaactggcaagt

SEQ ID NO: 392344 - DNA, 20 bp, Artificial Sequence
  Description of Artificial Sequence: Synthetic oligonucleotide
  Target: LAMA2; (+) strand; PAM type: YTN; PAM sequence: TTA
aactggcaagttttaatggg

SEQ ID NO: 392345 - DNA, 20 bp, Artificial Sequence
  Description of Artificial Sequence: Synthetic oligonucleotide
  Target: LAMA2; (+) strand; PAM type: YTN; PAM sequence: CTG
gcaagttttaatgggccatg

SEQ ID NO: 392346 - DNA, 20 bp, Artificial Sequence
  Description of Artificial Sequence: Synthetic oligonucleotide
  Target: LAMA2; (+) strand; PAM type: YTN; PAM sequence: TTT
taatgggccatgtgtaattt

SEQ ID NO: 392347 - DNA, 20 bp, Artificial Sequence
  Description of Artificial Sequence: Synthetic oligonucleotide
  Target: LAMA2; (+) strand; PAM type: YTN; PAM sequence: TTT
aatgggccatgtgtaattta

SEQ ID NO: 392348 - DNA, 20 bp, Artificial Sequence
  Description of Artificial Sequence: Synthetic oligonucleotide
  Target: LAMA2; (+) strand; PAM type: YTN; PAM sequence: TTA
atgggccatgtgtaatttat

SEQ ID NO: 392349 - DNA, 20 bp, Artificial Sequence
  Description of Artificial Sequence: Synthetic oligonucleotide
  Target: LAMA2; (+) strand; PAM type: YTN; PAM sequence: TTT
atctgtgtcccgatgaggcc

SEQ ID NO: 392350 - DNA, 20 bp, Artificial Sequence
  Description of Artificial Sequence: Synthetic oligonucleotide
  Target: LAMA2; (+) strand; PAM type: YTN; PAM sequence: TTA
tctgtgtcccgatgaggcca

SEQ ID NO: 392351 - DNA, 20 bp, Artificial Sequence
  Description of Artificial Sequence: Synthetic oligonucleotide
  Target: LAMA2; (+) strand; PAM type: YTN; PAM sequence: CTG
tgtcccgatgaggccatatt

SEQ ID NO: 392352 - DNA, 20 bp, Artificial Sequence
  Description of Artificial Sequence: Synthetic oligonucleotide
  Target: LAMA2; (+) strand; PAM type: YTN; PAM sequence: TTT
ttctccaaaacccatatcta

SEQ ID NO: 392353 - DNA, 20 bp, Artificial Sequence
  Description of Artificial Sequence: Synthetic oligonucleotide
  Target: LAMA2; (+) strand; PAM type: YTN; PAM sequence: TTT
tctccaaaacccatatctaa

SEQ ID NO: 392354 - DNA, 20 bp, Artificial Sequence
  Description of Artificial Sequence: Synthetic oligonucleotide
  Target: LAMA2; (+) strand; PAM type: YTN; PAM sequence: TTT
ctccaaaacccatatctaaa

SEQ ID NO: 392355 - DNA, 20 bp, Artificial Sequence
  Description of Artificial Sequence: Synthetic oligonucleotide
  Target: LAMA2; (+) strand; PAM type: YTN; PAM sequence: TTC
tccaaaacccatatctaaaa

SEQ ID NO: 392356 - DNA, 20 bp, Artificial Sequence
  Description of Artificial Sequence: Synthetic oligonucleotide
  Target: LAMA2; (+) strand; PAM type: YTN; PAM sequence: CTC
caaaacccatatctaaaatt

SEQ ID NO: 392357 - DNA, 20 bp, Artificial Sequence
  Description of Artificial Sequence: Synthetic oligonucleotide
  Target: LAMA2; (+) strand; PAM type: YTN; PAM sequence: CTA
aaatttgtttttcataatga

SEQ ID NO: 392358 - DNA, 20 bp, Artificial Sequence
  Description of Artificial Sequence: Synthetic oligonucleotide
  Target: LAMA2; (+) strand; PAM type: YTN; PAM sequence: TTT
gtttttcataatgaagataa

SEQ ID NO: 392359 - DNA, 20 bp, Artificial Sequence
  Description of Artificial Sequence: Synthetic oligonucleotide
  Target: LAMA2; (+) strand; PAM type: YTN; PAM sequence: TTG
tttttcataatgaagataaa

SEQ ID NO: 392360 - DNA, 20 bp, Artificial Sequence
  Description of Artificial Sequence: Synthetic oligonucleotide
  Target: LAMA2; (+) strand; PAM type: YTN; PAM sequence: TTT
ttcataatgaagataaagta

SEQ ID NO: 392361 - DNA, 20 bp, Artificial Sequence
  Description of Artificial Sequence: Synthetic oligonucleotide
  Target: LAMA2; (+) strand; PAM type: YTN; PAM sequence: TTT
tcataatgaagataaagtag

SEQ ID NO: 392362 - DNA, 20 bp, Artificial Sequence
  Description of Artificial Sequence: Synthetic oligonucleotide
  Target: LAMA2; (+) strand; PAM type: YTN; PAM sequence: TTT
cataatgaagataaagtagc

SEQ ID NO: 392363 - DNA, 20 bp, Artificial Sequence
  Description of Artificial Sequence: Synthetic oligonucleotide
  Target: LAMA2; (+) strand; PAM type: YTN; PAM sequence: TTC
ataatgaagataaagtagca

SEQ ID NO: 392364 - DNA, 20 bp, Artificial Sequence
  Description of Artificial Sequence: Synthetic oligonucleotide
  Target: LAMA2; (+) strand; PAM type: YTN; PAM sequence: TTT
gaaagatgctctcatttaat

SEQ ID NO: 392365 - DNA, 20 bp, Artificial Sequence
  Description of Artificial Sequence: Synthetic oligonucleotide
  Target: LAMA2; (+) strand; PAM type: YTN; PAM sequence: TTG
aaagatgctctcatttaatc

SEQ ID NO: 392366 - DNA, 20 bp, Artificial Sequence
  Description of Artificial Sequence: Synthetic oligonucleotide
  Target: LAMA2; (+) strand; PAM type: YTN; PAM sequence: CTC
tcatttaatccaaaaagata

SEQ ID NO: 392367 - DNA, 20 bp, Artificial Sequence
  Description of Artificial Sequence: Synthetic oligonucleotide
  Target: LAMA2; (+) strand; PAM type: YTN; PAM sequence: CTC
atttaatccaaaaagatact

SEQ ID NO: 392368 - DNA, 20 bp, Artificial Sequence
  Description of Artificial Sequence: Synthetic oligonucleotide
  Target: LAMA2; (+) strand; PAM type: YTN; PAM sequence: TTT
aatccaaaaagatactgaag

SEQ ID NO: 392369 - DNA, 20 bp, Artificial Sequence
  Description of Artificial Sequence: Synthetic oligonucleotide
  Target: LAMA2; (+) strand; PAM type: YTN; PAM sequence: TTA
atccaaaaagatactgaagg

SEQ ID NO: 392370 - DNA, 20 bp, Artificial Sequence
  Description of Artificial Sequence: Synthetic oligonucleotide
  Target: LAMA2; (+) strand; PAM type: YTN; PAM sequence: CTG
aaggcccatgtccattttgg

SEQ ID NO: 392371 - DNA, 20 bp, Artificial Sequence
  Description of Artificial Sequence: Synthetic oligonucleotide
  Target: LAMA2; (+) strand; PAM type: YTN; PAM sequence: TTT
tggggagcttgtattttttt

SEQ ID NO: 392372 - DNA, 20 bp, Artificial Sequence
  Description of Artificial Sequence: Synthetic oligonucleotide
  Target: LAMA2; (+) strand; PAM type: YTN; PAM sequence: TTT
ggggagcttgtatttttttt

SEQ ID NO: 392373 - DNA, 20 bp, Artificial Sequence
  Description of Artificial Sequence: Synthetic oligonucleotide
  Target: LAMA2; (+) strand; PAM type: YTN; PAM sequence: TTG
gggagcttgtatttttttta

SEQ ID NO: 392374 - DNA, 20 bp, Artificial Sequence
  Description of Artificial Sequence: Synthetic oligonucleotide
  Target: LAMA2; (+) strand; PAM type: YTN; PAM sequence: CTT
gtattttttttacataacat

SEQ ID NO: 392375 - DNA, 20 bp, Artificial Sequence
  Description of Artificial Sequence: Synthetic oligonucleotide
  Target: LAMA2; (+) strand; PAM type: YTN; PAM sequence: TTG
tattttttttacataacatg

SEQ ID NO: 392376 - DNA, 20 bp, Artificial Sequence
  Description of Artificial Sequence: Synthetic oligonucleotide
  Target: LAMA2; (+) strand; PAM type: YTN; PAM sequence: TTT
tttttacataacatgggttg

SEQ ID NO: 392377 - DNA, 20 bp, Artificial Sequence
  Description of Artificial Sequence: Synthetic oligonucleotide
  Target: LAMA2; (+) strand; PAM type: YTN; PAM sequence: TTT
ttttacataacatgggttgc

SEQ ID NO: 392378 - DNA, 20 bp, Artificial Sequence
  Description of Artificial Sequence: Synthetic oligonucleotide
  Target: LAMA2; (+) strand; PAM type: YTN; PAM sequence: TTT
tttacataacatgggttgca

SEQ ID NO: 392379 - DNA, 20 bp, Artificial Sequence
  Description of Artificial Sequence: Synthetic oligonucleotide
  Target: LAMA2; (+) strand; PAM type: YTN; PAM sequence: TTT
ttacataacatgggttgcaa

SEQ ID NO: 392380 - DNA, 20 bp, Artificial Sequence
  Description of Artificial Sequence: Synthetic oligonucleotide
  Target: LAMA2; (+) strand; PAM type: YTN; PAM sequence: TTT
tacataacatgggttgcaac

SEQ ID NO: 392381 - DNA, 20 bp, Artificial Sequence
  Description of Artificial Sequence: Synthetic oligonucleotide
  Target: LAMA2; (+) strand; PAM type: YTN; PAM sequence: TTT
acataacatgggttgcaaca

SEQ ID NO: 392382 - DNA, 20 bp, Artificial Sequence
  Description of Artificial Sequence: Synthetic oligonucleotide
  Target: LAMA2; (+) strand; PAM type: YTN; PAM sequence: TTA
cataacatgggttgcaacaa

SEQ ID NO: 392383 - DNA, 20 bp, Artificial Sequence
  Description of Artificial Sequence: Synthetic oligonucleotide
  Target: LAMA2; (+) strand; PAM type: YTN; PAM sequence: TTG
caacaaaaagctggccatgg

SEQ ID NO: 392384 - DNA, 20 bp, Artificial Sequence
  Description of Artificial Sequence: Synthetic oligonucleotide
  Target: LAMA2; (+) strand; PAM type: YTN; PAM sequence: CTG
gccatggaatagcagtttat

SEQ ID NO: 392385 - DNA, 20 bp, Artificial Sequence
  Description of Artificial Sequence: Synthetic oligonucleotide
  Target: LAMA2; (+) strand; PAM type: YTN; PAM sequence: TTT
attccataagcagccaatat

SEQ ID NO: 392386 - DNA, 20 bp, Artificial Sequence
  Description of Artificial Sequence: Synthetic oligonucleotide
  Target: LAMA2; (+) strand; PAM type: YTN; PAM sequence: TTA
ttccataagcagccaatata

SEQ ID NO: 392387 - DNA, 20 bp, Artificial Sequence
  Description of Artificial Sequence: Synthetic oligonucleotide
  Target: LAMA2; (+) strand; PAM type: YTN; PAM sequence: TTC
cataagcagccaatatattt

SEQ ID NO: 392388 - DNA, 20 bp, Artificial Sequence
  Description of Artificial Sequence: Synthetic oligonucleotide
  Target: LAMA2; (+) strand; PAM type: YTN; PAM sequence: TTT
gctaaaatgtttgttctttt

SEQ ID NO: 392389 - DNA, 20 bp, Artificial Sequence
  Description of Artificial Sequence: Synthetic oligonucleotide
  Target: LAMA2; (+) strand; PAM type: YTN; PAM sequence: TTG
ctaaaatgtttgttcttttg

SEQ ID NO: 392390 - DNA, 20 bp, Artificial Sequence
  Description of Artificial Sequence: Synthetic oligonucleotide
  Target: LAMA2; (+) strand; PAM type: YTN; PAM sequence: CTA
aaatgtttgttcttttggtc

SEQ ID NO: 392391 - DNA, 20 bp, Artificial Sequence
  Description of Artificial Sequence: Synthetic oligonucleotide
  Target: LAMA2; (+) strand; PAM type: YTN; PAM sequence: TTT
gttcttttggtcctaaccac

SEQ ID NO: 392392 - DNA, 20 bp, Artificial Sequence
  Description of Artificial Sequence: Synthetic oligonucleotide
  Target: LAMA2; (+) strand; PAM type: YTN; PAM sequence: TTG
ttcttttggtcctaaccaca

SEQ ID NO: 392393 - DNA, 20 bp, Artificial Sequence
  Description of Artificial Sequence: Synthetic oligonucleotide
  Target: LAMA2; (+) strand; PAM type: YTN; PAM sequence: TTC
ttttggtcctaaccacattg

SEQ ID NO: 392394 - DNA, 20 bp, Artificial Sequence
  Description of Artificial Sequence: Synthetic oligonucleotide
  Target: LAMA2; (+) strand; PAM type: YTN; PAM sequence: CTT
ttggtcctaaccacattgaa

SEQ ID NO: 392395 - DNA, 20 bp, Artificial Sequence
  Description of Artificial Sequence: Synthetic oligonucleotide
  Target: LAMA2; (+) strand; PAM type: YTN; PAM sequence: TTT
tggtcctaaccacattgaaa

SEQ ID NO: 392396 - DNA, 20 bp, Artificial Sequence
  Description of Artificial Sequence: Synthetic oligonucleotide
  Target: LAMA2; (+) strand; PAM type: YTN; PAM sequence: TTT
ggtcctaaccacattgaaat

SEQ ID NO: 392397 - DNA, 20 bp, Artificial Sequence
  Description of Artificial Sequence: Synthetic oligonucleotide
  Target: LAMA2; (+) strand; PAM type: YTN; PAM sequence: TTG
gtcctaaccacattgaaatc

SEQ ID NO: 392398 - DNA, 20 bp, Artificial Sequence
  Description of Artificial Sequence: Synthetic oligonucleotide
  Target: LAMA2; (+) strand; PAM type: YTN; PAM sequence: CTA
accacattgaaatcttctgg

SEQ ID NO: 392399 - DNA, 20 bp, Artificial Sequence
  Description of Artificial Sequence: Synthetic oligonucleotide
  Target: LAMA2; (+) strand; PAM type: YTN; PAM sequence: TTG
aaatcttctgggactatttc

SEQ ID NO: 392400 - DNA, 20 bp, Artificial Sequence
  Description of Artificial Sequence: Synthetic oligonucleotide
  Target: LAMA2; (+) strand; PAM type: YTN; PAM sequence: CTT
ctgggactatttcaataaca

SEQ ID NO: 392401 - DNA, 20 bp, Artificial Sequence
  Description of Artificial Sequence: Synthetic oligonucleotide
  Target: LAMA2; (+) strand; PAM type: YTN; PAM sequence: TTC
tgggactatttcaataacag

SEQ ID NO: 392402 - DNA, 20 bp, Artificial Sequence
  Description of Artificial Sequence: Synthetic oligonucleotide
  Target: LAMA2; (+) strand; PAM type: YTN; PAM sequence: CTG
ggactatttcaataacagta

SEQ ID NO: 392403 - DNA, 20 bp, Artificial Sequence
  Description of Artificial Sequence: Synthetic oligonucleotide
  Target: LAMA2; (+) strand; PAM type: YTN; PAM sequence: CTA
tttcaataacagtaattgca

SEQ ID NO: 392404 - DNA, 20 bp, Artificial Sequence
  Description of Artificial Sequence: Synthetic oligonucleotide
  Target: LAMA2; (+) strand; PAM type: YTN; PAM sequence: TTT
caataacagtaattgcaaca

SEQ ID NO: 392405 - DNA, 20 bp, Artificial Sequence
  Description of Artificial Sequence: Synthetic oligonucleotide
  Target: LAMA2; (+) strand; PAM type: YTN; PAM sequence: TTC
aataacagtaattgcaacaa

SEQ ID NO: 392406 - DNA, 20 bp, Artificial Sequence
  Description of Artificial Sequence: Synthetic oligonucleotide
  Target: LAMA2; (+) strand; PAM type: YTN; PAM sequence: TTG
caacaattgataatatccaa

SEQ ID NO: 392407 - DNA, 20 bp, Artificial Sequence
  Description of Artificial Sequence: Synthetic oligonucleotide
  Target: LAMA2; (+) strand; PAM type: YTN; PAM sequence: TTG
ataatatccaactggaaaaa

SEQ ID NO: 392408 - DNA, 20 bp, Artificial Sequence
  Description of Artificial Sequence: Synthetic oligonucleotide
  Target: LAMA2; (+) strand; PAM type: YTN; PAM sequence: CTG
gaaaaaaaaaaacaacctca

SEQ ID NO: 392409 - DNA, 20 bp, Artificial Sequence
  Description of Artificial Sequence: Synthetic oligonucleotide
  Target: LAMA2; (+) strand; PAM type: YTN; PAM sequence: CTC
atgactgagctgcacagtga

SEQ ID NO: 392410 - DNA, 20 bp, Artificial Sequence
  Description of Artificial Sequence: Synthetic oligonucleotide
  Target: LAMA2; (+) strand; PAM type: YTN; PAM sequence: CTG
agctgcacagtgatgtccta

SEQ ID NO: 392411 - DNA, 20 bp, Artificial Sequence
  Description of Artificial Sequence: Synthetic oligonucleotide
  Target: LAMA2; (+) strand; PAM type: YTN; PAM sequence: CTG
cacagtgatgtcctatagaa

SEQ ID NO: 392412 - DNA, 20 bp, Artificial Sequence
  Description of Artificial Sequence: Synthetic oligonucleotide
  Target: LAMA2; (+) strand; PAM type: YTN; PAM sequence: CTA
tagaaactttatggggtatg

SEQ ID NO: 392413 - DNA, 20 bp, Artificial Sequence
  Description of Artificial Sequence: Synthetic oligonucleotide
  Target: LAMA2; (+) strand; PAM type: YTN; PAM sequence: CTT
tatggggtatgtgttatatg

SEQ ID NO: 392414 - DNA, 20 bp, Artificial Sequence
  Description of Artificial Sequence: Synthetic oligonucleotide
  Target: LAMA2; (+) strand; PAM type: YTN; PAM sequence: TTT
atggggtatgtgttatatgt

SEQ ID NO: 392415 - DNA, 20 bp, Artificial Sequence
  Description of Artificial Sequence: Synthetic oligonucleotide
  Target: LAMA2; (+) strand; PAM type: YTN; PAM sequence: TTA
tggggtatgtgttatatgtt

SEQ ID NO: 392416 - DNA, 20 bp, Artificial Sequence
  Description of Artificial Sequence: Synthetic oligonucleotide
  Target: LAMA2; (+) strand; PAM type: YTN; PAM sequence: TTA
tatgttttgatgtttttctt

SEQ ID NO: 392417 - DNA, 20 bp, Artificial Sequence
  Description of Artificial Sequence: Synthetic oligonucleotide
  Target: LAMA2; (+) strand; PAM type: YTN; PAM sequence: TTT
tgatgtttttctttttttta

SEQ ID NO: 392418 - DNA, 20 bp, Artificial Sequence
  Description of Artificial Sequence: Synthetic oligonucleotide
  Target: LAMA2; (+) strand; PAM type: YTN; PAM sequence: TTT
gatgtttttcttttttttat

SEQ ID NO: 392419 - DNA, 20 bp, Artificial Sequence
  Description of Artificial Sequence: Synthetic oligonucleotide
  Target: LAMA2; (+) strand; PAM type: YTN; PAM sequence: TTG
atgtttttcttttttttatt

SEQ ID NO: 392420 - DNA, 20 bp, Artificial Sequence
  Description of Artificial Sequence: Synthetic oligonucleotide
  Target: LAMA2; (+) strand; PAM type: YTN; PAM sequence: TTT
ttcttttttttattctcatg

SEQ ID NO: 392421 - DNA, 20 bp, Artificial Sequence
  Description of Artificial Sequence: Synthetic oligonucleotide
  Target: LAMA2; (+) strand; PAM type: YTN; PAM sequence: TTT
tcttttttttattctcatgt

SEQ ID NO: 392422 - DNA, 20 bp, Artificial Sequence
  Description of Artificial Sequence: Synthetic oligonucleotide
  Target: LAMA2; (+) strand; PAM type: YTN; PAM sequence: TTT
cttttttttattctcatgtt

SEQ ID NO: 392423 - DNA, 20 bp, Artificial Sequence
  Description of Artificial Sequence: Synthetic oligonucleotide
  Target: LAMA2; (+) strand; PAM type: YTN; PAM sequence: TTC
ttttttttattctcatgttt

SEQ ID NO: 392424 - DNA, 20 bp, Artificial Sequence
  Description of Artificial Sequence: Synthetic oligonucleotide
  Target: LAMA2; (+) strand; PAM type: YTN; PAM sequence: CTT
ttttttattctcatgttttt

SEQ ID NO: 392425 - DNA, 20 bp, Artificial Sequence
  Description of Artificial Sequence: Synthetic oligonucleotide
  Target: LAMA2; (+) strand; PAM type: YTN; PAM sequence: TTT
tttttattctcatgttttta

SEQ ID NO: 392426 - DNA, 20 bp, Artificial Sequence
  Description of Artificial Sequence: Synthetic oligonucleotide
  Target: LAMA2; (+) strand; PAM type: YTN; PAM sequence: TTT
ttttattctcatgtttttat

SEQ ID NO: 392427 - DNA, 20 bp, Artificial Sequence
  Description of Artificial Sequence: Synthetic oligonucleotide
  Target: LAMA2; (+) strand; PAM type: YTN; PAM sequence: TTT
tttattctcatgtttttatt

SEQ ID NO: 392428 - DNA, 20 bp, Artificial Sequence
  Description of Artificial Sequence: Synthetic oligonucleotide
  Target: LAMA2; (+) strand; PAM type: YTN; PAM sequence: TTT
ttattctcatgtttttattt

SEQ ID NO: 392429 - DNA, 20 bp, Artificial Sequence
  Description of Artificial Sequence: Synthetic oligonucleotide
  Target: LAMA2; (+) strand; PAM type: YTN; PAM sequence: TTT
tattctcatgtttttatttt

SEQ ID NO: 392430 - DNA, 20 bp, Artificial Sequence
  Description of Artificial Sequence: Synthetic oligonucleotide
  Target: LAMA2; (+) strand; PAM type: YTN; PAM sequence: TTT
attctcatgtttttattttc

SEQ ID NO: 392431 - DNA, 20 bp, Artificial Sequence
  Description of Artificial Sequence: Synthetic oligonucleotide
  Target: LAMA2; (+) strand; PAM type: YTN; PAM sequence: TTA
ttctcatgtttttattttcc

SEQ ID NO: 392432 - DNA, 20 bp, Artificial Sequence
  Description of Artificial Sequence: Synthetic oligonucleotide
  Target: LAMA2; (+) strand; PAM type: YTN; PAM sequence: TTC
tcatgtttttattttccttt

SEQ ID NO: 392433 - DNA, 20 bp, Artificial Sequence
  Description of Artificial Sequence: Synthetic oligonucleotide
  Target: LAMA2; (+) strand; PAM type: YTN; PAM sequence: CTC
atgtttttattttccttttt

SEQ ID NO: 392434 - DNA, 20 bp, Artificial Sequence
  Description of Artificial Sequence: Synthetic oligonucleotide
  Target: LAMA2; (+) strand; PAM type: YTN; PAM sequence: TTT
ttattttcctttttacttta

SEQ ID NO: 392435 - DNA, 20 bp, Artificial Sequence
  Description of Artificial Sequence: Synthetic oligonucleotide
  Target: LAMA2; (+) strand; PAM type: YTN; PAM sequence: TTT
tattttcctttttactttaa

SEQ ID NO: 392436 - DNA, 20 bp, Artificial Sequence
  Description of Artificial Sequence: Synthetic oligonucleotide
  Target: LAMA2; (+) strand; PAM type: YTN; PAM sequence: TTT
attttcctttttactttaag

SEQ ID NO: 392437 - DNA, 20 bp, Artificial Sequence
  Description of Artificial Sequence: Synthetic oligonucleotide
  Target: LAMA2; (+) strand; PAM type: YTN; PAM sequence: TTA
ttttcctttttactttaagt

SEQ ID NO: 392438 - DNA, 20 bp, Artificial Sequence
  Description of Artificial Sequence: Synthetic oligonucleotide
  Target: LAMA2; (+) strand; PAM type: YTN; PAM sequence: TTT
tcctttttactttaagttct

SEQ ID NO: 392439 - DNA, 20 bp, Artificial Sequence
  Description of Artificial Sequence: Synthetic oligonucleotide
  Target: LAMA2; (+) strand; PAM type: YTN; PAM sequence: TTT
cctttttactttaagttctg

SEQ ID NO: 392440 - DNA, 20 bp, Artificial Sequence
  Description of Artificial Sequence: Synthetic oligonucleotide
  Target: LAMA2; (+) strand; PAM type: YTN; PAM sequence: TTC
ctttttactttaagttctgg

SEQ ID NO: 392441 - DNA, 20 bp, Artificial Sequence
  Description of Artificial Sequence: Synthetic oligonucleotide
  Target: LAMA2; (+) strand; PAM type: YTN; PAM sequence: CTT
tttactttaagttctgggat

SEQ ID NO: 392442 - DNA, 20 bp, Artificial Sequence
  Description of Artificial Sequence: Synthetic oligonucleotide
  Target: LAMA2; (+) strand; PAM type: YTN; PAM sequence: TTT
ttactttaagttctgggatg

SEQ ID NO: 392443 - DNA, 20 bp, Artificial Sequence
  Description of Artificial Sequence: Synthetic oligonucleotide
  Target: LAMA2; (+) strand; PAM type: YTN; PAM sequence: TTT
tactttaagttctgggatgc

SEQ ID NO: 392444 - DNA, 20 bp, Artificial Sequence
  Description of Artificial Sequence: Synthetic oligonucleotide
  Target: LAMA2; (+) strand; PAM type: YTN; PAM sequence: TTT
actttaagttctgggatgca

SEQ ID NO: 392445 - DNA, 20 bp, Artificial Sequence
  Description of Artificial Sequence: Synthetic oligonucleotide
  Target: LAMA2; (+) strand; PAM type: YTN; PAM sequence: TTA
ctttaagttctgggatgcat

SEQ ID NO: 392446 - DNA, 20 bp, Artificial Sequence
  Description of Artificial Sequence: Synthetic oligonucleotide
  Target: LAMA2; (+) strand; PAM type: YTN; PAM sequence: CTT
taagttctgggatgcatgca

SEQ ID NO: 392447 - DNA, 20 bp, Artificial Sequence
  Description of Artificial Sequence: Synthetic oligonucleotide
  Target: LAMA2; (+) strand; PAM type: YTN; PAM sequence: TTT
aagttctgggatgcatgcac

SEQ ID NO: 392448 - DNA, 20 bp, Artificial Sequence
  Description of Artificial Sequence: Synthetic oligonucleotide
  Target: LAMA2; (+) strand; PAM type: YTN; PAM sequence: TTA
agttctgggatgcatgcaca

SEQ ID NO: 392449 - DNA, 20 bp, Artificial Sequence
  Description of Artificial Sequence: Synthetic oligonucleotide
  Target: LAMA2; (+) strand; PAM type: YTN; PAM sequence: TTC
tgggatgcatgcacagaatg

SEQ ID NO: 392450 - DNA, 20 bp, Artificial Sequence
  Description of Artificial Sequence: Synthetic oligonucleotide
  Target: LAMA2; (+) strand; PAM type: YTN; PAM sequence: CTG
ggatgcatgcacagaatgtt

SEQ ID NO: 392451 - DNA, 20 bp, Artificial Sequence
  Description of Artificial Sequence: Synthetic oligonucleotide
  Target: LAMA2; (+) strand; PAM type: YTN; PAM sequence: TTC
aggtttgttgcataggtata

SEQ ID NO: 392452 - DNA, 20 bp, Artificial Sequence
  Description of Artificial Sequence: Synthetic oligonucleotide
  Target: LAMA2; (+) strand; PAM type: YTN; PAM sequence: TTT
gttgcataggtatacctgtg

SEQ ID NO: 392453 - DNA, 20 bp, Artificial Sequence
  Description of Artificial Sequence: Synthetic oligonucleotide
  Target: LAMA2; (+) strand; PAM type: YTN; PAM sequence: TTG
ttgcataggtatacctgtgc

SEQ ID NO: 392454 - DNA, 20 bp, Artificial Sequence
  Description of Artificial Sequence: Synthetic oligonucleotide
  Target: LAMA2; (+) strand; PAM type: YTN; PAM sequence: TTG
cataggtatacctgtgccat

SEQ ID NO: 392455 - DNA, 20 bp, Artificial Sequence
  Description of Artificial Sequence: Synthetic oligonucleotide
  Target: LAMA2; (+) strand; PAM type: YTN; PAM sequence: CTG
tgccatggtggtttgctgca

SEQ ID NO: 392456 - DNA, 20 bp, Artificial Sequence
  Description of Artificial Sequence: Synthetic oligonucleotide
  Target: LAMA2; (+) strand; PAM type: YTN; PAM sequence: TTT
gctgcacctatcaacccatc

SEQ ID NO: 392457 - DNA, 20 bp, Artificial Sequence
  Description of Artificial Sequence: Synthetic oligonucleotide
  Target: LAMA2; (+) strand; PAM type: YTN; PAM sequence: TTG
ctgcacctatcaacccatca

SEQ ID NO: 392458 - DNA, 20 bp, Artificial Sequence
  Description of Artificial Sequence: Synthetic oligonucleotide
  Target: LAMA2; (+) strand; PAM type: YTN; PAM sequence: CTG
cacctatcaacccatcaaaa

SEQ ID NO: 392459 - DNA, 20 bp, Artificial Sequence
  Description of Artificial Sequence: Synthetic oligonucleotide
  Target: LAMA2; (+) strand; PAM type: YTN; PAM sequence: CTA
tcaacccatcaaaagaagac

SEQ ID NO: 392460 - DNA, 20 bp, Artificial Sequence
  Description of Artificial Sequence: Synthetic oligonucleotide
  Target: LAMA2; (+) strand; PAM type: YTN; PAM sequence: TTT
atgcagccaacaaacatatg

SEQ ID NO: 392461 - DNA, 20 bp, Artificial Sequence
  Description of Artificial Sequence: Synthetic oligonucleotide
  Target: LAMA2; (+) strand; PAM type: YTN; PAM sequence: TTA
tgcagccaacaaacatatga

SEQ ID NO: 392462 - DNA, 20 bp, Artificial Sequence
  Description of Artificial Sequence: Synthetic oligonucleotide
  Target: LAMA2; (+) strand; PAM type: YTN; PAM sequence: CTC
atcaccactgatcattagag

SEQ ID NO: 392463 - DNA, 20 bp, Artificial Sequence
  Description of Artificial Sequence: Synthetic oligonucleotide
  Target: LAMA2; (+) strand; PAM type: YTN; PAM sequence: CTG
atcattagagaaatgcaagt

SEQ ID NO: 392464 - DNA, 20 bp, Artificial Sequence
  Description of Artificial Sequence: Synthetic oligonucleotide
  Target: LAMA2; (+) strand; PAM type: YTN; PAM sequence: TTA
gagaaatgcaagtcaaaacc

SEQ ID NO: 392465 - DNA, 20 bp, Artificial Sequence
  Description of Artificial Sequence: Synthetic oligonucleotide
  Target: LAMA2; (+) strand; PAM type: YTN; PAM sequence: TTG
gtaattattaaaaagtcagg

SEQ ID NO: 392466 - DNA, 20 bp, Artificial Sequence
  Description of Artificial Sequence: Synthetic oligonucleotide
  Target: LAMA2; (+) strand; PAM type: YTN; PAM sequence: TTA
ttaaaaagtcaggaaacaat

SEQ ID NO: 392467 - DNA, 20 bp, Artificial Sequence
  Description of Artificial Sequence: Synthetic oligonucleotide
  Target: LAMA2; (+) strand; PAM type: YTN; PAM sequence: TTA
aaaagtcaggaaacaataga

SEQ ID NO: 392468 - DNA, 20 bp, Artificial Sequence
  Description of Artificial Sequence: Synthetic oligonucleotide
  Target: LAMA2; (+) strand; PAM type: YTN; PAM sequence: CTG
gcaaggctgtggagaagtag

SEQ ID NO: 392469 - DNA, 20 bp, Artificial Sequence
  Description of Artificial Sequence: Synthetic oligonucleotide
  Target: LAMA2; (+) strand; PAM type: YTN; PAM sequence: CTG
tggagaagtagaaacacttt

SEQ ID NO: 392470 - DNA, 20 bp, Artificial Sequence
  Description of Artificial Sequence: Synthetic oligonucleotide
  Target: LAMA2; (+) strand; PAM type: YTN; PAM sequence: CTT
ttacactgttggtgggaatg

SEQ ID NO: 392471 - DNA, 20 bp, Artificial Sequence
  Description of Artificial Sequence: Synthetic oligonucleotide
  Target: LAMA2; (+) strand; PAM type: YTN; PAM sequence: TTT
tacactgttggtgggaatgt

SEQ ID NO: 392472 - DNA, 20 bp, Artificial Sequence
  Description of Artificial Sequence: Synthetic oligonucleotide
  Target: LAMA2; (+) strand; PAM type: YTN; PAM sequence: TTT
acactgttggtgggaatgta

SEQ ID NO: 392473 - DNA, 20 bp, Artificial Sequence
  Description of Artificial Sequence: Synthetic oligonucleotide
  Target: LAMA2; (+) strand; PAM type: YTN; PAM sequence: TTA
cactgttggtgggaatgtaa

SEQ ID NO: 392474 - DNA, 20 bp, Artificial Sequence
  Description of Artificial Sequence: Synthetic oligonucleotide
  Target: LAMA2; (+) strand; PAM type: YTN; PAM sequence: CTG
ttggtgggaatgtaaattag

SEQ ID NO: 392475 - DNA, 20 bp, Artificial Sequence
  Description of Artificial Sequence: Synthetic oligonucleotide
  Target: LAMA2; (+) strand; PAM type: YTN; PAM sequence: TTG
gtgggaatgtaaattagttt

SEQ ID NO: 392476 - DNA, 20 bp, Artificial Sequence
  Description of Artificial Sequence: Synthetic oligonucleotide
  Target: LAMA2; (+) strand; PAM type: YTN; PAM sequence: TTA
gtttaaccattgtggaagac

SEQ ID NO: 392477 - DNA, 20 bp, Artificial Sequence
  Description of Artificial Sequence: Synthetic oligonucleotide
  Target: LAMA2; (+) strand; PAM type: YTN; PAM sequence: TTT
aaccattgtggaagacagtg

SEQ ID NO: 392478 - DNA, 20 bp, Artificial Sequence
  Description of Artificial Sequence: Synthetic oligonucleotide
  Target: LAMA2; (+) strand; PAM type: YTN; PAM sequence: TTA
accattgtggaagacagtgt

SEQ ID NO: 392479 - DNA, 20 bp, Artificial Sequence
  Description of Artificial Sequence: Synthetic oligonucleotide
  Target: LAMA2; (+) strand; PAM type: YTN; PAM sequence: TTG
tggaagacagtgtggcgatt

SEQ ID NO: 392480 - DNA, 20 bp, Artificial Sequence
  Description of Artificial Sequence: Synthetic oligonucleotide
  Target: LAMA2; (+) strand; PAM type: YTN; PAM sequence: TTC
ctcaaggatccagaaccaga

SEQ ID NO: 392481 - DNA, 20 bp, Artificial Sequence
  Description of Artificial Sequence: Synthetic oligonucleotide
  Target: LAMA2; (+) strand; PAM type: YTN; PAM sequence: CTC
aaggatccagaaccagaaat

SEQ ID NO: 392482 - DNA, 20 bp, Artificial Sequence
  Description of Artificial Sequence: Synthetic oligonucleotide
  Target: LAMA2; (+) strand; PAM type: YTN; PAM sequence: TTT
gacccagcaaccccataact

SEQ ID NO: 392483 - DNA, 20 bp, Artificial Sequence
  Description of Artificial Sequence: Synthetic oligonucleotide
  Target: LAMA2; (+) strand; PAM type: YTN; PAM sequence: TTG
acccagcaaccccataactg

SEQ ID NO: 392484 - DNA, 20 bp, Artificial Sequence
  Description of Artificial Sequence: Synthetic oligonucleotide
  Target: LAMA2; (+) strand; PAM type: YTN; PAM sequence: CTG
ggtatatacccaaaggaata

SEQ ID NO: 392485 - DNA, 20 bp, Artificial Sequence
  Description of Artificial Sequence: Synthetic oligonucleotide
  Target: LAMA2; (+) strand; PAM type: YTN; PAM sequence: TTC
tactctaaagacacatatac

SEQ ID NO: 392486 - DNA, 20 bp, Artificial Sequence
  Description of Artificial Sequence: Synthetic oligonucleotide
  Target: LAMA2; (+) strand; PAM type: YTN; PAM sequence: CTA
ctctaaagacacatatacag

SEQ ID NO: 392487 - DNA, 20 bp, Artificial Sequence
  Description of Artificial Sequence: Synthetic oligonucleotide
  Target: LAMA2; (+) strand; PAM type: YTN; PAM sequence: CTC
taaagacacatatacagtat

SEQ ID NO: 392488 - DNA, 20 bp, Artificial Sequence
  Description of Artificial Sequence: Synthetic oligonucleotide
  Target: LAMA2; (+) strand; PAM type: YTN; PAM sequence: CTA
aagacacatatacagtatgt

SEQ ID NO: 392489 - DNA, 20 bp, Artificial Sequence
  Description of Artificial Sequence: Synthetic oligonucleotide
  Target: LAMA2; (+) strand; PAM type: YTN; PAM sequence: TTT
attgcaacactatttatgca

SEQ ID NO: 392490 - DNA, 20 bp, Artificial Sequence
  Description of Artificial Sequence: Synthetic oligonucleotide
  Target: LAMA2; (+) strand; PAM type: YTN; PAM sequence: TTA
ttgcaacactatttatgcaa

SEQ ID NO: 392491 - DNA, 20 bp, Artificial Sequence
  Description of Artificial Sequence: Synthetic oligonucleotide
  Target: LAMA2; (+) strand; PAM type: YTN; PAM sequence: TTG
caacactatttatgcaaaga

SEQ ID NO: 392492 - DNA, 20 bp, Artificial Sequence
  Description of Artificial Sequence: Synthetic oligonucleotide
  Target: LAMA2; (+) strand; PAM type: YTN; PAM sequence: CTA
tttatgcaaagagatggaac

SEQ ID NO: 392493 - DNA, 20 bp, Artificial Sequence
  Description of Artificial Sequence: Synthetic oligonucleotide
  Target: LAMA2; (+) strand; PAM type: YTN; PAM sequence: TTT
atgcaaagagatggaaccaa

SEQ ID NO: 392494 - DNA, 20 bp, Artificial Sequence
  Description of Artificial Sequence: Synthetic oligonucleotide
  Target: LAMA2; (+) strand; PAM type: YTN; PAM sequence: TTA
tgcaaagagatggaaccaac

SEQ ID NO: 392495 - DNA, 20 bp, Artificial Sequence
  Description of Artificial Sequence: Synthetic oligonucleotide
  Target: LAMA2; (+) strand; PAM type: YTN; PAM sequence: TTA
ggtaaagaaaatgtggtaca

SEQ ID NO: 392496 - DNA, 20 bp, Artificial Sequence
  Description of Artificial Sequence: Synthetic oligonucleotide
  Target: LAMA2; (+) strand; PAM type: YTN; PAM sequence: CTA
tgcagccataaaaaagaatg

SEQ ID NO: 392497 - DNA, 20 bp, Artificial Sequence
  Description of Artificial Sequence: Synthetic oligonucleotide
  Target: LAMA2; (+) strand; PAM type: YTN; PAM sequence: CTT
tgcagggatatggatgaagc

SEQ ID NO: 392498 - DNA, 20 bp, Artificial Sequence
  Description of Artificial Sequence: Synthetic oligonucleotide
  Target: LAMA2; (+) strand; PAM type: YTN; PAM sequence: TTT
gcagggatatggatgaagct

SEQ ID NO: 392499 - DNA, 20 bp, Artificial Sequence
  Description of Artificial Sequence: Synthetic oligonucleotide
  Target: LAMA2; (+) strand; PAM type: YTN; PAM sequence: TTG
cagggatatggatgaagctg

SEQ ID NO: 392500 - DNA, 20 bp, Artificial Sequence
  Description of Artificial Sequence: Synthetic oligonucleotide
  Target: LAMA2; (+) strand; PAM type: YTN; PAM sequence: CTG
aaagcttcagcatcctcagc

SEQ ID NO: 392501 - DNA, 20 bp, Artificial Sequence
  Description of Artificial Sequence: Synthetic oligonucleotide
  Target: LAMA2; (+) strand; PAM type: YTN; PAM sequence: CTT
cagcatcctcagcaaactaa

SEQ ID NO: 392502 - DNA, 20 bp, Artificial Sequence
  Description of Artificial Sequence: Synthetic oligonucleotide
  Target: LAMA2; (+) strand; PAM type: YTN; PAM sequence: TTC
agcatcctcagcaaactaat

SEQ ID NO: 392503 - DNA, 20 bp, Artificial Sequence
  Description of Artificial Sequence: Synthetic oligonucleotide
  Target: LAMA2; (+) strand; PAM type: YTN; PAM sequence: CTC
agcaaactaatccaggaatg

SEQ ID NO: 392504 - DNA, 20 bp, Artificial Sequence
  Description of Artificial Sequence: Synthetic oligonucleotide
  Target: LAMA2; (+) strand; PAM type: YTN; PAM sequence: CTA
atccaggaatggaaaaccaa

SEQ ID NO: 392505 - DNA, 20 bp, Artificial Sequence
  Description of Artificial Sequence: Synthetic oligonucleotide
  Target: LAMA2; (+) strand; PAM type: YTN; PAM sequence: TTC
tcgctcataagtgggagttg

SEQ ID NO: 392506 - DNA, 20 bp, Artificial Sequence
  Description of Artificial Sequence: Synthetic oligonucleotide
  Target: LAMA2; (+) strand; PAM type: YTN; PAM sequence: CTC
gctcataagtgggagttgaa

SEQ ID NO: 392507 - DNA, 20 bp, Artificial Sequence
  Description of Artificial Sequence: Synthetic oligonucleotide
  Target: LAMA2; (+) strand; PAM type: YTN; PAM sequence: CTC
ataagtgggagttgaacagt

SEQ ID NO: 392508 - DNA, 20 bp, Artificial Sequence
  Description of Artificial Sequence: Synthetic oligonucleotide
  Target: LAMA2; (+) strand; PAM type: YTN; PAM sequence: TTG
aacagtgagaacacatggac

SEQ ID NO: 392509 - DNA, 20 bp, Artificial Sequence
  Description of Artificial Sequence: Synthetic oligonucleotide
  Target: LAMA2; (+) strand; PAM type: YTN; PAM sequence: CTG
gagtctattgggggttgtgg

SEQ ID NO: 392510 - DNA, 20 bp, Artificial Sequence
  Description of Artificial Sequence: Synthetic oligonucleotide
  Target: LAMA2; (+) strand; PAM type: YTN; PAM sequence: CTA
ttgggggttgtggggagagg

SEQ ID NO: 392511 - DNA, 20 bp, Artificial Sequence
  Description of Artificial Sequence: Synthetic oligonucleotide
  Target: LAMA2; (+) strand; PAM type: YTN; PAM sequence: TTG
ggggttgtggggagaggaaa

SEQ ID NO: 392512 - DNA, 20 bp, Artificial Sequence
  Description of Artificial Sequence: Synthetic oligonucleotide
  Target: LAMA2; (+) strand; PAM type: YTN; PAM sequence: TTG
tggggagaggaaaaggaaag

SEQ ID NO: 392513 - DNA, 20 bp, Artificial Sequence
  Description of Artificial Sequence: Synthetic oligonucleotide
  Target: LAMA2; (+) strand; PAM type: YTN; PAM sequence: TTA
ggacaaatagttaatgcatg

SEQ ID NO: 392514 - DNA, 20 bp, Artificial Sequence
  Description of Artificial Sequence: Synthetic oligonucleotide
  Target: LAMA2; (+) strand; PAM type: YTN; PAM sequence: TTA
atgcatgaggggctttaaaa

SEQ ID NO: 392515 - DNA, 20 bp, Artificial Sequence
  Description of Artificial Sequence: Synthetic oligonucleotide
  Target: LAMA2; (+) strand; PAM type: YTN; PAM sequence: CTT
taaaacctagatgatgggct

SEQ ID NO: 392516 - DNA, 20 bp, Artificial Sequence
  Description of Artificial Sequence: Synthetic oligonucleotide
  Target: LAMA2; (+) strand; PAM type: YTN; PAM sequence: TTT
aaaacctagatgatgggctg

SEQ ID NO: 392517 - DNA, 20 bp, Artificial Sequence
  Description of Artificial Sequence: Synthetic oligonucleotide
  Target: LAMA2; (+) strand; PAM type: YTN; PAM sequence: TTA
aaacctagatgatgggctgg

SEQ ID NO: 392518 - DNA, 20 bp, Artificial Sequence
  Description of Artificial Sequence: Synthetic oligonucleotide
  Target: LAMA2; (+) strand; PAM type: YTN; PAM sequence: CTA
gatgatgggctgggcgtggt

SEQ ID NO: 392519 - DNA, 20 bp, Artificial Sequence
  Description of Artificial Sequence: Synthetic oligonucleotide
  Target: LAMA2; (+) strand; PAM type: YTN; PAM sequence: CTG
ggcgtggtggctcactcctg

SEQ ID NO: 392520 - DNA, 20 bp, Artificial Sequence
  Description of Artificial Sequence: Synthetic oligonucleotide
  Target: LAMA2; (+) strand; PAM type: YTN; PAM sequence: CTC
actcctgtaatcccagtact

SEQ ID NO: 392521 - DNA, 20 bp, Artificial Sequence
  Description of Artificial Sequence: Synthetic oligonucleotide
  Target: LAMA2; (+) strand; PAM type: YTN; PAM sequence: CTC
ctgtaatcccagtactttga

SEQ ID NO: 392522 - DNA, 20 bp, Artificial Sequence
  Description of Artificial Sequence: Synthetic oligonucleotide
  Target: LAMA2; (+) strand; PAM type: YTN; PAM sequence: CTG
taatcccagtactttgagag

SEQ ID NO: 392523 - DNA, 20 bp, Artificial Sequence
  Description of Artificial Sequence: Synthetic oligonucleotide
  Target: LAMA2; (+) strand; PAM type: YTN; PAM sequence: CTT
tgagaggccaaggcaggcag

SEQ ID NO: 392524 - DNA, 20 bp, Artificial Sequence
  Description of Artificial Sequence: Synthetic oligonucleotide
  Target: LAMA2; (+) strand; PAM type: YTN; PAM sequence: TTT
gagaggccaaggcaggcaga

SEQ ID NO: 392525 - DNA, 20 bp, Artificial Sequence
  Description of Artificial Sequence: Synthetic oligonucleotide
  Target: LAMA2; (+) strand; PAM type: YTN; PAM sequence: TTG
agaggccaaggcaggcagat

SEQ ID NO: 392526 - DNA, 20 bp, Artificial Sequence
  Description of Artificial Sequence: Synthetic oligonucleotide
  Target: LAMA2; (+) strand; PAM type: YTN; PAM sequence: CTG
aggtcaggcgttcaagacca

SEQ ID NO: 392527 - DNA, 20 bp, Artificial Sequence
  Description of Artificial Sequence: Synthetic oligonucleotide
  Target: LAMA2; (+) strand; PAM type: YTN; PAM sequence: TTC
aagaccagcctggccaacat

SEQ ID NO: 392528 - DNA, 20 bp, Artificial Sequence
  Description of Artificial Sequence: Synthetic oligonucleotide
  Target: LAMA2; (+) strand; PAM type: YTN; PAM sequence: CTG
gccaacatggcaaaacccca

SEQ ID NO: 392529 - DNA, 20 bp, Artificial Sequence
  Description of Artificial Sequence: Synthetic oligonucleotide
  Target: LAMA2; (+) strand; PAM type: YTN; PAM sequence: CTC
tactaaaaatacaaaaatca

SEQ ID NO: 392530 - DNA, 20 bp, Artificial Sequence
  Description of Artificial Sequence: Synthetic oligonucleotide
  Target: LAMA2; (+) strand; PAM type: YTN; PAM sequence: CTA
ctaaaaatacaaaaatcagc

SEQ ID NO: 392531 - DNA, 20 bp, Artificial Sequence
  Description of Artificial Sequence: Synthetic oligonucleotide
  Target: LAMA2; (+) strand; PAM type: YTN; PAM sequence: CTA
aaaatacaaaaatcagctgg

SEQ ID NO: 392532 - DNA, 20 bp, Artificial Sequence
  Description of Artificial Sequence: Synthetic oligonucleotide
  Target: LAMA2; (+) strand; PAM type: YTN; PAM sequence: CTG
ggcacggtggcatgcgctat

SEQ ID NO: 392533 - DNA, 20 bp, Artificial Sequence
  Description of Artificial Sequence: Synthetic oligonucleotide
  Target: LAMA2; (+) strand; PAM type: YTN; PAM sequence: CTA
taattccagctactcgggag

SEQ ID NO: 392534 - DNA, 20 bp, Artificial Sequence
  Description of Artificial Sequence: Synthetic oligonucleotide
  Target: LAMA2; (+) strand; PAM type: YTN; PAM sequence: TTC
cagctactcgggaggctgag

SEQ ID NO: 392535 - DNA, 20 bp, Artificial Sequence
  Description of Artificial Sequence: Synthetic oligonucleotide
  Target: LAMA2; (+) strand; PAM type: YTN; PAM sequence: CTA
ctcgggaggctgagacagta

SEQ ID NO: 392536 - DNA, 20 bp, Artificial Sequence
  Description of Artificial Sequence: Synthetic oligonucleotide
  Target: LAMA2; (+) strand; PAM type: YTN; PAM sequence: CTC
gggaggctgagacagtagaa

SEQ ID NO: 392537 - DNA, 20 bp, Artificial Sequence
  Description of Artificial Sequence: Synthetic oligonucleotide
  Target: LAMA2; (+) strand; PAM type: YTN; PAM sequence: CTG
agacagtagaatcgcttgaa

SEQ ID NO: 392538 - DNA, 20 bp, Artificial Sequence
  Description of Artificial Sequence: Synthetic oligonucleotide
  Target: LAMA2; (+) strand; PAM type: YTN; PAM sequence: CTT
gaacccaggaggtgcggtcg

SEQ ID NO: 392539 - DNA, 20 bp, Artificial Sequence
  Description of Artificial Sequence: Synthetic oligonucleotide
  Target: LAMA2; (+) strand; PAM type: YTN; PAM sequence: TTG
aacccaggaggtgcggtcgc

SEQ ID NO: 392540 - DNA, 20 bp, Artificial Sequence
  Description of Artificial Sequence: Synthetic oligonucleotide
  Target: LAMA2; (+) strand; PAM type: YTN; PAM sequence: TTG
tgccactgcactccagcctg

SEQ ID NO: 392541 - DNA, 20 bp, Artificial Sequence
  Description of Artificial Sequence: Synthetic oligonucleotide
  Target: LAMA2; (+) strand; PAM type: YTN; PAM sequence: CTG
cactccagcctgggcaacag

SEQ ID NO: 392542 - DNA, 20 bp, Artificial Sequence
  Description of Artificial Sequence: Synthetic oligonucleotide
  Target: LAMA2; (+) strand; PAM type: YTN; PAM sequence: CTC
cagcctgggcaacagagcaa

SEQ ID NO: 392543 - DNA, 20 bp, Artificial Sequence
  Description of Artificial Sequence: Synthetic oligonucleotide
  Target: LAMA2; (+) strand; PAM type: YTN; PAM sequence: CTG
ggcaacagagcaagactcca

SEQ ID NO: 392544 - DNA, 20 bp, Artificial Sequence
  Description of Artificial Sequence: Synthetic oligonucleotide
  Target: LAMA2; (+) strand; PAM type: YTN; PAM sequence: CTC
catctcaaaaaaaaaaaaac

SEQ ID NO: 392545 - DNA, 20 bp, Artificial Sequence
  Description of Artificial Sequence: Synthetic oligonucleotide
  Target: LAMA2; (+) strand; PAM type: YTN; PAM sequence: CTC
aaaaaaaaaaaaacaaaaac

SEQ ID NO: 392546 - DNA, 20 bp, Artificial Sequence
  Description of Artificial Sequence: Synthetic oligonucleotide
  Target: LAMA2; (+) strand; PAM type: YTN; PAM sequence: CTG
gttgacgggttgataggtgc

SEQ ID NO: 392547 - DNA, 20 bp, Artificial Sequence
  Description of Artificial Sequence: Synthetic oligonucleotide
  Target: LAMA2; (+) strand; PAM type: YTN; PAM sequence: TTG
acgggttgataggtgcagca

SEQ ID NO: 392548 - DNA, 20 bp, Artificial Sequence
  Description of Artificial Sequence: Synthetic oligonucleotide
  Target: LAMA2; (+) strand; PAM type: YTN; PAM sequence: TTG
ataggtgcagcaaaccacca

SEQ ID NO: 392549 - DNA, 20 bp, Artificial Sequence
  Description of Artificial Sequence: Synthetic oligonucleotide
  Target: LAMA2; (+) strand; PAM type: YTN; PAM sequence: TTC
ctatgtaacaaagcttgctt

SEQ ID NO: 392550 - DNA, 20 bp, Artificial Sequence
  Description of Artificial Sequence: Synthetic oligonucleotide
  Target: LAMA2; (+) strand; PAM type: YTN; PAM sequence: CTA
tgtaacaaagcttgctttct

SEQ ID NO: 392551 - DNA, 20 bp, Artificial Sequence
  Description of Artificial Sequence: Synthetic oligonucleotide
  Target: LAMA2; (+) strand; PAM type: YTN; PAM sequence: CTT
gctttcttaatacatgatca

SEQ ID NO: 392552 - DNA, 20 bp, Artificial Sequence
  Description of Artificial Sequence: Synthetic oligonucleotide
  Target: LAMA2; (+) strand; PAM type: YTN; PAM sequence: TTG
ctttcttaatacatgatcat

SEQ ID NO: 392553 - DNA, 20 bp, Artificial Sequence
  Description of Artificial Sequence: Synthetic oligonucleotide
  Target: LAMA2; (+) strand; PAM type: YTN; PAM sequence: CTT
tcttaatacatgatcatttt

SEQ ID NO: 392554 - DNA, 20 bp, Artificial Sequence
  Description of Artificial Sequence: Synthetic oligonucleotide
  Target: LAMA2; (+) strand; PAM type: YTN; PAM sequence: TTT
cttaatacatgatcattttg

SEQ ID NO: 392555 - DNA, 20 bp, Artificial Sequence
  Description of Artificial Sequence: Synthetic oligonucleotide
  Target: LAMA2; (+) strand; PAM type: YTN; PAM sequence: TTC
ttaatacatgatcattttgc

SEQ ID NO: 392556 - DNA, 20 bp, Artificial Sequence
  Description of Artificial Sequence: Synthetic oligonucleotide
  Target: LAMA2; (+) strand; PAM type: YTN; PAM sequence: CTT
aatacatgatcattttgcta

SEQ ID NO: 392557 - DNA, 20 bp, Artificial Sequence
  Description of Artificial Sequence: Synthetic oligonucleotide
  Target: LAMA2; (+) strand; PAM type: YTN; PAM sequence: TTA
atacatgatcattttgctaa

SEQ ID NO: 392558 - DNA, 20 bp, Artificial Sequence
  Description of Artificial Sequence: Synthetic oligonucleotide
  Target: LAMA2; (+) strand; PAM type: YTN; PAM sequence: TTT
tgctaaagtcatttttgtgc

SEQ ID NO: 392559 - DNA, 20 bp, Artificial Sequence
  Description of Artificial Sequence: Synthetic oligonucleotide
  Target: LAMA2; (+) strand; PAM type: YTN; PAM sequence: TTT
gctaaagtcatttttgtgca

SEQ ID NO: 392560 - DNA, 20 bp, Artificial Sequence
  Description of Artificial Sequence: Synthetic oligonucleotide
  Target: LAMA2; (+) strand; PAM type: YTN; PAM sequence: TTG
ctaaagtcatttttgtgcac

SEQ ID NO: 392561 - DNA, 20 bp, Artificial Sequence
  Description of Artificial Sequence: Synthetic oligonucleotide
  Target: LAMA2; (+) strand; PAM type: YTN; PAM sequence: CTA
aagtcatttttgtgcacctt

SEQ ID NO: 392562 - DNA, 20 bp, Artificial Sequence
  Description of Artificial Sequence: Synthetic oligonucleotide
  Target: LAMA2; (+) strand; PAM type: YTN; PAM sequence: TTT
ttgtgcaccttaatgattgc

SEQ ID NO: 392563 - DNA, 20 bp, Artificial Sequence
  Description of Artificial Sequence: Synthetic oligonucleotide
  Target: LAMA2; (+) strand; PAM type: YTN; PAM sequence: TTT
tgtgcaccttaatgattgct

SEQ ID NO: 392564 - DNA, 20 bp, Artificial Sequence
  Description of Artificial Sequence: Synthetic oligonucleotide
  Target: LAMA2; (+) strand; PAM type: YTN; PAM sequence: TTT
gtgcaccttaatgattgctt

SEQ ID NO: 392565 - DNA, 20 bp, Artificial Sequence
  Description of Artificial Sequence: Synthetic oligonucleotide
  Target: LAMA2; (+) strand; PAM type: YTN; PAM sequence: TTG
tgcaccttaatgattgcttc

SEQ ID NO: 392566 - DNA, 20 bp, Artificial Sequence
  Description of Artificial Sequence: Synthetic oligonucleotide
  Target: LAMA2; (+) strand; PAM type: YTN; PAM sequence: CTT
aatgattgcttcttgtttac

SEQ ID NO: 392567 - DNA, 20 bp, Artificial Sequence
  Description of Artificial Sequence: Synthetic oligonucleotide
  Target: LAMA2; (+) strand; PAM type: YTN; PAM sequence: TTA
atgattgcttcttgtttaca

SEQ ID NO: 392568 - DNA, 20 bp, Artificial Sequence
  Description of Artificial Sequence: Synthetic oligonucleotide
  Target: LAMA2; (+) strand; PAM type: YTN; PAM sequence: TTG
cttcttgtttacaaatggtt

SEQ ID NO: 392569 - DNA, 20 bp, Artificial Sequence
  Description of Artificial Sequence: Synthetic oligonucleotide
  Target: LAMA2; (+) strand; PAM type: YTN; PAM sequence: CTT
cttgtttacaaatggtttta

SEQ ID NO: 392570 - DNA, 20 bp, Artificial Sequence
  Description of Artificial Sequence: Synthetic oligonucleotide
  Target: LAMA2; (+) strand; PAM type: YTN; PAM sequence: TTC
ttgtttacaaatggttttaa

SEQ ID NO: 392571 - DNA, 20 bp, Artificial Sequence
  Description of Artificial Sequence: Synthetic oligonucleotide
  Target: LAMA2; (+) strand; PAM type: YTN; PAM sequence: CTT
gtttacaaatggttttaatt

SEQ ID NO: 392572 - DNA, 20 bp, Artificial Sequence
  Description of Artificial Sequence: Synthetic oligonucleotide
  Target: LAMA2; (+) strand; PAM type: YTN; PAM sequence: TTG
tttacaaatggttttaattt

SEQ ID NO: 392573 - DNA, 20 bp, Artificial Sequence
  Description of Artificial Sequence: Synthetic oligonucleotide
  Target: LAMA2; (+) strand; PAM type: YTN; PAM sequence: TTT
acaaatggttttaatttaaa

SEQ ID NO: 392574 - DNA, 20 bp, Artificial Sequence
  Description of Artificial Sequence: Synthetic oligonucleotide
  Target: LAMA2; (+) strand; PAM type: YTN; PAM sequence: TTA
caaatggttttaatttaaag

SEQ ID NO: 392575 - DNA, 20 bp, Artificial Sequence
  Description of Artificial Sequence: Synthetic oligonucleotide
  Target: LAMA2; (+) strand; PAM type: YTN; PAM sequence: TTT
taatttaaagaaattatgta

SEQ ID NO: 392576 - DNA, 20 bp, Artificial Sequence
  Description of Artificial Sequence: Synthetic oligonucleotide
  Target: LAMA2; (+) strand; PAM type: YTN; PAM sequence: TTT
aatttaaagaaattatgtat

SEQ ID NO: 392577 - DNA, 20 bp, Artificial Sequence
  Description of Artificial Sequence: Synthetic oligonucleotide
  Target: LAMA2; (+) strand; PAM type: YTN; PAM sequence: TTA
atttaaagaaattatgtatg

SEQ ID NO: 392578 - DNA, 20 bp, Artificial Sequence
  Description of Artificial Sequence: Synthetic oligonucleotide
  Target: LAMA2; (+) strand; PAM type: YTN; PAM sequence: TTT
aaagaaattatgtatgccat

SEQ ID NO: 392579 - DNA, 20 bp, Artificial Sequence
  Description of Artificial Sequence: Synthetic oligonucleotide
  Target: LAMA2; (+) strand; PAM type: YTN; PAM sequence: TTA
aagaaattatgtatgccatc

SEQ ID NO: 392580 - DNA, 20 bp, Artificial Sequence
  Description of Artificial Sequence: Synthetic oligonucleotide
  Target: LAMA2; (+) strand; PAM type: YTN; PAM sequence: TTA
tgtatgccatccaaaagata

SEQ ID NO: 392581 - DNA, 20 bp, Artificial Sequence
  Description of Artificial Sequence: Synthetic oligonucleotide
  Target: LAMA2; (+) strand; PAM type: YTN; PAM sequence: TTT
gccttttccctttctctatc

SEQ ID NO: 392582 - DNA, 20 bp, Artificial Sequence
  Description of Artificial Sequence: Synthetic oligonucleotide
  Target: LAMA2; (+) strand; PAM type: YTN; PAM sequence: TTG
ccttttccctttctctatct

SEQ ID NO: 392583 - DNA, 20 bp, Artificial Sequence
  Description of Artificial Sequence: Synthetic oligonucleotide
  Target: LAMA2; (+) strand; PAM type: YTN; PAM sequence: CTT
ttccctttctctatctgttg

SEQ ID NO: 392584 - DNA, 20 bp, Artificial Sequence
  Description of Artificial Sequence: Synthetic oligonucleotide
  Target: LAMA2; (+) strand; PAM type: YTN; PAM sequence: TTT
tccctttctctatctgttgt

SEQ ID NO: 392585 - DNA, 20 bp, Artificial Sequence
  Description of Artificial Sequence: Synthetic oligonucleotide
  Target: LAMA2; (+) strand; PAM type: YTN; PAM sequence: TTT
ccctttctctatctgttgtc

SEQ ID NO: 392586 - DNA, 20 bp, Artificial Sequence
  Description of Artificial Sequence: Synthetic oligonucleotide
  Target: LAMA2; (+) strand; PAM type: YTN; PAM sequence: TTC
cctttctctatctgttgtca

SEQ ID NO: 392587 - DNA, 20 bp, Artificial Sequence
  Description of Artificial Sequence: Synthetic oligonucleotide
  Target: LAMA2; (+) strand; PAM type: YTN; PAM sequence: CTT
tctctatctgttgtcattct

SEQ ID NO: 392588 - DNA, 20 bp, Artificial Sequence
  Description of Artificial Sequence: Synthetic oligonucleotide
  Target: LAMA2; (+) strand; PAM type: YTN; PAM sequence: TTT
ctctatctgttgtcattctt

SEQ ID NO: 392589 - DNA, 20 bp, Artificial Sequence
  Description of Artificial Sequence: Synthetic oligonucleotide
  Target: LAMA2; (+) strand; PAM type: YTN; PAM sequence: TTC
tctatctgttgtcattcttt

SEQ ID NO: 392590 - DNA, 20 bp, Artificial Sequence
  Description of Artificial Sequence: Synthetic oligonucleotide
  Target: LAMA2; (+) strand; PAM type: YTN; PAM sequence: CTC
tatctgttgtcattcttttt

SEQ ID NO: 392591 - DNA, 20 bp, Artificial Sequence
  Description of Artificial Sequence: Synthetic oligonucleotide
  Target: LAMA2; (+) strand; PAM type: YTN; PAM sequence: CTA
tctgttgtcattctttttcc

SEQ ID NO: 392592 - DNA, 20 bp, Artificial Sequence
  Description of Artificial Sequence: Synthetic oligonucleotide
  Target: LAMA2; (+) strand; PAM type: YTN; PAM sequence: CTG
ttgtcattctttttccacca

SEQ ID NO: 392593 - DNA, 20 bp, Artificial Sequence
  Description of Artificial Sequence: Synthetic oligonucleotide
  Target: LAMA2; (+) strand; PAM type: YTN; PAM sequence: TTG
tcattctttttccaccagat

SEQ ID NO: 392594 - DNA, 20 bp, Artificial Sequence
  Description of Artificial Sequence: Synthetic oligonucleotide
  Target: LAMA2; (+) strand; PAM type: YTN; PAM sequence: TTC
tttttccaccagattcttct

SEQ ID NO: 392595 - DNA, 20 bp, Artificial Sequence
  Description of Artificial Sequence: Synthetic oligonucleotide
  Target: LAMA2; (+) strand; PAM type: YTN; PAM sequence: CTT
tttccaccagattcttctct

SEQ ID NO: 392596 - DNA, 20 bp, Artificial Sequence
  Description of Artificial Sequence: Synthetic oligonucleotide
  Target: LAMA2; (+) strand; PAM type: YTN; PAM sequence: TTT
ttccaccagattcttctctg

SEQ ID NO: 392597 - DNA, 20 bp, Artificial Sequence
  Description of Artificial Sequence: Synthetic oligonucleotide
  Target: LAMA2; (+) strand; PAM type: YTN; PAM sequence: TTT
tccaccagattcttctctgc

SEQ ID NO: 392598 - DNA, 20 bp, Artificial Sequence
  Description of Artificial Sequence: Synthetic oligonucleotide
  Target: LAMA2; (+) strand; PAM type: YTN; PAM sequence: TTT
ccaccagattcttctctgca

SEQ ID NO: 392599 - DNA, 20 bp, Artificial Sequence
  Description of Artificial Sequence: Synthetic oligonucleotide
  Target: LAMA2; (+) strand; PAM type: YTN; PAM sequence: TTC
caccagattcttctctgcag

SEQ ID NO: 392600 - DNA, 20 bp, Artificial Sequence
  Description of Artificial Sequence: Synthetic oligonucleotide
  Target: LAMA2; (+) strand; PAM type: YTN; PAM sequence: TTC
ttctctgcagaagtttagct

SEQ ID NO: 392601 - DNA, 20 bp, Artificial Sequence
  Description of Artificial Sequence: Synthetic oligonucleotide
  Target: LAMA2; (+) strand; PAM type: YTN; PAM sequence: CTT
ctctgcagaagtttagcttt

SEQ ID NO: 392602 - DNA, 20 bp, Artificial Sequence
  Description of Artificial Sequence: Synthetic oligonucleotide
  Target: LAMA2; (+) strand; PAM type: YTN; PAM sequence: TTC
tctgcagaagtttagctttg

SEQ ID NO: 392603 - DNA, 20 bp, Artificial Sequence
  Description of Artificial Sequence: Synthetic oligonucleotide
  Target: LAMA2; (+) strand; PAM type: YTN; PAM sequence: CTC
tgcagaagtttagctttgag

SEQ ID NO: 392604 - DNA, 20 bp, Artificial Sequence
  Description of Artificial Sequence: Synthetic oligonucleotide
  Target: LAMA2; (+) strand; PAM type: YTN; PAM sequence: CTG
cagaagtttagctttgagac

SEQ ID NO: 392605 - DNA, 20 bp, Artificial Sequence
  Description of Artificial Sequence: Synthetic oligonucleotide
  Target: LAMA2; (+) strand; PAM type: YTN; PAM sequence: TTT
agctttgagaccagagcaca

SEQ ID NO: 392606 - DNA, 20 bp, Artificial Sequence
  Description of Artificial Sequence: Synthetic oligonucleotide
  Target: LAMA2; (+) strand; PAM type: YTN; PAM sequence: TTA
gctttgagaccagagcacaa

SEQ ID NO: 392607 - DNA, 20 bp, Artificial Sequence
  Description of Artificial Sequence: Synthetic oligonucleotide
  Target: LAMA2; (+) strand; PAM type: YTN; PAM sequence: CTT
tgagaccagagcacaagaga

SEQ ID NO: 392608 - DNA, 20 bp, Artificial Sequence
  Description of Artificial Sequence: Synthetic oligonucleotide
  Target: LAMA2; (+) strand; PAM type: YTN; PAM sequence: TTT
gagaccagagcacaagagaa

SEQ ID NO: 392609 - DNA, 20 bp, Artificial Sequence
  Description of Artificial Sequence: Synthetic oligonucleotide
  Target: LAMA2; (+) strand; PAM type: YTN; PAM sequence: TTG
agaccagagcacaagagaaa

SEQ ID NO: 392610 - DNA, 20 bp, Artificial Sequence
  Description of Artificial Sequence: Synthetic oligonucleotide
  Target: LAMA2; (+) strand; PAM type: YTN; PAM sequence: CTC
tgtctctcatttttcccttc

SEQ ID NO: 392611 - DNA, 20 bp, Artificial Sequence
  Description of Artificial Sequence: Synthetic oligonucleotide
  Target: LAMA2; (+) strand; PAM type: YTN; PAM sequence: CTG
tctctcatttttcccttcct

SEQ ID NO: 392612 - DNA, 20 bp, Artificial Sequence
  Description of Artificial Sequence: Synthetic oligonucleotide
  Target: LAMA2; (+) strand; PAM type: YTN; PAM sequence: CTC
tcatttttcccttcctctat

SEQ ID NO: 392613 - DNA, 20 bp, Artificial Sequence
  Description of Artificial Sequence: Synthetic oligonucleotide
  Target: LAMA2; (+) strand; PAM type: YTN; PAM sequence: CTC
atttttcccttcctctatac

SEQ ID NO: 392614 - DNA, 20 bp, Artificial Sequence
  Description of Artificial Sequence: Synthetic oligonucleotide
  Target: LAMA2; (+) strand; PAM type: YTN; PAM sequence: TTT
ttcccttcctctatactgcc

SEQ ID NO: 392615 - DNA, 20 bp, Artificial Sequence
  Description of Artificial Sequence: Synthetic oligonucleotide
  Target: LAMA2; (+) strand; PAM type: YTN; PAM sequence: TTT
tcccttcctctatactgcct

SEQ ID NO: 392616 - DNA, 20 bp, Artificial Sequence
  Description of Artificial Sequence: Synthetic oligonucleotide
  Target: LAMA2; (+) strand; PAM type: YTN; PAM sequence: TTT
cccttcctctatactgccta

SEQ ID NO: 392617 - DNA, 20 bp, Artificial Sequence
  Description of Artificial Sequence: Synthetic oligonucleotide
  Target: LAMA2; (+) strand; PAM type: YTN; PAM sequence: TTC
ccttcctctatactgcctag

SEQ ID NO: 392618 - DNA, 20 bp, Artificial Sequence
  Description of Artificial Sequence: Synthetic oligonucleotide
  Target: LAMA2; (+) strand; PAM type: YTN; PAM sequence: CTT
cctctatactgcctaggccc

SEQ ID NO: 392619 - DNA, 20 bp, Artificial Sequence
  Description of Artificial Sequence: Synthetic oligonucleotide
  Target: LAMA2; (+) strand; PAM type: YTN; PAM sequence: TTC
ctctatactgcctaggccca

SEQ ID NO: 392620 - DNA, 20 bp, Artificial Sequence
  Description of Artificial Sequence: Synthetic oligonucleotide
  Target: LAMA2; (+) strand; PAM type: YTN; PAM sequence: CTC
tatactgcctaggcccagaa

SEQ ID NO: 392621 - DNA, 20 bp, Artificial Sequence
  Description of Artificial Sequence: Synthetic oligonucleotide
  Target: LAMA2; (+) strand; PAM type: YTN; PAM sequence: CTA
tactgcctaggcccagaatc

SEQ ID NO: 392622 - DNA, 20 bp, Artificial Sequence
  Description of Artificial Sequence: Synthetic oligonucleotide
  Target: LAMA2; (+) strand; PAM type: YTN; PAM sequence: CTG
cctaggcccagaatctaaat

SEQ ID NO: 392623 - DNA, 20 bp, Artificial Sequence
  Description of Artificial Sequence: Synthetic oligonucleotide
  Target: LAMA2; (+) strand; PAM type: YTN; PAM sequence: CTA
ggcccagaatctaaattaga

SEQ ID NO: 392624 - DNA, 20 bp, Artificial Sequence
  Description of Artificial Sequence: Synthetic oligonucleotide
  Target: LAMA2; (+) strand; PAM type: YTN; PAM sequence: CTA
aattagatcaaatttcaaaa

SEQ ID NO: 392625 - DNA, 20 bp, Artificial Sequence
  Description of Artificial Sequence: Synthetic oligonucleotide
  Target: LAMA2; (+) strand; PAM type: YTN; PAM sequence: TTA
gatcaaatttcaaaagatat

SEQ ID NO: 392626 - DNA, 20 bp, Artificial Sequence
  Description of Artificial Sequence: Synthetic oligonucleotide
  Target: LAMA2; (+) strand; PAM type: YTN; PAM sequence: TTT
caaaagatatttcttatgaa

SEQ ID NO: 392627 - DNA, 20 bp, Artificial Sequence
  Description of Artificial Sequence: Synthetic oligonucleotide
  Target: LAMA2; (+) strand; PAM type: YTN; PAM sequence: TTC
aaaagatatttcttatgaaa

SEQ ID NO: 392628 - DNA, 20 bp, Artificial Sequence
  Description of Artificial Sequence: Synthetic oligonucleotide
  Target: LAMA2; (+) strand; PAM type: YTN; PAM sequence: TTT
cttatgaaagctgatttata

SEQ ID NO: 392629 - DNA, 20 bp, Artificial Sequence
  Description of Artificial Sequence: Synthetic oligonucleotide
  Target: LAMA2; (+) strand; PAM type: YTN; PAM sequence: TTC
ttatgaaagctgatttatac

SEQ ID NO: 392630 - DNA, 20 bp, Artificial Sequence
  Description of Artificial Sequence: Synthetic oligonucleotide
  Target: LAMA2; (+) strand; PAM type: YTN; PAM sequence: CTT
atgaaagctgatttatacac

SEQ ID NO: 392631 - DNA, 20 bp, Artificial Sequence
  Description of Artificial Sequence: Synthetic oligonucleotide
  Target: LAMA2; (+) strand; PAM type: YTN; PAM sequence: TTA
tgaaagctgatttatacacg

SEQ ID NO: 392632 - DNA, 20 bp, Artificial Sequence
  Description of Artificial Sequence: Synthetic oligonucleotide
  Target: LAMA2; (+) strand; PAM type: YTN; PAM sequence: CTG
atttatacacgcacacacac

SEQ ID NO: 392633 - DNA, 20 bp, Artificial Sequence
  Description of Artificial Sequence: Synthetic oligonucleotide
  Target: LAMA2; (+) strand; PAM type: YTN; PAM sequence: TTT
atacacgcacacacacacac

SEQ ID NO: 392634 - DNA, 20 bp, Artificial Sequence
  Description of Artificial Sequence: Synthetic oligonucleotide
  Target: LAMA2; (+) strand; PAM type: YTN; PAM sequence: TTA
tacacgcacacacacacacg

SEQ ID NO: 392635 - DNA, 20 bp, Artificial Sequence
  Description of Artificial Sequence: Synthetic oligonucleotide
  Target: LAMA2; (+) strand; PAM type: YTN; PAM sequence: TTC
atttaacaaagaaaaaacat

SEQ ID NO: 392636 - DNA, 20 bp, Artificial Sequence
  Description of Artificial Sequence: Synthetic oligonucleotide
  Target: LAMA2; (+) strand; PAM type: YTN; PAM sequence: TTT
aacaaagaaaaaacatacag

SEQ ID NO: 392637 - DNA, 20 bp, Artificial Sequence
  Description of Artificial Sequence: Synthetic oligonucleotide
  Target: LAMA2; (+) strand; PAM type: YTN; PAM sequence: TTA
acaaagaaaaaacatacagc

SEQ ID NO: 392638 - DNA, 20 bp, Artificial Sequence
  Description of Artificial Sequence: Synthetic oligonucleotide
  Target: LAMA2; (+) strand; PAM type: YTN; PAM sequence: CTT
tagcaggttgggaagtggca

SEQ ID NO: 392639 - DNA, 20 bp, Artificial Sequence
  Description of Artificial Sequence: Synthetic oligonucleotide
  Target: LAMA2; (+) strand; PAM type: YTN; PAM sequence: TTT
agcaggttgggaagtggcat

SEQ ID NO: 392640 - DNA, 20 bp, Artificial Sequence
  Description of Artificial Sequence: Synthetic oligonucleotide
  Target: LAMA2; (+) strand; PAM type: YTN; PAM sequence: TTA
gcaggttgggaagtggcatt

SEQ ID NO: 392641 - DNA, 20 bp, Artificial Sequence
  Description of Artificial Sequence: Synthetic oligonucleotide
  Target: LAMA2; (+) strand; PAM type: YTN; PAM sequence: TTG
ggaagtggcatttattaata

SEQ ID NO: 392642 - DNA, 20 bp, Artificial Sequence
  Description of Artificial Sequence: Synthetic oligonucleotide
  Target: LAMA2; (+) strand; PAM type: YTN; PAM sequence: TTT
attaatatcatcttcatttt

SEQ ID NO: 392643 - DNA, 20 bp, Artificial Sequence
  Description of Artificial Sequence: Synthetic oligonucleotide
  Target: LAMA2; (+) strand; PAM type: YTN; PAM sequence: TTA
ttaatatcatcttcatttta

SEQ ID NO: 392644 - DNA, 20 bp, Artificial Sequence
  Description of Artificial Sequence: Synthetic oligonucleotide
  Target: LAMA2; (+) strand; PAM type: YTN; PAM sequence: TTA
atatcatcttcattttaaaa

SEQ ID NO: 392645 - DNA, 20 bp, Artificial Sequence
  Description of Artificial Sequence: Synthetic oligonucleotide
  Target: LAMA2; (+) strand; PAM type: YTN; PAM sequence: CTT
cattttaaaaagtgagtaca

SEQ ID NO: 392646 - DNA, 20 bp, Artificial Sequence
  Description of Artificial Sequence: Synthetic oligonucleotide
  Target: LAMA2; (+) strand; PAM type: YTN; PAM sequence: TTC
attttaaaaagtgagtacaa

SEQ ID NO: 392647 - DNA, 20 bp, Artificial Sequence
  Description of Artificial Sequence: Synthetic oligonucleotide
  Target: LAMA2; (+) strand; PAM type: YTN; PAM sequence: TTT
taaaaagtgagtacaaatta

SEQ ID NO: 392648 - DNA, 20 bp, Artificial Sequence
  Description of Artificial Sequence: Synthetic oligonucleotide
  Target: LAMA2; (+) strand; PAM type: YTN; PAM sequence: TTT
aaaaagtgagtacaaattat

SEQ ID NO: 392649 - DNA, 20 bp, Artificial Sequence
  Description of Artificial Sequence: Synthetic oligonucleotide
  Target: LAMA2; (+) strand; PAM type: YTN; PAM sequence: TTA
aaaagtgagtacaaattata

SEQ ID NO: 392650 - DNA, 20 bp, Artificial Sequence
  Description of Artificial Sequence: Synthetic oligonucleotide
  Target: LAMA2; (+) strand; PAM type: YTN; PAM sequence: TTA
tatcagtagttacttacatg

SEQ ID NO: 392651 - DNA, 20 bp, Artificial Sequence
  Description of Artificial Sequence: Synthetic oligonucleotide
  Target: LAMA2; (+) strand; PAM type: YTN; PAM sequence: TTA
cttacatgctacaattggtt

SEQ ID NO: 392652 - DNA, 20 bp, Artificial Sequence
  Description of Artificial Sequence: Synthetic oligonucleotide
  Target: LAMA2; (+) strand; PAM type: YTN; PAM sequence: CTT
acatgctacaattggttaaa

SEQ ID NO: 392653 - DNA, 20 bp, Artificial Sequence
  Description of Artificial Sequence: Synthetic oligonucleotide
  Target: LAMA2; (+) strand; PAM type: YTN; PAM sequence: TTA
catgctacaattggttaaag

SEQ ID NO: 392654 - DNA, 20 bp, Artificial Sequence
  Description of Artificial Sequence: Synthetic oligonucleotide
  Target: LAMA2; (+) strand; PAM type: YTN; PAM sequence: CTA
caattggttaaagtcagcta

SEQ ID NO: 392655 - DNA, 20 bp, Artificial Sequence
  Description of Artificial Sequence: Synthetic oligonucleotide
  Target: LAMA2; (+) strand; PAM type: YTN; PAM sequence: TTG
gttaaagtcagctatacaga

SEQ ID NO: 392656 - DNA, 20 bp, Artificial Sequence
  Description of Artificial Sequence: Synthetic oligonucleotide
  Target: LAMA2; (+) strand; PAM type: YTN; PAM sequence: TTA
aagtcagctatacagatagc

SEQ ID NO: 392657 - DNA, 20 bp, Artificial Sequence
  Description of Artificial Sequence: Synthetic oligonucleotide
  Target: LAMA2; (+) strand; PAM type: YTN; PAM sequence: CTA
tacagatagcatgcactcag

SEQ ID NO: 392658 - DNA, 20 bp, Artificial Sequence
  Description of Artificial Sequence: Synthetic oligonucleotide
  Target: LAMA2; (+) strand; PAM type: YTN; PAM sequence: CTC
agactaaaggatgagatagt

SEQ ID NO: 392659 - DNA, 20 bp, Artificial Sequence
  Description of Artificial Sequence: Synthetic oligonucleotide
  Target: LAMA2; (+) strand; PAM type: YTN; PAM sequence: CTA
aaggatgagatagtaccata

SEQ ID NO: 392660 - DNA, 20 bp, Artificial Sequence
  Description of Artificial Sequence: Synthetic oligonucleotide
  Target: LAMA2; (+) strand; PAM type: YTN; PAM sequence: CTG
ctactgctttcttgaaatct

SEQ ID NO: 392661 - DNA, 20 bp, Artificial Sequence
  Description of Artificial Sequence: Synthetic oligonucleotide
  Target: LAMA2; (+) strand; PAM type: YTN; PAM sequence: CTA
ctgctttcttgaaatctaag

SEQ ID NO: 392662 - DNA, 20 bp, Artificial Sequence
  Description of Artificial Sequence: Synthetic oligonucleotide
  Target: LAMA2; (+) strand; PAM type: YTN; PAM sequence: CTG
ctttcttgaaatctaagaag

SEQ ID NO: 392663 - DNA, 20 bp, Artificial Sequence
  Description of Artificial Sequence: Synthetic oligonucleotide
  Target: LAMA2; (+) strand; PAM type: YTN; PAM sequence: CTT
tcttgaaatctaagaagcag

SEQ ID NO: 392664 - DNA, 20 bp, Artificial Sequence
  Description of Artificial Sequence: Synthetic oligonucleotide
  Target: LAMA2; (+) strand; PAM type: YTN; PAM sequence: TTT
cttgaaatctaagaagcaga

SEQ ID NO: 392665 - DNA, 20 bp, Artificial Sequence
  Description of Artificial Sequence: Synthetic oligonucleotide
  Target: LAMA2; (+) strand; PAM type: YTN; PAM sequence: TTC
ttgaaatctaagaagcagaa

SEQ ID NO: 392666 - DNA, 20 bp, Artificial Sequence
  Description of Artificial Sequence: Synthetic oligonucleotide
  Target: LAMA2; (+) strand; PAM type: YTN; PAM sequence: CTT
gaaatctaagaagcagaaag

SEQ ID NO: 392667 - DNA, 20 bp, Artificial Sequence
  Description of Artificial Sequence: Synthetic oligonucleotide
  Target: LAMA2; (+) strand; PAM type: YTN; PAM sequence: TTG
aaatctaagaagcagaaagc

SEQ ID NO: 392668 - DNA, 20 bp, Artificial Sequence
  Description of Artificial Sequence: Synthetic oligonucleotide
  Target: LAMA2; (+) strand; PAM type: YTN; PAM sequence: CTA
agaagcagaaagcttcttac

SEQ ID NO: 392669 - DNA, 20 bp, Artificial Sequence
  Description of Artificial Sequence: Synthetic oligonucleotide
  Target: LAMA2; (+) strand; PAM type: YTN; PAM sequence: CTT
cttacatttaatcattggta

SEQ ID NO: 392670 - DNA, 20 bp, Artificial Sequence
  Description of Artificial Sequence: Synthetic oligonucleotide
  Target: LAMA2; (+) strand; PAM type: YTN; PAM sequence: TTC
ttacatttaatcattggtac

SEQ ID NO: 392671 - DNA, 20 bp, Artificial Sequence
  Description of Artificial Sequence: Synthetic oligonucleotide
  Target: LAMA2; (+) strand; PAM type: YTN; PAM sequence: CTT
acatttaatcattggtactc

SEQ ID NO: 392672 - DNA, 20 bp, Artificial Sequence
  Description of Artificial Sequence: Synthetic oligonucleotide
  Target: LAMA2; (+) strand; PAM type: YTN; PAM sequence: TTA
catttaatcattggtactct

SEQ ID NO: 392673 - DNA, 20 bp, Artificial Sequence
  Description of Artificial Sequence: Synthetic oligonucleotide
  Target: LAMA2; (+) strand; PAM type: YTN; PAM sequence: TTT
aatcattggtactctggaag

SEQ ID NO: 392674 - DNA, 20 bp, Artificial Sequence
  Description of Artificial Sequence: Synthetic oligonucleotide
  Target: LAMA2; (+) strand; PAM type: YTN; PAM sequence: TTA
atcattggtactctggaagg

SEQ ID NO: 392675 - DNA, 20 bp, Artificial Sequence
  Description of Artificial Sequence: Synthetic oligonucleotide
  Target: LAMA2; (+) strand; PAM type: YTN; PAM sequence: TTG
gtactctggaaggcttccca

SEQ ID NO: 392676 - DNA, 20 bp, Artificial Sequence
  Description of Artificial Sequence: Synthetic oligonucleotide
  Target: LAMA2; (+) strand; PAM type: YTN; PAM sequence: CTC
tggaaggcttcccacctagt

SEQ ID NO: 392677 - DNA, 20 bp, Artificial Sequence
  Description of Artificial Sequence: Synthetic oligonucleotide
  Target: LAMA2; (+) strand; PAM type: YTN; PAM sequence: CTG
gaaggcttcccacctagttt

SEQ ID NO: 392678 - DNA, 20 bp, Artificial Sequence
  Description of Artificial Sequence: Synthetic oligonucleotide
  Target: LAMA2; (+) strand; PAM type: YTN; PAM sequence: CTT
cccacctagtttgctggacc

SEQ ID NO: 392679 - DNA, 20 bp, Artificial Sequence
  Description of Artificial Sequence: Synthetic oligonucleotide
  Target: LAMA2; (+) strand; PAM type: YTN; PAM sequence: TTC
ccacctagtttgctggacca

SEQ ID NO: 392680 - DNA, 20 bp, Artificial Sequence
  Description of Artificial Sequence: Synthetic oligonucleotide
  Target: LAMA2; (+) strand; PAM type: YTN; PAM sequence: CTA
gtttgctggaccagggagct

SEQ ID NO: 392681 - DNA, 20 bp, Artificial Sequence
  Description of Artificial Sequence: Synthetic oligonucleotide
  Target: LAMA2; (+) strand; PAM type: YTN; PAM sequence: TTT
gctggaccagggagctttca

SEQ ID NO: 392682 - DNA, 20 bp, Artificial Sequence
  Description of Artificial Sequence: Synthetic oligonucleotide
  Target: LAMA2; (+) strand; PAM type: YTN; PAM sequence: TTG
ctggaccagggagctttcaa

SEQ ID NO: 392683 - DNA, 20 bp, Artificial Sequence
  Description of Artificial Sequence: Synthetic oligonucleotide
  Target: LAMA2; (+) strand; PAM type: YTN; PAM sequence: CTG
gaccagggagctttcaaact

SEQ ID NO: 392684 - DNA, 20 bp, Artificial Sequence
  Description of Artificial Sequence: Synthetic oligonucleotide
  Target: LAMA2; (+) strand; PAM type: YTN; PAM sequence: CTT
tcaaactaatcagcctatgg

SEQ ID NO: 392685 - DNA, 20 bp, Artificial Sequence
  Description of Artificial Sequence: Synthetic oligonucleotide
  Target: LAMA2; (+) strand; PAM type: YTN; PAM sequence: TTT
caaactaatcagcctatggt

SEQ ID NO: 392686 - DNA, 20 bp, Artificial Sequence
  Description of Artificial Sequence: Synthetic oligonucleotide
  Target: LAMA2; (+) strand; PAM type: YTN; PAM sequence: TTC
aaactaatcagcctatggtt

SEQ ID NO: 392687 - DNA, 20 bp, Artificial Sequence
  Description of Artificial Sequence: Synthetic oligonucleotide
  Target: LAMA2; (+) strand; PAM type: YTN; PAM sequence: CTA
atcagcctatggttactgtg

SEQ ID NO: 392688 - DNA, 20 bp, Artificial Sequence
  Description of Artificial Sequence: Synthetic oligonucleotide
  Target: LAMA2; (+) strand; PAM type: YTN; PAM sequence: CTA
tggttactgtgattctgtaa

SEQ ID NO: 392689 - DNA, 20 bp, Artificial Sequence
  Description of Artificial Sequence: Synthetic oligonucleotide
  Target: LAMA2; (+) strand; PAM type: YTN; PAM sequence: TTA
ctgtgattctgtaacaaaat

SEQ ID NO: 392690 - DNA, 20 bp, Artificial Sequence
  Description of Artificial Sequence: Synthetic oligonucleotide
  Target: LAMA2; (+) strand; PAM type: YTN; PAM sequence: CTG
tgattctgtaacaaaattga

SEQ ID NO: 392691 - DNA, 20 bp, Artificial Sequence
  Description of Artificial Sequence: Synthetic oligonucleotide
  Target: LAMA2; (+) strand; PAM type: YTN; PAM sequence: TTC
tgtaacaaaattgagacaca

SEQ ID NO: 392692 - DNA, 20 bp, Artificial Sequence
  Description of Artificial Sequence: Synthetic oligonucleotide
  Target: LAMA2; (+) strand; PAM type: YTN; PAM sequence: CTG
taacaaaattgagacacagc

SEQ ID NO: 392693 - DNA, 20 bp, Artificial Sequence
  Description of Artificial Sequence: Synthetic oligonucleotide
  Target: LAMA2; (+) strand; PAM type: YTN; PAM sequence: TTG
agacacagcctaggtgatgt

SEQ ID NO: 392694 - DNA, 20 bp, Artificial Sequence
  Description of Artificial Sequence: Synthetic oligonucleotide
  Target: LAMA2; (+) strand; PAM type: YTN; PAM sequence: CTA
ggtgatgtatcttactgaca

SEQ ID NO: 392695 - DNA, 20 bp, Artificial Sequence
  Description of Artificial Sequence: Synthetic oligonucleotide
  Target: LAMA2; (+) strand; PAM type: YTN; PAM sequence: CTT
actgacaatagtggtgaaat

SEQ ID NO: 392696 - DNA, 20 bp, Artificial Sequence
  Description of Artificial Sequence: Synthetic oligonucleotide
  Target: LAMA2; (+) strand; PAM type: YTN; PAM sequence: TTA
ctgacaatagtggtgaaata

SEQ ID NO: 392697 - DNA, 20 bp, Artificial Sequence
  Description of Artificial Sequence: Synthetic oligonucleotide
  Target: LAMA2; (+) strand; PAM type: YTN; PAM sequence: CTG
acaatagtggtgaaatattg

SEQ ID NO: 392698 - DNA, 20 bp, Artificial Sequence
  Description of Artificial Sequence: Synthetic oligonucleotide
  Target: LAMA2; (+) strand; PAM type: YTN; PAM sequence: TTG
ggaggattctttggcatatg

SEQ ID NO: 392699 - DNA, 20 bp, Artificial Sequence
  Description of Artificial Sequence: Synthetic oligonucleotide
  Target: LAMA2; (+) strand; PAM type: YTN; PAM sequence: TTC
tttggcatatgtcaaggtat

SEQ ID NO: 392700 - DNA, 20 bp, Artificial Sequence
  Description of Artificial Sequence: Synthetic oligonucleotide
  Target: LAMA2; (+) strand; PAM type: YTN; PAM sequence: CTT
tggcatatgtcaaggtataa

SEQ ID NO: 392701 - DNA, 20 bp, Artificial Sequence
  Description of Artificial Sequence: Synthetic oligonucleotide
  Target: LAMA2; (+) strand; PAM type: YTN; PAM sequence: TTT
ggcatatgtcaaggtataac

SEQ ID NO: 392702 - DNA, 20 bp, Artificial Sequence
  Description of Artificial Sequence: Synthetic oligonucleotide
  Target: LAMA2; (+) strand; PAM type: YTN; PAM sequence: TTG
gcatatgtcaaggtataact

SEQ ID NO: 392703 - DNA, 20 bp, Artificial Sequence
  Description of Artificial Sequence: Synthetic oligonucleotide
  Target: LAMA2; (+) strand; PAM type: YTN; PAM sequence: CTG
ttaggcagtgggtcaagaaa

SEQ ID NO: 392704 - DNA, 20 bp, Artificial Sequence
  Description of Artificial Sequence: Synthetic oligonucleotide
  Target: LAMA2; (+) strand; PAM type: YTN; PAM sequence: TTA
ggcagtgggtcaagaaagag

SEQ ID NO: 392705 - DNA, 20 bp, Artificial Sequence
  Description of Artificial Sequence: Synthetic oligonucleotide
  Target: LAMA2; (+) strand; PAM type: YTN; PAM sequence: CTC
actaacttctaggaatacag

SEQ ID NO: 392706 - DNA, 20 bp, Artificial Sequence
  Description of Artificial Sequence: Synthetic oligonucleotide
  Target: LAMA2; (+) strand; PAM type: YTN; PAM sequence: CTA
acttctaggaatacagcacc

SEQ ID NO: 392707 - DNA, 20 bp, Artificial Sequence
  Description of Artificial Sequence: Synthetic oligonucleotide
  Target: LAMA2; (+) strand; PAM type: YTN; PAM sequence: CTT
ctaggaatacagcacctgac

SEQ ID NO: 392708 - DNA, 20 bp, Artificial Sequence
  Description of Artificial Sequence: Synthetic oligonucleotide
  Target: LAMA2; (+) strand; PAM type: YTN; PAM sequence: TTC
taggaatacagcacctgaca

SEQ ID NO: 392709 - DNA, 20 bp, Artificial Sequence
  Description of Artificial Sequence: Synthetic oligonucleotide
  Target: LAMA2; (+) strand; PAM type: YTN; PAM sequence: CTA
ggaatacagcacctgacaat

SEQ ID NO: 392710 - DNA, 20 bp, Artificial Sequence
  Description of Artificial Sequence: Synthetic oligonucleotide
  Target: LAMA2; (+) strand; PAM type: YTN; PAM sequence: CTG
acaataacttctaccacagg

SEQ ID NO: 392711 - DNA, 20 bp, Artificial Sequence
  Description of Artificial Sequence: Synthetic oligonucleotide
  Target: LAMA2; (+) strand; PAM type: YTN; PAM sequence: CTT
ctaccacagggctaggaatg

SEQ ID NO: 392712 - DNA, 20 bp, Artificial Sequence
  Description of Artificial Sequence: Synthetic oligonucleotide
  Target: LAMA2; (+) strand; PAM type: YTN; PAM sequence: TTC
taccacagggctaggaatgg

SEQ ID NO: 392713 - DNA, 20 bp, Artificial Sequence
  Description of Artificial Sequence: Synthetic oligonucleotide
  Target: LAMA2; (+) strand; PAM type: YTN; PAM sequence: CTA
ccacagggctaggaatggcc

SEQ ID NO: 392714 - DNA, 20 bp, Artificial Sequence
  Description of Artificial Sequence: Synthetic oligonucleotide
  Target: LAMA2; (+) strand; PAM type: YTN; PAM sequence: CTA
ggaatggccatatttgttct

SEQ ID NO: 392715 - DNA, 20 bp, Artificial Sequence
  Description of Artificial Sequence: Synthetic oligonucleotide
  Target: LAMA2; (+) strand; PAM type: YTN; PAM sequence: TTT
gttctttaagacatgtgatt

SEQ ID NO: 392716 - DNA, 20 bp, Artificial Sequence
  Description of Artificial Sequence: Synthetic oligonucleotide
  Target: LAMA2; (+) strand; PAM type: YTN; PAM sequence: TTG
ttctttaagacatgtgattc

SEQ ID NO: 392717 - DNA, 20 bp, Artificial Sequence
  Description of Artificial Sequence: Synthetic oligonucleotide
  Target: LAMA2; (+) strand; PAM type: YTN; PAM sequence: TTC
tttaagacatgtgattcaaa

SEQ ID NO: 392718 - DNA, 20 bp, Artificial Sequence
  Description of Artificial Sequence: Synthetic oligonucleotide
  Target: LAMA2; (+) strand; PAM type: YTN; PAM sequence: CTT
taagacatgtgattcaaata

SEQ ID NO: 392719 - DNA, 20 bp, Artificial Sequence
  Description of Artificial Sequence: Synthetic oligonucleotide
  Target: LAMA2; (+) strand; PAM type: YTN; PAM sequence: TTT
aagacatgtgattcaaatat

SEQ ID NO: 392720 - DNA, 20 bp, Artificial Sequence
  Description of Artificial Sequence: Synthetic oligonucleotide
  Target: LAMA2; (+) strand; PAM type: YTN; PAM sequence: TTA
agacatgtgattcaaatatt

SEQ ID NO: 392721 - DNA, 20 bp, Artificial Sequence
  Description of Artificial Sequence: Synthetic oligonucleotide
  Target: LAMA2; (+) strand; PAM type: YTN; PAM sequence: TTC
aaatatttctgctaattaaa

SEQ ID NO: 392722 - DNA, 20 bp, Artificial Sequence
  Description of Artificial Sequence: Synthetic oligonucleotide
  Target: LAMA2; (+) strand; PAM type: YTN; PAM sequence: TTT
ctgctaattaaaccatggct

SEQ ID NO: 392723 - DNA, 20 bp, Artificial Sequence
  Description of Artificial Sequence: Synthetic oligonucleotide
  Target: LAMA2; (+) strand; PAM type: YTN; PAM sequence: TTC
tgctaattaaaccatggctg

SEQ ID NO: 392724 - DNA, 20 bp, Artificial Sequence
  Description of Artificial Sequence: Synthetic oligonucleotide
  Target: LAMA2; (+) strand; PAM type: YTN; PAM sequence: CTG
ctaattaaaccatggctgtc

SEQ ID NO: 392725 - DNA, 20 bp, Artificial Sequence
  Description of Artificial Sequence: Synthetic oligonucleotide
  Target: LAMA2; (+) strand; PAM type: YTN; PAM sequence: CTA
attaaaccatggctgtctta

SEQ ID NO: 392726 - DNA, 20 bp, Artificial Sequence
  Description of Artificial Sequence: Synthetic oligonucleotide
  Target: LAMA2; (+) strand; PAM type: YTN; PAM sequence: TTA
aaccatggctgtcttagccc

SEQ ID NO: 392727 - DNA, 20 bp, Artificial Sequence
  Description of Artificial Sequence: Synthetic oligonucleotide
  Target: LAMA2; (+) strand; PAM type: YTN; PAM sequence: CTG
tcttagcccatttgggctgc

SEQ ID NO: 392728 - DNA, 20 bp, Artificial Sequence
  Description of Artificial Sequence: Synthetic oligonucleotide
  Target: LAMA2; (+) strand; PAM type: YTN; PAM sequence: CTT
agcccatttgggctgctata

SEQ ID NO: 392729 - DNA, 20 bp, Artificial Sequence
  Description of Artificial Sequence: Synthetic oligonucleotide
  Target: LAMA2; (+) strand; PAM type: YTN; PAM sequence: TTA
gcccatttgggctgctataa

SEQ ID NO: 392730 - DNA, 20 bp, Artificial Sequence
  Description of Artificial Sequence: Synthetic oligonucleotide
  Target: LAMA2; (+) strand; PAM type: YTN; PAM sequence: TTT
gggctgctataatgaaaata

SEQ ID NO: 392731 - DNA, 20 bp, Artificial Sequence
  Description of Artificial Sequence: Synthetic oligonucleotide
  Target: LAMA2; (+) strand; PAM type: YTN; PAM sequence: TTG
ggctgctataatgaaaatat

SEQ ID NO: 392732 - DNA, 20 bp, Artificial Sequence
  Description of Artificial Sequence: Synthetic oligonucleotide
  Target: LAMA2; (+) strand; PAM type: YTN; PAM sequence: CTG
ctataatgaaaatatcatag

SEQ ID NO: 392733 - DNA, 20 bp, Artificial Sequence
  Description of Artificial Sequence: Synthetic oligonucleotide
  Target: LAMA2; (+) strand; PAM type: YTN; PAM sequence: CTA
taatgaaaatatcatagatt

SEQ ID NO: 392734 - DNA, 20 bp, Artificial Sequence
  Description of Artificial Sequence: Synthetic oligonucleotide
  Target: LAMA2; (+) strand; PAM type: YTN; PAM sequence: TTT
tgtgccttataactgaaatg

SEQ ID NO: 392735 - DNA, 20 bp, Artificial Sequence
  Description of Artificial Sequence: Synthetic oligonucleotide
  Target: LAMA2; (+) strand; PAM type: YTN; PAM sequence: TTT
gtgccttataactgaaatgc

SEQ ID NO: 392736 - DNA, 20 bp, Artificial Sequence
  Description of Artificial Sequence: Synthetic oligonucleotide
  Target: LAMA2; (+) strand; PAM type: YTN; PAM sequence: TTG
tgccttataactgaaatgca

SEQ ID NO: 392737 - DNA, 20 bp, Artificial Sequence
  Description of Artificial Sequence: Synthetic oligonucleotide
  Target: LAMA2; (+) strand; PAM type: YTN; PAM sequence: CTT
ataactgaaatgcatttctc

SEQ ID NO: 392738 - DNA, 20 bp, Artificial Sequence
  Description of Artificial Sequence: Synthetic oligonucleotide
  Target: LAMA2; (+) strand; PAM type: YTN; PAM sequence: TTA
taactgaaatgcatttctca

SEQ ID NO: 392739 - DNA, 20 bp, Artificial Sequence
  Description of Artificial Sequence: Synthetic oligonucleotide
  Target: LAMA2; (+) strand; PAM type: YTN; PAM sequence: CTG
aaatgcatttctcatttgtg

SEQ ID NO: 392740 - DNA, 20 bp, Artificial Sequence
  Description of Artificial Sequence: Synthetic oligonucleotide
  Target: LAMA2; (+) strand; PAM type: YTN; PAM sequence: TTT
ctcatttgtgaaggctgaga

SEQ ID NO: 392741 - DNA, 20 bp, Artificial Sequence
  Description of Artificial Sequence: Synthetic oligonucleotide
  Target: LAMA2; (+) strand; PAM type: YTN; PAM sequence: TTC
tcatttgtgaaggctgagag

SEQ ID NO: 392742 - DNA, 20 bp, Artificial Sequence
  Description of Artificial Sequence: Synthetic oligonucleotide
  Target: LAMA2; (+) strand; PAM type: YTN; PAM sequence: CTC
atttgtgaaggctgagaggt

SEQ ID NO: 392743 - DNA, 20 bp, Artificial Sequence
  Description of Artificial Sequence: Synthetic oligonucleotide
  Target: LAMA2; (+) strand; PAM type: YTN; PAM sequence: TTT
gtgaaggctgagaggtccaa

SEQ ID NO: 392744 - DNA, 20 bp, Artificial Sequence
  Description of Artificial Sequence: Synthetic oligonucleotide
  Target: LAMA2; (+) strand; PAM type: YTN; PAM sequence: TTG
tgaaggctgagaggtccaag

SEQ ID NO: 392745 - DNA, 20 bp, Artificial Sequence
  Description of Artificial Sequence: Synthetic oligonucleotide
  Target: LAMA2; (+) strand; PAM type: YTN; PAM sequence: CTG
agaggtccaagatcaaggtg

SEQ ID NO: 392746 - DNA, 20 bp, Artificial Sequence
  Description of Artificial Sequence: Synthetic oligonucleotide
  Target: LAMA2; (+) strand; PAM type: YTN; PAM sequence: CTG
gctggtttggtgcctggtaa

SEQ ID NO: 392747 - DNA, 20 bp, Artificial Sequence
  Description of Artificial Sequence: Synthetic oligonucleotide
  Target: LAMA2; (+) strand; PAM type: YTN; PAM sequence: CTG
gtttggtgcctggtaaggag

SEQ ID NO: 392748 - DNA, 20 bp, Artificial Sequence
  Description of Artificial Sequence: Synthetic oligonucleotide
  Target: LAMA2; (+) strand; PAM type: YTN; PAM sequence: TTT
ggtgcctggtaaggagctgc

SEQ ID NO: 392749 - DNA, 20 bp, Artificial Sequence
  Description of Artificial Sequence: Synthetic oligonucleotide
  Target: LAMA2; (+) strand; PAM type: YTN; PAM sequence: TTG
gtgcctggtaaggagctgct

SEQ ID NO: 392750 - DNA, 20 bp, Artificial Sequence
  Description of Artificial Sequence: Synthetic oligonucleotide
  Target: LAMA2; (+) strand; PAM type: YTN; PAM sequence: CTG
gtaaggagctgcttcctggt

SEQ ID NO: 392751 - DNA, 20 bp, Artificial Sequence
  Description of Artificial Sequence: Synthetic oligonucleotide
  Target: LAMA2; (+) strand; PAM type: YTN; PAM sequence: CTG
cttcctggttcagagatggc

SEQ ID NO: 392752 - DNA, 20 bp, Artificial Sequence
  Description of Artificial Sequence: Synthetic oligonucleotide
  Target: LAMA2; (+) strand; PAM type: YTN; PAM sequence: CTT
cctggttcagagatggctgt

SEQ ID NO: 392753 - DNA, 20 bp, Artificial Sequence
  Description of Artificial Sequence: Synthetic oligonucleotide
  Target: LAMA2; (+) strand; PAM type: YTN; PAM sequence: TTC
ctggttcagagatggctgtc

SEQ ID NO: 392754 - DNA, 20 bp, Artificial Sequence
  Description of Artificial Sequence: Synthetic oligonucleotide
  Target: LAMA2; (+) strand; PAM type: YTN; PAM sequence: CTG
gttcagagatggctgtctcc

SEQ ID NO: 392755 - DNA, 20 bp, Artificial Sequence
  Description of Artificial Sequence: Synthetic oligonucleotide
  Target: LAMA2; (+) strand; PAM type: YTN; PAM sequence: TTC
agagatggctgtctccttgt

SEQ ID NO: 392756 - DNA, 20 bp, Artificial Sequence
  Description of Artificial Sequence: Synthetic oligonucleotide
  Target: LAMA2; (+) strand; PAM type: YTN; PAM sequence: CTG
tctccttgttatagtttcat

SEQ ID NO: 392757 - DNA, 20 bp, Artificial Sequence
  Description of Artificial Sequence: Synthetic oligonucleotide
  Target: LAMA2; (+) strand; PAM type: YTN; PAM sequence: CTC
cttgttatagtttcatgtgg

SEQ ID NO: 392758 - DNA, 20 bp, Artificial Sequence
  Description of Artificial Sequence: Synthetic oligonucleotide
  Target: LAMA2; (+) strand; PAM type: YTN; PAM sequence: CTT
gttatagtttcatgtggtag

SEQ ID NO: 392759 - DNA, 20 bp, Artificial Sequence
  Description of Artificial Sequence: Synthetic oligonucleotide
  Target: LAMA2; (+) strand; PAM type: YTN; PAM sequence: TTG
ttatagtttcatgtggtaga

SEQ ID NO: 392760 - DNA, 20 bp, Artificial Sequence
  Description of Artificial Sequence: Synthetic oligonucleotide
  Target: LAMA2; (+) strand; PAM type: YTN; PAM sequence: TTA
tagtttcatgtggtagaaag

SEQ ID NO: 392761 - DNA, 20 bp, Artificial Sequence
  Description of Artificial Sequence: Synthetic oligonucleotide
  Target: LAMA2; (+) strand; PAM type: YTN; PAM sequence: TTT
catgtggtagaaagggcaag

SEQ ID NO: 392762 - DNA, 20 bp, Artificial Sequence
  Description of Artificial Sequence: Synthetic oligonucleotide
  Target: LAMA2; (+) strand; PAM type: YTN; PAM sequence: TTC
atgtggtagaaagggcaagg

SEQ ID NO: 392763 - DNA, 20 bp, Artificial Sequence
  Description of Artificial Sequence: Synthetic oligonucleotide
  Target: LAMA2; (+) strand; PAM type: YTN; PAM sequence: TTA
tctggcatcccttttataag

SEQ ID NO: 392764 - DNA, 20 bp, Artificial Sequence
  Description of Artificial Sequence: Synthetic oligonucleotide
  Target: LAMA2; (+) strand; PAM type: YTN; PAM sequence: CTG
gcatcccttttataagagca

SEQ ID NO: 392765 - DNA, 20 bp, Artificial Sequence
  Description of Artificial Sequence: Synthetic oligonucleotide
  Target: LAMA2; (+) strand; PAM type: YTN; PAM sequence: CTT
ttataagagcactaatttca

SEQ ID NO: 392766 - DNA, 20 bp, Artificial Sequence
  Description of Artificial Sequence: Synthetic oligonucleotide
  Target: LAMA2; (+) strand; PAM type: YTN; PAM sequence: TTT
tataagagcactaatttcat

SEQ ID NO: 392767 - DNA, 20 bp, Artificial Sequence
  Description of Artificial Sequence: Synthetic oligonucleotide
  Target: LAMA2; (+) strand; PAM type: YTN; PAM sequence: TTT
ataagagcactaatttcatt

SEQ ID NO: 392768 - DNA, 20 bp, Artificial Sequence
  Description of Artificial Sequence: Synthetic oligonucleotide
  Target: LAMA2; (+) strand; PAM type: YTN; PAM sequence: TTA
taagagcactaatttcattc

SEQ ID NO: 392769 - DNA, 20 bp, Artificial Sequence
  Description of Artificial Sequence: Synthetic oligonucleotide
  Target: LAMA2; (+) strand; PAM type: YTN; PAM sequence: CTA
atttcattcttgcccttatg

SEQ ID NO: 392770 - DNA, 20 bp, Artificial Sequence
  Description of Artificial Sequence: Synthetic oligonucleotide
  Target: LAMA2; (+) strand; PAM type: YTN; PAM sequence: TTT
cattcttgcccttatgacct

SEQ ID NO: 392771 - DNA, 20 bp, Artificial Sequence
  Description of Artificial Sequence: Synthetic oligonucleotide
  Target: LAMA2; (+) strand; PAM type: YTN; PAM sequence: TTC
attcttgcccttatgaccta

SEQ ID NO: 392772 - DNA, 20 bp, Artificial Sequence
  Description of Artificial Sequence: Synthetic oligonucleotide
  Target: LAMA2; (+) strand; PAM type: YTN; PAM sequence: TTC
ttgcccttatgacctaatct

SEQ ID NO: 392773 - DNA, 20 bp, Artificial Sequence
  Description of Artificial Sequence: Synthetic oligonucleotide
  Target: LAMA2; (+) strand; PAM type: YTN; PAM sequence: CTT
gcccttatgacctaatctcc

SEQ ID NO: 392774 - DNA, 20 bp, Artificial Sequence
  Description of Artificial Sequence: Synthetic oligonucleotide
  Target: LAMA2; (+) strand; PAM type: YTN; PAM sequence: TTG
cccttatgacctaatctcct

SEQ ID NO: 392775 - DNA, 20 bp, Artificial Sequence
  Description of Artificial Sequence: Synthetic oligonucleotide
  Target: LAMA2; (+) strand; PAM type: YTN; PAM sequence: CTT
atgacctaatctcctctcaa

SEQ ID NO: 392776 - DNA, 20 bp, Artificial Sequence
  Description of Artificial Sequence: Synthetic oligonucleotide
  Target: LAMA2; (+) strand; PAM type: YTN; PAM sequence: TTA
tgacctaatctcctctcaaa

SEQ ID NO: 392777 - DNA, 20 bp, Artificial Sequence
  Description of Artificial Sequence: Synthetic oligonucleotide
  Target: LAMA2; (+) strand; PAM type: YTN; PAM sequence: CTA
atctcctctcaaaggctctg

SEQ ID NO: 392778 - DNA, 20 bp, Artificial Sequence
  Description of Artificial Sequence: Synthetic oligonucleotide
  Target: LAMA2; (+) strand; PAM type: YTN; PAM sequence: CTC
ctctcaaaggctctgtatta

SEQ ID NO: 392779 - DNA, 20 bp, Artificial Sequence
  Description of Artificial Sequence: Synthetic oligonucleotide
  Target: LAMA2; (+) strand; PAM type: YTN; PAM sequence: CTC
tcaaaggctctgtattaatc

SEQ ID NO: 392780 - DNA, 20 bp, Artificial Sequence
  Description of Artificial Sequence: Synthetic oligonucleotide
  Target: LAMA2; (+) strand; PAM type: YTN; PAM sequence: CTC
aaaggctctgtattaatctc

SEQ ID NO: 392781 - DNA, 20 bp, Artificial Sequence
  Description of Artificial Sequence: Synthetic oligonucleotide
  Target: LAMA2; (+) strand; PAM type: YTN; PAM sequence: CTC
tgtattaatctcttctcacg

SEQ ID NO: 392782 - DNA, 20 bp, Artificial Sequence
  Description of Artificial Sequence: Synthetic oligonucleotide
  Target: LAMA2; (+) strand; PAM type: YTN; PAM sequence: CTG
tattaatctcttctcacgct

SEQ ID NO: 392783 - DNA, 20 bp, Artificial Sequence
  Description of Artificial Sequence: Synthetic oligonucleotide
  Target: LAMA2; (+) strand; PAM type: YTN; PAM sequence: TTA
atctcttctcacgctgctat

SEQ ID NO: 392784 - DNA, 20 bp, Artificial Sequence
  Description of Artificial Sequence: Synthetic oligonucleotide
  Target: LAMA2; (+) strand; PAM type: YTN; PAM sequence: CTC
ttctcacgctgctataaaga

SEQ ID NO: 392785 - DNA, 20 bp, Artificial Sequence
  Description of Artificial Sequence: Synthetic oligonucleotide
  Target: LAMA2; (+) strand; PAM type: YTN; PAM sequence: CTT
ctcacgctgctataaagaac

SEQ ID NO: 392786 - DNA, 20 bp, Artificial Sequence
  Description of Artificial Sequence: Synthetic oligonucleotide
  Target: LAMA2; (+) strand; PAM type: YTN; PAM sequence: TTC
tcacgctgctataaagaact

SEQ ID NO: 392787 - DNA, 20 bp, Artificial Sequence
  Description of Artificial Sequence: Synthetic oligonucleotide
  Target: LAMA2; (+) strand; PAM type: YTN; PAM sequence: CTC
acgctgctataaagaactac

SEQ ID NO: 392788 - DNA, 20 bp, Artificial Sequence
  Description of Artificial Sequence: Synthetic oligonucleotide
  Target: LAMA2; (+) strand; PAM type: YTN; PAM sequence: CTG
ctataaagaactacctgaga

SEQ ID NO: 392789 - DNA, 20 bp, Artificial Sequence
  Description of Artificial Sequence: Synthetic oligonucleotide
  Target: LAMA2; (+) strand; PAM type: YTN; PAM sequence: CTA
taaagaactacctgagactg

SEQ ID NO: 392790 - DNA, 20 bp, Artificial Sequence
  Description of Artificial Sequence: Synthetic oligonucleotide
  Target: LAMA2; (+) strand; PAM type: YTN; PAM sequence: CTA
cctgagactgggtaacttat

SEQ ID NO: 392791 - DNA, 20 bp, Artificial Sequence
  Description of Artificial Sequence: Synthetic oligonucleotide
  Target: LAMA2; (+) strand; PAM type: YTN; PAM sequence: CTG
agactgggtaacttatgaag

SEQ ID NO: 392792 - DNA, 20 bp, Artificial Sequence
  Description of Artificial Sequence: Synthetic oligonucleotide
  Target: LAMA2; (+) strand; PAM type: YTN; PAM sequence: CTG
ggtaacttatgaagaaaaga

SEQ ID NO: 392793 - DNA, 20 bp, Artificial Sequence
  Description of Artificial Sequence: Synthetic oligonucleotide
  Target: LAMA2; (+) strand; PAM type: YTN; PAM sequence: CTT
atgaagaaaagacgtataaa

SEQ ID NO: 392794 - DNA, 20 bp, Artificial Sequence
  Description of Artificial Sequence: Synthetic oligonucleotide
  Target: LAMA2; (+) strand; PAM type: YTN; PAM sequence: TTA
tgaagaaaagacgtataaat

SEQ ID NO: 392795 - DNA, 20 bp, Artificial Sequence
  Description of Artificial Sequence: Synthetic oligonucleotide
  Target: LAMA2; (+) strand; PAM type: YTN; PAM sequence: TTG
accacagttctgcaggctta

SEQ ID NO: 392796 - DNA, 20 bp, Artificial Sequence
  Description of Artificial Sequence: Synthetic oligonucleotide
  Target: LAMA2; (+) strand; PAM type: YTN; PAM sequence: TTC
tgcaggcttaacaagaagca

SEQ ID NO: 392797 - DNA, 20 bp, Artificial Sequence
  Description of Artificial Sequence: Synthetic oligonucleotide
  Target: LAMA2; (+) strand; PAM type: YTN; PAM sequence: CTG
caggcttaacaagaagcatg

SEQ ID NO: 392798 - DNA, 20 bp, Artificial Sequence
  Description of Artificial Sequence: Synthetic oligonucleotide
  Target: LAMA2; (+) strand; PAM type: YTN; PAM sequence: CTT
aacaagaagcatgactagga

SEQ ID NO: 392799 - DNA, 20 bp, Artificial Sequence
  Description of Artificial Sequence: Synthetic oligonucleotide
  Target: LAMA2; (+) strand; PAM type: YTN; PAM sequence: TTA
acaagaagcatgactaggag

SEQ ID NO: 392800 - DNA, 20 bp, Artificial Sequence
  Description of Artificial Sequence: Synthetic oligonucleotide
  Target: LAMA2; (+) strand; PAM type: YTN; PAM sequence: CTA
ggaggcctcaggaaatttac

SEQ ID NO: 392801 - DNA, 20 bp, Artificial Sequence
  Description of Artificial Sequence: Synthetic oligonucleotide
  Target: LAMA2; (+) strand; PAM type: YTN; PAM sequence: CTC
aggaaatttacgatcatggc

SEQ ID NO: 392802 - DNA, 20 bp, Artificial Sequence
  Description of Artificial Sequence: Synthetic oligonucleotide
  Target: LAMA2; (+) strand; PAM type: YTN; PAM sequence: TTT
acgatcatggcagaaggcaa

SEQ ID NO: 392803 - DNA, 20 bp, Artificial Sequence
  Description of Artificial Sequence: Synthetic oligonucleotide
  Target: LAMA2; (+) strand; PAM type: YTN; PAM sequence: TTA
cgatcatggcagaaggcaaa

SEQ ID NO: 392804 - DNA, 20 bp, Artificial Sequence
  Description of Artificial Sequence: Synthetic oligonucleotide
  Target: LAMA2; (+) strand; PAM type: YTN; PAM sequence: CTT
cttcacatagtggcaggaaa

SEQ ID NO: 392805 - DNA, 20 bp, Artificial Sequence
  Description of Artificial Sequence: Synthetic oligonucleotide
  Target: LAMA2; (+) strand; PAM type: YTN; PAM sequence: TTC
ttcacatagtggcaggaaag

SEQ ID NO: 392806 - DNA, 20 bp, Artificial Sequence
  Description of Artificial Sequence: Synthetic oligonucleotide
  Target: LAMA2; (+) strand; PAM type: YTN; PAM sequence: CTT
cacatagtggcaggaaagag

SEQ ID NO: 392807 - DNA, 20 bp, Artificial Sequence
  Description of Artificial Sequence: Synthetic oligonucleotide
  Target: LAMA2; (+) strand; PAM type: YTN; PAM sequence: TTC
acatagtggcaggaaagaga

SEQ ID NO: 392808 - DNA, 20 bp, Artificial Sequence
  Description of Artificial Sequence: Synthetic oligonucleotide
  Target: LAMA2; (+) strand; PAM type: YTN; PAM sequence: CTT
cgaacaacctgatcttgtga

SEQ ID NO: 392809 - DNA, 20 bp, Artificial Sequence
  Description of Artificial Sequence: Synthetic oligonucleotide
  Target: LAMA2; (+) strand; PAM type: YTN; PAM sequence: TTC
gaacaacctgatcttgtgag

SEQ ID NO: 392810 - DNA, 20 bp, Artificial Sequence
  Description of Artificial Sequence: Synthetic oligonucleotide
  Target: LAMA2; (+) strand; PAM type: YTN; PAM sequence: CTG
atcttgtgagaatttattca

SEQ ID NO: 392811 - DNA, 20 bp, Artificial Sequence
  Description of Artificial Sequence: Synthetic oligonucleotide
  Target: LAMA2; (+) strand; PAM type: YTN; PAM sequence: CTT
gtgagaatttattcactatc

SEQ ID NO: 392812 - DNA, 20 bp, Artificial Sequence
  Description of Artificial Sequence: Synthetic oligonucleotide
  Target: LAMA2; (+) strand; PAM type: YTN; PAM sequence: TTG
tgagaatttattcactatca

SEQ ID NO: 392813 - DNA, 20 bp, Artificial Sequence
  Description of Artificial Sequence: Synthetic oligonucleotide
  Target: LAMA2; (+) strand; PAM type: YTN; PAM sequence: TTT
attcactatcacaagaacag

SEQ ID NO: 392814 - DNA, 20 bp, Artificial Sequence
  Description of Artificial Sequence: Synthetic oligonucleotide
  Target: LAMA2; (+) strand; PAM type: YTN; PAM sequence: TTA
ttcactatcacaagaacagc

SEQ ID NO: 392815 - DNA, 20 bp, Artificial Sequence
  Description of Artificial Sequence: Synthetic oligonucleotide
  Target: LAMA2; (+) strand; PAM type: YTN; PAM sequence: TTC
actatcacaagaacagcaag

SEQ ID NO: 392816 - DNA, 20 bp, Artificial Sequence
  Description of Artificial Sequence: Synthetic oligonucleotide
  Target: LAMA2; (+) strand; PAM type: YTN; PAM sequence: CTA
tcacaagaacagcaaggggg

SEQ ID NO: 392817 - DNA, 20 bp, Artificial Sequence
  Description of Artificial Sequence: Synthetic oligonucleotide
  Target: LAMA2; (+) strand; PAM type: YTN; PAM sequence: TTT
gctcccatgattcagtcacc

SEQ ID NO: 392818 - DNA, 20 bp, Artificial Sequence
  Description of Artificial Sequence: Synthetic oligonucleotide
  Target: LAMA2; (+) strand; PAM type: YTN; PAM sequence: TTG
ctcccatgattcagtcacca

SEQ ID NO: 392819 - DNA, 20 bp, Artificial Sequence
  Description of Artificial Sequence: Synthetic oligonucleotide
  Target: LAMA2; (+) strand; PAM type: YTN; PAM sequence: CTC
ccatgattcagtcaccaccc

SEQ ID NO: 392820 - DNA, 20 bp, Artificial Sequence
  Description of Artificial Sequence: Synthetic oligonucleotide
  Target: LAMA2; (+) strand; PAM type: YTN; PAM sequence: TTC
agtcaccacccaccaggccc

SEQ ID NO: 392821 - DNA, 20 bp, Artificial Sequence
  Description of Artificial Sequence: Synthetic oligonucleotide
  Target: LAMA2; (+) strand; PAM type: YTN; PAM sequence: CTC
cctcaacatgtgggtattac

SEQ ID NO: 392822 - DNA, 20 bp, Artificial Sequence
  Description of Artificial Sequence: Synthetic oligonucleotide
  Target: LAMA2; (+) strand; PAM type: YTN; PAM sequence: CTC
aacatgtgggtattacaact

SEQ ID NO: 392823 - DNA, 20 bp, Artificial Sequence
  Description of Artificial Sequence: Synthetic oligonucleotide
  Target: LAMA2; (+) strand; PAM type: YTN; PAM sequence: TTA
caacttgagatgagatttga

SEQ ID NO: 392824 - DNA, 20 bp, Artificial Sequence
  Description of Artificial Sequence: Synthetic oligonucleotide
  Target: LAMA2; (+) strand; PAM type: YTN; PAM sequence: CTT
gagatgagatttgaggtggt

SEQ ID NO: 392825 - DNA, 20 bp, Artificial Sequence
  Description of Artificial Sequence: Synthetic oligonucleotide
  Target: LAMA2; (+) strand; PAM type: YTN; PAM sequence: TTG
agatgagatttgaggtggtc

SEQ ID NO: 392826 - DNA, 20 bp, Artificial Sequence
  Description of Artificial Sequence: Synthetic oligonucleotide
  Target: LAMA2; (+) strand; PAM type: YTN; PAM sequence: TTT
gaggtggtcggtggggggac

SEQ ID NO: 392827 - DNA, 20 bp, Artificial Sequence
  Description of Artificial Sequence: Synthetic oligonucleotide
  Target: LAMA2; (+) strand; PAM type: YTN; PAM sequence: TTG
aggtggtcggtggggggaca

SEQ ID NO: 392828 - DNA, 20 bp, Artificial Sequence
  Description of Artificial Sequence: Synthetic oligonucleotide
  Target: LAMA2; (+) strand; PAM type: YTN; PAM sequence: CTC
tgcctccaaataccatcaca

SEQ ID NO: 392829 - DNA, 20 bp, Artificial Sequence
  Description of Artificial Sequence: Synthetic oligonucleotide
  Target: LAMA2; (+) strand; PAM type: YTN; PAM sequence: CTG
cctccaaataccatcacatt

SEQ ID NO: 392830 - DNA, 20 bp, Artificial Sequence
  Description of Artificial Sequence: Synthetic oligonucleotide
  Target: LAMA2; (+) strand; PAM type: YTN; PAM sequence: CTC
caaataccatcacattggga

SEQ ID NO: 392831 - DNA, 20 bp, Artificial Sequence
  Description of Artificial Sequence: Synthetic oligonucleotide
  Target: LAMA2; (+) strand; PAM type: YTN; PAM sequence: TTG
ggaattaggtttcaacatat

SEQ ID NO: 392832 - DNA, 20 bp, Artificial Sequence
  Description of Artificial Sequence: Synthetic oligonucleotide
  Target: LAMA2; (+) strand; PAM type: YTN; PAM sequence: TTA
ggtttcaacatatgaatttg

SEQ ID NO: 392833 - DNA, 20 bp, Artificial Sequence
  Description of Artificial Sequence: Synthetic oligonucleotide
  Target: LAMA2; (+) strand; PAM type: YTN; PAM sequence: TTT
caacatatgaatttgaggag

SEQ ID NO: 392834 - DNA, 20 bp, Artificial Sequence
  Description of Artificial Sequence: Synthetic oligonucleotide
  Target: LAMA2; (+) strand; PAM type: YTN; PAM sequence: TTC
aacatatgaatttgaggaga

SEQ ID NO: 392835 - DNA, 20 bp, Artificial Sequence
  Description of Artificial Sequence: Synthetic oligonucleotide
  Target: LAMA2; (+) strand; PAM type: YTN; PAM sequence: TTT
gaggagaacataaacattca

SEQ ID NO: 392836 - DNA, 20 bp, Artificial Sequence
  Description of Artificial Sequence: Synthetic oligonucleotide
  Target: LAMA2; (+) strand; PAM type: YTN; PAM sequence: TTG
aggagaacataaacattcaa

SEQ ID NO: 392837 - DNA, 20 bp, Artificial Sequence
  Description of Artificial Sequence: Synthetic oligonucleotide
  Target: LAMA2; (+) strand; PAM type: YTN; PAM sequence: TTC
aatctacagcattggctatc

SEQ ID NO: 392838 - DNA, 20 bp, Artificial Sequence
  Description of Artificial Sequence: Synthetic oligonucleotide
  Target: LAMA2; (+) strand; PAM type: YTN; PAM sequence: CTA
cagcattggctatcagggtt

SEQ ID NO: 392839 - DNA, 20 bp, Artificial Sequence
  Description of Artificial Sequence: Synthetic oligonucleotide
  Target: LAMA2; (+) strand; PAM type: YTN; PAM sequence: TTG
gctatcagggttaaagtact

SEQ ID NO: 392840 - DNA, 20 bp, Artificial Sequence
  Description of Artificial Sequence: Synthetic oligonucleotide
  Target: LAMA2; (+) strand; PAM type: YTN; PAM sequence: CTA
tcagggttaaagtactgact

SEQ ID NO: 392841 - DNA, 20 bp, Artificial Sequence
  Description of Artificial Sequence: Synthetic oligonucleotide
  Target: LAMA2; (+) strand; PAM type: YTN; PAM sequence: TTA
aagtactgactacaggaact

SEQ ID NO: 392842 - DNA, 20 bp, Artificial Sequence
  Description of Artificial Sequence: Synthetic oligonucleotide
  Target: LAMA2; (+) strand; PAM type: YTN; PAM sequence: CTG
actacaggaacttttaaacc

SEQ ID NO: 392843 - DNA, 20 bp, Artificial Sequence
  Description of Artificial Sequence: Synthetic oligonucleotide
  Target: LAMA2; (+) strand; PAM type: YTN; PAM sequence: CTA
caggaacttttaaaccaaag

SEQ ID NO: 392844 - DNA, 20 bp, Artificial Sequence
  Description of Artificial Sequence: Synthetic oligonucleotide
  Target: LAMA2; (+) strand; PAM type: YTN; PAM sequence: CTT
ttaaaccaaagacatatata

SEQ ID NO: 392845 - DNA, 20 bp, Artificial Sequence
  Description of Artificial Sequence: Synthetic oligonucleotide
  Target: LAMA2; (+) strand; PAM type: YTN; PAM sequence: TTT
taaaccaaagacatatataa

SEQ ID NO: 392846 - DNA, 20 bp, Artificial Sequence
  Description of Artificial Sequence: Synthetic oligonucleotide
  Target: LAMA2; (+) strand; PAM type: YTN; PAM sequence: TTT
aaaccaaagacatatataac

SEQ ID NO: 392847 - DNA, 20 bp, Artificial Sequence
  Description of Artificial Sequence: Synthetic oligonucleotide
  Target: LAMA2; (+) strand; PAM type: YTN; PAM sequence: TTA
aaccaaagacatatataacg

SEQ ID NO: 392848 - DNA, 20 bp, Artificial Sequence
  Description of Artificial Sequence: Synthetic oligonucleotide
  Target: LAMA2; (+) strand; PAM type: YTN; PAM sequence: TTA
taaagatgcattgtggaaag

SEQ ID NO: 392849 - DNA, 20 bp, Artificial Sequence
  Description of Artificial Sequence: Synthetic oligonucleotide
  Target: LAMA2; (+) strand; PAM type: YTN; PAM sequence: TTG
tggaaagggtatattagaca

SEQ ID NO: 392850 - DNA, 20 bp, Artificial Sequence
  Description of Artificial Sequence: Synthetic oligonucleotide
  Target: LAMA2; (+) strand; PAM type: YTN; PAM sequence: TTA
gacattgaaactcaattctt

SEQ ID NO: 392851 - DNA, 20 bp, Artificial Sequence
  Description of Artificial Sequence: Synthetic oligonucleotide
  Target: LAMA2; (+) strand; PAM type: YTN; PAM sequence: TTG
aaactcaattctttctacta

SEQ ID NO: 392852 - DNA, 20 bp, Artificial Sequence
  Description of Artificial Sequence: Synthetic oligonucleotide
  Target: LAMA2; (+) strand; PAM type: YTN; PAM sequence: CTC
aattctttctactatcccag

SEQ ID NO: 392853 - DNA, 20 bp, Artificial Sequence
  Description of Artificial Sequence: Synthetic oligonucleotide
  Target: LAMA2; (+) strand; PAM type: YTN; PAM sequence: TTC
tttctactatcccagtgttt

SEQ ID NO: 392854 - DNA, 20 bp, Artificial Sequence
  Description of Artificial Sequence: Synthetic oligonucleotide
  Target: LAMA2; (+) strand; PAM type: YTN; PAM sequence: CTT
tctactatcccagtgtttct

SEQ ID NO: 392855 - DNA, 20 bp, Artificial Sequence
  Description of Artificial Sequence: Synthetic oligonucleotide
  Target: LAMA2; (+) strand; PAM type: YTN; PAM sequence: TTT
ctactatcccagtgtttctc

SEQ ID NO: 392856 - DNA, 20 bp, Artificial Sequence
  Description of Artificial Sequence: Synthetic oligonucleotide
  Target: LAMA2; (+) strand; PAM type: YTN; PAM sequence: TTC
tactatcccagtgtttctca

SEQ ID NO: 392857 - DNA, 20 bp, Artificial Sequence
  Description of Artificial Sequence: Synthetic oligonucleotide
  Target: LAMA2; (+) strand; PAM type: YTN; PAM sequence: CTA
ctatcccagtgtttctcaag

SEQ ID NO: 392858 - DNA, 20 bp, Artificial Sequence
  Description of Artificial Sequence: Synthetic oligonucleotide
  Target: LAMA2; (+) strand; PAM type: YTN; PAM sequence: CTA
tcccagtgtttctcaagctc

SEQ ID NO: 392859 - DNA, 20 bp, Artificial Sequence
  Description of Artificial Sequence: Synthetic oligonucleotide
  Target: LAMA2; (+) strand; PAM type: YTN; PAM sequence: TTT
ctcaagctctagggtacatc

SEQ ID NO: 392860 - DNA, 20 bp, Artificial Sequence
  Description of Artificial Sequence: Synthetic oligonucleotide
  Target: LAMA2; (+) strand; PAM type: YTN; PAM sequence: TTC
tcaagctctagggtacatca

SEQ ID NO: 392861 - DNA, 20 bp, Artificial Sequence
  Description of Artificial Sequence: Synthetic oligonucleotide
  Target: LAMA2; (+) strand; PAM type: YTN; PAM sequence: CTC
aagctctagggtacatcaga

SEQ ID NO: 392862 - DNA, 20 bp, Artificial Sequence
  Description of Artificial Sequence: Synthetic oligonucleotide
  Target: LAMA2; (+) strand; PAM type: YTN; PAM sequence: CTC
tagggtacatcagaagctct

SEQ ID NO: 392863 - DNA, 20 bp, Artificial Sequence
  Description of Artificial Sequence: Synthetic oligonucleotide
  Target: LAMA2; (+) strand; PAM type: YTN; PAM sequence: CTA
gggtacatcagaagctctga

SEQ ID NO: 392864 - DNA, 20 bp, Artificial Sequence
  Description of Artificial Sequence: Synthetic oligonucleotide
  Target: LAMA2; (+) strand; PAM type: YTN; PAM sequence: CTC
tgagaaggcttgttaaagcc

SEQ ID NO: 392865 - DNA, 20 bp, Artificial Sequence
  Description of Artificial Sequence: Synthetic oligonucleotide
  Target: LAMA2; (+) strand; PAM type: YTN; PAM sequence: CTG
agaaggcttgttaaagccca

SEQ ID NO: 392866 - DNA, 20 bp, Artificial Sequence
  Description of Artificial Sequence: Synthetic oligonucleotide
  Target: LAMA2; (+) strand; PAM type: YTN; PAM sequence: CTT
gttaaagcccagattgctgg

SEQ ID NO: 392867 - DNA, 20 bp, Artificial Sequence
  Description of Artificial Sequence: Synthetic oligonucleotide
  Target: LAMA2; (+) strand; PAM type: YTN; PAM sequence: TTG
ttaaagcccagattgctggt

SEQ ID NO: 392868 - DNA, 20 bp, Artificial Sequence
  Description of Artificial Sequence: Synthetic oligonucleotide
  Target: LAMA2; (+) strand; PAM type: YTN; PAM sequence: TTA
aagcccagattgctggtcct

SEQ ID NO: 392869 - DNA, 20 bp, Artificial Sequence
  Description of Artificial Sequence: Synthetic oligonucleotide
  Target: LAMA2; (+) strand; PAM type: YTN; PAM sequence: TTG
ctggtcctcacccccagaat

SEQ ID NO: 392870 - DNA, 20 bp, Artificial Sequence
  Description of Artificial Sequence: Synthetic oligonucleotide
  Target: LAMA2; (+) strand; PAM type: YTN; PAM sequence: CTG
gtcctcacccccagaatttc

SEQ ID NO: 392871 - DNA, 20 bp, Artificial Sequence
  Description of Artificial Sequence: Synthetic oligonucleotide
  Target: LAMA2; (+) strand; PAM type: YTN; PAM sequence: CTC
acccccagaatttctgagtc

SEQ ID NO: 392872 - DNA, 20 bp, Artificial Sequence
  Description of Artificial Sequence: Synthetic oligonucleotide
  Target: LAMA2; (+) strand; PAM type: YTN; PAM sequence: TTT
ctgagtctgtaggtttgtgg

SEQ ID NO: 392873 - DNA, 20 bp, Artificial Sequence
  Description of Artificial Sequence: Synthetic oligonucleotide
  Target: LAMA2; (+) strand; PAM type: YTN; PAM sequence: TTC
tgagtctgtaggtttgtggc

SEQ ID NO: 392874 - DNA, 20 bp, Artificial Sequence
  Description of Artificial Sequence: Synthetic oligonucleotide
  Target: LAMA2; (+) strand; PAM type: YTN; PAM sequence: CTG
agtctgtaggtttgtggcag

SEQ ID NO: 392875 - DNA, 20 bp, Artificial Sequence
  Description of Artificial Sequence: Synthetic oligonucleotide
  Target: LAMA2; (+) strand; PAM type: YTN; PAM sequence: CTG
taggtttgtggcagggcctg

SEQ ID NO: 392876 - DNA, 20 bp, Artificial Sequence
  Description of Artificial Sequence: Synthetic oligonucleotide
  Target: LAMA2; (+) strand; PAM type: YTN; PAM sequence: TTT
gtggcagggcctgagaatct

SEQ ID NO: 392877 - DNA, 20 bp, Artificial Sequence
  Description of Artificial Sequence: Synthetic oligonucleotide
  Target: LAMA2; (+) strand; PAM type: YTN; PAM sequence: TTG
tggcagggcctgagaatctg

SEQ ID NO: 392878 - DNA, 20 bp, Artificial Sequence
  Description of Artificial Sequence: Synthetic oligonucleotide
  Target: LAMA2; (+) strand; PAM type: YTN; PAM sequence: CTG
agaatctgcatttctaatgg

SEQ ID NO: 392879 - DNA, 20 bp, Artificial Sequence
  Description of Artificial Sequence: Synthetic oligonucleotide
  Target: LAMA2; (+) strand; PAM type: YTN; PAM sequence: CTG
catttctaatgggctccaag

SEQ ID NO: 392880 - DNA, 20 bp, Artificial Sequence
  Description of Artificial Sequence: Synthetic oligonucleotide
  Target: LAMA2; (+) strand; PAM type: YTN; PAM sequence: TTT
ctaatgggctccaaggtggt

SEQ ID NO: 392881 - DNA, 20 bp, Artificial Sequence
  Description of Artificial Sequence: Synthetic oligonucleotide
  Target: LAMA2; (+) strand; PAM type: YTN; PAM sequence: TTC
taatgggctccaaggtggtg

SEQ ID NO: 392882 - DNA, 20 bp, Artificial Sequence
  Description of Artificial Sequence: Synthetic oligonucleotide
  Target: LAMA2; (+) strand; PAM type: YTN; PAM sequence: CTA
atgggctccaaggtggtgat

SEQ ID NO: 392883 - DNA, 20 bp, Artificial Sequence
  Description of Artificial Sequence: Synthetic oligonucleotide
  Target: LAMA2; (+) strand; PAM type: YTN; PAM sequence: CTC
caaggtggtgatgctgctgc

SEQ ID NO: 392884 - DNA, 20 bp, Artificial Sequence
  Description of Artificial Sequence: Synthetic oligonucleotide
  Target: LAMA2; (+) strand; PAM type: YTN; PAM sequence: CTG
ctgctgcttataggggacca

SEQ ID NO: 392885 - DNA, 20 bp, Artificial Sequence
  Description of Artificial Sequence: Synthetic oligonucleotide
  Target: LAMA2; (+) strand; PAM type: YTN; PAM sequence: CTG
ctgcttataggggaccacat

SEQ ID NO: 392886 - DNA, 20 bp, Artificial Sequence
  Description of Artificial Sequence: Synthetic oligonucleotide
  Target: LAMA2; (+) strand; PAM type: YTN; PAM sequence: CTG
cttataggggaccacatttt

SEQ ID NO: 392887 - DNA, 20 bp, Artificial Sequence
  Description of Artificial Sequence: Synthetic oligonucleotide
  Target: LAMA2; (+) strand; PAM type: YTN; PAM sequence: CTT
ataggggaccacattttaga

SEQ ID NO: 392888 - DNA, 20 bp, Artificial Sequence
  Description of Artificial Sequence: Synthetic oligonucleotide
  Target: LAMA2; (+) strand; PAM type: YTN; PAM sequence: TTA
taggggaccacattttagaa

SEQ ID NO: 392889 - DNA, 20 bp, Artificial Sequence
  Description of Artificial Sequence: Synthetic oligonucleotide
  Target: LAMA2; (+) strand; PAM type: YTN; PAM sequence: TTT
tagaaccactgtactgaccc

SEQ ID NO: 392890 - DNA, 20 bp, Artificial Sequence
  Description of Artificial Sequence: Synthetic oligonucleotide
  Target: LAMA2; (+) strand; PAM type: YTN; PAM sequence: TTT
agaaccactgtactgaccca

SEQ ID NO: 392891 - DNA, 20 bp, Artificial Sequence
  Description of Artificial Sequence: Synthetic oligonucleotide
  Target: LAMA2; (+) strand; PAM type: YTN; PAM sequence: TTA
gaaccactgtactgacccac

SEQ ID NO: 392892 - DNA, 20 bp, Artificial Sequence
  Description of Artificial Sequence: Synthetic oligonucleotide
  Target: LAMA2; (+) strand; PAM type: YTN; PAM sequence: CTG
tactgacccaccttctcaca

SEQ ID NO: 392893 - DNA, 20 bp, Artificial Sequence
  Description of Artificial Sequence: Synthetic oligonucleotide
  Target: LAMA2; (+) strand; PAM type: YTN; PAM sequence: CTG
acccaccttctcacataccc

SEQ ID NO: 392894 - DNA, 20 bp, Artificial Sequence
  Description of Artificial Sequence: Synthetic oligonucleotide
  Target: LAMA2; (+) strand; PAM type: YTN; PAM sequence: CTT
ctcacatacccctctgcctg

SEQ ID NO: 392895 - DNA, 20 bp, Artificial Sequence
  Description of Artificial Sequence: Synthetic oligonucleotide
  Target: LAMA2; (+) strand; PAM type: YTN; PAM sequence: TTC
tcacatacccctctgcctgc

SEQ ID NO: 392896 - DNA, 20 bp, Artificial Sequence
  Description of Artificial Sequence: Synthetic oligonucleotide
  Target: LAMA2; (+) strand; PAM type: YTN; PAM sequence: CTC
acatacccctctgcctgctc

SEQ ID NO: 392897 - DNA, 20 bp, Artificial Sequence
  Description of Artificial Sequence: Synthetic oligonucleotide
  Target: LAMA2; (+) strand; PAM type: YTN; PAM sequence: CTC
tgcctgctctgcttgtcctg

SEQ ID NO: 392898 - DNA, 20 bp, Artificial Sequence
  Description of Artificial Sequence: Synthetic oligonucleotide
  Target: LAMA2; (+) strand; PAM type: YTN; PAM sequence: CTG
cctgctctgcttgtcctgac

SEQ ID NO: 392899 - DNA, 20 bp, Artificial Sequence
  Description of Artificial Sequence: Synthetic oligonucleotide
  Target: LAMA2; (+) strand; PAM type: YTN; PAM sequence: CTG
ctctgcttgtcctgactatg

SEQ ID NO: 392900 - DNA, 20 bp, Artificial Sequence
  Description of Artificial Sequence: Synthetic oligonucleotide
  Target: LAMA2; (+) strand; PAM type: YTN; PAM sequence: CTC
tgcttgtcctgactatgtac

SEQ ID NO: 392901 - DNA, 20 bp, Artificial Sequence
  Description of Artificial Sequence: Synthetic oligonucleotide
  Target: LAMA2; (+) strand; PAM type: YTN; PAM sequence: CTG
cttgtcctgactatgtacac

SEQ ID NO: 392902 - DNA, 20 bp, Artificial Sequence
  Description of Artificial Sequence: Synthetic oligonucleotide
  Target: LAMA2; (+) strand; PAM type: YTN; PAM sequence: CTT
gtcctgactatgtacacctg

SEQ ID NO: 392903 - DNA, 20 bp, Artificial Sequence
  Description of Artificial Sequence: Synthetic oligonucleotide
  Target: LAMA2; (+) strand; PAM type: YTN; PAM sequence: TTG
tcctgactatgtacacctgt

SEQ ID NO: 392904 - DNA, 20 bp, Artificial Sequence
  Description of Artificial Sequence: Synthetic oligonucleotide
  Target: LAMA2; (+) strand; PAM type: YTN; PAM sequence: CTG
actatgtacacctgtttcag

SEQ ID NO: 392905 - DNA, 20 bp, Artificial Sequence
  Description of Artificial Sequence: Synthetic oligonucleotide
  Target: LAMA2; (+) strand; PAM type: YTN; PAM sequence: CTA
tgtacacctgtttcaggagc

SEQ ID NO: 392906 - DNA, 20 bp, Artificial Sequence
  Description of Artificial Sequence: Synthetic oligonucleotide
  Target: LAMA2; (+) strand; PAM type: YTN; PAM sequence: CTG
tttcaggagctctgcccagt

SEQ ID NO: 392907 - DNA, 20 bp, Artificial Sequence
  Description of Artificial Sequence: Synthetic oligonucleotide
  Target: LAMA2; (+) strand; PAM type: YTN; PAM sequence: TTT
caggagctctgcccagtgca

SEQ ID NO: 392908 - DNA, 20 bp, Artificial Sequence
  Description of Artificial Sequence: Synthetic oligonucleotide
  Target: LAMA2; (+) strand; PAM type: YTN; PAM sequence: TTC
aggagctctgcccagtgcaa

SEQ ID NO: 392909 - DNA, 20 bp, Artificial Sequence
  Description of Artificial Sequence: Synthetic oligonucleotide
  Target: LAMA2; (+) strand; PAM type: YTN; PAM sequence: CTC
tgcccagtgcaaaactctct

SEQ ID NO: 392910 - DNA, 20 bp, Artificial Sequence
  Description of Artificial Sequence: Synthetic oligonucleotide
  Target: LAMA2; (+) strand; PAM type: YTN; PAM sequence: CTG
cccagtgcaaaactctctcc

SEQ ID NO: 392911 - DNA, 20 bp, Artificial Sequence
  Description of Artificial Sequence: Synthetic oligonucleotide
  Target: LAMA2; (+) strand; PAM type: YTN; PAM sequence: CTC
tctccaagaatagaaattaa

SEQ ID NO: 392912 - DNA, 20 bp, Artificial Sequence
  Description of Artificial Sequence: Synthetic oligonucleotide
  Target: LAMA2; (+) strand; PAM type: YTN; PAM sequence: CTC
tccaagaatagaaattaatt

SEQ ID NO: 392913 - DNA, 20 bp, Artificial Sequence
  Description of Artificial Sequence: Synthetic oligonucleotide
  Target: LAMA2; (+) strand; PAM type: YTN; PAM sequence: CTC
caagaatagaaattaatttt

SEQ ID NO: 392914 - DNA, 20 bp, Artificial Sequence
  Description of Artificial Sequence: Synthetic oligonucleotide
  Target: LAMA2; (+) strand; PAM type: YTN; PAM sequence: TTA
attttcaggaatctctatgt

SEQ ID NO: 392915 - DNA, 20 bp, Artificial Sequence
  Description of Artificial Sequence: Synthetic oligonucleotide
  Target: LAMA2; (+) strand; PAM type: YTN; PAM sequence: TTT
tcaggaatctctatgtcata

SEQ ID NO: 392916 - DNA, 20 bp, Artificial Sequence
  Description of Artificial Sequence: Synthetic oligonucleotide
  Target: LAMA2; (+) strand; PAM type: YTN; PAM sequence: TTT
caggaatctctatgtcataa

SEQ ID NO: 392917 - DNA, 20 bp, Artificial Sequence
  Description of Artificial Sequence: Synthetic oligonucleotide
  Target: LAMA2; (+) strand; PAM type: YTN; PAM sequence: TTC
aggaatctctatgtcataag

SEQ ID NO: 392918 - DNA, 20 bp, Artificial Sequence
  Description of Artificial Sequence: Synthetic oligonucleotide
  Target: LAMA2; (+) strand; PAM type: YTN; PAM sequence: CTC
tatgtcataaggagatcttc

SEQ ID NO: 392919 - DNA, 20 bp, Artificial Sequence
  Description of Artificial Sequence: Synthetic oligonucleotide
  Target: LAMA2; (+) strand; PAM type: YTN; PAM sequence: CTA
tgtcataaggagatcttcgg

SEQ ID NO: 392920 - DNA, 20 bp, Artificial Sequence
  Description of Artificial Sequence: Synthetic oligonucleotide
  Target: LAMA2; (+) strand; PAM type: YTN; PAM sequence: CTT
cggatacacccttgaatggt

SEQ ID NO: 392921 - DNA, 20 bp, Artificial Sequence
  Description of Artificial Sequence: Synthetic oligonucleotide
  Target: LAMA2; (+) strand; PAM type: YTN; PAM sequence: TTC
ggatacacccttgaatggta

SEQ ID NO: 392922 - DNA, 20 bp, Artificial Sequence
  Description of Artificial Sequence: Synthetic oligonucleotide
  Target: LAMA2; (+) strand; PAM type: YTN; PAM sequence: CTT
gaatggtagaaaatgcctct

SEQ ID NO: 392923 - DNA, 20 bp, Artificial Sequence
  Description of Artificial Sequence: Synthetic oligonucleotide
  Target: LAMA2; (+) strand; PAM type: YTN; PAM sequence: TTG
aatggtagaaaatgcctctt

SEQ ID NO: 392924 - DNA, 20 bp, Artificial Sequence
  Description of Artificial Sequence: Synthetic oligonucleotide
  Target: LAMA2; (+) strand; PAM type: YTN; PAM sequence: CTC
ttggccaaccgagacccctc

SEQ ID NO: 392925 - DNA, 20 bp, Artificial Sequence
  Description of Artificial Sequence: Synthetic oligonucleotide
  Target: LAMA2; (+) strand; PAM type: YTN; PAM sequence: CTT
ggccaaccgagacccctcat

SEQ ID NO: 392926 - DNA, 20 bp, Artificial Sequence
  Description of Artificial Sequence: Synthetic oligonucleotide
  Target: LAMA2; (+) strand; PAM type: YTN; PAM sequence: TTG
gccaaccgagacccctcatt

SEQ ID NO: 392927 - DNA, 20 bp, Artificial Sequence
  Description of Artificial Sequence: Synthetic oligonucleotide
  Target: LAMA2; (+) strand; PAM type: YTN; PAM sequence: CTC
attctaggagttttcaaagg

SEQ ID NO: 392928 - DNA, 20 bp, Artificial Sequence
  Description of Artificial Sequence: Synthetic oligonucleotide
  Target: LAMA2; (+) strand; PAM type: YTN; PAM sequence: TTC
taggagttttcaaaggtaat

SEQ ID NO: 392929 - DNA, 20 bp, Artificial Sequence
  Description of Artificial Sequence: Synthetic oligonucleotide
  Target: LAMA2; (+) strand; PAM type: YTN; PAM sequence: CTA
ggagttttcaaaggtaatat

SEQ ID NO: 392930 - DNA, 20 bp, Artificial Sequence
  Description of Artificial Sequence: Synthetic oligonucleotide
  Target: LAMA2; (+) strand; PAM type: YTN; PAM sequence: TTT
tcaaaggtaatattatagaa

SEQ ID NO: 392931 - DNA, 20 bp, Artificial Sequence
  Description of Artificial Sequence: Synthetic oligonucleotide
  Target: LAMA2; (+) strand; PAM type: YTN; PAM sequence: TTT
caaaggtaatattatagaaa

SEQ ID NO: 392932 - DNA, 20 bp, Artificial Sequence
  Description of Artificial Sequence: Synthetic oligonucleotide
  Target: LAMA2; (+) strand; PAM type: YTN; PAM sequence: TTC
aaaggtaatattatagaaat

SEQ ID NO: 392933 - DNA, 20 bp, Artificial Sequence
  Description of Artificial Sequence: Synthetic oligonucleotide
  Target: LAMA2; (+) strand; PAM type: YTN; PAM sequence: TTA
tagaaataagtattcagctg

SEQ ID NO: 392934 - DNA, 20 bp, Artificial Sequence
  Description of Artificial Sequence: Synthetic oligonucleotide
  Target: LAMA2; (+) strand; PAM type: YTN; PAM sequence: TTC
agctgacaaaagagtttgag

SEQ ID NO: 392935 - DNA, 20 bp, Artificial Sequence
  Description of Artificial Sequence: Synthetic oligonucleotide
  Target: LAMA2; (+) strand; PAM type: YTN; PAM sequence: CTG
acaaaagagtttgagaaaac

SEQ ID NO: 392936 - DNA, 20 bp, Artificial Sequence
  Description of Artificial Sequence: Synthetic oligonucleotide
  Target: LAMA2; (+) strand; PAM type: YTN; PAM sequence: TTT
gagaaaacatctctcttaaa

SEQ ID NO: 392937 - DNA, 20 bp, Artificial Sequence
  Description of Artificial Sequence: Synthetic oligonucleotide
  Target: LAMA2; (+) strand; PAM type: YTN; PAM sequence: TTG
agaaaacatctctcttaaat

SEQ ID NO: 392938 - DNA, 20 bp, Artificial Sequence
  Description of Artificial Sequence: Synthetic oligonucleotide
  Target: LAMA2; (+) strand; PAM type: YTN; PAM sequence: CTC
tcttaaattcaccaaaaaaa

SEQ ID NO: 392939 - DNA, 20 bp, Artificial Sequence
  Description of Artificial Sequence: Synthetic oligonucleotide
  Target: LAMA2; (+) strand; PAM type: YTN; PAM sequence: CTC
ttaaattcaccaaaaaaatg

SEQ ID NO: 392940 - DNA, 20 bp, Artificial Sequence
  Description of Artificial Sequence: Synthetic oligonucleotide
  Target: LAMA2; (+) strand; PAM type: YTN; PAM sequence: CTT
aaattcaccaaaaaaatgtc

SEQ ID NO: 392941 - DNA, 20 bp, Artificial Sequence
  Description of Artificial Sequence: Synthetic oligonucleotide
  Target: LAMA2; (+) strand; PAM type: YTN; PAM sequence: TTA
aattcaccaaaaaaatgtcc

SEQ ID NO: 392942 - DNA, 20 bp, Artificial Sequence
  Description of Artificial Sequence: Synthetic oligonucleotide
  Target: LAMA2; (+) strand; PAM type: YTN; PAM sequence: TTC
accaaaaaaatgtcctatag

SEQ ID NO: 392943 - DNA, 20 bp, Artificial Sequence
  Description of Artificial Sequence: Synthetic oligonucleotide
  Target: LAMA2; (+) strand; PAM type: YTN; PAM sequence: CTA
tagaacacactccaggaaac

SEQ ID NO: 392944 - DNA, 20 bp, Artificial Sequence
  Description of Artificial Sequence: Synthetic oligonucleotide
  Target: LAMA2; (+) strand; PAM type: YTN; PAM sequence: CTC
caggaaactttagtctaaaa

SEQ ID NO: 392945 - DNA, 20 bp, Artificial Sequence
  Description of Artificial Sequence: Synthetic oligonucleotide
  Target: LAMA2; (+) strand; PAM type: YTN; PAM sequence: CTT
tagtctaaaactaataatat

SEQ ID NO: 392946 - DNA, 20 bp, Artificial Sequence
  Description of Artificial Sequence: Synthetic oligonucleotide
  Target: LAMA2; (+) strand; PAM type: YTN; PAM sequence: TTT
agtctaaaactaataatata

SEQ ID NO: 392947 - DNA, 20 bp, Artificial Sequence
  Description of Artificial Sequence: Synthetic oligonucleotide
  Target: LAMA2; (+) strand; PAM type: YTN; PAM sequence: TTA
gtctaaaactaataatataa

SEQ ID NO: 392948 - DNA, 20 bp, Artificial Sequence
  Description of Artificial Sequence: Synthetic oligonucleotide
  Target: LAMA2; (+) strand; PAM type: YTN; PAM sequence: CTA
aaactaataatataactgtg

SEQ ID NO: 392949 - DNA, 20 bp, Artificial Sequence
  Description of Artificial Sequence: Synthetic oligonucleotide
  Target: LAMA2; (+) strand; PAM type: YTN; PAM sequence: CTA
ataatataactgtgtaaatg

SEQ ID NO: 392950 - DNA, 20 bp, Artificial Sequence
  Description of Artificial Sequence: Synthetic oligonucleotide
  Target: LAMA2; (+) strand; PAM type: YTN; PAM sequence: CTG
tgtaaatgtttcaattcacc

SEQ ID NO: 392951 - DNA, 20 bp, Artificial Sequence
  Description of Artificial Sequence: Synthetic oligonucleotide
  Target: LAMA2; (+) strand; PAM type: YTN; PAM sequence: TTT
caattcaccattttaaactt

SEQ ID NO: 392952 - DNA, 20 bp, Artificial Sequence
  Description of Artificial Sequence: Synthetic oligonucleotide
  Target: LAMA2; (+) strand; PAM type: YTN; PAM sequence: TTC
aattcaccattttaaacttt

SEQ ID NO: 392953 - DNA, 20 bp, Artificial Sequence
  Description of Artificial Sequence: Synthetic oligonucleotide
  Target: LAMA2; (+) strand; PAM type: YTN; PAM sequence: TTC
accattttaaacttttattt

SEQ ID NO: 392954 - DNA, 20 bp, Artificial Sequence
  Description of Artificial Sequence: Synthetic oligonucleotide
  Target: LAMA2; (+) strand; PAM type: YTN; PAM sequence: TTT
taaacttttatttgacgtag

SEQ ID NO: 392955 - DNA, 20 bp, Artificial Sequence
  Description of Artificial Sequence: Synthetic oligonucleotide
  Target: LAMA2; (+) strand; PAM type: YTN; PAM sequence: TTT
aaacttttatttgacgtaga

SEQ ID NO: 392956 - DNA, 20 bp, Artificial Sequence
  Description of Artificial Sequence: Synthetic oligonucleotide
  Target: LAMA2; (+) strand; PAM type: YTN; PAM sequence: TTA
aacttttatttgacgtagaa

SEQ ID NO: 392957 - DNA, 20 bp, Artificial Sequence
  Description of Artificial Sequence: Synthetic oligonucleotide
  Target: LAMA2; (+) strand; PAM type: YTN; PAM sequence: CTT
ttatttgacgtagaattctt

SEQ ID NO: 392958 - DNA, 20 bp, Artificial Sequence
  Description of Artificial Sequence: Synthetic oligonucleotide
  Target: LAMA2; (+) strand; PAM type: YTN; PAM sequence: TTT
tatttgacgtagaattcttt

SEQ ID NO: 392959 - DNA, 20 bp, Artificial Sequence
  Description of Artificial Sequence: Synthetic oligonucleotide
  Target: LAMA2; (+) strand; PAM type: YTN; PAM sequence: TTT
atttgacgtagaattctttt

SEQ ID NO: 392960 - DNA, 20 bp, Artificial Sequence
  Description of Artificial Sequence: Synthetic oligonucleotide
  Target: LAMA2; (+) strand; PAM type: YTN; PAM sequence: TTA
tttgacgtagaattcttttc

SEQ ID NO: 392961 - DNA, 20 bp, Artificial Sequence
  Description of Artificial Sequence: Synthetic oligonucleotide
  Target: LAMA2; (+) strand; PAM type: YTN; PAM sequence: TTT
gacgtagaattcttttctca

SEQ ID NO: 392962 - DNA, 20 bp, Artificial Sequence
  Description of Artificial Sequence: Synthetic oligonucleotide
  Target: LAMA2; (+) strand; PAM type: YTN; PAM sequence: TTG
acgtagaattcttttctcaa

SEQ ID NO: 392963 - DNA, 20 bp, Artificial Sequence
  Description of Artificial Sequence: Synthetic oligonucleotide
  Target: LAMA2; (+) strand; PAM type: YTN; PAM sequence: TTC
ttttctcaaatgaaatcctg

SEQ ID NO: 392964 - DNA, 20 bp, Artificial Sequence
  Description of Artificial Sequence: Synthetic oligonucleotide
  Target: LAMA2; (+) strand; PAM type: YTN; PAM sequence: CTT
ttctcaaatgaaatcctgcc

SEQ ID NO: 392965 - DNA, 20 bp, Artificial Sequence
  Description of Artificial Sequence: Synthetic oligonucleotide
  Target: LAMA2; (+) strand; PAM type: YTN; PAM sequence: TTT
tctcaaatgaaatcctgccc

SEQ ID NO: 392966 - DNA, 20 bp, Artificial Sequence
  Description of Artificial Sequence: Synthetic oligonucleotide
  Target: LAMA2; (+) strand; PAM type: YTN; PAM sequence: TTT
ctcaaatgaaatcctgccca

SEQ ID NO: 392967 - DNA, 20 bp, Artificial Sequence
  Description of Artificial Sequence: Synthetic oligonucleotide
  Target: LAMA2; (+) strand; PAM type: YTN; PAM sequence: TTC
tcaaatgaaatcctgcccag

SEQ ID NO: 392968 - DNA, 20 bp, Artificial Sequence
  Description of Artificial Sequence: Synthetic oligonucleotide
  Target: LAMA2; (+) strand; PAM type: YTN; PAM sequence: CTC
aaatgaaatcctgcccagaa

SEQ ID NO: 392969 - DNA, 20 bp, Artificial Sequence
  Description of Artificial Sequence: Synthetic oligonucleotide
  Target: LAMA2; (+) strand; PAM type: YTN; PAM sequence: CTG
cccagaacatcagcctataa

SEQ ID NO: 392970 - DNA, 20 bp, Artificial Sequence
  Description of Artificial Sequence: Synthetic oligonucleotide
  Target: LAMA2; (+) strand; PAM type: YTN; PAM sequence: CTA
taaagcagactcttggcaga

SEQ ID NO: 392971 - DNA, 20 bp, Artificial Sequence
  Description of Artificial Sequence: Synthetic oligonucleotide
  Target: LAMA2; (+) strand; PAM type: YTN; PAM sequence: CTC
ttggcagaatagacatcatt

SEQ ID NO: 392972 - DNA, 20 bp, Artificial Sequence
  Description of Artificial Sequence: Synthetic oligonucleotide
  Target: LAMA2; (+) strand; PAM type: YTN; PAM sequence: CTT
ggcagaatagacatcatttg

SEQ ID NO: 392973 - DNA, 20 bp, Artificial Sequence
  Description of Artificial Sequence: Synthetic oligonucleotide
  Target: LAMA2; (+) strand; PAM type: YTN; PAM sequence: TTG
gcagaatagacatcatttgt

SEQ ID NO: 392974 - DNA, 20 bp, Artificial Sequence
  Description of Artificial Sequence: Synthetic oligonucleotide
  Target: LAMA2; (+) strand; PAM type: YTN; PAM sequence: TTT
gtagaaaacctgaagcacct

SEQ ID NO: 392975 - DNA, 20 bp, Artificial Sequence
  Description of Artificial Sequence: Synthetic oligonucleotide
  Target: LAMA2; (+) strand; PAM type: YTN; PAM sequence: TTG
tagaaaacctgaagcacctg

SEQ ID NO: 392976 - DNA, 20 bp, Artificial Sequence
  Description of Artificial Sequence: Synthetic oligonucleotide
  Target: LAMA2; (+) strand; PAM type: YTN; PAM sequence: CTG
aagcacctggagaatcctac

SEQ ID NO: 392977 - DNA, 20 bp, Artificial Sequence
  Description of Artificial Sequence: Synthetic oligonucleotide
  Target: LAMA2; (+) strand; PAM type: YTN; PAM sequence: CTG
gagaatcctacgattccaag

SEQ ID NO: 392978 - DNA, 20 bp, Artificial Sequence
  Description of Artificial Sequence: Synthetic oligonucleotide
  Target: LAMA2; (+) strand; PAM type: YTN; PAM sequence: CTA
cgattccaaggagtacagtt

SEQ ID NO: 392979 - DNA, 20 bp, Artificial Sequence
  Description of Artificial Sequence: Synthetic oligonucleotide
  Target: LAMA2; (+) strand; PAM type: YTN; PAM sequence: TTC
caaggagtacagtttgaaac

SEQ ID NO: 392980 - DNA, 20 bp, Artificial Sequence
  Description of Artificial Sequence: Synthetic oligonucleotide
  Target: LAMA2; (+) strand; PAM type: YTN; PAM sequence: TTT
gaaaccccatttaatgcata

SEQ ID NO: 392981 - DNA, 20 bp, Artificial Sequence
  Description of Artificial Sequence: Synthetic oligonucleotide
  Target: LAMA2; (+) strand; PAM type: YTN; PAM sequence: TTG
aaaccccatttaatgcataa

SEQ ID NO: 392982 - DNA, 20 bp, Artificial Sequence
  Description of Artificial Sequence: Synthetic oligonucleotide
  Target: LAMA2; (+) strand; PAM type: YTN; PAM sequence: TTT
aatgcataataaacacagac

SEQ ID NO: 392983 - DNA, 20 bp, Artificial Sequence
  Description of Artificial Sequence: Synthetic oligonucleotide
  Target: LAMA2; (+) strand; PAM type: YTN; PAM sequence: TTA
atgcataataaacacagacc

SEQ ID NO: 392984 - DNA, 20 bp, Artificial Sequence
  Description of Artificial Sequence: Synthetic oligonucleotide
  Target: LAMA2; (+) strand; PAM type: YTN; PAM sequence: CTT
gtgaaggatgctattgctgg

SEQ ID NO: 392985 - DNA, 20 bp, Artificial Sequence
  Description of Artificial Sequence: Synthetic oligonucleotide
  Target: LAMA2; (+) strand; PAM type: YTN; PAM sequence: TTG
tgaaggatgctattgctgga

SEQ ID NO: 392986 - DNA, 20 bp, Artificial Sequence
  Description of Artificial Sequence: Synthetic oligonucleotide
  Target: LAMA2; (+) strand; PAM type: YTN; PAM sequence: CTA
ttgctggaaagtgtccttga

SEQ ID NO: 392987 - DNA, 20 bp, Artificial Sequence
  Description of Artificial Sequence: Synthetic oligonucleotide
  Target: LAMA2; (+) strand; PAM type: YTN; PAM sequence: TTG
ctggaaagtgtccttgaagc

SEQ ID NO: 392988 - DNA, 20 bp, Artificial Sequence
  Description of Artificial Sequence: Synthetic oligonucleotide
  Target: LAMA2; (+) strand; PAM type: YTN; PAM sequence: CTG
gaaagtgtccttgaagccta

SEQ ID NO: 392989 - DNA, 20 bp, Artificial Sequence
  Description of Artificial Sequence: Synthetic oligonucleotide
  Target: LAMA2; (+) strand; PAM type: YTN; PAM sequence: CTT
gaagcctaatttataaccct

SEQ ID NO: 392990 - DNA, 20 bp, Artificial Sequence
  Description of Artificial Sequence: Synthetic oligonucleotide
  Target: LAMA2; (+) strand; PAM type: YTN; PAM sequence: TTG
aagcctaatttataaccctt

SEQ ID NO: 392991 - DNA, 20 bp, Artificial Sequence
  Description of Artificial Sequence: Synthetic oligonucleotide
  Target: LAMA2; (+) strand; PAM type: YTN; PAM sequence: CTA
atttataacccttctcctag

SEQ ID NO: 392992 - DNA, 20 bp, Artificial Sequence
  Description of Artificial Sequence: Synthetic oligonucleotide
  Target: LAMA2; (+) strand; PAM type: YTN; PAM sequence: TTT
ataacccttctcctagaagg

SEQ ID NO: 392993 - DNA, 20 bp, Artificial Sequence
  Description of Artificial Sequence: Synthetic oligonucleotide
  Target: LAMA2; (+) strand; PAM type: YTN; PAM sequence: TTA
taacccttctcctagaaggg

SEQ ID NO: 392994 - DNA, 20 bp, Artificial Sequence
  Description of Artificial Sequence: Synthetic oligonucleotide
  Target: LAMA2; (+) strand; PAM type: YTN; PAM sequence: CTT
ctcctagaagggttataagt

SEQ ID NO: 392995 - DNA, 20 bp, Artificial Sequence
  Description of Artificial Sequence: Synthetic oligonucleotide
  Target: LAMA2; (+) strand; PAM type: YTN; PAM sequence: TTC
tcctagaagggttataagtc

SEQ ID NO: 392996 - DNA, 20 bp, Artificial Sequence
  Description of Artificial Sequence: Synthetic oligonucleotide
  Target: LAMA2; (+) strand; PAM type: YTN; PAM sequence: CTC
ctagaagggttataagtcta

SEQ ID NO: 392997 - DNA, 20 bp, Artificial Sequence
  Description of Artificial Sequence: Synthetic oligonucleotide
  Target: LAMA2; (+) strand; PAM type: YTN; PAM sequence: CTA
gaagggttataagtctagac

SEQ ID NO: 392998 - DNA, 20 bp, Artificial Sequence
  Description of Artificial Sequence: Synthetic oligonucleotide
  Target: LAMA2; (+) strand; PAM type: YTN; PAM sequence: TTA
taagtctagaccagtgcttc

SEQ ID NO: 392999 - DNA, 20 bp, Artificial Sequence
  Description of Artificial Sequence: Synthetic oligonucleotide
  Target: LAMA2; (+) strand; PAM type: YTN; PAM sequence: CTA
gaccagtgcttctttcttca

SEQ ID NO: 393000 - DNA, 20 bp, Artificial Sequence
  Description of Artificial Sequence: Synthetic oligonucleotide
  Target: LAMA2; (+) strand; PAM type: YTN; PAM sequence: CTT
ctttcttcactcctttaaaa

SEQ ID NO: 393001 - DNA, 20 bp, Artificial Sequence
  Description of Artificial Sequence: Synthetic oligonucleotide
  Target: LAMA2; (+) strand; PAM type: YTN; PAM sequence: TTC
tttcttcactcctttaaaaa

SEQ ID NO: 393002 - DNA, 20 bp, Artificial Sequence
  Description of Artificial Sequence: Synthetic oligonucleotide
  Target: LAMA2; (+) strand; PAM type: YTN; PAM sequence: CTT
tcttcactcctttaaaaaat

SEQ ID NO: 393003 - DNA, 20 bp, Artificial Sequence
  Description of Artificial Sequence: Synthetic oligonucleotide
  Target: LAMA2; (+) strand; PAM type: YTN; PAM sequence: TTT
cttcactcctttaaaaaatg

SEQ ID NO: 393004 - DNA, 20 bp, Artificial Sequence
  Description of Artificial Sequence: Synthetic oligonucleotide
  Target: LAMA2; (+) strand; PAM type: YTN; PAM sequence: TTC
ttcactcctttaaaaaatga

SEQ ID NO: 393005 - DNA, 20 bp, Artificial Sequence
  Description of Artificial Sequence: Synthetic oligonucleotide
  Target: LAMA2; (+) strand; PAM type: YTN; PAM sequence: CTT
cactcctttaaaaaatgaac

SEQ ID NO: 393006 - DNA, 20 bp, Artificial Sequence
  Description of Artificial Sequence: Synthetic oligonucleotide
  Target: LAMA2; (+) strand; PAM type: YTN; PAM sequence: TTC
actcctttaaaaaatgaaca

SEQ ID NO: 393007 - DNA, 20 bp, Artificial Sequence
  Description of Artificial Sequence: Synthetic oligonucleotide
  Target: LAMA2; (+) strand; PAM type: YTN; PAM sequence: CTC
ctttaaaaaatgaacacagg

SEQ ID NO: 393008 - DNA, 20 bp, Artificial Sequence
  Description of Artificial Sequence: Synthetic oligonucleotide
  Target: LAMA2; (+) strand; PAM type: YTN; PAM sequence: CTT
taaaaaatgaacacaggaga

SEQ ID NO: 393009 - DNA, 20 bp, Artificial Sequence
  Description of Artificial Sequence: Synthetic oligonucleotide
  Target: LAMA2; (+) strand; PAM type: YTN; PAM sequence: TTT
aaaaaatgaacacaggagaa

SEQ ID NO: 393010 - DNA, 20 bp, Artificial Sequence
  Description of Artificial Sequence: Synthetic oligonucleotide
  Target: LAMA2; (+) strand; PAM type: YTN; PAM sequence: TTA
aaaaatgaacacaggagaac

SEQ ID NO: 393011 - DNA, 20 bp, Artificial Sequence
  Description of Artificial Sequence: Synthetic oligonucleotide
  Target: LAMA2; (+) strand; PAM type: YTN; PAM sequence: CTA
tgtggaaatacaagggcagg

SEQ ID NO: 393012 - DNA, 20 bp, Artificial Sequence
  Description of Artificial Sequence: Synthetic oligonucleotide
  Target: LAMA2; (+) strand; PAM type: YTN; PAM sequence: TTC
attttcagagatctcatcac

SEQ ID NO: 393013 - DNA, 20 bp, Artificial Sequence
  Description of Artificial Sequence: Synthetic oligonucleotide
  Target: LAMA2; (+) strand; PAM type: YTN; PAM sequence: TTT
tcagagatctcatcactgag

SEQ ID NO: 393014 - DNA, 20 bp, Artificial Sequence
  Description of Artificial Sequence: Synthetic oligonucleotide
  Target: LAMA2; (+) strand; PAM type: YTN; PAM sequence: TTT
cagagatctcatcactgagt

SEQ ID NO: 393015 - DNA, 20 bp, Artificial Sequence
  Description of Artificial Sequence: Synthetic oligonucleotide
  Target: LAMA2; (+) strand; PAM type: YTN; PAM sequence: TTC
agagatctcatcactgagtg

SEQ ID NO: 393016 - DNA, 20 bp, Artificial Sequence
  Description of Artificial Sequence: Synthetic oligonucleotide
  Target: LAMA2; (+) strand; PAM type: YTN; PAM sequence: CTC
atcactgagtgtatttccac

SEQ ID NO: 393017 - DNA, 20 bp, Artificial Sequence
  Description of Artificial Sequence: Synthetic oligonucleotide
  Target: LAMA2; (+) strand; PAM type: YTN; PAM sequence: CTG
agtgtatttccacactcagt

SEQ ID NO: 393018 - DNA, 20 bp, Artificial Sequence
  Description of Artificial Sequence: Synthetic oligonucleotide
  Target: LAMA2; (+) strand; PAM type: YTN; PAM sequence: TTT
ccacactcagtatttttaaa

SEQ ID NO: 393019 - DNA, 20 bp, Artificial Sequence
  Description of Artificial Sequence: Synthetic oligonucleotide
  Target: LAMA2; (+) strand; PAM type: YTN; PAM sequence: TTC
cacactcagtatttttaaac

SEQ ID NO: 393020 - DNA, 20 bp, Artificial Sequence
  Description of Artificial Sequence: Synthetic oligonucleotide
  Target: LAMA2; (+) strand; PAM type: YTN; PAM sequence: CTC
agtatttttaaactgactga

SEQ ID NO: 393021 - DNA, 20 bp, Artificial Sequence
  Description of Artificial Sequence: Synthetic oligonucleotide
  Target: LAMA2; (+) strand; PAM type: YTN; PAM sequence: TTT
ttaaactgactgatagccac

SEQ ID NO: 393022 - DNA, 20 bp, Artificial Sequence
  Description of Artificial Sequence: Synthetic oligonucleotide
  Target: LAMA2; (+) strand; PAM type: YTN; PAM sequence: TTT
taaactgactgatagccact

SEQ ID NO: 393023 - DNA, 20 bp, Artificial Sequence
  Description of Artificial Sequence: Synthetic oligonucleotide
  Target: LAMA2; (+) strand; PAM type: YTN; PAM sequence: TTT
aaactgactgatagccactg

SEQ ID NO: 393024 - DNA, 20 bp, Artificial Sequence
  Description of Artificial Sequence: Synthetic oligonucleotide
  Target: LAMA2; (+) strand; PAM type: YTN; PAM sequence: TTA
aactgactgatagccactgc

SEQ ID NO: 393025 - DNA, 20 bp, Artificial Sequence
  Description of Artificial Sequence: Synthetic oligonucleotide
  Target: LAMA2; (+) strand; PAM type: YTN; PAM sequence: CTG
actgatagccactgctatga

SEQ ID NO: 393026 - DNA, 20 bp, Artificial Sequence
  Description of Artificial Sequence: Synthetic oligonucleotide
  Target: LAMA2; (+) strand; PAM type: YTN; PAM sequence: CTG
atagccactgctatgactat

SEQ ID NO: 393027 - DNA, 20 bp, Artificial Sequence
  Description of Artificial Sequence: Synthetic oligonucleotide
  Target: LAMA2; (+) strand; PAM type: YTN; PAM sequence: CTG
ctatgactatcttatcagca

SEQ ID NO: 393028 - DNA, 20 bp, Artificial Sequence
  Description of Artificial Sequence: Synthetic oligonucleotide
  Target: LAMA2; (+) strand; PAM type: YTN; PAM sequence: CTA
tgactatcttatcagcaatg

SEQ ID NO: 393029 - DNA, 20 bp, Artificial Sequence
  Description of Artificial Sequence: Synthetic oligonucleotide
  Target: LAMA2; (+) strand; PAM type: YTN; PAM sequence: CTA
tcttatcagcaatgcagagc

SEQ ID NO: 393030 - DNA, 20 bp, Artificial Sequence
  Description of Artificial Sequence: Synthetic oligonucleotide
  Target: LAMA2; (+) strand; PAM type: YTN; PAM sequence: CTT
atcagcaatgcagagcttgc

SEQ ID NO: 393031 - DNA, 20 bp, Artificial Sequence
  Description of Artificial Sequence: Synthetic oligonucleotide
  Target: LAMA2; (+) strand; PAM type: YTN; PAM sequence: TTA
tcagcaatgcagagcttgcg

SEQ ID NO: 393032 - DNA, 20 bp, Artificial Sequence
  Description of Artificial Sequence: Synthetic oligonucleotide
  Target: LAMA2; (+) strand; PAM type: YTN; PAM sequence: CTT
gcgtttccagcctccaagtg

SEQ ID NO: 393033 - DNA, 20 bp, Artificial Sequence
  Description of Artificial Sequence: Synthetic oligonucleotide
  Target: LAMA2; (+) strand; PAM type: YTN; PAM sequence: TTG
cgtttccagcctccaagtgt

SEQ ID NO: 393034 - DNA, 20 bp, Artificial Sequence
  Description of Artificial Sequence: Synthetic oligonucleotide
  Target: LAMA2; (+) strand; PAM type: YTN; PAM sequence: TTT
ccagcctccaagtgttatgc

SEQ ID NO: 393035 - DNA, 20 bp, Artificial Sequence
  Description of Artificial Sequence: Synthetic oligonucleotide
  Target: LAMA2; (+) strand; PAM type: YTN; PAM sequence: TTC
cagcctccaagtgttatgct

SEQ ID NO: 393036 - DNA, 20 bp, Artificial Sequence
  Description of Artificial Sequence: Synthetic oligonucleotide
  Target: LAMA2; (+) strand; PAM type: YTN; PAM sequence: CTC
caagtgttatgctacaggtc

SEQ ID NO: 393037 - DNA, 20 bp, Artificial Sequence
  Description of Artificial Sequence: Synthetic oligonucleotide
  Target: LAMA2; (+) strand; PAM type: YTN; PAM sequence: TTA
tgctacaggtcactgttttt

SEQ ID NO: 393038 - DNA, 20 bp, Artificial Sequence
  Description of Artificial Sequence: Synthetic oligonucleotide
  Target: LAMA2; (+) strand; PAM type: YTN; PAM sequence: CTA
caggtcactgttttttttaa

SEQ ID NO: 393039 - DNA, 20 bp, Artificial Sequence
  Description of Artificial Sequence: Synthetic oligonucleotide
  Target: LAMA2; (+) strand; PAM type: YTN; PAM sequence: CTG
ttttttttaaactcttacct

SEQ ID NO: 393040 - DNA, 20 bp, Artificial Sequence
  Description of Artificial Sequence: Synthetic oligonucleotide
  Target: LAMA2; (+) strand; PAM type: YTN; PAM sequence: TTT
tttttaaactcttacctgag

SEQ ID NO: 393041 - DNA, 20 bp, Artificial Sequence
  Description of Artificial Sequence: Synthetic oligonucleotide
  Target: LAMA2; (+) strand; PAM type: YTN; PAM sequence: TTT
ttttaaactcttacctgagt

SEQ ID NO: 393042 - DNA, 20 bp, Artificial Sequence
  Description of Artificial Sequence: Synthetic oligonucleotide
  Target: LAMA2; (+) strand; PAM type: YTN; PAM sequence: TTT
tttaaactcttacctgagta

SEQ ID NO: 393043 - DNA, 20 bp, Artificial Sequence
  Description of Artificial Sequence: Synthetic oligonucleotide
  Target: LAMA2; (+) strand; PAM type: YTN; PAM sequence: TTT
ttaaactcttacctgagtat

SEQ ID NO: 393044 - DNA, 20 bp, Artificial Sequence
  Description of Artificial Sequence: Synthetic oligonucleotide
  Target: LAMA2; (+) strand; PAM type: YTN; PAM sequence: TTT
taaactcttacctgagtatg

SEQ ID NO: 393045 - DNA, 20 bp, Artificial Sequence
  Description of Artificial Sequence: Synthetic oligonucleotide
  Target: LAMA2; (+) strand; PAM type: YTN; PAM sequence: TTT
aaactcttacctgagtatgc

SEQ ID NO: 393046 - DNA, 20 bp, Artificial Sequence
  Description of Artificial Sequence: Synthetic oligonucleotide
  Target: LAMA2; (+) strand; PAM type: YTN; PAM sequence: TTA
aactcttacctgagtatgct

SEQ ID NO: 393047 - DNA, 20 bp, Artificial Sequence
  Description of Artificial Sequence: Synthetic oligonucleotide
  Target: LAMA2; (+) strand; PAM type: YTN; PAM sequence: CTC
ttacctgagtatgcttcgac

SEQ ID NO: 393048 - DNA, 20 bp, Artificial Sequence
  Description of Artificial Sequence: Synthetic oligonucleotide
  Target: LAMA2; (+) strand; PAM type: YTN; PAM sequence: CTT
acctgagtatgcttcgacct

SEQ ID NO: 393049 - DNA, 20 bp, Artificial Sequence
  Description of Artificial Sequence: Synthetic oligonucleotide
  Target: LAMA2; (+) strand; PAM type: YTN; PAM sequence: TTA
cctgagtatgcttcgaccta

SEQ ID NO: 393050 - DNA, 20 bp, Artificial Sequence
  Description of Artificial Sequence: Synthetic oligonucleotide
  Target: LAMA2; (+) strand; PAM type: YTN; PAM sequence: CTG
agtatgcttcgacctacttc

SEQ ID NO: 393051 - DNA, 20 bp, Artificial Sequence
  Description of Artificial Sequence: Synthetic oligonucleotide
  Target: LAMA2; (+) strand; PAM type: YTN; PAM sequence: CTT
cgacctacttctttatttta

SEQ ID NO: 393052 - DNA, 20 bp, Artificial Sequence
  Description of Artificial Sequence: Synthetic oligonucleotide
  Target: LAMA2; (+) strand; PAM type: YTN; PAM sequence: TTC
gacctacttctttattttaa

SEQ ID NO: 393053 - DNA, 20 bp, Artificial Sequence
  Description of Artificial Sequence: Synthetic oligonucleotide
  Target: LAMA2; (+) strand; PAM type: YTN; PAM sequence: CTA
cttctttattttaattcttt

SEQ ID NO: 393054 - DNA, 20 bp, Artificial Sequence
  Description of Artificial Sequence: Synthetic oligonucleotide
  Target: LAMA2; (+) strand; PAM type: YTN; PAM sequence: CTT
ctttattttaattctttctt

SEQ ID NO: 393055 - DNA, 20 bp, Artificial Sequence
  Description of Artificial Sequence: Synthetic oligonucleotide
  Target: LAMA2; (+) strand; PAM type: YTN; PAM sequence: TTC
tttattttaattctttcttt

SEQ ID NO: 393056 - DNA, 20 bp, Artificial Sequence
  Description of Artificial Sequence: Synthetic oligonucleotide
  Target: LAMA2; (+) strand; PAM type: YTN; PAM sequence: CTT
tattttaattctttctttct

SEQ ID NO: 393057 - DNA, 20 bp, Artificial Sequence
  Description of Artificial Sequence: Synthetic oligonucleotide
  Target: LAMA2; (+) strand; PAM type: YTN; PAM sequence: TTT
attttaattctttctttctt

SEQ ID NO: 393058 - DNA, 20 bp, Artificial Sequence
  Description of Artificial Sequence: Synthetic oligonucleotide
  Target: LAMA2; (+) strand; PAM type: YTN; PAM sequence: TTA
ttttaattctttctttcttt

SEQ ID NO: 393059 - DNA, 20 bp, Artificial Sequence
  Description of Artificial Sequence: Synthetic oligonucleotide
  Target: LAMA2; (+) strand; PAM type: YTN; PAM sequence: TTT
taattctttctttcttttga

SEQ ID NO: 393060 - DNA, 20 bp, Artificial Sequence
  Description of Artificial Sequence: Synthetic oligonucleotide
  Target: LAMA2; (+) strand; PAM type: YTN; PAM sequence: TTT
aattctttctttcttttgag

SEQ ID NO: 393061 - DNA, 20 bp, Artificial Sequence
  Description of Artificial Sequence: Synthetic oligonucleotide
  Target: LAMA2; (+) strand; PAM type: YTN; PAM sequence: TTA
attctttctttcttttgagg

SEQ ID NO: 393062 - DNA, 20 bp, Artificial Sequence
  Description of Artificial Sequence: Synthetic oligonucleotide
  Target: LAMA2; (+) strand; PAM type: YTN; PAM sequence: TTC
tttctttcttttgaggttag

SEQ ID NO: 393063 - DNA, 20 bp, Artificial Sequence
  Description of Artificial Sequence: Synthetic oligonucleotide
  Target: LAMA2; (+) strand; PAM type: YTN; PAM sequence: CTT
tctttcttttgaggttagaa

SEQ ID NO: 393064 - DNA, 20 bp, Artificial Sequence
  Description of Artificial Sequence: Synthetic oligonucleotide
  Target: LAMA2; (+) strand; PAM type: YTN; PAM sequence: TTT
ctttcttttgaggttagaaa

SEQ ID NO: 393065 - DNA, 20 bp, Artificial Sequence
  Description of Artificial Sequence: Synthetic oligonucleotide
  Target: LAMA2; (+) strand; PAM type: YTN; PAM sequence: TTC
tttcttttgaggttagaaac

SEQ ID NO: 393066 - DNA, 20 bp, Artificial Sequence
  Description of Artificial Sequence: Synthetic oligonucleotide
  Target: LAMA2; (+) strand; PAM type: YTN; PAM sequence: CTT
tcttttgaggttagaaacac

SEQ ID NO: 393067 - DNA, 20 bp, Artificial Sequence
  Description of Artificial Sequence: Synthetic oligonucleotide
  Target: LAMA2; (+) strand; PAM type: YTN; PAM sequence: TTT
cttttgaggttagaaacacc

SEQ ID NO: 393068 - DNA, 20 bp, Artificial Sequence
  Description of Artificial Sequence: Synthetic oligonucleotide
  Target: LAMA2; (+) strand; PAM type: YTN; PAM sequence: TTC
ttttgaggttagaaacacca

SEQ ID NO: 393069 - DNA, 20 bp, Artificial Sequence
  Description of Artificial Sequence: Synthetic oligonucleotide
  Target: LAMA2; (+) strand; PAM type: YTN; PAM sequence: CTT
ttgaggttagaaacaccatg

SEQ ID NO: 393070 - DNA, 20 bp, Artificial Sequence
  Description of Artificial Sequence: Synthetic oligonucleotide
  Target: LAMA2; (+) strand; PAM type: YTN; PAM sequence: TTT
tgaggttagaaacaccatgc

SEQ ID NO: 393071 - DNA, 20 bp, Artificial Sequence
  Description of Artificial Sequence: Synthetic oligonucleotide
  Target: LAMA2; (+) strand; PAM type: YTN; PAM sequence: TTT
gaggttagaaacaccatgct

SEQ ID NO: 393072 - DNA, 20 bp, Artificial Sequence
  Description of Artificial Sequence: Synthetic oligonucleotide
  Target: LAMA2; (+) strand; PAM type: YTN; PAM sequence: TTG
aggttagaaacaccatgctt

SEQ ID NO: 393073 - DNA, 20 bp, Artificial Sequence
  Description of Artificial Sequence: Synthetic oligonucleotide
  Target: LAMA2; (+) strand; PAM type: YTN; PAM sequence: TTA
gaaacaccatgctttaattg

SEQ ID NO: 393074 - DNA, 20 bp, Artificial Sequence
  Description of Artificial Sequence: Synthetic oligonucleotide
  Target: LAMA2; (+) strand; PAM type: YTN; PAM sequence: CTT
taattgctgtaacccccaaa

SEQ ID NO: 393075 - DNA, 20 bp, Artificial Sequence
  Description of Artificial Sequence: Synthetic oligonucleotide
  Target: LAMA2; (+) strand; PAM type: YTN; PAM sequence: TTT
aattgctgtaacccccaaaa

SEQ ID NO: 393076 - DNA, 20 bp, Artificial Sequence
  Description of Artificial Sequence: Synthetic oligonucleotide
  Target: LAMA2; (+) strand; PAM type: YTN; PAM sequence: TTA
attgctgtaacccccaaaag

SEQ ID NO: 393077 - DNA, 20 bp, Artificial Sequence
  Description of Artificial Sequence: Synthetic oligonucleotide
  Target: LAMA2; (+) strand; PAM type: YTN; PAM sequence: TTG
ctgtaacccccaaaagaaat

SEQ ID NO: 393078 - DNA, 20 bp, Artificial Sequence
  Description of Artificial Sequence: Synthetic oligonucleotide
  Target: LAMA2; (+) strand; PAM type: YTN; PAM sequence: CTG
taacccccaaaagaaatata

SEQ ID NO: 393079 - DNA, 20 bp, Artificial Sequence
  Description of Artificial Sequence: Synthetic oligonucleotide
  Target: LAMA2; (+) strand; PAM type: YTN; PAM sequence: TTG
agaaacatattacatttccc

SEQ ID NO: 393080 - DNA, 20 bp, Artificial Sequence
  Description of Artificial Sequence: Synthetic oligonucleotide
  Target: LAMA2; (+) strand; PAM type: YTN; PAM sequence: TTA
catttccctgtttgttactg

SEQ ID NO: 393081 - DNA, 20 bp, Artificial Sequence
  Description of Artificial Sequence: Synthetic oligonucleotide
  Target: LAMA2; (+) strand; PAM type: YTN; PAM sequence: TTT
ccctgtttgttactgattgt

SEQ ID NO: 393082 - DNA, 20 bp, Artificial Sequence
  Description of Artificial Sequence: Synthetic oligonucleotide
  Target: LAMA2; (+) strand; PAM type: YTN; PAM sequence: TTC
cctgtttgttactgattgtt

SEQ ID NO: 393083 - DNA, 20 bp, Artificial Sequence
  Description of Artificial Sequence: Synthetic oligonucleotide
  Target: LAMA2; (+) strand; PAM type: YTN; PAM sequence: CTG
tttgttactgattgttgtct

SEQ ID NO: 393084 - DNA, 20 bp, Artificial Sequence
  Description of Artificial Sequence: Synthetic oligonucleotide
  Target: LAMA2; (+) strand; PAM type: YTN; PAM sequence: TTT
gttactgattgttgtcttaa

SEQ ID NO: 393085 - DNA, 20 bp, Artificial Sequence
  Description of Artificial Sequence: Synthetic oligonucleotide
  Target: LAMA2; (+) strand; PAM type: YTN; PAM sequence: TTG
ttactgattgttgtcttaac

SEQ ID NO: 393086 - DNA, 20 bp, Artificial Sequence
  Description of Artificial Sequence: Synthetic oligonucleotide
  Target: LAMA2; (+) strand; PAM type: YTN; PAM sequence: TTA
ctgattgttgtcttaactgc

SEQ ID NO: 393087 - DNA, 20 bp, Artificial Sequence
  Description of Artificial Sequence: Synthetic oligonucleotide
  Target: LAMA2; (+) strand; PAM type: YTN; PAM sequence: CTG
attgttgtcttaactgcctc

SEQ ID NO: 393088 - DNA, 20 bp, Artificial Sequence
  Description of Artificial Sequence: Synthetic oligonucleotide
  Target: LAMA2; (+) strand; PAM type: YTN; PAM sequence: TTG
ttgtcttaactgcctctgtg

SEQ ID NO: 393089 - DNA, 20 bp, Artificial Sequence
  Description of Artificial Sequence: Synthetic oligonucleotide
  Target: LAMA2; (+) strand; PAM type: YTN; PAM sequence: TTG
tcttaactgcctctgtggtt

SEQ ID NO: 393090 - DNA, 20 bp, Artificial Sequence
  Description of Artificial Sequence: Synthetic oligonucleotide
  Target: LAMA2; (+) strand; PAM type: YTN; PAM sequence: CTT
aactgcctctgtggttccca

SEQ ID NO: 393091 - DNA, 20 bp, Artificial Sequence
  Description of Artificial Sequence: Synthetic oligonucleotide
  Target: LAMA2; (+) strand; PAM type: YTN; PAM sequence: TTA
actgcctctgtggttcccag

SEQ ID NO: 393092 - DNA, 20 bp, Artificial Sequence
  Description of Artificial Sequence: Synthetic oligonucleotide
  Target: LAMA2; (+) strand; PAM type: YTN; PAM sequence: CTG
cctctgtggttcccagcagg

SEQ ID NO: 393093 - DNA, 20 bp, Artificial Sequence
  Description of Artificial Sequence: Synthetic oligonucleotide
  Target: LAMA2; (+) strand; PAM type: YTN; PAM sequence: CTC
tgtggttcccagcaggaaca

SEQ ID NO: 393094 - DNA, 20 bp, Artificial Sequence
  Description of Artificial Sequence: Synthetic oligonucleotide
  Target: LAMA2; (+) strand; PAM type: YTN; PAM sequence: CTG
tggttcccagcaggaacact

SEQ ID NO: 393095 - DNA, 20 bp, Artificial Sequence
  Description of Artificial Sequence: Synthetic oligonucleotide
  Target: LAMA2; (+) strand; PAM type: YTN; PAM sequence: TTC
ccagcaggaacactcacggc

SEQ ID NO: 393096 - DNA, 20 bp, Artificial Sequence
  Description of Artificial Sequence: Synthetic oligonucleotide
  Target: LAMA2; (+) strand; PAM type: YTN; PAM sequence: CTC
acggcaaaatactcttcatt

SEQ ID NO: 393097 - DNA, 20 bp, Artificial Sequence
  Description of Artificial Sequence: Synthetic oligonucleotide
  Target: LAMA2; (+) strand; PAM type: YTN; PAM sequence: CTC
ttcatttggagatggtggtg

SEQ ID NO: 393098 - DNA, 20 bp, Artificial Sequence
  Description of Artificial Sequence: Synthetic oligonucleotide
  Target: LAMA2; (+) strand; PAM type: YTN; PAM sequence: CTT
catttggagatggtggtgcc

SEQ ID NO: 393099 - DNA, 20 bp, Artificial Sequence
  Description of Artificial Sequence: Synthetic oligonucleotide
  Target: LAMA2; (+) strand; PAM type: YTN; PAM sequence: TTC
atttggagatggtggtgccc

SEQ ID NO: 393100 - DNA, 20 bp, Artificial Sequence
  Description of Artificial Sequence: Synthetic oligonucleotide
  Target: LAMA2; (+) strand; PAM type: YTN; PAM sequence: TTT
ggagatggtggtgcccagca

SEQ ID NO: 393101 - DNA, 20 bp, Artificial Sequence
  Description of Artificial Sequence: Synthetic oligonucleotide
  Target: LAMA2; (+) strand; PAM type: YTN; PAM sequence: TTG
gagatggtggtgcccagcag

SEQ ID NO: 393102 - DNA, 20 bp, Artificial Sequence
  Description of Artificial Sequence: Synthetic oligonucleotide
  Target: LAMA2; (+) strand; PAM type: YTN; PAM sequence: CTG
aataccatgttttcatgtgg

SEQ ID NO: 393103 - DNA, 20 bp, Artificial Sequence
  Description of Artificial Sequence: Synthetic oligonucleotide
  Target: LAMA2; (+) strand; PAM type: YTN; PAM sequence: TTT
tcatgtggcatgtttgttta

SEQ ID NO: 393104 - DNA, 20 bp, Artificial Sequence
  Description of Artificial Sequence: Synthetic oligonucleotide
  Target: LAMA2; (+) strand; PAM type: YTN; PAM sequence: TTT
catgtggcatgtttgtttac

SEQ ID NO: 393105 - DNA, 20 bp, Artificial Sequence
  Description of Artificial Sequence: Synthetic oligonucleotide
  Target: LAMA2; (+) strand; PAM type: YTN; PAM sequence: TTC
atgtggcatgtttgtttact

SEQ ID NO: 393106 - DNA, 20 bp, Artificial Sequence
  Description of Artificial Sequence: Synthetic oligonucleotide
  Target: LAMA2; (+) strand; PAM type: YTN; PAM sequence: TTT
gtttactaatttacaaaatt

SEQ ID NO: 393107 - DNA, 20 bp, Artificial Sequence
  Description of Artificial Sequence: Synthetic oligonucleotide
  Target: LAMA2; (+) strand; PAM type: YTN; PAM sequence: TTG
tttactaatttacaaaattt

SEQ ID NO: 393108 - DNA, 20 bp, Artificial Sequence
  Description of Artificial Sequence: Synthetic oligonucleotide
  Target: LAMA2; (+) strand; PAM type: YTN; PAM sequence: TTT
actaatttacaaaatttgtt

SEQ ID NO: 393109 - DNA, 20 bp, Artificial Sequence
  Description of Artificial Sequence: Synthetic oligonucleotide
  Target: LAMA2; (+) strand; PAM type: YTN; PAM sequence: TTA
ctaatttacaaaatttgttt

SEQ ID NO: 393110 - DNA, 20 bp, Artificial Sequence
  Description of Artificial Sequence: Synthetic oligonucleotide
  Target: LAMA2; (+) strand; PAM type: YTN; PAM sequence: CTA
atttacaaaatttgttttac

SEQ ID NO: 393111 - DNA, 20 bp, Artificial Sequence
  Description of Artificial Sequence: Synthetic oligonucleotide
  Target: LAMA2; (+) strand; PAM type: YTN; PAM sequence: TTT
acaaaatttgttttaccccc

SEQ ID NO: 393112 - DNA, 20 bp, Artificial Sequence
  Description of Artificial Sequence: Synthetic oligonucleotide
  Target: LAMA2; (+) strand; PAM type: YTN; PAM sequence: TTA
caaaatttgttttaccccct

SEQ ID NO: 393113 - DNA, 20 bp, Artificial Sequence
  Description of Artificial Sequence: Synthetic oligonucleotide
  Target: LAMA2; (+) strand; PAM type: YTN; PAM sequence: TTT
gttttaccccctgcagctgt

SEQ ID NO: 393114 - DNA, 20 bp, Artificial Sequence
  Description of Artificial Sequence: Synthetic oligonucleotide
  Target: LAMA2; (+) strand; PAM type: YTN; PAM sequence: TTG
ttttaccccctgcagctgta

SEQ ID NO: 393115 - DNA, 20 bp, Artificial Sequence
  Description of Artificial Sequence: Synthetic oligonucleotide
  Target: LAMA2; (+) strand; PAM type: YTN; PAM sequence: TTT
taccccctgcagctgtaaat

SEQ ID NO: 393116 - DNA, 20 bp, Artificial Sequence
  Description of Artificial Sequence: Synthetic oligonucleotide
  Target: LAMA2; (+) strand; PAM type: YTN; PAM sequence: TTT
accccctgcagctgtaaatg

SEQ ID NO: 393117 - DNA, 20 bp, Artificial Sequence
  Description of Artificial Sequence: Synthetic oligonucleotide
  Target: LAMA2; (+) strand; PAM type: YTN; PAM sequence: TTA
ccccctgcagctgtaaatga

SEQ ID NO: 393118 - DNA, 20 bp, Artificial Sequence
  Description of Artificial Sequence: Synthetic oligonucleotide
  Target: LAMA2; (+) strand; PAM type: YTN; PAM sequence: CTG
cagctgtaaatgaaaaagct

SEQ ID NO: 393119 - DNA, 20 bp, Artificial Sequence
  Description of Artificial Sequence: Synthetic oligonucleotide
  Target: LAMA2; (+) strand; PAM type: YTN; PAM sequence: CTG
taaatgaaaaagctataaaa

SEQ ID NO: 393120 - DNA, 20 bp, Artificial Sequence
  Description of Artificial Sequence: Synthetic oligonucleotide
  Target: LAMA2; (+) strand; PAM type: YTN; PAM sequence: CTA
taaaactaaatgaaactcta

SEQ ID NO: 393121 - DNA, 20 bp, Artificial Sequence
  Description of Artificial Sequence: Synthetic oligonucleotide
  Target: LAMA2; (+) strand; PAM type: YTN; PAM sequence: CTA
aatgaaactctaggaactcg

SEQ ID NO: 393122 - DNA, 20 bp, Artificial Sequence
  Description of Artificial Sequence: Synthetic oligonucleotide
  Target: LAMA2; (+) strand; PAM type: YTN; PAM sequence: CTC
taggaactcgagacgaggcc

SEQ ID NO: 393123 - DNA, 20 bp, Artificial Sequence
  Description of Artificial Sequence: Synthetic oligonucleotide
  Target: LAMA2; (+) strand; PAM type: YTN; PAM sequence: CTA
ggaactcgagacgaggcctt

SEQ ID NO: 393124 - DNA, 20 bp, Artificial Sequence
  Description of Artificial Sequence: Synthetic oligonucleotide
  Target: LAMA2; (+) strand; PAM type: YTN; PAM sequence: CTC
gagacgaggcctttgagaga

SEQ ID NO: 393125 - DNA, 20 bp, Artificial Sequence
  Description of Artificial Sequence: Synthetic oligonucleotide
  Target: LAMA2; (+) strand; PAM type: YTN; PAM sequence: CTT
tgagagaaatttggaagggc

SEQ ID NO: 393126 - DNA, 20 bp, Artificial Sequence
  Description of Artificial Sequence: Synthetic oligonucleotide
  Target: LAMA2; (+) strand; PAM type: YTN; PAM sequence: TTT
gagagaaatttggaagggct

SEQ ID NO: 393127 - DNA, 20 bp, Artificial Sequence
  Description of Artificial Sequence: Synthetic oligonucleotide
  Target: LAMA2; (+) strand; PAM type: YTN; PAM sequence: TTG
agagaaatttggaagggctt

SEQ ID NO: 393128 - DNA, 20 bp, Artificial Sequence
  Description of Artificial Sequence: Synthetic oligonucleotide
  Target: LAMA2; (+) strand; PAM type: YTN; PAM sequence: TTT
ggaagggcttcagaaagaga

SEQ ID NO: 393129 - DNA, 20 bp, Artificial Sequence
  Description of Artificial Sequence: Synthetic oligonucleotide
  Target: LAMA2; (+) strand; PAM type: YTN; PAM sequence: TTG
gaagggcttcagaaagagat

SEQ ID NO: 393130 - DNA, 20 bp, Artificial Sequence
  Description of Artificial Sequence: Synthetic oligonucleotide
  Target: LAMA2; (+) strand; PAM type: YTN; PAM sequence: CTT
cagaaagagattgaccagat

SEQ ID NO: 393131 - DNA, 20 bp, Artificial Sequence
  Description of Artificial Sequence: Synthetic oligonucleotide
  Target: LAMA2; (+) strand; PAM type: YTN; PAM sequence: TTC
agaaagagattgaccagatg

SEQ ID NO: 393132 - DNA, 20 bp, Artificial Sequence
  Description of Artificial Sequence: Synthetic oligonucleotide
  Target: LAMA2; (+) strand; PAM type: YTN; PAM sequence: TTG
accagatgattaaagaactg

SEQ ID NO: 393133 - DNA, 20 bp, Artificial Sequence
  Description of Artificial Sequence: Synthetic oligonucleotide
  Target: LAMA2; (+) strand; PAM type: YTN; PAM sequence: TTA
aagaactgaggaggaaaaat

SEQ ID NO: 393134 - DNA, 20 bp, Artificial Sequence
  Description of Artificial Sequence: Synthetic oligonucleotide
  Target: LAMA2; (+) strand; PAM type: YTN; PAM sequence: CTG
aggaggaaaaatctagagac

SEQ ID NO: 393135 - DNA, 20 bp, Artificial Sequence
  Description of Artificial Sequence: Synthetic oligonucleotide
  Target: LAMA2; (+) strand; PAM type: YTN; PAM sequence: CTA
gagacacaaaaggaaattgc

SEQ ID NO: 393136 - DNA, 20 bp, Artificial Sequence
  Description of Artificial Sequence: Synthetic oligonucleotide
  Target: LAMA2; (+) strand; PAM type: YTN; PAM sequence: TTG
ctgaagatgagttggtgtga

SEQ ID NO: 393137 - DNA, 20 bp, Artificial Sequence
  Description of Artificial Sequence: Synthetic oligonucleotide
  Target: LAMA2; (+) strand; PAM type: YTN; PAM sequence: CTG
aagatgagttggtgtgagta

SEQ ID NO: 393138 - DNA, 20 bp, Artificial Sequence
  Description of Artificial Sequence: Synthetic oligonucleotide
  Target: LAMA2; (+) strand; PAM type: YTN; PAM sequence: TTG
gtgtgagtagatgagttatt

SEQ ID NO: 393139 - DNA, 20 bp, Artificial Sequence
  Description of Artificial Sequence: Synthetic oligonucleotide
  Target: LAMA2; (+) strand; PAM type: YTN; PAM sequence: TTA
ttattttttcttttgacaaa

SEQ ID NO: 393140 - DNA, 20 bp, Artificial Sequence
  Description of Artificial Sequence: Synthetic oligonucleotide
  Target: LAMA2; (+) strand; PAM type: YTN; PAM sequence: TTA
ttttttcttttgacaaactg

SEQ ID NO: 393141 - DNA, 20 bp, Artificial Sequence
  Description of Artificial Sequence: Synthetic oligonucleotide
  Target: LAMA2; (+) strand; PAM type: YTN; PAM sequence: TTT
tttcttttgacaaactgaga

SEQ ID NO: 393142 - DNA, 20 bp, Artificial Sequence
  Description of Artificial Sequence: Synthetic oligonucleotide
  Target: LAMA2; (+) strand; PAM type: YTN; PAM sequence: TTT
ttcttttgacaaactgagat

SEQ ID NO: 393143 - DNA, 20 bp, Artificial Sequence
  Description of Artificial Sequence: Synthetic oligonucleotide
  Target: LAMA2; (+) strand; PAM type: YTN; PAM sequence: TTT
tcttttgacaaactgagatt

SEQ ID NO: 393144 - DNA, 20 bp, Artificial Sequence
  Description of Artificial Sequence: Synthetic oligonucleotide
  Target: LAMA2; (+) strand; PAM type: YTN; PAM sequence: TTT
cttttgacaaactgagattt

SEQ ID NO: 393145 - DNA, 20 bp, Artificial Sequence
  Description of Artificial Sequence: Synthetic oligonucleotide
  Target: LAMA2; (+) strand; PAM type: YTN; PAM sequence: TTC
ttttgacaaactgagatttc

SEQ ID NO: 393146 - DNA, 20 bp, Artificial Sequence
  Description of Artificial Sequence: Synthetic oligonucleotide
  Target: LAMA2; (+) strand; PAM type: YTN; PAM sequence: CTT
ttgacaaactgagatttcca

SEQ ID NO: 393147 - DNA, 20 bp, Artificial Sequence
  Description of Artificial Sequence: Synthetic oligonucleotide
  Target: LAMA2; (+) strand; PAM type: YTN; PAM sequence: TTT
tgacaaactgagatttccag

SEQ ID NO: 393148 - DNA, 20 bp, Artificial Sequence
  Description of Artificial Sequence: Synthetic oligonucleotide
  Target: LAMA2; (+) strand; PAM type: YTN; PAM sequence: TTT
gacaaactgagatttccaga

SEQ ID NO: 393149 - DNA, 20 bp, Artificial Sequence
  Description of Artificial Sequence: Synthetic oligonucleotide
  Target: LAMA2; (+) strand; PAM type: YTN; PAM sequence: TTG
acaaactgagatttccagat

SEQ ID NO: 393150 - DNA, 20 bp, Artificial Sequence
  Description of Artificial Sequence: Synthetic oligonucleotide
  Target: LAMA2; (+) strand; PAM type: YTN; PAM sequence: CTG
agatttccagataatttaca

SEQ ID NO: 393151 - DNA, 20 bp, Artificial Sequence
  Description of Artificial Sequence: Synthetic oligonucleotide
  Target: LAMA2; (+) strand; PAM type: YTN; PAM sequence: TTT
ccagataatttacagttttc

SEQ ID NO: 393152 - DNA, 20 bp, Artificial Sequence
  Description of Artificial Sequence: Synthetic oligonucleotide
  Target: LAMA2; (+) strand; PAM type: YTN; PAM sequence: TTC
cagataatttacagttttct

SEQ ID NO: 393153 - DNA, 20 bp, Artificial Sequence
  Description of Artificial Sequence: Synthetic oligonucleotide
  Target: LAMA2; (+) strand; PAM type: YTN; PAM sequence: TTT
acagttttctaaatttttat

SEQ ID NO: 393154 - DNA, 20 bp, Artificial Sequence
  Description of Artificial Sequence: Synthetic oligonucleotide
  Target: LAMA2; (+) strand; PAM type: YTN; PAM sequence: TTA
cagttttctaaatttttatc

SEQ ID NO: 393155 - DNA, 20 bp, Artificial Sequence
  Description of Artificial Sequence: Synthetic oligonucleotide
  Target: LAMA2; (+) strand; PAM type: YTN; PAM sequence: TTT
tctaaatttttatcacacgt

SEQ ID NO: 393156 - DNA, 20 bp, Artificial Sequence
  Description of Artificial Sequence: Synthetic oligonucleotide
  Target: LAMA2; (+) strand; PAM type: YTN; PAM sequence: TTT
ctaaatttttatcacacgta

SEQ ID NO: 393157 - DNA, 20 bp, Artificial Sequence
  Description of Artificial Sequence: Synthetic oligonucleotide
  Target: LAMA2; (+) strand; PAM type: YTN; PAM sequence: TTC
taaatttttatcacacgtat

SEQ ID NO: 393158 - DNA, 20 bp, Artificial Sequence
  Description of Artificial Sequence: Synthetic oligonucleotide
  Target: LAMA2; (+) strand; PAM type: YTN; PAM sequence: CTA
aatttttatcacacgtataa

SEQ ID NO: 393159 - DNA, 20 bp, Artificial Sequence
  Description of Artificial Sequence: Synthetic oligonucleotide
  Target: LAMA2; (+) strand; PAM type: YTN; PAM sequence: TTT
ttatcacacgtataagtaaa

SEQ ID NO: 393160 - DNA, 20 bp, Artificial Sequence
  Description of Artificial Sequence: Synthetic oligonucleotide
  Target: LAMA2; (+) strand; PAM type: YTN; PAM sequence: TTT
tatcacacgtataagtaaaa

SEQ ID NO: 393161 - DNA, 20 bp, Artificial Sequence
  Description of Artificial Sequence: Synthetic oligonucleotide
  Target: LAMA2; (+) strand; PAM type: YTN; PAM sequence: TTT
atcacacgtataagtaaaag

SEQ ID NO: 393162 - DNA, 20 bp, Artificial Sequence
  Description of Artificial Sequence: Synthetic oligonucleotide
  Target: LAMA2; (+) strand; PAM type: YTN; PAM sequence: TTA
tcacacgtataagtaaaaga

SEQ ID NO: 393163 - DNA, 20 bp, Artificial Sequence
  Description of Artificial Sequence: Synthetic oligonucleotide
  Target: LAMA2; (+) strand; PAM type: YTN; PAM sequence: CTT
tgtttttccaacctggagat

SEQ ID NO: 393164 - DNA, 20 bp, Artificial Sequence
  Description of Artificial Sequence: Synthetic oligonucleotide
  Target: LAMA2; (+) strand; PAM type: YTN; PAM sequence: TTT
gtttttccaacctggagata

SEQ ID NO: 393165 - DNA, 20 bp, Artificial Sequence
  Description of Artificial Sequence: Synthetic oligonucleotide
  Target: LAMA2; (+) strand; PAM type: YTN; PAM sequence: TTG
tttttccaacctggagatat

SEQ ID NO: 393166 - DNA, 20 bp, Artificial Sequence
  Description of Artificial Sequence: Synthetic oligonucleotide
  Target: LAMA2; (+) strand; PAM type: YTN; PAM sequence: TTT
ttccaacctggagatatttg

SEQ ID NO: 393167 - DNA, 20 bp, Artificial Sequence
  Description of Artificial Sequence: Synthetic oligonucleotide
  Target: LAMA2; (+) strand; PAM type: YTN; PAM sequence: TTT
tccaacctggagatatttgc

SEQ ID NO: 393168 - DNA, 20 bp, Artificial Sequence
  Description of Artificial Sequence: Synthetic oligonucleotide
  Target: LAMA2; (+) strand; PAM type: YTN; PAM sequence: TTT
ccaacctggagatatttgct

SEQ ID NO: 393169 - DNA, 20 bp, Artificial Sequence
  Description of Artificial Sequence: Synthetic oligonucleotide
  Target: LAMA2; (+) strand; PAM type: YTN; PAM sequence: TTC
caacctggagatatttgcta

SEQ ID NO: 393170 - DNA, 20 bp, Artificial Sequence
  Description of Artificial Sequence: Synthetic oligonucleotide
  Target: LAMA2; (+) strand; PAM type: YTN; PAM sequence: CTG
gagatatttgctatgttatc

SEQ ID NO: 393171 - DNA, 20 bp, Artificial Sequence
  Description of Artificial Sequence: Synthetic oligonucleotide
  Target: LAMA2; (+) strand; PAM type: YTN; PAM sequence: TTT
gctatgttatctatcatcta

SEQ ID NO: 393172 - DNA, 20 bp, Artificial Sequence
  Description of Artificial Sequence: Synthetic oligonucleotide
  Target: LAMA2; (+) strand; PAM type: YTN; PAM sequence: TTG
ctatgttatctatcatctat

SEQ ID NO: 393173 - DNA, 20 bp, Artificial Sequence
  Description of Artificial Sequence: Synthetic oligonucleotide
  Target: LAMA2; (+) strand; PAM type: YTN; PAM sequence: CTA
tgttatctatcatctatcta

SEQ ID NO: 393174 - DNA, 20 bp, Artificial Sequence
  Description of Artificial Sequence: Synthetic oligonucleotide
  Target: LAMA2; (+) strand; PAM type: YTN; PAM sequence: TTA
tctatcatctatctatctat

SEQ ID NO: 393175 - DNA, 20 bp, Artificial Sequence
  Description of Artificial Sequence: Synthetic oligonucleotide
  Target: LAMA2; (+) strand; PAM type: YTN; PAM sequence: CTA
tcatctatctatctatctat

SEQ ID NO: 393176 - DNA, 20 bp, Artificial Sequence
  Description of Artificial Sequence: Synthetic oligonucleotide
  Target: LAMA2; (+) strand; PAM type: YTN; PAM sequence: CTA
tctatctatctatctatcta

SEQ ID NO: 393177 - DNA, 20 bp, Artificial Sequence
  Description of Artificial Sequence: Synthetic oligonucleotide
  Target: LAMA2; (+) strand; PAM type: YTN; PAM sequence: CTA
tctatctatctatctattta

SEQ ID NO: 393178 - DNA, 20 bp, Artificial Sequence
  Description of Artificial Sequence: Synthetic oligonucleotide
  Target: LAMA2; (+) strand; PAM type: YTN; PAM sequence: CTA
tctatctatctatttatcta

SEQ ID NO: 393179 - DNA, 20 bp, Artificial Sequence
  Description of Artificial Sequence: Synthetic oligonucleotide
  Target: LAMA2; (+) strand; PAM type: YTN; PAM sequence: CTA
tctatctatttatctatcta

SEQ ID NO: 393180 - DNA, 20 bp, Artificial Sequence
  Description of Artificial Sequence: Synthetic oligonucleotide
  Target: LAMA2; (+) strand; PAM type: YTN; PAM sequence: CTA
tctatttatctatctaccat

SEQ ID NO: 393181 - DNA, 20 bp, Artificial Sequence
  Description of Artificial Sequence: Synthetic oligonucleotide
  Target: LAMA2; (+) strand; PAM type: YTN; PAM sequence: CTA
tttatctatctaccatctat

SEQ ID NO: 393182 - DNA, 20 bp, Artificial Sequence
  Description of Artificial Sequence: Synthetic oligonucleotide
  Target: LAMA2; (+) strand; PAM type: YTN; PAM sequence: TTT
atctatctaccatctattat

SEQ ID NO: 393183 - DNA, 20 bp, Artificial Sequence
  Description of Artificial Sequence: Synthetic oligonucleotide
  Target: LAMA2; (+) strand; PAM type: YTN; PAM sequence: TTA
tctatctaccatctattatt

SEQ ID NO: 393184 - DNA, 20 bp, Artificial Sequence
  Description of Artificial Sequence: Synthetic oligonucleotide
  Target: LAMA2; (+) strand; PAM type: YTN; PAM sequence: CTA
tctaccatctattatttatt

SEQ ID NO: 393185 - DNA, 20 bp, Artificial Sequence
  Description of Artificial Sequence: Synthetic oligonucleotide
  Target: LAMA2; (+) strand; PAM type: YTN; PAM sequence: CTA
ccatctattatttattcatt

SEQ ID NO: 393186 - DNA, 20 bp, Artificial Sequence
  Description of Artificial Sequence: Synthetic oligonucleotide
  Target: LAMA2; (+) strand; PAM type: YTN; PAM sequence: CTA
ttatttattcatttacttat

SEQ ID NO: 393187 - DNA, 20 bp, Artificial Sequence
  Description of Artificial Sequence: Synthetic oligonucleotide
  Target: LAMA2; (+) strand; PAM type: YTN; PAM sequence: TTA
tttattcatttacttattta

SEQ ID NO: 393188 - DNA, 20 bp, Artificial Sequence
  Description of Artificial Sequence: Synthetic oligonucleotide
  Target: LAMA2; (+) strand; PAM type: YTN; PAM sequence: TTT
attcatttacttatttaatt

SEQ ID NO: 393189 - DNA, 20 bp, Artificial Sequence
  Description of Artificial Sequence: Synthetic oligonucleotide
  Target: LAMA2; (+) strand; PAM type: YTN; PAM sequence: TTA
ttcatttacttatttaattg

SEQ ID NO: 393190 - DNA, 20 bp, Artificial Sequence
  Description of Artificial Sequence: Synthetic oligonucleotide
  Target: LAMA2; (+) strand; PAM type: YTN; PAM sequence: TTC
atttacttatttaattgtac

SEQ ID NO: 393191 - DNA, 20 bp, Artificial Sequence
  Description of Artificial Sequence: Synthetic oligonucleotide
  Target: LAMA2; (+) strand; PAM type: YTN; PAM sequence: TTT
acttatttaattgtacttta

SEQ ID NO: 393192 - DNA, 20 bp, Artificial Sequence
  Description of Artificial Sequence: Synthetic oligonucleotide
  Target: LAMA2; (+) strand; PAM type: YTN; PAM sequence: TTA
cttatttaattgtactttac

SEQ ID NO: 393193 - DNA, 20 bp, Artificial Sequence
  Description of Artificial Sequence: Synthetic oligonucleotide
  Target: LAMA2; (+) strand; PAM type: YTN; PAM sequence: CTT
atttaattgtactttaccat

SEQ ID NO: 393194 - DNA, 20 bp, Artificial Sequence
  Description of Artificial Sequence: Synthetic oligonucleotide
  Target: LAMA2; (+) strand; PAM type: YTN; PAM sequence: TTA
tttaattgtactttaccatt

SEQ ID NO: 393195 - DNA, 20 bp, Artificial Sequence
  Description of Artificial Sequence: Synthetic oligonucleotide
  Target: LAMA2; (+) strand; PAM type: YTN; PAM sequence: TTT
aattgtactttaccattgtt

SEQ ID NO: 393196 - DNA, 20 bp, Artificial Sequence
  Description of Artificial Sequence: Synthetic oligonucleotide
  Target: LAMA2; (+) strand; PAM type: YTN; PAM sequence: TTA
attgtactttaccattgttc

SEQ ID NO: 393197 - DNA, 20 bp, Artificial Sequence
  Description of Artificial Sequence: Synthetic oligonucleotide
  Target: LAMA2; (+) strand; PAM type: YTN; PAM sequence: TTG
tactttaccattgttccaaa

SEQ ID NO: 393198 - DNA, 20 bp, Artificial Sequence
  Description of Artificial Sequence: Synthetic oligonucleotide
  Target: LAMA2; (+) strand; PAM type: YTN; PAM sequence: CTT
taccattgttccaaaatgaa

SEQ ID NO: 393199 - DNA, 20 bp, Artificial Sequence
  Description of Artificial Sequence: Synthetic oligonucleotide
  Target: LAMA2; (+) strand; PAM type: YTN; PAM sequence: TTT
accattgttccaaaatgaat

SEQ ID NO: 393200 - DNA, 20 bp, Artificial Sequence
  Description of Artificial Sequence: Synthetic oligonucleotide
  Target: LAMA2; (+) strand; PAM type: YTN; PAM sequence: TTA
ccattgttccaaaatgaatc

SEQ ID NO: 393201 - DNA, 20 bp, Artificial Sequence
  Description of Artificial Sequence: Synthetic oligonucleotide
  Target: LAMA2; (+) strand; PAM type: YTN; PAM sequence: TTG
ttccaaaatgaatcaaaagc

SEQ ID NO: 393202 - DNA, 20 bp, Artificial Sequence
  Description of Artificial Sequence: Synthetic oligonucleotide
  Target: LAMA2; (+) strand; PAM type: YTN; PAM sequence: TTC
caaaatgaatcaaaagcatg

SEQ ID NO: 393203 - DNA, 20 bp, Artificial Sequence
  Description of Artificial Sequence: Synthetic oligonucleotide
  Target: LAMA2; (+) strand; PAM type: YTN; PAM sequence: TTC
ttgcctacatataatcaagt

SEQ ID NO: 393204 - DNA, 20 bp, Artificial Sequence
  Description of Artificial Sequence: Synthetic oligonucleotide
  Target: LAMA2; (+) strand; PAM type: YTN; PAM sequence: CTT
gcctacatataatcaagtaa

SEQ ID NO: 393205 - DNA, 20 bp, Artificial Sequence
  Description of Artificial Sequence: Synthetic oligonucleotide
  Target: LAMA2; (+) strand; PAM type: YTN; PAM sequence: TTG
cctacatataatcaagtaaa

SEQ ID NO: 393206 - DNA, 20 bp, Artificial Sequence
  Description of Artificial Sequence: Synthetic oligonucleotide
  Target: LAMA2; (+) strand; PAM type: YTN; PAM sequence: CTA
catataatcaagtaaatgat

SEQ ID NO: 393207 - DNA, 20 bp, Artificial Sequence
  Description of Artificial Sequence: Synthetic oligonucleotide
  Target: LAMA2; (+) strand; PAM type: YTN; PAM sequence: CTT
ttctggtgctgctccttctg

SEQ ID NO: 393208 - DNA, 20 bp, Artificial Sequence
  Description of Artificial Sequence: Synthetic oligonucleotide
  Target: LAMA2; (+) strand; PAM type: YTN; PAM sequence: TTT
tctggtgctgctccttctgt

SEQ ID NO: 393209 - DNA, 20 bp, Artificial Sequence
  Description of Artificial Sequence: Synthetic oligonucleotide
  Target: LAMA2; (+) strand; PAM type: YTN; PAM sequence: TTT
ctggtgctgctccttctgta

SEQ ID NO: 393210 - DNA, 20 bp, Artificial Sequence
  Description of Artificial Sequence: Synthetic oligonucleotide
  Target: LAMA2; (+) strand; PAM type: YTN; PAM sequence: TTC
tggtgctgctccttctgtaa

SEQ ID NO: 393211 - DNA, 20 bp, Artificial Sequence
  Description of Artificial Sequence: Synthetic oligonucleotide
  Target: LAMA2; (+) strand; PAM type: YTN; PAM sequence: CTG
gtgctgctccttctgtaatt

SEQ ID NO: 393212 - DNA, 20 bp, Artificial Sequence
  Description of Artificial Sequence: Synthetic oligonucleotide
  Target: LAMA2; (+) strand; PAM type: YTN; PAM sequence: CTG
ctccttctgtaattaggcta

SEQ ID NO: 393213 - DNA, 20 bp, Artificial Sequence
  Description of Artificial Sequence: Synthetic oligonucleotide
  Target: LAMA2; (+) strand; PAM type: YTN; PAM sequence: CTC
cttctgtaattaggctaatg

SEQ ID NO: 393214 - DNA, 20 bp, Artificial Sequence
  Description of Artificial Sequence: Synthetic oligonucleotide
  Target: LAMA2; (+) strand; PAM type: YTN; PAM sequence: CTT
ctgtaattaggctaatgagt

SEQ ID NO: 393215 - DNA, 20 bp, Artificial Sequence
  Description of Artificial Sequence: Synthetic oligonucleotide
  Target: LAMA2; (+) strand; PAM type: YTN; PAM sequence: TTC
tgtaattaggctaatgagtt

SEQ ID NO: 393216 - DNA, 20 bp, Artificial Sequence
  Description of Artificial Sequence: Synthetic oligonucleotide
  Target: LAMA2; (+) strand; PAM type: YTN; PAM sequence: CTG
taattaggctaatgagtttg

SEQ ID NO: 393217 - DNA, 20 bp, Artificial Sequence
  Description of Artificial Sequence: Synthetic oligonucleotide
  Target: LAMA2; (+) strand; PAM type: YTN; PAM sequence: TTA
ggctaatgagtttgttttgt

SEQ ID NO: 393218 - DNA, 20 bp, Artificial Sequence
  Description of Artificial Sequence: Synthetic oligonucleotide
  Target: LAMA2; (+) strand; PAM type: YTN; PAM sequence: CTA
atgagtttgttttgttaatc

SEQ ID NO: 393219 - DNA, 20 bp, Artificial Sequence
  Description of Artificial Sequence: Synthetic oligonucleotide
  Target: LAMA2; (+) strand; PAM type: YTN; PAM sequence: TTT
gttttgttaatcatctgcat

SEQ ID NO: 393220 - DNA, 20 bp, Artificial Sequence
  Description of Artificial Sequence: Synthetic oligonucleotide
  Target: LAMA2; (+) strand; PAM type: YTN; PAM sequence: TTG
ttttgttaatcatctgcatt

SEQ ID NO: 393221 - DNA, 20 bp, Artificial Sequence
  Description of Artificial Sequence: Synthetic oligonucleotide
  Target: LAMA2; (+) strand; PAM type: YTN; PAM sequence: TTT
tgttaatcatctgcattagg

SEQ ID NO: 393222 - DNA, 20 bp, Artificial Sequence
  Description of Artificial Sequence: Synthetic oligonucleotide
  Target: LAMA2; (+) strand; PAM type: YTN; PAM sequence: TTT
gttaatcatctgcattaggg

SEQ ID NO: 393223 - DNA, 20 bp, Artificial Sequence
  Description of Artificial Sequence: Synthetic oligonucleotide
  Target: LAMA2; (+) strand; PAM type: YTN; PAM sequence: TTG
ttaatcatctgcattaggga

SEQ ID NO: 393224 - DNA, 20 bp, Artificial Sequence
  Description of Artificial Sequence: Synthetic oligonucleotide
  Target: LAMA2; (+) strand; PAM type: YTN; PAM sequence: TTA
atcatctgcattagggactt

SEQ ID NO: 393225 - DNA, 20 bp, Artificial Sequence
  Description of Artificial Sequence: Synthetic oligonucleotide
  Target: LAMA2; (+) strand; PAM type: YTN; PAM sequence: CTG
cattagggacttttggacta

SEQ ID NO: 393226 - DNA, 20 bp, Artificial Sequence
  Description of Artificial Sequence: Synthetic oligonucleotide
  Target: LAMA2; (+) strand; PAM type: YTN; PAM sequence: TTA
gggacttttggactatcagt

SEQ ID NO: 393227 - DNA, 20 bp, Artificial Sequence
  Description of Artificial Sequence: Synthetic oligonucleotide
  Target: LAMA2; (+) strand; PAM type: YTN; PAM sequence: CTT
ttggactatcagttgatttt

SEQ ID NO: 393228 - DNA, 20 bp, Artificial Sequence
  Description of Artificial Sequence: Synthetic oligonucleotide
  Target: LAMA2; (+) strand; PAM type: YTN; PAM sequence: TTT
tggactatcagttgattttt

SEQ ID NO: 393229 - DNA, 20 bp, Artificial Sequence
  Description of Artificial Sequence: Synthetic oligonucleotide
  Target: LAMA2; (+) strand; PAM type: YTN; PAM sequence: TTT
ggactatcagttgatttttg

SEQ ID NO: 393230 - DNA, 20 bp, Artificial Sequence
  Description of Artificial Sequence: Synthetic oligonucleotide
  Target: LAMA2; (+) strand; PAM type: YTN; PAM sequence: TTG
gactatcagttgatttttgt

SEQ ID NO: 393231 - DNA, 20 bp, Artificial Sequence
  Description of Artificial Sequence: Synthetic oligonucleotide
  Target: LAMA2; (+) strand; PAM type: YTN; PAM sequence: CTA
tcagttgatttttgttttaa

SEQ ID NO: 393232 - DNA, 20 bp, Artificial Sequence
  Description of Artificial Sequence: Synthetic oligonucleotide
  Target: LAMA2; (+) strand; PAM type: YTN; PAM sequence: TTG
atttttgttttaataaaaat

SEQ ID NO: 393233 - DNA, 20 bp, Artificial Sequence
  Description of Artificial Sequence: Synthetic oligonucleotide
  Target: LAMA2; (+) strand; PAM type: YTN; PAM sequence: TTT
ttgttttaataaaaatacct

SEQ ID NO: 393234 - DNA, 20 bp, Artificial Sequence
  Description of Artificial Sequence: Synthetic oligonucleotide
  Target: LAMA2; (+) strand; PAM type: YTN; PAM sequence: TTT
tgttttaataaaaatacctt

SEQ ID NO: 393235 - DNA, 20 bp, Artificial Sequence
  Description of Artificial Sequence: Synthetic oligonucleotide
  Target: LAMA2; (+) strand; PAM type: YTN; PAM sequence: TTT
gttttaataaaaataccttt

SEQ ID NO: 393236 - DNA, 20 bp, Artificial Sequence
  Description of Artificial Sequence: Synthetic oligonucleotide
  Target: LAMA2; (+) strand; PAM type: YTN; PAM sequence: TTG
ttttaataaaaatacctttg

SEQ ID NO: 393237 - DNA, 20 bp, Artificial Sequence
  Description of Artificial Sequence: Synthetic oligonucleotide
  Target: LAMA2; (+) strand; PAM type: YTN; PAM sequence: TTT
taataaaaatacctttggat

SEQ ID NO: 393238 - DNA, 20 bp, Artificial Sequence
  Description of Artificial Sequence: Synthetic oligonucleotide
  Target: LAMA2; (+) strand; PAM type: YTN; PAM sequence: TTT
aataaaaatacctttggata

SEQ ID NO: 393239 - DNA, 20 bp, Artificial Sequence
  Description of Artificial Sequence: Synthetic oligonucleotide
  Target: LAMA2; (+) strand; PAM type: YTN; PAM sequence: TTA
ataaaaatacctttggataa

SEQ ID NO: 393240 - DNA, 20 bp, Artificial Sequence
  Description of Artificial Sequence: Synthetic oligonucleotide
  Target: LAMA2; (+) strand; PAM type: YTN; PAM sequence: CTT
tggataaacaaagttatgac

SEQ ID NO: 393241 - DNA, 20 bp, Artificial Sequence
  Description of Artificial Sequence: Synthetic oligonucleotide
  Target: LAMA2; (+) strand; PAM type: YTN; PAM sequence: TTT
ggataaacaaagttatgact

SEQ ID NO: 393242 - DNA, 20 bp, Artificial Sequence
  Description of Artificial Sequence: Synthetic oligonucleotide
  Target: LAMA2; (+) strand; PAM type: YTN; PAM sequence: TTG
gataaacaaagttatgactt

SEQ ID NO: 393243 - DNA, 20 bp, Artificial Sequence
  Description of Artificial Sequence: Synthetic oligonucleotide
  Target: LAMA2; (+) strand; PAM type: YTN; PAM sequence: TTA
tgactttaccattcatatat

SEQ ID NO: 393244 - DNA, 20 bp, Artificial Sequence
  Description of Artificial Sequence: Synthetic oligonucleotide
  Target: LAMA2; (+) strand; PAM type: YTN; PAM sequence: CTT
taccattcatatattggcca

SEQ ID NO: 393245 - DNA, 20 bp, Artificial Sequence
  Description of Artificial Sequence: Synthetic oligonucleotide
  Target: LAMA2; (+) strand; PAM type: YTN; PAM sequence: TTT
accattcatatattggccaa

SEQ ID NO: 393246 - DNA, 20 bp, Artificial Sequence
  Description of Artificial Sequence: Synthetic oligonucleotide
  Target: LAMA2; (+) strand; PAM type: YTN; PAM sequence: TTA
ccattcatatattggccaac

SEQ ID NO: 393247 - DNA, 20 bp, Artificial Sequence
  Description of Artificial Sequence: Synthetic oligonucleotide
  Target: LAMA2; (+) strand; PAM type: YTN; PAM sequence: TTC
atatattggccaacctatac

SEQ ID NO: 393248 - DNA, 20 bp, Artificial Sequence
  Description of Artificial Sequence: Synthetic oligonucleotide
  Target: LAMA2; (+) strand; PAM type: YTN; PAM sequence: TTG
gccaacctatacattttatc

SEQ ID NO: 393249 - DNA, 20 bp, Artificial Sequence
  Description of Artificial Sequence: Synthetic oligonucleotide
  Target: LAMA2; (+) strand; PAM type: YTN; PAM sequence: CTA
tacattttatcatcttaaga

SEQ ID NO: 393250 - DNA, 20 bp, Artificial Sequence
  Description of Artificial Sequence: Synthetic oligonucleotide
  Target: LAMA2; (+) strand; PAM type: YTN; PAM sequence: TTT
tatcatcttaagaaatgctg

SEQ ID NO: 393251 - DNA, 20 bp, Artificial Sequence
  Description of Artificial Sequence: Synthetic oligonucleotide
  Target: LAMA2; (+) strand; PAM type: YTN; PAM sequence: TTT
atcatcttaagaaatgctga

SEQ ID NO: 393252 - DNA, 20 bp, Artificial Sequence
  Description of Artificial Sequence: Synthetic oligonucleotide
  Target: LAMA2; (+) strand; PAM type: YTN; PAM sequence: TTA
tcatcttaagaaatgctgaa

SEQ ID NO: 393253 - DNA, 20 bp, Artificial Sequence
  Description of Artificial Sequence: Synthetic oligonucleotide
  Target: LAMA2; (+) strand; PAM type: YTN; PAM sequence: CTT
aagaaatgctgaaaagaaaa

SEQ ID NO: 393254 - DNA, 20 bp, Artificial Sequence
  Description of Artificial Sequence: Synthetic oligonucleotide
  Target: LAMA2; (+) strand; PAM type: YTN; PAM sequence: TTA
agaaatgctgaaaagaaaag

SEQ ID NO: 393255 - DNA, 20 bp, Artificial Sequence
  Description of Artificial Sequence: Synthetic oligonucleotide
  Target: LAMA2; (+) strand; PAM type: YTN; PAM sequence: CTG
aaaagaaaagtcatcaaata

SEQ ID NO: 393256 - DNA, 20 bp, Artificial Sequence
  Description of Artificial Sequence: Synthetic oligonucleotide
  Target: LAMA2; (+) strand; PAM type: YTN; PAM sequence: CTA
atactttcaaataagagttg

SEQ ID NO: 393257 - DNA, 20 bp, Artificial Sequence
  Description of Artificial Sequence: Synthetic oligonucleotide
  Target: LAMA2; (+) strand; PAM type: YTN; PAM sequence: CTT
tcaaataagagttgcgaata

SEQ ID NO: 393258 - DNA, 20 bp, Artificial Sequence
  Description of Artificial Sequence: Synthetic oligonucleotide
  Target: LAMA2; (+) strand; PAM type: YTN; PAM sequence: TTT
caaataagagttgcgaatat

SEQ ID NO: 393259 - DNA, 20 bp, Artificial Sequence
  Description of Artificial Sequence: Synthetic oligonucleotide
  Target: LAMA2; (+) strand; PAM type: YTN; PAM sequence: TTC
aaataagagttgcgaatatg

SEQ ID NO: 393260 - DNA, 20 bp, Artificial Sequence
  Description of Artificial Sequence: Synthetic oligonucleotide
  Target: LAMA2; (+) strand; PAM type: YTN; PAM sequence: TTG
cgaatatgagggttgggaaa

SEQ ID NO: 393261 - DNA, 20 bp, Artificial Sequence
  Description of Artificial Sequence: Synthetic oligonucleotide
  Target: LAMA2; (+) strand; PAM type: YTN; PAM sequence: TTG
ggaaaagtgatagtgatttt

SEQ ID NO: 393262 - DNA, 20 bp, Artificial Sequence
  Description of Artificial Sequence: Synthetic oligonucleotide
  Target: LAMA2; (+) strand; PAM type: YTN; PAM sequence: TTT
tacccatgctaaagaacttt

SEQ ID NO: 393263 - DNA, 20 bp, Artificial Sequence
  Description of Artificial Sequence: Synthetic oligonucleotide
  Target: LAMA2; (+) strand; PAM type: YTN; PAM sequence: TTT
acccatgctaaagaactttt

SEQ ID NO: 393264 - DNA, 20 bp, Artificial Sequence
  Description of Artificial Sequence: Synthetic oligonucleotide
  Target: LAMA2; (+) strand; PAM type: YTN; PAM sequence: TTA
cccatgctaaagaactttta

SEQ ID NO: 393265 - DNA, 20 bp, Artificial Sequence
  Description of Artificial Sequence: Synthetic oligonucleotide
  Target: LAMA2; (+) strand; PAM type: YTN; PAM sequence: CTA
aagaacttttatgataacgc

SEQ ID NO: 393266 - DNA, 20 bp, Artificial Sequence
  Description of Artificial Sequence: Synthetic oligonucleotide
  Target: LAMA2; (+) strand; PAM type: YTN; PAM sequence: CTT
ttatgataacgcactcaata

SEQ ID NO: 393267 - DNA, 20 bp, Artificial Sequence
  Description of Artificial Sequence: Synthetic oligonucleotide
  Target: LAMA2; (+) strand; PAM type: YTN; PAM sequence: TTT
tatgataacgcactcaataa

SEQ ID NO: 393268 - DNA, 20 bp, Artificial Sequence
  Description of Artificial Sequence: Synthetic oligonucleotide
  Target: LAMA2; (+) strand; PAM type: YTN; PAM sequence: TTT
atgataacgcactcaataaa

SEQ ID NO: 393269 - DNA, 20 bp, Artificial Sequence
  Description of Artificial Sequence: Synthetic oligonucleotide
  Target: LAMA2; (+) strand; PAM type: YTN; PAM sequence: TTA
tgataacgcactcaataaaa

SEQ ID NO: 393270 - DNA, 20 bp, Artificial Sequence
  Description of Artificial Sequence: Synthetic oligonucleotide
  Target: LAMA2; (+) strand; PAM type: YTN; PAM sequence: CTC
aataaaatagatacatctct

SEQ ID NO: 393271 - DNA, 20 bp, Artificial Sequence
  Description of Artificial Sequence: Synthetic oligonucleotide
  Target: LAMA2; (+) strand; PAM type: YTN; PAM sequence: CTC
tacattcatagtcagctaac

SEQ ID NO: 393272 - DNA, 20 bp, Artificial Sequence
  Description of Artificial Sequence: Synthetic oligonucleotide
  Target: LAMA2; (+) strand; PAM type: YTN; PAM sequence: CTA
cattcatagtcagctaactt

SEQ ID NO: 393273 - DNA, 20 bp, Artificial Sequence
  Description of Artificial Sequence: Synthetic oligonucleotide
  Target: LAMA2; (+) strand; PAM type: YTN; PAM sequence: TTC
atagtcagctaacttcaaag

SEQ ID NO: 393274 - DNA, 20 bp, Artificial Sequence
  Description of Artificial Sequence: Synthetic oligonucleotide
  Target: LAMA2; (+) strand; PAM type: YTN; PAM sequence: CTA
acttcaaagtggtagtatta

SEQ ID NO: 393275 - DNA, 20 bp, Artificial Sequence
  Description of Artificial Sequence: Synthetic oligonucleotide
  Target: LAMA2; (+) strand; PAM type: YTN; PAM sequence: CTT
caaagtggtagtattactaa

SEQ ID NO: 393276 - DNA, 20 bp, Artificial Sequence
  Description of Artificial Sequence: Synthetic oligonucleotide
  Target: LAMA2; (+) strand; PAM type: YTN; PAM sequence: TTC
aaagtggtagtattactaat

SEQ ID NO: 393277 - DNA, 20 bp, Artificial Sequence
  Description of Artificial Sequence: Synthetic oligonucleotide
  Target: LAMA2; (+) strand; PAM type: YTN; PAM sequence: TTA
ctaatacttaaataatttat

SEQ ID NO: 393278 - DNA, 20 bp, Artificial Sequence
  Description of Artificial Sequence: Synthetic oligonucleotide
  Target: LAMA2; (+) strand; PAM type: YTN; PAM sequence: CTA
atacttaaataatttatact

SEQ ID NO: 393279 - DNA, 20 bp, Artificial Sequence
  Description of Artificial Sequence: Synthetic oligonucleotide
  Target: LAMA2; (+) strand; PAM type: YTN; PAM sequence: CTT
aaataatttatactaaacca

SEQ ID NO: 393280 - DNA, 20 bp, Artificial Sequence
  Description of Artificial Sequence: Synthetic oligonucleotide
  Target: LAMA2; (+) strand; PAM type: YTN; PAM sequence: TTA
aataatttatactaaaccag

SEQ ID NO: 393281 - DNA, 20 bp, Artificial Sequence
  Description of Artificial Sequence: Synthetic oligonucleotide
  Target: LAMA2; (+) strand; PAM type: YTN; PAM sequence: TTT
atactaaaccagcaatatca

SEQ ID NO: 393282 - DNA, 20 bp, Artificial Sequence
  Description of Artificial Sequence: Synthetic oligonucleotide
  Target: LAMA2; (+) strand; PAM type: YTN; PAM sequence: TTA
tactaaaccagcaatatcag

SEQ ID NO: 393283 - DNA, 20 bp, Artificial Sequence
  Description of Artificial Sequence: Synthetic oligonucleotide
  Target: LAMA2; (+) strand; PAM type: YTN; PAM sequence: CTA
aaccagcaatatcagcacac

SEQ ID NO: 393284 - DNA, 20 bp, Artificial Sequence
  Description of Artificial Sequence: Synthetic oligonucleotide
  Target: LAMA2; (+) strand; PAM type: YTN; PAM sequence: CTT
gttaaaaatacagattgtca

SEQ ID NO: 393285 - DNA, 20 bp, Artificial Sequence
  Description of Artificial Sequence: Synthetic oligonucleotide
  Target: LAMA2; (+) strand; PAM type: YTN; PAM sequence: TTG
ttaaaaatacagattgtcag

SEQ ID NO: 393286 - DNA, 20 bp, Artificial Sequence
  Description of Artificial Sequence: Synthetic oligonucleotide
  Target: LAMA2; (+) strand; PAM type: YTN; PAM sequence: TTA
aaaatacagattgtcagacc

SEQ ID NO: 393287 - DNA, 20 bp, Artificial Sequence
  Description of Artificial Sequence: Synthetic oligonucleotide
  Target: LAMA2; (+) strand; PAM type: YTN; PAM sequence: TTG
tcagaccccctcccagacct

SEQ ID NO: 393288 - DNA, 20 bp, Artificial Sequence
  Description of Artificial Sequence: Synthetic oligonucleotide
  Target: LAMA2; (+) strand; PAM type: YTN; PAM sequence: CTC
ccagacctcctgaatcagaa

SEQ ID NO: 393289 - DNA, 20 bp, Artificial Sequence
  Description of Artificial Sequence: Synthetic oligonucleotide
  Target: LAMA2; (+) strand; PAM type: YTN; PAM sequence: CTC
ctgaatcagaaactttgggg

SEQ ID NO: 393290 - DNA, 20 bp, Artificial Sequence
  Description of Artificial Sequence: Synthetic oligonucleotide
  Target: LAMA2; (+) strand; PAM type: YTN; PAM sequence: CTG
aatcagaaactttggggatg

SEQ ID NO: 393291 - DNA, 20 bp, Artificial Sequence
  Description of Artificial Sequence: Synthetic oligonucleotide
  Target: LAMA2; (+) strand; PAM type: YTN; PAM sequence: CTT
tggggatgggacccagcaaa

SEQ ID NO: 393292 - DNA, 20 bp, Artificial Sequence
  Description of Artificial Sequence: Synthetic oligonucleotide
  Target: LAMA2; (+) strand; PAM type: YTN; PAM sequence: TTT
ggggatgggacccagcaaac

SEQ ID NO: 393293 - DNA, 20 bp, Artificial Sequence
  Description of Artificial Sequence: Synthetic oligonucleotide
  Target: LAMA2; (+) strand; PAM type: YTN; PAM sequence: TTG
gggatgggacccagcaaacc

SEQ ID NO: 393294 - DNA, 20 bp, Artificial Sequence
  Description of Artificial Sequence: Synthetic oligonucleotide
  Target: LAMA2; (+) strand; PAM type: YTN; PAM sequence: TTA
acaagcccttcaggggatta

SEQ ID NO: 393295 - DNA, 20 bp, Artificial Sequence
  Description of Artificial Sequence: Synthetic oligonucleotide
  Target: LAMA2; (+) strand; PAM type: YTN; PAM sequence: CTT
caggggattatgaggcatgt

SEQ ID NO: 393296 - DNA, 20 bp, Artificial Sequence
  Description of Artificial Sequence: Synthetic oligonucleotide
  Target: LAMA2; (+) strand; PAM type: YTN; PAM sequence: TTC
aggggattatgaggcatgtt

SEQ ID NO: 393297 - DNA, 20 bp, Artificial Sequence
  Description of Artificial Sequence: Synthetic oligonucleotide
  Target: LAMA2; (+) strand; PAM type: YTN; PAM sequence: TTA
tgaggcatgttagtttgaga

SEQ ID NO: 393298 - DNA, 20 bp, Artificial Sequence
  Description of Artificial Sequence: Synthetic oligonucleotide
  Target: LAMA2; (+) strand; PAM type: YTN; PAM sequence: TTA
gtttgagaattactgtcttt

SEQ ID NO: 393299 - DNA, 20 bp, Artificial Sequence
  Description of Artificial Sequence: Synthetic oligonucleotide
  Target: LAMA2; (+) strand; PAM type: YTN; PAM sequence: TTT
gagaattactgtctttcaag

SEQ ID NO: 393300 - DNA, 20 bp, Artificial Sequence
  Description of Artificial Sequence: Synthetic oligonucleotide
  Target: LAMA2; (+) strand; PAM type: YTN; PAM sequence: TTG
agaattactgtctttcaagt

SEQ ID NO: 393301 - DNA, 20 bp, Artificial Sequence
  Description of Artificial Sequence: Synthetic oligonucleotide
  Target: LAMA2; (+) strand; PAM type: YTN; PAM sequence: TTA
ctgtctttcaagtatttaga

SEQ ID NO: 393302 - DNA, 20 bp, Artificial Sequence
  Description of Artificial Sequence: Synthetic oligonucleotide
  Target: LAMA2; (+) strand; PAM type: YTN; PAM sequence: CTG
tctttcaagtatttagagtt

SEQ ID NO: 393303 - DNA, 20 bp, Artificial Sequence
  Description of Artificial Sequence: Synthetic oligonucleotide
  Target: LAMA2; (+) strand; PAM type: YTN; PAM sequence: CTT
tcaagtatttagagtttctt

SEQ ID NO: 393304 - DNA, 20 bp, Artificial Sequence
  Description of Artificial Sequence: Synthetic oligonucleotide
  Target: LAMA2; (+) strand; PAM type: YTN; PAM sequence: TTT
caagtatttagagtttctta

SEQ ID NO: 393305 - DNA, 20 bp, Artificial Sequence
  Description of Artificial Sequence: Synthetic oligonucleotide
  Target: LAMA2; (+) strand; PAM type: YTN; PAM sequence: TTC
aagtatttagagtttcttaa

SEQ ID NO: 393306 - DNA, 20 bp, Artificial Sequence
  Description of Artificial Sequence: Synthetic oligonucleotide
  Target: LAMA2; (+) strand; PAM type: YTN; PAM sequence: TTT
agagtttcttaatgactcga

SEQ ID NO: 393307 - DNA, 20 bp, Artificial Sequence
  Description of Artificial Sequence: Synthetic oligonucleotide
  Target: LAMA2; (+) strand; PAM type: YTN; PAM sequence: TTA
gagtttcttaatgactcgaa

SEQ ID NO: 393308 - DNA, 20 bp, Artificial Sequence
  Description of Artificial Sequence: Synthetic oligonucleotide
  Target: LAMA2; (+) strand; PAM type: YTN; PAM sequence: TTT
cttaatgactcgaaaattat

SEQ ID NO: 393309 - DNA, 20 bp, Artificial Sequence
  Description of Artificial Sequence: Synthetic oligonucleotide
  Target: LAMA2; (+) strand; PAM type: YTN; PAM sequence: TTC
ttaatgactcgaaaattatc

SEQ ID NO: 393310 - DNA, 20 bp, Artificial Sequence
  Description of Artificial Sequence: Synthetic oligonucleotide
  Target: LAMA2; (+) strand; PAM type: YTN; PAM sequence: CTT
aatgactcgaaaattatcac

SEQ ID NO: 393311 - DNA, 20 bp, Artificial Sequence
  Description of Artificial Sequence: Synthetic oligonucleotide
  Target: LAMA2; (+) strand; PAM type: YTN; PAM sequence: TTA
atgactcgaaaattatcact

SEQ ID NO: 393312 - DNA, 20 bp, Artificial Sequence
  Description of Artificial Sequence: Synthetic oligonucleotide
  Target: LAMA2; (+) strand; PAM type: YTN; PAM sequence: CTC
gaaaattatcactttagaaa

SEQ ID NO: 393313 - DNA, 20 bp, Artificial Sequence
  Description of Artificial Sequence: Synthetic oligonucleotide
  Target: LAMA2; (+) strand; PAM type: YTN; PAM sequence: TTA
tcactttagaaaaactaggt

SEQ ID NO: 393314 - DNA, 20 bp, Artificial Sequence
  Description of Artificial Sequence: Synthetic oligonucleotide
  Target: LAMA2; (+) strand; PAM type: YTN; PAM sequence: CTT
tagaaaaactaggtaagtta

SEQ ID NO: 393315 - DNA, 20 bp, Artificial Sequence
  Description of Artificial Sequence: Synthetic oligonucleotide
  Target: LAMA2; (+) strand; PAM type: YTN; PAM sequence: TTT
agaaaaactaggtaagttaa

SEQ ID NO: 393316 - DNA, 20 bp, Artificial Sequence
  Description of Artificial Sequence: Synthetic oligonucleotide
  Target: LAMA2; (+) strand; PAM type: YTN; PAM sequence: TTA
gaaaaactaggtaagttaaa

SEQ ID NO: 393317 - DNA, 20 bp, Artificial Sequence
  Description of Artificial Sequence: Synthetic oligonucleotide
  Target: LAMA2; (+) strand; PAM type: YTN; PAM sequence: CTA
ggtaagttaaatccaaaaac

SEQ ID NO: 393318 - DNA, 20 bp, Artificial Sequence
  Description of Artificial Sequence: Synthetic oligonucleotide
  Target: LAMA2; (+) strand; PAM type: YTN; PAM sequence: TTA
aatccaaaaacttccagatc

SEQ ID NO: 393319 - DNA, 20 bp, Artificial Sequence
  Description of Artificial Sequence: Synthetic oligonucleotide
  Target: LAMA2; (+) strand; PAM type: YTN; PAM sequence: CTT
ccagatcaatcagttggaag

SEQ ID NO: 393320 - DNA, 20 bp, Artificial Sequence
  Description of Artificial Sequence: Synthetic oligonucleotide
  Target: LAMA2; (+) strand; PAM type: YTN; PAM sequence: TTC
cagatcaatcagttggaaga

SEQ ID NO: 393321 - DNA, 20 bp, Artificial Sequence
  Description of Artificial Sequence: Synthetic oligonucleotide
  Target: LAMA2; (+) strand; PAM type: YTN; PAM sequence: TTG
gaagaaaaagaaacatagat

SEQ ID NO: 393322 - DNA, 20 bp, Artificial Sequence
  Description of Artificial Sequence: Synthetic oligonucleotide
  Target: LAMA2; (+) strand; PAM type: YTN; PAM sequence: TTA
aaattatgctagtctactag

SEQ ID NO: 393323 - DNA, 20 bp, Artificial Sequence
  Description of Artificial Sequence: Synthetic oligonucleotide
  Target: LAMA2; (+) strand; PAM type: YTN; PAM sequence: TTA
tgctagtctactagcatgac

SEQ ID NO: 393324 - DNA, 20 bp, Artificial Sequence
  Description of Artificial Sequence: Synthetic oligonucleotide
  Target: LAMA2; (+) strand; PAM type: YTN; PAM sequence: CTA
gtctactagcatgacaatga

SEQ ID NO: 393325 - DNA, 20 bp, Artificial Sequence
  Description of Artificial Sequence: Synthetic oligonucleotide
  Target: LAMA2; (+) strand; PAM type: YTN; PAM sequence: CTA
ctagcatgacaatgacctag

SEQ ID NO: 393326 - DNA, 20 bp, Artificial Sequence
  Description of Artificial Sequence: Synthetic oligonucleotide
  Target: LAMA2; (+) strand; PAM type: YTN; PAM sequence: CTA
gcatgacaatgacctagaat

SEQ ID NO: 393327 - DNA, 20 bp, Artificial Sequence
  Description of Artificial Sequence: Synthetic oligonucleotide
  Target: LAMA2; (+) strand; PAM type: YTN; PAM sequence: CTA
gaattctgttcacagtttct

SEQ ID NO: 393328 - DNA, 20 bp, Artificial Sequence
  Description of Artificial Sequence: Synthetic oligonucleotide
  Target: LAMA2; (+) strand; PAM type: YTN; PAM sequence: TTC
tgttcacagtttctgagcaa

SEQ ID NO: 393329 - DNA, 20 bp, Artificial Sequence
  Description of Artificial Sequence: Synthetic oligonucleotide
  Target: LAMA2; (+) strand; PAM type: YTN; PAM sequence: CTG
ttcacagtttctgagcaaac

SEQ ID NO: 393330 - DNA, 20 bp, Artificial Sequence
  Description of Artificial Sequence: Synthetic oligonucleotide
  Target: LAMA2; (+) strand; PAM type: YTN; PAM sequence: TTC
acagtttctgagcaaacata

SEQ ID NO: 393331 - DNA, 20 bp, Artificial Sequence
  Description of Artificial Sequence: Synthetic oligonucleotide
  Target: LAMA2; (+) strand; PAM type: YTN; PAM sequence: TTT
ctgagcaaacataacaatat

SEQ ID NO: 393332 - DNA, 20 bp, Artificial Sequence
  Description of Artificial Sequence: Synthetic oligonucleotide
  Target: LAMA2; (+) strand; PAM type: YTN; PAM sequence: TTC
tgagcaaacataacaatatt

SEQ ID NO: 393333 - DNA, 20 bp, Artificial Sequence
  Description of Artificial Sequence: Synthetic oligonucleotide
  Target: LAMA2; (+) strand; PAM type: YTN; PAM sequence: CTG
agcaaacataacaatattca

SEQ ID NO: 393334 - DNA, 20 bp, Artificial Sequence
  Description of Artificial Sequence: Synthetic oligonucleotide
  Target: LAMA2; (+) strand; PAM type: YTN; PAM sequence: TTC
atcattacattcaaagtaat

SEQ ID NO: 393335 - DNA, 20 bp, Artificial Sequence
  Description of Artificial Sequence: Synthetic oligonucleotide
  Target: LAMA2; (+) strand; PAM type: YTN; PAM sequence: TTA
cattcaaagtaatagagaaa

SEQ ID NO: 393336 - DNA, 20 bp, Artificial Sequence
  Description of Artificial Sequence: Synthetic oligonucleotide
  Target: LAMA2; (+) strand; PAM type: YTN; PAM sequence: TTC
aaagtaatagagaaaaggtc

SEQ ID NO: 393337 - DNA, 20 bp, Artificial Sequence
  Description of Artificial Sequence: Synthetic oligonucleotide
  Target: LAMA2; (+) strand; PAM type: YTN; PAM sequence: CTC
agtacaatgaaacaagtgga

SEQ ID NO: 393338 - DNA, 20 bp, Artificial Sequence
  Description of Artificial Sequence: Synthetic oligonucleotide
  Target: LAMA2; (+) strand; PAM type: YTN; PAM sequence: TTG
tttgattttggtatgtgaag

SEQ ID NO: 393339 - DNA, 20 bp, Artificial Sequence
  Description of Artificial Sequence: Synthetic oligonucleotide
  Target: LAMA2; (+) strand; PAM type: YTN; PAM sequence: TTT
gattttggtatgtgaagtga

SEQ ID NO: 393340 - DNA, 20 bp, Artificial Sequence
  Description of Artificial Sequence: Synthetic oligonucleotide
  Target: LAMA2; (+) strand; PAM type: YTN; PAM sequence: TTG
attttggtatgtgaagtgaa

SEQ ID NO: 393341 - DNA, 20 bp, Artificial Sequence
  Description of Artificial Sequence: Synthetic oligonucleotide
  Target: LAMA2; (+) strand; PAM type: YTN; PAM sequence: TTT
tggtatgtgaagtgaatctt

SEQ ID NO: 393342 - DNA, 20 bp, Artificial Sequence
  Description of Artificial Sequence: Synthetic oligonucleotide
  Target: LAMA2; (+) strand; PAM type: YTN; PAM sequence: TTT
ggtatgtgaagtgaatctta

SEQ ID NO: 393343 - DNA, 20 bp, Artificial Sequence
  Description of Artificial Sequence: Synthetic oligonucleotide
  Target: LAMA2; (+) strand; PAM type: YTN; PAM sequence: TTG
gtatgtgaagtgaatcttaa

SEQ ID NO: 393344 - DNA, 20 bp, Artificial Sequence
  Description of Artificial Sequence: Synthetic oligonucleotide
  Target: LAMA2; (+) strand; PAM type: YTN; PAM sequence: CTT
aaaactcatttcatcaatca

SEQ ID NO: 393345 - DNA, 20 bp, Artificial Sequence
  Description of Artificial Sequence: Synthetic oligonucleotide
  Target: LAMA2; (+) strand; PAM type: YTN; PAM sequence: TTA
aaactcatttcatcaatcag

SEQ ID NO: 393346 - DNA, 20 bp, Artificial Sequence
  Description of Artificial Sequence: Synthetic oligonucleotide
  Target: LAMA2; (+) strand; PAM type: YTN; PAM sequence: CTC
atttcatcaatcagattcct

SEQ ID NO: 393347 - DNA, 20 bp, Artificial Sequence
  Description of Artificial Sequence: Synthetic oligonucleotide
  Target: LAMA2; (+) strand; PAM type: YTN; PAM sequence: TTT
catcaatcagattcctagaa

SEQ ID NO: 393348 - DNA, 20 bp, Artificial Sequence
  Description of Artificial Sequence: Synthetic oligonucleotide
  Target: LAMA2; (+) strand; PAM type: YTN; PAM sequence: TTC
atcaatcagattcctagaat

SEQ ID NO: 393349 - DNA, 20 bp, Artificial Sequence
  Description of Artificial Sequence: Synthetic oligonucleotide
  Target: LAMA2; (+) strand; PAM type: YTN; PAM sequence: TTC
ctagaatgacatgattcaaa

SEQ ID NO: 393350 - DNA, 20 bp, Artificial Sequence
  Description of Artificial Sequence: Synthetic oligonucleotide
  Target: LAMA2; (+) strand; PAM type: YTN; PAM sequence: CTA
gaatgacatgattcaaaatg

SEQ ID NO: 393351 - DNA, 20 bp, Artificial Sequence
  Description of Artificial Sequence: Synthetic oligonucleotide
  Target: LAMA2; (+) strand; PAM type: YTN; PAM sequence: TTC
aaaatgttattttacttaca

SEQ ID NO: 393352 - DNA, 20 bp, Artificial Sequence
  Description of Artificial Sequence: Synthetic oligonucleotide
  Target: LAMA2; (+) strand; PAM type: YTN; PAM sequence: TTA
ttttacttacaaatttaaaa

SEQ ID NO: 393353 - DNA, 20 bp, Artificial Sequence
  Description of Artificial Sequence: Synthetic oligonucleotide
  Target: LAMA2; (+) strand; PAM type: YTN; PAM sequence: TTT
tacttacaaatttaaaaggt

SEQ ID NO: 393354 - DNA, 20 bp, Artificial Sequence
  Description of Artificial Sequence: Synthetic oligonucleotide
  Target: LAMA2; (+) strand; PAM type: YTN; PAM sequence: TTT
acttacaaatttaaaaggtt

SEQ ID NO: 393355 - DNA, 20 bp, Artificial Sequence
  Description of Artificial Sequence: Synthetic oligonucleotide
  Target: LAMA2; (+) strand; PAM type: YTN; PAM sequence: TTA
cttacaaatttaaaaggttt

SEQ ID NO: 393356 - DNA, 20 bp, Artificial Sequence
  Description of Artificial Sequence: Synthetic oligonucleotide
  Target: LAMA2; (+) strand; PAM type: YTN; PAM sequence: CTT
acaaatttaaaaggtttctt

SEQ ID NO: 393357 - DNA, 20 bp, Artificial Sequence
  Description of Artificial Sequence: Synthetic oligonucleotide
  Target: LAMA2; (+) strand; PAM type: YTN; PAM sequence: TTA
caaatttaaaaggtttctta

SEQ ID NO: 393358 - DNA, 20 bp, Artificial Sequence
  Description of Artificial Sequence: Synthetic oligonucleotide
  Target: LAMA2; (+) strand; PAM type: YTN; PAM sequence: TTT
aaaaggtttcttaaaaatct

SEQ ID NO: 393359 - DNA, 20 bp, Artificial Sequence
  Description of Artificial Sequence: Synthetic oligonucleotide
  Target: LAMA2; (+) strand; PAM type: YTN; PAM sequence: TTA
aaaggtttcttaaaaatctg

SEQ ID NO: 393360 - DNA, 20 bp, Artificial Sequence
  Description of Artificial Sequence: Synthetic oligonucleotide
  Target: LAMA2; (+) strand; PAM type: YTN; PAM sequence: TTT
cttaaaaatctgtttcgctt

SEQ ID NO: 393361 - DNA, 20 bp, Artificial Sequence
  Description of Artificial Sequence: Synthetic oligonucleotide
  Target: LAMA2; (+) strand; PAM type: YTN; PAM sequence: TTC
ttaaaaatctgtttcgcttt

SEQ ID NO: 393362 - DNA, 20 bp, Artificial Sequence
  Description of Artificial Sequence: Synthetic oligonucleotide
  Target: LAMA2; (+) strand; PAM type: YTN; PAM sequence: CTT
aaaaatctgtttcgctttta

SEQ ID NO: 393363 - DNA, 20 bp, Artificial Sequence
  Description of Artificial Sequence: Synthetic oligonucleotide
  Target: LAMA2; (+) strand; PAM type: YTN; PAM sequence: TTA
aaaatctgtttcgcttttat

SEQ ID NO: 393364 - DNA, 20 bp, Artificial Sequence
  Description of Artificial Sequence: Synthetic oligonucleotide
  Target: LAMA2; (+) strand; PAM type: YTN; PAM sequence: CTG
tttcgcttttattttaatta

SEQ ID NO: 393365 - DNA, 20 bp, Artificial Sequence
  Description of Artificial Sequence: Synthetic oligonucleotide
  Target: LAMA2; (+) strand; PAM type: YTN; PAM sequence: TTT
cgcttttattttaattaatt

SEQ ID NO: 393366 - DNA, 20 bp, Artificial Sequence
  Description of Artificial Sequence: Synthetic oligonucleotide
  Target: LAMA2; (+) strand; PAM type: YTN; PAM sequence: TTC
gcttttattttaattaatta

SEQ ID NO: 393367 - DNA, 20 bp, Artificial Sequence
  Description of Artificial Sequence: Synthetic oligonucleotide
  Target: LAMA2; (+) strand; PAM type: YTN; PAM sequence: CTT
ttattttaattaattataaa

SEQ ID NO: 393368 - DNA, 20 bp, Artificial Sequence
  Description of Artificial Sequence: Synthetic oligonucleotide
  Target: LAMA2; (+) strand; PAM type: YTN; PAM sequence: TTT
tattttaattaattataaat

SEQ ID NO: 393369 - DNA, 20 bp, Artificial Sequence
  Description of Artificial Sequence: Synthetic oligonucleotide
  Target: LAMA2; (+) strand; PAM type: YTN; PAM sequence: TTT
attttaattaattataaatg

SEQ ID NO: 393370 - DNA, 20 bp, Artificial Sequence
  Description of Artificial Sequence: Synthetic oligonucleotide
  Target: LAMA2; (+) strand; PAM type: YTN; PAM sequence: TTA
ttttaattaattataaatgg

SEQ ID NO: 393371 - DNA, 20 bp, Artificial Sequence
  Description of Artificial Sequence: Synthetic oligonucleotide
  Target: LAMA2; (+) strand; PAM type: YTN; PAM sequence: TTT
taattaattataaatggtct

SEQ ID NO: 393372 - DNA, 20 bp, Artificial Sequence
  Description of Artificial Sequence: Synthetic oligonucleotide
  Target: LAMA2; (+) strand; PAM type: YTN; PAM sequence: TTT
aattaattataaatggtctc

SEQ ID NO: 393373 - DNA, 20 bp, Artificial Sequence
  Description of Artificial Sequence: Synthetic oligonucleotide
  Target: LAMA2; (+) strand; PAM type: YTN; PAM sequence: TTA
attaattataaatggtctca

SEQ ID NO: 393374 - DNA, 20 bp, Artificial Sequence
  Description of Artificial Sequence: Synthetic oligonucleotide
  Target: LAMA2; (+) strand; PAM type: YTN; PAM sequence: TTA
attataaatggtctcaggta

SEQ ID NO: 393375 - DNA, 20 bp, Artificial Sequence
  Description of Artificial Sequence: Synthetic oligonucleotide
  Target: LAMA2; (+) strand; PAM type: YTN; PAM sequence: TTA
taaatggtctcaggtaccag

SEQ ID NO: 393376 - DNA, 20 bp, Artificial Sequence
  Description of Artificial Sequence: Synthetic oligonucleotide
  Target: LAMA2; (+) strand; PAM type: YTN; PAM sequence: CTC
aggtaccagttttcaacttg

SEQ ID NO: 393377 - DNA, 20 bp, Artificial Sequence
  Description of Artificial Sequence: Synthetic oligonucleotide
  Target: LAMA2; (+) strand; PAM type: YTN; PAM sequence: TTT
tcaacttgatttagcacaca

SEQ ID NO: 393378 - DNA, 20 bp, Artificial Sequence
  Description of Artificial Sequence: Synthetic oligonucleotide
  Target: LAMA2; (+) strand; PAM type: YTN; PAM sequence: TTT
caacttgatttagcacacag

SEQ ID NO: 393379 - DNA, 20 bp, Artificial Sequence
  Description of Artificial Sequence: Synthetic oligonucleotide
  Target: LAMA2; (+) strand; PAM type: YTN; PAM sequence: TTC
aacttgatttagcacacagt

SEQ ID NO: 393380 - DNA, 20 bp, Artificial Sequence
  Description of Artificial Sequence: Synthetic oligonucleotide
  Target: LAMA2; (+) strand; PAM type: YTN; PAM sequence: CTT
gatttagcacacagtgaatc

SEQ ID NO: 393381 - DNA, 20 bp, Artificial Sequence
  Description of Artificial Sequence: Synthetic oligonucleotide
  Target: LAMA2; (+) strand; PAM type: YTN; PAM sequence: TTG
atttagcacacagtgaatct

SEQ ID NO: 393382 - DNA, 20 bp, Artificial Sequence
  Description of Artificial Sequence: Synthetic oligonucleotide
  Target: LAMA2; (+) strand; PAM type: YTN; PAM sequence: TTT
agcacacagtgaatctattt

SEQ ID NO: 393383 - DNA, 20 bp, Artificial Sequence
  Description of Artificial Sequence: Synthetic oligonucleotide
  Target: LAMA2; (+) strand; PAM type: YTN; PAM sequence: TTA
gcacacagtgaatctatttt

SEQ ID NO: 393384 - DNA, 20 bp, Artificial Sequence
  Description of Artificial Sequence: Synthetic oligonucleotide
  Target: LAMA2; (+) strand; PAM type: YTN; PAM sequence: CTA
ttttacatgttttcttattt

SEQ ID NO: 393385 - DNA, 20 bp, Artificial Sequence
  Description of Artificial Sequence: Synthetic oligonucleotide
  Target: LAMA2; (+) strand; PAM type: YTN; PAM sequence: TTT
tacatgttttcttattttct

SEQ ID NO: 393386 - DNA, 20 bp, Artificial Sequence
  Description of Artificial Sequence: Synthetic oligonucleotide
  Target: LAMA2; (+) strand; PAM type: YTN; PAM sequence: TTT
acatgttttcttattttctc

SEQ ID NO: 393387 - DNA, 20 bp, Artificial Sequence
  Description of Artificial Sequence: Synthetic oligonucleotide
  Target: LAMA2; (+) strand; PAM type: YTN; PAM sequence: TTA
catgttttcttattttctca

SEQ ID NO: 393388 - DNA, 20 bp, Artificial Sequence
  Description of Artificial Sequence: Synthetic oligonucleotide
  Target: LAMA2; (+) strand; PAM type: YTN; PAM sequence: TTT
tcttattttctcattctttt

SEQ ID NO: 393389 - DNA, 20 bp, Artificial Sequence
  Description of Artificial Sequence: Synthetic oligonucleotide
  Target: LAMA2; (+) strand; PAM type: YTN; PAM sequence: TTT
cttattttctcattcttttc

SEQ ID NO: 393390 - DNA, 20 bp, Artificial Sequence
  Description of Artificial Sequence: Synthetic oligonucleotide
  Target: LAMA2; (+) strand; PAM type: YTN; PAM sequence: TTC
ttattttctcattcttttca

SEQ ID NO: 393391 - DNA, 20 bp, Artificial Sequence
  Description of Artificial Sequence: Synthetic oligonucleotide
  Target: LAMA2; (+) strand; PAM type: YTN; PAM sequence: CTT
attttctcattcttttcatg

SEQ ID NO: 393392 - DNA, 20 bp, Artificial Sequence
  Description of Artificial Sequence: Synthetic oligonucleotide
  Target: LAMA2; (+) strand; PAM type: YTN; PAM sequence: TTA
ttttctcattcttttcatgt

SEQ ID NO: 393393 - DNA, 20 bp, Artificial Sequence
  Description of Artificial Sequence: Synthetic oligonucleotide
  Target: LAMA2; (+) strand; PAM type: YTN; PAM sequence: TTT
tctcattcttttcatgttag

SEQ ID NO: 393394 - DNA, 20 bp, Artificial Sequence
  Description of Artificial Sequence: Synthetic oligonucleotide
  Target: LAMA2; (+) strand; PAM type: YTN; PAM sequence: TTT
ctcattcttttcatgttagc

SEQ ID NO: 393395 - DNA, 20 bp, Artificial Sequence
  Description of Artificial Sequence: Synthetic oligonucleotide
  Target: LAMA2; (+) strand; PAM type: YTN; PAM sequence: TTC
tcattcttttcatgttagca

SEQ ID NO: 393396 - DNA, 20 bp, Artificial Sequence
  Description of Artificial Sequence: Synthetic oligonucleotide
  Target: LAMA2; (+) strand; PAM type: YTN; PAM sequence: CTC
attcttttcatgttagcatc

SEQ ID NO: 393397 - DNA, 20 bp, Artificial Sequence
  Description of Artificial Sequence: Synthetic oligonucleotide
  Target: LAMA2; (+) strand; PAM type: YTN; PAM sequence: TTC
ttttcatgttagcatctctt

SEQ ID NO: 393398 - DNA, 20 bp, Artificial Sequence
  Description of Artificial Sequence: Synthetic oligonucleotide
  Target: LAMA2; (+) strand; PAM type: YTN; PAM sequence: CTT
ttcatgttagcatctctttg

SEQ ID NO: 393399 - DNA, 20 bp, Artificial Sequence
  Description of Artificial Sequence: Synthetic oligonucleotide
  Target: LAMA2; (+) strand; PAM type: YTN; PAM sequence: TTT
tcatgttagcatctctttgt

SEQ ID NO: 393400 - DNA, 20 bp, Artificial Sequence
  Description of Artificial Sequence: Synthetic oligonucleotide
  Target: LAMA2; (+) strand; PAM type: YTN; PAM sequence: TTT
catgttagcatctctttgta

SEQ ID NO: 393401 - DNA, 20 bp, Artificial Sequence
  Description of Artificial Sequence: Synthetic oligonucleotide
  Target: LAMA2; (+) strand; PAM type: YTN; PAM sequence: TTC
atgttagcatctctttgtaa

SEQ ID NO: 393402 - DNA, 20 bp, Artificial Sequence
  Description of Artificial Sequence: Synthetic oligonucleotide
  Target: LAMA2; (+) strand; PAM type: YTN; PAM sequence: TTA
gcatctctttgtaacatggt

SEQ ID NO: 393403 - DNA, 20 bp, Artificial Sequence
  Description of Artificial Sequence: Synthetic oligonucleotide
  Target: LAMA2; (+) strand; PAM type: YTN; PAM sequence: CTC
tttgtaacatggtttaatac

SEQ ID NO: 393404 - DNA, 20 bp, Artificial Sequence
  Description of Artificial Sequence: Synthetic oligonucleotide
  Target: LAMA2; (+) strand; PAM type: YTN; PAM sequence: CTT
tgtaacatggtttaatacca

SEQ ID NO: 393405 - DNA, 20 bp, Artificial Sequence
  Description of Artificial Sequence: Synthetic oligonucleotide
  Target: LAMA2; (+) strand; PAM type: YTN; PAM sequence: TTT
gtaacatggtttaataccaa

SEQ ID NO: 393406 - DNA, 20 bp, Artificial Sequence
  Description of Artificial Sequence: Synthetic oligonucleotide
  Target: LAMA2; (+) strand; PAM type: YTN; PAM sequence: TTG
taacatggtttaataccaat

SEQ ID NO: 393407 - DNA, 20 bp, Artificial Sequence
  Description of Artificial Sequence: Synthetic oligonucleotide
  Target: LAMA2; (+) strand; PAM type: YTN; PAM sequence: TTT
aataccaataaaccctaagg

SEQ ID NO: 393408 - DNA, 20 bp, Artificial Sequence
  Description of Artificial Sequence: Synthetic oligonucleotide
  Target: LAMA2; (+) strand; PAM type: YTN; PAM sequence: TTA
ataccaataaaccctaaggc

SEQ ID NO: 393409 - DNA, 20 bp, Artificial Sequence
  Description of Artificial Sequence: Synthetic oligonucleotide
  Target: LAMA2; (+) strand; PAM type: YTN; PAM sequence: CTA
aggcagtgacatgagctcat

SEQ ID NO: 393410 - DNA, 20 bp, Artificial Sequence
  Description of Artificial Sequence: Synthetic oligonucleotide
  Target: LAMA2; (+) strand; PAM type: YTN; PAM sequence: CTC
attgtctattattgggctgg

SEQ ID NO: 393411 - DNA, 20 bp, Artificial Sequence
  Description of Artificial Sequence: Synthetic oligonucleotide
  Target: LAMA2; (+) strand; PAM type: YTN; PAM sequence: TTG
tctattattgggctgggggt

SEQ ID NO: 393412 - DNA, 20 bp, Artificial Sequence
  Description of Artificial Sequence: Synthetic oligonucleotide
  Target: LAMA2; (+) strand; PAM type: YTN; PAM sequence: CTA
ttattgggctgggggtggtt

SEQ ID NO: 393413 - DNA, 20 bp, Artificial Sequence
  Description of Artificial Sequence: Synthetic oligonucleotide
  Target: LAMA2; (+) strand; PAM type: YTN; PAM sequence: TTA
ttgggctgggggtggttaca

SEQ ID NO: 393414 - DNA, 20 bp, Artificial Sequence
  Description of Artificial Sequence: Synthetic oligonucleotide
  Target: LAMA2; (+) strand; PAM type: YTN; PAM sequence: TTG
ggctgggggtggttacagag

SEQ ID NO: 393415 - DNA, 20 bp, Artificial Sequence
  Description of Artificial Sequence: Synthetic oligonucleotide
  Target: LAMA2; (+) strand; PAM type: YTN; PAM sequence: CTG
ggggtggttacagagctgca

SEQ ID NO: 393416 - DNA, 20 bp, Artificial Sequence
  Description of Artificial Sequence: Synthetic oligonucleotide
  Target: LAMA2; (+) strand; PAM type: YTN; PAM sequence: TTA
cagagctgcagaagcccttc

SEQ ID NO: 393417 - DNA, 20 bp, Artificial Sequence
  Description of Artificial Sequence: Synthetic oligonucleotide
  Target: LAMA2; (+) strand; PAM type: YTN; PAM sequence: CTG
cagaagcccttctgaaaaaa

SEQ ID NO: 393418 - DNA, 20 bp, Artificial Sequence
  Description of Artificial Sequence: Synthetic oligonucleotide
  Target: LAMA2; (+) strand; PAM type: YTN; PAM sequence: CTT
ctgaaaaaagtgaagaagct

SEQ ID NO: 393419 - DNA, 20 bp, Artificial Sequence
  Description of Artificial Sequence: Synthetic oligonucleotide
  Target: LAMA2; (+) strand; PAM type: YTN; PAM sequence: TTC
tgaaaaaagtgaagaagctg

SEQ ID NO: 393420 - DNA, 20 bp, Artificial Sequence
  Description of Artificial Sequence: Synthetic oligonucleotide
  Target: LAMA2; (+) strand; PAM type: YTN; PAM sequence: CTG
aaaaaagtgaagaagctgtt

SEQ ID NO: 393421 - DNA, 20 bp, Artificial Sequence
  Description of Artificial Sequence: Synthetic oligonucleotide
  Target: LAMA2; (+) strand; PAM type: YTN; PAM sequence: CTG
tttggagagtcccgggggga

SEQ ID NO: 393422 - DNA, 20 bp, Artificial Sequence
  Description of Artificial Sequence: Synthetic oligonucleotide
  Target: LAMA2; (+) strand; PAM type: YTN; PAM sequence: TTT
ggagagtcccggggggaaaa

SEQ ID NO: 393423 - DNA, 20 bp, Artificial Sequence
  Description of Artificial Sequence: Synthetic oligonucleotide
  Target: LAMA2; (+) strand; PAM type: YTN; PAM sequence: TTG
gagagtcccggggggaaaat

SEQ ID NO: 393424 - DNA, 20 bp, Artificial Sequence
  Description of Artificial Sequence: Synthetic oligonucleotide
  Target: LAMA2; (+) strand; PAM type: YTN; PAM sequence: CTC
cgggaaaaactggctgacta

SEQ ID NO: 393425 - DNA, 20 bp, Artificial Sequence
  Description of Artificial Sequence: Synthetic oligonucleotide
  Target: LAMA2; (+) strand; PAM type: YTN; PAM sequence: CTG
gctgactacaaaaacaaagt

SEQ ID NO: 393426 - DNA, 20 bp, Artificial Sequence
  Description of Artificial Sequence: Synthetic oligonucleotide
  Target: LAMA2; (+) strand; PAM type: YTN; PAM sequence: CTG
actacaaaaacaaagttgat

SEQ ID NO: 393427 - DNA, 20 bp, Artificial Sequence
  Description of Artificial Sequence: Synthetic oligonucleotide
  Target: LAMA2; (+) strand; PAM type: YTN; PAM sequence: CTA
caaaaacaaagttgatgatg

SEQ ID NO: 393428 - DNA, 20 bp, Artificial Sequence
  Description of Artificial Sequence: Synthetic oligonucleotide
  Target: LAMA2; (+) strand; PAM type: YTN; PAM sequence: TTG
atgatgcttgggaccttttg

SEQ ID NO: 393429 - DNA, 20 bp, Artificial Sequence
  Description of Artificial Sequence: Synthetic oligonucleotide
  Target: LAMA2; (+) strand; PAM type: YTN; PAM sequence: CTT
gggaccttttgagagaagcc

SEQ ID NO: 393430 - DNA, 20 bp, Artificial Sequence
  Description of Artificial Sequence: Synthetic oligonucleotide
  Target: LAMA2; (+) strand; PAM type: YTN; PAM sequence: TTG
ggaccttttgagagaagcca

SEQ ID NO: 393431 - DNA, 20 bp, Artificial Sequence
  Description of Artificial Sequence: Synthetic oligonucleotide
  Target: LAMA2; (+) strand; PAM type: YTN; PAM sequence: CTT
ttgagagaagccacagataa

SEQ ID NO: 393432 - DNA, 20 bp, Artificial Sequence
  Description of Artificial Sequence: Synthetic oligonucleotide
  Target: LAMA2; (+) strand; PAM type: YTN; PAM sequence: TTT
tgagagaagccacagataaa

SEQ ID NO: 393433 - DNA, 20 bp, Artificial Sequence
  Description of Artificial Sequence: Synthetic oligonucleotide
  Target: LAMA2; (+) strand; PAM type: YTN; PAM sequence: TTT
gagagaagccacagataaaa

SEQ ID NO: 393434 - DNA, 20 bp, Artificial Sequence
  Description of Artificial Sequence: Synthetic oligonucleotide
  Target: LAMA2; (+) strand; PAM type: YTN; PAM sequence: TTG
agagaagccacagataaaat

SEQ ID NO: 393435 - DNA, 20 bp, Artificial Sequence
  Description of Artificial Sequence: Synthetic oligonucleotide
  Target: LAMA2; (+) strand; PAM type: YTN; PAM sequence: CTA
atcgcctatttgcagtaaat

SEQ ID NO: 393436 - DNA, 20 bp, Artificial Sequence
  Description of Artificial Sequence: Synthetic oligonucleotide
  Target: LAMA2; (+) strand; PAM type: YTN; PAM sequence: CTA
tttgcagtaaatcagaaaaa

SEQ ID NO: 393437 - DNA, 20 bp, Artificial Sequence
  Description of Artificial Sequence: Synthetic oligonucleotide
  Target: LAMA2; (+) strand; PAM type: YTN; PAM sequence: TTT
gcagtaaatcagaaaaacat

SEQ ID NO: 393438 - DNA, 20 bp, Artificial Sequence
  Description of Artificial Sequence: Synthetic oligonucleotide
  Target: LAMA2; (+) strand; PAM type: YTN; PAM sequence: TTG
cagtaaatcagaaaaacatg

SEQ ID NO: 393439 - DNA, 20 bp, Artificial Sequence
  Description of Artificial Sequence: Synthetic oligonucleotide
  Target: LAMA2; (+) strand; PAM type: YTN; PAM sequence: CTG
cattggaggtgagtcttagg

SEQ ID NO: 393440 - DNA, 20 bp, Artificial Sequence
  Description of Artificial Sequence: Synthetic oligonucleotide
  Target: LAMA2; (+) strand; PAM type: YTN; PAM sequence: TTG
gaggtgagtcttaggggcac

SEQ ID NO: 393441 - DNA, 20 bp, Artificial Sequence
  Description of Artificial Sequence: Synthetic oligonucleotide
  Target: LAMA2; (+) strand; PAM type: YTN; PAM sequence: CTT
aggggcacttttatcttaat

SEQ ID NO: 393442 - DNA, 20 bp, Artificial Sequence
  Description of Artificial Sequence: Synthetic oligonucleotide
  Target: LAMA2; (+) strand; PAM type: YTN; PAM sequence: TTA
ggggcacttttatcttaatc

SEQ ID NO: 393443 - DNA, 20 bp, Artificial Sequence
  Description of Artificial Sequence: Synthetic oligonucleotide
  Target: LAMA2; (+) strand; PAM type: YTN; PAM sequence: CTT
ttatcttaatctcagaaggt

SEQ ID NO: 393444 - DNA, 20 bp, Artificial Sequence
  Description of Artificial Sequence: Synthetic oligonucleotide
  Target: LAMA2; (+) strand; PAM type: YTN; PAM sequence: TTT
tatcttaatctcagaaggtt

SEQ ID NO: 393445 - DNA, 20 bp, Artificial Sequence
  Description of Artificial Sequence: Synthetic oligonucleotide
  Target: LAMA2; (+) strand; PAM type: YTN; PAM sequence: TTT
atcttaatctcagaaggttg

SEQ ID NO: 393446 - DNA, 20 bp, Artificial Sequence
  Description of Artificial Sequence: Synthetic oligonucleotide
  Target: LAMA2; (+) strand; PAM type: YTN; PAM sequence: TTA
tcttaatctcagaaggttgg

SEQ ID NO: 393447 - DNA, 20 bp, Artificial Sequence
  Description of Artificial Sequence: Synthetic oligonucleotide
  Target: LAMA2; (+) strand; PAM type: YTN; PAM sequence: CTT
aatctcagaaggttggggac

SEQ ID NO: 393448 - DNA, 20 bp, Artificial Sequence
  Description of Artificial Sequence: Synthetic oligonucleotide
  Target: LAMA2; (+) strand; PAM type: YTN; PAM sequence: TTA
atctcagaaggttggggact

SEQ ID NO: 393449 - DNA, 20 bp, Artificial Sequence
  Description of Artificial Sequence: Synthetic oligonucleotide
  Target: LAMA2; (+) strand; PAM type: YTN; PAM sequence: CTC
agaaggttggggactgcggg

SEQ ID NO: 393450 - DNA, 20 bp, Artificial Sequence
  Description of Artificial Sequence: Synthetic oligonucleotide
  Target: LAMA2; (+) strand; PAM type: YTN; PAM sequence: TTG
gggactgcgggggcagtgtt

SEQ ID NO: 393451 - DNA, 20 bp, Artificial Sequence
  Description of Artificial Sequence: Synthetic oligonucleotide
  Target: LAMA2; (+) strand; PAM type: YTN; PAM sequence: CTG
cgggggcagtgttgaacatg

SEQ ID NO: 393452 - DNA, 20 bp, Artificial Sequence
  Description of Artificial Sequence: Synthetic oligonucleotide
  Target: LAMA2; (+) strand; PAM type: YTN; PAM sequence: TTG
aacatggctggactattcaa

SEQ ID NO: 393453 - DNA, 20 bp, Artificial Sequence
  Description of Artificial Sequence: Synthetic oligonucleotide
  Target: LAMA2; (+) strand; PAM type: YTN; PAM sequence: CTG
gactattcaagttgatgcac

SEQ ID NO: 393454 - DNA, 20 bp, Artificial Sequence
  Description of Artificial Sequence: Synthetic oligonucleotide
  Target: LAMA2; (+) strand; PAM type: YTN; PAM sequence: CTA
ttcaagttgatgcacattta

SEQ ID NO: 393455 - DNA, 20 bp, Artificial Sequence
  Description of Artificial Sequence: Synthetic oligonucleotide
  Target: LAMA2; (+) strand; PAM type: YTN; PAM sequence: TTC
aagttgatgcacatttacaa

SEQ ID NO: 393456 - DNA, 20 bp, Artificial Sequence
  Description of Artificial Sequence: Synthetic oligonucleotide
  Target: LAMA2; (+) strand; PAM type: YTN; PAM sequence: TTG
atgcacatttacaaaagtca

SEQ ID NO: 393457 - DNA, 20 bp, Artificial Sequence
  Description of Artificial Sequence: Synthetic oligonucleotide
  Target: LAMA2; (+) strand; PAM type: YTN; PAM sequence: TTT
acaaaagtcaagagtgacaa

SEQ ID NO: 393458 - DNA, 20 bp, Artificial Sequence
  Description of Artificial Sequence: Synthetic oligonucleotide
  Target: LAMA2; (+) strand; PAM type: YTN; PAM sequence: TTA
caaaagtcaagagtgacaac

SEQ ID NO: 393459 - DNA, 20 bp, Artificial Sequence
  Description of Artificial Sequence: Synthetic oligonucleotide
  Target: LAMA2; (+) strand; PAM type: YTN; PAM sequence: CTC
tgaaagggggcttctaagaa

SEQ ID NO: 393460 - DNA, 20 bp, Artificial Sequence
  Description of Artificial Sequence: Synthetic oligonucleotide
  Target: LAMA2; (+) strand; PAM type: YTN; PAM sequence: CTG
aaagggggcttctaagaaac

SEQ ID NO: 393461 - DNA, 20 bp, Artificial Sequence
  Description of Artificial Sequence: Synthetic oligonucleotide
  Target: LAMA2; (+) strand; PAM type: YTN; PAM sequence: CTT
ctaagaaacagaacaagaaa

SEQ ID NO: 393462 - DNA, 20 bp, Artificial Sequence
  Description of Artificial Sequence: Synthetic oligonucleotide
  Target: LAMA2; (+) strand; PAM type: YTN; PAM sequence: TTC
taagaaacagaacaagaaat

SEQ ID NO: 393463 - DNA, 20 bp, Artificial Sequence
  Description of Artificial Sequence: Synthetic oligonucleotide
  Target: LAMA2; (+) strand; PAM type: YTN; PAM sequence: CTA
agaaacagaacaagaaatga

SEQ ID NO: 393464 - DNA, 20 bp, Artificial Sequence
  Description of Artificial Sequence: Synthetic oligonucleotide
  Target: LAMA2; (+) strand; PAM type: YTN; PAM sequence: CTT
ttttttgtttttgttttgtt

SEQ ID NO: 393465 - DNA, 20 bp, Artificial Sequence
  Description of Artificial Sequence: Synthetic oligonucleotide
  Target: LAMA2; (+) strand; PAM type: YTN; PAM sequence: TTT
tttttgtttttgttttgttt

SEQ ID NO: 393466 - DNA, 20 bp, Artificial Sequence
  Description of Artificial Sequence: Synthetic oligonucleotide
  Target: LAMA2; (+) strand; PAM type: YTN; PAM sequence: TTT
ttttgtttttgttttgtttt

SEQ ID NO: 393467 - DNA, 20 bp, Artificial Sequence
  Description of Artificial Sequence: Synthetic oligonucleotide
  Target: LAMA2; (+) strand; PAM type: YTN; PAM sequence: TTT
tttgtttttgttttgttttt

SEQ ID NO: 393468 - DNA, 20 bp, Artificial Sequence
  Description of Artificial Sequence: Synthetic oligonucleotide
  Target: LAMA2; (+) strand; PAM type: YTN; PAM sequence: TTT
ttgtttttgttttgttttta

SEQ ID NO: 393469 - DNA, 20 bp, Artificial Sequence
  Description of Artificial Sequence: Synthetic oligonucleotide
  Target: LAMA2; (+) strand; PAM type: YTN; PAM sequence: TTT
tgtttttgttttgtttttaa

SEQ ID NO: 393470 - DNA, 20 bp, Artificial Sequence
  Description of Artificial Sequence: Synthetic oligonucleotide
  Target: LAMA2; (+) strand; PAM type: YTN; PAM sequence: TTT
gtttttgttttgtttttaat

SEQ ID NO: 393471 - DNA, 20 bp, Artificial Sequence
  Description of Artificial Sequence: Synthetic oligonucleotide
  Target: LAMA2; (+) strand; PAM type: YTN; PAM sequence: TTG
tttttgttttgtttttaatg

SEQ ID NO: 393472 - DNA, 20 bp, Artificial Sequence
  Description of Artificial Sequence: Synthetic oligonucleotide
  Target: LAMA2; (+) strand; PAM type: YTN; PAM sequence: TTT
ttgttttgtttttaatgacc

SEQ ID NO: 393473 - DNA, 20 bp, Artificial Sequence
  Description of Artificial Sequence: Synthetic oligonucleotide
  Target: LAMA2; (+) strand; PAM type: YTN; PAM sequence: TTT
tgttttgtttttaatgacca

SEQ ID NO: 393474 - DNA, 20 bp, Artificial Sequence
  Description of Artificial Sequence: Synthetic oligonucleotide
  Target: LAMA2; (+) strand; PAM type: YTN; PAM sequence: TTT
gttttgtttttaatgaccag

SEQ ID NO: 393475 - DNA, 20 bp, Artificial Sequence
  Description of Artificial Sequence: Synthetic oligonucleotide
  Target: LAMA2; (+) strand; PAM type: YTN; PAM sequence: TTG
ttttgtttttaatgaccagt

SEQ ID NO: 393476 - DNA, 20 bp, Artificial Sequence
  Description of Artificial Sequence: Synthetic oligonucleotide
  Target: LAMA2; (+) strand; PAM type: YTN; PAM sequence: TTT
tgtttttaatgaccagttac

SEQ ID NO: 393477 - DNA, 20 bp, Artificial Sequence
  Description of Artificial Sequence: Synthetic oligonucleotide
  Target: LAMA2; (+) strand; PAM type: YTN; PAM sequence: TTT
gtttttaatgaccagttacc

SEQ ID NO: 393478 - DNA, 20 bp, Artificial Sequence
  Description of Artificial Sequence: Synthetic oligonucleotide
  Target: LAMA2; (+) strand; PAM type: YTN; PAM sequence: TTG
tttttaatgaccagttacca

SEQ ID NO: 393479 - DNA, 20 bp, Artificial Sequence
  Description of Artificial Sequence: Synthetic oligonucleotide
  Target: LAMA2; (+) strand; PAM type: YTN; PAM sequence: TTT
ttaatgaccagttaccatcg

SEQ ID NO: 393480 - DNA, 20 bp, Artificial Sequence
  Description of Artificial Sequence: Synthetic oligonucleotide
  Target: LAMA2; (+) strand; PAM type: YTN; PAM sequence: TTT
taatgaccagttaccatcgc

SEQ ID NO: 393481 - DNA, 20 bp, Artificial Sequence
  Description of Artificial Sequence: Synthetic oligonucleotide
  Target: LAMA2; (+) strand; PAM type: YTN; PAM sequence: TTT
aatgaccagttaccatcgcc

SEQ ID NO: 393482 - DNA, 20 bp, Artificial Sequence
  Description of Artificial Sequence: Synthetic oligonucleotide
  Target: LAMA2; (+) strand; PAM type: YTN; PAM sequence: TTA
atgaccagttaccatcgccc

SEQ ID NO: 393483 - DNA, 20 bp, Artificial Sequence
  Description of Artificial Sequence: Synthetic oligonucleotide
  Target: LAMA2; (+) strand; PAM type: YTN; PAM sequence: TTA
ccatcgcccaaagaatcaaa

SEQ ID NO: 393484 - DNA, 20 bp, Artificial Sequence
  Description of Artificial Sequence: Synthetic oligonucleotide
  Target: LAMA2; (+) strand; PAM type: YTN; PAM sequence: TTT
tgataaattaaactgttgaa

SEQ ID NO: 393485 - DNA, 20 bp, Artificial Sequence
  Description of Artificial Sequence: Synthetic oligonucleotide
  Target: LAMA2; (+) strand; PAM type: YTN; PAM sequence: TTT
gataaattaaactgttgaag

SEQ ID NO: 393486 - DNA, 20 bp, Artificial Sequence
  Description of Artificial Sequence: Synthetic oligonucleotide
  Target: LAMA2; (+) strand; PAM type: YTN; PAM sequence: TTG
ataaattaaactgttgaaga

SEQ ID NO: 393487 - DNA, 20 bp, Artificial Sequence
  Description of Artificial Sequence: Synthetic oligonucleotide
  Target: LAMA2; (+) strand; PAM type: YTN; PAM sequence: TTA
aactgttgaagatatttaag

SEQ ID NO: 393488 - DNA, 20 bp, Artificial Sequence
  Description of Artificial Sequence: Synthetic oligonucleotide
  Target: LAMA2; (+) strand; PAM type: YTN; PAM sequence: CTG
ttgaagatatttaagaacac

SEQ ID NO: 393489 - DNA, 20 bp, Artificial Sequence
  Description of Artificial Sequence: Synthetic oligonucleotide
  Target: LAMA2; (+) strand; PAM type: YTN; PAM sequence: TTG
aagatatttaagaacactgt

SEQ ID NO: 393490 - DNA, 20 bp, Artificial Sequence
  Description of Artificial Sequence: Synthetic oligonucleotide
  Target: LAMA2; (+) strand; PAM type: YTN; PAM sequence: TTT
aagaacactgtgatacagtg

SEQ ID NO: 393491 - DNA, 20 bp, Artificial Sequence
  Description of Artificial Sequence: Synthetic oligonucleotide
  Target: LAMA2; (+) strand; PAM type: YTN; PAM sequence: TTA
agaacactgtgatacagtgg

SEQ ID NO: 393492 - DNA, 20 bp, Artificial Sequence
  Description of Artificial Sequence: Synthetic oligonucleotide
  Target: LAMA2; (+) strand; PAM type: YTN; PAM sequence: CTG
tgatacagtggaagaagttc

SEQ ID NO: 393493 - DNA, 20 bp, Artificial Sequence
  Description of Artificial Sequence: Synthetic oligonucleotide
  Target: LAMA2; (+) strand; PAM type: YTN; PAM sequence: TTC
tttacagggagtcaggcgac

SEQ ID NO: 393494 - DNA, 20 bp, Artificial Sequence
  Description of Artificial Sequence: Synthetic oligonucleotide
  Target: LAMA2; (+) strand; PAM type: YTN; PAM sequence: CTT
tacagggagtcaggcgacct

SEQ ID NO: 393495 - DNA, 20 bp, Artificial Sequence
  Description of Artificial Sequence: Synthetic oligonucleotide
  Target: LAMA2; (+) strand; PAM type: YTN; PAM sequence: TTT
acagggagtcaggcgacctt

SEQ ID NO: 393496 - DNA, 20 bp, Artificial Sequence
  Description of Artificial Sequence: Synthetic oligonucleotide
  Target: LAMA2; (+) strand; PAM type: YTN; PAM sequence: TTA
cagggagtcaggcgaccttg

SEQ ID NO: 393497 - DNA, 20 bp, Artificial Sequence
  Description of Artificial Sequence: Synthetic oligonucleotide
  Target: LAMA2; (+) strand; PAM type: YTN; PAM sequence: CTT
ggtctcaatgacaactgtgc

SEQ ID NO: 393498 - DNA, 20 bp, Artificial Sequence
  Description of Artificial Sequence: Synthetic oligonucleotide
  Target: LAMA2; (+) strand; PAM type: YTN; PAM sequence: TTG
gtctcaatgacaactgtgcc

SEQ ID NO: 393499 - DNA, 20 bp, Artificial Sequence
  Description of Artificial Sequence: Synthetic oligonucleotide
  Target: LAMA2; (+) strand; PAM type: YTN; PAM sequence: CTC
aatgacaactgtgccactat

SEQ ID NO: 393500 - DNA, 20 bp, Artificial Sequence
  Description of Artificial Sequence: Synthetic oligonucleotide
  Target: LAMA2; (+) strand; PAM type: YTN; PAM sequence: CTG
tgccactatctagacataca

SEQ ID NO: 393501 - DNA, 20 bp, Artificial Sequence
  Description of Artificial Sequence: Synthetic oligonucleotide
  Target: LAMA2; (+) strand; PAM type: YTN; PAM sequence: CTA
tctagacatacaaattgggc

SEQ ID NO: 393502 - DNA, 20 bp, Artificial Sequence
  Description of Artificial Sequence: Synthetic oligonucleotide
  Target: LAMA2; (+) strand; PAM type: YTN; PAM sequence: CTA
gacatacaaattgggcaagt

SEQ ID NO: 393503 - DNA, 20 bp, Artificial Sequence
  Description of Artificial Sequence: Synthetic oligonucleotide
  Target: LAMA2; (+) strand; PAM type: YTN; PAM sequence: TTG
ggcaagtcaattaatctgta

SEQ ID NO: 393504 - DNA, 20 bp, Artificial Sequence
  Description of Artificial Sequence: Synthetic oligonucleotide
  Target: LAMA2; (+) strand; PAM type: YTN; PAM sequence: TTA
atctgtaagcatcagttccc

SEQ ID NO: 393505 - DNA, 20 bp, Artificial Sequence
  Description of Artificial Sequence: Synthetic oligonucleotide
  Target: LAMA2; (+) strand; PAM type: YTN; PAM sequence: CTG
taagcatcagttccccaaat

SEQ ID NO: 393506 - DNA, 20 bp, Artificial Sequence
  Description of Artificial Sequence: Synthetic oligonucleotide
  Target: LAMA2; (+) strand; PAM type: YTN; PAM sequence: TTC
cccaaatctacaataagtgc

SEQ ID NO: 393507 - DNA, 20 bp, Artificial Sequence
  Description of Artificial Sequence: Synthetic oligonucleotide
  Target: LAMA2; (+) strand; PAM type: YTN; PAM sequence: CTA
caataagtgcattatactat

SEQ ID NO: 393508 - DNA, 20 bp, Artificial Sequence
  Description of Artificial Sequence: Synthetic oligonucleotide
  Target: LAMA2; (+) strand; PAM type: YTN; PAM sequence: TTA
tactatagcatacatatagg

SEQ ID NO: 393509 - DNA, 20 bp, Artificial Sequence
  Description of Artificial Sequence: Synthetic oligonucleotide
  Target: LAMA2; (+) strand; PAM type: YTN; PAM sequence: CTA
tagcatacatatagggtatc

SEQ ID NO: 393510 - DNA, 20 bp, Artificial Sequence
  Description of Artificial Sequence: Synthetic oligonucleotide
  Target: LAMA2; (+) strand; PAM type: YTN; PAM sequence: CTT
caaatattcatatcatatta

SEQ ID NO: 393511 - DNA, 20 bp, Artificial Sequence
  Description of Artificial Sequence: Synthetic oligonucleotide
  Target: LAMA2; (+) strand; PAM type: YTN; PAM sequence: TTC
aaatattcatatcatattat

SEQ ID NO: 393512 - DNA, 20 bp, Artificial Sequence
  Description of Artificial Sequence: Synthetic oligonucleotide
  Target: LAMA2; (+) strand; PAM type: YTN; PAM sequence: TTC
atatcatattattttgcagc

SEQ ID NO: 393513 - DNA, 20 bp, Artificial Sequence
  Description of Artificial Sequence: Synthetic oligonucleotide
  Target: LAMA2; (+) strand; PAM type: YTN; PAM sequence: TTA
ttttgcagctttcccaaact

SEQ ID NO: 393514 - DNA, 20 bp, Artificial Sequence
  Description of Artificial Sequence: Synthetic oligonucleotide
  Target: LAMA2; (+) strand; PAM type: YTN; PAM sequence: TTT
tgcagctttcccaaactaat

SEQ ID NO: 393515 - DNA, 20 bp, Artificial Sequence
  Description of Artificial Sequence: Synthetic oligonucleotide
  Target: LAMA2; (+) strand; PAM type: YTN; PAM sequence: TTT
gcagctttcccaaactaatt

SEQ ID NO: 393516 - DNA, 20 bp, Artificial Sequence
  Description of Artificial Sequence: Synthetic oligonucleotide
  Target: LAMA2; (+) strand; PAM type: YTN; PAM sequence: TTG
cagctttcccaaactaattc

SEQ ID NO: 393517 - DNA, 20 bp, Artificial Sequence
  Description of Artificial Sequence: Synthetic oligonucleotide
  Target: LAMA2; (+) strand; PAM type: YTN; PAM sequence: CTT
tcccaaactaattcacaaat

SEQ ID NO: 393518 - DNA, 20 bp, Artificial Sequence
  Description of Artificial Sequence: Synthetic oligonucleotide
  Target: LAMA2; (+) strand; PAM type: YTN; PAM sequence: TTT
cccaaactaattcacaaatc

SEQ ID NO: 393519 - DNA, 20 bp, Artificial Sequence
  Description of Artificial Sequence: Synthetic oligonucleotide
  Target: LAMA2; (+) strand; PAM type: YTN; PAM sequence: TTC
ccaaactaattcacaaatct

SEQ ID NO: 393520 - DNA, 20 bp, Artificial Sequence
  Description of Artificial Sequence: Synthetic oligonucleotide
  Target: LAMA2; (+) strand; PAM type: YTN; PAM sequence: CTA
attcacaaatcttgttcaga

SEQ ID NO: 393521 - DNA, 20 bp, Artificial Sequence
  Description of Artificial Sequence: Synthetic oligonucleotide
  Target: LAMA2; (+) strand; PAM type: YTN; PAM sequence: TTC
acaaatcttgttcagagatc

SEQ ID NO: 393522 - DNA, 20 bp, Artificial Sequence
  Description of Artificial Sequence: Synthetic oligonucleotide
  Target: LAMA2; (+) strand; PAM type: YTN; PAM sequence: CTT
gttcagagatcttgctgcca

SEQ ID NO: 393523 - DNA, 20 bp, Artificial Sequence
  Description of Artificial Sequence: Synthetic oligonucleotide
  Target: LAMA2; (+) strand; PAM type: YTN; PAM sequence: TTG
ttcagagatcttgctgccaa

SEQ ID NO: 393524 - DNA, 20 bp, Artificial Sequence
  Description of Artificial Sequence: Synthetic oligonucleotide
  Target: LAMA2; (+) strand; PAM type: YTN; PAM sequence: TTC
agagatcttgctgccaaaaa

SEQ ID NO: 393525 - DNA, 20 bp, Artificial Sequence
  Description of Artificial Sequence: Synthetic oligonucleotide
  Target: LAMA2; (+) strand; PAM type: YTN; PAM sequence: CTT
gctgccaaaaatcatagaag

SEQ ID NO: 393526 - DNA, 20 bp, Artificial Sequence
  Description of Artificial Sequence: Synthetic oligonucleotide
  Target: LAMA2; (+) strand; PAM type: YTN; PAM sequence: TTG
ctgccaaaaatcatagaagt

SEQ ID NO: 393527 - DNA, 20 bp, Artificial Sequence
  Description of Artificial Sequence: Synthetic oligonucleotide
  Target: LAMA2; (+) strand; PAM type: YTN; PAM sequence: CTG
ccaaaaatcatagaagttcc

SEQ ID NO: 393528 - DNA, 20 bp, Artificial Sequence
  Description of Artificial Sequence: Synthetic oligonucleotide
  Target: LAMA2; (+) strand; PAM type: YTN; PAM sequence: TTC
cctacactttcaaattcaat

SEQ ID NO: 393529 - DNA, 20 bp, Artificial Sequence
  Description of Artificial Sequence: Synthetic oligonucleotide
  Target: LAMA2; (+) strand; PAM type: YTN; PAM sequence: CTA
cactttcaaattcaatctga

SEQ ID NO: 393530 - DNA, 20 bp, Artificial Sequence
  Description of Artificial Sequence: Synthetic oligonucleotide
  Target: LAMA2; (+) strand; PAM type: YTN; PAM sequence: CTT
tcaaattcaatctgagcaca

SEQ ID NO: 393531 - DNA, 20 bp, Artificial Sequence
  Description of Artificial Sequence: Synthetic oligonucleotide
  Target: LAMA2; (+) strand; PAM type: YTN; PAM sequence: TTT
caaattcaatctgagcacat

SEQ ID NO: 393532 - DNA, 20 bp, Artificial Sequence
  Description of Artificial Sequence: Synthetic oligonucleotide
  Target: LAMA2; (+) strand; PAM type: YTN; PAM sequence: TTC
aaattcaatctgagcacatg

SEQ ID NO: 393533 - DNA, 20 bp, Artificial Sequence
  Description of Artificial Sequence: Synthetic oligonucleotide
  Target: LAMA2; (+) strand; PAM type: YTN; PAM sequence: TTC
aatctgagcacatgacaaat

SEQ ID NO: 393534 - DNA, 20 bp, Artificial Sequence
  Description of Artificial Sequence: Synthetic oligonucleotide
  Target: LAMA2; (+) strand; PAM type: YTN; PAM sequence: CTG
agcacatgacaaatagctca

SEQ ID NO: 393535 - DNA, 20 bp, Artificial Sequence
  Description of Artificial Sequence: Synthetic oligonucleotide
  Target: LAMA2; (+) strand; PAM type: YTN; PAM sequence: CTC
aatgaattgagaccagagct

SEQ ID NO: 393536 - DNA, 20 bp, Artificial Sequence
  Description of Artificial Sequence: Synthetic oligonucleotide
  Target: LAMA2; (+) strand; PAM type: YTN; PAM sequence: TTG
agaccagagcttggaaaaat

SEQ ID NO: 393537 - DNA, 20 bp, Artificial Sequence
  Description of Artificial Sequence: Synthetic oligonucleotide
  Target: LAMA2; (+) strand; PAM type: YTN; PAM sequence: CTT
ggaaaaattttggttcctct

SEQ ID NO: 393538 - DNA, 20 bp, Artificial Sequence
  Description of Artificial Sequence: Synthetic oligonucleotide
  Target: LAMA2; (+) strand; PAM type: YTN; PAM sequence: TTG
gaaaaattttggttcctctt

SEQ ID NO: 393539 - DNA, 20 bp, Artificial Sequence
  Description of Artificial Sequence: Synthetic oligonucleotide
  Target: LAMA2; (+) strand; PAM type: YTN; PAM sequence: TTT
tggttcctctttttctatgc

SEQ ID NO: 393540 - DNA, 20 bp, Artificial Sequence
  Description of Artificial Sequence: Synthetic oligonucleotide
  Target: LAMA2; (+) strand; PAM type: YTN; PAM sequence: TTT
ggttcctctttttctatgcg

SEQ ID NO: 393541 - DNA, 20 bp, Artificial Sequence
  Description of Artificial Sequence: Synthetic oligonucleotide
  Target: LAMA2; (+) strand; PAM type: YTN; PAM sequence: TTG
gttcctctttttctatgcgc

SEQ ID NO: 393542 - DNA, 20 bp, Artificial Sequence
  Description of Artificial Sequence: Synthetic oligonucleotide
  Target: LAMA2; (+) strand; PAM type: YTN; PAM sequence: TTC
ctctttttctatgcgctgtg

SEQ ID NO: 393543 - DNA, 20 bp, Artificial Sequence
  Description of Artificial Sequence: Synthetic oligonucleotide
  Target: LAMA2; (+) strand; PAM type: YTN; PAM sequence: CTC
tttttctatgcgctgtgttc

SEQ ID NO: 393544 - DNA, 20 bp, Artificial Sequence
  Description of Artificial Sequence: Synthetic oligonucleotide
  Target: LAMA2; (+) strand; PAM type: YTN; PAM sequence: CTT
tttctatgcgctgtgttcta

SEQ ID NO: 393545 - DNA, 20 bp, Artificial Sequence
  Description of Artificial Sequence: Synthetic oligonucleotide
  Target: LAMA2; (+) strand; PAM type: YTN; PAM sequence: TTT
ttctatgcgctgtgttctat

SEQ ID NO: 393546 - DNA, 20 bp, Artificial Sequence
  Description of Artificial Sequence: Synthetic oligonucleotide
  Target: LAMA2; (+) strand; PAM type: YTN; PAM sequence: TTT
tctatgcgctgtgttctatg

SEQ ID NO: 393547 - DNA, 20 bp, Artificial Sequence
  Description of Artificial Sequence: Synthetic oligonucleotide
  Target: LAMA2; (+) strand; PAM type: YTN; PAM sequence: TTT
ctatgcgctgtgttctatgc

SEQ ID NO: 393548 - DNA, 20 bp, Artificial Sequence
  Description of Artificial Sequence: Synthetic oligonucleotide
  Target: LAMA2; (+) strand; PAM type: YTN; PAM sequence: TTC
tatgcgctgtgttctatgca

SEQ ID NO: 393549 - DNA, 20 bp, Artificial Sequence
  Description of Artificial Sequence: Synthetic oligonucleotide
  Target: LAMA2; (+) strand; PAM type: YTN; PAM sequence: CTA
tgcgctgtgttctatgcaaa

SEQ ID NO: 393550 - DNA, 20 bp, Artificial Sequence
  Description of Artificial Sequence: Synthetic oligonucleotide
  Target: LAMA2; (+) strand; PAM type: YTN; PAM sequence: CTG
tgttctatgcaaatgatctt

SEQ ID NO: 393551 - DNA, 20 bp, Artificial Sequence
  Description of Artificial Sequence: Synthetic oligonucleotide
  Target: LAMA2; (+) strand; PAM type: YTN; PAM sequence: TTC
tatgcaaatgatcttttaga

SEQ ID NO: 393552 - DNA, 20 bp, Artificial Sequence
  Description of Artificial Sequence: Synthetic oligonucleotide
  Target: LAMA2; (+) strand; PAM type: YTN; PAM sequence: CTA
tgcaaatgatcttttagaag

SEQ ID NO: 393553 - DNA, 20 bp, Artificial Sequence
  Description of Artificial Sequence: Synthetic oligonucleotide
  Target: LAMA2; (+) strand; PAM type: YTN; PAM sequence: CTT
ttagaaggaactaacatgaa

SEQ ID NO: 393554 - DNA, 20 bp, Artificial Sequence
  Description of Artificial Sequence: Synthetic oligonucleotide
  Target: LAMA2; (+) strand; PAM type: YTN; PAM sequence: TTT
tagaaggaactaacatgaat

SEQ ID NO: 393555 - DNA, 20 bp, Artificial Sequence
  Description of Artificial Sequence: Synthetic oligonucleotide
  Target: LAMA2; (+) strand; PAM type: YTN; PAM sequence: TTT
agaaggaactaacatgaata

SEQ ID NO: 393556 - DNA, 20 bp, Artificial Sequence
  Description of Artificial Sequence: Synthetic oligonucleotide
  Target: LAMA2; (+) strand; PAM type: YTN; PAM sequence: TTA
gaaggaactaacatgaatag

SEQ ID NO: 393557 - DNA, 20 bp, Artificial Sequence
  Description of Artificial Sequence: Synthetic oligonucleotide
  Target: LAMA2; (+) strand; PAM type: YTN; PAM sequence: CTA
acatgaatagatcaggtctg

SEQ ID NO: 393558 - DNA, 20 bp, Artificial Sequence
  Description of Artificial Sequence: Synthetic oligonucleotide
  Target: LAMA2; (+) strand; PAM type: YTN; PAM sequence: CTG
cgttattttctcctcctttt

SEQ ID NO: 393559 - DNA, 20 bp, Artificial Sequence
  Description of Artificial Sequence: Synthetic oligonucleotide
  Target: LAMA2; (+) strand; PAM type: YTN; PAM sequence: TTA
ttttctcctccttttccaca

SEQ ID NO: 393560 - DNA, 20 bp, Artificial Sequence
  Description of Artificial Sequence: Synthetic oligonucleotide
  Target: LAMA2; (+) strand; PAM type: YTN; PAM sequence: TTT
tctcctccttttccacacag

SEQ ID NO: 393561 - DNA, 20 bp, Artificial Sequence
  Description of Artificial Sequence: Synthetic oligonucleotide
  Target: LAMA2; (+) strand; PAM type: YTN; PAM sequence: TTT
ctcctccttttccacacaga

SEQ ID NO: 393562 - DNA, 20 bp, Artificial Sequence
  Description of Artificial Sequence: Synthetic oligonucleotide
  Target: LAMA2; (+) strand; PAM type: YTN; PAM sequence: TTC
tcctccttttccacacagat

SEQ ID NO: 393563 - DNA, 20 bp, Artificial Sequence
  Description of Artificial Sequence: Synthetic oligonucleotide
  Target: LAMA2; (+) strand; PAM type: YTN; PAM sequence: CTC
ctccttttccacacagataa

SEQ ID NO: 393564 - DNA, 20 bp, Artificial Sequence
  Description of Artificial Sequence: Synthetic oligonucleotide
  Target: LAMA2; (+) strand; PAM type: YTN; PAM sequence: CTC
cttttccacacagataacag

SEQ ID NO: 393565 - DNA, 20 bp, Artificial Sequence
  Description of Artificial Sequence: Synthetic oligonucleotide
  Target: LAMA2; (+) strand; PAM type: YTN; PAM sequence: CTT
ttccacacagataacagtta

SEQ ID NO: 393566 - DNA, 20 bp, Artificial Sequence
  Description of Artificial Sequence: Synthetic oligonucleotide
  Target: LAMA2; (+) strand; PAM type: YTN; PAM sequence: TTT
tccacacagataacagttac

SEQ ID NO: 393567 - DNA, 20 bp, Artificial Sequence
  Description of Artificial Sequence: Synthetic oligonucleotide
  Target: LAMA2; (+) strand; PAM type: YTN; PAM sequence: TTT
ccacacagataacagttact

SEQ ID NO: 393568 - DNA, 20 bp, Artificial Sequence
  Description of Artificial Sequence: Synthetic oligonucleotide
  Target: LAMA2; (+) strand; PAM type: YTN; PAM sequence: TTC
cacacagataacagttactt

SEQ ID NO: 393569 - DNA, 20 bp, Artificial Sequence
  Description of Artificial Sequence: Synthetic oligonucleotide
  Target: LAMA2; (+) strand; PAM type: YTN; PAM sequence: TTA
cttctcaactcaagaaatta

SEQ ID NO: 393570 - DNA, 20 bp, Artificial Sequence
  Description of Artificial Sequence: Synthetic oligonucleotide
  Target: LAMA2; (+) strand; PAM type: YTN; PAM sequence: CTT
ctcaactcaagaaattatgg

SEQ ID NO: 393571 - DNA, 20 bp, Artificial Sequence
  Description of Artificial Sequence: Synthetic oligonucleotide
  Target: LAMA2; (+) strand; PAM type: YTN; PAM sequence: TTC
tcaactcaagaaattatggg

SEQ ID NO: 393572 - DNA, 20 bp, Artificial Sequence
  Description of Artificial Sequence: Synthetic oligonucleotide
  Target: LAMA2; (+) strand; PAM type: YTN; PAM sequence: CTC
aactcaagaaattatgggca

SEQ ID NO: 393573 - DNA, 20 bp, Artificial Sequence
  Description of Artificial Sequence: Synthetic oligonucleotide
  Target: LAMA2; (+) strand; PAM type: YTN; PAM sequence: CTC
aagaaattatgggcagcctc

SEQ ID NO: 393574 - DNA, 20 bp, Artificial Sequence
  Description of Artificial Sequence: Synthetic oligonucleotide
  Target: LAMA2; (+) strand; PAM type: YTN; PAM sequence: TTA
tgggcagcctctatcttttt

SEQ ID NO: 393575 - DNA, 20 bp, Artificial Sequence
  Description of Artificial Sequence: Synthetic oligonucleotide
  Target: LAMA2; (+) strand; PAM type: YTN; PAM sequence: CTC
tatctttttaagagttctga

SEQ ID NO: 393576 - DNA, 20 bp, Artificial Sequence
  Description of Artificial Sequence: Synthetic oligonucleotide
  Target: LAMA2; (+) strand; PAM type: YTN; PAM sequence: CTA
tctttttaagagttctgatg

SEQ ID NO: 393577 - DNA, 20 bp, Artificial Sequence
  Description of Artificial Sequence: Synthetic oligonucleotide
  Target: LAMA2; (+) strand; PAM type: YTN; PAM sequence: CTT
tttaagagttctgatggaac

SEQ ID NO: 393578 - DNA, 20 bp, Artificial Sequence
  Description of Artificial Sequence: Synthetic oligonucleotide
  Target: LAMA2; (+) strand; PAM type: YTN; PAM sequence: TTT
ttaagagttctgatggaact

SEQ ID NO: 393579 - DNA, 20 bp, Artificial Sequence
  Description of Artificial Sequence: Synthetic oligonucleotide
  Target: LAMA2; (+) strand; PAM type: YTN; PAM sequence: TTT
taagagttctgatggaacta

SEQ ID NO: 393580 - DNA, 20 bp, Artificial Sequence
  Description of Artificial Sequence: Synthetic oligonucleotide
  Target: LAMA2; (+) strand; PAM type: YTN; PAM sequence: TTT
aagagttctgatggaactag

SEQ ID NO: 393581 - DNA, 20 bp, Artificial Sequence
  Description of Artificial Sequence: Synthetic oligonucleotide
  Target: LAMA2; (+) strand; PAM type: YTN; PAM sequence: TTA
agagttctgatggaactaga

SEQ ID NO: 393582 - DNA, 20 bp, Artificial Sequence
  Description of Artificial Sequence: Synthetic oligonucleotide
  Target: LAMA2; (+) strand; PAM type: YTN; PAM sequence: TTC
tgatggaactagaactaaaa

SEQ ID NO: 393583 - DNA, 20 bp, Artificial Sequence
  Description of Artificial Sequence: Synthetic oligonucleotide
  Target: LAMA2; (+) strand; PAM type: YTN; PAM sequence: CTG
atggaactagaactaaaaca

SEQ ID NO: 393584 - DNA, 20 bp, Artificial Sequence
  Description of Artificial Sequence: Synthetic oligonucleotide
  Target: LAMA2; (+) strand; PAM type: YTN; PAM sequence: CTA
gaactaaaacagattcctcc

SEQ ID NO: 393585 - DNA, 20 bp, Artificial Sequence
  Description of Artificial Sequence: Synthetic oligonucleotide
  Target: LAMA2; (+) strand; PAM type: YTN; PAM sequence: CTA
aaacagattcctccattatt

SEQ ID NO: 393586 - DNA, 20 bp, Artificial Sequence
  Description of Artificial Sequence: Synthetic oligonucleotide
  Target: LAMA2; (+) strand; PAM type: YTN; PAM sequence: TTC
ctccattattttttcttctt

SEQ ID NO: 393587 - DNA, 20 bp, Artificial Sequence
  Description of Artificial Sequence: Synthetic oligonucleotide
  Target: LAMA2; (+) strand; PAM type: YTN; PAM sequence: CTC
cattattttttcttcttttt

SEQ ID NO: 393588 - DNA, 20 bp, Artificial Sequence
  Description of Artificial Sequence: Synthetic oligonucleotide
  Target: LAMA2; (+) strand; PAM type: YTN; PAM sequence: TTA
ttttttcttcttttttttcc

SEQ ID NO: 393589 - DNA, 20 bp, Artificial Sequence
  Description of Artificial Sequence: Synthetic oligonucleotide
  Target: LAMA2; (+) strand; PAM type: YTN; PAM sequence: TTT
tttcttcttttttttccaat

SEQ ID NO: 393590 - DNA, 20 bp, Artificial Sequence
  Description of Artificial Sequence: Synthetic oligonucleotide
  Target: LAMA2; (+) strand; PAM type: YTN; PAM sequence: TTT
ttcttcttttttttccaatt

SEQ ID NO: 393591 - DNA, 20 bp, Artificial Sequence
  Description of Artificial Sequence: Synthetic oligonucleotide
  Target: LAMA2; (+) strand; PAM type: YTN; PAM sequence: TTT
tcttcttttttttccaattt

SEQ ID NO: 393592 - DNA, 20 bp, Artificial Sequence
  Description of Artificial Sequence: Synthetic oligonucleotide
  Target: LAMA2; (+) strand; PAM type: YTN; PAM sequence: TTT
cttcttttttttccaatttc

SEQ ID NO: 393593 - DNA, 20 bp, Artificial Sequence
  Description of Artificial Sequence: Synthetic oligonucleotide
  Target: LAMA2; (+) strand; PAM type: YTN; PAM sequence: TTC
ttcttttttttccaatttct

SEQ ID NO: 393594 - DNA, 20 bp, Artificial Sequence
  Description of Artificial Sequence: Synthetic oligonucleotide
  Target: LAMA2; (+) strand; PAM type: YTN; PAM sequence: CTT
cttttttttccaatttcttt

SEQ ID NO: 393595 - DNA, 20 bp, Artificial Sequence
  Description of Artificial Sequence: Synthetic oligonucleotide
  Target: LAMA2; (+) strand; PAM type: YTN; PAM sequence: TTC
ttttttttccaatttctttc

SEQ ID NO: 393596 - DNA, 20 bp, Artificial Sequence
  Description of Artificial Sequence: Synthetic oligonucleotide
  Target: LAMA2; (+) strand; PAM type: YTN; PAM sequence: CTT
ttttttccaatttctttctt

SEQ ID NO: 393597 - DNA, 20 bp, Artificial Sequence
  Description of Artificial Sequence: Synthetic oligonucleotide
  Target: LAMA2; (+) strand; PAM type: YTN; PAM sequence: TTT
tttttccaatttctttctta

SEQ ID NO: 393598 - DNA, 20 bp, Artificial Sequence
  Description of Artificial Sequence: Synthetic oligonucleotide
  Target: LAMA2; (+) strand; PAM type: YTN; PAM sequence: TTT
ttttccaatttctttcttaa

SEQ ID NO: 393599 - DNA, 20 bp, Artificial Sequence
  Description of Artificial Sequence: Synthetic oligonucleotide
  Target: LAMA2; (+) strand; PAM type: YTN; PAM sequence: TTT
tttccaatttctttcttaat

SEQ ID NO: 393600 - DNA, 20 bp, Artificial Sequence
  Description of Artificial Sequence: Synthetic oligonucleotide
  Target: LAMA2; (+) strand; PAM type: YTN; PAM sequence: TTT
ttccaatttctttcttaatc

SEQ ID NO: 393601 - DNA, 20 bp, Artificial Sequence
  Description of Artificial Sequence: Synthetic oligonucleotide
  Target: LAMA2; (+) strand; PAM type: YTN; PAM sequence: TTT
tccaatttctttcttaatct

SEQ ID NO: 393602 - DNA, 20 bp, Artificial Sequence
  Description of Artificial Sequence: Synthetic oligonucleotide
  Target: LAMA2; (+) strand; PAM type: YTN; PAM sequence: TTT
ccaatttctttcttaatctt

SEQ ID NO: 393603 - DNA, 20 bp, Artificial Sequence
  Description of Artificial Sequence: Synthetic oligonucleotide
  Target: LAMA2; (+) strand; PAM type: YTN; PAM sequence: TTC
caatttctttcttaatctta

SEQ ID NO: 393604 - DNA, 20 bp, Artificial Sequence
  Description of Artificial Sequence: Synthetic oligonucleotide
  Target: LAMA2; (+) strand; PAM type: YTN; PAM sequence: TTT
ctttcttaatcttaacatag

SEQ ID NO: 393605 - DNA, 20 bp, Artificial Sequence
  Description of Artificial Sequence: Synthetic oligonucleotide
  Target: LAMA2; (+) strand; PAM type: YTN; PAM sequence: TTC
tttcttaatcttaacatagt

SEQ ID NO: 393606 - DNA, 20 bp, Artificial Sequence
  Description of Artificial Sequence: Synthetic oligonucleotide
  Target: LAMA2; (+) strand; PAM type: YTN; PAM sequence: CTT
tcttaatcttaacatagtaa

SEQ ID NO: 393607 - DNA, 20 bp, Artificial Sequence
  Description of Artificial Sequence: Synthetic oligonucleotide
  Target: LAMA2; (+) strand; PAM type: YTN; PAM sequence: TTT
cttaatcttaacatagtaaa

SEQ ID NO: 393608 - DNA, 20 bp, Artificial Sequence
  Description of Artificial Sequence: Synthetic oligonucleotide
  Target: LAMA2; (+) strand; PAM type: YTN; PAM sequence: TTC
ttaatcttaacatagtaaat

SEQ ID NO: 393609 - DNA, 20 bp, Artificial Sequence
  Description of Artificial Sequence: Synthetic oligonucleotide
  Target: LAMA2; (+) strand; PAM type: YTN; PAM sequence: CTT
aatcttaacatagtaaatta

SEQ ID NO: 393610 - DNA, 20 bp, Artificial Sequence
  Description of Artificial Sequence: Synthetic oligonucleotide
  Target: LAMA2; (+) strand; PAM type: YTN; PAM sequence: TTA
atcttaacatagtaaattat

SEQ ID NO: 393611 - DNA, 20 bp, Artificial Sequence
  Description of Artificial Sequence: Synthetic oligonucleotide
  Target: LAMA2; (+) strand; PAM type: YTN; PAM sequence: CTT
aacatagtaaattatcactt

SEQ ID NO: 393612 - DNA, 20 bp, Artificial Sequence
  Description of Artificial Sequence: Synthetic oligonucleotide
  Target: LAMA2; (+) strand; PAM type: YTN; PAM sequence: TTA
acatagtaaattatcacttt

SEQ ID NO: 393613 - DNA, 20 bp, Artificial Sequence
  Description of Artificial Sequence: Synthetic oligonucleotide
  Target: LAMA2; (+) strand; PAM type: YTN; PAM sequence: TTA
tcacttttcctaagagtaaa

SEQ ID NO: 393614 - DNA, 20 bp, Artificial Sequence
  Description of Artificial Sequence: Synthetic oligonucleotide
  Target: LAMA2; (+) strand; PAM type: YTN; PAM sequence: CTT
ttcctaagagtaaactcagc

SEQ ID NO: 393615 - DNA, 20 bp, Artificial Sequence
  Description of Artificial Sequence: Synthetic oligonucleotide
  Target: LAMA2; (+) strand; PAM type: YTN; PAM sequence: TTT
tcctaagagtaaactcagca

SEQ ID NO: 393616 - DNA, 20 bp, Artificial Sequence
  Description of Artificial Sequence: Synthetic oligonucleotide
  Target: LAMA2; (+) strand; PAM type: YTN; PAM sequence: TTT
cctaagagtaaactcagcac

SEQ ID NO: 393617 - DNA, 20 bp, Artificial Sequence
  Description of Artificial Sequence: Synthetic oligonucleotide
  Target: LAMA2; (+) strand; PAM type: YTN; PAM sequence: TTC
ctaagagtaaactcagcaca

SEQ ID NO: 393618 - DNA, 20 bp, Artificial Sequence
  Description of Artificial Sequence: Synthetic oligonucleotide
  Target: LAMA2; (+) strand; PAM type: YTN; PAM sequence: CTA
agagtaaactcagcacatat

SEQ ID NO: 393619 - DNA, 20 bp, Artificial Sequence
  Description of Artificial Sequence: Synthetic oligonucleotide
  Target: LAMA2; (+) strand; PAM type: YTN; PAM sequence: CTC
agcacatataacagcagcac

SEQ ID NO: 393620 - DNA, 20 bp, Artificial Sequence
  Description of Artificial Sequence: Synthetic oligonucleotide
  Target: LAMA2; (+) strand; PAM type: YTN; PAM sequence: CTG
tatgtgatattaatatttaa

SEQ ID NO: 393621 - DNA, 20 bp, Artificial Sequence
  Description of Artificial Sequence: Synthetic oligonucleotide
  Target: LAMA2; (+) strand; PAM type: YTN; PAM sequence: TTA
atatttaaacaacaacaact

SEQ ID NO: 393622 - DNA, 20 bp, Artificial Sequence
  Description of Artificial Sequence: Synthetic oligonucleotide
  Target: LAMA2; (+) strand; PAM type: YTN; PAM sequence: TTT
aaacaacaacaactttctcc

SEQ ID NO: 393623 - DNA, 20 bp, Artificial Sequence
  Description of Artificial Sequence: Synthetic oligonucleotide
  Target: LAMA2; (+) strand; PAM type: YTN; PAM sequence: TTA
aacaacaacaactttctccc

SEQ ID NO: 393624 - DNA, 20 bp, Artificial Sequence
  Description of Artificial Sequence: Synthetic oligonucleotide
  Target: LAMA2; (+) strand; PAM type: YTN; PAM sequence: CTT
tctccccagagacaaattta

SEQ ID NO: 393625 - DNA, 20 bp, Artificial Sequence
  Description of Artificial Sequence: Synthetic oligonucleotide
  Target: LAMA2; (+) strand; PAM type: YTN; PAM sequence: TTT
ctccccagagacaaatttac

SEQ ID NO: 393626 - DNA, 20 bp, Artificial Sequence
  Description of Artificial Sequence: Synthetic oligonucleotide
  Target: LAMA2; (+) strand; PAM type: YTN; PAM sequence: TTC
tccccagagacaaatttacc

SEQ ID NO: 393627 - DNA, 20 bp, Artificial Sequence
  Description of Artificial Sequence: Synthetic oligonucleotide
  Target: LAMA2; (+) strand; PAM type: YTN; PAM sequence: CTC
cccagagacaaatttacctt

SEQ ID NO: 393628 - DNA, 20 bp, Artificial Sequence
  Description of Artificial Sequence: Synthetic oligonucleotide
  Target: LAMA2; (+) strand; PAM type: YTN; PAM sequence: TTT
acctttgctgttttcaaagt

SEQ ID NO: 393629 - DNA, 20 bp, Artificial Sequence
  Description of Artificial Sequence: Synthetic oligonucleotide
  Target: LAMA2; (+) strand; PAM type: YTN; PAM sequence: TTA
cctttgctgttttcaaagta

SEQ ID NO: 393630 - DNA, 20 bp, Artificial Sequence
  Description of Artificial Sequence: Synthetic oligonucleotide
  Target: LAMA2; (+) strand; PAM type: YTN; PAM sequence: CTT
tgctgttttcaaagtatctg

SEQ ID NO: 393631 - DNA, 20 bp, Artificial Sequence
  Description of Artificial Sequence: Synthetic oligonucleotide
  Target: LAMA2; (+) strand; PAM type: YTN; PAM sequence: TTT
gctgttttcaaagtatctga

SEQ ID NO: 393632 - DNA, 20 bp, Artificial Sequence
  Description of Artificial Sequence: Synthetic oligonucleotide
  Target: LAMA2; (+) strand; PAM type: YTN; PAM sequence: TTG
ctgttttcaaagtatctgac

SEQ ID NO: 393633 - DNA, 20 bp, Artificial Sequence
  Description of Artificial Sequence: Synthetic oligonucleotide
  Target: LAMA2; (+) strand; PAM type: YTN; PAM sequence: CTG
ttttcaaagtatctgactcc

SEQ ID NO: 393634 - DNA, 20 bp, Artificial Sequence
  Description of Artificial Sequence: Synthetic oligonucleotide
  Target: LAMA2; (+) strand; PAM type: YTN; PAM sequence: TTT
tcaaagtatctgactccaac

SEQ ID NO: 393635 - DNA, 20 bp, Artificial Sequence
  Description of Artificial Sequence: Synthetic oligonucleotide
  Target: LAMA2; (+) strand; PAM type: YTN; PAM sequence: TTT
caaagtatctgactccaaca

SEQ ID NO: 393636 - DNA, 20 bp, Artificial Sequence
  Description of Artificial Sequence: Synthetic oligonucleotide
  Target: LAMA2; (+) strand; PAM type: YTN; PAM sequence: TTC
aaagtatctgactccaacag

SEQ ID NO: 393637 - DNA, 20 bp, Artificial Sequence
  Description of Artificial Sequence: Synthetic oligonucleotide
  Target: LAMA2; (+) strand; PAM type: YTN; PAM sequence: CTG
actccaacaggtcagaaaac

SEQ ID NO: 393638 - DNA, 20 bp, Artificial Sequence
  Description of Artificial Sequence: Synthetic oligonucleotide
  Target: LAMA2; (+) strand; PAM type: YTN; PAM sequence: CTC
caacaggtcagaaaacagca

SEQ ID NO: 393639 - DNA, 20 bp, Artificial Sequence
  Description of Artificial Sequence: Synthetic oligonucleotide
  Target: LAMA2; (+) strand; PAM type: YTN; PAM sequence: CTA
tacatcttctaacacataat

SEQ ID NO: 393640 - DNA, 20 bp, Artificial Sequence
  Description of Artificial Sequence: Synthetic oligonucleotide
  Target: LAMA2; (+) strand; PAM type: YTN; PAM sequence: CTT
ctaacacataatttcaccgt

SEQ ID NO: 393641 - DNA, 20 bp, Artificial Sequence
  Description of Artificial Sequence: Synthetic oligonucleotide
  Target: LAMA2; (+) strand; PAM type: YTN; PAM sequence: TTC
taacacataatttcaccgtc

SEQ ID NO: 393642 - DNA, 20 bp, Artificial Sequence
  Description of Artificial Sequence: Synthetic oligonucleotide
  Target: LAMA2; (+) strand; PAM type: YTN; PAM sequence: CTA
acacataatttcaccgtcaa

SEQ ID NO: 393643 - DNA, 20 bp, Artificial Sequence
  Description of Artificial Sequence: Synthetic oligonucleotide
  Target: LAMA2; (+) strand; PAM type: YTN; PAM sequence: TTT
caccgtcaacagtaactcag

SEQ ID NO: 393644 - DNA, 20 bp, Artificial Sequence
  Description of Artificial Sequence: Synthetic oligonucleotide
  Target: LAMA2; (+) strand; PAM type: YTN; PAM sequence: TTC
accgtcaacagtaactcagc

SEQ ID NO: 393645 - DNA, 20 bp, Artificial Sequence
  Description of Artificial Sequence: Synthetic oligonucleotide
  Target: LAMA2; (+) strand; PAM type: YTN; PAM sequence: CTC
agcaccctctggcatatagt

SEQ ID NO: 393646 - DNA, 20 bp, Artificial Sequence
  Description of Artificial Sequence: Synthetic oligonucleotide
  Target: LAMA2; (+) strand; PAM type: YTN; PAM sequence: CTC
tggcatatagtatgtatgta

SEQ ID NO: 393647 - DNA, 20 bp, Artificial Sequence
  Description of Artificial Sequence: Synthetic oligonucleotide
  Target: LAMA2; (+) strand; PAM type: YTN; PAM sequence: CTG
gcatatagtatgtatgtaga

SEQ ID NO: 393648 - DNA, 20 bp, Artificial Sequence
  Description of Artificial Sequence: Synthetic oligonucleotide
  Target: LAMA2; (+) strand; PAM type: YTN; PAM sequence: TTT
gttgaatgacagtaacaatt

SEQ ID NO: 393649 - DNA, 20 bp, Artificial Sequence
  Description of Artificial Sequence: Synthetic oligonucleotide
  Target: LAMA2; (+) strand; PAM type: YTN; PAM sequence: TTG
ttgaatgacagtaacaattg

SEQ ID NO: 393650 - DNA, 20 bp, Artificial Sequence
  Description of Artificial Sequence: Synthetic oligonucleotide
  Target: LAMA2; (+) strand; PAM type: YTN; PAM sequence: TTG
aatgacagtaacaattgaat

SEQ ID NO: 393651 - DNA, 20 bp, Artificial Sequence
  Description of Artificial Sequence: Synthetic oligonucleotide
  Target: LAMA2; (+) strand; PAM type: YTN; PAM sequence: TTG
aatacaatcaaccaggattt

SEQ ID NO: 393652 - DNA, 20 bp, Artificial Sequence
  Description of Artificial Sequence: Synthetic oligonucleotide
  Target: LAMA2; (+) strand; PAM type: YTN; PAM sequence: TTT
tttaaatctattcatttcta

SEQ ID NO: 393653 - DNA, 20 bp, Artificial Sequence
  Description of Artificial Sequence: Synthetic oligonucleotide
  Target: LAMA2; (+) strand; PAM type: YTN; PAM sequence: TTT
ttaaatctattcatttctat

SEQ ID NO: 393654 - DNA, 20 bp, Artificial Sequence
  Description of Artificial Sequence: Synthetic oligonucleotide
  Target: LAMA2; (+) strand; PAM type: YTN; PAM sequence: TTT
taaatctattcatttctatt

SEQ ID NO: 393655 - DNA, 20 bp, Artificial Sequence
  Description of Artificial Sequence: Synthetic oligonucleotide
  Target: LAMA2; (+) strand; PAM type: YTN; PAM sequence: TTT
aaatctattcatttctattt

SEQ ID NO: 393656 - DNA, 20 bp, Artificial Sequence
  Description of Artificial Sequence: Synthetic oligonucleotide
  Target: LAMA2; (+) strand; PAM type: YTN; PAM sequence: TTA
aatctattcatttctatttt

SEQ ID NO: 393657 - DNA, 20 bp, Artificial Sequence
  Description of Artificial Sequence: Synthetic oligonucleotide
  Target: LAMA2; (+) strand; PAM type: YTN; PAM sequence: CTA
ttcatttctattttccttta

SEQ ID NO: 393658 - DNA, 20 bp, Artificial Sequence
  Description of Artificial Sequence: Synthetic oligonucleotide
  Target: LAMA2; (+) strand; PAM type: YTN; PAM sequence: TTC
atttctattttcctttagat

SEQ ID NO: 393659 - DNA, 20 bp, Artificial Sequence
  Description of Artificial Sequence: Synthetic oligonucleotide
  Target: LAMA2; (+) strand; PAM type: YTN; PAM sequence: TTT
ctattttcctttagattaag

SEQ ID NO: 393660 - DNA, 20 bp, Artificial Sequence
  Description of Artificial Sequence: Synthetic oligonucleotide
  Target: LAMA2; (+) strand; PAM type: YTN; PAM sequence: TTC
tattttcctttagattaagt

SEQ ID NO: 393661 - DNA, 20 bp, Artificial Sequence
  Description of Artificial Sequence: Synthetic oligonucleotide
  Target: LAMA2; (+) strand; PAM type: YTN; PAM sequence: CTA
ttttcctttagattaagtag

SEQ ID NO: 393662 - DNA, 20 bp, Artificial Sequence
  Description of Artificial Sequence: Synthetic oligonucleotide
  Target: LAMA2; (+) strand; PAM type: YTN; PAM sequence: TTT
tcctttagattaagtagtaa

SEQ ID NO: 393663 - DNA, 20 bp, Artificial Sequence
  Description of Artificial Sequence: Synthetic oligonucleotide
  Target: LAMA2; (+) strand; PAM type: YTN; PAM sequence: TTT
cctttagattaagtagtaag

SEQ ID NO: 393664 - DNA, 20 bp, Artificial Sequence
  Description of Artificial Sequence: Synthetic oligonucleotide
  Target: LAMA2; (+) strand; PAM type: YTN; PAM sequence: TTC
ctttagattaagtagtaaga

SEQ ID NO: 393665 - DNA, 20 bp, Artificial Sequence
  Description of Artificial Sequence: Synthetic oligonucleotide
  Target: LAMA2; (+) strand; PAM type: YTN; PAM sequence: CTT
tagattaagtagtaagagga

SEQ ID NO: 393666 - DNA, 20 bp, Artificial Sequence
  Description of Artificial Sequence: Synthetic oligonucleotide
  Target: LAMA2; (+) strand; PAM type: YTN; PAM sequence: TTT
agattaagtagtaagaggaa

SEQ ID NO: 393667 - DNA, 20 bp, Artificial Sequence
  Description of Artificial Sequence: Synthetic oligonucleotide
  Target: LAMA2; (+) strand; PAM type: YTN; PAM sequence: TTA
gattaagtagtaagaggaag

SEQ ID NO: 393668 - DNA, 20 bp, Artificial Sequence
  Description of Artificial Sequence: Synthetic oligonucleotide
  Target: LAMA2; (+) strand; PAM type: YTN; PAM sequence: TTA
agtagtaagaggaagaatta

SEQ ID NO: 393669 - DNA, 20 bp, Artificial Sequence
  Description of Artificial Sequence: Synthetic oligonucleotide
  Target: LAMA2; (+) strand; PAM type: YTN; PAM sequence: TTA
catttttttaatatatttta

SEQ ID NO: 393670 - DNA, 20 bp, Artificial Sequence
  Description of Artificial Sequence: Synthetic oligonucleotide
  Target: LAMA2; (+) strand; PAM type: YTN; PAM sequence: TTT
ttttaatatattttatttcc

SEQ ID NO: 393671 - DNA, 20 bp, Artificial Sequence
  Description of Artificial Sequence: Synthetic oligonucleotide
  Target: LAMA2; (+) strand; PAM type: YTN; PAM sequence: TTT
tttaatatattttatttccg

SEQ ID NO: 393672 - DNA, 20 bp, Artificial Sequence
  Description of Artificial Sequence: Synthetic oligonucleotide
  Target: LAMA2; (+) strand; PAM type: YTN; PAM sequence: TTT
ttaatatattttatttccgt

SEQ ID NO: 393673 - DNA, 20 bp, Artificial Sequence
  Description of Artificial Sequence: Synthetic oligonucleotide
  Target: LAMA2; (+) strand; PAM type: YTN; PAM sequence: TTT
taatatattttatttccgtg

SEQ ID NO: 393674 - DNA, 20 bp, Artificial Sequence
  Description of Artificial Sequence: Synthetic oligonucleotide
  Target: LAMA2; (+) strand; PAM type: YTN; PAM sequence: TTT
aatatattttatttccgtgt

SEQ ID NO: 393675 - DNA, 20 bp, Artificial Sequence
  Description of Artificial Sequence: Synthetic oligonucleotide
  Target: LAMA2; (+) strand; PAM type: YTN; PAM sequence: TTA
atatattttatttccgtgtc

SEQ ID NO: 393676 - DNA, 20 bp, Artificial Sequence
  Description of Artificial Sequence: Synthetic oligonucleotide
  Target: LAMA2; (+) strand; PAM type: YTN; PAM sequence: TTT
tatttccgtgtccctcttct

SEQ ID NO: 393677 - DNA, 20 bp, Artificial Sequence
  Description of Artificial Sequence: Synthetic oligonucleotide
  Target: LAMA2; (+) strand; PAM type: YTN; PAM sequence: TTT
atttccgtgtccctcttctg

SEQ ID NO: 393678 - DNA, 20 bp, Artificial Sequence
  Description of Artificial Sequence: Synthetic oligonucleotide
  Target: LAMA2; (+) strand; PAM type: YTN; PAM sequence: TTA
tttccgtgtccctcttctgg

SEQ ID NO: 393679 - DNA, 20 bp, Artificial Sequence
  Description of Artificial Sequence: Synthetic oligonucleotide
  Target: LAMA2; (+) strand; PAM type: YTN; PAM sequence: TTT
ccgtgtccctcttctgggac

SEQ ID NO: 393680 - DNA, 20 bp, Artificial Sequence
  Description of Artificial Sequence: Synthetic oligonucleotide
  Target: LAMA2; (+) strand; PAM type: YTN; PAM sequence: TTC
cgtgtccctcttctgggact

SEQ ID NO: 393681 - DNA, 20 bp, Artificial Sequence
  Description of Artificial Sequence: Synthetic oligonucleotide
  Target: LAMA2; (+) strand; PAM type: YTN; PAM sequence: CTC
ttctgggacttagccttgtc

SEQ ID NO: 393682 - DNA, 20 bp, Artificial Sequence
  Description of Artificial Sequence: Synthetic oligonucleotide
  Target: LAMA2; (+) strand; PAM type: YTN; PAM sequence: CTT
ctgggacttagccttgtcat

SEQ ID NO: 393683 - DNA, 20 bp, Artificial Sequence
  Description of Artificial Sequence: Synthetic oligonucleotide
  Target: LAMA2; (+) strand; PAM type: YTN; PAM sequence: TTC
tgggacttagccttgtcatt

SEQ ID NO: 393684 - DNA, 20 bp, Artificial Sequence
  Description of Artificial Sequence: Synthetic oligonucleotide
  Target: LAMA2; (+) strand; PAM type: YTN; PAM sequence: CTG
ggacttagccttgtcattct

SEQ ID NO: 393685 - DNA, 20 bp, Artificial Sequence
  Description of Artificial Sequence: Synthetic oligonucleotide
  Target: LAMA2; (+) strand; PAM type: YTN; PAM sequence: CTT
agccttgtcattctggtaga

SEQ ID NO: 393686 - DNA, 20 bp, Artificial Sequence
  Description of Artificial Sequence: Synthetic oligonucleotide
  Target: LAMA2; (+) strand; PAM type: YTN; PAM sequence: TTA
gccttgtcattctggtagaa

SEQ ID NO: 393687 - DNA, 20 bp, Artificial Sequence
  Description of Artificial Sequence: Synthetic oligonucleotide
  Target: LAMA2; (+) strand; PAM type: YTN; PAM sequence: CTT
gtcattctggtagaatattg

SEQ ID NO: 393688 - DNA, 20 bp, Artificial Sequence
  Description of Artificial Sequence: Synthetic oligonucleotide
  Target: LAMA2; (+) strand; PAM type: YTN; PAM sequence: TTG
tcattctggtagaatattga

SEQ ID NO: 393689 - DNA, 20 bp, Artificial Sequence
  Description of Artificial Sequence: Synthetic oligonucleotide
  Target: LAMA2; (+) strand; PAM type: YTN; PAM sequence: TTC
tggtagaatattgaagaggc

SEQ ID NO: 393690 - DNA, 20 bp, Artificial Sequence
  Description of Artificial Sequence: Synthetic oligonucleotide
  Target: LAMA2; (+) strand; PAM type: YTN; PAM sequence: CTG
gtagaatattgaagaggctt

SEQ ID NO: 393691 - DNA, 20 bp, Artificial Sequence
  Description of Artificial Sequence: Synthetic oligonucleotide
  Target: LAMA2; (+) strand; PAM type: YTN; PAM sequence: TTG
aagaggcttactttttttct

SEQ ID NO: 393692 - DNA, 20 bp, Artificial Sequence
  Description of Artificial Sequence: Synthetic oligonucleotide
  Target: LAMA2; (+) strand; PAM type: YTN; PAM sequence: CTT
actttttttcttcactgatg

SEQ ID NO: 393693 - DNA, 20 bp, Artificial Sequence
  Description of Artificial Sequence: Synthetic oligonucleotide
  Target: LAMA2; (+) strand; PAM type: YTN; PAM sequence: TTA
ctttttttcttcactgatgc

SEQ ID NO: 393694 - DNA, 20 bp, Artificial Sequence
  Description of Artificial Sequence: Synthetic oligonucleotide
  Target: LAMA2; (+) strand; PAM type: YTN; PAM sequence: CTT
tttttcttcactgatgcacc

SEQ ID NO: 393695 - DNA, 20 bp, Artificial Sequence
  Description of Artificial Sequence: Synthetic oligonucleotide
  Target: LAMA2; (+) strand; PAM type: YTN; PAM sequence: TTT
ttttcttcactgatgcacct

SEQ ID NO: 393696 - DNA, 20 bp, Artificial Sequence
  Description of Artificial Sequence: Synthetic oligonucleotide
  Target: LAMA2; (+) strand; PAM type: YTN; PAM sequence: TTT
tttcttcactgatgcaccta

SEQ ID NO: 393697 - DNA, 20 bp, Artificial Sequence
  Description of Artificial Sequence: Synthetic oligonucleotide
  Target: LAMA2; (+) strand; PAM type: YTN; PAM sequence: TTT
ttcttcactgatgcacctaa

SEQ ID NO: 393698 - DNA, 20 bp, Artificial Sequence
  Description of Artificial Sequence: Synthetic oligonucleotide
  Target: LAMA2; (+) strand; PAM type: YTN; PAM sequence: TTT
tcttcactgatgcacctaac

SEQ ID NO: 393699 - DNA, 20 bp, Artificial Sequence
  Description of Artificial Sequence: Synthetic oligonucleotide
  Target: LAMA2; (+) strand; PAM type: YTN; PAM sequence: TTT
cttcactgatgcacctaacc

SEQ ID NO: 393700 - DNA, 20 bp, Artificial Sequence
  Description of Artificial Sequence: Synthetic oligonucleotide
  Target: LAMA2; (+) strand; PAM type: YTN; PAM sequence: TTC
ttcactgatgcacctaacca

SEQ ID NO: 393701 - DNA, 20 bp, Artificial Sequence
  Description of Artificial Sequence: Synthetic oligonucleotide
  Target: LAMA2; (+) strand; PAM type: YTN; PAM sequence: CTT
cactgatgcacctaaccaat

SEQ ID NO: 393702 - DNA, 20 bp, Artificial Sequence
  Description of Artificial Sequence: Synthetic oligonucleotide
  Target: LAMA2; (+) strand; PAM type: YTN; PAM sequence: TTC
actgatgcacctaaccaatt

SEQ ID NO: 393703 - DNA, 20 bp, Artificial Sequence
  Description of Artificial Sequence: Synthetic oligonucleotide
  Target: LAMA2; (+) strand; PAM type: YTN; PAM sequence: CTG
atgcacctaaccaatttgga

SEQ ID NO: 393704 - DNA, 20 bp, Artificial Sequence
  Description of Artificial Sequence: Synthetic oligonucleotide
  Target: LAMA2; (+) strand; PAM type: YTN; PAM sequence: CTA
accaatttggagtctactga

SEQ ID NO: 393705 - DNA, 20 bp, Artificial Sequence
  Description of Artificial Sequence: Synthetic oligonucleotide
  Target: LAMA2; (+) strand; PAM type: YTN; PAM sequence: TTT
ggagtctactgacatgctag

SEQ ID NO: 393706 - DNA, 20 bp, Artificial Sequence
  Description of Artificial Sequence: Synthetic oligonucleotide
  Target: LAMA2; (+) strand; PAM type: YTN; PAM sequence: TTG
gagtctactgacatgctagc

SEQ ID NO: 393707 - DNA, 20 bp, Artificial Sequence
  Description of Artificial Sequence: Synthetic oligonucleotide
  Target: LAMA2; (+) strand; PAM type: YTN; PAM sequence: CTA
ctgacatgctagcagtattc

SEQ ID NO: 393708 - DNA, 20 bp, Artificial Sequence
  Description of Artificial Sequence: Synthetic oligonucleotide
  Target: LAMA2; (+) strand; PAM type: YTN; PAM sequence: CTG
acatgctagcagtattccag

SEQ ID NO: 393709 - DNA, 20 bp, Artificial Sequence
  Description of Artificial Sequence: Synthetic oligonucleotide
  Target: LAMA2; (+) strand; PAM type: YTN; PAM sequence: CTA
gcagtattccagaaatactg

SEQ ID NO: 393710 - DNA, 20 bp, Artificial Sequence
  Description of Artificial Sequence: Synthetic oligonucleotide
  Target: LAMA2; (+) strand; PAM type: YTN; PAM sequence: TTC
cagaaatactgctgtgaggc

SEQ ID NO: 393711 - DNA, 20 bp, Artificial Sequence
  Description of Artificial Sequence: Synthetic oligonucleotide
  Target: LAMA2; (+) strand; PAM type: YTN; PAM sequence: CTG
ctgtgaggcaggatgctggg

SEQ ID NO: 393712 - DNA, 20 bp, Artificial Sequence
  Description of Artificial Sequence: Synthetic oligonucleotide
  Target: LAMA2; (+) strand; PAM type: YTN; PAM sequence: CTG
tgaggcaggatgctgggcca

SEQ ID NO: 393713 - DNA, 20 bp, Artificial Sequence
  Description of Artificial Sequence: Synthetic oligonucleotide
  Target: LAMA2; (+) strand; PAM type: YTN; PAM sequence: CTG
ggccactgtcctgtcacagg

SEQ ID NO: 393714 - DNA, 20 bp, Artificial Sequence
  Description of Artificial Sequence: Synthetic oligonucleotide
  Target: LAMA2; (+) strand; PAM type: YTN; PAM sequence: CTG
tcctgtcacaggctccagca

SEQ ID NO: 393715 - DNA, 20 bp, Artificial Sequence
  Description of Artificial Sequence: Synthetic oligonucleotide
  Target: LAMA2; (+) strand; PAM type: YTN; PAM sequence: CTG
tcacaggctccagcatgatt

SEQ ID NO: 393716 - DNA, 20 bp, Artificial Sequence
  Description of Artificial Sequence: Synthetic oligonucleotide
  Target: LAMA2; (+) strand; PAM type: YTN; PAM sequence: CTC
cagcatgattcaccctgctc

SEQ ID NO: 393717 - DNA, 20 bp, Artificial Sequence
  Description of Artificial Sequence: Synthetic oligonucleotide
  Target: LAMA2; (+) strand; PAM type: YTN; PAM sequence: TTC
accctgctcggtgacacacc

SEQ ID NO: 393718 - DNA, 20 bp, Artificial Sequence
  Description of Artificial Sequence: Synthetic oligonucleotide
  Target: LAMA2; (+) strand; PAM type: YTN; PAM sequence: CTG
ctcggtgacacaccagccgt

SEQ ID NO: 393719 - DNA, 20 bp, Artificial Sequence
  Description of Artificial Sequence: Synthetic oligonucleotide
  Target: LAMA2; (+) strand; PAM type: YTN; PAM sequence: CTC
ggtgacacaccagccgtgtg

SEQ ID NO: 393720 - DNA, 20 bp, Artificial Sequence
  Description of Artificial Sequence: Synthetic oligonucleotide
  Target: LAMA2; (+) strand; PAM type: YTN; PAM sequence: CTT
acccgaaggtgcacctgtct

SEQ ID NO: 393721 - DNA, 20 bp, Artificial Sequence
  Description of Artificial Sequence: Synthetic oligonucleotide
  Target: LAMA2; (+) strand; PAM type: YTN; PAM sequence: TTA
cccgaaggtgcacctgtcta

SEQ ID NO: 393722 - DNA, 20 bp, Artificial Sequence
  Description of Artificial Sequence: Synthetic oligonucleotide
  Target: LAMA2; (+) strand; PAM type: YTN; PAM sequence: CTG
tctattttatggcaaccgtt

SEQ ID NO: 393723 - DNA, 20 bp, Artificial Sequence
  Description of Artificial Sequence: Synthetic oligonucleotide
  Target: LAMA2; (+) strand; PAM type: YTN; PAM sequence: CTA
ttttatggcaaccgtttgat

SEQ ID NO: 393724 - DNA, 20 bp, Artificial Sequence
  Description of Artificial Sequence: Synthetic oligonucleotide
  Target: LAMA2; (+) strand; PAM type: YTN; PAM sequence: TTT
tatggcaaccgtttgataaa

SEQ ID NO: 393725 - DNA, 20 bp, Artificial Sequence
  Description of Artificial Sequence: Synthetic oligonucleotide
  Target: LAMA2; (+) strand; PAM type: YTN; PAM sequence: TTT
atggcaaccgtttgataaat

SEQ ID NO: 393726 - DNA, 20 bp, Artificial Sequence
  Description of Artificial Sequence: Synthetic oligonucleotide
  Target: LAMA2; (+) strand; PAM type: YTN; PAM sequence: TTA
tggcaaccgtttgataaatg

SEQ ID NO: 393727 - DNA, 20 bp, Artificial Sequence
  Description of Artificial Sequence: Synthetic oligonucleotide
  Target: LAMA2; (+) strand; PAM type: YTN; PAM sequence: TTT
gataaatgaaaattacctgt

SEQ ID NO: 393728 - DNA, 20 bp, Artificial Sequence
  Description of Artificial Sequence: Synthetic oligonucleotide
  Target: LAMA2; (+) strand; PAM type: YTN; PAM sequence: TTG
ataaatgaaaattacctgtg

SEQ ID NO: 393729 - DNA, 20 bp, Artificial Sequence
  Description of Artificial Sequence: Synthetic oligonucleotide
  Target: LAMA2; (+) strand; PAM type: YTN; PAM sequence: TTA
cctgtgtggaaagcatagta

SEQ ID NO: 393730 - DNA, 20 bp, Artificial Sequence
  Description of Artificial Sequence: Synthetic oligonucleotide
  Target: LAMA2; (+) strand; PAM type: YTN; PAM sequence: CTG
tgtggaaagcatagtaagta

SEQ ID NO: 393731 - DNA, 20 bp, Artificial Sequence
  Description of Artificial Sequence: Synthetic oligonucleotide
  Target: LAMA2; (+) strand; PAM type: YTN; PAM sequence: TTT
gagaaatatttcaagaagag

SEQ ID NO: 393732 - DNA, 20 bp, Artificial Sequence
  Description of Artificial Sequence: Synthetic oligonucleotide
  Target: LAMA2; (+) strand; PAM type: YTN; PAM sequence: TTG
agaaatatttcaagaagagt

SEQ ID NO: 393733 - DNA, 20 bp, Artificial Sequence
  Description of Artificial Sequence: Synthetic oligonucleotide
  Target: LAMA2; (+) strand; PAM type: YTN; PAM sequence: TTT
caagaagagttatatggcac

SEQ ID NO: 393734 - DNA, 20 bp, Artificial Sequence
  Description of Artificial Sequence: Synthetic oligonucleotide
  Target: LAMA2; (+) strand; PAM type: YTN; PAM sequence: TTC
aagaagagttatatggcaca

SEQ ID NO: 393735 - DNA, 20 bp, Artificial Sequence
  Description of Artificial Sequence: Synthetic oligonucleotide
  Target: LAMA2; (+) strand; PAM type: YTN; PAM sequence: TTA
tatggcacagtcaatagtac

SEQ ID NO: 393736 - DNA, 20 bp, Artificial Sequence
  Description of Artificial Sequence: Synthetic oligonucleotide
  Target: LAMA2; (+) strand; PAM type: YTN; PAM sequence: CTT
tagctattcgtttcttttag

SEQ ID NO: 393737 - DNA, 20 bp, Artificial Sequence
  Description of Artificial Sequence: Synthetic oligonucleotide
  Target: LAMA2; (+) strand; PAM type: YTN; PAM sequence: TTT
agctattcgtttcttttagt

SEQ ID NO: 393738 - DNA, 20 bp, Artificial Sequence
  Description of Artificial Sequence: Synthetic oligonucleotide
  Target: LAMA2; (+) strand; PAM type: YTN; PAM sequence: TTA
gctattcgtttcttttagtg

SEQ ID NO: 393739 - DNA, 20 bp, Artificial Sequence
  Description of Artificial Sequence: Synthetic oligonucleotide
  Target: LAMA2; (+) strand; PAM type: YTN; PAM sequence: CTA
ttcgtttcttttagtgatgt

SEQ ID NO: 393740 - DNA, 20 bp, Artificial Sequence
  Description of Artificial Sequence: Synthetic oligonucleotide
  Target: LAMA2; (+) strand; PAM type: YTN; PAM sequence: TTC
gtttcttttagtgatgttta

SEQ ID NO: 393741 - DNA, 20 bp, Artificial Sequence
  Description of Artificial Sequence: Synthetic oligonucleotide
  Target: LAMA2; (+) strand; PAM type: YTN; PAM sequence: TTT
cttttagtgatgtttaaaac

SEQ ID NO: 393742 - DNA, 20 bp, Artificial Sequence
  Description of Artificial Sequence: Synthetic oligonucleotide
  Target: LAMA2; (+) strand; PAM type: YTN; PAM sequence: TTC
ttttagtgatgtttaaaacc

SEQ ID NO: 393743 - DNA, 20 bp, Artificial Sequence
  Description of Artificial Sequence: Synthetic oligonucleotide
  Target: LAMA2; (+) strand; PAM type: YTN; PAM sequence: CTT
ttagtgatgtttaaaaccag

SEQ ID NO: 393744 - DNA, 20 bp, Artificial Sequence
  Description of Artificial Sequence: Synthetic oligonucleotide
  Target: LAMA2; (+) strand; PAM type: YTN; PAM sequence: TTT
tagtgatgtttaaaaccaga

SEQ ID NO: 393745 - DNA, 20 bp, Artificial Sequence
  Description of Artificial Sequence: Synthetic oligonucleotide
  Target: LAMA2; (+) strand; PAM type: YTN; PAM sequence: TTT
agtgatgtttaaaaccagaa

SEQ ID NO: 393746 - DNA, 20 bp, Artificial Sequence
  Description of Artificial Sequence: Synthetic oligonucleotide
  Target: LAMA2; (+) strand; PAM type: YTN; PAM sequence: TTA
gtgatgtttaaaaccagaag

SEQ ID NO: 393747 - DNA, 20 bp, Artificial Sequence
  Description of Artificial Sequence: Synthetic oligonucleotide
  Target: LAMA2; (+) strand; PAM type: YTN; PAM sequence: TTT
aaaaccagaagtcatcattc

SEQ ID NO: 393748 - DNA, 20 bp, Artificial Sequence
  Description of Artificial Sequence: Synthetic oligonucleotide
  Target: LAMA2; (+) strand; PAM type: YTN; PAM sequence: TTA
aaaccagaagtcatcattct

SEQ ID NO: 393749 - DNA, 20 bp, Artificial Sequence
  Description of Artificial Sequence: Synthetic oligonucleotide
  Target: LAMA2; (+) strand; PAM type: YTN; PAM sequence: TTC
ttgggcacccctacaaatac

SEQ ID NO: 393750 - DNA, 20 bp, Artificial Sequence
  Description of Artificial Sequence: Synthetic oligonucleotide
  Target: LAMA2; (+) strand; PAM type: YTN; PAM sequence: CTT
gggcacccctacaaatacct

SEQ ID NO: 393751 - DNA, 20 bp, Artificial Sequence
  Description of Artificial Sequence: Synthetic oligonucleotide
  Target: LAMA2; (+) strand; PAM type: YTN; PAM sequence: TTG
ggcacccctacaaatacctg

SEQ ID NO: 393752 - DNA, 20 bp, Artificial Sequence
  Description of Artificial Sequence: Synthetic oligonucleotide
  Target: LAMA2; (+) strand; PAM type: YTN; PAM sequence: CTA
caaatacctggagcttatgt

SEQ ID NO: 393753 - DNA, 20 bp, Artificial Sequence
  Description of Artificial Sequence: Synthetic oligonucleotide
  Target: LAMA2; (+) strand; PAM type: YTN; PAM sequence: CTG
gagcttatgtatagtcggta

SEQ ID NO: 393754 - DNA, 20 bp, Artificial Sequence
  Description of Artificial Sequence: Synthetic oligonucleotide
  Target: LAMA2; (+) strand; PAM type: YTN; PAM sequence: CTT
atgtatagtcggtattgaaa

SEQ ID NO: 393755 - DNA, 20 bp, Artificial Sequence
  Description of Artificial Sequence: Synthetic oligonucleotide
  Target: LAMA2; (+) strand; PAM type: YTN; PAM sequence: TTA
tgtatagtcggtattgaaat

SEQ ID NO: 393756 - DNA, 20 bp, Artificial Sequence
  Description of Artificial Sequence: Synthetic oligonucleotide
  Target: LAMA2; (+) strand; PAM type: YTN; PAM sequence: TTG
aaattctgagtggtcctgtt

SEQ ID NO: 393757 - DNA, 20 bp, Artificial Sequence
  Description of Artificial Sequence: Synthetic oligonucleotide
  Target: LAMA2; (+) strand; PAM type: YTN; PAM sequence: TTC
tgagtggtcctgtttggatt

SEQ ID NO: 393758 - DNA, 20 bp, Artificial Sequence
  Description of Artificial Sequence: Synthetic oligonucleotide
  Target: LAMA2; (+) strand; PAM type: YTN; PAM sequence: CTG
agtggtcctgtttggatttt

SEQ ID NO: 393759 - DNA, 20 bp, Artificial Sequence
  Description of Artificial Sequence: Synthetic oligonucleotide
  Target: LAMA2; (+) strand; PAM type: YTN; PAM sequence: CTG
tttggattttccttgtatgt

SEQ ID NO: 393760 - DNA, 20 bp, Artificial Sequence
  Description of Artificial Sequence: Synthetic oligonucleotide
  Target: LAMA2; (+) strand; PAM type: YTN; PAM sequence: TTT
ggattttccttgtatgtgcc

SEQ ID NO: 393761 - DNA, 20 bp, Artificial Sequence
  Description of Artificial Sequence: Synthetic oligonucleotide
  Target: LAMA2; (+) strand; PAM type: YTN; PAM sequence: TTG
gattttccttgtatgtgcca

SEQ ID NO: 393762 - DNA, 20 bp, Artificial Sequence
  Description of Artificial Sequence: Synthetic oligonucleotide
  Target: LAMA2; (+) strand; PAM type: YTN; PAM sequence: TTT
tccttgtatgtgccacgttt

SEQ ID NO: 393763 - DNA, 20 bp, Artificial Sequence
  Description of Artificial Sequence: Synthetic oligonucleotide
  Target: LAMA2; (+) strand; PAM type: YTN; PAM sequence: TTT
ccttgtatgtgccacgttta

SEQ ID NO: 393764 - DNA, 20 bp, Artificial Sequence
  Description of Artificial Sequence: Synthetic oligonucleotide
  Target: LAMA2; (+) strand; PAM type: YTN; PAM sequence: TTC
cttgtatgtgccacgtttaa

SEQ ID NO: 393765 - DNA, 20 bp, Artificial Sequence
  Description of Artificial Sequence: Synthetic oligonucleotide
  Target: LAMA2; (+) strand; PAM type: YTN; PAM sequence: CTT
gtatgtgccacgtttaacta

SEQ ID NO: 393766 - DNA, 20 bp, Artificial Sequence
  Description of Artificial Sequence: Synthetic oligonucleotide
  Target: LAMA2; (+) strand; PAM type: YTN; PAM sequence: TTG
tatgtgccacgtttaactaa

SEQ ID NO: 393767 - DNA, 20 bp, Artificial Sequence
  Description of Artificial Sequence: Synthetic oligonucleotide
  Target: LAMA2; (+) strand; PAM type: YTN; PAM sequence: TTT
aactaaagacttgtttaaaa

SEQ ID NO: 393768 - DNA, 20 bp, Artificial Sequence
  Description of Artificial Sequence: Synthetic oligonucleotide
  Target: LAMA2; (+) strand; PAM type: YTN; PAM sequence: TTA
actaaagacttgtttaaaag

SEQ ID NO: 393769 - DNA, 20 bp, Artificial Sequence
  Description of Artificial Sequence: Synthetic oligonucleotide
  Target: LAMA2; (+) strand; PAM type: YTN; PAM sequence: CTA
aagacttgtttaaaagttac

SEQ ID NO: 393770 - DNA, 20 bp, Artificial Sequence
  Description of Artificial Sequence: Synthetic oligonucleotide
  Target: LAMA2; (+) strand; PAM type: YTN; PAM sequence: CTT
gtttaaaagttactggataa

SEQ ID NO: 393771 - DNA, 20 bp, Artificial Sequence
  Description of Artificial Sequence: Synthetic oligonucleotide
  Target: LAMA2; (+) strand; PAM type: YTN; PAM sequence: TTG
tttaaaagttactggataaa

SEQ ID NO: 393772 - DNA, 20 bp, Artificial Sequence
  Description of Artificial Sequence: Synthetic oligonucleotide
  Target: LAMA2; (+) strand; PAM type: YTN; PAM sequence: TTT
aaaagttactggataaaata

SEQ ID NO: 393773 - DNA, 20 bp, Artificial Sequence
  Description of Artificial Sequence: Synthetic oligonucleotide
  Target: LAMA2; (+) strand; PAM type: YTN; PAM sequence: TTA
aaagttactggataaaatag

SEQ ID NO: 393774 - DNA, 20 bp, Artificial Sequence
  Description of Artificial Sequence: Synthetic oligonucleotide
  Target: LAMA2; (+) strand; PAM type: YTN; PAM sequence: TTA
ctggataaaatagataaact

SEQ ID NO: 393775 - DNA, 20 bp, Artificial Sequence
  Description of Artificial Sequence: Synthetic oligonucleotide
  Target: LAMA2; (+) strand; PAM type: YTN; PAM sequence: CTG
gataaaatagataaactaac

SEQ ID NO: 393776 - DNA, 20 bp, Artificial Sequence
  Description of Artificial Sequence: Synthetic oligonucleotide
  Target: LAMA2; (+) strand; PAM type: YTN; PAM sequence: CTA
actgaatcaatatgaataag

SEQ ID NO: 393777 - DNA, 20 bp, Artificial Sequence
  Description of Artificial Sequence: Synthetic oligonucleotide
  Target: LAMA2; (+) strand; PAM type: YTN; PAM sequence: CTG
aatcaatatgaataaggcat

SEQ ID NO: 393778 - DNA, 20 bp, Artificial Sequence
  Description of Artificial Sequence: Synthetic oligonucleotide
  Target: LAMA2; (+) strand; PAM type: YTN; PAM sequence: TTA
tttatggttgcttaaaccaa

SEQ ID NO: 393779 - DNA, 20 bp, Artificial Sequence
  Description of Artificial Sequence: Synthetic oligonucleotide
  Target: LAMA2; (+) strand; PAM type: YTN; PAM sequence: TTT
atggttgcttaaaccaaata

SEQ ID NO: 393780 - DNA, 20 bp, Artificial Sequence
  Description of Artificial Sequence: Synthetic oligonucleotide
  Target: LAMA2; (+) strand; PAM type: YTN; PAM sequence: TTA
tggttgcttaaaccaaataa

SEQ ID NO: 393781 - DNA, 20 bp, Artificial Sequence
  Description of Artificial Sequence: Synthetic oligonucleotide
  Target: LAMA2; (+) strand; PAM type: YTN; PAM sequence: TTG
cttaaaccaaataaataatt

SEQ ID NO: 393782 - DNA, 20 bp, Artificial Sequence
  Description of Artificial Sequence: Synthetic oligonucleotide
  Target: LAMA2; (+) strand; PAM type: YTN; PAM sequence: CTT
aaaccaaataaataatttgg

SEQ ID NO: 393783 - DNA, 20 bp, Artificial Sequence
  Description of Artificial Sequence: Synthetic oligonucleotide
  Target: LAMA2; (+) strand; PAM type: YTN; PAM sequence: TTA
aaccaaataaataatttggt

SEQ ID NO: 393784 - DNA, 20 bp, Artificial Sequence
  Description of Artificial Sequence: Synthetic oligonucleotide
  Target: LAMA2; (+) strand; PAM type: YTN; PAM sequence: TTT
ggttgctgccaaaatggctg

SEQ ID NO: 393785 - DNA, 20 bp, Artificial Sequence
  Description of Artificial Sequence: Synthetic oligonucleotide
  Target: LAMA2; (+) strand; PAM type: YTN; PAM sequence: TTG
gttgctgccaaaatggctga

SEQ ID NO: 393786 - DNA, 20 bp, Artificial Sequence
  Description of Artificial Sequence: Synthetic oligonucleotide
  Target: LAMA2; (+) strand; PAM type: YTN; PAM sequence: TTG
ctgccaaaatggctgaaaat

SEQ ID NO: 393787 - DNA, 20 bp, Artificial Sequence
  Description of Artificial Sequence: Synthetic oligonucleotide
  Target: LAMA2; (+) strand; PAM type: YTN; PAM sequence: CTG
ccaaaatggctgaaaatcac

SEQ ID NO: 393788 - DNA, 20 bp, Artificial Sequence
  Description of Artificial Sequence: Synthetic oligonucleotide
  Target: LAMA2; (+) strand; PAM type: YTN; PAM sequence: CTG
aaaatcacatggggtgtttg

SEQ ID NO: 393789 - DNA, 20 bp, Artificial Sequence
  Description of Artificial Sequence: Synthetic oligonucleotide
  Target: LAMA2; (+) strand; PAM type: YTN; PAM sequence: TTT
gttaagccaacaggtttcat

SEQ ID NO: 393790 - DNA, 20 bp, Artificial Sequence
  Description of Artificial Sequence: Synthetic oligonucleotide
  Target: LAMA2; (+) strand; PAM type: YTN; PAM sequence: TTG
ttaagccaacaggtttcatg

SEQ ID NO: 393791 - DNA, 20 bp, Artificial Sequence
  Description of Artificial Sequence: Synthetic oligonucleotide
  Target: LAMA2; (+) strand; PAM type: YTN; PAM sequence: TTA
agccaacaggtttcatgggc

SEQ ID NO: 393792 - DNA, 20 bp, Artificial Sequence
  Description of Artificial Sequence: Synthetic oligonucleotide
  Target: LAMA2; (+) strand; PAM type: YTN; PAM sequence: TTT
catgggctcccacctagaga

SEQ ID NO: 393793 - DNA, 20 bp, Artificial Sequence
  Description of Artificial Sequence: Synthetic oligonucleotide
  Target: LAMA2; (+) strand; PAM type: YTN; PAM sequence: TTC
atgggctcccacctagagag

SEQ ID NO: 393794 - DNA, 20 bp, Artificial Sequence
  Description of Artificial Sequence: Synthetic oligonucleotide
  Target: LAMA2; (+) strand; PAM type: YTN; PAM sequence: CTC
ccacctagagagtctgtgta

SEQ ID NO: 393795 - DNA, 20 bp, Artificial Sequence
  Description of Artificial Sequence: Synthetic oligonucleotide
  Target: LAMA2; (+) strand; PAM type: YTN; PAM sequence: CTA
gagagtctgtgtaggctgct

SEQ ID NO: 393796 - DNA, 20 bp, Artificial Sequence
  Description of Artificial Sequence: Synthetic oligonucleotide
  Target: LAMA2; (+) strand; PAM type: YTN; PAM sequence: CTG
tgtaggctgctctggggttt

SEQ ID NO: 393797 - DNA, 20 bp, Artificial Sequence
  Description of Artificial Sequence: Synthetic oligonucleotide
  Target: LAMA2; (+) strand; PAM type: YTN; PAM sequence: CTG
ctctggggtttggccccatg

SEQ ID NO: 393798 - DNA, 20 bp, Artificial Sequence
  Description of Artificial Sequence: Synthetic oligonucleotide
  Target: LAMA2; (+) strand; PAM type: YTN; PAM sequence: CTC
tggggtttggccccatgtgt

SEQ ID NO: 393799 - DNA, 20 bp, Artificial Sequence
  Description of Artificial Sequence: Synthetic oligonucleotide
  Target: LAMA2; (+) strand; PAM type: YTN; PAM sequence: CTG
gggtttggccccatgtgtac

SEQ ID NO: 393800 - DNA, 20 bp, Artificial Sequence
  Description of Artificial Sequence: Synthetic oligonucleotide
  Target: LAMA2; (+) strand; PAM type: YTN; PAM sequence: TTT
ggccccatgtgtacattcta

SEQ ID NO: 393801 - DNA, 20 bp, Artificial Sequence
  Description of Artificial Sequence: Synthetic oligonucleotide
  Target: LAMA2; (+) strand; PAM type: YTN; PAM sequence: TTG
gccccatgtgtacattctaa

SEQ ID NO: 393802 - DNA, 20 bp, Artificial Sequence
  Description of Artificial Sequence: Synthetic oligonucleotide
  Target: LAMA2; (+) strand; PAM type: YTN; PAM sequence: TTC
taacactctccctgggctaa

SEQ ID NO: 393803 - DNA, 20 bp, Artificial Sequence
  Description of Artificial Sequence: Synthetic oligonucleotide
  Target: LAMA2; (+) strand; PAM type: YTN; PAM sequence: CTA
acactctccctgggctaatc

SEQ ID NO: 393804 - DNA, 20 bp, Artificial Sequence
  Description of Artificial Sequence: Synthetic oligonucleotide
  Target: LAMA2; (+) strand; PAM type: YTN; PAM sequence: CTC
tccctgggctaatctgatgc

SEQ ID NO: 393805 - DNA, 20 bp, Artificial Sequence
  Description of Artificial Sequence: Synthetic oligonucleotide
  Target: LAMA2; (+) strand; PAM type: YTN; PAM sequence: CTC
cctgggctaatctgatgcct

SEQ ID NO: 393806 - DNA, 20 bp, Artificial Sequence
  Description of Artificial Sequence: Synthetic oligonucleotide
  Target: LAMA2; (+) strand; PAM type: YTN; PAM sequence: CTG
ggctaatctgatgcctatac

SEQ ID NO: 393807 - DNA, 20 bp, Artificial Sequence
  Description of Artificial Sequence: Synthetic oligonucleotide
  Target: LAMA2; (+) strand; PAM type: YTN; PAM sequence: CTA
atctgatgcctatacaggtt

SEQ ID NO: 393808 - DNA, 20 bp, Artificial Sequence
  Description of Artificial Sequence: Synthetic oligonucleotide
  Target: LAMA2; (+) strand; PAM type: YTN; PAM sequence: CTG
atgcctatacaggttcgagg

SEQ ID NO: 393809 - DNA, 20 bp, Artificial Sequence
  Description of Artificial Sequence: Synthetic oligonucleotide
  Target: LAMA2; (+) strand; PAM type: YTN; PAM sequence: CTA
tacaggttcgaggaaaactg

SEQ ID NO: 393810 - DNA, 20 bp, Artificial Sequence
  Description of Artificial Sequence: Synthetic oligonucleotide
  Target: LAMA2; (+) strand; PAM type: YTN; PAM sequence: TTC
gaggaaaactgacacattgc

SEQ ID NO: 393811 - DNA, 20 bp, Artificial Sequence
  Description of Artificial Sequence: Synthetic oligonucleotide
  Target: LAMA2; (+) strand; PAM type: YTN; PAM sequence: CTG
acacattgcatctatttgat

SEQ ID NO: 393812 - DNA, 20 bp, Artificial Sequence
  Description of Artificial Sequence: Synthetic oligonucleotide
  Target: LAMA2; (+) strand; PAM type: YTN; PAM sequence: TTG
catctatttgattgaataat

SEQ ID NO: 393813 - DNA, 20 bp, Artificial Sequence
  Description of Artificial Sequence: Synthetic oligonucleotide
  Target: LAMA2; (+) strand; PAM type: YTN; PAM sequence: CTA
tttgattgaataataagctg

SEQ ID NO: 393814 - DNA, 20 bp, Artificial Sequence
  Description of Artificial Sequence: Synthetic oligonucleotide
  Target: LAMA2; (+) strand; PAM type: YTN; PAM sequence: TTT
gattgaataataagctgcat

SEQ ID NO: 393815 - DNA, 20 bp, Artificial Sequence
  Description of Artificial Sequence: Synthetic oligonucleotide
  Target: LAMA2; (+) strand; PAM type: YTN; PAM sequence: TTG
attgaataataagctgcatt

SEQ ID NO: 393816 - DNA, 20 bp, Artificial Sequence
  Description of Artificial Sequence: Synthetic oligonucleotide
  Target: LAMA2; (+) strand; PAM type: YTN; PAM sequence: TTG
aataataagctgcattttaa

SEQ ID NO: 393817 - DNA, 20 bp, Artificial Sequence
  Description of Artificial Sequence: Synthetic oligonucleotide
  Target: LAMA2; (+) strand; PAM type: YTN; PAM sequence: CTG
cattttaaataaataactcc

SEQ ID NO: 393818 - DNA, 20 bp, Artificial Sequence
  Description of Artificial Sequence: Synthetic oligonucleotide
  Target: LAMA2; (+) strand; PAM type: YTN; PAM sequence: TTT
taaataaataactcccttat

SEQ ID NO: 393819 - DNA, 20 bp, Artificial Sequence
  Description of Artificial Sequence: Synthetic oligonucleotide
  Target: LAMA2; (+) strand; PAM type: YTN; PAM sequence: TTT
aaataaataactcccttata

SEQ ID NO: 393820 - DNA, 20 bp, Artificial Sequence
  Description of Artificial Sequence: Synthetic oligonucleotide
  Target: LAMA2; (+) strand; PAM type: YTN; PAM sequence: TTA
aataaataactcccttataa

SEQ ID NO: 393821 - DNA, 20 bp, Artificial Sequence
  Description of Artificial Sequence: Synthetic oligonucleotide
  Target: LAMA2; (+) strand; PAM type: YTN; PAM sequence: CTC
ccttataactgtgtccacaa

SEQ ID NO: 393822 - DNA, 20 bp, Artificial Sequence
  Description of Artificial Sequence: Synthetic oligonucleotide
  Target: LAMA2; (+) strand; PAM type: YTN; PAM sequence: CTT
ataactgtgtccacaatgaa

SEQ ID NO: 393823 - DNA, 20 bp, Artificial Sequence
  Description of Artificial Sequence: Synthetic oligonucleotide
  Target: LAMA2; (+) strand; PAM type: YTN; PAM sequence: TTA
taactgtgtccacaatgaag

SEQ ID NO: 393824 - DNA, 20 bp, Artificial Sequence
  Description of Artificial Sequence: Synthetic oligonucleotide
  Target: LAMA2; (+) strand; PAM type: YTN; PAM sequence: CTG
tgtccacaatgaaggtaaca

SEQ ID NO: 393825 - DNA, 20 bp, Artificial Sequence
  Description of Artificial Sequence: Synthetic oligonucleotide
  Target: LAMA2; (+) strand; PAM type: YTN; PAM sequence: TTA
atacccaactcaaaaacttt

SEQ ID NO: 393826 - DNA, 20 bp, Artificial Sequence
  Description of Artificial Sequence: Synthetic oligonucleotide
  Target: LAMA2; (+) strand; PAM type: YTN; PAM sequence: CTC
aaaaactttttatttatttt

SEQ ID NO: 393827 - DNA, 20 bp, Artificial Sequence
  Description of Artificial Sequence: Synthetic oligonucleotide
  Target: LAMA2; (+) strand; PAM type: YTN; PAM sequence: CTT
tttatttattttaaggtggc

SEQ ID NO: 393828 - DNA, 20 bp, Artificial Sequence
  Description of Artificial Sequence: Synthetic oligonucleotide
  Target: LAMA2; (+) strand; PAM type: YTN; PAM sequence: TTT
ttatttattttaaggtggca

SEQ ID NO: 393829 - DNA, 20 bp, Artificial Sequence
  Description of Artificial Sequence: Synthetic oligonucleotide
  Target: LAMA2; (+) strand; PAM type: YTN; PAM sequence: TTT
tatttattttaaggtggcat

SEQ ID NO: 393830 - DNA, 20 bp, Artificial Sequence
  Description of Artificial Sequence: Synthetic oligonucleotide
  Target: LAMA2; (+) strand; PAM type: YTN; PAM sequence: TTT
atttattttaaggtggcatg

SEQ ID NO: 393831 - DNA, 20 bp, Artificial Sequence
  Description of Artificial Sequence: Synthetic oligonucleotide
  Target: LAMA2; (+) strand; PAM type: YTN; PAM sequence: TTA
tttattttaaggtggcatgt

SEQ ID NO: 393832 - DNA, 20 bp, Artificial Sequence
  Description of Artificial Sequence: Synthetic oligonucleotide
  Target: LAMA2; (+) strand; PAM type: YTN; PAM sequence: TTT
attttaaggtggcatgtaat

SEQ ID NO: 393833 - DNA, 20 bp, Artificial Sequence
  Description of Artificial Sequence: Synthetic oligonucleotide
  Target: LAMA2; (+) strand; PAM type: YTN; PAM sequence: TTA
ttttaaggtggcatgtaatt

SEQ ID NO: 393834 - DNA, 20 bp, Artificial Sequence
  Description of Artificial Sequence: Synthetic oligonucleotide
  Target: LAMA2; (+) strand; PAM type: YTN; PAM sequence: TTT
taaggtggcatgtaattttc

SEQ ID NO: 393835 - DNA, 20 bp, Artificial Sequence
  Description of Artificial Sequence: Synthetic oligonucleotide
  Target: LAMA2; (+) strand; PAM type: YTN; PAM sequence: TTT
aaggtggcatgtaattttct

SEQ ID NO: 393836 - DNA, 20 bp, Artificial Sequence
  Description of Artificial Sequence: Synthetic oligonucleotide
  Target: LAMA2; (+) strand; PAM type: YTN; PAM sequence: TTA
aggtggcatgtaattttctt

SEQ ID NO: 393837 - DNA, 20 bp, Artificial Sequence
  Description of Artificial Sequence: Synthetic oligonucleotide
  Target: LAMA2; (+) strand; PAM type: YTN; PAM sequence: TTT
tctttttaaaaattttatca

SEQ ID NO: 393838 - DNA, 20 bp, Artificial Sequence
  Description of Artificial Sequence: Synthetic oligonucleotide
  Target: LAMA2; (+) strand; PAM type: YTN; PAM sequence: TTT
ctttttaaaaattttatcaa

SEQ ID NO: 393839 - DNA, 20 bp, Artificial Sequence
  Description of Artificial Sequence: Synthetic oligonucleotide
  Target: LAMA2; (+) strand; PAM type: YTN; PAM sequence: TTC
tttttaaaaattttatcaag

SEQ ID NO: 393840 - DNA, 20 bp, Artificial Sequence
  Description of Artificial Sequence: Synthetic oligonucleotide
  Target: LAMA2; (+) strand; PAM type: YTN; PAM sequence: CTT
tttaaaaattttatcaagcc

SEQ ID NO: 393841 - DNA, 20 bp, Artificial Sequence
  Description of Artificial Sequence: Synthetic oligonucleotide
  Target: LAMA2; (+) strand; PAM type: YTN; PAM sequence: TTT
ttaaaaattttatcaagcct

SEQ ID NO: 393842 - DNA, 20 bp, Artificial Sequence
  Description of Artificial Sequence: Synthetic oligonucleotide
  Target: LAMA2; (+) strand; PAM type: YTN; PAM sequence: TTT
taaaaattttatcaagcctc

SEQ ID NO: 393843 - DNA, 20 bp, Artificial Sequence
  Description of Artificial Sequence: Synthetic oligonucleotide
  Target: LAMA2; (+) strand; PAM type: YTN; PAM sequence: TTT
aaaaattttatcaagcctct

SEQ ID NO: 393844 - DNA, 20 bp, Artificial Sequence
  Description of Artificial Sequence: Synthetic oligonucleotide
  Target: LAMA2; (+) strand; PAM type: YTN; PAM sequence: TTA
aaaattttatcaagcctcta

SEQ ID NO: 393845 - DNA, 20 bp, Artificial Sequence
  Description of Artificial Sequence: Synthetic oligonucleotide
  Target: LAMA2; (+) strand; PAM type: YTN; PAM sequence: TTT
tatcaagcctctaattcatt

SEQ ID NO: 393846 - DNA, 20 bp, Artificial Sequence
  Description of Artificial Sequence: Synthetic oligonucleotide
  Target: LAMA2; (+) strand; PAM type: YTN; PAM sequence: TTT
atcaagcctctaattcattc

SEQ ID NO: 393847 - DNA, 20 bp, Artificial Sequence
  Description of Artificial Sequence: Synthetic oligonucleotide
  Target: LAMA2; (+) strand; PAM type: YTN; PAM sequence: TTA
tcaagcctctaattcattca

SEQ ID NO: 393848 - DNA, 20 bp, Artificial Sequence
  Description of Artificial Sequence: Synthetic oligonucleotide
  Target: LAMA2; (+) strand; PAM type: YTN; PAM sequence: CTC
taattcattcaggaaacgtg

SEQ ID NO: 393849 - DNA, 20 bp, Artificial Sequence
  Description of Artificial Sequence: Synthetic oligonucleotide
  Target: LAMA2; (+) strand; PAM type: YTN; PAM sequence: CTA
attcattcaggaaacgtgct

SEQ ID NO: 393850 - DNA, 20 bp, Artificial Sequence
  Description of Artificial Sequence: Synthetic oligonucleotide
  Target: LAMA2; (+) strand; PAM type: YTN; PAM sequence: TTC
attcaggaaacgtgctagac

SEQ ID NO: 393851 - DNA, 20 bp, Artificial Sequence
  Description of Artificial Sequence: Synthetic oligonucleotide
  Target: LAMA2; (+) strand; PAM type: YTN; PAM sequence: TTC
aggaaacgtgctagacacca

SEQ ID NO: 393852 - DNA, 20 bp, Artificial Sequence
  Description of Artificial Sequence: Synthetic oligonucleotide
  Target: LAMA2; (+) strand; PAM type: YTN; PAM sequence: CTA
gacaccaaaattgattgtgt

SEQ ID NO: 393853 - DNA, 20 bp, Artificial Sequence
  Description of Artificial Sequence: Synthetic oligonucleotide
  Target: LAMA2; (+) strand; PAM type: YTN; PAM sequence: TTG
attgtgtcagtgatgagccc

SEQ ID NO: 393854 - DNA, 20 bp, Artificial Sequence
  Description of Artificial Sequence: Synthetic oligonucleotide
  Target: LAMA2; (+) strand; PAM type: YTN; PAM sequence: TTG
tgtcagtgatgagccccctt

SEQ ID NO: 393855 - DNA, 20 bp, Artificial Sequence
  Description of Artificial Sequence: Synthetic oligonucleotide
  Target: LAMA2; (+) strand; PAM type: YTN; PAM sequence: CTT
agagcagcagcctcagcgta

SEQ ID NO: 393856 - DNA, 20 bp, Artificial Sequence
  Description of Artificial Sequence: Synthetic oligonucleotide
  Target: LAMA2; (+) strand; PAM type: YTN; PAM sequence: TTA
gagcagcagcctcagcgtaa

SEQ ID NO: 393857 - DNA, 20 bp, Artificial Sequence
  Description of Artificial Sequence: Synthetic oligonucleotide
  Target: LAMA2; (+) strand; PAM type: YTN; PAM sequence: CTC
agcgtaacctagcaacttgt

SEQ ID NO: 393858 - DNA, 20 bp, Artificial Sequence
  Description of Artificial Sequence: Synthetic oligonucleotide
  Target: LAMA2; (+) strand; PAM type: YTN; PAM sequence: CTA
gcaacttgtcaaaaagacaa

SEQ ID NO: 393859 - DNA, 20 bp, Artificial Sequence
  Description of Artificial Sequence: Synthetic oligonucleotide
  Target: LAMA2; (+) strand; PAM type: YTN; PAM sequence: CTT
gtcaaaaagacaaattcttg

SEQ ID NO: 393860 - DNA, 20 bp, Artificial Sequence
  Description of Artificial Sequence: Synthetic oligonucleotide
  Target: LAMA2; (+) strand; PAM type: YTN; PAM sequence: TTG
tcaaaaagacaaattcttgg

SEQ ID NO: 393861 - DNA, 20 bp, Artificial Sequence
  Description of Artificial Sequence: Synthetic oligonucleotide
  Target: LAMA2; (+) strand; PAM type: YTN; PAM sequence: TTC
ttggaccccatccctaaatg

SEQ ID NO: 393862 - DNA, 20 bp, Artificial Sequence
  Description of Artificial Sequence: Synthetic oligonucleotide
  Target: LAMA2; (+) strand; PAM type: YTN; PAM sequence: CTT
ggaccccatccctaaatgac

SEQ ID NO: 393863 - DNA, 20 bp, Artificial Sequence
  Description of Artificial Sequence: Synthetic oligonucleotide
  Target: LAMA2; (+) strand; PAM type: YTN; PAM sequence: TTG
gaccccatccctaaatgacc

SEQ ID NO: 393864 - DNA, 20 bp, Artificial Sequence
  Description of Artificial Sequence: Synthetic oligonucleotide
  Target: LAMA2; (+) strand; PAM type: YTN; PAM sequence: CTA
aatgaccaactcagaaactc

SEQ ID NO: 393865 - DNA, 20 bp, Artificial Sequence
  Description of Artificial Sequence: Synthetic oligonucleotide
  Target: LAMA2; (+) strand; PAM type: YTN; PAM sequence: CTC
agaaactctgagaatggggc

SEQ ID NO: 393866 - DNA, 20 bp, Artificial Sequence
  Description of Artificial Sequence: Synthetic oligonucleotide
  Target: LAMA2; (+) strand; PAM type: YTN; PAM sequence: CTC
tgagaatggggcccagaaat

SEQ ID NO: 393867 - DNA, 20 bp, Artificial Sequence
  Description of Artificial Sequence: Synthetic oligonucleotide
  Target: LAMA2; (+) strand; PAM type: YTN; PAM sequence: CTG
agaatggggcccagaaatcc

SEQ ID NO: 393868 - DNA, 20 bp, Artificial Sequence
  Description of Artificial Sequence: Synthetic oligonucleotide
  Target: LAMA2; (+) strand; PAM type: YTN; PAM sequence: TTT
taaaaattcctccagtgatt

SEQ ID NO: 393869 - DNA, 20 bp, Artificial Sequence
  Description of Artificial Sequence: Synthetic oligonucleotide
  Target: LAMA2; (+) strand; PAM type: YTN; PAM sequence: TTT
aaaaattcctccagtgatta

SEQ ID NO: 393870 - DNA, 20 bp, Artificial Sequence
  Description of Artificial Sequence: Synthetic oligonucleotide
  Target: LAMA2; (+) strand; PAM type: YTN; PAM sequence: TTA
aaaattcctccagtgattaa

SEQ ID NO: 393871 - DNA, 20 bp, Artificial Sequence
  Description of Artificial Sequence: Synthetic oligonucleotide
  Target: LAMA2; (+) strand; PAM type: YTN; PAM sequence: TTC
ctccagtgattaagatgcag

SEQ ID NO: 393872 - DNA, 20 bp, Artificial Sequence
  Description of Artificial Sequence: Synthetic oligonucleotide
  Target: LAMA2; (+) strand; PAM type: YTN; PAM sequence: CTC
cagtgattaagatgcagctt

SEQ ID NO: 393873 - DNA, 20 bp, Artificial Sequence
  Description of Artificial Sequence: Synthetic oligonucleotide
  Target: LAMA2; (+) strand; PAM type: YTN; PAM sequence: TTA
agatgcagcttcaaggttga

SEQ ID NO: 393874 - DNA, 20 bp, Artificial Sequence
  Description of Artificial Sequence: Synthetic oligonucleotide
  Target: LAMA2; (+) strand; PAM type: YTN; PAM sequence: CTT
caaggttgagaaccacgggt

SEQ ID NO: 393875 - DNA, 20 bp, Artificial Sequence
  Description of Artificial Sequence: Synthetic oligonucleotide
  Target: LAMA2; (+) strand; PAM type: YTN; PAM sequence: TTC
aaggttgagaaccacgggta

SEQ ID NO: 393876 - DNA, 20 bp, Artificial Sequence
  Description of Artificial Sequence: Synthetic oligonucleotide
  Target: LAMA2; (+) strand; PAM type: YTN; PAM sequence: TTG
agaaccacgggtataaacac

SEQ ID NO: 393877 - DNA, 20 bp, Artificial Sequence
  Description of Artificial Sequence: Synthetic oligonucleotide
  Target: LAMA2; (+) strand; PAM type: YTN; PAM sequence: CTA
aaacaccatctctgattact

SEQ ID NO: 393878 - DNA, 20 bp, Artificial Sequence
  Description of Artificial Sequence: Synthetic oligonucleotide
  Target: LAMA2; (+) strand; PAM type: YTN; PAM sequence: CTC
tgattacttcaagtaacttg

SEQ ID NO: 393879 - DNA, 20 bp, Artificial Sequence
  Description of Artificial Sequence: Synthetic oligonucleotide
  Target: LAMA2; (+) strand; PAM type: YTN; PAM sequence: CTG
attacttcaagtaacttgta

SEQ ID NO: 393880 - DNA, 20 bp, Artificial Sequence
  Description of Artificial Sequence: Synthetic oligonucleotide
  Target: LAMA2; (+) strand; PAM type: YTN; PAM sequence: TTA
cttcaagtaacttgtattta

SEQ ID NO: 393881 - DNA, 20 bp, Artificial Sequence
  Description of Artificial Sequence: Synthetic oligonucleotide
  Target: LAMA2; (+) strand; PAM type: YTN; PAM sequence: CTT
caagtaacttgtatttagtg

SEQ ID NO: 393882 - DNA, 20 bp, Artificial Sequence
  Description of Artificial Sequence: Synthetic oligonucleotide
  Target: LAMA2; (+) strand; PAM type: YTN; PAM sequence: TTC
aagtaacttgtatttagtgg

SEQ ID NO: 393883 - DNA, 20 bp, Artificial Sequence
  Description of Artificial Sequence: Synthetic oligonucleotide
  Target: LAMA2; (+) strand; PAM type: YTN; PAM sequence: CTT
gtatttagtgggaggtacac

SEQ ID NO: 393884 - DNA, 20 bp, Artificial Sequence
  Description of Artificial Sequence: Synthetic oligonucleotide
  Target: LAMA2; (+) strand; PAM type: YTN; PAM sequence: TTG
tatttagtgggaggtacaca

SEQ ID NO: 393885 - DNA, 20 bp, Artificial Sequence
  Description of Artificial Sequence: Synthetic oligonucleotide
  Target: LAMA2; (+) strand; PAM type: YTN; PAM sequence: TTT
agtgggaggtacacataagc

SEQ ID NO: 393886 - DNA, 20 bp, Artificial Sequence
  Description of Artificial Sequence: Synthetic oligonucleotide
  Target: LAMA2; (+) strand; PAM type: YTN; PAM sequence: TTA
gtgggaggtacacataagca

SEQ ID NO: 393887 - DNA, 20 bp, Artificial Sequence
  Description of Artificial Sequence: Synthetic oligonucleotide
  Target: LAMA2; (+) strand; PAM type: YTN; PAM sequence: CTC
catacgctaccataattatc

SEQ ID NO: 393888 - DNA, 20 bp, Artificial Sequence
  Description of Artificial Sequence: Synthetic oligonucleotide
  Target: LAMA2; (+) strand; PAM type: YTN; PAM sequence: CTA
ccataattatcacaggcgta

SEQ ID NO: 393889 - DNA, 20 bp, Artificial Sequence
  Description of Artificial Sequence: Synthetic oligonucleotide
  Target: LAMA2; (+) strand; PAM type: YTN; PAM sequence: TTA
tcacaggcgtaagcaaagga

SEQ ID NO: 393890 - DNA, 20 bp, Artificial Sequence
  Description of Artificial Sequence: Synthetic oligonucleotide
  Target: LAMA2; (+) strand; PAM type: YTN; PAM sequence: CTA
agtcacccctgagtttagga

SEQ ID NO: 393891 - DNA, 20 bp, Artificial Sequence
  Description of Artificial Sequence: Synthetic oligonucleotide
  Target: LAMA2; (+) strand; PAM type: YTN; PAM sequence: CTG
agtttaggaagagctttgta

SEQ ID NO: 393892 - DNA, 20 bp, Artificial Sequence
  Description of Artificial Sequence: Synthetic oligonucleotide
  Target: LAMA2; (+) strand; PAM type: YTN; PAM sequence: TTT
aggaagagctttgtagaggc

SEQ ID NO: 393893 - DNA, 20 bp, Artificial Sequence
  Description of Artificial Sequence: Synthetic oligonucleotide
  Target: LAMA2; (+) strand; PAM type: YTN; PAM sequence: TTA
ggaagagctttgtagaggcc

SEQ ID NO: 393894 - DNA, 20 bp, Artificial Sequence
  Description of Artificial Sequence: Synthetic oligonucleotide
  Target: LAMA2; (+) strand; PAM type: YTN; PAM sequence: CTT
tgtagaggccctgacacttg

SEQ ID NO: 393895 - DNA, 20 bp, Artificial Sequence
  Description of Artificial Sequence: Synthetic oligonucleotide
  Target: LAMA2; (+) strand; PAM type: YTN; PAM sequence: TTT
gtagaggccctgacacttgt

SEQ ID NO: 393896 - DNA, 20 bp, Artificial Sequence
  Description of Artificial Sequence: Synthetic oligonucleotide
  Target: LAMA2; (+) strand; PAM type: YTN; PAM sequence: TTG
tagaggccctgacacttgtg

SEQ ID NO: 393897 - DNA, 20 bp, Artificial Sequence
  Description of Artificial Sequence: Synthetic oligonucleotide
  Target: LAMA2; (+) strand; PAM type: YTN; PAM sequence: CTG
acacttgtgctagatcctaa

SEQ ID NO: 393898 - DNA, 20 bp, Artificial Sequence
  Description of Artificial Sequence: Synthetic oligonucleotide
  Target: LAMA2; (+) strand; PAM type: YTN; PAM sequence: CTT
gtgctagatcctaaaggata

SEQ ID NO: 393899 - DNA, 20 bp, Artificial Sequence
  Description of Artificial Sequence: Synthetic oligonucleotide
  Target: LAMA2; (+) strand; PAM type: YTN; PAM sequence: TTG
tgctagatcctaaaggataa

SEQ ID NO: 393900 - DNA, 20 bp, Artificial Sequence
  Description of Artificial Sequence: Synthetic oligonucleotide
  Target: LAMA2; (+) strand; PAM type: YTN; PAM sequence: CTA
gatcctaaaggataagcact

SEQ ID NO: 393901 - DNA, 20 bp, Artificial Sequence
  Description of Artificial Sequence: Synthetic oligonucleotide
  Target: LAMA2; (+) strand; PAM type: YTN; PAM sequence: CTA
aaggataagcactgggtcac

SEQ ID NO: 393902 - DNA, 20 bp, Artificial Sequence
  Description of Artificial Sequence: Synthetic oligonucleotide
  Target: LAMA2; (+) strand; PAM type: YTN; PAM sequence: CTG
ggtcacagaagaataaagag

SEQ ID NO: 393903 - DNA, 20 bp, Artificial Sequence
  Description of Artificial Sequence: Synthetic oligonucleotide
  Target: LAMA2; (+) strand; PAM type: YTN; PAM sequence: TTT
cagaaactgggaaaaacata

SEQ ID NO: 393904 - DNA, 20 bp, Artificial Sequence
  Description of Artificial Sequence: Synthetic oligonucleotide
  Target: LAMA2; (+) strand; PAM type: YTN; PAM sequence: TTC
agaaactgggaaaaacatat

SEQ ID NO: 393905 - DNA, 20 bp, Artificial Sequence
  Description of Artificial Sequence: Synthetic oligonucleotide
  Target: LAMA2; (+) strand; PAM type: YTN; PAM sequence: CTG
ggaaaaacatatacaaaggc

SEQ ID NO: 393906 - DNA, 20 bp, Artificial Sequence
  Description of Artificial Sequence: Synthetic oligonucleotide
  Target: LAMA2; (+) strand; PAM type: YTN; PAM sequence: TTT
tgggggaaagttcagtggtt

SEQ ID NO: 393907 - DNA, 20 bp, Artificial Sequence
  Description of Artificial Sequence: Synthetic oligonucleotide
  Target: LAMA2; (+) strand; PAM type: YTN; PAM sequence: TTT
gggggaaagttcagtggttt

SEQ ID NO: 393908 - DNA, 20 bp, Artificial Sequence
  Description of Artificial Sequence: Synthetic oligonucleotide
  Target: LAMA2; (+) strand; PAM type: YTN; PAM sequence: TTG
ggggaaagttcagtggtttg

SEQ ID NO: 393909 - DNA, 20 bp, Artificial Sequence
  Description of Artificial Sequence: Synthetic oligonucleotide
  Target: LAMA2; (+) strand; PAM type: YTN; PAM sequence: TTC
agtggtttgataggcttgga

SEQ ID NO: 393910 - DNA, 20 bp, Artificial Sequence
  Description of Artificial Sequence: Synthetic oligonucleotide
  Target: LAMA2; (+) strand; PAM type: YTN; PAM sequence: TTT
gataggcttggaaagaagac

SEQ ID NO: 393911 - DNA, 20 bp, Artificial Sequence
  Description of Artificial Sequence: Synthetic oligonucleotide
  Target: LAMA2; (+) strand; PAM type: YTN; PAM sequence: TTG
ataggcttggaaagaagact

SEQ ID NO: 393912 - DNA, 20 bp, Artificial Sequence
  Description of Artificial Sequence: Synthetic oligonucleotide
  Target: LAMA2; (+) strand; PAM type: YTN; PAM sequence: CTT
ggaaagaagactgcatgtga

SEQ ID NO: 393913 - DNA, 20 bp, Artificial Sequence
  Description of Artificial Sequence: Synthetic oligonucleotide
  Target: LAMA2; (+) strand; PAM type: YTN; PAM sequence: TTG
gaaagaagactgcatgtgaa

SEQ ID NO: 393914 - DNA, 20 bp, Artificial Sequence
  Description of Artificial Sequence: Synthetic oligonucleotide
  Target: LAMA2; (+) strand; PAM type: YTN; PAM sequence: CTG
catgtgaacgactgaaggga

SEQ ID NO: 393915 - DNA, 20 bp, Artificial Sequence
  Description of Artificial Sequence: Synthetic oligonucleotide
  Target: LAMA2; (+) strand; PAM type: YTN; PAM sequence: CTG
aagggatagaaagaaagaga

SEQ ID NO: 393916 - DNA, 20 bp, Artificial Sequence
  Description of Artificial Sequence: Synthetic oligonucleotide
  Target: LAMA2; (+) strand; PAM type: YTN; PAM sequence: CTT
cagttataagagaatcgcat

SEQ ID NO: 393917 - DNA, 20 bp, Artificial Sequence
  Description of Artificial Sequence: Synthetic oligonucleotide
  Target: LAMA2; (+) strand; PAM type: YTN; PAM sequence: TTC
agttataagagaatcgcatt

SEQ ID NO: 393918 - DNA, 20 bp, Artificial Sequence
  Description of Artificial Sequence: Synthetic oligonucleotide
  Target: LAMA2; (+) strand; PAM type: YTN; PAM sequence: TTA
taagagaatcgcattgtgag

SEQ ID NO: 393919 - DNA, 20 bp, Artificial Sequence
  Description of Artificial Sequence: Synthetic oligonucleotide
  Target: LAMA2; (+) strand; PAM type: YTN; PAM sequence: TTG
tgagactaagctaaggaatt

SEQ ID NO: 393920 - DNA, 20 bp, Artificial Sequence
  Description of Artificial Sequence: Synthetic oligonucleotide
  Target: LAMA2; (+) strand; PAM type: YTN; PAM sequence: CTA
agctaaggaattggttttta

SEQ ID NO: 393921 - DNA, 20 bp, Artificial Sequence
  Description of Artificial Sequence: Synthetic oligonucleotide
  Target: LAMA2; (+) strand; PAM type: YTN; PAM sequence: CTA
aggaattggtttttatcctg

SEQ ID NO: 393922 - DNA, 20 bp, Artificial Sequence
  Description of Artificial Sequence: Synthetic oligonucleotide
  Target: LAMA2; (+) strand; PAM type: YTN; PAM sequence: TTG
gtttttatcctgagagccat

SEQ ID NO: 393923 - DNA, 20 bp, Artificial Sequence
  Description of Artificial Sequence: Synthetic oligonucleotide
  Target: LAMA2; (+) strand; PAM type: YTN; PAM sequence: TTT
ttatcctgagagccatagga

SEQ ID NO: 393924 - DNA, 20 bp, Artificial Sequence
  Description of Artificial Sequence: Synthetic oligonucleotide
  Target: LAMA2; (+) strand; PAM type: YTN; PAM sequence: TTT
tatcctgagagccataggaa

SEQ ID NO: 393925 - DNA, 20 bp, Artificial Sequence
  Description of Artificial Sequence: Synthetic oligonucleotide
  Target: LAMA2; (+) strand; PAM type: YTN; PAM sequence: TTT
atcctgagagccataggaag

SEQ ID NO: 393926 - DNA, 20 bp, Artificial Sequence
  Description of Artificial Sequence: Synthetic oligonucleotide
  Target: LAMA2; (+) strand; PAM type: YTN; PAM sequence: TTA
tcctgagagccataggaagc

SEQ ID NO: 393927 - DNA, 20 bp, Artificial Sequence
  Description of Artificial Sequence: Synthetic oligonucleotide
  Target: LAMA2; (+) strand; PAM type: YTN; PAM sequence: CTG
agagccataggaagcaattg

SEQ ID NO: 393928 - DNA, 20 bp, Artificial Sequence
  Description of Artificial Sequence: Synthetic oligonucleotide
  Target: LAMA2; (+) strand; PAM type: YTN; PAM sequence: TTG
aaatattgcagtcatgggtt

SEQ ID NO: 393929 - DNA, 20 bp, Artificial Sequence
  Description of Artificial Sequence: Synthetic oligonucleotide
  Target: LAMA2; (+) strand; PAM type: YTN; PAM sequence: TTG
cagtcatgggttaaaataaa

SEQ ID NO: 393930 - DNA, 20 bp, Artificial Sequence
  Description of Artificial Sequence: Synthetic oligonucleotide
  Target: LAMA2; (+) strand; PAM type: YTN; PAM sequence: TTA
aaataaaatgttgcagaatt

SEQ ID NO: 393931 - DNA, 20 bp, Artificial Sequence
  Description of Artificial Sequence: Synthetic oligonucleotide
  Target: LAMA2; (+) strand; PAM type: YTN; PAM sequence: TTG
cagaatttgagtggctcact

SEQ ID NO: 393932 - DNA, 20 bp, Artificial Sequence
  Description of Artificial Sequence: Synthetic oligonucleotide
  Target: LAMA2; (+) strand; PAM type: YTN; PAM sequence: TTT
gagtggctcacttaaactga

SEQ ID NO: 393933 - DNA, 20 bp, Artificial Sequence
  Description of Artificial Sequence: Synthetic oligonucleotide
  Target: LAMA2; (+) strand; PAM type: YTN; PAM sequence: TTG
agtggctcacttaaactgaa

SEQ ID NO: 393934 - DNA, 20 bp, Artificial Sequence
  Description of Artificial Sequence: Synthetic oligonucleotide
  Target: LAMA2; (+) strand; PAM type: YTN; PAM sequence: CTC
acttaaactgaataaatggt

SEQ ID NO: 393935 - DNA, 20 bp, Artificial Sequence
  Description of Artificial Sequence: Synthetic oligonucleotide
  Target: LAMA2; (+) strand; PAM type: YTN; PAM sequence: CTT
aaactgaataaatggttttt

SEQ ID NO: 393936 - DNA, 20 bp, Artificial Sequence
  Description of Artificial Sequence: Synthetic oligonucleotide
  Target: LAMA2; (+) strand; PAM type: YTN; PAM sequence: TTA
aactgaataaatggtttttt

SEQ ID NO: 393937 - DNA, 20 bp, Artificial Sequence
  Description of Artificial Sequence: Synthetic oligonucleotide
  Target: LAMA2; (+) strand; PAM type: YTN; PAM sequence: CTG
aataaatggttttttatcgg

SEQ ID NO: 393938 - DNA, 20 bp, Artificial Sequence
  Description of Artificial Sequence: Synthetic oligonucleotide
  Target: LAMA2; (+) strand; PAM type: YTN; PAM sequence: TTT
tttatcggaaaatagtgtga

SEQ ID NO: 393939 - DNA, 20 bp, Artificial Sequence
  Description of Artificial Sequence: Synthetic oligonucleotide
  Target: LAMA2; (+) strand; PAM type: YTN; PAM sequence: TTT
ttatcggaaaatagtgtgat

SEQ ID NO: 393940 - DNA, 20 bp, Artificial Sequence
  Description of Artificial Sequence: Synthetic oligonucleotide
  Target: LAMA2; (+) strand; PAM type: YTN; PAM sequence: TTT
tatcggaaaatagtgtgata

SEQ ID NO: 393941 - DNA, 20 bp, Artificial Sequence
  Description of Artificial Sequence: Synthetic oligonucleotide
  Target: LAMA2; (+) strand; PAM type: YTN; PAM sequence: TTT
atcggaaaatagtgtgatat

SEQ ID NO: 393942 - DNA, 20 bp, Artificial Sequence
  Description of Artificial Sequence: Synthetic oligonucleotide
  Target: LAMA2; (+) strand; PAM type: YTN; PAM sequence: TTA
tcggaaaatagtgtgatatt

SEQ ID NO: 393943 - DNA, 20 bp, Artificial Sequence
  Description of Artificial Sequence: Synthetic oligonucleotide
  Target: LAMA2; (+) strand; PAM type: YTN; PAM sequence: TTA
ggctagaaaagtaggctggg

SEQ ID NO: 393944 - DNA, 20 bp, Artificial Sequence
  Description of Artificial Sequence: Synthetic oligonucleotide
  Target: LAMA2; (+) strand; PAM type: YTN; PAM sequence: CTA
gaaaagtaggctgggataat

SEQ ID NO: 393945 - DNA, 20 bp, Artificial Sequence
  Description of Artificial Sequence: Synthetic oligonucleotide
  Target: LAMA2; (+) strand; PAM type: YTN; PAM sequence: CTG
ggataatatttatctacata

SEQ ID NO: 393946 - DNA, 20 bp, Artificial Sequence
  Description of Artificial Sequence: Synthetic oligonucleotide
  Target: LAMA2; (+) strand; PAM type: YTN; PAM sequence: TTT
atctacatatctgtcaggta

SEQ ID NO: 393947 - DNA, 20 bp, Artificial Sequence
  Description of Artificial Sequence: Synthetic oligonucleotide
  Target: LAMA2; (+) strand; PAM type: YTN; PAM sequence: TTA
tctacatatctgtcaggtac

SEQ ID NO: 393948 - DNA, 20 bp, Artificial Sequence
  Description of Artificial Sequence: Synthetic oligonucleotide
  Target: LAMA2; (+) strand; PAM type: YTN; PAM sequence: CTA
catatctgtcaggtacctac

SEQ ID NO: 393949 - DNA, 20 bp, Artificial Sequence
  Description of Artificial Sequence: Synthetic oligonucleotide
  Target: LAMA2; (+) strand; PAM type: YTN; PAM sequence: CTG
tcaggtacctaccatatcaa

SEQ ID NO: 393950 - DNA, 20 bp, Artificial Sequence
  Description of Artificial Sequence: Synthetic oligonucleotide
  Target: LAMA2; (+) strand; PAM type: YTN; PAM sequence: CTA
ccatatcaaggtactgttgg

SEQ ID NO: 393951 - DNA, 20 bp, Artificial Sequence
  Description of Artificial Sequence: Synthetic oligonucleotide
  Target: LAMA2; (+) strand; PAM type: YTN; PAM sequence: CTG
ttggtaaccagggtatttga

SEQ ID NO: 393952 - DNA, 20 bp, Artificial Sequence
  Description of Artificial Sequence: Synthetic oligonucleotide
  Target: LAMA2; (+) strand; PAM type: YTN; PAM sequence: TTG
gtaaccagggtatttgaggt

SEQ ID NO: 393953 - DNA, 20 bp, Artificial Sequence
  Description of Artificial Sequence: Synthetic oligonucleotide
  Target: LAMA2; (+) strand; PAM type: YTN; PAM sequence: TTT
gaggttgaatagaaatgatt

SEQ ID NO: 393954 - DNA, 20 bp, Artificial Sequence
  Description of Artificial Sequence: Synthetic oligonucleotide
  Target: LAMA2; (+) strand; PAM type: YTN; PAM sequence: TTG
aggttgaatagaaatgattc

SEQ ID NO: 393955 - DNA, 20 bp, Artificial Sequence
  Description of Artificial Sequence: Synthetic oligonucleotide
  Target: LAMA2; (+) strand; PAM type: YTN; PAM sequence: TTG
aatagaaatgattcctggcc

SEQ ID NO: 393956 - DNA, 20 bp, Artificial Sequence
  Description of Artificial Sequence: Synthetic oligonucleotide
  Target: LAMA2; (+) strand; PAM type: YTN; PAM sequence: TTC
ctggcctcaaagaatttaca

SEQ ID NO: 393957 - DNA, 20 bp, Artificial Sequence
  Description of Artificial Sequence: Synthetic oligonucleotide
  Target: LAMA2; (+) strand; PAM type: YTN; PAM sequence: CTG
gcctcaaagaatttacaacc

SEQ ID NO: 393958 - DNA, 20 bp, Artificial Sequence
  Description of Artificial Sequence: Synthetic oligonucleotide
  Target: LAMA2; (+) strand; PAM type: YTN; PAM sequence: CTC
aaagaatttacaacctcctg

SEQ ID NO: 393959 - DNA, 20 bp, Artificial Sequence
  Description of Artificial Sequence: Synthetic oligonucleotide
  Target: LAMA2; (+) strand; PAM type: YTN; PAM sequence: TTT
acaacctcctgaaaaattca

SEQ ID NO: 393960 - DNA, 20 bp, Artificial Sequence
  Description of Artificial Sequence: Synthetic oligonucleotide
  Target: LAMA2; (+) strand; PAM type: YTN; PAM sequence: TTA
caacctcctgaaaaattcag

SEQ ID NO: 393961 - DNA, 20 bp, Artificial Sequence
  Description of Artificial Sequence: Synthetic oligonucleotide
  Target: LAMA2; (+) strand; PAM type: YTN; PAM sequence: CTC
ctgaaaaattcagacatgtc

SEQ ID NO: 393962 - DNA, 20 bp, Artificial Sequence
  Description of Artificial Sequence: Synthetic oligonucleotide
  Target: LAMA2; (+) strand; PAM type: YTN; PAM sequence: CTG
aaaaattcagacatgtcaac

SEQ ID NO: 393963 - DNA, 20 bp, Artificial Sequence
  Description of Artificial Sequence: Synthetic oligonucleotide
  Target: LAMA2; (+) strand; PAM type: YTN; PAM sequence: TTC
agacatgtcaacctttcact

SEQ ID NO: 393964 - DNA, 20 bp, Artificial Sequence
  Description of Artificial Sequence: Synthetic oligonucleotide
  Target: LAMA2; (+) strand; PAM type: YTN; PAM sequence: CTT
tcactctacataatactatg

SEQ ID NO: 393965 - DNA, 20 bp, Artificial Sequence
  Description of Artificial Sequence: Synthetic oligonucleotide
  Target: LAMA2; (+) strand; PAM type: YTN; PAM sequence: TTT
cactctacataatactatga

SEQ ID NO: 393966 - DNA, 20 bp, Artificial Sequence
  Description of Artificial Sequence: Synthetic oligonucleotide
  Target: LAMA2; (+) strand; PAM type: YTN; PAM sequence: TTC
actctacataatactatgat

SEQ ID NO: 393967 - DNA, 20 bp, Artificial Sequence
  Description of Artificial Sequence: Synthetic oligonucleotide
  Target: LAMA2; (+) strand; PAM type: YTN; PAM sequence: CTC
tacataatactatgataata

SEQ ID NO: 393968 - DNA, 20 bp, Artificial Sequence
  Description of Artificial Sequence: Synthetic oligonucleotide
  Target: LAMA2; (+) strand; PAM type: YTN; PAM sequence: CTA
cataatactatgataatatt

SEQ ID NO: 393969 - DNA, 20 bp, Artificial Sequence
  Description of Artificial Sequence: Synthetic oligonucleotide
  Target: LAMA2; (+) strand; PAM type: YTN; PAM sequence: CTA
tgataatattgactgggaga

SEQ ID NO: 393970 - DNA, 20 bp, Artificial Sequence
  Description of Artificial Sequence: Synthetic oligonucleotide
  Target: LAMA2; (+) strand; PAM type: YTN; PAM sequence: TTG
actgggagattcagcaaaag

SEQ ID NO: 393971 - DNA, 20 bp, Artificial Sequence
  Description of Artificial Sequence: Synthetic oligonucleotide
  Target: LAMA2; (+) strand; PAM type: YTN; PAM sequence: CTG
ggagattcagcaaaagtttc

SEQ ID NO: 393972 - DNA, 20 bp, Artificial Sequence
  Description of Artificial Sequence: Synthetic oligonucleotide
  Target: LAMA2; (+) strand; PAM type: YTN; PAM sequence: TTC
agcaaaagtttcacaaaaat

SEQ ID NO: 393973 - DNA, 20 bp, Artificial Sequence
  Description of Artificial Sequence: Synthetic oligonucleotide
  Target: LAMA2; (+) strand; PAM type: YTN; PAM sequence: TTT
cacaaaaataacagcatcat

SEQ ID NO: 393974 - DNA, 20 bp, Artificial Sequence
  Description of Artificial Sequence: Synthetic oligonucleotide
  Target: LAMA2; (+) strand; PAM type: YTN; PAM sequence: TTC
acaaaaataacagcatcata

SEQ ID NO: 393975 - DNA, 20 bp, Artificial Sequence
  Description of Artificial Sequence: Synthetic oligonucleotide
  Target: LAMA2; (+) strand; PAM type: YTN; PAM sequence: TTG
gaagaaagacagagcaacag

SEQ ID NO: 393976 - DNA, 20 bp, Artificial Sequence
  Description of Artificial Sequence: Synthetic oligonucleotide
  Target: LAMA2; (+) strand; PAM type: YTN; PAM sequence: CTT
tggaagtgtaaggtgatctt

SEQ ID NO: 393977 - DNA, 20 bp, Artificial Sequence
  Description of Artificial Sequence: Synthetic oligonucleotide
  Target: LAMA2; (+) strand; PAM type: YTN; PAM sequence: TTT
ggaagtgtaaggtgatctta

SEQ ID NO: 393978 - DNA, 20 bp, Artificial Sequence
  Description of Artificial Sequence: Synthetic oligonucleotide
  Target: LAMA2; (+) strand; PAM type: YTN; PAM sequence: TTG
gaagtgtaaggtgatcttag

SEQ ID NO: 393979 - DNA, 20 bp, Artificial Sequence
  Description of Artificial Sequence: Synthetic oligonucleotide
  Target: LAMA2; (+) strand; PAM type: YTN; PAM sequence: CTT
aggaagtgtccagtacagca

SEQ ID NO: 393980 - DNA, 20 bp, Artificial Sequence
  Description of Artificial Sequence: Synthetic oligonucleotide
  Target: LAMA2; (+) strand; PAM type: YTN; PAM sequence: TTA
ggaagtgtccagtacagcag

SEQ ID NO: 393981 - DNA, 20 bp, Artificial Sequence
  Description of Artificial Sequence: Synthetic oligonucleotide
  Target: LAMA2; (+) strand; PAM type: YTN; PAM sequence: CTT
tcaaaagctacgtaaaaatc

SEQ ID NO: 393982 - DNA, 20 bp, Artificial Sequence
  Description of Artificial Sequence: Synthetic oligonucleotide
  Target: LAMA2; (+) strand; PAM type: YTN; PAM sequence: TTT
caaaagctacgtaaaaatct

SEQ ID NO: 393983 - DNA, 20 bp, Artificial Sequence
  Description of Artificial Sequence: Synthetic oligonucleotide
  Target: LAMA2; (+) strand; PAM type: YTN; PAM sequence: TTC
aaaagctacgtaaaaatctg

SEQ ID NO: 393984 - DNA, 20 bp, Artificial Sequence
  Description of Artificial Sequence: Synthetic oligonucleotide
  Target: LAMA2; (+) strand; PAM type: YTN; PAM sequence: CTA
cgtaaaaatctgtagcagag

SEQ ID NO: 393985 - DNA, 20 bp, Artificial Sequence
  Description of Artificial Sequence: Synthetic oligonucleotide
  Target: LAMA2; (+) strand; PAM type: YTN; PAM sequence: CTG
tagcagagaaggctctggaa

SEQ ID NO: 393986 - DNA, 20 bp, Artificial Sequence
  Description of Artificial Sequence: Synthetic oligonucleotide
  Target: LAMA2; (+) strand; PAM type: YTN; PAM sequence: CTC
tggaatttggagccagatca

SEQ ID NO: 393987 - DNA, 20 bp, Artificial Sequence
  Description of Artificial Sequence: Synthetic oligonucleotide
  Target: LAMA2; (+) strand; PAM type: YTN; PAM sequence: CTG
gaatttggagccagatcata

SEQ ID NO: 393988 - DNA, 20 bp, Artificial Sequence
  Description of Artificial Sequence: Synthetic oligonucleotide
  Target: LAMA2; (+) strand; PAM type: YTN; PAM sequence: TTT
ggagccagatcatagaaggc

SEQ ID NO: 393989 - DNA, 20 bp, Artificial Sequence
  Description of Artificial Sequence: Synthetic oligonucleotide
  Target: LAMA2; (+) strand; PAM type: YTN; PAM sequence: TTG
gagccagatcatagaaggct

SEQ ID NO: 393990 - DNA, 20 bp, Artificial Sequence
  Description of Artificial Sequence: Synthetic oligonucleotide
  Target: LAMA2; (+) strand; PAM type: YTN; PAM sequence: CTT
tggatgcagccaactagatg

SEQ ID NO: 393991 - DNA, 20 bp, Artificial Sequence
  Description of Artificial Sequence: Synthetic oligonucleotide
  Target: LAMA2; (+) strand; PAM type: YTN; PAM sequence: TTT
ggatgcagccaactagatgg

SEQ ID NO: 393992 - DNA, 20 bp, Artificial Sequence
  Description of Artificial Sequence: Synthetic oligonucleotide
  Target: LAMA2; (+) strand; PAM type: YTN; PAM sequence: TTG
gatgcagccaactagatggt

SEQ ID NO: 393993 - DNA, 20 bp, Artificial Sequence
  Description of Artificial Sequence: Synthetic oligonucleotide
  Target: LAMA2; (+) strand; PAM type: YTN; PAM sequence: CTA
gatggtgatggagttggaaa

SEQ ID NO: 393994 - DNA, 20 bp, Artificial Sequence
  Description of Artificial Sequence: Synthetic oligonucleotide
  Target: LAMA2; (+) strand; PAM type: YTN; PAM sequence: TTG
gaaaggcatttccagcagtg

SEQ ID NO: 393995 - DNA, 20 bp, Artificial Sequence
  Description of Artificial Sequence: Synthetic oligonucleotide
  Target: LAMA2; (+) strand; PAM type: YTN; PAM sequence: TTT
ccagcagtggagagagggct

SEQ ID NO: 393996 - DNA, 20 bp, Artificial Sequence
  Description of Artificial Sequence: Synthetic oligonucleotide
  Target: LAMA2; (+) strand; PAM type: YTN; PAM sequence: TTC
cagcagtggagagagggcta

SEQ ID NO: 393997 - DNA, 20 bp, Artificial Sequence
  Description of Artificial Sequence: Synthetic oligonucleotide
  Target: LAMA2; (+) strand; PAM type: YTN; PAM sequence: CTA
agggaactggggacgtcatg

SEQ ID NO: 393998 - DNA, 20 bp, Artificial Sequence
  Description of Artificial Sequence: Synthetic oligonucleotide
  Target: LAMA2; (+) strand; PAM type: YTN; PAM sequence: CTG
gggacgtcatgggaagaaaa

SEQ ID NO: 393999 - DNA, 20 bp, Artificial Sequence
  Description of Artificial Sequence: Synthetic oligonucleotide
  Target: LAMA2; (+) strand; PAM type: YTN; PAM sequence: TTT
cagtgaagcaaaataatatg

SEQ ID NO: 394000 - DNA, 20 bp, Artificial Sequence
  Description of Artificial Sequence: Synthetic oligonucleotide
  Target: LAMA2; (+) strand; PAM type: YTN; PAM sequence: TTC
agtgaagcaaaataatatgt

SEQ ID NO: 394001 - DNA, 20 bp, Artificial Sequence
  Description of Artificial Sequence: Synthetic oligonucleotide
  Target: LAMA2; (+) strand; PAM type: YTN; PAM sequence: TTG
agcagtctatccccaaatct

SEQ ID NO: 394002 - DNA, 20 bp, Artificial Sequence
  Description of Artificial Sequence: Synthetic oligonucleotide
  Target: LAMA2; (+) strand; PAM type: YTN; PAM sequence: CTA
tccccaaatctaccattata

SEQ ID NO: 394003 - DNA, 20 bp, Artificial Sequence
  Description of Artificial Sequence: Synthetic oligonucleotide
  Target: LAMA2; (+) strand; PAM type: YTN; PAM sequence: CTA
ccattatatccttgccaaag

SEQ ID NO: 394004 - DNA, 20 bp, Artificial Sequence
  Description of Artificial Sequence: Synthetic oligonucleotide
  Target: LAMA2; (+) strand; PAM type: YTN; PAM sequence: TTA
tatccttgccaaagaaggca

SEQ ID NO: 394005 - DNA, 20 bp, Artificial Sequence
  Description of Artificial Sequence: Synthetic oligonucleotide
  Target: LAMA2; (+) strand; PAM type: YTN; PAM sequence: CTT
gccaaagaaggcagtgcgga

SEQ ID NO: 394006 - DNA, 20 bp, Artificial Sequence
  Description of Artificial Sequence: Synthetic oligonucleotide
  Target: LAMA2; (+) strand; PAM type: YTN; PAM sequence: TTG
ccaaagaaggcagtgcggat

SEQ ID NO: 394007 - DNA, 20 bp, Artificial Sequence
  Description of Artificial Sequence: Synthetic oligonucleotide
  Target: LAMA2; (+) strand; PAM type: YTN; PAM sequence: TTG
ctacataaagaatacacagg

SEQ ID NO: 394008 - DNA, 20 bp, Artificial Sequence
  Description of Artificial Sequence: Synthetic oligonucleotide
  Target: LAMA2; (+) strand; PAM type: YTN; PAM sequence: CTA
cataaagaatacacaggcca

SEQ ID NO: 394009 - DNA, 20 bp, Artificial Sequence
  Description of Artificial Sequence: Synthetic oligonucleotide
  Target: LAMA2; (+) strand; PAM type: YTN; PAM sequence: CTG
agcaacatggtgacacccta

SEQ ID NO: 394010 - DNA, 20 bp, Artificial Sequence
  Description of Artificial Sequence: Synthetic oligonucleotide
  Target: LAMA2; (+) strand; PAM type: YTN; PAM sequence: CTA
tctctatagaaaaatacaaa

SEQ ID NO: 394011 - DNA, 20 bp, Artificial Sequence
  Description of Artificial Sequence: Synthetic oligonucleotide
  Target: LAMA2; (+) strand; PAM type: YTN; PAM sequence: CTC
tatagaaaaatacaaaaatt

SEQ ID NO: 394012 - DNA, 20 bp, Artificial Sequence
  Description of Artificial Sequence: Synthetic oligonucleotide
  Target: LAMA2; (+) strand; PAM type: YTN; PAM sequence: CTA
tagaaaaatacaaaaattag

SEQ ID NO: 394013 - DNA, 20 bp, Artificial Sequence
  Description of Artificial Sequence: Synthetic oligonucleotide
  Target: LAMA2; (+) strand; PAM type: YTN; PAM sequence: TTA
gtcgggcatggtggtgcatg

SEQ ID NO: 394014 - DNA, 20 bp, Artificial Sequence
  Description of Artificial Sequence: Synthetic oligonucleotide
  Target: LAMA2; (+) strand; PAM type: YTN; PAM sequence: CTG
tggtcccagctacttggagg

SEQ ID NO: 394015 - DNA, 20 bp, Artificial Sequence
  Description of Artificial Sequence: Synthetic oligonucleotide
  Target: LAMA2; (+) strand; PAM type: YTN; PAM sequence: CTA
cttggaggctgaggtgggag

SEQ ID NO: 394016 - DNA, 20 bp, Artificial Sequence
  Description of Artificial Sequence: Synthetic oligonucleotide
  Target: LAMA2; (+) strand; PAM type: YTN; PAM sequence: CTT
ggaggctgaggtgggaggat

SEQ ID NO: 394017 - DNA, 20 bp, Artificial Sequence
  Description of Artificial Sequence: Synthetic oligonucleotide
  Target: LAMA2; (+) strand; PAM type: YTN; PAM sequence: TTG
gaggctgaggtgggaggatt

SEQ ID NO: 394018 - DNA, 20 bp, Artificial Sequence
  Description of Artificial Sequence: Synthetic oligonucleotide
  Target: LAMA2; (+) strand; PAM type: YTN; PAM sequence: CTG
aggtgggaggattgcttgag

SEQ ID NO: 394019 - DNA, 20 bp, Artificial Sequence
  Description of Artificial Sequence: Synthetic oligonucleotide
  Target: LAMA2; (+) strand; PAM type: YTN; PAM sequence: TTG
cttgagcccagaagtttgag

SEQ ID NO: 394020 - DNA, 20 bp, Artificial Sequence
  Description of Artificial Sequence: Synthetic oligonucleotide
  Target: LAMA2; (+) strand; PAM type: YTN; PAM sequence: CTT
gagcccagaagtttgagcct

SEQ ID NO: 394021 - DNA, 20 bp, Artificial Sequence
  Description of Artificial Sequence: Synthetic oligonucleotide
  Target: LAMA2; (+) strand; PAM type: YTN; PAM sequence: TTG
agcccagaagtttgagcctg

SEQ ID NO: 394022 - DNA, 20 bp, Artificial Sequence
  Description of Artificial Sequence: Synthetic oligonucleotide
  Target: LAMA2; (+) strand; PAM type: YTN; PAM sequence: TTT
gagcctgcagtgagctgtga

SEQ ID NO: 394023 - DNA, 20 bp, Artificial Sequence
  Description of Artificial Sequence: Synthetic oligonucleotide
  Target: LAMA2; (+) strand; PAM type: YTN; PAM sequence: TTG
agcctgcagtgagctgtgat

SEQ ID NO: 394024 - DNA, 20 bp, Artificial Sequence
  Description of Artificial Sequence: Synthetic oligonucleotide
  Target: LAMA2; (+) strand; PAM type: YTN; PAM sequence: CTG
cagtgagctgtgatcatgcc

SEQ ID NO: 394025 - DNA, 20 bp, Artificial Sequence
  Description of Artificial Sequence: Synthetic oligonucleotide
  Target: LAMA2; (+) strand; PAM type: YTN; PAM sequence: CTG
tgatcatgccacagcactcc

SEQ ID NO: 394026 - DNA, 20 bp, Artificial Sequence
  Description of Artificial Sequence: Synthetic oligonucleotide
  Target: LAMA2; (+) strand; PAM type: YTN; PAM sequence: CTC
cagcctggatgacagtgaga

SEQ ID NO: 394027 - DNA, 20 bp, Artificial Sequence
  Description of Artificial Sequence: Synthetic oligonucleotide
  Target: LAMA2; (+) strand; PAM type: YTN; PAM sequence: CTG
gatgacagtgagacaatgag

SEQ ID NO: 394028 - DNA, 20 bp, Artificial Sequence
  Description of Artificial Sequence: Synthetic oligonucleotide
  Target: LAMA2; (+) strand; PAM type: YTN; PAM sequence: CTC
aaaaaaaaaaaaaaagaaaa

SEQ ID NO: 394029 - DNA, 20 bp, Artificial Sequence
  Description of Artificial Sequence: Synthetic oligonucleotide
  Target: LAMA2; (+) strand; PAM type: YTN; PAM sequence: CTT
ttgcaggttcctgaagaatc

SEQ ID NO: 394030 - DNA, 20 bp, Artificial Sequence
  Description of Artificial Sequence: Synthetic oligonucleotide
  Target: LAMA2; (+) strand; PAM type: YTN; PAM sequence: TTT
tgcaggttcctgaagaatct

SEQ ID NO: 394031 - DNA, 20 bp, Artificial Sequence
  Description of Artificial Sequence: Synthetic oligonucleotide
  Target: LAMA2; (+) strand; PAM type: YTN; PAM sequence: TTT
gcaggttcctgaagaatcta

SEQ ID NO: 394032 - DNA, 20 bp, Artificial Sequence
  Description of Artificial Sequence: Synthetic oligonucleotide
  Target: LAMA2; (+) strand; PAM type: YTN; PAM sequence: TTG
caggttcctgaagaatctac

SEQ ID NO: 394033 - DNA, 20 bp, Artificial Sequence
  Description of Artificial Sequence: Synthetic oligonucleotide
  Target: LAMA2; (+) strand; PAM type: YTN; PAM sequence: TTC
ctgaagaatctaccacacca

SEQ ID NO: 394034 - DNA, 20 bp, Artificial Sequence
  Description of Artificial Sequence: Synthetic oligonucleotide
  Target: LAMA2; (+) strand; PAM type: YTN; PAM sequence: CTG
aagaatctaccacaccaaca

SEQ ID NO: 394035 - DNA, 20 bp, Artificial Sequence
  Description of Artificial Sequence: Synthetic oligonucleotide
  Target: LAMA2; (+) strand; PAM type: YTN; PAM sequence: CTA
ccacaccaacacaccaaaaa

SEQ ID NO: 394036 - DNA, 20 bp, Artificial Sequence
  Description of Artificial Sequence: Synthetic oligonucleotide
  Target: LAMA2; (+) strand; PAM type: YTN; PAM sequence: TTT
gcaaagctctggaataaata

SEQ ID NO: 394037 - DNA, 20 bp, Artificial Sequence
  Description of Artificial Sequence: Synthetic oligonucleotide
  Target: LAMA2; (+) strand; PAM type: YTN; PAM sequence: TTG
caaagctctggaataaataa

SEQ ID NO: 394038 - DNA, 20 bp, Artificial Sequence
  Description of Artificial Sequence: Synthetic oligonucleotide
  Target: LAMA2; (+) strand; PAM type: YTN; PAM sequence: CTC
tggaataaataaagatctaa

SEQ ID NO: 394039 - DNA, 20 bp, Artificial Sequence
  Description of Artificial Sequence: Synthetic oligonucleotide
  Target: LAMA2; (+) strand; PAM type: YTN; PAM sequence: CTG
gaataaataaagatctaatt

SEQ ID NO: 394040 - DNA, 20 bp, Artificial Sequence
  Description of Artificial Sequence: Synthetic oligonucleotide
  Target: LAMA2; (+) strand; PAM type: YTN; PAM sequence: CTA
attaattacaagttaaaagt

SEQ ID NO: 394041 - DNA, 20 bp, Artificial Sequence
  Description of Artificial Sequence: Synthetic oligonucleotide
  Target: LAMA2; (+) strand; PAM type: YTN; PAM sequence: TTA
attacaagttaaaagtagaa

SEQ ID NO: 394042 - DNA, 20 bp, Artificial Sequence
  Description of Artificial Sequence: Synthetic oligonucleotide
  Target: LAMA2; (+) strand; PAM type: YTN; PAM sequence: TTA
caagttaaaagtagaaatat

SEQ ID NO: 394043 - DNA, 20 bp, Artificial Sequence
  Description of Artificial Sequence: Synthetic oligonucleotide
  Target: LAMA2; (+) strand; PAM type: YTN; PAM sequence: TTA
aaagtagaaatataatcaac

SEQ ID NO: 394044 - DNA, 20 bp, Artificial Sequence
  Description of Artificial Sequence: Synthetic oligonucleotide
  Target: LAMA2; (+) strand; PAM type: YTN; PAM sequence: CTT
catatccaaacaataattga

SEQ ID NO: 394045 - DNA, 20 bp, Artificial Sequence
  Description of Artificial Sequence: Synthetic oligonucleotide
  Target: LAMA2; (+) strand; PAM type: YTN; PAM sequence: TTC
atatccaaacaataattgag

SEQ ID NO: 394046 - DNA, 20 bp, Artificial Sequence
  Description of Artificial Sequence: Synthetic oligonucleotide
  Target: LAMA2; (+) strand; PAM type: YTN; PAM sequence: TTG
agcaattatacttatgccat

SEQ ID NO: 394047 - DNA, 20 bp, Artificial Sequence
  Description of Artificial Sequence: Synthetic oligonucleotide
  Target: LAMA2; (+) strand; PAM type: YTN; PAM sequence: TTA
tacttatgccatactttttg

SEQ ID NO: 394048 - DNA, 20 bp, Artificial Sequence
  Description of Artificial Sequence: Synthetic oligonucleotide
  Target: LAMA2; (+) strand; PAM type: YTN; PAM sequence: CTT
atgccatactttttgtagaa

SEQ ID NO: 394049 - DNA, 20 bp, Artificial Sequence
  Description of Artificial Sequence: Synthetic oligonucleotide
  Target: LAMA2; (+) strand; PAM type: YTN; PAM sequence: TTA
tgccatactttttgtagaat

SEQ ID NO: 394050 - DNA, 20 bp, Artificial Sequence
  Description of Artificial Sequence: Synthetic oligonucleotide
  Target: LAMA2; (+) strand; PAM type: YTN; PAM sequence: CTT
tttgtagaataattctccct

SEQ ID NO: 394051 - DNA, 20 bp, Artificial Sequence
  Description of Artificial Sequence: Synthetic oligonucleotide
  Target: LAMA2; (+) strand; PAM type: YTN; PAM sequence: TTT
ttgtagaataattctcccta

SEQ ID NO: 394052 - DNA, 20 bp, Artificial Sequence
  Description of Artificial Sequence: Synthetic oligonucleotide
  Target: LAMA2; (+) strand; PAM type: YTN; PAM sequence: TTT
tgtagaataattctccctat

SEQ ID NO: 394053 - DNA, 20 bp, Artificial Sequence
  Description of Artificial Sequence: Synthetic oligonucleotide
  Target: LAMA2; (+) strand; PAM type: YTN; PAM sequence: TTT
gtagaataattctccctata

SEQ ID NO: 394054 - DNA, 20 bp, Artificial Sequence
  Description of Artificial Sequence: Synthetic oligonucleotide
  Target: LAMA2; (+) strand; PAM type: YTN; PAM sequence: TTG
tagaataattctccctatac

SEQ ID NO: 394055 - DNA, 20 bp, Artificial Sequence
  Description of Artificial Sequence: Synthetic oligonucleotide
  Target: LAMA2; (+) strand; PAM type: YTN; PAM sequence: TTC
tccctatacataggccttct

SEQ ID NO: 394056 - DNA, 20 bp, Artificial Sequence
  Description of Artificial Sequence: Synthetic oligonucleotide
  Target: LAMA2; (+) strand; PAM type: YTN; PAM sequence: CTC
cctatacataggccttcttt

SEQ ID NO: 394057 - DNA, 20 bp, Artificial Sequence
  Description of Artificial Sequence: Synthetic oligonucleotide
  Target: LAMA2; (+) strand; PAM type: YTN; PAM sequence: CTA
tacataggccttctttctgt

SEQ ID NO: 394058 - DNA, 20 bp, Artificial Sequence
  Description of Artificial Sequence: Synthetic oligonucleotide
  Target: LAMA2; (+) strand; PAM type: YTN; PAM sequence: CTT
ctttctgtttcttaaatact

SEQ ID NO: 394059 - DNA, 20 bp, Artificial Sequence
  Description of Artificial Sequence: Synthetic oligonucleotide
  Target: LAMA2; (+) strand; PAM type: YTN; PAM sequence: TTC
tttctgtttcttaaatactc

SEQ ID NO: 394060 - DNA, 20 bp, Artificial Sequence
  Description of Artificial Sequence: Synthetic oligonucleotide
  Target: LAMA2; (+) strand; PAM type: YTN; PAM sequence: CTT
tctgtttcttaaatactcta

SEQ ID NO: 394061 - DNA, 20 bp, Artificial Sequence
  Description of Artificial Sequence: Synthetic oligonucleotide
  Target: LAMA2; (+) strand; PAM type: YTN; PAM sequence: TTT
ctgtttcttaaatactctaa

SEQ ID NO: 394062 - DNA, 20 bp, Artificial Sequence
  Description of Artificial Sequence: Synthetic oligonucleotide
  Target: LAMA2; (+) strand; PAM type: YTN; PAM sequence: TTC
tgtttcttaaatactctaag

SEQ ID NO: 394063 - DNA, 20 bp, Artificial Sequence
  Description of Artificial Sequence: Synthetic oligonucleotide
  Target: LAMA2; (+) strand; PAM type: YTN; PAM sequence: CTG
tttcttaaatactctaagtt

SEQ ID NO: 394064 - DNA, 20 bp, Artificial Sequence
  Description of Artificial Sequence: Synthetic oligonucleotide
  Target: LAMA2; (+) strand; PAM type: YTN; PAM sequence: TTT
cttaaatactctaagtttcc

SEQ ID NO: 394065 - DNA, 20 bp, Artificial Sequence
  Description of Artificial Sequence: Synthetic oligonucleotide
  Target: LAMA2; (+) strand; PAM type: YTN; PAM sequence: TTC
ttaaatactctaagtttcct

SEQ ID NO: 394066 - DNA, 20 bp, Artificial Sequence
  Description of Artificial Sequence: Synthetic oligonucleotide
  Target: LAMA2; (+) strand; PAM type: YTN; PAM sequence: CTT
aaatactctaagtttcctat

SEQ ID NO: 394067 - DNA, 20 bp, Artificial Sequence
  Description of Artificial Sequence: Synthetic oligonucleotide
  Target: LAMA2; (+) strand; PAM type: YTN; PAM sequence: TTA
aatactctaagtttcctatc

SEQ ID NO: 394068 - DNA, 20 bp, Artificial Sequence
  Description of Artificial Sequence: Synthetic oligonucleotide
  Target: LAMA2; (+) strand; PAM type: YTN; PAM sequence: CTC
taagtttcctatcttaggta

SEQ ID NO: 394069 - DNA, 20 bp, Artificial Sequence
  Description of Artificial Sequence: Synthetic oligonucleotide
  Target: LAMA2; (+) strand; PAM type: YTN; PAM sequence: CTA
agtttcctatcttaggtatt

SEQ ID NO: 394070 - DNA, 20 bp, Artificial Sequence
  Description of Artificial Sequence: Synthetic oligonucleotide
  Target: LAMA2; (+) strand; PAM type: YTN; PAM sequence: TTT
cctatcttaggtattttata

SEQ ID NO: 394071 - DNA, 20 bp, Artificial Sequence
  Description of Artificial Sequence: Synthetic oligonucleotide
  Target: LAMA2; (+) strand; PAM type: YTN; PAM sequence: TTC
ctatcttaggtattttatat

SEQ ID NO: 394072 - DNA, 20 bp, Artificial Sequence
  Description of Artificial Sequence: Synthetic oligonucleotide
  Target: LAMA2; (+) strand; PAM type: YTN; PAM sequence: CTA
tcttaggtattttatatgct

SEQ ID NO: 394073 - DNA, 20 bp, Artificial Sequence
  Description of Artificial Sequence: Synthetic oligonucleotide
  Target: LAMA2; (+) strand; PAM type: YTN; PAM sequence: CTT
aggtattttatatgctacat

SEQ ID NO: 394074 - DNA, 20 bp, Artificial Sequence
  Description of Artificial Sequence: Synthetic oligonucleotide
  Target: LAMA2; (+) strand; PAM type: YTN; PAM sequence: TTA
ggtattttatatgctacatc

SEQ ID NO: 394075 - DNA, 20 bp, Artificial Sequence
  Description of Artificial Sequence: Synthetic oligonucleotide
  Target: LAMA2; (+) strand; PAM type: YTN; PAM sequence: TTT
tatatgctacatcattttct

SEQ ID NO: 394076 - DNA, 20 bp, Artificial Sequence
  Description of Artificial Sequence: Synthetic oligonucleotide
  Target: LAMA2; (+) strand; PAM type: YTN; PAM sequence: TTT
atatgctacatcattttcta

SEQ ID NO: 394077 - DNA, 20 bp, Artificial Sequence
  Description of Artificial Sequence: Synthetic oligonucleotide
  Target: LAMA2; (+) strand; PAM type: YTN; PAM sequence: TTA
tatgctacatcattttctat

SEQ ID NO: 394078 - DNA, 20 bp, Artificial Sequence
  Description of Artificial Sequence: Synthetic oligonucleotide
  Target: LAMA2; (+) strand; PAM type: YTN; PAM sequence: CTA
catcattttctatctgtgcc

SEQ ID NO: 394079 - DNA, 20 bp, Artificial Sequence
  Description of Artificial Sequence: Synthetic oligonucleotide
  Target: LAMA2; (+) strand; PAM type: YTN; PAM sequence: TTT
tctatctgtgcctctctttg

SEQ ID NO: 394080 - DNA, 20 bp, Artificial Sequence
  Description of Artificial Sequence: Synthetic oligonucleotide
  Target: LAMA2; (+) strand; PAM type: YTN; PAM sequence: TTT
ctatctgtgcctctctttgt

SEQ ID NO: 394081 - DNA, 20 bp, Artificial Sequence
  Description of Artificial Sequence: Synthetic oligonucleotide
  Target: LAMA2; (+) strand; PAM type: YTN; PAM sequence: TTC
tatctgtgcctctctttgtt

SEQ ID NO: 394082 - DNA, 20 bp, Artificial Sequence
  Description of Artificial Sequence: Synthetic oligonucleotide
  Target: LAMA2; (+) strand; PAM type: YTN; PAM sequence: CTA
tctgtgcctctctttgtttt

SEQ ID NO: 394083 - DNA, 20 bp, Artificial Sequence
  Description of Artificial Sequence: Synthetic oligonucleotide
  Target: LAMA2; (+) strand; PAM type: YTN; PAM sequence: CTG
tgcctctctttgtttttatt

SEQ ID NO: 394084 - DNA, 20 bp, Artificial Sequence
  Description of Artificial Sequence: Synthetic oligonucleotide
  Target: LAMA2; (+) strand; PAM type: YTN; PAM sequence: CTC
tctttgtttttattgtactc

SEQ ID NO: 394085 - DNA, 20 bp, Artificial Sequence
  Description of Artificial Sequence: Synthetic oligonucleotide
  Target: LAMA2; (+) strand; PAM type: YTN; PAM sequence: CTC
tttgtttttattgtactcat

SEQ ID NO: 394086 - DNA, 20 bp, Artificial Sequence
  Description of Artificial Sequence: Synthetic oligonucleotide
  Target: LAMA2; (+) strand; PAM type: YTN; PAM sequence: CTT
tgtttttattgtactcatct

SEQ ID NO: 394087 - DNA, 20 bp, Artificial Sequence
  Description of Artificial Sequence: Synthetic oligonucleotide
  Target: LAMA2; (+) strand; PAM type: YTN; PAM sequence: TTT
gtttttattgtactcatcta

SEQ ID NO: 394088 - DNA, 20 bp, Artificial Sequence
  Description of Artificial Sequence: Synthetic oligonucleotide
  Target: LAMA2; (+) strand; PAM type: YTN; PAM sequence: TTG
tttttattgtactcatctaa

SEQ ID NO: 394089 - DNA, 20 bp, Artificial Sequence
  Description of Artificial Sequence: Synthetic oligonucleotide
  Target: LAMA2; (+) strand; PAM type: YTN; PAM sequence: TTT
ttattgtactcatctaatct

SEQ ID NO: 394090 - DNA, 20 bp, Artificial Sequence
  Description of Artificial Sequence: Synthetic oligonucleotide
  Target: LAMA2; (+) strand; PAM type: YTN; PAM sequence: TTT
tattgtactcatctaatctt

SEQ ID NO: 394091 - DNA, 20 bp, Artificial Sequence
  Description of Artificial Sequence: Synthetic oligonucleotide
  Target: LAMA2; (+) strand; PAM type: YTN; PAM sequence: TTT
attgtactcatctaatcttt

SEQ ID NO: 394092 - DNA, 20 bp, Artificial Sequence
  Description of Artificial Sequence: Synthetic oligonucleotide
  Target: LAMA2; (+) strand; PAM type: YTN; PAM sequence: TTA
ttgtactcatctaatctttc

SEQ ID NO: 394093 - DNA, 20 bp, Artificial Sequence
  Description of Artificial Sequence: Synthetic oligonucleotide
  Target: LAMA2; (+) strand; PAM type: YTN; PAM sequence: TTG
tactcatctaatctttcttt

SEQ ID NO: 394094 - DNA, 20 bp, Artificial Sequence
  Description of Artificial Sequence: Synthetic oligonucleotide
  Target: LAMA2; (+) strand; PAM type: YTN; PAM sequence: CTC
atctaatctttctttaagaa

SEQ ID NO: 394095 - DNA, 20 bp, Artificial Sequence
  Description of Artificial Sequence: Synthetic oligonucleotide
  Target: LAMA2; (+) strand; PAM type: YTN; PAM sequence: CTA
atctttctttaagaatatat

SEQ ID NO: 394096 - DNA, 20 bp, Artificial Sequence
  Description of Artificial Sequence: Synthetic oligonucleotide
  Target: LAMA2; (+) strand; PAM type: YTN; PAM sequence: CTT
tctttaagaatatattatac

SEQ ID NO: 394097 - DNA, 20 bp, Artificial Sequence
  Description of Artificial Sequence: Synthetic oligonucleotide
  Target: LAMA2; (+) strand; PAM type: YTN; PAM sequence: TTT
ctttaagaatatattataca

SEQ ID NO: 394098 - DNA, 20 bp, Artificial Sequence
  Description of Artificial Sequence: Synthetic oligonucleotide
  Target: LAMA2; (+) strand; PAM type: YTN; PAM sequence: TTC
tttaagaatatattatacat

SEQ ID NO: 394099 - DNA, 20 bp, Artificial Sequence
  Description of Artificial Sequence: Synthetic oligonucleotide
  Target: LAMA2; (+) strand; PAM type: YTN; PAM sequence: CTT
taagaatatattatacatta

SEQ ID NO: 394100 - DNA, 20 bp, Artificial Sequence
  Description of Artificial Sequence: Synthetic oligonucleotide
  Target: LAMA2; (+) strand; PAM type: YTN; PAM sequence: TTT
aagaatatattatacattaa

SEQ ID NO: 394101 - DNA, 20 bp, Artificial Sequence
  Description of Artificial Sequence: Synthetic oligonucleotide
  Target: LAMA2; (+) strand; PAM type: YTN; PAM sequence: TTA
agaatatattatacattaat

SEQ ID NO: 394102 - DNA, 20 bp, Artificial Sequence
  Description of Artificial Sequence: Synthetic oligonucleotide
  Target: LAMA2; (+) strand; PAM type: YTN; PAM sequence: TTA
tacattaatttactcattca

SEQ ID NO: 394103 - DNA, 20 bp, Artificial Sequence
  Description of Artificial Sequence: Synthetic oligonucleotide
  Target: LAMA2; (+) strand; PAM type: YTN; PAM sequence: TTA
atttactcattcattttatc

SEQ ID NO: 394104 - DNA, 20 bp, Artificial Sequence
  Description of Artificial Sequence: Synthetic oligonucleotide
  Target: LAMA2; (+) strand; PAM type: YTN; PAM sequence: TTT
actcattcattttatctctc

SEQ ID NO: 394105 - DNA, 20 bp, Artificial Sequence
  Description of Artificial Sequence: Synthetic oligonucleotide
  Target: LAMA2; (+) strand; PAM type: YTN; PAM sequence: TTA
ctcattcattttatctctcc

SEQ ID NO: 394106 - DNA, 20 bp, Artificial Sequence
  Description of Artificial Sequence: Synthetic oligonucleotide
  Target: LAMA2; (+) strand; PAM type: YTN; PAM sequence: CTC
attcattttatctctcctcc

SEQ ID NO: 394107 - DNA, 20 bp, Artificial Sequence
  Description of Artificial Sequence: Synthetic oligonucleotide
  Target: LAMA2; (+) strand; PAM type: YTN; PAM sequence: TTC
attttatctctcctccacac

SEQ ID NO: 394108 - DNA, 20 bp, Artificial Sequence
  Description of Artificial Sequence: Synthetic oligonucleotide
  Target: LAMA2; (+) strand; PAM type: YTN; PAM sequence: TTT
tatctctcctccacacaagc

SEQ ID NO: 394109 - DNA, 20 bp, Artificial Sequence
  Description of Artificial Sequence: Synthetic oligonucleotide
  Target: LAMA2; (+) strand; PAM type: YTN; PAM sequence: TTT
atctctcctccacacaagcc

SEQ ID NO: 394110 - DNA, 20 bp, Artificial Sequence
  Description of Artificial Sequence: Synthetic oligonucleotide
  Target: LAMA2; (+) strand; PAM type: YTN; PAM sequence: TTA
tctctcctccacacaagcca

SEQ ID NO: 394111 - DNA, 20 bp, Artificial Sequence
  Description of Artificial Sequence: Synthetic oligonucleotide
  Target: LAMA2; (+) strand; PAM type: YTN; PAM sequence: CTC
tcctccacacaagccatgag

SEQ ID NO: 394112 - DNA, 20 bp, Artificial Sequence
  Description of Artificial Sequence: Synthetic oligonucleotide
  Target: LAMA2; (+) strand; PAM type: YTN; PAM sequence: CTC
ctccacacaagccatgagga

SEQ ID NO: 394113 - DNA, 20 bp, Artificial Sequence
  Description of Artificial Sequence: Synthetic oligonucleotide
  Target: LAMA2; (+) strand; PAM type: YTN; PAM sequence: CTC
cacacaagccatgaggaaca

SEQ ID NO: 394114 - DNA, 20 bp, Artificial Sequence
  Description of Artificial Sequence: Synthetic oligonucleotide
  Target: LAMA2; (+) strand; PAM type: YTN; PAM sequence: TTC
ttcctcacatcccccaatcc

SEQ ID NO: 394115 - DNA, 20 bp, Artificial Sequence
  Description of Artificial Sequence: Synthetic oligonucleotide
  Target: LAMA2; (+) strand; PAM type: YTN; PAM sequence: CTT
cctcacatcccccaatccta

SEQ ID NO: 394116 - DNA, 20 bp, Artificial Sequence
  Description of Artificial Sequence: Synthetic oligonucleotide
  Target: LAMA2; (+) strand; PAM type: YTN; PAM sequence: TTC
ctcacatcccccaatcctag

SEQ ID NO: 394117 - DNA, 20 bp, Artificial Sequence
  Description of Artificial Sequence: Synthetic oligonucleotide
  Target: LAMA2; (+) strand; PAM type: YTN; PAM sequence: CTC
acatcccccaatcctagaac

SEQ ID NO: 394118 - DNA, 20 bp, Artificial Sequence
  Description of Artificial Sequence: Synthetic oligonucleotide
  Target: LAMA2; (+) strand; PAM type: YTN; PAM sequence: CTA
gaacagtatctagcaaaggc

SEQ ID NO: 394119 - DNA, 20 bp, Artificial Sequence
  Description of Artificial Sequence: Synthetic oligonucleotide
  Target: LAMA2; (+) strand; PAM type: YTN; PAM sequence: CTA
gcaaaggcaaaacagattgt

SEQ ID NO: 394120 - DNA, 20 bp, Artificial Sequence
  Description of Artificial Sequence: Synthetic oligonucleotide
  Target: LAMA2; (+) strand; PAM type: YTN; PAM sequence: TTG
ttttccgtgaataaataaag

SEQ ID NO: 394121 - DNA, 20 bp, Artificial Sequence
  Description of Artificial Sequence: Synthetic oligonucleotide
  Target: LAMA2; (+) strand; PAM type: YTN; PAM sequence: TTT
tccgtgaataaataaagtgc

SEQ ID NO: 394122 - DNA, 20 bp, Artificial Sequence
  Description of Artificial Sequence: Synthetic oligonucleotide
  Target: LAMA2; (+) strand; PAM type: YTN; PAM sequence: TTT
ccgtgaataaataaagtgcc

SEQ ID NO: 394123 - DNA, 20 bp, Artificial Sequence
  Description of Artificial Sequence: Synthetic oligonucleotide
  Target: LAMA2; (+) strand; PAM type: YTN; PAM sequence: TTC
cgtgaataaataaagtgcca

SEQ ID NO: 394124 - DNA, 20 bp, Artificial Sequence
  Description of Artificial Sequence: Synthetic oligonucleotide
  Target: LAMA2; (+) strand; PAM type: YTN; PAM sequence: CTC
tatacttttgtcaatatttg

SEQ ID NO: 394125 - DNA, 20 bp, Artificial Sequence
  Description of Artificial Sequence: Synthetic oligonucleotide
  Target: LAMA2; (+) strand; PAM type: YTN; PAM sequence: CTA
tacttttgtcaatatttgtg

SEQ ID NO: 394126 - DNA, 20 bp, Artificial Sequence
  Description of Artificial Sequence: Synthetic oligonucleotide
  Target: LAMA2; (+) strand; PAM type: YTN; PAM sequence: CTT
ttgtcaatatttgtgagctc

SEQ ID NO: 394127 - DNA, 20 bp, Artificial Sequence
  Description of Artificial Sequence: Synthetic oligonucleotide
  Target: LAMA2; (+) strand; PAM type: YTN; PAM sequence: TTT
tgtcaatatttgtgagctcc

SEQ ID NO: 394128 - DNA, 20 bp, Artificial Sequence
  Description of Artificial Sequence: Synthetic oligonucleotide
  Target: LAMA2; (+) strand; PAM type: YTN; PAM sequence: TTT
gtcaatatttgtgagctcca

SEQ ID NO: 394129 - DNA, 20 bp, Artificial Sequence
  Description of Artificial Sequence: Synthetic oligonucleotide
  Target: LAMA2; (+) strand; PAM type: YTN; PAM sequence: TTG
tcaatatttgtgagctccaa

SEQ ID NO: 394130 - DNA, 20 bp, Artificial Sequence
  Description of Artificial Sequence: Synthetic oligonucleotide
  Target: LAMA2; (+) strand; PAM type: YTN; PAM sequence: TTT
gtgagctccaaatttccatc

SEQ ID NO: 394131 - DNA, 20 bp, Artificial Sequence
  Description of Artificial Sequence: Synthetic oligonucleotide
  Target: LAMA2; (+) strand; PAM type: YTN; PAM sequence: TTG
tgagctccaaatttccatct

SEQ ID NO: 394132 - DNA, 20 bp, Artificial Sequence
  Description of Artificial Sequence: Synthetic oligonucleotide
  Target: LAMA2; (+) strand; PAM type: YTN; PAM sequence: CTC
caaatttccatcttttctcg

SEQ ID NO: 394133 - DNA, 20 bp, Artificial Sequence
  Description of Artificial Sequence: Synthetic oligonucleotide
  Target: LAMA2; (+) strand; PAM type: YTN; PAM sequence: TTT
ccatcttttctcggttcaaa

SEQ ID NO: 394134 - DNA, 20 bp, Artificial Sequence
  Description of Artificial Sequence: Synthetic oligonucleotide
  Target: LAMA2; (+) strand; PAM type: YTN; PAM sequence: TTC
catcttttctcggttcaaag

SEQ ID NO: 394135 - DNA, 20 bp, Artificial Sequence
  Description of Artificial Sequence: Synthetic oligonucleotide
  Target: LAMA2; (+) strand; PAM type: YTN; PAM sequence: CTT
ttctcggttcaaagctagaa

SEQ ID NO: 394136 - DNA, 20 bp, Artificial Sequence
  Description of Artificial Sequence: Synthetic oligonucleotide
  Target: LAMA2; (+) strand; PAM type: YTN; PAM sequence: TTT
tctcggttcaaagctagaac

SEQ ID NO: 394137 - DNA, 20 bp, Artificial Sequence
  Description of Artificial Sequence: Synthetic oligonucleotide
  Target: LAMA2; (+) strand; PAM type: YTN; PAM sequence: TTT
ctcggttcaaagctagaacc

SEQ ID NO: 394138 - DNA, 20 bp, Artificial Sequence
  Description of Artificial Sequence: Synthetic oligonucleotide
  Target: LAMA2; (+) strand; PAM type: YTN; PAM sequence: TTC
tcggttcaaagctagaaccc

SEQ ID NO: 394139 - DNA, 20 bp, Artificial Sequence
  Description of Artificial Sequence: Synthetic oligonucleotide
  Target: LAMA2; (+) strand; PAM type: YTN; PAM sequence: CTC
ggttcaaagctagaacccat

SEQ ID NO: 394140 - DNA, 20 bp, Artificial Sequence
  Description of Artificial Sequence: Synthetic oligonucleotide
  Target: LAMA2; (+) strand; PAM type: YTN; PAM sequence: TTC
aaagctagaacccatcagta

SEQ ID NO: 394141 - DNA, 20 bp, Artificial Sequence
  Description of Artificial Sequence: Synthetic oligonucleotide
  Target: LAMA2; (+) strand; PAM type: YTN; PAM sequence: CTA
gaacccatcagtatctaatc

SEQ ID NO: 394142 - DNA, 20 bp, Artificial Sequence
  Description of Artificial Sequence: Synthetic oligonucleotide
  Target: LAMA2; (+) strand; PAM type: YTN; PAM sequence: CTA
atctgaaaacaagacacctc

SEQ ID NO: 394143 - DNA, 20 bp, Artificial Sequence
  Description of Artificial Sequence: Synthetic oligonucleotide
  Target: LAMA2; (+) strand; PAM type: YTN; PAM sequence: CTG
aaaacaagacacctctaaaa

SEQ ID NO: 394144 - DNA, 20 bp, Artificial Sequence
  Description of Artificial Sequence: Synthetic oligonucleotide
  Target: LAMA2; (+) strand; PAM type: YTN; PAM sequence: CTC
taaaatttatttaacctcat

SEQ ID NO: 394145 - DNA, 20 bp, Artificial Sequence
  Description of Artificial Sequence: Synthetic oligonucleotide
  Target: LAMA2; (+) strand; PAM type: YTN; PAM sequence: CTA
aaatttatttaacctcatcc

SEQ ID NO: 394146 - DNA, 20 bp, Artificial Sequence
  Description of Artificial Sequence: Synthetic oligonucleotide
  Target: LAMA2; (+) strand; PAM type: YTN; PAM sequence: TTT
atttaacctcatcccagcac

SEQ ID NO: 394147 - DNA, 20 bp, Artificial Sequence
  Description of Artificial Sequence: Synthetic oligonucleotide
  Target: LAMA2; (+) strand; PAM type: YTN; PAM sequence: TTA
tttaacctcatcccagcact

SEQ ID NO: 394148 - DNA, 20 bp, Artificial Sequence
  Description of Artificial Sequence: Synthetic oligonucleotide
  Target: LAMA2; (+) strand; PAM type: YTN; PAM sequence: TTT
aacctcatcccagcactctg

SEQ ID NO: 394149 - DNA, 20 bp, Artificial Sequence
  Description of Artificial Sequence: Synthetic oligonucleotide
  Target: LAMA2; (+) strand; PAM type: YTN; PAM sequence: TTA
acctcatcccagcactctgg

SEQ ID NO: 394150 - DNA, 20 bp, Artificial Sequence
  Description of Artificial Sequence: Synthetic oligonucleotide
  Target: LAMA2; (+) strand; PAM type: YTN; PAM sequence: CTC
atcccagcactctgggaggc

SEQ ID NO: 394151 - DNA, 20 bp, Artificial Sequence
  Description of Artificial Sequence: Synthetic oligonucleotide
  Target: LAMA2; (+) strand; PAM type: YTN; PAM sequence: CTC
tgggaggctgaggcaggagg

SEQ ID NO: 394152 - DNA, 20 bp, Artificial Sequence
  Description of Artificial Sequence: Synthetic oligonucleotide
  Target: LAMA2; (+) strand; PAM type: YTN; PAM sequence: CTG
ggaggctgaggcaggaggat

SEQ ID NO: 394153 - DNA, 20 bp, Artificial Sequence
  Description of Artificial Sequence: Synthetic oligonucleotide
  Target: LAMA2; (+) strand; PAM type: YTN; PAM sequence: CTG
aggcaggaggatcatgaggt

SEQ ID NO: 394154 - DNA, 20 bp, Artificial Sequence
  Description of Artificial Sequence: Synthetic oligonucleotide
  Target: LAMA2; (+) strand; PAM type: YTN; PAM sequence: CTG
gctaacatggtgaaacccca

SEQ ID NO: 394155 - DNA, 20 bp, Artificial Sequence
  Description of Artificial Sequence: Synthetic oligonucleotide
  Target: LAMA2; (+) strand; PAM type: YTN; PAM sequence: CTA
acatggtgaaaccccatctc

SEQ ID NO: 394156 - DNA, 20 bp, Artificial Sequence
  Description of Artificial Sequence: Synthetic oligonucleotide
  Target: LAMA2; (+) strand; PAM type: YTN; PAM sequence: CTC
tactgaaaatgaaaattaaa

SEQ ID NO: 394157 - DNA, 20 bp, Artificial Sequence
  Description of Artificial Sequence: Synthetic oligonucleotide
  Target: LAMA2; (+) strand; PAM type: YTN; PAM sequence: CTA
ctgaaaatgaaaattaaaaa

SEQ ID NO: 394158 - DNA, 20 bp, Artificial Sequence
  Description of Artificial Sequence: Synthetic oligonucleotide
  Target: LAMA2; (+) strand; PAM type: YTN; PAM sequence: CTG
aaaatgaaaattaaaaaaaa

SEQ ID NO: 394159 - DNA, 20 bp, Artificial Sequence
  Description of Artificial Sequence: Synthetic oligonucleotide
  Target: LAMA2; (+) strand; PAM type: YTN; PAM sequence: TTA
aaaaaaaatacaaaaataaa

SEQ ID NO: 394160 - DNA, 20 bp, Artificial Sequence
  Description of Artificial Sequence: Synthetic oligonucleotide
  Target: LAMA2; (+) strand; PAM type: YTN; PAM sequence: TTA
gccaggcgtggtggcaggca

SEQ ID NO: 394161 - DNA, 20 bp, Artificial Sequence
  Description of Artificial Sequence: Synthetic oligonucleotide
  Target: LAMA2; (+) strand; PAM type: YTN; PAM sequence: CTG
cagtccctactcgggaggct

SEQ ID NO: 394162 - DNA, 20 bp, Artificial Sequence
  Description of Artificial Sequence: Synthetic oligonucleotide
  Target: LAMA2; (+) strand; PAM type: YTN; PAM sequence: CTA
ctcgggaggctgaggcagga

SEQ ID NO: 394163 - DNA, 20 bp, Artificial Sequence
  Description of Artificial Sequence: Synthetic oligonucleotide
  Target: LAMA2; (+) strand; PAM type: YTN; PAM sequence: CTC
gggaggctgaggcaggagaa

SEQ ID NO: 394164 - DNA, 20 bp, Artificial Sequence
  Description of Artificial Sequence: Synthetic oligonucleotide
  Target: LAMA2; (+) strand; PAM type: YTN; PAM sequence: CTG
aggcaggagaatggtgtgaa

SEQ ID NO: 394165 - DNA, 20 bp, Artificial Sequence
  Description of Artificial Sequence: Synthetic oligonucleotide
  Target: LAMA2; (+) strand; PAM type: YTN; PAM sequence: CTG
ggaggcagagcttgcagtga

SEQ ID NO: 394166 - DNA, 20 bp, Artificial Sequence
  Description of Artificial Sequence: Synthetic oligonucleotide
  Target: LAMA2; (+) strand; PAM type: YTN; PAM sequence: CTT
gcagtgagccaagattgctc

SEQ ID NO: 394167 - DNA, 20 bp, Artificial Sequence
  Description of Artificial Sequence: Synthetic oligonucleotide
  Target: LAMA2; (+) strand; PAM type: YTN; PAM sequence: TTG
cagtgagccaagattgctcc

SEQ ID NO: 394168 - DNA, 20 bp, Artificial Sequence
  Description of Artificial Sequence: Synthetic oligonucleotide
  Target: LAMA2; (+) strand; PAM type: YTN; PAM sequence: TTG
ctccactgcactccagcctg

SEQ ID NO: 394169 - DNA, 20 bp, Artificial Sequence
  Description of Artificial Sequence: Synthetic oligonucleotide
  Target: LAMA2; (+) strand; PAM type: YTN; PAM sequence: CTC
cactgcactccagcctgggc

SEQ ID NO: 394170 - DNA, 20 bp, Artificial Sequence
  Description of Artificial Sequence: Synthetic oligonucleotide
  Target: LAMA2; (+) strand; PAM type: YTN; PAM sequence: CTG
cactccagcctgggcgacag

SEQ ID NO: 394171 - DNA, 20 bp, Artificial Sequence
  Description of Artificial Sequence: Synthetic oligonucleotide
  Target: LAMA2; (+) strand; PAM type: YTN; PAM sequence: CTC
cagcctgggcgacagagtga

SEQ ID NO: 394172 - DNA, 20 bp, Artificial Sequence
  Description of Artificial Sequence: Synthetic oligonucleotide
  Target: LAMA2; (+) strand; PAM type: YTN; PAM sequence: CTG
ggcgacagagtgagactccg

SEQ ID NO: 394173 - DNA, 20 bp, Artificial Sequence
  Description of Artificial Sequence: Synthetic oligonucleotide
  Target: LAMA2; (+) strand; PAM type: YTN; PAM sequence: CTC
cgtctcagaaaaaaaaaaaa

SEQ ID NO: 394174 - DNA, 20 bp, Artificial Sequence
  Description of Artificial Sequence: Synthetic oligonucleotide
  Target: LAMA2; (+) strand; PAM type: YTN; PAM sequence: CTC
agaaaaaaaaaaaaaaaaaa

SEQ ID NO: 394175 - DNA, 20 bp, Artificial Sequence
  Description of Artificial Sequence: Synthetic oligonucleotide
  Target: LAMA2; (+) strand; PAM type: YTN; PAM sequence: TTA
tttaacctcttgatcatcat

SEQ ID NO: 394176 - DNA, 20 bp, Artificial Sequence
  Description of Artificial Sequence: Synthetic oligonucleotide
  Target: LAMA2; (+) strand; PAM type: YTN; PAM sequence: TTT
aacctcttgatcatcatttc

SEQ ID NO: 394177 - DNA, 20 bp, Artificial Sequence
  Description of Artificial Sequence: Synthetic oligonucleotide
  Target: LAMA2; (+) strand; PAM type: YTN; PAM sequence: TTA
acctcttgatcatcatttct

SEQ ID NO: 394178 - DNA, 20 bp, Artificial Sequence
  Description of Artificial Sequence: Synthetic oligonucleotide
  Target: LAMA2; (+) strand; PAM type: YTN; PAM sequence: CTC
ttgatcatcatttctgattg

SEQ ID NO: 394179 - DNA, 20 bp, Artificial Sequence
  Description of Artificial Sequence: Synthetic oligonucleotide
  Target: LAMA2; (+) strand; PAM type: YTN; PAM sequence: CTT
gatcatcatttctgattgag

SEQ ID NO: 394180 - DNA, 20 bp, Artificial Sequence
  Description of Artificial Sequence: Synthetic oligonucleotide
  Target: LAMA2; (+) strand; PAM type: YTN; PAM sequence: TTG
atcatcatttctgattgagt

SEQ ID NO: 394181 - DNA, 20 bp, Artificial Sequence
  Description of Artificial Sequence: Synthetic oligonucleotide
  Target: LAMA2; (+) strand; PAM type: YTN; PAM sequence: TTT
ctgattgagtatgctaagaa

SEQ ID NO: 394182 - DNA, 20 bp, Artificial Sequence
  Description of Artificial Sequence: Synthetic oligonucleotide
  Target: LAMA2; (+) strand; PAM type: YTN; PAM sequence: TTC
tgattgagtatgctaagaag

SEQ ID NO: 394183 - DNA, 20 bp, Artificial Sequence
  Description of Artificial Sequence: Synthetic oligonucleotide
  Target: LAMA2; (+) strand; PAM type: YTN; PAM sequence: CTG
attgagtatgctaagaagca

SEQ ID NO: 394184 - DNA, 20 bp, Artificial Sequence
  Description of Artificial Sequence: Synthetic oligonucleotide
  Target: LAMA2; (+) strand; PAM type: YTN; PAM sequence: TTG
agtatgctaagaagcacatt

SEQ ID NO: 394185 - DNA, 20 bp, Artificial Sequence
  Description of Artificial Sequence: Synthetic oligonucleotide
  Target: LAMA2; (+) strand; PAM type: YTN; PAM sequence: CTA
agaagcacattttgatcttt

SEQ ID NO: 394186 - DNA, 20 bp, Artificial Sequence
  Description of Artificial Sequence: Synthetic oligonucleotide
  Target: LAMA2; (+) strand; PAM type: YTN; PAM sequence: TTT
tgatctttgcttttacaaaa

SEQ ID NO: 394187 - DNA, 20 bp, Artificial Sequence
  Description of Artificial Sequence: Synthetic oligonucleotide
  Target: LAMA2; (+) strand; PAM type: YTN; PAM sequence: TTT
gatctttgcttttacaaaag

SEQ ID NO: 394188 - DNA, 20 bp, Artificial Sequence
  Description of Artificial Sequence: Synthetic oligonucleotide
  Target: LAMA2; (+) strand; PAM type: YTN; PAM sequence: TTG
atctttgcttttacaaaaga

SEQ ID NO: 394189 - DNA, 20 bp, Artificial Sequence
  Description of Artificial Sequence: Synthetic oligonucleotide
  Target: LAMA2; (+) strand; PAM type: YTN; PAM sequence: CTT
tgcttttacaaaagattcta

SEQ ID NO: 394190 - DNA, 20 bp, Artificial Sequence
  Description of Artificial Sequence: Synthetic oligonucleotide
  Target: LAMA2; (+) strand; PAM type: YTN; PAM sequence: TTT
gcttttacaaaagattctaa

SEQ ID NO: 394191 - DNA, 20 bp, Artificial Sequence
  Description of Artificial Sequence: Synthetic oligonucleotide
  Target: LAMA2; (+) strand; PAM type: YTN; PAM sequence: TTG
cttttacaaaagattctaac

SEQ ID NO: 394192 - DNA, 20 bp, Artificial Sequence
  Description of Artificial Sequence: Synthetic oligonucleotide
  Target: LAMA2; (+) strand; PAM type: YTN; PAM sequence: CTT
ttacaaaagattctaactca

SEQ ID NO: 394193 - DNA, 20 bp, Artificial Sequence
  Description of Artificial Sequence: Synthetic oligonucleotide
  Target: LAMA2; (+) strand; PAM type: YTN; PAM sequence: TTT
tacaaaagattctaactcac

SEQ ID NO: 394194 - DNA, 20 bp, Artificial Sequence
  Description of Artificial Sequence: Synthetic oligonucleotide
  Target: LAMA2; (+) strand; PAM type: YTN; PAM sequence: TTT
acaaaagattctaactcact

SEQ ID NO: 394195 - DNA, 20 bp, Artificial Sequence
  Description of Artificial Sequence: Synthetic oligonucleotide
  Target: LAMA2; (+) strand; PAM type: YTN; PAM sequence: TTA
caaaagattctaactcacta

SEQ ID NO: 394196 - DNA, 20 bp, Artificial Sequence
  Description of Artificial Sequence: Synthetic oligonucleotide
  Target: LAMA2; (+) strand; PAM type: YTN; PAM sequence: TTC
taactcactactttattgaa

SEQ ID NO: 394197 - DNA, 20 bp, Artificial Sequence
  Description of Artificial Sequence: Synthetic oligonucleotide
  Target: LAMA2; (+) strand; PAM type: YTN; PAM sequence: CTA
actcactactttattgaaat

SEQ ID NO: 394198 - DNA, 20 bp, Artificial Sequence
  Description of Artificial Sequence: Synthetic oligonucleotide
  Target: LAMA2; (+) strand; PAM type: YTN; PAM sequence: CTC
actactttattgaaatcaaa

SEQ ID NO: 394199 - DNA, 20 bp, Artificial Sequence
  Description of Artificial Sequence: Synthetic oligonucleotide
  Target: LAMA2; (+) strand; PAM type: YTN; PAM sequence: CTA
ctttattgaaatcaaaatat

SEQ ID NO: 394200 - DNA, 20 bp, Artificial Sequence
  Description of Artificial Sequence: Synthetic oligonucleotide
  Target: LAMA2; (+) strand; PAM type: YTN; PAM sequence: CTT
tattgaaatcaaaatatata

SEQ ID NO: 394201 - DNA, 20 bp, Artificial Sequence
  Description of Artificial Sequence: Synthetic oligonucleotide
  Target: LAMA2; (+) strand; PAM type: YTN; PAM sequence: TTT
attgaaatcaaaatatatat

SEQ ID NO: 394202 - DNA, 20 bp, Artificial Sequence
  Description of Artificial Sequence: Synthetic oligonucleotide
  Target: LAMA2; (+) strand; PAM type: YTN; PAM sequence: TTA
ttgaaatcaaaatatatata

SEQ ID NO: 394203 - DNA, 20 bp, Artificial Sequence
  Description of Artificial Sequence: Synthetic oligonucleotide
  Target: LAMA2; (+) strand; PAM type: YTN; PAM sequence: TTG
aaatcaaaatatatatagct

SEQ ID NO: 394204 - DNA, 20 bp, Artificial Sequence
  Description of Artificial Sequence: Synthetic oligonucleotide
  Target: LAMA2; (+) strand; PAM type: YTN; PAM sequence: CTC
ttcaattaacacacgtgtgg

SEQ ID NO: 394205 - DNA, 20 bp, Artificial Sequence
  Description of Artificial Sequence: Synthetic oligonucleotide
  Target: LAMA2; (+) strand; PAM type: YTN; PAM sequence: CTT
caattaacacacgtgtggaa

SEQ ID NO: 394206 - DNA, 20 bp, Artificial Sequence
  Description of Artificial Sequence: Synthetic oligonucleotide
  Target: LAMA2; (+) strand; PAM type: YTN; PAM sequence: TTC
aattaacacacgtgtggaaa

SEQ ID NO: 394207 - DNA, 20 bp, Artificial Sequence
  Description of Artificial Sequence: Synthetic oligonucleotide
  Target: LAMA2; (+) strand; PAM type: YTN; PAM sequence: TTA
acacacgtgtggaaatatct

SEQ ID NO: 394208 - DNA, 20 bp, Artificial Sequence
  Description of Artificial Sequence: Synthetic oligonucleotide
  Target: LAMA2; (+) strand; PAM type: YTN; PAM sequence: CTT
ccctgtttccagtggcacag

SEQ ID NO: 394209 - DNA, 20 bp, Artificial Sequence
  Description of Artificial Sequence: Synthetic oligonucleotide
  Target: LAMA2; (+) strand; PAM type: YTN; PAM sequence: TTC
cctgtttccagtggcacagc

SEQ ID NO: 394210 - DNA, 20 bp, Artificial Sequence
  Description of Artificial Sequence: Synthetic oligonucleotide
  Target: LAMA2; (+) strand; PAM type: YTN; PAM sequence: CTG
tttccagtggcacagcattt

SEQ ID NO: 394211 - DNA, 20 bp, Artificial Sequence
  Description of Artificial Sequence: Synthetic oligonucleotide
  Target: LAMA2; (+) strand; PAM type: YTN; PAM sequence: TTT
ccagtggcacagcattttaa

SEQ ID NO: 394212 - DNA, 20 bp, Artificial Sequence
  Description of Artificial Sequence: Synthetic oligonucleotide
  Target: LAMA2; (+) strand; PAM type: YTN; PAM sequence: TTC
cagtggcacagcattttaaa

SEQ ID NO: 394213 - DNA, 20 bp, Artificial Sequence
  Description of Artificial Sequence: Synthetic oligonucleotide
  Target: LAMA2; (+) strand; PAM type: YTN; PAM sequence: TTT
taaattaccttgatccatta

SEQ ID NO: 394214 - DNA, 20 bp, Artificial Sequence
  Description of Artificial Sequence: Synthetic oligonucleotide
  Target: LAMA2; (+) strand; PAM type: YTN; PAM sequence: TTT
aaattaccttgatccattaa

SEQ ID NO: 394215 - DNA, 20 bp, Artificial Sequence
  Description of Artificial Sequence: Synthetic oligonucleotide
  Target: LAMA2; (+) strand; PAM type: YTN; PAM sequence: TTA
aattaccttgatccattaat

SEQ ID NO: 394216 - DNA, 20 bp, Artificial Sequence
  Description of Artificial Sequence: Synthetic oligonucleotide
  Target: LAMA2; (+) strand; PAM type: YTN; PAM sequence: TTA
ccttgatccattaattcaaa

SEQ ID NO: 394217 - DNA, 20 bp, Artificial Sequence
  Description of Artificial Sequence: Synthetic oligonucleotide
  Target: LAMA2; (+) strand; PAM type: YTN; PAM sequence: CTT
gatccattaattcaaacaag

SEQ ID NO: 394218 - DNA, 20 bp, Artificial Sequence
  Description of Artificial Sequence: Synthetic oligonucleotide
  Target: LAMA2; (+) strand; PAM type: YTN; PAM sequence: TTG
atccattaattcaaacaagc

SEQ ID NO: 394219 - DNA, 20 bp, Artificial Sequence
  Description of Artificial Sequence: Synthetic oligonucleotide
  Target: LAMA2; (+) strand; PAM type: YTN; PAM sequence: TTA
attcaaacaagccatgttgt

SEQ ID NO: 394220 - DNA, 20 bp, Artificial Sequence
  Description of Artificial Sequence: Synthetic oligonucleotide
  Target: LAMA2; (+) strand; PAM type: YTN; PAM sequence: TTC
aaacaagccatgttgtaaaa

SEQ ID NO: 394221 - DNA, 20 bp, Artificial Sequence
  Description of Artificial Sequence: Synthetic oligonucleotide
  Target: LAMA2; (+) strand; PAM type: YTN; PAM sequence: TTG
taaaagattcttgtgtttct

SEQ ID NO: 394222 - DNA, 20 bp, Artificial Sequence
  Description of Artificial Sequence: Synthetic oligonucleotide
  Target: LAMA2; (+) strand; PAM type: YTN; PAM sequence: TTC
ttgtgtttctgtacatgcta

SEQ ID NO: 394223 - DNA, 20 bp, Artificial Sequence
  Description of Artificial Sequence: Synthetic oligonucleotide
  Target: LAMA2; (+) strand; PAM type: YTN; PAM sequence: CTT
gtgtttctgtacatgctata

SEQ ID NO: 394224 - DNA, 20 bp, Artificial Sequence
  Description of Artificial Sequence: Synthetic oligonucleotide
  Target: LAMA2; (+) strand; PAM type: YTN; PAM sequence: TTG
tgtttctgtacatgctatac

SEQ ID NO: 394225 - DNA, 20 bp, Artificial Sequence
  Description of Artificial Sequence: Synthetic oligonucleotide
  Target: LAMA2; (+) strand; PAM type: YTN; PAM sequence: TTT
ctgtacatgctatactttaa

SEQ ID NO: 394226 - DNA, 20 bp, Artificial Sequence
  Description of Artificial Sequence: Synthetic oligonucleotide
  Target: LAMA2; (+) strand; PAM type: YTN; PAM sequence: TTC
tgtacatgctatactttaag

SEQ ID NO: 394227 - DNA, 20 bp, Artificial Sequence
  Description of Artificial Sequence: Synthetic oligonucleotide
  Target: LAMA2; (+) strand; PAM type: YTN; PAM sequence: CTG
tacatgctatactttaagtc

SEQ ID NO: 394228 - DNA, 20 bp, Artificial Sequence
  Description of Artificial Sequence: Synthetic oligonucleotide
  Target: LAMA2; (+) strand; PAM type: YTN; PAM sequence: CTA
tactttaagtcagctcatac

SEQ ID NO: 394229 - DNA, 20 bp, Artificial Sequence
  Description of Artificial Sequence: Synthetic oligonucleotide
  Target: LAMA2; (+) strand; PAM type: YTN; PAM sequence: CTT
taagtcagctcatacaaaag

SEQ ID NO: 394230 - DNA, 20 bp, Artificial Sequence
  Description of Artificial Sequence: Synthetic oligonucleotide
  Target: LAMA2; (+) strand; PAM type: YTN; PAM sequence: TTT
aagtcagctcatacaaaagc

SEQ ID NO: 394231 - DNA, 20 bp, Artificial Sequence
  Description of Artificial Sequence: Synthetic oligonucleotide
  Target: LAMA2; (+) strand; PAM type: YTN; PAM sequence: TTA
agtcagctcatacaaaagct

SEQ ID NO: 394232 - DNA, 20 bp, Artificial Sequence
  Description of Artificial Sequence: Synthetic oligonucleotide
  Target: LAMA2; (+) strand; PAM type: YTN; PAM sequence: CTC
atacaaaagctaagggctaa

SEQ ID NO: 394233 - DNA, 20 bp, Artificial Sequence
  Description of Artificial Sequence: Synthetic oligonucleotide
  Target: LAMA2; (+) strand; PAM type: YTN; PAM sequence: CTA
agggctaaaattggcagttg

SEQ ID NO: 394234 - DNA, 20 bp, Artificial Sequence
  Description of Artificial Sequence: Synthetic oligonucleotide
  Target: LAMA2; (+) strand; PAM type: YTN; PAM sequence: CTA
aaattggcagttgtgtaaaa

SEQ ID NO: 394235 - DNA, 20 bp, Artificial Sequence
  Description of Artificial Sequence: Synthetic oligonucleotide
  Target: LAMA2; (+) strand; PAM type: YTN; PAM sequence: TTG
gcagttgtgtaaaagaatgt

SEQ ID NO: 394236 - DNA, 20 bp, Artificial Sequence
  Description of Artificial Sequence: Synthetic oligonucleotide
  Target: LAMA2; (+) strand; PAM type: YTN; PAM sequence: TTG
tgtaaaagaatgttagaccc

SEQ ID NO: 394237 - DNA, 20 bp, Artificial Sequence
  Description of Artificial Sequence: Synthetic oligonucleotide
  Target: LAMA2; (+) strand; PAM type: YTN; PAM sequence: TTA
gacccttggaagataagata

SEQ ID NO: 394238 - DNA, 20 bp, Artificial Sequence
  Description of Artificial Sequence: Synthetic oligonucleotide
  Target: LAMA2; (+) strand; PAM type: YTN; PAM sequence: CTT
ggaagataagatatgacttg

SEQ ID NO: 394239 - DNA, 20 bp, Artificial Sequence
  Description of Artificial Sequence: Synthetic oligonucleotide
  Target: LAMA2; (+) strand; PAM type: YTN; PAM sequence: TTG
gaagataagatatgacttgt

SEQ ID NO: 394240 - DNA, 20 bp, Artificial Sequence
  Description of Artificial Sequence: Synthetic oligonucleotide
  Target: LAMA2; (+) strand; PAM type: YTN; PAM sequence: CTT
gtaatcagggagattgtaat

SEQ ID NO: 394241 - DNA, 20 bp, Artificial Sequence
  Description of Artificial Sequence: Synthetic oligonucleotide
  Target: LAMA2; (+) strand; PAM type: YTN; PAM sequence: TTG
taatcagggagattgtaatc

SEQ ID NO: 394242 - DNA, 20 bp, Artificial Sequence
  Description of Artificial Sequence: Synthetic oligonucleotide
  Target: LAMA2; (+) strand; PAM type: YTN; PAM sequence: TTG
taatcagggacattgggact

SEQ ID NO: 394243 - DNA, 20 bp, Artificial Sequence
  Description of Artificial Sequence: Synthetic oligonucleotide
  Target: LAMA2; (+) strand; PAM type: YTN; PAM sequence: TTG
ggactcttcccacatttgtt

SEQ ID NO: 394244 - DNA, 20 bp, Artificial Sequence
  Description of Artificial Sequence: Synthetic oligonucleotide
  Target: LAMA2; (+) strand; PAM type: YTN; PAM sequence: CTC
ttcccacatttgttgtctgt

SEQ ID NO: 394245 - DNA, 20 bp, Artificial Sequence
  Description of Artificial Sequence: Synthetic oligonucleotide
  Target: LAMA2; (+) strand; PAM type: YTN; PAM sequence: CTT
cccacatttgttgtctgtga

SEQ ID NO: 394246 - DNA, 20 bp, Artificial Sequence
  Description of Artificial Sequence: Synthetic oligonucleotide
  Target: LAMA2; (+) strand; PAM type: YTN; PAM sequence: TTC
ccacatttgttgtctgtgaa

SEQ ID NO: 394247 - DNA, 20 bp, Artificial Sequence
  Description of Artificial Sequence: Synthetic oligonucleotide
  Target: LAMA2; (+) strand; PAM type: YTN; PAM sequence: TTT
gttgtctgtgaagagtgaat

SEQ ID NO: 394248 - DNA, 20 bp, Artificial Sequence
  Description of Artificial Sequence: Synthetic oligonucleotide
  Target: LAMA2; (+) strand; PAM type: YTN; PAM sequence: TTG
ttgtctgtgaagagtgaatg

SEQ ID NO: 394249 - DNA, 20 bp, Artificial Sequence
  Description of Artificial Sequence: Synthetic oligonucleotide
  Target: LAMA2; (+) strand; PAM type: YTN; PAM sequence: TTG
tctgtgaagagtgaatgaca

SEQ ID NO: 394250 - DNA, 20 bp, Artificial Sequence
  Description of Artificial Sequence: Synthetic oligonucleotide
  Target: LAMA2; (+) strand; PAM type: YTN; PAM sequence: CTG
tgaagagtgaatgacatatc

SEQ ID NO: 394251 - DNA, 20 bp, Artificial Sequence
  Description of Artificial Sequence: Synthetic oligonucleotide
  Target: LAMA2; (+) strand; PAM type: YTN; PAM sequence: CTT
cccctgaattagtgatggga

SEQ ID NO: 394252 - DNA, 20 bp, Artificial Sequence
  Description of Artificial Sequence: Synthetic oligonucleotide
  Target: LAMA2; (+) strand; PAM type: YTN; PAM sequence: TTC
ccctgaattagtgatgggag

SEQ ID NO: 394253 - DNA, 20 bp, Artificial Sequence
  Description of Artificial Sequence: Synthetic oligonucleotide
  Target: LAMA2; (+) strand; PAM type: YTN; PAM sequence: CTG
aattagtgatgggagtagct

SEQ ID NO: 394254 - DNA, 20 bp, Artificial Sequence
  Description of Artificial Sequence: Synthetic oligonucleotide
  Target: LAMA2; (+) strand; PAM type: YTN; PAM sequence: TTA
gtgatgggagtagctgaatg

SEQ ID NO: 394255 - DNA, 20 bp, Artificial Sequence
  Description of Artificial Sequence: Synthetic oligonucleotide
  Target: LAMA2; (+) strand; PAM type: YTN; PAM sequence: CTG
aatgagccaagtgtcagcag

SEQ ID NO: 394256 - DNA, 20 bp, Artificial Sequence
  Description of Artificial Sequence: Synthetic oligonucleotide
  Target: LAMA2; (+) strand; PAM type: YTN; PAM sequence: CTT
cattttcttttttctttctt

SEQ ID NO: 394257 - DNA, 20 bp, Artificial Sequence
  Description of Artificial Sequence: Synthetic oligonucleotide
  Target: LAMA2; (+) strand; PAM type: YTN; PAM sequence: TTC
attttcttttttctttcttt

SEQ ID NO: 394258 - DNA, 20 bp, Artificial Sequence
  Description of Artificial Sequence: Synthetic oligonucleotide
  Target: LAMA2; (+) strand; PAM type: YTN; PAM sequence: TTT
tcttttttctttcttttctt

SEQ ID NO: 394259 - DNA, 20 bp, Artificial Sequence
  Description of Artificial Sequence: Synthetic oligonucleotide
  Target: LAMA2; (+) strand; PAM type: YTN; PAM sequence: TTT
cttttttctttcttttcttt

SEQ ID NO: 394260 - DNA, 20 bp, Artificial Sequence
  Description of Artificial Sequence: Synthetic oligonucleotide
  Target: LAMA2; (+) strand; PAM type: YTN; PAM sequence: TTC
ttttttctttcttttctttt

SEQ ID NO: 394261 - DNA, 20 bp, Artificial Sequence
  Description of Artificial Sequence: Synthetic oligonucleotide
  Target: LAMA2; (+) strand; PAM type: YTN; PAM sequence: CTT
ttttctttcttttcttttct

SEQ ID NO: 394262 - DNA, 20 bp, Artificial Sequence
  Description of Artificial Sequence: Synthetic oligonucleotide
  Target: LAMA2; (+) strand; PAM type: YTN; PAM sequence: TTT
tttctttcttttcttttctt

SEQ ID NO: 394263 - DNA, 20 bp, Artificial Sequence
  Description of Artificial Sequence: Synthetic oligonucleotide
  Target: LAMA2; (+) strand; PAM type: YTN; PAM sequence: TTT
ttctttcttttcttttcttt

SEQ ID NO: 394264 - DNA, 20 bp, Artificial Sequence
  Description of Artificial Sequence: Synthetic oligonucleotide
  Target: LAMA2; (+) strand; PAM type: YTN; PAM sequence: TTT
tctttcttttcttttctttt

SEQ ID NO: 394265 - DNA, 20 bp, Artificial Sequence
  Description of Artificial Sequence: Synthetic oligonucleotide
  Target: LAMA2; (+) strand; PAM type: YTN; PAM sequence: TTT
ctttcttttcttttcttttt

SEQ ID NO: 394266 - DNA, 20 bp, Artificial Sequence
  Description of Artificial Sequence: Synthetic oligonucleotide
  Target: LAMA2; (+) strand; PAM type: YTN; PAM sequence: TTC
tttcttttcttttctttttt

SEQ ID NO: 394267 - DNA, 20 bp, Artificial Sequence
  Description of Artificial Sequence: Synthetic oligonucleotide
  Target: LAMA2; (+) strand; PAM type: YTN; PAM sequence: CTT
tcttttcttttctttttttt

SEQ ID NO: 394268 - DNA, 20 bp, Artificial Sequence
  Description of Artificial Sequence: Synthetic oligonucleotide
  Target: LAMA2; (+) strand; PAM type: YTN; PAM sequence: TTT
cttttcttttcttttttttt

SEQ ID NO: 394269 - DNA, 20 bp, Artificial Sequence
  Description of Artificial Sequence: Synthetic oligonucleotide
  Target: LAMA2; (+) strand; PAM type: YTN; PAM sequence: TTC
ttttcttttctttttttttt

SEQ ID NO: 394270 - DNA, 20 bp, Artificial Sequence
  Description of Artificial Sequence: Synthetic oligonucleotide
  Target: LAMA2; (+) strand; PAM type: YTN; PAM sequence: CTT
ttcttttctttttttttttt

SEQ ID NO: 394271 - DNA, 20 bp, Artificial Sequence
  Description of Artificial Sequence: Synthetic oligonucleotide
  Target: LAMA2; (+) strand; PAM type: YTN; PAM sequence: TTT
tcttttcttttttttttttt

SEQ ID NO: 394272 - DNA, 20 bp, Artificial Sequence
  Description of Artificial Sequence: Synthetic oligonucleotide
  Target: LAMA2; (+) strand; PAM type: YTN; PAM sequence: TTT
cttttctttttttttttttt

SEQ ID NO: 394273 - DNA, 20 bp, Artificial Sequence
  Description of Artificial Sequence: Synthetic oligonucleotide
  Target: LAMA2; (+) strand; PAM type: YTN; PAM sequence: TTC
ttttcttttttttttttttt

SEQ ID NO: 394274 - DNA, 20 bp, Artificial Sequence
  Description of Artificial Sequence: Synthetic oligonucleotide
  Target: LAMA2; (+) strand; PAM type: YTN; PAM sequence: CTT
ttcttttttttttttttttt

SEQ ID NO: 394275 - DNA, 20 bp, Artificial Sequence
  Description of Artificial Sequence: Synthetic oligonucleotide
  Target: LAMA2; (+) strand; PAM type: YTN; PAM sequence: TTT
tctttttttttttttttttt

SEQ ID NO: 394276 - DNA, 20 bp, Artificial Sequence
  Description of Artificial Sequence: Synthetic oligonucleotide
  Target: LAMA2; (+) strand; PAM type: YTN; PAM sequence: TTT
cttttttttttttttttttt

SEQ ID NO: 394277 - DNA, 20 bp, Artificial Sequence
  Description of Artificial Sequence: Synthetic oligonucleotide
  Target: LAMA2; (+) strand; PAM type: YTN; PAM sequence: TTC
tttttttttttttttttttt

SEQ ID NO: 394278 - DNA, 20 bp, Artificial Sequence
  Description of Artificial Sequence: Synthetic oligonucleotide
  Target: LAMA2; (+) strand; PAM type: YTN; PAM sequence: CTT
ttttttttttttttttttga

SEQ ID NO: 394279 - DNA, 20 bp, Artificial Sequence
  Description of Artificial Sequence: Synthetic oligonucleotide
  Target: LAMA2; (+) strand; PAM type: YTN; PAM sequence: TTT
tttttttttttttttttgag

SEQ ID NO: 394280 - DNA, 20 bp, Artificial Sequence
  Description of Artificial Sequence: Synthetic oligonucleotide
  Target: LAMA2; (+) strand; PAM type: YTN; PAM sequence: TTT
ttttttttttttttttgaga

SEQ ID NO: 394281 - DNA, 20 bp, Artificial Sequence
  Description of Artificial Sequence: Synthetic oligonucleotide
  Target: LAMA2; (+) strand; PAM type: YTN; PAM sequence: TTT
tttttttttttttttgagac

SEQ ID NO: 394282 - DNA, 20 bp, Artificial Sequence
  Description of Artificial Sequence: Synthetic oligonucleotide
  Target: LAMA2; (+) strand; PAM type: YTN; PAM sequence: TTT
ttttttttttttttgagaca

SEQ ID NO: 394283 - DNA, 20 bp, Artificial Sequence
  Description of Artificial Sequence: Synthetic oligonucleotide
  Target: LAMA2; (+) strand; PAM type: YTN; PAM sequence: TTT
tttttttttttttgagacag

SEQ ID NO: 394284 - DNA, 20 bp, Artificial Sequence
  Description of Artificial Sequence: Synthetic oligonucleotide
  Target: LAMA2; (+) strand; PAM type: YTN; PAM sequence: TTT
ttttttttttttgagacaga

SEQ ID NO: 394285 - DNA, 20 bp, Artificial Sequence
  Description of Artificial Sequence: Synthetic oligonucleotide
  Target: LAMA2; (+) strand; PAM type: YTN; PAM sequence: TTT
tttttttttttgagacagag

SEQ ID NO: 394286 - DNA, 20 bp, Artificial Sequence
  Description of Artificial Sequence: Synthetic oligonucleotide
  Target: LAMA2; (+) strand; PAM type: YTN; PAM sequence: TTT
ttttttttttgagacagagt

SEQ ID NO: 394287 - DNA, 20 bp, Artificial Sequence
  Description of Artificial Sequence: Synthetic oligonucleotide
  Target: LAMA2; (+) strand; PAM type: YTN; PAM sequence: TTT
tttttttttgagacagagtt

SEQ ID NO: 394288 - DNA, 20 bp, Artificial Sequence
  Description of Artificial Sequence: Synthetic oligonucleotide
  Target: LAMA2; (+) strand; PAM type: YTN; PAM sequence: TTT
ttttttttgagacagagttt

SEQ ID NO: 394289 - DNA, 20 bp, Artificial Sequence
  Description of Artificial Sequence: Synthetic oligonucleotide
  Target: LAMA2; (+) strand; PAM type: YTN; PAM sequence: TTT
tttttttgagacagagtttc

SEQ ID NO: 394290 - DNA, 20 bp, Artificial Sequence
  Description of Artificial Sequence: Synthetic oligonucleotide
  Target: LAMA2; (+) strand; PAM type: YTN; PAM sequence: TTT
ttttttgagacagagtttcg

SEQ ID NO: 394291 - DNA, 20 bp, Artificial Sequence
  Description of Artificial Sequence: Synthetic oligonucleotide
  Target: LAMA2; (+) strand; PAM type: YTN; PAM sequence: TTT
tttttgagacagagtttcgc

SEQ ID NO: 394292 - DNA, 20 bp, Artificial Sequence
  Description of Artificial Sequence: Synthetic oligonucleotide
  Target: LAMA2; (+) strand; PAM type: YTN; PAM sequence: TTT
ttttgagacagagtttcgct

SEQ ID NO: 394293 - DNA, 20 bp, Artificial Sequence
  Description of Artificial Sequence: Synthetic oligonucleotide
  Target: LAMA2; (+) strand; PAM type: YTN; PAM sequence: TTT
tttgagacagagtttcgctc

SEQ ID NO: 394294 - DNA, 20 bp, Artificial Sequence
  Description of Artificial Sequence: Synthetic oligonucleotide
  Target: LAMA2; (+) strand; PAM type: YTN; PAM sequence: TTT
ttgagacagagtttcgctct

SEQ ID NO: 394295 - DNA, 20 bp, Artificial Sequence
  Description of Artificial Sequence: Synthetic oligonucleotide
  Target: LAMA2; (+) strand; PAM type: YTN; PAM sequence: TTT
tgagacagagtttcgctctt

SEQ ID NO: 394296 - DNA, 20 bp, Artificial Sequence
  Description of Artificial Sequence: Synthetic oligonucleotide
  Target: LAMA2; (+) strand; PAM type: YTN; PAM sequence: TTT
gagacagagtttcgctcttg

SEQ ID NO: 394297 - DNA, 20 bp, Artificial Sequence
  Description of Artificial Sequence: Synthetic oligonucleotide
  Target: LAMA2; (+) strand; PAM type: YTN; PAM sequence: TTG
agacagagtttcgctcttgt

SEQ ID NO: 394298 - DNA, 20 bp, Artificial Sequence
  Description of Artificial Sequence: Synthetic oligonucleotide
  Target: LAMA2; (+) strand; PAM type: YTN; PAM sequence: TTT
cgctcttgtcacccaggctg

SEQ ID NO: 394299 - DNA, 20 bp, Artificial Sequence
  Description of Artificial Sequence: Synthetic oligonucleotide
  Target: LAMA2; (+) strand; PAM type: YTN; PAM sequence: TTC
gctcttgtcacccaggctgg

SEQ ID NO: 394300 - DNA, 20 bp, Artificial Sequence
  Description of Artificial Sequence: Synthetic oligonucleotide
  Target: LAMA2; (+) strand; PAM type: YTN; PAM sequence: CTC
ttgtcacccaggctggattg

SEQ ID NO: 394301 - DNA, 20 bp, Artificial Sequence
  Description of Artificial Sequence: Synthetic oligonucleotide
  Target: LAMA2; (+) strand; PAM type: YTN; PAM sequence: CTT
gtcacccaggctggattgca

SEQ ID NO: 394302 - DNA, 20 bp, Artificial Sequence
  Description of Artificial Sequence: Synthetic oligonucleotide
  Target: LAMA2; (+) strand; PAM type: YTN; PAM sequence: TTG
tcacccaggctggattgcaa

SEQ ID NO: 394303 - DNA, 20 bp, Artificial Sequence
  Description of Artificial Sequence: Synthetic oligonucleotide
  Target: LAMA2; (+) strand; PAM type: YTN; PAM sequence: CTG
gattgcaatggtgcaatctt

SEQ ID NO: 394304 - DNA, 20 bp, Artificial Sequence
  Description of Artificial Sequence: Synthetic oligonucleotide
  Target: LAMA2; (+) strand; PAM type: YTN; PAM sequence: TTG
caatggtgcaatcttggctc

SEQ ID NO: 394305 - DNA, 20 bp, Artificial Sequence
  Description of Artificial Sequence: Synthetic oligonucleotide
  Target: LAMA2; (+) strand; PAM type: YTN; PAM sequence: CTT
ggctcactttaacctccacc

SEQ ID NO: 394306 - DNA, 20 bp, Artificial Sequence
  Description of Artificial Sequence: Synthetic oligonucleotide
  Target: LAMA2; (+) strand; PAM type: YTN; PAM sequence: TTG
gctcactttaacctccacct

SEQ ID NO: 394307 - DNA, 20 bp, Artificial Sequence
  Description of Artificial Sequence: Synthetic oligonucleotide
  Target: LAMA2; (+) strand; PAM type: YTN; PAM sequence: CTC
actttaacctccacctctca

SEQ ID NO: 394308 - DNA, 20 bp, Artificial Sequence
  Description of Artificial Sequence: Synthetic oligonucleotide
  Target: LAMA2; (+) strand; PAM type: YTN; PAM sequence: CTT
taacctccacctctcaggtc

SEQ ID NO: 394309 - DNA, 20 bp, Artificial Sequence
  Description of Artificial Sequence: Synthetic oligonucleotide
  Target: LAMA2; (+) strand; PAM type: YTN; PAM sequence: TTT
aacctccacctctcaggtca

SEQ ID NO: 394310 - DNA, 20 bp, Artificial Sequence
  Description of Artificial Sequence: Synthetic oligonucleotide
  Target: LAMA2; (+) strand; PAM type: YTN; PAM sequence: TTA
acctccacctctcaggtcaa

SEQ ID NO: 394311 - DNA, 20 bp, Artificial Sequence
  Description of Artificial Sequence: Synthetic oligonucleotide
  Target: LAMA2; (+) strand; PAM type: YTN; PAM sequence: CTC
cacctctcaggtcaagtgat

SEQ ID NO: 394312 - DNA, 20 bp, Artificial Sequence
  Description of Artificial Sequence: Synthetic oligonucleotide
  Target: LAMA2; (+) strand; PAM type: YTN; PAM sequence: CTC
tcaggtcaagtgattctcct

SEQ ID NO: 394313 - DNA, 20 bp, Artificial Sequence
  Description of Artificial Sequence: Synthetic oligonucleotide
  Target: LAMA2; (+) strand; PAM type: YTN; PAM sequence: CTC
aggtcaagtgattctcctgc

SEQ ID NO: 394314 - DNA, 20 bp, Artificial Sequence
  Description of Artificial Sequence: Synthetic oligonucleotide
  Target: LAMA2; (+) strand; PAM type: YTN; PAM sequence: TTC
tcctgcctcagcctcccaag

SEQ ID NO: 394315 - DNA, 20 bp, Artificial Sequence
  Description of Artificial Sequence: Synthetic oligonucleotide
  Target: LAMA2; (+) strand; PAM type: YTN; PAM sequence: CTC
ctgcctcagcctcccaagta

SEQ ID NO: 394316 - DNA, 20 bp, Artificial Sequence
  Description of Artificial Sequence: Synthetic oligonucleotide
  Target: LAMA2; (+) strand; PAM type: YTN; PAM sequence: CTG
cctcagcctcccaagtagct

SEQ ID NO: 394317 - DNA, 20 bp, Artificial Sequence
  Description of Artificial Sequence: Synthetic oligonucleotide
  Target: LAMA2; (+) strand; PAM type: YTN; PAM sequence: CTC
agcctcccaagtagctgaga

SEQ ID NO: 394318 - DNA, 20 bp, Artificial Sequence
  Description of Artificial Sequence: Synthetic oligonucleotide
  Target: LAMA2; (+) strand; PAM type: YTN; PAM sequence: CTC
ccaagtagctgagattacag

SEQ ID NO: 394319 - DNA, 20 bp, Artificial Sequence
  Description of Artificial Sequence: Synthetic oligonucleotide
  Target: LAMA2; (+) strand; PAM type: YTN; PAM sequence: CTG
agattacaggcatgcaccac

SEQ ID NO: 394320 - DNA, 20 bp, Artificial Sequence
  Description of Artificial Sequence: Synthetic oligonucleotide
  Target: LAMA2; (+) strand; PAM type: YTN; PAM sequence: TTA
caggcatgcaccaccacacc

SEQ ID NO: 394321 - DNA, 20 bp, Artificial Sequence
  Description of Artificial Sequence: Synthetic oligonucleotide
  Target: LAMA2; (+) strand; PAM type: YTN; PAM sequence: CTA
attttgtatttttagtagag

SEQ ID NO: 394322 - DNA, 20 bp, Artificial Sequence
  Description of Artificial Sequence: Synthetic oligonucleotide
  Target: LAMA2; (+) strand; PAM type: YTN; PAM sequence: TTT
tgtatttttagtagagacga

SEQ ID NO: 394323 - DNA, 20 bp, Artificial Sequence
  Description of Artificial Sequence: Synthetic oligonucleotide
  Target: LAMA2; (+) strand; PAM type: YTN; PAM sequence: TTT
gtatttttagtagagacgag

SEQ ID NO: 394324 - DNA, 20 bp, Artificial Sequence
  Description of Artificial Sequence: Synthetic oligonucleotide
  Target: LAMA2; (+) strand; PAM type: YTN; PAM sequence: TTG
tatttttagtagagacgagg

SEQ ID NO: 394325 - DNA, 20 bp, Artificial Sequence
  Description of Artificial Sequence: Synthetic oligonucleotide
  Target: LAMA2; (+) strand; PAM type: YTN; PAM sequence: TTT
ttagtagagacgaggtttca

SEQ ID NO: 394326 - DNA, 20 bp, Artificial Sequence
  Description of Artificial Sequence: Synthetic oligonucleotide
  Target: LAMA2; (+) strand; PAM type: YTN; PAM sequence: TTT
tagtagagacgaggtttcac

SEQ ID NO: 394327 - DNA, 20 bp, Artificial Sequence
  Description of Artificial Sequence: Synthetic oligonucleotide
  Target: LAMA2; (+) strand; PAM type: YTN; PAM sequence: TTT
agtagagacgaggtttcacc

SEQ ID NO: 394328 - DNA, 20 bp, Artificial Sequence
  Description of Artificial Sequence: Synthetic oligonucleotide
  Target: LAMA2; (+) strand; PAM type: YTN; PAM sequence: TTA
gtagagacgaggtttcacca

SEQ ID NO: 394329 - DNA, 20 bp, Artificial Sequence
  Description of Artificial Sequence: Synthetic oligonucleotide
  Target: LAMA2; (+) strand; PAM type: YTN; PAM sequence: TTT
caccatgttggccaggctgg

SEQ ID NO: 394330 - DNA, 20 bp, Artificial Sequence
  Description of Artificial Sequence: Synthetic oligonucleotide
  Target: LAMA2; (+) strand; PAM type: YTN; PAM sequence: TTC
accatgttggccaggctggt

SEQ ID NO: 394331 - DNA, 20 bp, Artificial Sequence
  Description of Artificial Sequence: Synthetic oligonucleotide
  Target: LAMA2; (+) strand; PAM type: YTN; PAM sequence: TTG
gccaggctggtctcggactc

SEQ ID NO: 394332 - DNA, 20 bp, Artificial Sequence
  Description of Artificial Sequence: Synthetic oligonucleotide
  Target: LAMA2; (+) strand; PAM type: YTN; PAM sequence: CTG
gtctcggactcctgacctca

SEQ ID NO: 394333 - DNA, 20 bp, Artificial Sequence
  Description of Artificial Sequence: Synthetic oligonucleotide
  Target: LAMA2; (+) strand; PAM type: YTN; PAM sequence: CTC
ggactcctgacctcaggtga

SEQ ID NO: 394334 - DNA, 20 bp, Artificial Sequence
  Description of Artificial Sequence: Synthetic oligonucleotide
  Target: LAMA2; (+) strand; PAM type: YTN; PAM sequence: CTC
ctgacctcaggtgatccacc

SEQ ID NO: 394335 - DNA, 20 bp, Artificial Sequence
  Description of Artificial Sequence: Synthetic oligonucleotide
  Target: LAMA2; (+) strand; PAM type: YTN; PAM sequence: CTG
acctcaggtgatccacctgc

SEQ ID NO: 394336 - DNA, 20 bp, Artificial Sequence
  Description of Artificial Sequence: Synthetic oligonucleotide
  Target: LAMA2; (+) strand; PAM type: YTN; PAM sequence: CTC
aggtgatccacctgccttgg

SEQ ID NO: 394337 - DNA, 20 bp, Artificial Sequence
  Description of Artificial Sequence: Synthetic oligonucleotide
  Target: LAMA2; (+) strand; PAM type: YTN; PAM sequence: CTG
ccttggcctcccaaagtgct

SEQ ID NO: 394338 - DNA, 20 bp, Artificial Sequence
  Description of Artificial Sequence: Synthetic oligonucleotide
  Target: LAMA2; (+) strand; PAM type: YTN; PAM sequence: CTT
ggcctcccaaagtgctggga

SEQ ID NO: 394339 - DNA, 20 bp, Artificial Sequence
  Description of Artificial Sequence: Synthetic oligonucleotide
  Target: LAMA2; (+) strand; PAM type: YTN; PAM sequence: TTG
gcctcccaaagtgctgggat

SEQ ID NO: 394340 - DNA, 20 bp, Artificial Sequence
  Description of Artificial Sequence: Synthetic oligonucleotide
  Target: LAMA2; (+) strand; PAM type: YTN; PAM sequence: CTC
ccaaagtgctgggataacag

SEQ ID NO: 394341 - DNA, 20 bp, Artificial Sequence
  Description of Artificial Sequence: Synthetic oligonucleotide
  Target: LAMA2; (+) strand; PAM type: YTN; PAM sequence: CTG
ggataacaggcatgagccac

SEQ ID NO: 394342 - DNA, 20 bp, Artificial Sequence
  Description of Artificial Sequence: Synthetic oligonucleotide
  Target: LAMA2; (+) strand; PAM type: YTN; PAM sequence: CTG
acccatttttatttatttat

SEQ ID NO: 394343 - DNA, 20 bp, Artificial Sequence
  Description of Artificial Sequence: Synthetic oligonucleotide
  Target: LAMA2; (+) strand; PAM type: YTN; PAM sequence: TTT
ttatttatttattaaaaaat

SEQ ID NO: 394344 - DNA, 20 bp, Artificial Sequence
  Description of Artificial Sequence: Synthetic oligonucleotide
  Target: LAMA2; (+) strand; PAM type: YTN; PAM sequence: TTT
tatttatttattaaaaaata

SEQ ID NO: 394345 - DNA, 20 bp, Artificial Sequence
  Description of Artificial Sequence: Synthetic oligonucleotide
  Target: LAMA2; (+) strand; PAM type: YTN; PAM sequence: TTT
atttatttattaaaaaatat

SEQ ID NO: 394346 - DNA, 20 bp, Artificial Sequence
  Description of Artificial Sequence: Synthetic oligonucleotide
  Target: LAMA2; (+) strand; PAM type: YTN; PAM sequence: TTA
tttatttattaaaaaatatt

SEQ ID NO: 394347 - DNA, 20 bp, Artificial Sequence
  Description of Artificial Sequence: Synthetic oligonucleotide
  Target: LAMA2; (+) strand; PAM type: YTN; PAM sequence: TTT
atttattaaaaaatatttat

SEQ ID NO: 394348 - DNA, 20 bp, Artificial Sequence
  Description of Artificial Sequence: Synthetic oligonucleotide
  Target: LAMA2; (+) strand; PAM type: YTN; PAM sequence: TTA
tttattaaaaaatatttatt

SEQ ID NO: 394349 - DNA, 20 bp, Artificial Sequence
  Description of Artificial Sequence: Synthetic oligonucleotide
  Target: LAMA2; (+) strand; PAM type: YTN; PAM sequence: TTT
attaaaaaatatttattgag

SEQ ID NO: 394350 - DNA, 20 bp, Artificial Sequence
  Description of Artificial Sequence: Synthetic oligonucleotide
  Target: LAMA2; (+) strand; PAM type: YTN; PAM sequence: TTA
ttaaaaaatatttattgagg

SEQ ID NO: 394351 - DNA, 20 bp, Artificial Sequence
  Description of Artificial Sequence: Synthetic oligonucleotide
  Target: LAMA2; (+) strand; PAM type: YTN; PAM sequence: TTA
aaaaatatttattgaggaaa

SEQ ID NO: 394352 - DNA, 20 bp, Artificial Sequence
  Description of Artificial Sequence: Synthetic oligonucleotide
  Target: LAMA2; (+) strand; PAM type: YTN; PAM sequence: TTT
attgaggaaactcatctaca

SEQ ID NO: 394353 - DNA, 20 bp, Artificial Sequence
  Description of Artificial Sequence: Synthetic oligonucleotide
  Target: LAMA2; (+) strand; PAM type: YTN; PAM sequence: TTA
ttgaggaaactcatctacat

SEQ ID NO: 394354 - DNA, 20 bp, Artificial Sequence
  Description of Artificial Sequence: Synthetic oligonucleotide
  Target: LAMA2; (+) strand; PAM type: YTN; PAM sequence: TTG
aggaaactcatctacatact

SEQ ID NO: 394355 - DNA, 20 bp, Artificial Sequence
  Description of Artificial Sequence: Synthetic oligonucleotide
  Target: LAMA2; (+) strand; PAM type: YTN; PAM sequence: CTC
atctacatactagagatagt

SEQ ID NO: 394356 - DNA, 20 bp, Artificial Sequence
  Description of Artificial Sequence: Synthetic oligonucleotide
  Target: LAMA2; (+) strand; PAM type: YTN; PAM sequence: CTA
catactagagatagtgatat

SEQ ID NO: 394357 - DNA, 20 bp, Artificial Sequence
  Description of Artificial Sequence: Synthetic oligonucleotide
  Target: LAMA2; (+) strand; PAM type: YTN; PAM sequence: CTA
gagatagtgatatataaaac

SEQ ID NO: 394358 - DNA, 20 bp, Artificial Sequence
  Description of Artificial Sequence: Synthetic oligonucleotide
  Target: LAMA2; (+) strand; PAM type: YTN; PAM sequence: CTG
tctttatggaatttgtgtta

SEQ ID NO: 394359 - DNA, 20 bp, Artificial Sequence
  Description of Artificial Sequence: Synthetic oligonucleotide
  Target: LAMA2; (+) strand; PAM type: YTN; PAM sequence: CTT
tatggaatttgtgttacagt

SEQ ID NO: 394360 - DNA, 20 bp, Artificial Sequence
  Description of Artificial Sequence: Synthetic oligonucleotide
  Target: LAMA2; (+) strand; PAM type: YTN; PAM sequence: TTT
atggaatttgtgttacagtg

SEQ ID NO: 394361 - DNA, 20 bp, Artificial Sequence
  Description of Artificial Sequence: Synthetic oligonucleotide
  Target: LAMA2; (+) strand; PAM type: YTN; PAM sequence: TTA
tggaatttgtgttacagtgc

SEQ ID NO: 394362 - DNA, 20 bp, Artificial Sequence
  Description of Artificial Sequence: Synthetic oligonucleotide
  Target: LAMA2; (+) strand; PAM type: YTN; PAM sequence: TTT
gtgttacagtgcaggagaca

SEQ ID NO: 394363 - DNA, 20 bp, Artificial Sequence
  Description of Artificial Sequence: Synthetic oligonucleotide
  Target: LAMA2; (+) strand; PAM type: YTN; PAM sequence: TTG
tgttacagtgcaggagacag

SEQ ID NO: 394364 - DNA, 20 bp, Artificial Sequence
  Description of Artificial Sequence: Synthetic oligonucleotide
  Target: LAMA2; (+) strand; PAM type: YTN; PAM sequence: TTA
cagtgcaggagacagtcact

SEQ ID NO: 394365 - DNA, 20 bp, Artificial Sequence
  Description of Artificial Sequence: Synthetic oligonucleotide
  Target: LAMA2; (+) strand; PAM type: YTN; PAM sequence: CTA
agtcaataaataagcataag

SEQ ID NO: 394366 - DNA, 20 bp, Artificial Sequence
  Description of Artificial Sequence: Synthetic oligonucleotide
  Target: LAMA2; (+) strand; PAM type: YTN; PAM sequence: CTA
cgaccataaagtctggatgc

SEQ ID NO: 394367 - DNA, 20 bp, Artificial Sequence
  Description of Artificial Sequence: Synthetic oligonucleotide
  Target: LAMA2; (+) strand; PAM type: YTN; PAM sequence: CTG
gatgcacgggctgataaaca

SEQ ID NO: 394368 - DNA, 20 bp, Artificial Sequence
  Description of Artificial Sequence: Synthetic oligonucleotide
  Target: LAMA2; (+) strand; PAM type: YTN; PAM sequence: CTG
ataaacataagttgtttact

SEQ ID NO: 394369 - DNA, 20 bp, Artificial Sequence
  Description of Artificial Sequence: Synthetic oligonucleotide
  Target: LAMA2; (+) strand; PAM type: YTN; PAM sequence: TTG
tttactgatatgtaataaat

SEQ ID NO: 394370 - DNA, 20 bp, Artificial Sequence
  Description of Artificial Sequence: Synthetic oligonucleotide
  Target: LAMA2; (+) strand; PAM type: YTN; PAM sequence: TTT
actgatatgtaataaatggt

SEQ ID NO: 394371 - DNA, 20 bp, Artificial Sequence
  Description of Artificial Sequence: Synthetic oligonucleotide
  Target: LAMA2; (+) strand; PAM type: YTN; PAM sequence: TTA
ctgatatgtaataaatggta

SEQ ID NO: 394372 - DNA, 20 bp, Artificial Sequence
  Description of Artificial Sequence: Synthetic oligonucleotide
  Target: LAMA2; (+) strand; PAM type: YTN; PAM sequence: CTG
atatgtaataaatggtatgt

SEQ ID NO: 394373 - DNA, 20 bp, Artificial Sequence
  Description of Artificial Sequence: Synthetic oligonucleotide
  Target: LAMA2; (+) strand; PAM type: YTN; PAM sequence: TTG
catgatattgcataatagat

SEQ ID NO: 394374 - DNA, 20 bp, Artificial Sequence
  Description of Artificial Sequence: Synthetic oligonucleotide
  Target: LAMA2; (+) strand; PAM type: YTN; PAM sequence: TTG
cataatagattcaatgtgtt

SEQ ID NO: 394375 - DNA, 20 bp, Artificial Sequence
  Description of Artificial Sequence: Synthetic oligonucleotide
  Target: LAMA2; (+) strand; PAM type: YTN; PAM sequence: TTC
aatgtgttgtccttcattaa

SEQ ID NO: 394376 - DNA, 20 bp, Artificial Sequence
  Description of Artificial Sequence: Synthetic oligonucleotide
  Target: LAMA2; (+) strand; PAM type: YTN; PAM sequence: TTG
tccttcattaacaatgtgta

SEQ ID NO: 394377 - DNA, 20 bp, Artificial Sequence
  Description of Artificial Sequence: Synthetic oligonucleotide
  Target: LAMA2; (+) strand; PAM type: YTN; PAM sequence: CTT
cattaacaatgtgtagttca

SEQ ID NO: 394378 - DNA, 20 bp, Artificial Sequence
  Description of Artificial Sequence: Synthetic oligonucleotide
  Target: LAMA2; (+) strand; PAM type: YTN; PAM sequence: TTC
attaacaatgtgtagttcaa

SEQ ID NO: 394379 - DNA, 20 bp, Artificial Sequence
  Description of Artificial Sequence: Synthetic oligonucleotide
  Target: LAMA2; (+) strand; PAM type: YTN; PAM sequence: TTA
acaatgtgtagttcaacagg

SEQ ID NO: 394380 - DNA, 20 bp, Artificial Sequence
  Description of Artificial Sequence: Synthetic oligonucleotide
  Target: LAMA2; (+) strand; PAM type: YTN; PAM sequence: TTC
aacaggctgtgcctttctgc

SEQ ID NO: 394381 - DNA, 20 bp, Artificial Sequence
  Description of Artificial Sequence: Synthetic oligonucleotide
  Target: LAMA2; (+) strand; PAM type: YTN; PAM sequence: CTG
tgcctttctgctagtccctg

SEQ ID NO: 394382 - DNA, 20 bp, Artificial Sequence
  Description of Artificial Sequence: Synthetic oligonucleotide
  Target: LAMA2; (+) strand; PAM type: YTN; PAM sequence: CTT
tctgctagtccctgtacatg

SEQ ID NO: 394383 - DNA, 20 bp, Artificial Sequence
  Description of Artificial Sequence: Synthetic oligonucleotide
  Target: LAMA2; (+) strand; PAM type: YTN; PAM sequence: TTT
ctgctagtccctgtacatgt

SEQ ID NO: 394384 - DNA, 20 bp, Artificial Sequence
  Description of Artificial Sequence: Synthetic oligonucleotide
  Target: LAMA2; (+) strand; PAM type: YTN; PAM sequence: TTC
tgctagtccctgtacatgta

SEQ ID NO: 394385 - DNA, 20 bp, Artificial Sequence
  Description of Artificial Sequence: Synthetic oligonucleotide
  Target: LAMA2; (+) strand; PAM type: YTN; PAM sequence: CTG
ctagtccctgtacatgtatc

SEQ ID NO: 394386 - DNA, 20 bp, Artificial Sequence
  Description of Artificial Sequence: Synthetic oligonucleotide
  Target: LAMA2; (+) strand; PAM type: YTN; PAM sequence: CTA
gtccctgtacatgtatctgt

SEQ ID NO: 394387 - DNA, 20 bp, Artificial Sequence
  Description of Artificial Sequence: Synthetic oligonucleotide
  Target: LAMA2; (+) strand; PAM type: YTN; PAM sequence: CTG
tacatgtatctgtgatgcat

SEQ ID NO: 394388 - DNA, 20 bp, Artificial Sequence
  Description of Artificial Sequence: Synthetic oligonucleotide
  Target: LAMA2; (+) strand; PAM type: YTN; PAM sequence: CTG
tgatgcattggtatttctga

SEQ ID NO: 394389 - DNA, 20 bp, Artificial Sequence
  Description of Artificial Sequence: Synthetic oligonucleotide
  Target: LAMA2; (+) strand; PAM type: YTN; PAM sequence: TTG
gtatttctgatttttattac

SEQ ID NO: 394390 - DNA, 20 bp, Artificial Sequence
  Description of Artificial Sequence: Synthetic oligonucleotide
  Target: LAMA2; (+) strand; PAM type: YTN; PAM sequence: TTT
ctgatttttattacctaatc

SEQ ID NO: 394391 - DNA, 20 bp, Artificial Sequence
  Description of Artificial Sequence: Synthetic oligonucleotide
  Target: LAMA2; (+) strand; PAM type: YTN; PAM sequence: TTC
tgatttttattacctaatct

SEQ ID NO: 394392 - DNA, 20 bp, Artificial Sequence
  Description of Artificial Sequence: Synthetic oligonucleotide
  Target: LAMA2; (+) strand; PAM type: YTN; PAM sequence: CTG
atttttattacctaatcttt

SEQ ID NO: 394393 - DNA, 20 bp, Artificial Sequence
  Description of Artificial Sequence: Synthetic oligonucleotide
  Target: LAMA2; (+) strand; PAM type: YTN; PAM sequence: TTT
ttattacctaatctttgttt

SEQ ID NO: 394394 - DNA, 20 bp, Artificial Sequence
  Description of Artificial Sequence: Synthetic oligonucleotide
  Target: LAMA2; (+) strand; PAM type: YTN; PAM sequence: TTT
tattacctaatctttgtttt

SEQ ID NO: 394395 - DNA, 20 bp, Artificial Sequence
  Description of Artificial Sequence: Synthetic oligonucleotide
  Target: LAMA2; (+) strand; PAM type: YTN; PAM sequence: TTT
attacctaatctttgttttt

SEQ ID NO: 394396 - DNA, 20 bp, Artificial Sequence
  Description of Artificial Sequence: Synthetic oligonucleotide
  Target: LAMA2; (+) strand; PAM type: YTN; PAM sequence: TTA
ttacctaatctttgttttta

SEQ ID NO: 394397 - DNA, 20 bp, Artificial Sequence
  Description of Artificial Sequence: Synthetic oligonucleotide
  Target: LAMA2; (+) strand; PAM type: YTN; PAM sequence: TTA
cctaatctttgtttttagca

SEQ ID NO: 394398 - DNA, 20 bp, Artificial Sequence
  Description of Artificial Sequence: Synthetic oligonucleotide
  Target: LAMA2; (+) strand; PAM type: YTN; PAM sequence: CTA
atctttgtttttagcaactc

SEQ ID NO: 394399 - DNA, 20 bp, Artificial Sequence
  Description of Artificial Sequence: Synthetic oligonucleotide
  Target: LAMA2; (+) strand; PAM type: YTN; PAM sequence: CTT
tgtttttagcaactcccggc

SEQ ID NO: 394400 - DNA, 20 bp, Artificial Sequence
  Description of Artificial Sequence: Synthetic oligonucleotide
  Target: LAMA2; (+) strand; PAM type: YTN; PAM sequence: TTT
gtttttagcaactcccggca

SEQ ID NO: 394401 - DNA, 20 bp, Artificial Sequence
  Description of Artificial Sequence: Synthetic oligonucleotide
  Target: LAMA2; (+) strand; PAM type: YTN; PAM sequence: TTG
tttttagcaactcccggcaa

SEQ ID NO: 394402 - DNA, 20 bp, Artificial Sequence
  Description of Artificial Sequence: Synthetic oligonucleotide
  Target: LAMA2; (+) strand; PAM type: YTN; PAM sequence: TTT
ttagcaactcccggcaaaag

SEQ ID NO: 394403 - DNA, 20 bp, Artificial Sequence
  Description of Artificial Sequence: Synthetic oligonucleotide
  Target: LAMA2; (+) strand; PAM type: YTN; PAM sequence: TTT
tagcaactcccggcaaaagt

SEQ ID NO: 394404 - DNA, 20 bp, Artificial Sequence
  Description of Artificial Sequence: Synthetic oligonucleotide
  Target: LAMA2; (+) strand; PAM type: YTN; PAM sequence: TTT
agcaactcccggcaaaagta

SEQ ID NO: 394405 - DNA, 20 bp, Artificial Sequence
  Description of Artificial Sequence: Synthetic oligonucleotide
  Target: LAMA2; (+) strand; PAM type: YTN; PAM sequence: TTA
gcaactcccggcaaaagtaa

SEQ ID NO: 394406 - DNA, 20 bp, Artificial Sequence
  Description of Artificial Sequence: Synthetic oligonucleotide
  Target: LAMA2; (+) strand; PAM type: YTN; PAM sequence: CTC
ccggcaaaagtaatcaagac

SEQ ID NO: 394407 - DNA, 20 bp, Artificial Sequence
  Description of Artificial Sequence: Synthetic oligonucleotide
  Target: LAMA2; (+) strand; PAM type: YTN; PAM sequence: CTA
tataaaaaagaaaataatat

SEQ ID NO: 394408 - DNA, 20 bp, Artificial Sequence
  Description of Artificial Sequence: Synthetic oligonucleotide
  Target: LAMA2; (+) strand; PAM type: YTN; PAM sequence: TTG
tctatgtttctaccactctg

SEQ ID NO: 394409 - DNA, 20 bp, Artificial Sequence
  Description of Artificial Sequence: Synthetic oligonucleotide
  Target: LAMA2; (+) strand; PAM type: YTN; PAM sequence: CTA
tgtttctaccactctgtaga

SEQ ID NO: 394410 - DNA, 20 bp, Artificial Sequence
  Description of Artificial Sequence: Synthetic oligonucleotide
  Target: LAMA2; (+) strand; PAM type: YTN; PAM sequence: TTT
ctaccactctgtagaatata

SEQ ID NO: 394411 - DNA, 20 bp, Artificial Sequence
  Description of Artificial Sequence: Synthetic oligonucleotide
  Target: LAMA2; (+) strand; PAM type: YTN; PAM sequence: TTC
taccactctgtagaatataa

SEQ ID NO: 394412 - DNA, 20 bp, Artificial Sequence
  Description of Artificial Sequence: Synthetic oligonucleotide
  Target: LAMA2; (+) strand; PAM type: YTN; PAM sequence: CTA
ccactctgtagaatataatt

SEQ ID NO: 394413 - DNA, 20 bp, Artificial Sequence
  Description of Artificial Sequence: Synthetic oligonucleotide
  Target: LAMA2; (+) strand; PAM type: YTN; PAM sequence: CTC
tgtagaatataattcagata

SEQ ID NO: 394414 - DNA, 20 bp, Artificial Sequence
  Description of Artificial Sequence: Synthetic oligonucleotide
  Target: LAMA2; (+) strand; PAM type: YTN; PAM sequence: CTG
tagaatataattcagataaa

SEQ ID NO: 394415 - DNA, 20 bp, Artificial Sequence
  Description of Artificial Sequence: Synthetic oligonucleotide
  Target: LAMA2; (+) strand; PAM type: YTN; PAM sequence: TTC
agataaatgggttctaagaa

SEQ ID NO: 394416 - DNA, 20 bp, Artificial Sequence
  Description of Artificial Sequence: Synthetic oligonucleotide
  Target: LAMA2; (+) strand; PAM type: YTN; PAM sequence: TTC
taagaagaacaaaataaggt

SEQ ID NO: 394417 - DNA, 20 bp, Artificial Sequence
  Description of Artificial Sequence: Synthetic oligonucleotide
  Target: LAMA2; (+) strand; PAM type: YTN; PAM sequence: CTA
agaagaacaaaataaggtaa

SEQ ID NO: 394418 - DNA, 20 bp, Artificial Sequence
  Description of Artificial Sequence: Synthetic oligonucleotide
  Target: LAMA2; (+) strand; PAM type: YTN; PAM sequence: TTA
taatagttaaaattacagtg

SEQ ID NO: 394419 - DNA, 20 bp, Artificial Sequence
  Description of Artificial Sequence: Synthetic oligonucleotide
  Target: LAMA2; (+) strand; PAM type: YTN; PAM sequence: TTA
aaattacagtgttactgggt

SEQ ID NO: 394420 - DNA, 20 bp, Artificial Sequence
  Description of Artificial Sequence: Synthetic oligonucleotide
  Target: LAMA2; (+) strand; PAM type: YTN; PAM sequence: TTA
cagtgttactgggtgccagg

SEQ ID NO: 394421 - DNA, 20 bp, Artificial Sequence
  Description of Artificial Sequence: Synthetic oligonucleotide
  Target: LAMA2; (+) strand; PAM type: YTN; PAM sequence: TTA
ctgggtgccaggcagtgttc

SEQ ID NO: 394422 - DNA, 20 bp, Artificial Sequence
  Description of Artificial Sequence: Synthetic oligonucleotide
  Target: LAMA2; (+) strand; PAM type: YTN; PAM sequence: CTG
ggtgccaggcagtgttctaa

SEQ ID NO: 394423 - DNA, 20 bp, Artificial Sequence
  Description of Artificial Sequence: Synthetic oligonucleotide
  Target: LAMA2; (+) strand; PAM type: YTN; PAM sequence: TTC
taagctaattcttctccaat

SEQ ID NO: 394424 - DNA, 20 bp, Artificial Sequence
  Description of Artificial Sequence: Synthetic oligonucleotide
  Target: LAMA2; (+) strand; PAM type: YTN; PAM sequence: CTA
agctaattcttctccaattt

SEQ ID NO: 394425 - DNA, 20 bp, Artificial Sequence
  Description of Artificial Sequence: Synthetic oligonucleotide
  Target: LAMA2; (+) strand; PAM type: YTN; PAM sequence: CTA
attcttctccaattttacaa

SEQ ID NO: 394426 - DNA, 20 bp, Artificial Sequence
  Description of Artificial Sequence: Synthetic oligonucleotide
  Target: LAMA2; (+) strand; PAM type: YTN; PAM sequence: TTC
ttctccaattttacaatgtc

SEQ ID NO: 394427 - DNA, 20 bp, Artificial Sequence
  Description of Artificial Sequence: Synthetic oligonucleotide
  Target: LAMA2; (+) strand; PAM type: YTN; PAM sequence: CTT
ctccaattttacaatgtcta

SEQ ID NO: 394428 - DNA, 20 bp, Artificial Sequence
  Description of Artificial Sequence: Synthetic oligonucleotide
  Target: LAMA2; (+) strand; PAM type: YTN; PAM sequence: TTC
tccaattttacaatgtctat

SEQ ID NO: 394429 - DNA, 20 bp, Artificial Sequence
  Description of Artificial Sequence: Synthetic oligonucleotide
  Target: LAMA2; (+) strand; PAM type: YTN; PAM sequence: CTC
caattttacaatgtctatca

SEQ ID NO: 394430 - DNA, 20 bp, Artificial Sequence
  Description of Artificial Sequence: Synthetic oligonucleotide
  Target: LAMA2; (+) strand; PAM type: YTN; PAM sequence: TTT
tacaatgtctatcaatcatg

SEQ ID NO: 394431 - DNA, 20 bp, Artificial Sequence
  Description of Artificial Sequence: Synthetic oligonucleotide
  Target: LAMA2; (+) strand; PAM type: YTN; PAM sequence: TTT
acaatgtctatcaatcatgt

SEQ ID NO: 394432 - DNA, 20 bp, Artificial Sequence
  Description of Artificial Sequence: Synthetic oligonucleotide
  Target: LAMA2; (+) strand; PAM type: YTN; PAM sequence: TTA
caatgtctatcaatcatgtg

SEQ ID NO: 394433 - DNA, 20 bp, Artificial Sequence
  Description of Artificial Sequence: Synthetic oligonucleotide
  Target: LAMA2; (+) strand; PAM type: YTN; PAM sequence: CTA
tcaatcatgtggggttcttg

SEQ ID NO: 394434 - DNA, 20 bp, Artificial Sequence
  Description of Artificial Sequence: Synthetic oligonucleotide
  Target: LAMA2; (+) strand; PAM type: YTN; PAM sequence: TTC
ttgttaaagtgcagattctg

SEQ ID NO: 394435 - DNA, 20 bp, Artificial Sequence
  Description of Artificial Sequence: Synthetic oligonucleotide
  Target: LAMA2; (+) strand; PAM type: YTN; PAM sequence: CTT
gttaaagtgcagattctgag

SEQ ID NO: 394436 - DNA, 20 bp, Artificial Sequence
  Description of Artificial Sequence: Synthetic oligonucleotide
  Target: LAMA2; (+) strand; PAM type: YTN; PAM sequence: TTG
ttaaagtgcagattctgagt

SEQ ID NO: 394437 - DNA, 20 bp, Artificial Sequence
  Description of Artificial Sequence: Synthetic oligonucleotide
  Target: LAMA2; (+) strand; PAM type: YTN; PAM sequence: TTA
aagtgcagattctgagtcag

SEQ ID NO: 394438 - DNA, 20 bp, Artificial Sequence
  Description of Artificial Sequence: Synthetic oligonucleotide
  Target: LAMA2; (+) strand; PAM type: YTN; PAM sequence: TTC
tgagtcagtagttcccagga

SEQ ID NO: 394439 - DNA, 20 bp, Artificial Sequence
  Description of Artificial Sequence: Synthetic oligonucleotide
  Target: LAMA2; (+) strand; PAM type: YTN; PAM sequence: CTG
agtcagtagttcccaggaat

SEQ ID NO: 394440 - DNA, 20 bp, Artificial Sequence
  Description of Artificial Sequence: Synthetic oligonucleotide
  Target: LAMA2; (+) strand; PAM type: YTN; PAM sequence: TTC
ccaggaatggattgagatta

SEQ ID NO: 394441 - DNA, 20 bp, Artificial Sequence
  Description of Artificial Sequence: Synthetic oligonucleotide
  Target: LAMA2; (+) strand; PAM type: YTN; PAM sequence: TTG
agattatgcatttctaatga

SEQ ID NO: 394442 - DNA, 20 bp, Artificial Sequence
  Description of Artificial Sequence: Synthetic oligonucleotide
  Target: LAMA2; (+) strand; PAM type: YTN; PAM sequence: TTA
tgcatttctaatgagcttcc

SEQ ID NO: 394443 - DNA, 20 bp, Artificial Sequence
  Description of Artificial Sequence: Synthetic oligonucleotide
  Target: LAMA2; (+) strand; PAM type: YTN; PAM sequence: TTT
ctaatgagcttccaggtgac

SEQ ID NO: 394444 - DNA, 20 bp, Artificial Sequence
  Description of Artificial Sequence: Synthetic oligonucleotide
  Target: LAMA2; (+) strand; PAM type: YTN; PAM sequence: TTC
taatgagcttccaggtgacg

SEQ ID NO: 394445 - DNA, 20 bp, Artificial Sequence
  Description of Artificial Sequence: Synthetic oligonucleotide
  Target: LAMA2; (+) strand; PAM type: YTN; PAM sequence: CTA
atgagcttccaggtgacgct

SEQ ID NO: 394446 - DNA, 20 bp, Artificial Sequence
  Description of Artificial Sequence: Synthetic oligonucleotide
  Target: LAMA2; (+) strand; PAM type: YTN; PAM sequence: CTT
ccaggtgacgctgatgctgc

SEQ ID NO: 394447 - DNA, 20 bp, Artificial Sequence
  Description of Artificial Sequence: Synthetic oligonucleotide
  Target: LAMA2; (+) strand; PAM type: YTN; PAM sequence: TTC
caggtgacgctgatgctgct

SEQ ID NO: 394448 - DNA, 20 bp, Artificial Sequence
  Description of Artificial Sequence: Synthetic oligonucleotide
  Target: LAMA2; (+) strand; PAM type: YTN; PAM sequence: CTG
atgctgctggtgaatgggct

SEQ ID NO: 394449 - DNA, 20 bp, Artificial Sequence
  Description of Artificial Sequence: Synthetic oligonucleotide
  Target: LAMA2; (+) strand; PAM type: YTN; PAM sequence: CTG
ctggtgaatgggctgcacat

SEQ ID NO: 394450 - DNA, 20 bp, Artificial Sequence
  Description of Artificial Sequence: Synthetic oligonucleotide
  Target: LAMA2; (+) strand; PAM type: YTN; PAM sequence: CTG
gtgaatgggctgcacattga

SEQ ID NO: 394451 - DNA, 20 bp, Artificial Sequence
  Description of Artificial Sequence: Synthetic oligonucleotide
  Target: LAMA2; (+) strand; PAM type: YTN; PAM sequence: CTG
cacattgagtagggagggac

SEQ ID NO: 394452 - DNA, 20 bp, Artificial Sequence
  Description of Artificial Sequence: Synthetic oligonucleotide
  Target: LAMA2; (+) strand; PAM type: YTN; PAM sequence: TTG
agtagggagggactaaacat

SEQ ID NO: 394453 - DNA, 20 bp, Artificial Sequence
  Description of Artificial Sequence: Synthetic oligonucleotide
  Target: LAMA2; (+) strand; PAM type: YTN; PAM sequence: CTA
aacattttgtatgaaggtaa

SEQ ID NO: 394454 - DNA, 20 bp, Artificial Sequence
  Description of Artificial Sequence: Synthetic oligonucleotide
  Target: LAMA2; (+) strand; PAM type: YTN; PAM sequence: TTT
tgtatgaaggtaaattactt

SEQ ID NO: 394455 - DNA, 20 bp, Artificial Sequence
  Description of Artificial Sequence: Synthetic oligonucleotide
  Target: LAMA2; (+) strand; PAM type: YTN; PAM sequence: TTT
gtatgaaggtaaattacttc

SEQ ID NO: 394456 - DNA, 20 bp, Artificial Sequence
  Description of Artificial Sequence: Synthetic oligonucleotide
  Target: LAMA2; (+) strand; PAM type: YTN; PAM sequence: TTG
tatgaaggtaaattacttcc

SEQ ID NO: 394457 - DNA, 20 bp, Artificial Sequence
  Description of Artificial Sequence: Synthetic oligonucleotide
  Target: LAMA2; (+) strand; PAM type: YTN; PAM sequence: TTA
cttccttaaggtttcatagc

SEQ ID NO: 394458 - DNA, 20 bp, Artificial Sequence
  Description of Artificial Sequence: Synthetic oligonucleotide
  Target: LAMA2; (+) strand; PAM type: YTN; PAM sequence: CTT
ccttaaggtttcatagcttg

SEQ ID NO: 394459 - DNA, 20 bp, Artificial Sequence
  Description of Artificial Sequence: Synthetic oligonucleotide
  Target: LAMA2; (+) strand; PAM type: YTN; PAM sequence: TTC
cttaaggtttcatagcttgg

SEQ ID NO: 394460 - DNA, 20 bp, Artificial Sequence
  Description of Artificial Sequence: Synthetic oligonucleotide
  Target: LAMA2; (+) strand; PAM type: YTN; PAM sequence: CTT
aaggtttcatagcttgggag

SEQ ID NO: 394461 - DNA, 20 bp, Artificial Sequence
  Description of Artificial Sequence: Synthetic oligonucleotide
  Target: LAMA2; (+) strand; PAM type: YTN; PAM sequence: TTA
aggtttcatagcttgggagt

SEQ ID NO: 394462 - DNA, 20 bp, Artificial Sequence
  Description of Artificial Sequence: Synthetic oligonucleotide
  Target: LAMA2; (+) strand; PAM type: YTN; PAM sequence: TTT
catagcttgggagtgagcag

SEQ ID NO: 394463 - DNA, 20 bp, Artificial Sequence
  Description of Artificial Sequence: Synthetic oligonucleotide
  Target: LAMA2; (+) strand; PAM type: YTN; PAM sequence: TTC
atagcttgggagtgagcaga

SEQ ID NO: 394464 - DNA, 20 bp, Artificial Sequence
  Description of Artificial Sequence: Synthetic oligonucleotide
  Target: LAMA2; (+) strand; PAM type: YTN; PAM sequence: CTT
gggagtgagcagagctgtga

SEQ ID NO: 394465 - DNA, 20 bp, Artificial Sequence
  Description of Artificial Sequence: Synthetic oligonucleotide
  Target: LAMA2; (+) strand; PAM type: YTN; PAM sequence: TTG
ggagtgagcagagctgtgat

SEQ ID NO: 394466 - DNA, 20 bp, Artificial Sequence
  Description of Artificial Sequence: Synthetic oligonucleotide
  Target: LAMA2; (+) strand; PAM type: YTN; PAM sequence: CTG
tgatcccaaaccagaagggc

SEQ ID NO: 394467 - DNA, 20 bp, Artificial Sequence
  Description of Artificial Sequence: Synthetic oligonucleotide
  Target: LAMA2; (+) strand; PAM type: YTN; PAM sequence: CTG
tcacttggatgtagctttta

SEQ ID NO: 394468 - DNA, 20 bp, Artificial Sequence
  Description of Artificial Sequence: Synthetic oligonucleotide
  Target: LAMA2; (+) strand; PAM type: YTN; PAM sequence: CTT
ggatgtagcttttaatcact

SEQ ID NO: 394469 - DNA, 20 bp, Artificial Sequence
  Description of Artificial Sequence: Synthetic oligonucleotide
  Target: LAMA2; (+) strand; PAM type: YTN; PAM sequence: TTG
gatgtagcttttaatcactg

SEQ ID NO: 394470 - DNA, 20 bp, Artificial Sequence
  Description of Artificial Sequence: Synthetic oligonucleotide
  Target: LAMA2; (+) strand; PAM type: YTN; PAM sequence: CTT
ttaatcactgtgccctagta

SEQ ID NO: 394471 - DNA, 20 bp, Artificial Sequence
  Description of Artificial Sequence: Synthetic oligonucleotide
  Target: LAMA2; (+) strand; PAM type: YTN; PAM sequence: TTT
taatcactgtgccctagtac

SEQ ID NO: 394472 - DNA, 20 bp, Artificial Sequence
  Description of Artificial Sequence: Synthetic oligonucleotide
  Target: LAMA2; (+) strand; PAM type: YTN; PAM sequence: TTT
aatcactgtgccctagtaca

SEQ ID NO: 394473 - DNA, 20 bp, Artificial Sequence
  Description of Artificial Sequence: Synthetic oligonucleotide
  Target: LAMA2; (+) strand; PAM type: YTN; PAM sequence: TTA
atcactgtgccctagtacat

SEQ ID NO: 394474 - DNA, 20 bp, Artificial Sequence
  Description of Artificial Sequence: Synthetic oligonucleotide
  Target: LAMA2; (+) strand; PAM type: YTN; PAM sequence: CTG
tgccctagtacatagagaat

SEQ ID NO: 394475 - DNA, 20 bp, Artificial Sequence
  Description of Artificial Sequence: Synthetic oligonucleotide
  Target: LAMA2; (+) strand; PAM type: YTN; PAM sequence: CTA
gtacatagagaatgattgag

SEQ ID NO: 394476 - DNA, 20 bp, Artificial Sequence
  Description of Artificial Sequence: Synthetic oligonucleotide
  Target: LAMA2; (+) strand; PAM type: YTN; PAM sequence: TTG
agacaaggataggtgctatt

SEQ ID NO: 394477 - DNA, 20 bp, Artificial Sequence
  Description of Artificial Sequence: Synthetic oligonucleotide
  Target: LAMA2; (+) strand; PAM type: YTN; PAM sequence: CTA
ttttagataggtaatcagag

SEQ ID NO: 394478 - DNA, 20 bp, Artificial Sequence
  Description of Artificial Sequence: Synthetic oligonucleotide
  Target: LAMA2; (+) strand; PAM type: YTN; PAM sequence: TTT
tagataggtaatcagaggag

SEQ ID NO: 394479 - DNA, 20 bp, Artificial Sequence
  Description of Artificial Sequence: Synthetic oligonucleotide
  Target: LAMA2; (+) strand; PAM type: YTN; PAM sequence: TTT
agataggtaatcagaggagt

SEQ ID NO: 394480 - DNA, 20 bp, Artificial Sequence
  Description of Artificial Sequence: Synthetic oligonucleotide
  Target: LAMA2; (+) strand; PAM type: YTN; PAM sequence: TTA
gataggtaatcagaggagtg

SEQ ID NO: 394481 - DNA, 20 bp, Artificial Sequence
  Description of Artificial Sequence: Synthetic oligonucleotide
  Target: LAMA2; (+) strand; PAM type: YTN; PAM sequence: CTA
ttaccagaatggagggagga

SEQ ID NO: 394482 - DNA, 20 bp, Artificial Sequence
  Description of Artificial Sequence: Synthetic oligonucleotide
  Target: LAMA2; (+) strand; PAM type: YTN; PAM sequence: TTA
ccagaatggagggaggacac

SEQ ID NO: 394483 - DNA, 20 bp, Artificial Sequence
  Description of Artificial Sequence: Synthetic oligonucleotide
  Target: LAMA2; (+) strand; PAM type: YTN; PAM sequence: CTG
caagtgcaaaggcttagagg

SEQ ID NO: 394484 - DNA, 20 bp, Artificial Sequence
  Description of Artificial Sequence: Synthetic oligonucleotide
  Target: LAMA2; (+) strand; PAM type: YTN; PAM sequence: CTT
agaggcaggaactagttgta

SEQ ID NO: 394485 - DNA, 20 bp, Artificial Sequence
  Description of Artificial Sequence: Synthetic oligonucleotide
  Target: LAMA2; (+) strand; PAM type: YTN; PAM sequence: TTA
gaggcaggaactagttgtat

SEQ ID NO: 394486 - DNA, 20 bp, Artificial Sequence
  Description of Artificial Sequence: Synthetic oligonucleotide
  Target: LAMA2; (+) strand; PAM type: YTN; PAM sequence: CTA
gttgtatgtacctggcaaca

SEQ ID NO: 394487 - DNA, 20 bp, Artificial Sequence
  Description of Artificial Sequence: Synthetic oligonucleotide
  Target: LAMA2; (+) strand; PAM type: YTN; PAM sequence: TTG
tatgtacctggcaacatact

SEQ ID NO: 394488 - DNA, 20 bp, Artificial Sequence
  Description of Artificial Sequence: Synthetic oligonucleotide
  Target: LAMA2; (+) strand; PAM type: YTN; PAM sequence: CTG
gcaacatactgaattggtcg

SEQ ID NO: 394489 - DNA, 20 bp, Artificial Sequence
  Description of Artificial Sequence: Synthetic oligonucleotide
  Target: LAMA2; (+) strand; PAM type: YTN; PAM sequence: CTG
aattggtcggtgaagggaag

SEQ ID NO: 394490 - DNA, 20 bp, Artificial Sequence
  Description of Artificial Sequence: Synthetic oligonucleotide
  Target: LAMA2; (+) strand; PAM type: YTN; PAM sequence: TTG
gtcggtgaagggaaggaaag

SEQ ID NO: 394491 - DNA, 20 bp, Artificial Sequence
  Description of Artificial Sequence: Synthetic oligonucleotide
  Target: LAMA2; (+) strand; PAM type: YTN; PAM sequence: TTA
gcactagctcagtgcaaatt

SEQ ID NO: 394492 - DNA, 20 bp, Artificial Sequence
  Description of Artificial Sequence: Synthetic oligonucleotide
  Target: LAMA2; (+) strand; PAM type: YTN; PAM sequence: CTA
gctcagtgcaaattttaaaa

SEQ ID NO: 394493 - DNA, 20 bp, Artificial Sequence
  Description of Artificial Sequence: Synthetic oligonucleotide
  Target: LAMA2; (+) strand; PAM type: YTN; PAM sequence: CTC
agtgcaaattttaaaactgt

SEQ ID NO: 394494 - DNA, 20 bp, Artificial Sequence
  Description of Artificial Sequence: Synthetic oligonucleotide
  Target: LAMA2; (+) strand; PAM type: YTN; PAM sequence: TTT
taaaactgtgatttctataa

SEQ ID NO: 394495 - DNA, 20 bp, Artificial Sequence
  Description of Artificial Sequence: Synthetic oligonucleotide
  Target: LAMA2; (+) strand; PAM type: YTN; PAM sequence: TTT
aaaactgtgatttctataat

SEQ ID NO: 394496 - DNA, 20 bp, Artificial Sequence
  Description of Artificial Sequence: Synthetic oligonucleotide
  Target: LAMA2; (+) strand; PAM type: YTN; PAM sequence: TTA
aaactgtgatttctataata

SEQ ID NO: 394497 - DNA, 20 bp, Artificial Sequence
  Description of Artificial Sequence: Synthetic oligonucleotide
  Target: LAMA2; (+) strand; PAM type: YTN; PAM sequence: CTG
tgatttctataatagaagag

SEQ ID NO: 394498 - DNA, 20 bp, Artificial Sequence
  Description of Artificial Sequence: Synthetic oligonucleotide
  Target: LAMA2; (+) strand; PAM type: YTN; PAM sequence: TTT
ctataatagaagagatagta

SEQ ID NO: 394499 - DNA, 20 bp, Artificial Sequence
  Description of Artificial Sequence: Synthetic oligonucleotide
  Target: LAMA2; (+) strand; PAM type: YTN; PAM sequence: TTC
tataatagaagagatagtat

SEQ ID NO: 394500 - DNA, 20 bp, Artificial Sequence
  Description of Artificial Sequence: Synthetic oligonucleotide
  Target: LAMA2; (+) strand; PAM type: YTN; PAM sequence: CTA
taatagaagagatagtattt

SEQ ID NO: 394501 - DNA, 20 bp, Artificial Sequence
  Description of Artificial Sequence: Synthetic oligonucleotide
  Target: LAMA2; (+) strand; PAM type: YTN; PAM sequence: TTT
tcgtagtcaaggacccagga

SEQ ID NO: 394502 - DNA, 20 bp, Artificial Sequence
  Description of Artificial Sequence: Synthetic oligonucleotide
  Target: LAMA2; (+) strand; PAM type: YTN; PAM sequence: TTT
cgtagtcaaggacccaggat

SEQ ID NO: 394503 - DNA, 20 bp, Artificial Sequence
  Description of Artificial Sequence: Synthetic oligonucleotide
  Target: LAMA2; (+) strand; PAM type: YTN; PAM sequence: TTC
gtagtcaaggacccaggatc

SEQ ID NO: 394504 - DNA, 20 bp, Artificial Sequence
  Description of Artificial Sequence: Synthetic oligonucleotide
  Target: LAMA2; (+) strand; PAM type: YTN; PAM sequence: CTA
tcattaagtagacaggggtt

SEQ ID NO: 394505 - DNA, 20 bp, Artificial Sequence
  Description of Artificial Sequence: Synthetic oligonucleotide
  Target: LAMA2; (+) strand; PAM type: YTN; PAM sequence: TTA
agtagacaggggtttaaatc

SEQ ID NO: 394506 - DNA, 20 bp, Artificial Sequence
  Description of Artificial Sequence: Synthetic oligonucleotide
  Target: LAMA2; (+) strand; PAM type: YTN; PAM sequence: TTT
aaatcttaatcacactgtac

SEQ ID NO: 394507 - DNA, 20 bp, Artificial Sequence
  Description of Artificial Sequence: Synthetic oligonucleotide
  Target: LAMA2; (+) strand; PAM type: YTN; PAM sequence: TTA
aatcttaatcacactgtact

SEQ ID NO: 394508 - DNA, 20 bp, Artificial Sequence
  Description of Artificial Sequence: Synthetic oligonucleotide
  Target: LAMA2; (+) strand; PAM type: YTN; PAM sequence: CTT
aatcacactgtactatgtga

SEQ ID NO: 394509 - DNA, 20 bp, Artificial Sequence
  Description of Artificial Sequence: Synthetic oligonucleotide
  Target: LAMA2; (+) strand; PAM type: YTN; PAM sequence: TTA
atcacactgtactatgtgac

SEQ ID NO: 394510 - DNA, 20 bp, Artificial Sequence
  Description of Artificial Sequence: Synthetic oligonucleotide
  Target: LAMA2; (+) strand; PAM type: YTN; PAM sequence: CTG
tactatgtgaccttaaagga

SEQ ID NO: 394511 - DNA, 20 bp, Artificial Sequence
  Description of Artificial Sequence: Synthetic oligonucleotide
  Target: LAMA2; (+) strand; PAM type: YTN; PAM sequence: CTA
tgtgaccttaaaggaatcat

SEQ ID NO: 394512 - DNA, 20 bp, Artificial Sequence
  Description of Artificial Sequence: Synthetic oligonucleotide
  Target: LAMA2; (+) strand; PAM type: YTN; PAM sequence: CTT
aaaggaatcatttaatatct

SEQ ID NO: 394513 - DNA, 20 bp, Artificial Sequence
  Description of Artificial Sequence: Synthetic oligonucleotide
  Target: LAMA2; (+) strand; PAM type: YTN; PAM sequence: TTA
aaggaatcatttaatatctt

SEQ ID NO: 394514 - DNA, 20 bp, Artificial Sequence
  Description of Artificial Sequence: Synthetic oligonucleotide
  Target: LAMA2; (+) strand; PAM type: YTN; PAM sequence: TTT
aatatcttagttcatctgag

SEQ ID NO: 394515 - DNA, 20 bp, Artificial Sequence
  Description of Artificial Sequence: Synthetic oligonucleotide
  Target: LAMA2; (+) strand; PAM type: YTN; PAM sequence: TTA
atatcttagttcatctgagc

SEQ ID NO: 394516 - DNA, 20 bp, Artificial Sequence
  Description of Artificial Sequence: Synthetic oligonucleotide
  Target: LAMA2; (+) strand; PAM type: YTN; PAM sequence: CTT
agttcatctgagctgctata

SEQ ID NO: 394517 - DNA, 20 bp, Artificial Sequence
  Description of Artificial Sequence: Synthetic oligonucleotide
  Target: LAMA2; (+) strand; PAM type: YTN; PAM sequence: TTA
gttcatctgagctgctatag

SEQ ID NO: 394518 - DNA, 20 bp, Artificial Sequence
  Description of Artificial Sequence: Synthetic oligonucleotide
  Target: LAMA2; (+) strand; PAM type: YTN; PAM sequence: TTC
atctgagctgctatagcaag

SEQ ID NO: 394519 - DNA, 20 bp, Artificial Sequence
  Description of Artificial Sequence: Synthetic oligonucleotide
  Target: LAMA2; (+) strand; PAM type: YTN; PAM sequence: CTG
agctgctatagcaagagacc

SEQ ID NO: 394520 - DNA, 20 bp, Artificial Sequence
  Description of Artificial Sequence: Synthetic oligonucleotide
  Target: LAMA2; (+) strand; PAM type: YTN; PAM sequence: CTG
ctatagcaagagaccaaaaa

SEQ ID NO: 394521 - DNA, 20 bp, Artificial Sequence
  Description of Artificial Sequence: Synthetic oligonucleotide
  Target: LAMA2; (+) strand; PAM type: YTN; PAM sequence: CTA
tagcaagagaccaaaaactg

SEQ ID NO: 394522 - DNA, 20 bp, Artificial Sequence
  Description of Artificial Sequence: Synthetic oligonucleotide
  Target: LAMA2; (+) strand; PAM type: YTN; PAM sequence: CTG
agtggcttatatgcaatcaa

SEQ ID NO: 394523 - DNA, 20 bp, Artificial Sequence
  Description of Artificial Sequence: Synthetic oligonucleotide
  Target: LAMA2; (+) strand; PAM type: YTN; PAM sequence: CTT
atatgcaatcaaaacttatt

SEQ ID NO: 394524 - DNA, 20 bp, Artificial Sequence
  Description of Artificial Sequence: Synthetic oligonucleotide
  Target: LAMA2; (+) strand; PAM type: YTN; PAM sequence: TTA
tatgcaatcaaaacttattt

SEQ ID NO: 394525 - DNA, 20 bp, Artificial Sequence
  Description of Artificial Sequence: Synthetic oligonucleotide
  Target: LAMA2; (+) strand; PAM type: YTN; PAM sequence: CTT
atttcttatggttctggagg

SEQ ID NO: 394526 - DNA, 20 bp, Artificial Sequence
  Description of Artificial Sequence: Synthetic oligonucleotide
  Target: LAMA2; (+) strand; PAM type: YTN; PAM sequence: TTA
tttcttatggttctggaggc

SEQ ID NO: 394527 - DNA, 20 bp, Artificial Sequence
  Description of Artificial Sequence: Synthetic oligonucleotide
  Target: LAMA2; (+) strand; PAM type: YTN; PAM sequence: TTT
cttatggttctggaggctgg

SEQ ID NO: 394528 - DNA, 20 bp, Artificial Sequence
  Description of Artificial Sequence: Synthetic oligonucleotide
  Target: LAMA2; (+) strand; PAM type: YTN; PAM sequence: TTC
ttatggttctggaggctggg

SEQ ID NO: 394529 - DNA, 20 bp, Artificial Sequence
  Description of Artificial Sequence: Synthetic oligonucleotide
  Target: LAMA2; (+) strand; PAM type: YTN; PAM sequence: CTT
atggttctggaggctgggaa

SEQ ID NO: 394530 - DNA, 20 bp, Artificial Sequence
  Description of Artificial Sequence: Synthetic oligonucleotide
  Target: LAMA2; (+) strand; PAM type: YTN; PAM sequence: TTA
tggttctggaggctgggaaa

SEQ ID NO: 394531 - DNA, 20 bp, Artificial Sequence
  Description of Artificial Sequence: Synthetic oligonucleotide
  Target: LAMA2; (+) strand; PAM type: YTN; PAM sequence: TTC
tggaggctgggaaatccatg

SEQ ID NO: 394532 - DNA, 20 bp, Artificial Sequence
  Description of Artificial Sequence: Synthetic oligonucleotide
  Target: LAMA2; (+) strand; PAM type: YTN; PAM sequence: CTG
gaggctgggaaatccatgat

SEQ ID NO: 394533 - DNA, 20 bp, Artificial Sequence
  Description of Artificial Sequence: Synthetic oligonucleotide
  Target: LAMA2; (+) strand; PAM type: YTN; PAM sequence: CTG
ggaaatccatgatcaaagta

SEQ ID NO: 394534 - DNA, 20 bp, Artificial Sequence
  Description of Artificial Sequence: Synthetic oligonucleotide
  Target: LAMA2; (+) strand; PAM type: YTN; PAM sequence: TTG
gcagatttggtgtctgatga

SEQ ID NO: 394535 - DNA, 20 bp, Artificial Sequence
  Description of Artificial Sequence: Synthetic oligonucleotide
  Target: LAMA2; (+) strand; PAM type: YTN; PAM sequence: TTT
ggtgtctgatgagggaccac

SEQ ID NO: 394536 - DNA, 20 bp, Artificial Sequence
  Description of Artificial Sequence: Synthetic oligonucleotide
  Target: LAMA2; (+) strand; PAM type: YTN; PAM sequence: TTG
gtgtctgatgagggaccact

SEQ ID NO: 394537 - DNA, 20 bp, Artificial Sequence
  Description of Artificial Sequence: Synthetic oligonucleotide
  Target: LAMA2; (+) strand; PAM type: YTN; PAM sequence: CTG
atgagggaccactttctggt

SEQ ID NO: 394538 - DNA, 20 bp, Artificial Sequence
  Description of Artificial Sequence: Synthetic oligonucleotide
  Target: LAMA2; (+) strand; PAM type: YTN; PAM sequence: CTT
tctggttcatagacaccgtt

SEQ ID NO: 394539 - DNA, 20 bp, Artificial Sequence
  Description of Artificial Sequence: Synthetic oligonucleotide
  Target: LAMA2; (+) strand; PAM type: YTN; PAM sequence: TTT
ctggttcatagacaccgttt

SEQ ID NO: 394540 - DNA, 20 bp, Artificial Sequence
  Description of Artificial Sequence: Synthetic oligonucleotide
  Target: LAMA2; (+) strand; PAM type: YTN; PAM sequence: TTC
tggttcatagacaccgtttt

SEQ ID NO: 394541 - DNA, 20 bp, Artificial Sequence
  Description of Artificial Sequence: Synthetic oligonucleotide
  Target: LAMA2; (+) strand; PAM type: YTN; PAM sequence: CTG
gttcatagacaccgttttca

SEQ ID NO: 394542 - DNA, 20 bp, Artificial Sequence
  Description of Artificial Sequence: Synthetic oligonucleotide
  Target: LAMA2; (+) strand; PAM type: YTN; PAM sequence: TTC
atagacaccgttttcactgt

SEQ ID NO: 394543 - DNA, 20 bp, Artificial Sequence
  Description of Artificial Sequence: Synthetic oligonucleotide
  Target: LAMA2; (+) strand; PAM type: YTN; PAM sequence: TTT
tcactgtgtcctcacatggt

SEQ ID NO: 394544 - DNA, 20 bp, Artificial Sequence
  Description of Artificial Sequence: Synthetic oligonucleotide
  Target: LAMA2; (+) strand; PAM type: YTN; PAM sequence: TTT
cactgtgtcctcacatggta

SEQ ID NO: 394545 - DNA, 20 bp, Artificial Sequence
  Description of Artificial Sequence: Synthetic oligonucleotide
  Target: LAMA2; (+) strand; PAM type: YTN; PAM sequence: TTC
actgtgtcctcacatggtaa

SEQ ID NO: 394546 - DNA, 20 bp, Artificial Sequence
  Description of Artificial Sequence: Synthetic oligonucleotide
  Target: LAMA2; (+) strand; PAM type: YTN; PAM sequence: CTG
tgtcctcacatggtaaaagg

SEQ ID NO: 394547 - DNA, 20 bp, Artificial Sequence
  Description of Artificial Sequence: Synthetic oligonucleotide
  Target: LAMA2; (+) strand; PAM type: YTN; PAM sequence: CTC
acatggtaaaaggatgaaca

SEQ ID NO: 394548 - DNA, 20 bp, Artificial Sequence
  Description of Artificial Sequence: Synthetic oligonucleotide
  Target: LAMA2; (+) strand; PAM type: YTN; PAM sequence: CTC
cttcaggtcttttttataag

SEQ ID NO: 394549 - DNA, 20 bp, Artificial Sequence
  Description of Artificial Sequence: Synthetic oligonucleotide
  Target: LAMA2; (+) strand; PAM type: YTN; PAM sequence: CTT
caggtcttttttataagggc

SEQ ID NO: 394550 - DNA, 20 bp, Artificial Sequence
  Description of Artificial Sequence: Synthetic oligonucleotide
  Target: LAMA2; (+) strand; PAM type: YTN; PAM sequence: TTC
aggtcttttttataagggca

SEQ ID NO: 394551 - DNA, 20 bp, Artificial Sequence
  Description of Artificial Sequence: Synthetic oligonucleotide
  Target: LAMA2; (+) strand; PAM type: YTN; PAM sequence: CTT
ttttataagggcagtaatcc

SEQ ID NO: 394552 - DNA, 20 bp, Artificial Sequence
  Description of Artificial Sequence: Synthetic oligonucleotide
  Target: LAMA2; (+) strand; PAM type: YTN; PAM sequence: TTT
tttataagggcagtaatccc

SEQ ID NO: 394553 - DNA, 20 bp, Artificial Sequence
  Description of Artificial Sequence: Synthetic oligonucleotide
  Target: LAMA2; (+) strand; PAM type: YTN; PAM sequence: TTT
ttataagggcagtaatcccg

SEQ ID NO: 394554 - DNA, 20 bp, Artificial Sequence
  Description of Artificial Sequence: Synthetic oligonucleotide
  Target: LAMA2; (+) strand; PAM type: YTN; PAM sequence: TTT
tataagggcagtaatcccgt

SEQ ID NO: 394555 - DNA, 20 bp, Artificial Sequence
  Description of Artificial Sequence: Synthetic oligonucleotide
  Target: LAMA2; (+) strand; PAM type: YTN; PAM sequence: TTT
ataagggcagtaatcccgtt

SEQ ID NO: 394556 - DNA, 20 bp, Artificial Sequence
  Description of Artificial Sequence: Synthetic oligonucleotide
  Target: LAMA2; (+) strand; PAM type: YTN; PAM sequence: TTA
taagggcagtaatcccgttt

SEQ ID NO: 394557 - DNA, 20 bp, Artificial Sequence
  Description of Artificial Sequence: Synthetic oligonucleotide
  Target: LAMA2; (+) strand; PAM type: YTN; PAM sequence: TTT
atgaagtctctgcttcatga

SEQ ID NO: 394558 - DNA, 20 bp, Artificial Sequence
  Description of Artificial Sequence: Synthetic oligonucleotide
  Target: LAMA2; (+) strand; PAM type: YTN; PAM sequence: TTA
tgaagtctctgcttcatgac

SEQ ID NO: 394559 - DNA, 20 bp, Artificial Sequence
  Description of Artificial Sequence: Synthetic oligonucleotide
  Target: LAMA2; (+) strand; PAM type: YTN; PAM sequence: CTC
tgcttcatgacctggtcacc

SEQ ID NO: 394560 - DNA, 20 bp, Artificial Sequence
  Description of Artificial Sequence: Synthetic oligonucleotide
  Target: LAMA2; (+) strand; PAM type: YTN; PAM sequence: CTG
cttcatgacctggtcacctc

SEQ ID NO: 394561 - DNA, 20 bp, Artificial Sequence
  Description of Artificial Sequence: Synthetic oligonucleotide
  Target: LAMA2; (+) strand; PAM type: YTN; PAM sequence: CTT
catgacctggtcacctccaa

SEQ ID NO: 394562 - DNA, 20 bp, Artificial Sequence
  Description of Artificial Sequence: Synthetic oligonucleotide
  Target: LAMA2; (+) strand; PAM type: YTN; PAM sequence: TTC
atgacctggtcacctccaaa

SEQ ID NO: 394563 - DNA, 20 bp, Artificial Sequence
  Description of Artificial Sequence: Synthetic oligonucleotide
  Target: LAMA2; (+) strand; PAM type: YTN; PAM sequence: CTG
gtcacctccaaaggccccac

SEQ ID NO: 394564 - DNA, 20 bp, Artificial Sequence
  Description of Artificial Sequence: Synthetic oligonucleotide
  Target: LAMA2; (+) strand; PAM type: YTN; PAM sequence: CTC
caaaggccccacttcctaat

SEQ ID NO: 394565 - DNA, 20 bp, Artificial Sequence
  Description of Artificial Sequence: Synthetic oligonucleotide
  Target: LAMA2; (+) strand; PAM type: YTN; PAM sequence: CTT
cctaatcctatcaccttgag

SEQ ID NO: 394566 - DNA, 20 bp, Artificial Sequence
  Description of Artificial Sequence: Synthetic oligonucleotide
  Target: LAMA2; (+) strand; PAM type: YTN; PAM sequence: TTC
ctaatcctatcaccttgagg

SEQ ID NO: 394567 - DNA, 20 bp, Artificial Sequence
  Description of Artificial Sequence: Synthetic oligonucleotide
  Target: LAMA2; (+) strand; PAM type: YTN; PAM sequence: CTA
atcctatcaccttgaggatt

SEQ ID NO: 394568 - DNA, 20 bp, Artificial Sequence
  Description of Artificial Sequence: Synthetic oligonucleotide
  Target: LAMA2; (+) strand; PAM type: YTN; PAM sequence: CTA
tcaccttgaggattaggatt

SEQ ID NO: 394569 - DNA, 20 bp, Artificial Sequence
  Description of Artificial Sequence: Synthetic oligonucleotide
  Target: LAMA2; (+) strand; PAM type: YTN; PAM sequence: CTT
gaggattaggatttcaacat

SEQ ID NO: 394570 - DNA, 20 bp, Artificial Sequence
  Description of Artificial Sequence: Synthetic oligonucleotide
  Target: LAMA2; (+) strand; PAM type: YTN; PAM sequence: TTG
aggattaggatttcaacata

SEQ ID NO: 394571 - DNA, 20 bp, Artificial Sequence
  Description of Artificial Sequence: Synthetic oligonucleotide
  Target: LAMA2; (+) strand; PAM type: YTN; PAM sequence: TTA
ggatttcaacatatgaattt

SEQ ID NO: 394572 - DNA, 20 bp, Artificial Sequence
  Description of Artificial Sequence: Synthetic oligonucleotide
  Target: LAMA2; (+) strand; PAM type: YTN; PAM sequence: TTT
caacatatgaattttcaggg

SEQ ID NO: 394573 - DNA, 20 bp, Artificial Sequence
  Description of Artificial Sequence: Synthetic oligonucleotide
  Target: LAMA2; (+) strand; PAM type: YTN; PAM sequence: TTC
aacatatgaattttcagggg

SEQ ID NO: 394574 - DNA, 20 bp, Artificial Sequence
  Description of Artificial Sequence: Synthetic oligonucleotide
  Target: LAMA2; (+) strand; PAM type: YTN; PAM sequence: TTT
tcaggggacacagacattca

SEQ ID NO: 394575 - DNA, 20 bp, Artificial Sequence
  Description of Artificial Sequence: Synthetic oligonucleotide
  Target: LAMA2; (+) strand; PAM type: YTN; PAM sequence: TTT
caggggacacagacattcag

SEQ ID NO: 394576 - DNA, 20 bp, Artificial Sequence
  Description of Artificial Sequence: Synthetic oligonucleotide
  Target: LAMA2; (+) strand; PAM type: YTN; PAM sequence: TTC
aggggacacagacattcagg

SEQ ID NO: 394577 - DNA, 20 bp, Artificial Sequence
  Description of Artificial Sequence: Synthetic oligonucleotide
  Target: LAMA2; (+) strand; PAM type: YTN; PAM sequence: TTC
aggccactgccctttactta

SEQ ID NO: 394578 - DNA, 20 bp, Artificial Sequence
  Description of Artificial Sequence: Synthetic oligonucleotide
  Target: LAMA2; (+) strand; PAM type: YTN; PAM sequence: CTG
ccctttacttattcaatttc

SEQ ID NO: 394579 - DNA, 20 bp, Artificial Sequence
  Description of Artificial Sequence: Synthetic oligonucleotide
  Target: LAMA2; (+) strand; PAM type: YTN; PAM sequence: CTT
tacttattcaatttcccact

SEQ ID NO: 394580 - DNA, 20 bp, Artificial Sequence
  Description of Artificial Sequence: Synthetic oligonucleotide
  Target: LAMA2; (+) strand; PAM type: YTN; PAM sequence: TTT
acttattcaatttcccactt

SEQ ID NO: 394581 - DNA, 20 bp, Artificial Sequence
  Description of Artificial Sequence: Synthetic oligonucleotide
  Target: LAMA2; (+) strand; PAM type: YTN; PAM sequence: TTA
cttattcaatttcccactta

SEQ ID NO: 394582 - DNA, 20 bp, Artificial Sequence
  Description of Artificial Sequence: Synthetic oligonucleotide
  Target: LAMA2; (+) strand; PAM type: YTN; PAM sequence: CTT
attcaatttcccacttatgt

SEQ ID NO: 394583 - DNA, 20 bp, Artificial Sequence
  Description of Artificial Sequence: Synthetic oligonucleotide
  Target: LAMA2; (+) strand; PAM type: YTN; PAM sequence: TTA
ttcaatttcccacttatgta

SEQ ID NO: 394584 - DNA, 20 bp, Artificial Sequence
  Description of Artificial Sequence: Synthetic oligonucleotide
  Target: LAMA2; (+) strand; PAM type: YTN; PAM sequence: TTC
aatttcccacttatgtaaaa

SEQ ID NO: 394585 - DNA, 20 bp, Artificial Sequence
  Description of Artificial Sequence: Synthetic oligonucleotide
  Target: LAMA2; (+) strand; PAM type: YTN; PAM sequence: TTT
cccacttatgtaaaaagtga

SEQ ID NO: 394586 - DNA, 20 bp, Artificial Sequence
  Description of Artificial Sequence: Synthetic oligonucleotide
  Target: LAMA2; (+) strand; PAM type: YTN; PAM sequence: TTC
ccacttatgtaaaaagtgat

SEQ ID NO: 394587 - DNA, 20 bp, Artificial Sequence
  Description of Artificial Sequence: Synthetic oligonucleotide
  Target: LAMA2; (+) strand; PAM type: YTN; PAM sequence: CTT
atgtaaaaagtgatcaacat

SEQ ID NO: 394588 - DNA, 20 bp, Artificial Sequence
  Description of Artificial Sequence: Synthetic oligonucleotide
  Target: LAMA2; (+) strand; PAM type: YTN; PAM sequence: TTA
tgtaaaaagtgatcaacatg

SEQ ID NO: 394589 - DNA, 20 bp, Artificial Sequence
  Description of Artificial Sequence: Synthetic oligonucleotide
  Target: LAMA2; (+) strand; PAM type: YTN; PAM sequence: TTG
gaataacaaaatgcttacaa

SEQ ID NO: 394590 - DNA, 20 bp, Artificial Sequence
  Description of Artificial Sequence: Synthetic oligonucleotide
  Target: LAMA2; (+) strand; PAM type: YTN; PAM sequence: CTT
acaaactgtctggcacatat

SEQ ID NO: 394591 - DNA, 20 bp, Artificial Sequence
  Description of Artificial Sequence: Synthetic oligonucleotide
  Target: LAMA2; (+) strand; PAM type: YTN; PAM sequence: TTA
caaactgtctggcacatatt

SEQ ID NO: 394592 - DNA, 20 bp, Artificial Sequence
  Description of Artificial Sequence: Synthetic oligonucleotide
  Target: LAMA2; (+) strand; PAM type: YTN; PAM sequence: CTG
tctggcacatattgagatct

SEQ ID NO: 394593 - DNA, 20 bp, Artificial Sequence
  Description of Artificial Sequence: Synthetic oligonucleotide
  Target: LAMA2; (+) strand; PAM type: YTN; PAM sequence: CTG
gcacatattgagatctaaat

SEQ ID NO: 394594 - DNA, 20 bp, Artificial Sequence
  Description of Artificial Sequence: Synthetic oligonucleotide
  Target: LAMA2; (+) strand; PAM type: YTN; PAM sequence: TTG
agatctaaatgaattagcat

SEQ ID NO: 394595 - DNA, 20 bp, Artificial Sequence
  Description of Artificial Sequence: Synthetic oligonucleotide
  Target: LAMA2; (+) strand; PAM type: YTN; PAM sequence: CTA
aatgaattagcattattgtc

SEQ ID NO: 394596 - DNA, 20 bp, Artificial Sequence
  Description of Artificial Sequence: Synthetic oligonucleotide
  Target: LAMA2; (+) strand; PAM type: YTN; PAM sequence: TTA
gcattattgtctatagaaaa

SEQ ID NO: 394597 - DNA, 20 bp, Artificial Sequence
  Description of Artificial Sequence: Synthetic oligonucleotide
  Target: LAMA2; (+) strand; PAM type: YTN; PAM sequence: TTA
ttgtctatagaaaaaaacta

SEQ ID NO: 394598 - DNA, 20 bp, Artificial Sequence
  Description of Artificial Sequence: Synthetic oligonucleotide
  Target: LAMA2; (+) strand; PAM type: YTN; PAM sequence: TTG
tctatagaaaaaaactataa

SEQ ID NO: 394599 - DNA, 20 bp, Artificial Sequence
  Description of Artificial Sequence: Synthetic oligonucleotide
  Target: LAMA2; (+) strand; PAM type: YTN; PAM sequence: CTA
tagaaaaaaactataagtgg

SEQ ID NO: 394600 - DNA, 20 bp, Artificial Sequence
  Description of Artificial Sequence: Synthetic oligonucleotide
  Target: LAMA2; (+) strand; PAM type: YTN; PAM sequence: CTA
taagtggtcaaagcttaaaa

SEQ ID NO: 394601 - DNA, 20 bp, Artificial Sequence
  Description of Artificial Sequence: Synthetic oligonucleotide
  Target: LAMA2; (+) strand; PAM type: YTN; PAM sequence: CTT
aaaattataattgatgcagt

SEQ ID NO: 394602 - DNA, 20 bp, Artificial Sequence
  Description of Artificial Sequence: Synthetic oligonucleotide
  Target: LAMA2; (+) strand; PAM type: YTN; PAM sequence: TTA
aaattataattgatgcagtt

SEQ ID NO: 394603 - DNA, 20 bp, Artificial Sequence
  Description of Artificial Sequence: Synthetic oligonucleotide
  Target: LAMA2; (+) strand; PAM type: YTN; PAM sequence: TTA
taattgatgcagttaaatct

SEQ ID NO: 394604 - DNA, 20 bp, Artificial Sequence
  Description of Artificial Sequence: Synthetic oligonucleotide
  Target: LAMA2; (+) strand; PAM type: YTN; PAM sequence: TTG
atgcagttaaatctgtaggt

SEQ ID NO: 394605 - DNA, 20 bp, Artificial Sequence
  Description of Artificial Sequence: Synthetic oligonucleotide
  Target: LAMA2; (+) strand; PAM type: YTN; PAM sequence: TTA
aatctgtaggtagaatggtg

SEQ ID NO: 394606 - DNA, 20 bp, Artificial Sequence
  Description of Artificial Sequence: Synthetic oligonucleotide
  Target: LAMA2; (+) strand; PAM type: YTN; PAM sequence: CTG
taggtagaatggtgatttca

SEQ ID NO: 394607 - DNA, 20 bp, Artificial Sequence
  Description of Artificial Sequence: Synthetic oligonucleotide
  Target: LAMA2; (+) strand; PAM type: YTN; PAM sequence: TTT
caggaataggaatgaatcag

SEQ ID NO: 394608 - DNA, 20 bp, Artificial Sequence
  Description of Artificial Sequence: Synthetic oligonucleotide
  Target: LAMA2; (+) strand; PAM type: YTN; PAM sequence: TTC
aggaataggaatgaatcaga

SEQ ID NO: 394609 - DNA, 20 bp, Artificial Sequence
  Description of Artificial Sequence: Synthetic oligonucleotide
  Target: LAMA2; (+) strand; PAM type: YTN; PAM sequence: TTT
gtctctcactgattttactc

SEQ ID NO: 394610 - DNA, 20 bp, Artificial Sequence
  Description of Artificial Sequence: Synthetic oligonucleotide
  Target: LAMA2; (+) strand; PAM type: YTN; PAM sequence: TTG
tctctcactgattttactct

SEQ ID NO: 394611 - DNA, 20 bp, Artificial Sequence
  Description of Artificial Sequence: Synthetic oligonucleotide
  Target: LAMA2; (+) strand; PAM type: YTN; PAM sequence: CTC
tcactgattttactcttcta

SEQ ID NO: 394612 - DNA, 20 bp, Artificial Sequence
  Description of Artificial Sequence: Synthetic oligonucleotide
  Target: LAMA2; (+) strand; PAM type: YTN; PAM sequence: CTC
actgattttactcttctagg

SEQ ID NO: 394613 - DNA, 20 bp, Artificial Sequence
  Description of Artificial Sequence: Synthetic oligonucleotide
  Target: LAMA2; (+) strand; PAM type: YTN; PAM sequence: CTG
attttactcttctaggccag

SEQ ID NO: 394614 - DNA, 20 bp, Artificial Sequence
  Description of Artificial Sequence: Synthetic oligonucleotide
  Target: LAMA2; (+) strand; PAM type: YTN; PAM sequence: TTT
tactcttctaggccaggatt

SEQ ID NO: 394615 - DNA, 20 bp, Artificial Sequence
  Description of Artificial Sequence: Synthetic oligonucleotide
  Target: LAMA2; (+) strand; PAM type: YTN; PAM sequence: TTT
actcttctaggccaggattg

SEQ ID NO: 394616 - DNA, 20 bp, Artificial Sequence
  Description of Artificial Sequence: Synthetic oligonucleotide
  Target: LAMA2; (+) strand; PAM type: YTN; PAM sequence: TTA
ctcttctaggccaggattga

SEQ ID NO: 394617 - DNA, 20 bp, Artificial Sequence
  Description of Artificial Sequence: Synthetic oligonucleotide
  Target: LAMA2; (+) strand; PAM type: YTN; PAM sequence: CTC
ttctaggccaggattgagtt

SEQ ID NO: 394618 - DNA, 20 bp, Artificial Sequence
  Description of Artificial Sequence: Synthetic oligonucleotide
  Target: LAMA2; (+) strand; PAM type: YTN; PAM sequence: CTT
ctaggccaggattgagtttc

SEQ ID NO: 394619 - DNA, 20 bp, Artificial Sequence
  Description of Artificial Sequence: Synthetic oligonucleotide
  Target: LAMA2; (+) strand; PAM type: YTN; PAM sequence: TTC
taggccaggattgagtttca

SEQ ID NO: 394620 - DNA, 20 bp, Artificial Sequence
  Description of Artificial Sequence: Synthetic oligonucleotide
  Target: LAMA2; (+) strand; PAM type: YTN; PAM sequence: CTA
ggccaggattgagtttcatg

SEQ ID NO: 394621 - DNA, 20 bp, Artificial Sequence
  Description of Artificial Sequence: Synthetic oligonucleotide
  Target: LAMA2; (+) strand; PAM type: YTN; PAM sequence: TTG
agtttcatgtacttttgaga

SEQ ID NO: 394622 - DNA, 20 bp, Artificial Sequence
  Description of Artificial Sequence: Synthetic oligonucleotide
  Target: LAMA2; (+) strand; PAM type: YTN; PAM sequence: TTT
catgtacttttgagacaagc

SEQ ID NO: 394623 - DNA, 20 bp, Artificial Sequence
  Description of Artificial Sequence: Synthetic oligonucleotide
  Target: LAMA2; (+) strand; PAM type: YTN; PAM sequence: TTC
atgtacttttgagacaagct

SEQ ID NO: 394624 - DNA, 20 bp, Artificial Sequence
  Description of Artificial Sequence: Synthetic oligonucleotide
  Target: LAMA2; (+) strand; PAM type: YTN; PAM sequence: CTT
ttgagacaagctatatgttc

SEQ ID NO: 394625 - DNA, 20 bp, Artificial Sequence
  Description of Artificial Sequence: Synthetic oligonucleotide
  Target: LAMA2; (+) strand; PAM type: YTN; PAM sequence: TTT
tgagacaagctatatgttcc

SEQ ID NO: 394626 - DNA, 20 bp, Artificial Sequence
  Description of Artificial Sequence: Synthetic oligonucleotide
  Target: LAMA2; (+) strand; PAM type: YTN; PAM sequence: TTT
gagacaagctatatgttcca

SEQ ID NO: 394627 - DNA, 20 bp, Artificial Sequence
  Description of Artificial Sequence: Synthetic oligonucleotide
  Target: LAMA2; (+) strand; PAM type: YTN; PAM sequence: TTG
agacaagctatatgttccaa

SEQ ID NO: 394628 - DNA, 20 bp, Artificial Sequence
  Description of Artificial Sequence: Synthetic oligonucleotide
  Target: LAMA2; (+) strand; PAM type: YTN; PAM sequence: CTA
tatgttccaaagaaaaatta

SEQ ID NO: 394629 - DNA, 20 bp, Artificial Sequence
  Description of Artificial Sequence: Synthetic oligonucleotide
  Target: LAMA2; (+) strand; PAM type: YTN; PAM sequence: TTC
caaagaaaaattataatcta

SEQ ID NO: 394630 - DNA, 20 bp, Artificial Sequence
  Description of Artificial Sequence: Synthetic oligonucleotide
  Target: LAMA2; (+) strand; PAM type: YTN; PAM sequence: TTA
taatctattctctcatgaaa

SEQ ID NO: 394631 - DNA, 20 bp, Artificial Sequence
  Description of Artificial Sequence: Synthetic oligonucleotide
  Target: LAMA2; (+) strand; PAM type: YTN; PAM sequence: CTA
ttctctcatgaaacagtcca

SEQ ID NO: 394632 - DNA, 20 bp, Artificial Sequence
  Description of Artificial Sequence: Synthetic oligonucleotide
  Target: LAMA2; (+) strand; PAM type: YTN; PAM sequence: TTC
tctcatgaaacagtccatta

SEQ ID NO: 394633 - DNA, 20 bp, Artificial Sequence
  Description of Artificial Sequence: Synthetic oligonucleotide
  Target: LAMA2; (+) strand; PAM type: YTN; PAM sequence: CTC
tcatgaaacagtccattagg

SEQ ID NO: 394634 - DNA, 20 bp, Artificial Sequence
  Description of Artificial Sequence: Synthetic oligonucleotide
  Target: LAMA2; (+) strand; PAM type: YTN; PAM sequence: CTC
atgaaacagtccattaggtt

SEQ ID NO: 394635 - DNA, 20 bp, Artificial Sequence
  Description of Artificial Sequence: Synthetic oligonucleotide
  Target: LAMA2; (+) strand; PAM type: YTN; PAM sequence: TTA
ggttgattcttccatgtgat

SEQ ID NO: 394636 - DNA, 20 bp, Artificial Sequence
  Description of Artificial Sequence: Synthetic oligonucleotide
  Target: LAMA2; (+) strand; PAM type: YTN; PAM sequence: TTG
attcttccatgtgatggttt

SEQ ID NO: 394637 - DNA, 20 bp, Artificial Sequence
  Description of Artificial Sequence: Synthetic oligonucleotide
  Target: LAMA2; (+) strand; PAM type: YTN; PAM sequence: TTC
ttccatgtgatggtttctct

SEQ ID NO: 394638 - DNA, 20 bp, Artificial Sequence
  Description of Artificial Sequence: Synthetic oligonucleotide
  Target: LAMA2; (+) strand; PAM type: YTN; PAM sequence: CTT
ccatgtgatggtttctctat

SEQ ID NO: 394639 - DNA, 20 bp, Artificial Sequence
  Description of Artificial Sequence: Synthetic oligonucleotide
  Target: LAMA2; (+) strand; PAM type: YTN; PAM sequence: TTC
catgtgatggtttctctatt

SEQ ID NO: 394640 - DNA, 20 bp, Artificial Sequence
  Description of Artificial Sequence: Synthetic oligonucleotide
  Target: LAMA2; (+) strand; PAM type: YTN; PAM sequence: TTT
ctctatttcttaaaaagtat

SEQ ID NO: 394641 - DNA, 20 bp, Artificial Sequence
  Description of Artificial Sequence: Synthetic oligonucleotide
  Target: LAMA2; (+) strand; PAM type: YTN; PAM sequence: TTC
tctatttcttaaaaagtatt

SEQ ID NO: 394642 - DNA, 20 bp, Artificial Sequence
  Description of Artificial Sequence: Synthetic oligonucleotide
  Target: LAMA2; (+) strand; PAM type: YTN; PAM sequence: CTC
tatttcttaaaaagtatttt

SEQ ID NO: 394643 - DNA, 20 bp, Artificial Sequence
  Description of Artificial Sequence: Synthetic oligonucleotide
  Target: LAMA2; (+) strand; PAM type: YTN; PAM sequence: CTA
tttcttaaaaagtattttcc

SEQ ID NO: 394644 - DNA, 20 bp, Artificial Sequence
  Description of Artificial Sequence: Synthetic oligonucleotide
  Target: LAMA2; (+) strand; PAM type: YTN; PAM sequence: TTT
cttaaaaagtattttcccta

SEQ ID NO: 394645 - DNA, 20 bp, Artificial Sequence
  Description of Artificial Sequence: Synthetic oligonucleotide
  Target: LAMA2; (+) strand; PAM type: YTN; PAM sequence: TTC
ttaaaaagtattttccctaa

SEQ ID NO: 394646 - DNA, 20 bp, Artificial Sequence
  Description of Artificial Sequence: Synthetic oligonucleotide
  Target: LAMA2; (+) strand; PAM type: YTN; PAM sequence: CTT
aaaaagtattttccctaagt

SEQ ID NO: 394647 - DNA, 20 bp, Artificial Sequence
  Description of Artificial Sequence: Synthetic oligonucleotide
  Target: LAMA2; (+) strand; PAM type: YTN; PAM sequence: TTA
aaaagtattttccctaagtt

SEQ ID NO: 394648 - DNA, 20 bp, Artificial Sequence
  Description of Artificial Sequence: Synthetic oligonucleotide
  Target: LAMA2; (+) strand; PAM type: YTN; PAM sequence: TTT
tccctaagtttccttaaaaa

SEQ ID NO: 394649 - DNA, 20 bp, Artificial Sequence
  Description of Artificial Sequence: Synthetic oligonucleotide
  Target: LAMA2; (+) strand; PAM type: YTN; PAM sequence: TTT
ccctaagtttccttaaaaat

SEQ ID NO: 394650 - DNA, 20 bp, Artificial Sequence
  Description of Artificial Sequence: Synthetic oligonucleotide
  Target: LAMA2; (+) strand; PAM type: YTN; PAM sequence: TTC
cctaagtttccttaaaaatc

SEQ ID NO: 394651 - DNA, 20 bp, Artificial Sequence
  Description of Artificial Sequence: Synthetic oligonucleotide
  Target: LAMA2; (+) strand; PAM type: YTN; PAM sequence: CTA
agtttccttaaaaatctcac

SEQ ID NO: 394652 - DNA, 20 bp, Artificial Sequence
  Description of Artificial Sequence: Synthetic oligonucleotide
  Target: LAMA2; (+) strand; PAM type: YTN; PAM sequence: TTT
ccttaaaaatctcacttcaa

SEQ ID NO: 394653 - DNA, 20 bp, Artificial Sequence
  Description of Artificial Sequence: Synthetic oligonucleotide
  Target: LAMA2; (+) strand; PAM type: YTN; PAM sequence: TTC
cttaaaaatctcacttcaaa

SEQ ID NO: 394654 - DNA, 20 bp, Artificial Sequence
  Description of Artificial Sequence: Synthetic oligonucleotide
  Target: LAMA2; (+) strand; PAM type: YTN; PAM sequence: CTT
aaaaatctcacttcaaattt

SEQ ID NO: 394655 - DNA, 20 bp, Artificial Sequence
  Description of Artificial Sequence: Synthetic oligonucleotide
  Target: LAMA2; (+) strand; PAM type: YTN; PAM sequence: TTA
aaaatctcacttcaaatttc

SEQ ID NO: 394656 - DNA, 20 bp, Artificial Sequence
  Description of Artificial Sequence: Synthetic oligonucleotide
  Target: LAMA2; (+) strand; PAM type: YTN; PAM sequence: CTC
acttcaaatttcacagaact

SEQ ID NO: 394657 - DNA, 20 bp, Artificial Sequence
  Description of Artificial Sequence: Synthetic oligonucleotide
  Target: LAMA2; (+) strand; PAM type: YTN; PAM sequence: CTT
caaatttcacagaactccca

SEQ ID NO: 394658 - DNA, 20 bp, Artificial Sequence
  Description of Artificial Sequence: Synthetic oligonucleotide
  Target: LAMA2; (+) strand; PAM type: YTN; PAM sequence: TTC
aaatttcacagaactcccat

SEQ ID NO: 394659 - DNA, 20 bp, Artificial Sequence
  Description of Artificial Sequence: Synthetic oligonucleotide
  Target: LAMA2; (+) strand; PAM type: YTN; PAM sequence: TTT
cacagaactcccattgaata

SEQ ID NO: 394660 - DNA, 20 bp, Artificial Sequence
  Description of Artificial Sequence: Synthetic oligonucleotide
  Target: LAMA2; (+) strand; PAM type: YTN; PAM sequence: TTC
acagaactcccattgaatac

SEQ ID NO: 394661 - DNA, 20 bp, Artificial Sequence
  Description of Artificial Sequence: Synthetic oligonucleotide
  Target: LAMA2; (+) strand; PAM type: YTN; PAM sequence: CTC
ccattgaatacatctgctta

SEQ ID NO: 394662 - DNA, 20 bp, Artificial Sequence
  Description of Artificial Sequence: Synthetic oligonucleotide
  Target: LAMA2; (+) strand; PAM type: YTN; PAM sequence: TTG
aatacatctgcttatgttta

SEQ ID NO: 394663 - DNA, 20 bp, Artificial Sequence
  Description of Artificial Sequence: Synthetic oligonucleotide
  Target: LAMA2; (+) strand; PAM type: YTN; PAM sequence: CTG
cttatgtttatgctcacaaa

SEQ ID NO: 394664 - DNA, 20 bp, Artificial Sequence
  Description of Artificial Sequence: Synthetic oligonucleotide
  Target: LAMA2; (+) strand; PAM type: YTN; PAM sequence: CTT
atgtttatgctcacaaagta

SEQ ID NO: 394665 - DNA, 20 bp, Artificial Sequence
  Description of Artificial Sequence: Synthetic oligonucleotide
  Target: LAMA2; (+) strand; PAM type: YTN; PAM sequence: TTA
tgtttatgctcacaaagtac

SEQ ID NO: 394666 - DNA, 20 bp, Artificial Sequence
  Description of Artificial Sequence: Synthetic oligonucleotide
  Target: LAMA2; (+) strand; PAM type: YTN; PAM sequence: TTT
atgctcacaaagtactcatt

SEQ ID NO: 394667 - DNA, 20 bp, Artificial Sequence
  Description of Artificial Sequence: Synthetic oligonucleotide
  Target: LAMA2; (+) strand; PAM type: YTN; PAM sequence: TTA
tgctcacaaagtactcattt

SEQ ID NO: 394668 - DNA, 20 bp, Artificial Sequence
  Description of Artificial Sequence: Synthetic oligonucleotide
  Target: LAMA2; (+) strand; PAM type: YTN; PAM sequence: CTC
acaaagtactcatttgtata

SEQ ID NO: 394669 - DNA, 20 bp, Artificial Sequence
  Description of Artificial Sequence: Synthetic oligonucleotide
  Target: LAMA2; (+) strand; PAM type: YTN; PAM sequence: CTC
atttgtatatagattctaga

SEQ ID NO: 394670 - DNA, 20 bp, Artificial Sequence
  Description of Artificial Sequence: Synthetic oligonucleotide
  Target: LAMA2; (+) strand; PAM type: YTN; PAM sequence: TTT
gtatatagattctagaattc

SEQ ID NO: 394671 - DNA, 20 bp, Artificial Sequence
  Description of Artificial Sequence: Synthetic oligonucleotide
  Target: LAMA2; (+) strand; PAM type: YTN; PAM sequence: TTG
tatatagattctagaattca

SEQ ID NO: 394672 - DNA, 20 bp, Artificial Sequence
  Description of Artificial Sequence: Synthetic oligonucleotide
  Target: LAMA2; (+) strand; PAM type: YTN; PAM sequence: TTC
tagaattcaatatgtagtac

SEQ ID NO: 394673 - DNA, 20 bp, Artificial Sequence
  Description of Artificial Sequence: Synthetic oligonucleotide
  Target: LAMA2; (+) strand; PAM type: YTN; PAM sequence: CTA
gaattcaatatgtagtacca

SEQ ID NO: 394674 - DNA, 20 bp, Artificial Sequence
  Description of Artificial Sequence: Synthetic oligonucleotide
  Target: LAMA2; (+) strand; PAM type: YTN; PAM sequence: TTC
aatatgtagtaccaatataa

SEQ ID NO: 394675 - DNA, 20 bp, Artificial Sequence
  Description of Artificial Sequence: Synthetic oligonucleotide
  Target: LAMA2; (+) strand; PAM type: YTN; PAM sequence: CTA
ttcagcacttatattttagt

SEQ ID NO: 394676 - DNA, 20 bp, Artificial Sequence
  Description of Artificial Sequence: Synthetic oligonucleotide
  Target: LAMA2; (+) strand; PAM type: YTN; PAM sequence: TTC
agcacttatattttagttag

SEQ ID NO: 394677 - DNA, 20 bp, Artificial Sequence
  Description of Artificial Sequence: Synthetic oligonucleotide
  Target: LAMA2; (+) strand; PAM type: YTN; PAM sequence: CTT
atattttagttagaaatgga

SEQ ID NO: 394678 - DNA, 20 bp, Artificial Sequence
  Description of Artificial Sequence: Synthetic oligonucleotide
  Target: LAMA2; (+) strand; PAM type: YTN; PAM sequence: TTA
tattttagttagaaatggat

SEQ ID NO: 394679 - DNA, 20 bp, Artificial Sequence
  Description of Artificial Sequence: Synthetic oligonucleotide
  Target: LAMA2; (+) strand; PAM type: YTN; PAM sequence: TTT
tagttagaaatggatgctcc

SEQ ID NO: 394680 - DNA, 20 bp, Artificial Sequence
  Description of Artificial Sequence: Synthetic oligonucleotide
  Target: LAMA2; (+) strand; PAM type: YTN; PAM sequence: TTT
agttagaaatggatgctcca

SEQ ID NO: 394681 - DNA, 20 bp, Artificial Sequence
  Description of Artificial Sequence: Synthetic oligonucleotide
  Target: LAMA2; (+) strand; PAM type: YTN; PAM sequence: TTA
gttagaaatggatgctccat

SEQ ID NO: 394682 - DNA, 20 bp, Artificial Sequence
  Description of Artificial Sequence: Synthetic oligonucleotide
  Target: LAMA2; (+) strand; PAM type: YTN; PAM sequence: TTA
gaaatggatgctccatcttt

SEQ ID NO: 394683 - DNA, 20 bp, Artificial Sequence
  Description of Artificial Sequence: Synthetic oligonucleotide
  Target: LAMA2; (+) strand; PAM type: YTN; PAM sequence: CTC
catctttctttaaaagtagt

SEQ ID NO: 394684 - DNA, 20 bp, Artificial Sequence
  Description of Artificial Sequence: Synthetic oligonucleotide
  Target: LAMA2; (+) strand; PAM type: YTN; PAM sequence: CTT
tctttaaaagtagttttaat

SEQ ID NO: 394685 - DNA, 20 bp, Artificial Sequence
  Description of Artificial Sequence: Synthetic oligonucleotide
  Target: LAMA2; (+) strand; PAM type: YTN; PAM sequence: TTT
ctttaaaagtagttttaatt

SEQ ID NO: 394686 - DNA, 20 bp, Artificial Sequence
  Description of Artificial Sequence: Synthetic oligonucleotide
  Target: LAMA2; (+) strand; PAM type: YTN; PAM sequence: TTC
tttaaaagtagttttaattc

SEQ ID NO: 394687 - DNA, 20 bp, Artificial Sequence
  Description of Artificial Sequence: Synthetic oligonucleotide
  Target: LAMA2; (+) strand; PAM type: YTN; PAM sequence: CTT
taaaagtagttttaattcct

SEQ ID NO: 394688 - DNA, 20 bp, Artificial Sequence
  Description of Artificial Sequence: Synthetic oligonucleotide
  Target: LAMA2; (+) strand; PAM type: YTN; PAM sequence: TTT
aaaagtagttttaattcctt

SEQ ID NO: 394689 - DNA, 20 bp, Artificial Sequence
  Description of Artificial Sequence: Synthetic oligonucleotide
  Target: LAMA2; (+) strand; PAM type: YTN; PAM sequence: TTA
aaagtagttttaattcctta

SEQ ID NO: 394690 - DNA, 20 bp, Artificial Sequence
  Description of Artificial Sequence: Synthetic oligonucleotide
  Target: LAMA2; (+) strand; PAM type: YTN; PAM sequence: TTT
taattccttaactagtatcg

SEQ ID NO: 394691 - DNA, 20 bp, Artificial Sequence
  Description of Artificial Sequence: Synthetic oligonucleotide
  Target: LAMA2; (+) strand; PAM type: YTN; PAM sequence: TTT
aattccttaactagtatcgc

SEQ ID NO: 394692 - DNA, 20 bp, Artificial Sequence
  Description of Artificial Sequence: Synthetic oligonucleotide
  Target: LAMA2; (+) strand; PAM type: YTN; PAM sequence: TTA
attccttaactagtatcgca

SEQ ID NO: 394693 - DNA, 20 bp, Artificial Sequence
  Description of Artificial Sequence: Synthetic oligonucleotide
  Target: LAMA2; (+) strand; PAM type: YTN; PAM sequence: TTC
cttaactagtatcgcataac

SEQ ID NO: 394694 - DNA, 20 bp, Artificial Sequence
  Description of Artificial Sequence: Synthetic oligonucleotide
  Target: LAMA2; (+) strand; PAM type: YTN; PAM sequence: CTT
aactagtatcgcataacttt

SEQ ID NO: 394695 - DNA, 20 bp, Artificial Sequence
  Description of Artificial Sequence: Synthetic oligonucleotide
  Target: LAMA2; (+) strand; PAM type: YTN; PAM sequence: TTA
actagtatcgcataactttt

SEQ ID NO: 394696 - DNA, 20 bp, Artificial Sequence
  Description of Artificial Sequence: Synthetic oligonucleotide
  Target: LAMA2; (+) strand; PAM type: YTN; PAM sequence: CTA
gtatcgcataacttttcttc

SEQ ID NO: 394697 - DNA, 20 bp, Artificial Sequence
  Description of Artificial Sequence: Synthetic oligonucleotide
  Target: LAMA2; (+) strand; PAM type: YTN; PAM sequence: CTT
ttcttcgcttggatgacttt

SEQ ID NO: 394698 - DNA, 20 bp, Artificial Sequence
  Description of Artificial Sequence: Synthetic oligonucleotide
  Target: LAMA2; (+) strand; PAM type: YTN; PAM sequence: TTT
tcttcgcttggatgactttc

SEQ ID NO: 394699 - DNA, 20 bp, Artificial Sequence
  Description of Artificial Sequence: Synthetic oligonucleotide
  Target: LAMA2; (+) strand; PAM type: YTN; PAM sequence: TTT
cttcgcttggatgactttct

SEQ ID NO: 394700 - DNA, 20 bp, Artificial Sequence
  Description of Artificial Sequence: Synthetic oligonucleotide
  Target: LAMA2; (+) strand; PAM type: YTN; PAM sequence: TTC
ttcgcttggatgactttctc

SEQ ID NO: 394701 - DNA, 20 bp, Artificial Sequence
  Description of Artificial Sequence: Synthetic oligonucleotide
  Target: LAMA2; (+) strand; PAM type: YTN; PAM sequence: CTT
cgcttggatgactttctcac

SEQ ID NO: 394702 - DNA, 20 bp, Artificial Sequence
  Description of Artificial Sequence: Synthetic oligonucleotide
  Target: LAMA2; (+) strand; PAM type: YTN; PAM sequence: TTC
gcttggatgactttctcaca

SEQ ID NO: 394703 - DNA, 20 bp, Artificial Sequence
  Description of Artificial Sequence: Synthetic oligonucleotide
  Target: LAMA2; (+) strand; PAM type: YTN; PAM sequence: CTT
ggatgactttctcacaatga

SEQ ID NO: 394704 - DNA, 20 bp, Artificial Sequence
  Description of Artificial Sequence: Synthetic oligonucleotide
  Target: LAMA2; (+) strand; PAM type: YTN; PAM sequence: TTG
gatgactttctcacaatgag

SEQ ID NO: 394705 - DNA, 20 bp, Artificial Sequence
  Description of Artificial Sequence: Synthetic oligonucleotide
  Target: LAMA2; (+) strand; PAM type: YTN; PAM sequence: CTT
tctcacaatgagaagaagaa

SEQ ID NO: 394706 - DNA, 20 bp, Artificial Sequence
  Description of Artificial Sequence: Synthetic oligonucleotide
  Target: LAMA2; (+) strand; PAM type: YTN; PAM sequence: TTT
ctcacaatgagaagaagaaa

SEQ ID NO: 394707 - DNA, 20 bp, Artificial Sequence
  Description of Artificial Sequence: Synthetic oligonucleotide
  Target: LAMA2; (+) strand; PAM type: YTN; PAM sequence: TTC
tcacaatgagaagaagaaat

SEQ ID NO: 394708 - DNA, 20 bp, Artificial Sequence
  Description of Artificial Sequence: Synthetic oligonucleotide
  Target: LAMA2; (+) strand; PAM type: YTN; PAM sequence: CTC
acaatgagaagaagaaataa

SEQ ID NO: 394709 - DNA, 20 bp, Artificial Sequence
  Description of Artificial Sequence: Synthetic oligonucleotide
  Target: LAMA2; (+) strand; PAM type: YTN; PAM sequence: CTG
tacaagcctctacatagaag

SEQ ID NO: 394710 - DNA, 20 bp, Artificial Sequence
  Description of Artificial Sequence: Synthetic oligonucleotide
  Target: LAMA2; (+) strand; PAM type: YTN; PAM sequence: CTC
tacatagaagaactcttcaa

SEQ ID NO: 394711 - DNA, 20 bp, Artificial Sequence
  Description of Artificial Sequence: Synthetic oligonucleotide
  Target: LAMA2; (+) strand; PAM type: YTN; PAM sequence: CTA
catagaagaactcttcaagg

SEQ ID NO: 394712 - DNA, 20 bp, Artificial Sequence
  Description of Artificial Sequence: Synthetic oligonucleotide
  Target: LAMA2; (+) strand; PAM type: YTN; PAM sequence: CTC
ttcaaggactggctaagtag

SEQ ID NO: 394713 - DNA, 20 bp, Artificial Sequence
  Description of Artificial Sequence: Synthetic oligonucleotide
  Target: LAMA2; (+) strand; PAM type: YTN; PAM sequence: CTT
caaggactggctaagtagtt

SEQ ID NO: 394714 - DNA, 20 bp, Artificial Sequence
  Description of Artificial Sequence: Synthetic oligonucleotide
  Target: LAMA2; (+) strand; PAM type: YTN; PAM sequence: TTC
aaggactggctaagtagttt

SEQ ID NO: 394715 - DNA, 20 bp, Artificial Sequence
  Description of Artificial Sequence: Synthetic oligonucleotide
  Target: LAMA2; (+) strand; PAM type: YTN; PAM sequence: CTG
gctaagtagtttatattttt

SEQ ID NO: 394716 - DNA, 20 bp, Artificial Sequence
  Description of Artificial Sequence: Synthetic oligonucleotide
  Target: LAMA2; (+) strand; PAM type: YTN; PAM sequence: CTA
agtagtttatatttttctca

SEQ ID NO: 394717 - DNA, 20 bp, Artificial Sequence
  Description of Artificial Sequence: Synthetic oligonucleotide
  Target: LAMA2; (+) strand; PAM type: YTN; PAM sequence: TTT
atatttttctcatctagcca

SEQ ID NO: 394718 - DNA, 20 bp, Artificial Sequence
  Description of Artificial Sequence: Synthetic oligonucleotide
  Target: LAMA2; (+) strand; PAM type: YTN; PAM sequence: TTA
tatttttctcatctagccac

SEQ ID NO: 394719 - DNA, 20 bp, Artificial Sequence
  Description of Artificial Sequence: Synthetic oligonucleotide
  Target: LAMA2; (+) strand; PAM type: YTN; PAM sequence: TTT
ttctcatctagccacatttc

SEQ ID NO: 394720 - DNA, 20 bp, Artificial Sequence
  Description of Artificial Sequence: Synthetic oligonucleotide
  Target: LAMA2; (+) strand; PAM type: YTN; PAM sequence: TTT
tctcatctagccacatttca

SEQ ID NO: 394721 - DNA, 20 bp, Artificial Sequence
  Description of Artificial Sequence: Synthetic oligonucleotide
  Target: LAMA2; (+) strand; PAM type: YTN; PAM sequence: TTT
ctcatctagccacatttcaa

SEQ ID NO: 394722 - DNA, 20 bp, Artificial Sequence
  Description of Artificial Sequence: Synthetic oligonucleotide
  Target: LAMA2; (+) strand; PAM type: YTN; PAM sequence: TTC
tcatctagccacatttcaac

SEQ ID NO: 394723 - DNA, 20 bp, Artificial Sequence
  Description of Artificial Sequence: Synthetic oligonucleotide
  Target: LAMA2; (+) strand; PAM type: YTN; PAM sequence: CTC
atctagccacatttcaacat

SEQ ID NO: 394724 - DNA, 20 bp, Artificial Sequence
  Description of Artificial Sequence: Synthetic oligonucleotide
  Target: LAMA2; (+) strand; PAM type: YTN; PAM sequence: CTA
gccacatttcaacatgatgt

SEQ ID NO: 394725 - DNA, 20 bp, Artificial Sequence
  Description of Artificial Sequence: Synthetic oligonucleotide
  Target: LAMA2; (+) strand; PAM type: YTN; PAM sequence: TTT
caacatgatgtacctttttt

SEQ ID NO: 394726 - DNA, 20 bp, Artificial Sequence
  Description of Artificial Sequence: Synthetic oligonucleotide
  Target: LAMA2; (+) strand; PAM type: YTN; PAM sequence: TTC
aacatgatgtaccttttttg

SEQ ID NO: 394727 - DNA, 20 bp, Artificial Sequence
  Description of Artificial Sequence: Synthetic oligonucleotide
  Target: LAMA2; (+) strand; PAM type: YTN; PAM sequence: CTT
ttttgctaagcttttattca

SEQ ID NO: 394728 - DNA, 20 bp, Artificial Sequence
  Description of Artificial Sequence: Synthetic oligonucleotide
  Target: LAMA2; (+) strand; PAM type: YTN; PAM sequence: TTT
tttgctaagcttttattcaa

SEQ ID NO: 394729 - DNA, 20 bp, Artificial Sequence
  Description of Artificial Sequence: Synthetic oligonucleotide
  Target: LAMA2; (+) strand; PAM type: YTN; PAM sequence: TTT
ttgctaagcttttattcaaa

SEQ ID NO: 394730 - DNA, 20 bp, Artificial Sequence
  Description of Artificial Sequence: Synthetic oligonucleotide
  Target: LAMA2; (+) strand; PAM type: YTN; PAM sequence: TTT
tgctaagcttttattcaaac

SEQ ID NO: 394731 - DNA, 20 bp, Artificial Sequence
  Description of Artificial Sequence: Synthetic oligonucleotide
  Target: LAMA2; (+) strand; PAM type: YTN; PAM sequence: TTT
gctaagcttttattcaaaca

SEQ ID NO: 394732 - DNA, 20 bp, Artificial Sequence
  Description of Artificial Sequence: Synthetic oligonucleotide
  Target: LAMA2; (+) strand; PAM type: YTN; PAM sequence: TTG
ctaagcttttattcaaacag

SEQ ID NO: 394733 - DNA, 20 bp, Artificial Sequence
  Description of Artificial Sequence: Synthetic oligonucleotide
  Target: LAMA2; (+) strand; PAM type: YTN; PAM sequence: CTA
agcttttattcaaacagctc

SEQ ID NO: 394734 - DNA, 20 bp, Artificial Sequence
  Description of Artificial Sequence: Synthetic oligonucleotide
  Target: LAMA2; (+) strand; PAM type: YTN; PAM sequence: CTT
ttattcaaacagctcaggaa

SEQ ID NO: 394735 - DNA, 20 bp, Artificial Sequence
  Description of Artificial Sequence: Synthetic oligonucleotide
  Target: LAMA2; (+) strand; PAM type: YTN; PAM sequence: TTT
tattcaaacagctcaggaaa

SEQ ID NO: 394736 - DNA, 20 bp, Artificial Sequence
  Description of Artificial Sequence: Synthetic oligonucleotide
  Target: LAMA2; (+) strand; PAM type: YTN; PAM sequence: TTT
attcaaacagctcaggaaag

SEQ ID NO: 394737 - DNA, 20 bp, Artificial Sequence
  Description of Artificial Sequence: Synthetic oligonucleotide
  Target: LAMA2; (+) strand; PAM type: YTN; PAM sequence: TTA
ttcaaacagctcaggaaagt

SEQ ID NO: 394738 - DNA, 20 bp, Artificial Sequence
  Description of Artificial Sequence: Synthetic oligonucleotide
  Target: LAMA2; (+) strand; PAM type: YTN; PAM sequence: TTC
aaacagctcaggaaagtcag

SEQ ID NO: 394739 - DNA, 20 bp, Artificial Sequence
  Description of Artificial Sequence: Synthetic oligonucleotide
  Target: LAMA2; (+) strand; PAM type: YTN; PAM sequence: CTC
aggaaagtcaggaatacaag

SEQ ID NO: 394740 - DNA, 20 bp, Artificial Sequence
  Description of Artificial Sequence: Synthetic oligonucleotide
  Target: LAMA2; (+) strand; PAM type: YTN; PAM sequence: TTT
tatgaaaatgcaattttgat

SEQ ID NO: 394741 - DNA, 20 bp, Artificial Sequence
  Description of Artificial Sequence: Synthetic oligonucleotide
  Target: LAMA2; (+) strand; PAM type: YTN; PAM sequence: TTT
atgaaaatgcaattttgatg

SEQ ID NO: 394742 - DNA, 20 bp, Artificial Sequence
  Description of Artificial Sequence: Synthetic oligonucleotide
  Target: LAMA2; (+) strand; PAM type: YTN; PAM sequence: TTA
tgaaaatgcaattttgatgt

SEQ ID NO: 394743 - DNA, 20 bp, Artificial Sequence
  Description of Artificial Sequence: Synthetic oligonucleotide
  Target: LAMA2; (+) strand; PAM type: YTN; PAM sequence: TTT
tgatgtcttgttcataatgg

SEQ ID NO: 394744 - DNA, 20 bp, Artificial Sequence
  Description of Artificial Sequence: Synthetic oligonucleotide
  Target: LAMA2; (+) strand; PAM type: YTN; PAM sequence: TTT
gatgtcttgttcataatggt

SEQ ID NO: 394745 - DNA, 20 bp, Artificial Sequence
  Description of Artificial Sequence: Synthetic oligonucleotide
  Target: LAMA2; (+) strand; PAM type: YTN; PAM sequence: TTG
atgtcttgttcataatggtc

SEQ ID NO: 394746 - DNA, 20 bp, Artificial Sequence
  Description of Artificial Sequence: Synthetic oligonucleotide
  Target: LAMA2; (+) strand; PAM type: YTN; PAM sequence: CTT
gttcataatggtctacagaa

SEQ ID NO: 394747 - DNA, 20 bp, Artificial Sequence
  Description of Artificial Sequence: Synthetic oligonucleotide
  Target: LAMA2; (+) strand; PAM type: YTN; PAM sequence: TTG
ttcataatggtctacagaaa

SEQ ID NO: 394748 - DNA, 20 bp, Artificial Sequence
  Description of Artificial Sequence: Synthetic oligonucleotide
  Target: LAMA2; (+) strand; PAM type: YTN; PAM sequence: TTC
ataatggtctacagaaaaag

SEQ ID NO: 394749 - DNA, 20 bp, Artificial Sequence
  Description of Artificial Sequence: Synthetic oligonucleotide
  Target: LAMA2; (+) strand; PAM type: YTN; PAM sequence: CTA
cagaaaaagaaggaggctgt

SEQ ID NO: 394750 - DNA, 20 bp, Artificial Sequence
  Description of Artificial Sequence: Synthetic oligonucleotide
  Target: LAMA2; (+) strand; PAM type: YTN; PAM sequence: CTG
ttgaaagcggcaaacgacaa

SEQ ID NO: 394751 - DNA, 20 bp, Artificial Sequence
  Description of Artificial Sequence: Synthetic oligonucleotide
  Target: LAMA2; (+) strand; PAM type: YTN; PAM sequence: TTG
aaagcggcaaacgacaaatt

SEQ ID NO: 394752 - DNA, 20 bp, Artificial Sequence
  Description of Artificial Sequence: Synthetic oligonucleotide
  Target: LAMA2; (+) strand; PAM type: YTN; PAM sequence: TTG
agaacactttaaaagagggc

SEQ ID NO: 394753 - DNA, 20 bp, Artificial Sequence
  Description of Artificial Sequence: Synthetic oligonucleotide
  Target: LAMA2; (+) strand; PAM type: YTN; PAM sequence: CTT
taaaagagggcaatgacata

SEQ ID NO: 394754 - DNA, 20 bp, Artificial Sequence
  Description of Artificial Sequence: Synthetic oligonucleotide
  Target: LAMA2; (+) strand; PAM type: YTN; PAM sequence: TTT
aaaagagggcaatgacatac

SEQ ID NO: 394755 - DNA, 20 bp, Artificial Sequence
  Description of Artificial Sequence: Synthetic oligonucleotide
  Target: LAMA2; (+) strand; PAM type: YTN; PAM sequence: TTA
aaagagggcaatgacatact

SEQ ID NO: 394756 - DNA, 20 bp, Artificial Sequence
  Description of Artificial Sequence: Synthetic oligonucleotide
  Target: LAMA2; (+) strand; PAM type: YTN; PAM sequence: CTC
gatgaagccaaccgtcttgc

SEQ ID NO: 394757 - DNA, 20 bp, Artificial Sequence
  Description of Artificial Sequence: Synthetic oligonucleotide
  Target: LAMA2; (+) strand; PAM type: YTN; PAM sequence: CTT
gcagatgaaatcaactccat

SEQ ID NO: 394758 - DNA, 20 bp, Artificial Sequence
  Description of Artificial Sequence: Synthetic oligonucleotide
  Target: LAMA2; (+) strand; PAM type: YTN; PAM sequence: TTG
cagatgaaatcaactccatc

SEQ ID NO: 394759 - DNA, 20 bp, Artificial Sequence
  Description of Artificial Sequence: Synthetic oligonucleotide
  Target: LAMA2; (+) strand; PAM type: YTN; PAM sequence: CTC
catcatagacgtgagtattg

SEQ ID NO: 394760 - DNA, 20 bp, Artificial Sequence
  Description of Artificial Sequence: Synthetic oligonucleotide
  Target: LAMA2; (+) strand; PAM type: YTN; PAM sequence: TTG
ggtaaaactcaaaagagaga

SEQ ID NO: 394761 - DNA, 20 bp, Artificial Sequence
  Description of Artificial Sequence: Synthetic oligonucleotide
  Target: LAMA2; (+) strand; PAM type: YTN; PAM sequence: CTC
aaaagagagatgataatgaa

SEQ ID NO: 394762 - DNA, 20 bp, Artificial Sequence
  Description of Artificial Sequence: Synthetic oligonucleotide
  Target: LAMA2; (+) strand; PAM type: YTN; PAM sequence: CTC
agtaatagaagcaaatacta

SEQ ID NO: 394763 - DNA, 20 bp, Artificial Sequence
  Description of Artificial Sequence: Synthetic oligonucleotide
  Target: LAMA2; (+) strand; PAM type: YTN; PAM sequence: CTA
gtacttgttttcttgtggag

SEQ ID NO: 394764 - DNA, 20 bp, Artificial Sequence
  Description of Artificial Sequence: Synthetic oligonucleotide
  Target: LAMA2; (+) strand; PAM type: YTN; PAM sequence: CTT
gttttcttgtggagataaaa

SEQ ID NO: 394765 - DNA, 20 bp, Artificial Sequence
  Description of Artificial Sequence: Synthetic oligonucleotide
  Target: LAMA2; (+) strand; PAM type: YTN; PAM sequence: TTG
ttttcttgtggagataaaat

SEQ ID NO: 394766 - DNA, 20 bp, Artificial Sequence
  Description of Artificial Sequence: Synthetic oligonucleotide
  Target: LAMA2; (+) strand; PAM type: YTN; PAM sequence: TTT
tcttgtggagataaaattat

SEQ ID NO: 394767 - DNA, 20 bp, Artificial Sequence
  Description of Artificial Sequence: Synthetic oligonucleotide
  Target: LAMA2; (+) strand; PAM type: YTN; PAM sequence: TTT
cttgtggagataaaattatt

SEQ ID NO: 394768 - DNA, 20 bp, Artificial Sequence
  Description of Artificial Sequence: Synthetic oligonucleotide
  Target: LAMA2; (+) strand; PAM type: YTN; PAM sequence: TTC
ttgtggagataaaattattt

SEQ ID NO: 394769 - DNA, 20 bp, Artificial Sequence
  Description of Artificial Sequence: Synthetic oligonucleotide
  Target: LAMA2; (+) strand; PAM type: YTN; PAM sequence: CTT
gtggagataaaattattttt

SEQ ID NO: 394770 - DNA, 20 bp, Artificial Sequence
  Description of Artificial Sequence: Synthetic oligonucleotide
  Target: LAMA2; (+) strand; PAM type: YTN; PAM sequence: TTG
tggagataaaattatttttg

SEQ ID NO: 394771 - DNA, 20 bp, Artificial Sequence
  Description of Artificial Sequence: Synthetic oligonucleotide
  Target: LAMA2; (+) strand; PAM type: YTN; PAM sequence: TTA
tttttgcattattctactgt

SEQ ID NO: 394772 - DNA, 20 bp, Artificial Sequence
  Description of Artificial Sequence: Synthetic oligonucleotide
  Target: LAMA2; (+) strand; PAM type: YTN; PAM sequence: TTT
ttgcattattctactgtgac

SEQ ID NO: 394773 - DNA, 20 bp, Artificial Sequence
  Description of Artificial Sequence: Synthetic oligonucleotide
  Target: LAMA2; (+) strand; PAM type: YTN; PAM sequence: TTT
tgcattattctactgtgacc

SEQ ID NO: 394774 - DNA, 20 bp, Artificial Sequence
  Description of Artificial Sequence: Synthetic oligonucleotide
  Target: LAMA2; (+) strand; PAM type: YTN; PAM sequence: TTT
gcattattctactgtgacca

SEQ ID NO: 394775 - DNA, 20 bp, Artificial Sequence
  Description of Artificial Sequence: Synthetic oligonucleotide
  Target: LAMA2; (+) strand; PAM type: YTN; PAM sequence: TTG
cattattctactgtgaccat

SEQ ID NO: 394776 - DNA, 20 bp, Artificial Sequence
  Description of Artificial Sequence: Synthetic oligonucleotide
  Target: LAMA2; (+) strand; PAM type: YTN; PAM sequence: TTA
ttctactgtgaccatgccta

SEQ ID NO: 394777 - DNA, 20 bp, Artificial Sequence
  Description of Artificial Sequence: Synthetic oligonucleotide
  Target: LAMA2; (+) strand; PAM type: YTN; PAM sequence: TTC
tactgtgaccatgcctatct

SEQ ID NO: 394778 - DNA, 20 bp, Artificial Sequence
  Description of Artificial Sequence: Synthetic oligonucleotide
  Target: LAMA2; (+) strand; PAM type: YTN; PAM sequence: CTA
ctgtgaccatgcctatctat

SEQ ID NO: 394779 - DNA, 20 bp, Artificial Sequence
  Description of Artificial Sequence: Synthetic oligonucleotide
  Target: LAMA2; (+) strand; PAM type: YTN; PAM sequence: CTG
tgaccatgcctatctattgg

SEQ ID NO: 394780 - DNA, 20 bp, Artificial Sequence
  Description of Artificial Sequence: Synthetic oligonucleotide
  Target: LAMA2; (+) strand; PAM type: YTN; PAM sequence: CTA
tctattggtgacaactggaa

SEQ ID NO: 394781 - DNA, 20 bp, Artificial Sequence
  Description of Artificial Sequence: Synthetic oligonucleotide
  Target: LAMA2; (+) strand; PAM type: YTN; PAM sequence: CTA
ttggtgacaactggaatatc

SEQ ID NO: 394782 - DNA, 20 bp, Artificial Sequence
  Description of Artificial Sequence: Synthetic oligonucleotide
  Target: LAMA2; (+) strand; PAM type: YTN; PAM sequence: TTG
gtgacaactggaatatcact

SEQ ID NO: 394783 - DNA, 20 bp, Artificial Sequence
  Description of Artificial Sequence: Synthetic oligonucleotide
  Target: LAMA2; (+) strand; PAM type: YTN; PAM sequence: CTG
gaatatcactttgttctccc

SEQ ID NO: 394784 - DNA, 20 bp, Artificial Sequence
  Description of Artificial Sequence: Synthetic oligonucleotide
  Target: LAMA2; (+) strand; PAM type: YTN; PAM sequence: CTT
tgttctcccaatggacatga

SEQ ID NO: 394785 - DNA, 20 bp, Artificial Sequence
  Description of Artificial Sequence: Synthetic oligonucleotide
  Target: LAMA2; (+) strand; PAM type: YTN; PAM sequence: TTT
gttctcccaatggacatgag

SEQ ID NO: 394786 - DNA, 20 bp, Artificial Sequence
  Description of Artificial Sequence: Synthetic oligonucleotide
  Target: LAMA2; (+) strand; PAM type: YTN; PAM sequence: TTG
ttctcccaatggacatgagt

SEQ ID NO: 394787 - DNA, 20 bp, Artificial Sequence
  Description of Artificial Sequence: Synthetic oligonucleotide
  Target: LAMA2; (+) strand; PAM type: YTN; PAM sequence: TTC
tcccaatggacatgagtgtt

SEQ ID NO: 394788 - DNA, 20 bp, Artificial Sequence
  Description of Artificial Sequence: Synthetic oligonucleotide
  Target: LAMA2; (+) strand; PAM type: YTN; PAM sequence: CTC
ccaatggacatgagtgtttg

SEQ ID NO: 394789 - DNA, 20 bp, Artificial Sequence
  Description of Artificial Sequence: Synthetic oligonucleotide
  Target: LAMA2; (+) strand; PAM type: YTN; PAM sequence: TTT
gtgtaagtgtactcacacat

SEQ ID NO: 394790 - DNA, 20 bp, Artificial Sequence
  Description of Artificial Sequence: Synthetic oligonucleotide
  Target: LAMA2; (+) strand; PAM type: YTN; PAM sequence: TTG
tgtaagtgtactcacacatt

SEQ ID NO: 394791 - DNA, 20 bp, Artificial Sequence
  Description of Artificial Sequence: Synthetic oligonucleotide
  Target: LAMA2; (+) strand; PAM type: YTN; PAM sequence: CTC
acacattcacacatatctgt

SEQ ID NO: 394792 - DNA, 20 bp, Artificial Sequence
  Description of Artificial Sequence: Synthetic oligonucleotide
  Target: LAMA2; (+) strand; PAM type: YTN; PAM sequence: TTC
acacatatctgtttttgtcc

SEQ ID NO: 394793 - DNA, 20 bp, Artificial Sequence
  Description of Artificial Sequence: Synthetic oligonucleotide
  Target: LAMA2; (+) strand; PAM type: YTN; PAM sequence: CTG
tttttgtccacagcgatgaa

SEQ ID NO: 394794 - DNA, 20 bp, Artificial Sequence
  Description of Artificial Sequence: Synthetic oligonucleotide
  Target: LAMA2; (+) strand; PAM type: YTN; PAM sequence: TTT
ttgtccacagcgatgaagga

SEQ ID NO: 394795 - DNA, 20 bp, Artificial Sequence
  Description of Artificial Sequence: Synthetic oligonucleotide
  Target: LAMA2; (+) strand; PAM type: YTN; PAM sequence: TTT
tgtccacagcgatgaaggac

SEQ ID NO: 394796 - DNA, 20 bp, Artificial Sequence
  Description of Artificial Sequence: Synthetic oligonucleotide
  Target: LAMA2; (+) strand; PAM type: YTN; PAM sequence: TTT
gtccacagcgatgaaggaca

SEQ ID NO: 394797 - DNA, 20 bp, Artificial Sequence
  Description of Artificial Sequence: Synthetic oligonucleotide
  Target: LAMA2; (+) strand; PAM type: YTN; PAM sequence: TTG
tccacagcgatgaaggacat

SEQ ID NO: 394798 - DNA, 20 bp, Artificial Sequence
  Description of Artificial Sequence: Synthetic oligonucleotide
  Target: LAMA2; (+) strand; PAM type: YTN; PAM sequence: TTT
cttgttcctagagcagcact

SEQ ID NO: 394799 - DNA, 20 bp, Artificial Sequence
  Description of Artificial Sequence: Synthetic oligonucleotide
  Target: LAMA2; (+) strand; PAM type: YTN; PAM sequence: TTC
ttgttcctagagcagcactt

SEQ ID NO: 394800 - DNA, 20 bp, Artificial Sequence
  Description of Artificial Sequence: Synthetic oligonucleotide
  Target: LAMA2; (+) strand; PAM type: YTN; PAM sequence: CTT
gttcctagagcagcacttac

SEQ ID NO: 394801 - DNA, 20 bp, Artificial Sequence
  Description of Artificial Sequence: Synthetic oligonucleotide
  Target: LAMA2; (+) strand; PAM type: YTN; PAM sequence: TTG
ttcctagagcagcacttaca

SEQ ID NO: 394802 - DNA, 20 bp, Artificial Sequence
  Description of Artificial Sequence: Synthetic oligonucleotide
  Target: LAMA2; (+) strand; PAM type: YTN; PAM sequence: TTC
ctagagcagcacttacaatc

SEQ ID NO: 394803 - DNA, 20 bp, Artificial Sequence
  Description of Artificial Sequence: Synthetic oligonucleotide
  Target: LAMA2; (+) strand; PAM type: YTN; PAM sequence: CTA
gagcagcacttacaatctgc

SEQ ID NO: 394804 - DNA, 20 bp, Artificial Sequence
  Description of Artificial Sequence: Synthetic oligonucleotide
  Target: LAMA2; (+) strand; PAM type: YTN; PAM sequence: CTT
acaatctgcttcaatattta

SEQ ID NO: 394805 - DNA, 20 bp, Artificial Sequence
  Description of Artificial Sequence: Synthetic oligonucleotide
  Target: LAMA2; (+) strand; PAM type: YTN; PAM sequence: TTA
caatctgcttcaatatttat

SEQ ID NO: 394806 - DNA, 20 bp, Artificial Sequence
  Description of Artificial Sequence: Synthetic oligonucleotide
  Target: LAMA2; (+) strand; PAM type: YTN; PAM sequence: CTG
cttcaatatttatataacat

SEQ ID NO: 394807 - DNA, 20 bp, Artificial Sequence
  Description of Artificial Sequence: Synthetic oligonucleotide
  Target: LAMA2; (+) strand; PAM type: YTN; PAM sequence: CTT
caatatttatataacattag

SEQ ID NO: 394808 - DNA, 20 bp, Artificial Sequence
  Description of Artificial Sequence: Synthetic oligonucleotide
  Target: LAMA2; (+) strand; PAM type: YTN; PAM sequence: TTC
aatatttatataacattagt

SEQ ID NO: 394809 - DNA, 20 bp, Artificial Sequence
  Description of Artificial Sequence: Synthetic oligonucleotide
  Target: LAMA2; (+) strand; PAM type: YTN; PAM sequence: TTT
atataacattagttaaaaga

SEQ ID NO: 394810 - DNA, 20 bp, Artificial Sequence
  Description of Artificial Sequence: Synthetic oligonucleotide
  Target: LAMA2; (+) strand; PAM type: YTN; PAM sequence: TTA
tataacattagttaaaagac

SEQ ID NO: 394811 - DNA, 20 bp, Artificial Sequence
  Description of Artificial Sequence: Synthetic oligonucleotide
  Target: LAMA2; (+) strand; PAM type: YTN; PAM sequence: TTA
gttaaaagacaaatgtaaat

SEQ ID NO: 394812 - DNA, 20 bp, Artificial Sequence
  Description of Artificial Sequence: Synthetic oligonucleotide
  Target: LAMA2; (+) strand; PAM type: YTN; PAM sequence: TTA
aaagacaaatgtaaatttac

SEQ ID NO: 394813 - DNA, 20 bp, Artificial Sequence
  Description of Artificial Sequence: Synthetic oligonucleotide
  Target: LAMA2; (+) strand; PAM type: YTN; PAM sequence: TTT
acaaacaggcttttaacatg

SEQ ID NO: 394814 - DNA, 20 bp, Artificial Sequence
  Description of Artificial Sequence: Synthetic oligonucleotide
  Target: LAMA2; (+) strand; PAM type: YTN; PAM sequence: TTA
caaacaggcttttaacatgt

SEQ ID NO: 394815 - DNA, 20 bp, Artificial Sequence
  Description of Artificial Sequence: Synthetic oligonucleotide
  Target: LAMA2; (+) strand; PAM type: YTN; PAM sequence: CTT
ttaacatgtaatgtctaatg

SEQ ID NO: 394816 - DNA, 20 bp, Artificial Sequence
  Description of Artificial Sequence: Synthetic oligonucleotide
  Target: LAMA2; (+) strand; PAM type: YTN; PAM sequence: TTT
taacatgtaatgtctaatgc

SEQ ID NO: 394817 - DNA, 20 bp, Artificial Sequence
  Description of Artificial Sequence: Synthetic oligonucleotide
  Target: LAMA2; (+) strand; PAM type: YTN; PAM sequence: TTT
aacatgtaatgtctaatgca

SEQ ID NO: 394818 - DNA, 20 bp, Artificial Sequence
  Description of Artificial Sequence: Synthetic oligonucleotide
  Target: LAMA2; (+) strand; PAM type: YTN; PAM sequence: TTA
acatgtaatgtctaatgcat

SEQ ID NO: 394819 - DNA, 20 bp, Artificial Sequence
  Description of Artificial Sequence: Synthetic oligonucleotide
  Target: LAMA2; (+) strand; PAM type: YTN; PAM sequence: CTA
atgcattacatagagtgata

SEQ ID NO: 394820 - DNA, 20 bp, Artificial Sequence
  Description of Artificial Sequence: Synthetic oligonucleotide
  Target: LAMA2; (+) strand; PAM type: YTN; PAM sequence: TTA
catagagtgatatgtggtca

SEQ ID NO: 394821 - DNA, 20 bp, Artificial Sequence
  Description of Artificial Sequence: Synthetic oligonucleotide
  Target: LAMA2; (+) strand; PAM type: YTN; PAM sequence: CTA
agagatcctaatgacatgta

SEQ ID NO: 394822 - DNA, 20 bp, Artificial Sequence
  Description of Artificial Sequence: Synthetic oligonucleotide
  Target: LAMA2; (+) strand; PAM type: YTN; PAM sequence: CTA
atgacatgtatacctatgaa

SEQ ID NO: 394823 - DNA, 20 bp, Artificial Sequence
  Description of Artificial Sequence: Synthetic oligonucleotide
  Target: LAMA2; (+) strand; PAM type: YTN; PAM sequence: CTA
tgaagtggcattgtttaaat

SEQ ID NO: 394824 - DNA, 20 bp, Artificial Sequence
  Description of Artificial Sequence: Synthetic oligonucleotide
  Target: LAMA2; (+) strand; PAM type: YTN; PAM sequence: TTG
tttaaatagataggcttttc

SEQ ID NO: 394825 - DNA, 20 bp, Artificial Sequence
  Description of Artificial Sequence: Synthetic oligonucleotide
  Target: LAMA2; (+) strand; PAM type: YTN; PAM sequence: TTT
aaatagataggcttttcttg

SEQ ID NO: 394826 - DNA, 20 bp, Artificial Sequence
  Description of Artificial Sequence: Synthetic oligonucleotide
  Target: LAMA2; (+) strand; PAM type: YTN; PAM sequence: TTA
aatagataggcttttcttgg

SEQ ID NO: 394827 - DNA, 20 bp, Artificial Sequence
  Description of Artificial Sequence: Synthetic oligonucleotide
  Target: LAMA2; (+) strand; PAM type: YTN; PAM sequence: CTT
ttcttggtctaagttggttt

SEQ ID NO: 394828 - DNA, 20 bp, Artificial Sequence
  Description of Artificial Sequence: Synthetic oligonucleotide
  Target: LAMA2; (+) strand; PAM type: YTN; PAM sequence: TTT
tcttggtctaagttggtttc

SEQ ID NO: 394829 - DNA, 20 bp, Artificial Sequence
  Description of Artificial Sequence: Synthetic oligonucleotide
  Target: LAMA2; (+) strand; PAM type: YTN; PAM sequence: TTT
cttggtctaagttggtttct

SEQ ID NO: 394830 - DNA, 20 bp, Artificial Sequence
  Description of Artificial Sequence: Synthetic oligonucleotide
  Target: LAMA2; (+) strand; PAM type: YTN; PAM sequence: TTC
ttggtctaagttggtttctt

SEQ ID NO: 394831 - DNA, 20 bp, Artificial Sequence
  Description of Artificial Sequence: Synthetic oligonucleotide
  Target: LAMA2; (+) strand; PAM type: YTN; PAM sequence: CTT
ggtctaagttggtttcttaa

SEQ ID NO: 394832 - DNA, 20 bp, Artificial Sequence
  Description of Artificial Sequence: Synthetic oligonucleotide
  Target: LAMA2; (+) strand; PAM type: YTN; PAM sequence: TTG
gtctaagttggtttcttaaa

SEQ ID NO: 394833 - DNA, 20 bp, Artificial Sequence
  Description of Artificial Sequence: Synthetic oligonucleotide
  Target: LAMA2; (+) strand; PAM type: YTN; PAM sequence: CTA
agttggtttcttaaatttcc

SEQ ID NO: 394834 - DNA, 20 bp, Artificial Sequence
  Description of Artificial Sequence: Synthetic oligonucleotide
  Target: LAMA2; (+) strand; PAM type: YTN; PAM sequence: TTG
gtttcttaaatttcctagtc

SEQ ID NO: 394835 - DNA, 20 bp, Artificial Sequence
  Description of Artificial Sequence: Synthetic oligonucleotide
  Target: LAMA2; (+) strand; PAM type: YTN; PAM sequence: TTT
cttaaatttcctagtctatt

SEQ ID NO: 394836 - DNA, 20 bp, Artificial Sequence
  Description of Artificial Sequence: Synthetic oligonucleotide
  Target: LAMA2; (+) strand; PAM type: YTN; PAM sequence: TTC
ttaaatttcctagtctattc

SEQ ID NO: 394837 - DNA, 20 bp, Artificial Sequence
  Description of Artificial Sequence: Synthetic oligonucleotide
  Target: LAMA2; (+) strand; PAM type: YTN; PAM sequence: CTT
aaatttcctagtctattcca

SEQ ID NO: 394838 - DNA, 20 bp, Artificial Sequence
  Description of Artificial Sequence: Synthetic oligonucleotide
  Target: LAMA2; (+) strand; PAM type: YTN; PAM sequence: TTA
aatttcctagtctattccat

SEQ ID NO: 394839 - DNA, 20 bp, Artificial Sequence
  Description of Artificial Sequence: Synthetic oligonucleotide
  Target: LAMA2; (+) strand; PAM type: YTN; PAM sequence: TTT
cctagtctattccattaaat

SEQ ID NO: 394840 - DNA, 20 bp, Artificial Sequence
  Description of Artificial Sequence: Synthetic oligonucleotide
  Target: LAMA2; (+) strand; PAM type: YTN; PAM sequence: TTC
ctagtctattccattaaata

SEQ ID NO: 394841 - DNA, 20 bp, Artificial Sequence
  Description of Artificial Sequence: Synthetic oligonucleotide
  Target: LAMA2; (+) strand; PAM type: YTN; PAM sequence: CTA
gtctattccattaaataatg

SEQ ID NO: 394842 - DNA, 20 bp, Artificial Sequence
  Description of Artificial Sequence: Synthetic oligonucleotide
  Target: LAMA2; (+) strand; PAM type: YTN; PAM sequence: CTA
ttccattaaataatgacttt

SEQ ID NO: 394843 - DNA, 20 bp, Artificial Sequence
  Description of Artificial Sequence: Synthetic oligonucleotide
  Target: LAMA2; (+) strand; PAM type: YTN; PAM sequence: TTC
cattaaataatgactttaat

SEQ ID NO: 394844 - DNA, 20 bp, Artificial Sequence
  Description of Artificial Sequence: Synthetic oligonucleotide
  Target: LAMA2; (+) strand; PAM type: YTN; PAM sequence: TTA
aataatgactttaattctct

SEQ ID NO: 394845 - DNA, 20 bp, Artificial Sequence
  Description of Artificial Sequence: Synthetic oligonucleotide
  Target: LAMA2; (+) strand; PAM type: YTN; PAM sequence: CTT
taattctctattctttttgc

SEQ ID NO: 394846 - DNA, 20 bp, Artificial Sequence
  Description of Artificial Sequence: Synthetic oligonucleotide
  Target: LAMA2; (+) strand; PAM type: YTN; PAM sequence: TTT
aattctctattctttttgct

SEQ ID NO: 394847 - DNA, 20 bp, Artificial Sequence
  Description of Artificial Sequence: Synthetic oligonucleotide
  Target: LAMA2; (+) strand; PAM type: YTN; PAM sequence: TTA
attctctattctttttgcta

SEQ ID NO: 394848 - DNA, 20 bp, Artificial Sequence
  Description of Artificial Sequence: Synthetic oligonucleotide
  Target: LAMA2; (+) strand; PAM type: YTN; PAM sequence: TTC
tctattctttttgctatgtt

SEQ ID NO: 394849 - DNA, 20 bp, Artificial Sequence
  Description of Artificial Sequence: Synthetic oligonucleotide
  Target: LAMA2; (+) strand; PAM type: YTN; PAM sequence: CTC
tattctttttgctatgttag

SEQ ID NO: 394850 - DNA, 20 bp, Artificial Sequence
  Description of Artificial Sequence: Synthetic oligonucleotide
  Target: LAMA2; (+) strand; PAM type: YTN; PAM sequence: CTA
ttctttttgctatgttagta

SEQ ID NO: 394851 - DNA, 20 bp, Artificial Sequence
  Description of Artificial Sequence: Synthetic oligonucleotide
  Target: LAMA2; (+) strand; PAM type: YTN; PAM sequence: TTC
tttttgctatgttagtaagt

SEQ ID NO: 394852 - DNA, 20 bp, Artificial Sequence
  Description of Artificial Sequence: Synthetic oligonucleotide
  Target: LAMA2; (+) strand; PAM type: YTN; PAM sequence: CTT
tttgctatgttagtaagttt

SEQ ID NO: 394853 - DNA, 20 bp, Artificial Sequence
  Description of Artificial Sequence: Synthetic oligonucleotide
  Target: LAMA2; (+) strand; PAM type: YTN; PAM sequence: TTT
ttgctatgttagtaagtttg

SEQ ID NO: 394854 - DNA, 20 bp, Artificial Sequence
  Description of Artificial Sequence: Synthetic oligonucleotide
  Target: LAMA2; (+) strand; PAM type: YTN; PAM sequence: TTT
tgctatgttagtaagtttga

SEQ ID NO: 394855 - DNA, 20 bp, Artificial Sequence
  Description of Artificial Sequence: Synthetic oligonucleotide
  Target: LAMA2; (+) strand; PAM type: YTN; PAM sequence: TTT
gctatgttagtaagtttgaa

SEQ ID NO: 394856 - DNA, 20 bp, Artificial Sequence
  Description of Artificial Sequence: Synthetic oligonucleotide
  Target: LAMA2; (+) strand; PAM type: YTN; PAM sequence: TTG
ctatgttagtaagtttgaag

SEQ ID NO: 394857 - DNA, 20 bp, Artificial Sequence
  Description of Artificial Sequence: Synthetic oligonucleotide
  Target: LAMA2; (+) strand; PAM type: YTN; PAM sequence: CTA
tgttagtaagtttgaagttt

SEQ ID NO: 394858 - DNA, 20 bp, Artificial Sequence
  Description of Artificial Sequence: Synthetic oligonucleotide
  Target: LAMA2; (+) strand; PAM type: YTN; PAM sequence: TTA
gtaagtttgaagtttcattt

SEQ ID NO: 394859 - DNA, 20 bp, Artificial Sequence
  Description of Artificial Sequence: Synthetic oligonucleotide
  Target: LAMA2; (+) strand; PAM type: YTN; PAM sequence: TTT
gaagtttcattttaaaacta

SEQ ID NO: 394860 - DNA, 20 bp, Artificial Sequence
  Description of Artificial Sequence: Synthetic oligonucleotide
  Target: LAMA2; (+) strand; PAM type: YTN; PAM sequence: TTG
aagtttcattttaaaactaa

SEQ ID NO: 394861 - DNA, 20 bp, Artificial Sequence
  Description of Artificial Sequence: Synthetic oligonucleotide
  Target: LAMA2; (+) strand; PAM type: YTN; PAM sequence: TTT
cattttaaaactaaacatgt

SEQ ID NO: 394862 - DNA, 20 bp, Artificial Sequence
  Description of Artificial Sequence: Synthetic oligonucleotide
  Target: LAMA2; (+) strand; PAM type: YTN; PAM sequence: TTC
attttaaaactaaacatgtg

SEQ ID NO: 394863 - DNA, 20 bp, Artificial Sequence
  Description of Artificial Sequence: Synthetic oligonucleotide
  Target: LAMA2; (+) strand; PAM type: YTN; PAM sequence: TTT
taaaactaaacatgtgggcc

SEQ ID NO: 394864 - DNA, 20 bp, Artificial Sequence
  Description of Artificial Sequence: Synthetic oligonucleotide
  Target: LAMA2; (+) strand; PAM type: YTN; PAM sequence: TTT
aaaactaaacatgtgggcca

SEQ ID NO: 394865 - DNA, 20 bp, Artificial Sequence
  Description of Artificial Sequence: Synthetic oligonucleotide
  Target: LAMA2; (+) strand; PAM type: YTN; PAM sequence: TTA
aaactaaacatgtgggccag

SEQ ID NO: 394866 - DNA, 20 bp, Artificial Sequence
  Description of Artificial Sequence: Synthetic oligonucleotide
  Target: LAMA2; (+) strand; PAM type: YTN; PAM sequence: CTA
aacatgtgggccaggcacgg

SEQ ID NO: 394867 - DNA, 20 bp, Artificial Sequence
  Description of Artificial Sequence: Synthetic oligonucleotide
  Target: LAMA2; (+) strand; PAM type: YTN; PAM sequence: CTC
atgcctgtaatcccagcact

SEQ ID NO: 394868 - DNA, 20 bp, Artificial Sequence
  Description of Artificial Sequence: Synthetic oligonucleotide
  Target: LAMA2; (+) strand; PAM type: YTN; PAM sequence: CTG
taatcccagcactttgggag

SEQ ID NO: 394869 - DNA, 20 bp, Artificial Sequence
  Description of Artificial Sequence: Synthetic oligonucleotide
  Target: LAMA2; (+) strand; PAM type: YTN; PAM sequence: CTT
tgggaggccgaggtgggcag

SEQ ID NO: 394870 - DNA, 20 bp, Artificial Sequence
  Description of Artificial Sequence: Synthetic oligonucleotide
  Target: LAMA2; (+) strand; PAM type: YTN; PAM sequence: TTT
gggaggccgaggtgggcaga

SEQ ID NO: 394871 - DNA, 20 bp, Artificial Sequence
  Description of Artificial Sequence: Synthetic oligonucleotide
  Target: LAMA2; (+) strand; PAM type: YTN; PAM sequence: TTG
ggaggccgaggtgggcagac

SEQ ID NO: 394872 - DNA, 20 bp, Artificial Sequence
  Description of Artificial Sequence: Synthetic oligonucleotide
  Target: LAMA2; (+) strand; PAM type: YTN; PAM sequence: CTG
cctgagctcgggagttcaaa

SEQ ID NO: 394873 - DNA, 20 bp, Artificial Sequence
  Description of Artificial Sequence: Synthetic oligonucleotide
  Target: LAMA2; (+) strand; PAM type: YTN; PAM sequence: CTG
agctcgggagttcaaaacca

SEQ ID NO: 394874 - DNA, 20 bp, Artificial Sequence
  Description of Artificial Sequence: Synthetic oligonucleotide
  Target: LAMA2; (+) strand; PAM type: YTN; PAM sequence: CTC
gggagttcaaaaccagcctg

SEQ ID NO: 394875 - DNA, 20 bp, Artificial Sequence
  Description of Artificial Sequence: Synthetic oligonucleotide
  Target: LAMA2; (+) strand; PAM type: YTN; PAM sequence: TTC
aaaaccagcctgggcaacat

SEQ ID NO: 394876 - DNA, 20 bp, Artificial Sequence
  Description of Artificial Sequence: Synthetic oligonucleotide
  Target: LAMA2; (+) strand; PAM type: YTN; PAM sequence: CTG
ggcaacatggcgaaaccccg

SEQ ID NO: 394877 - DNA, 20 bp, Artificial Sequence
  Description of Artificial Sequence: Synthetic oligonucleotide
  Target: LAMA2; (+) strand; PAM type: YTN; PAM sequence: CTC
tattaaatattcaaaaaatt

SEQ ID NO: 394878 - DNA, 20 bp, Artificial Sequence
  Description of Artificial Sequence: Synthetic oligonucleotide
  Target: LAMA2; (+) strand; PAM type: YTN; PAM sequence: CTA
ttaaatattcaaaaaattag

SEQ ID NO: 394879 - DNA, 20 bp, Artificial Sequence
  Description of Artificial Sequence: Synthetic oligonucleotide
  Target: LAMA2; (+) strand; PAM type: YTN; PAM sequence: TTA
aatattcaaaaaattagctg

SEQ ID NO: 394880 - DNA, 20 bp, Artificial Sequence
  Description of Artificial Sequence: Synthetic oligonucleotide
  Target: LAMA2; (+) strand; PAM type: YTN; PAM sequence: TTC
aaaaaattagctgggtgtgg

SEQ ID NO: 394881 - DNA, 20 bp, Artificial Sequence
  Description of Artificial Sequence: Synthetic oligonucleotide
  Target: LAMA2; (+) strand; PAM type: YTN; PAM sequence: TTA
gctgggtgtggtggtgggca

SEQ ID NO: 394882 - DNA, 20 bp, Artificial Sequence
  Description of Artificial Sequence: Synthetic oligonucleotide
  Target: LAMA2; (+) strand; PAM type: YTN; PAM sequence: CTG
ggtgtggtggtgggcacctg

SEQ ID NO: 394883 - DNA, 20 bp, Artificial Sequence
  Description of Artificial Sequence: Synthetic oligonucleotide
  Target: LAMA2; (+) strand; PAM type: YTN; PAM sequence: CTG
taatcccagctactcaggag

SEQ ID NO: 394884 - DNA, 20 bp, Artificial Sequence
  Description of Artificial Sequence: Synthetic oligonucleotide
  Target: LAMA2; (+) strand; PAM type: YTN; PAM sequence: CTA
ctcaggaggctgaggcagga

SEQ ID NO: 394885 - DNA, 20 bp, Artificial Sequence
  Description of Artificial Sequence: Synthetic oligonucleotide
  Target: LAMA2; (+) strand; PAM type: YTN; PAM sequence: CTC
aggaggctgaggcaggagaa

SEQ ID NO: 394886 - DNA, 20 bp, Artificial Sequence
  Description of Artificial Sequence: Synthetic oligonucleotide
  Target: LAMA2; (+) strand; PAM type: YTN; PAM sequence: CTG
aggcaggagaattgcttgaa

SEQ ID NO: 394887 - DNA, 20 bp, Artificial Sequence
  Description of Artificial Sequence: Synthetic oligonucleotide
  Target: LAMA2; (+) strand; PAM type: YTN; PAM sequence: TTG
cttgaaccagggaggcagag

SEQ ID NO: 394888 - DNA, 20 bp, Artificial Sequence
  Description of Artificial Sequence: Synthetic oligonucleotide
  Target: LAMA2; (+) strand; PAM type: YTN; PAM sequence: CTT
gaaccagggaggcagaggtt

SEQ ID NO: 394889 - DNA, 20 bp, Artificial Sequence
  Description of Artificial Sequence: Synthetic oligonucleotide
  Target: LAMA2; (+) strand; PAM type: YTN; PAM sequence: TTG
aaccagggaggcagaggttg

SEQ ID NO: 394890 - DNA, 20 bp, Artificial Sequence
  Description of Artificial Sequence: Synthetic oligonucleotide
  Target: LAMA2; (+) strand; PAM type: YTN; PAM sequence: TTG
cagtgagctgagatcgcacc

SEQ ID NO: 394891 - DNA, 20 bp, Artificial Sequence
  Description of Artificial Sequence: Synthetic oligonucleotide
  Target: LAMA2; (+) strand; PAM type: YTN; PAM sequence: CTG
agatcgcaccactgcattcc

SEQ ID NO: 394892 - DNA, 20 bp, Artificial Sequence
  Description of Artificial Sequence: Synthetic oligonucleotide
  Target: LAMA2; (+) strand; PAM type: YTN; PAM sequence: CTG
cattccagcctgggtgacag

SEQ ID NO: 394893 - DNA, 20 bp, Artificial Sequence
  Description of Artificial Sequence: Synthetic oligonucleotide
  Target: LAMA2; (+) strand; PAM type: YTN; PAM sequence: TTC
cagcctgggtgacagagcaa

SEQ ID NO: 394894 - DNA, 20 bp, Artificial Sequence
  Description of Artificial Sequence: Synthetic oligonucleotide
  Target: LAMA2; (+) strand; PAM type: YTN; PAM sequence: CTG
ggtgacagagcaagactctg

SEQ ID NO: 394895 - DNA, 20 bp, Artificial Sequence
  Description of Artificial Sequence: Synthetic oligonucleotide
  Target: LAMA2; (+) strand; PAM type: YTN; PAM sequence: CTC
tgtctcaaaaaaaaaaaaaa

SEQ ID NO: 394896 - DNA, 20 bp, Artificial Sequence
  Description of Artificial Sequence: Synthetic oligonucleotide
  Target: LAMA2; (+) strand; PAM type: YTN; PAM sequence: CTG
tctcaaaaaaaaaaaaaaaa

SEQ ID NO: 394897 - DNA, 20 bp, Artificial Sequence
  Description of Artificial Sequence: Synthetic oligonucleotide
  Target: LAMA2; (+) strand; PAM type: YTN; PAM sequence: CTC
aaaaaaaaaaaaaaaaaaac

SEQ ID NO: 394898 - DNA, 20 bp, Artificial Sequence
  Description of Artificial Sequence: Synthetic oligonucleotide
  Target: LAMA2; (+) strand; PAM type: YTN; PAM sequence: CTA
aactaaacgtgtagttatgt

SEQ ID NO: 394899 - DNA, 20 bp, Artificial Sequence
  Description of Artificial Sequence: Synthetic oligonucleotide
  Target: LAMA2; (+) strand; PAM type: YTN; PAM sequence: CTA
aacgtgtagttatgtctcat

SEQ ID NO: 394900 - DNA, 20 bp, Artificial Sequence
  Description of Artificial Sequence: Synthetic oligonucleotide
  Target: LAMA2; (+) strand; PAM type: YTN; PAM sequence: TTA
tgtctcatagagaaattagt

SEQ ID NO: 394901 - DNA, 20 bp, Artificial Sequence
  Description of Artificial Sequence: Synthetic oligonucleotide
  Target: LAMA2; (+) strand; PAM type: YTN; PAM sequence: CTC
atagagaaattagtaaaaga

SEQ ID NO: 394902 - DNA, 20 bp, Artificial Sequence
  Description of Artificial Sequence: Synthetic oligonucleotide
  Target: LAMA2; (+) strand; PAM type: YTN; PAM sequence: TTA
gtaaaagagaggaggcttga

SEQ ID NO: 394903 - DNA, 20 bp, Artificial Sequence
  Description of Artificial Sequence: Synthetic oligonucleotide
  Target: LAMA2; (+) strand; PAM type: YTN; PAM sequence: CTT
gaattcacttgcttaaaatg

SEQ ID NO: 394904 - DNA, 20 bp, Artificial Sequence
  Description of Artificial Sequence: Synthetic oligonucleotide
  Target: LAMA2; (+) strand; PAM type: YTN; PAM sequence: TTG
aattcacttgcttaaaatgc

SEQ ID NO: 394905 - DNA, 20 bp, Artificial Sequence
  Description of Artificial Sequence: Synthetic oligonucleotide
  Target: LAMA2; (+) strand; PAM type: YTN; PAM sequence: TTC
acttgcttaaaatgccctct

SEQ ID NO: 394906 - DNA, 20 bp, Artificial Sequence
  Description of Artificial Sequence: Synthetic oligonucleotide
  Target: LAMA2; (+) strand; PAM type: YTN; PAM sequence: CTT
gcttaaaatgccctcttctc

SEQ ID NO: 394907 - DNA, 20 bp, Artificial Sequence
  Description of Artificial Sequence: Synthetic oligonucleotide
  Target: LAMA2; (+) strand; PAM type: YTN; PAM sequence: TTG
cttaaaatgccctcttctct

SEQ ID NO: 394908 - DNA, 20 bp, Artificial Sequence
  Description of Artificial Sequence: Synthetic oligonucleotide
  Target: LAMA2; (+) strand; PAM type: YTN; PAM sequence: CTT
aaaatgccctcttctctaca

SEQ ID NO: 394909 - DNA, 20 bp, Artificial Sequence
  Description of Artificial Sequence: Synthetic oligonucleotide
  Target: LAMA2; (+) strand; PAM type: YTN; PAM sequence: TTA
aaatgccctcttctctacat

SEQ ID NO: 394910 - DNA, 20 bp, Artificial Sequence
  Description of Artificial Sequence: Synthetic oligonucleotide
  Target: LAMA2; (+) strand; PAM type: YTN; PAM sequence: CTC
ttctctacatatcagtatgt

SEQ ID NO: 394911 - DNA, 20 bp, Artificial Sequence
  Description of Artificial Sequence: Synthetic oligonucleotide
  Target: LAMA2; (+) strand; PAM type: YTN; PAM sequence: CTT
ctctacatatcagtatgttg

SEQ ID NO: 394912 - DNA, 20 bp, Artificial Sequence
  Description of Artificial Sequence: Synthetic oligonucleotide
  Target: LAMA2; (+) strand; PAM type: YTN; PAM sequence: TTC
tctacatatcagtatgttga

SEQ ID NO: 394913 - DNA, 20 bp, Artificial Sequence
  Description of Artificial Sequence: Synthetic oligonucleotide
  Target: LAMA2; (+) strand; PAM type: YTN; PAM sequence: CTC
tacatatcagtatgttgaag

SEQ ID NO: 394914 - DNA, 20 bp, Artificial Sequence
  Description of Artificial Sequence: Synthetic oligonucleotide
  Target: LAMA2; (+) strand; PAM type: YTN; PAM sequence: CTA
catatcagtatgttgaagac

SEQ ID NO: 394915 - DNA, 20 bp, Artificial Sequence
  Description of Artificial Sequence: Synthetic oligonucleotide
  Target: LAMA2; (+) strand; PAM type: YTN; PAM sequence: TTG
aagacatccaaactaaattg

SEQ ID NO: 394916 - DNA, 20 bp, Artificial Sequence
  Description of Artificial Sequence: Synthetic oligonucleotide
  Target: LAMA2; (+) strand; PAM type: YTN; PAM sequence: CTA
aattgccacctatgtctgag

SEQ ID NO: 394917 - DNA, 20 bp, Artificial Sequence
  Description of Artificial Sequence: Synthetic oligonucleotide
  Target: LAMA2; (+) strand; PAM type: YTN; PAM sequence: TTG
ccacctatgtctgaggagct

SEQ ID NO: 394918 - DNA, 20 bp, Artificial Sequence
  Description of Artificial Sequence: Synthetic oligonucleotide
  Target: LAMA2; (+) strand; PAM type: YTN; PAM sequence: CTA
tgtctgaggagcttaatgat

SEQ ID NO: 394919 - DNA, 20 bp, Artificial Sequence
  Description of Artificial Sequence: Synthetic oligonucleotide
  Target: LAMA2; (+) strand; PAM type: YTN; PAM sequence: CTG
aggagcttaatgataaaata

SEQ ID NO: 394920 - DNA, 20 bp, Artificial Sequence
  Description of Artificial Sequence: Synthetic oligonucleotide
  Target: LAMA2; (+) strand; PAM type: YTN; PAM sequence: CTT
aatgataaaatagatgacct

SEQ ID NO: 394921 - DNA, 20 bp, Artificial Sequence
  Description of Artificial Sequence: Synthetic oligonucleotide
  Target: LAMA2; (+) strand; PAM type: YTN; PAM sequence: TTA
atgataaaatagatgacctc

SEQ ID NO: 394922 - DNA, 20 bp, Artificial Sequence
  Description of Artificial Sequence: Synthetic oligonucleotide
  Target: LAMA2; (+) strand; PAM type: YTN; PAM sequence: CTC
tcccaagaaataaaggacag

SEQ ID NO: 394923 - DNA, 20 bp, Artificial Sequence
  Description of Artificial Sequence: Synthetic oligonucleotide
  Target: LAMA2; (+) strand; PAM type: YTN; PAM sequence: CTC
ccaagaaataaaggacagga

SEQ ID NO: 394924 - DNA, 20 bp, Artificial Sequence
  Description of Artificial Sequence: Synthetic oligonucleotide
  Target: LAMA2; (+) strand; PAM type: YTN; PAM sequence: CTT
gctgagaaggtgtcccaggc

SEQ ID NO: 394925 - DNA, 20 bp, Artificial Sequence
  Description of Artificial Sequence: Synthetic oligonucleotide
  Target: LAMA2; (+) strand; PAM type: YTN; PAM sequence: TTG
ctgagaaggtgtcccaggct

SEQ ID NO: 394926 - DNA, 20 bp, Artificial Sequence
  Description of Artificial Sequence: Synthetic oligonucleotide
  Target: LAMA2; (+) strand; PAM type: YTN; PAM sequence: CTG
agaaggtgtcccaggctgag

SEQ ID NO: 394927 - DNA, 20 bp, Artificial Sequence
  Description of Artificial Sequence: Synthetic oligonucleotide
  Target: LAMA2; (+) strand; PAM type: YTN; PAM sequence: CTG
agagccacgcagctcagttg

SEQ ID NO: 394928 - DNA, 20 bp, Artificial Sequence
  Description of Artificial Sequence: Synthetic oligonucleotide
  Target: LAMA2; (+) strand; PAM type: YTN; PAM sequence: CTC
agttgaatgactcatctgct

SEQ ID NO: 394929 - DNA, 20 bp, Artificial Sequence
  Description of Artificial Sequence: Synthetic oligonucleotide
  Target: LAMA2; (+) strand; PAM type: YTN; PAM sequence: TTG
aatgactcatctgctgtcct

SEQ ID NO: 394930 - DNA, 20 bp, Artificial Sequence
  Description of Artificial Sequence: Synthetic oligonucleotide
  Target: LAMA2; (+) strand; PAM type: YTN; PAM sequence: CTC
atctgctgtccttgatgggt

SEQ ID NO: 394931 - DNA, 20 bp, Artificial Sequence
  Description of Artificial Sequence: Synthetic oligonucleotide
  Target: LAMA2; (+) strand; PAM type: YTN; PAM sequence: CTG
ctgtccttgatgggtatgtc

SEQ ID NO: 394932 - DNA, 20 bp, Artificial Sequence
  Description of Artificial Sequence: Synthetic oligonucleotide
  Target: LAMA2; (+) strand; PAM type: YTN; PAM sequence: CTG
tccttgatgggtatgtcatt

SEQ ID NO: 394933 - DNA, 20 bp, Artificial Sequence
  Description of Artificial Sequence: Synthetic oligonucleotide
  Target: LAMA2; (+) strand; PAM type: YTN; PAM sequence: CTT
gatgggtatgtcatttgttt

SEQ ID NO: 394934 - DNA, 20 bp, Artificial Sequence
  Description of Artificial Sequence: Synthetic oligonucleotide
  Target: LAMA2; (+) strand; PAM type: YTN; PAM sequence: TTG
atgggtatgtcatttgtttt

SEQ ID NO: 394935 - DNA, 20 bp, Artificial Sequence
  Description of Artificial Sequence: Synthetic oligonucleotide
  Target: LAMA2; (+) strand; PAM type: YTN; PAM sequence: TTT
gtttttggaaatgtttgtgt

SEQ ID NO: 394936 - DNA, 20 bp, Artificial Sequence
  Description of Artificial Sequence: Synthetic oligonucleotide
  Target: LAMA2; (+) strand; PAM type: YTN; PAM sequence: TTG
tttttggaaatgtttgtgta

SEQ ID NO: 394937 - DNA, 20 bp, Artificial Sequence
  Description of Artificial Sequence: Synthetic oligonucleotide
  Target: LAMA2; (+) strand; PAM type: YTN; PAM sequence: TTT
ttggaaatgtttgtgtattt

SEQ ID NO: 394938 - DNA, 20 bp, Artificial Sequence
  Description of Artificial Sequence: Synthetic oligonucleotide
  Target: LAMA2; (+) strand; PAM type: YTN; PAM sequence: TTT
tggaaatgtttgtgtatttt

SEQ ID NO: 394939 - DNA, 20 bp, Artificial Sequence
  Description of Artificial Sequence: Synthetic oligonucleotide
  Target: LAMA2; (+) strand; PAM type: YTN; PAM sequence: TTT
ggaaatgtttgtgtattttg

SEQ ID NO: 394940 - DNA, 20 bp, Artificial Sequence
  Description of Artificial Sequence: Synthetic oligonucleotide
  Target: LAMA2; (+) strand; PAM type: YTN; PAM sequence: TTG
gaaatgtttgtgtattttga

SEQ ID NO: 394941 - DNA, 20 bp, Artificial Sequence
  Description of Artificial Sequence: Synthetic oligonucleotide
  Target: LAMA2; (+) strand; PAM type: YTN; PAM sequence: TTT
gtgtattttgatgcttgtcc

SEQ ID NO: 394942 - DNA, 20 bp, Artificial Sequence
  Description of Artificial Sequence: Synthetic oligonucleotide
  Target: LAMA2; (+) strand; PAM type: YTN; PAM sequence: TTG
tgtattttgatgcttgtcca

SEQ ID NO: 394943 - DNA, 20 bp, Artificial Sequence
  Description of Artificial Sequence: Synthetic oligonucleotide
  Target: LAMA2; (+) strand; PAM type: YTN; PAM sequence: TTT
tgatgcttgtccaaaggttt

SEQ ID NO: 394944 - DNA, 20 bp, Artificial Sequence
  Description of Artificial Sequence: Synthetic oligonucleotide
  Target: LAMA2; (+) strand; PAM type: YTN; PAM sequence: TTT
gatgcttgtccaaaggtttt

SEQ ID NO: 394945 - DNA, 20 bp, Artificial Sequence
  Description of Artificial Sequence: Synthetic oligonucleotide
  Target: LAMA2; (+) strand; PAM type: YTN; PAM sequence: TTG
atgcttgtccaaaggttttg

SEQ ID NO: 394946 - DNA, 20 bp, Artificial Sequence
  Description of Artificial Sequence: Synthetic oligonucleotide
  Target: LAMA2; (+) strand; PAM type: YTN; PAM sequence: CTT
gtccaaaggttttgactagc

SEQ ID NO: 394947 - DNA, 20 bp, Artificial Sequence
  Description of Artificial Sequence: Synthetic oligonucleotide
  Target: LAMA2; (+) strand; PAM type: YTN; PAM sequence: TTG
tccaaaggttttgactagca

SEQ ID NO: 394948 - DNA, 20 bp, Artificial Sequence
  Description of Artificial Sequence: Synthetic oligonucleotide
  Target: LAMA2; (+) strand; PAM type: YTN; PAM sequence: TTT
tgactagcataaatagtaga

SEQ ID NO: 394949 - DNA, 20 bp, Artificial Sequence
  Description of Artificial Sequence: Synthetic oligonucleotide
  Target: LAMA2; (+) strand; PAM type: YTN; PAM sequence: TTT
gactagcataaatagtagag

SEQ ID NO: 394950 - DNA, 20 bp, Artificial Sequence
  Description of Artificial Sequence: Synthetic oligonucleotide
  Target: LAMA2; (+) strand; PAM type: YTN; PAM sequence: TTG
actagcataaatagtagaga

SEQ ID NO: 394951 - DNA, 20 bp, Artificial Sequence
  Description of Artificial Sequence: Synthetic oligonucleotide
  Target: LAMA2; (+) strand; PAM type: YTN; PAM sequence: CTA
gcataaatagtagagaatca

SEQ ID NO: 394952 - DNA, 20 bp, Artificial Sequence
  Description of Artificial Sequence: Synthetic oligonucleotide
  Target: LAMA2; (+) strand; PAM type: YTN; PAM sequence: TTT
tcaaatcctgatttctgtta

SEQ ID NO: 394953 - DNA, 20 bp, Artificial Sequence
  Description of Artificial Sequence: Synthetic oligonucleotide
  Target: LAMA2; (+) strand; PAM type: YTN; PAM sequence: TTT
caaatcctgatttctgttaa

SEQ ID NO: 394954 - DNA, 20 bp, Artificial Sequence
  Description of Artificial Sequence: Synthetic oligonucleotide
  Target: LAMA2; (+) strand; PAM type: YTN; PAM sequence: TTC
aaatcctgatttctgttaat

SEQ ID NO: 394955 - DNA, 20 bp, Artificial Sequence
  Description of Artificial Sequence: Synthetic oligonucleotide
  Target: LAMA2; (+) strand; PAM type: YTN; PAM sequence: CTG
atttctgttaattatgaaca

SEQ ID NO: 394956 - DNA, 20 bp, Artificial Sequence
  Description of Artificial Sequence: Synthetic oligonucleotide
  Target: LAMA2; (+) strand; PAM type: YTN; PAM sequence: TTT
ctgttaattatgaacacact

SEQ ID NO: 394957 - DNA, 20 bp, Artificial Sequence
  Description of Artificial Sequence: Synthetic oligonucleotide
  Target: LAMA2; (+) strand; PAM type: YTN; PAM sequence: TTC
tgttaattatgaacacacta

SEQ ID NO: 394958 - DNA, 20 bp, Artificial Sequence
  Description of Artificial Sequence: Synthetic oligonucleotide
  Target: LAMA2; (+) strand; PAM type: YTN; PAM sequence: CTG
ttaattatgaacacactagc

SEQ ID NO: 394959 - DNA, 20 bp, Artificial Sequence
  Description of Artificial Sequence: Synthetic oligonucleotide
  Target: LAMA2; (+) strand; PAM type: YTN; PAM sequence: TTA
attatgaacacactagctat

SEQ ID NO: 394960 - DNA, 20 bp, Artificial Sequence
  Description of Artificial Sequence: Synthetic oligonucleotide
  Target: LAMA2; (+) strand; PAM type: YTN; PAM sequence: TTA
tgaacacactagctatatgg

SEQ ID NO: 394961 - DNA, 20 bp, Artificial Sequence
  Description of Artificial Sequence: Synthetic oligonucleotide
  Target: LAMA2; (+) strand; PAM type: YTN; PAM sequence: CTA
gctatatggcctttctgtgg

SEQ ID NO: 394962 - DNA, 20 bp, Artificial Sequence
  Description of Artificial Sequence: Synthetic oligonucleotide
  Target: LAMA2; (+) strand; PAM type: YTN; PAM sequence: CTA
tatggcctttctgtggatag

SEQ ID NO: 394963 - DNA, 20 bp, Artificial Sequence
  Description of Artificial Sequence: Synthetic oligonucleotide
  Target: LAMA2; (+) strand; PAM type: YTN; PAM sequence: CTT
tctgtggataggcttaatta

SEQ ID NO: 394964 - DNA, 20 bp, Artificial Sequence
  Description of Artificial Sequence: Synthetic oligonucleotide
  Target: LAMA2; (+) strand; PAM type: YTN; PAM sequence: TTT
ctgtggataggcttaattag

SEQ ID NO: 394965 - DNA, 20 bp, Artificial Sequence
  Description of Artificial Sequence: Synthetic oligonucleotide
  Target: LAMA2; (+) strand; PAM type: YTN; PAM sequence: TTC
tgtggataggcttaattagg

SEQ ID NO: 394966 - DNA, 20 bp, Artificial Sequence
  Description of Artificial Sequence: Synthetic oligonucleotide
  Target: LAMA2; (+) strand; PAM type: YTN; PAM sequence: CTG
tggataggcttaattaggag

SEQ ID NO: 394967 - DNA, 20 bp, Artificial Sequence
  Description of Artificial Sequence: Synthetic oligonucleotide
  Target: LAMA2; (+) strand; PAM type: YTN; PAM sequence: CTT
aattaggagggtctgggcaa

SEQ ID NO: 394968 - DNA, 20 bp, Artificial Sequence
  Description of Artificial Sequence: Synthetic oligonucleotide
  Target: LAMA2; (+) strand; PAM type: YTN; PAM sequence: TTA
attaggagggtctgggcaaa

SEQ ID NO: 394969 - DNA, 20 bp, Artificial Sequence
  Description of Artificial Sequence: Synthetic oligonucleotide
  Target: LAMA2; (+) strand; PAM type: YTN; PAM sequence: TTA
ggagggtctgggcaaagctt

SEQ ID NO: 394970 - DNA, 20 bp, Artificial Sequence
  Description of Artificial Sequence: Synthetic oligonucleotide
  Target: LAMA2; (+) strand; PAM type: YTN; PAM sequence: CTG
ggcaaagctttgctacagca

SEQ ID NO: 394971 - DNA, 20 bp, Artificial Sequence
  Description of Artificial Sequence: Synthetic oligonucleotide
  Target: LAMA2; (+) strand; PAM type: YTN; PAM sequence: CTT
tgctacagcagcatcaaaag

SEQ ID NO: 394972 - DNA, 20 bp, Artificial Sequence
  Description of Artificial Sequence: Synthetic oligonucleotide
  Target: LAMA2; (+) strand; PAM type: YTN; PAM sequence: TTT
gctacagcagcatcaaaagt

SEQ ID NO: 394973 - DNA, 20 bp, Artificial Sequence
  Description of Artificial Sequence: Synthetic oligonucleotide
  Target: LAMA2; (+) strand; PAM type: YTN; PAM sequence: TTG
ctacagcagcatcaaaagtc

SEQ ID NO: 394974 - DNA, 20 bp, Artificial Sequence
  Description of Artificial Sequence: Synthetic oligonucleotide
  Target: LAMA2; (+) strand; PAM type: YTN; PAM sequence: CTA
cagcagcatcaaaagtctga

SEQ ID NO: 394975 - DNA, 20 bp, Artificial Sequence
  Description of Artificial Sequence: Synthetic oligonucleotide
  Target: LAMA2; (+) strand; PAM type: YTN; PAM sequence: CTG
atttacaagtagactcaaat

SEQ ID NO: 394976 - DNA, 20 bp, Artificial Sequence
  Description of Artificial Sequence: Synthetic oligonucleotide
  Target: LAMA2; (+) strand; PAM type: YTN; PAM sequence: TTT
acaagtagactcaaatatgg

SEQ ID NO: 394977 - DNA, 20 bp, Artificial Sequence
  Description of Artificial Sequence: Synthetic oligonucleotide
  Target: LAMA2; (+) strand; PAM type: YTN; PAM sequence: TTA
caagtagactcaaatatggc

SEQ ID NO: 394978 - DNA, 20 bp, Artificial Sequence
  Description of Artificial Sequence: Synthetic oligonucleotide
  Target: LAMA2; (+) strand; PAM type: YTN; PAM sequence: CTC
aaatatggcttagtaggaag

SEQ ID NO: 394979 - DNA, 20 bp, Artificial Sequence
  Description of Artificial Sequence: Synthetic oligonucleotide
  Target: LAMA2; (+) strand; PAM type: YTN; PAM sequence: CTT
agtaggaagtgaacatagcc

SEQ ID NO: 394980 - DNA, 20 bp, Artificial Sequence
  Description of Artificial Sequence: Synthetic oligonucleotide
  Target: LAMA2; (+) strand; PAM type: YTN; PAM sequence: TTA
gtaggaagtgaacatagccc

SEQ ID NO: 394981 - DNA, 20 bp, Artificial Sequence
  Description of Artificial Sequence: Synthetic oligonucleotide
  Target: LAMA2; (+) strand; PAM type: YTN; PAM sequence: CTA
ggctacacttagaaaaaatt

SEQ ID NO: 394982 - DNA, 20 bp, Artificial Sequence
  Description of Artificial Sequence: Synthetic oligonucleotide
  Target: LAMA2; (+) strand; PAM type: YTN; PAM sequence: CTA
cacttagaaaaaattatttt

SEQ ID NO: 394983 - DNA, 20 bp, Artificial Sequence
  Description of Artificial Sequence: Synthetic oligonucleotide
  Target: LAMA2; (+) strand; PAM type: YTN; PAM sequence: CTT
agaaaaaattattttctgtt

SEQ ID NO: 394984 - DNA, 20 bp, Artificial Sequence
  Description of Artificial Sequence: Synthetic oligonucleotide
  Target: LAMA2; (+) strand; PAM type: YTN; PAM sequence: TTA
gaaaaaattattttctgttc

SEQ ID NO: 394985 - DNA, 20 bp, Artificial Sequence
  Description of Artificial Sequence: Synthetic oligonucleotide
  Target: LAMA2; (+) strand; PAM type: YTN; PAM sequence: TTA
ttttctgttctttattaaaa

SEQ ID NO: 394986 - DNA, 20 bp, Artificial Sequence
  Description of Artificial Sequence: Synthetic oligonucleotide
  Target: LAMA2; (+) strand; PAM type: YTN; PAM sequence: TTT
tctgttctttattaaaaagc

SEQ ID NO: 394987 - DNA, 20 bp, Artificial Sequence
  Description of Artificial Sequence: Synthetic oligonucleotide
  Target: LAMA2; (+) strand; PAM type: YTN; PAM sequence: TTT
ctgttctttattaaaaagca

SEQ ID NO: 394988 - DNA, 20 bp, Artificial Sequence
  Description of Artificial Sequence: Synthetic oligonucleotide
  Target: LAMA2; (+) strand; PAM type: YTN; PAM sequence: TTC
tgttctttattaaaaagcac

SEQ ID NO: 394989 - DNA, 20 bp, Artificial Sequence
  Description of Artificial Sequence: Synthetic oligonucleotide
  Target: LAMA2; (+) strand; PAM type: YTN; PAM sequence: CTG
ttctttattaaaaagcacag

SEQ ID NO: 394990 - DNA, 20 bp, Artificial Sequence
  Description of Artificial Sequence: Synthetic oligonucleotide
  Target: LAMA2; (+) strand; PAM type: YTN; PAM sequence: TTC
tttattaaaaagcacagtgg

SEQ ID NO: 394991 - DNA, 20 bp, Artificial Sequence
  Description of Artificial Sequence: Synthetic oligonucleotide
  Target: LAMA2; (+) strand; PAM type: YTN; PAM sequence: CTT
tattaaaaagcacagtggtt

SEQ ID NO: 394992 - DNA, 20 bp, Artificial Sequence
  Description of Artificial Sequence: Synthetic oligonucleotide
  Target: LAMA2; (+) strand; PAM type: YTN; PAM sequence: TTT
attaaaaagcacagtggttg

SEQ ID NO: 394993 - DNA, 20 bp, Artificial Sequence
  Description of Artificial Sequence: Synthetic oligonucleotide
  Target: LAMA2; (+) strand; PAM type: YTN; PAM sequence: TTA
ttaaaaagcacagtggttgc

SEQ ID NO: 394994 - DNA, 20 bp, Artificial Sequence
  Description of Artificial Sequence: Synthetic oligonucleotide
  Target: LAMA2; (+) strand; PAM type: YTN; PAM sequence: TTA
aaaagcacagtggttgcctt

SEQ ID NO: 394995 - DNA, 20 bp, Artificial Sequence
  Description of Artificial Sequence: Synthetic oligonucleotide
  Target: LAMA2; (+) strand; PAM type: YTN; PAM sequence: TTG
ccttattagcattttaaata

SEQ ID NO: 394996 - DNA, 20 bp, Artificial Sequence
  Description of Artificial Sequence: Synthetic oligonucleotide
  Target: LAMA2; (+) strand; PAM type: YTN; PAM sequence: CTT
attagcattttaaataacat

SEQ ID NO: 394997 - DNA, 20 bp, Artificial Sequence
  Description of Artificial Sequence: Synthetic oligonucleotide
  Target: LAMA2; (+) strand; PAM type: YTN; PAM sequence: TTA
ttagcattttaaataacata

SEQ ID NO: 394998 - DNA, 20 bp, Artificial Sequence
  Description of Artificial Sequence: Synthetic oligonucleotide
  Target: LAMA2; (+) strand; PAM type: YTN; PAM sequence: TTA
gcattttaaataacatatat

SEQ ID NO: 394999 - DNA, 20 bp, Artificial Sequence
  Description of Artificial Sequence: Synthetic oligonucleotide
  Target: LAMA2; (+) strand; PAM type: YTN; PAM sequence: TTT
taaataacatatatgaaaat

SEQ ID NO: 395000 - DNA, 20 bp, Artificial Sequence
  Description of Artificial Sequence: Synthetic oligonucleotide
  Target: LAMA2; (+) strand; PAM type: YTN; PAM sequence: TTT
aaataacatatatgaaaata

SEQ ID NO: 395001 - DNA, 20 bp, Artificial Sequence
  Description of Artificial Sequence: Synthetic oligonucleotide
  Target: LAMA2; (+) strand; PAM type: YTN; PAM sequence: TTA
aataacatatatgaaaatac

SEQ ID NO: 395002 - DNA, 20 bp, Artificial Sequence
  Description of Artificial Sequence: Synthetic oligonucleotide
  Target: LAMA2; (+) strand; PAM type: YTN; PAM sequence: TTC
tgtttcaaatttcagtttca

SEQ ID NO: 395003 - DNA, 20 bp, Artificial Sequence
  Description of Artificial Sequence: Synthetic oligonucleotide
  Target: LAMA2; (+) strand; PAM type: YTN; PAM sequence: CTG
tttcaaatttcagtttcatg

SEQ ID NO: 395004 - DNA, 20 bp, Artificial Sequence
  Description of Artificial Sequence: Synthetic oligonucleotide
  Target: LAMA2; (+) strand; PAM type: YTN; PAM sequence: TTT
caaatttcagtttcatgttt

SEQ ID NO: 395005 - DNA, 20 bp, Artificial Sequence
  Description of Artificial Sequence: Synthetic oligonucleotide
  Target: LAMA2; (+) strand; PAM type: YTN; PAM sequence: TTC
aaatttcagtttcatgtttc

SEQ ID NO: 395006 - DNA, 20 bp, Artificial Sequence
  Description of Artificial Sequence: Synthetic oligonucleotide
  Target: LAMA2; (+) strand; PAM type: YTN; PAM sequence: TTT
cagtttcatgtttctaatgg

SEQ ID NO: 395007 - DNA, 20 bp, Artificial Sequence
  Description of Artificial Sequence: Synthetic oligonucleotide
  Target: LAMA2; (+) strand; PAM type: YTN; PAM sequence: TTC
agtttcatgtttctaatgga

SEQ ID NO: 395008 - DNA, 20 bp, Artificial Sequence
  Description of Artificial Sequence: Synthetic oligonucleotide
  Target: LAMA2; (+) strand; PAM type: YTN; PAM sequence: TTT
catgtttctaatggaatcaa

SEQ ID NO: 395009 - DNA, 20 bp, Artificial Sequence
  Description of Artificial Sequence: Synthetic oligonucleotide
  Target: LAMA2; (+) strand; PAM type: YTN; PAM sequence: TTC
atgtttctaatggaatcaaa

SEQ ID NO: 395010 - DNA, 20 bp, Artificial Sequence
  Description of Artificial Sequence: Synthetic oligonucleotide
  Target: LAMA2; (+) strand; PAM type: YTN; PAM sequence: TTT
ctaatggaatcaaaacaatt

SEQ ID NO: 395011 - DNA, 20 bp, Artificial Sequence
  Description of Artificial Sequence: Synthetic oligonucleotide
  Target: LAMA2; (+) strand; PAM type: YTN; PAM sequence: TTC
taatggaatcaaaacaattt

SEQ ID NO: 395012 - DNA, 20 bp, Artificial Sequence
  Description of Artificial Sequence: Synthetic oligonucleotide
  Target: LAMA2; (+) strand; PAM type: YTN; PAM sequence: CTA
atggaatcaaaacaatttat

SEQ ID NO: 395013 - DNA, 20 bp, Artificial Sequence
  Description of Artificial Sequence: Synthetic oligonucleotide
  Target: LAMA2; (+) strand; PAM type: YTN; PAM sequence: TTT
attgttaaaaggatggcttt

SEQ ID NO: 395014 - DNA, 20 bp, Artificial Sequence
  Description of Artificial Sequence: Synthetic oligonucleotide
  Target: LAMA2; (+) strand; PAM type: YTN; PAM sequence: TTA
ttgttaaaaggatggctttt

SEQ ID NO: 395015 - DNA, 20 bp, Artificial Sequence
  Description of Artificial Sequence: Synthetic oligonucleotide
  Target: LAMA2; (+) strand; PAM type: YTN; PAM sequence: TTG
ttaaaaggatggcttttgaa

SEQ ID NO: 395016 - DNA, 20 bp, Artificial Sequence
  Description of Artificial Sequence: Synthetic oligonucleotide
  Target: LAMA2; (+) strand; PAM type: YTN; PAM sequence: TTA
aaaggatggcttttgaaaat

SEQ ID NO: 395017 - DNA, 20 bp, Artificial Sequence
  Description of Artificial Sequence: Synthetic oligonucleotide
  Target: LAMA2; (+) strand; PAM type: YTN; PAM sequence: CTT
ttgaaaatttggccccatac

SEQ ID NO: 395018 - DNA, 20 bp, Artificial Sequence
  Description of Artificial Sequence: Synthetic oligonucleotide
  Target: LAMA2; (+) strand; PAM type: YTN; PAM sequence: TTT
tgaaaatttggccccatacg

SEQ ID NO: 395019 - DNA, 20 bp, Artificial Sequence
  Description of Artificial Sequence: Synthetic oligonucleotide
  Target: LAMA2; (+) strand; PAM type: YTN; PAM sequence: TTT
gaaaatttggccccatacgt

SEQ ID NO: 395020 - DNA, 20 bp, Artificial Sequence
  Description of Artificial Sequence: Synthetic oligonucleotide
  Target: LAMA2; (+) strand; PAM type: YTN; PAM sequence: TTG
aaaatttggccccatacgta

SEQ ID NO: 395021 - DNA, 20 bp, Artificial Sequence
  Description of Artificial Sequence: Synthetic oligonucleotide
  Target: LAMA2; (+) strand; PAM type: YTN; PAM sequence: TTT
ggccccatacgtagtcttta

SEQ ID NO: 395022 - DNA, 20 bp, Artificial Sequence
  Description of Artificial Sequence: Synthetic oligonucleotide
  Target: LAMA2; (+) strand; PAM type: YTN; PAM sequence: TTG
gccccatacgtagtctttaa

SEQ ID NO: 395023 - DNA, 20 bp, Artificial Sequence
  Description of Artificial Sequence: Synthetic oligonucleotide
  Target: LAMA2; (+) strand; PAM type: YTN; PAM sequence: CTT
taagtcttttttatttttcc

SEQ ID NO: 395024 - DNA, 20 bp, Artificial Sequence
  Description of Artificial Sequence: Synthetic oligonucleotide
  Target: LAMA2; (+) strand; PAM type: YTN; PAM sequence: TTT
aagtcttttttatttttcct

SEQ ID NO: 395025 - DNA, 20 bp, Artificial Sequence
  Description of Artificial Sequence: Synthetic oligonucleotide
  Target: LAMA2; (+) strand; PAM type: YTN; PAM sequence: TTA
agtcttttttatttttcctc

SEQ ID NO: 395026 - DNA, 20 bp, Artificial Sequence
  Description of Artificial Sequence: Synthetic oligonucleotide
  Target: LAMA2; (+) strand; PAM type: YTN; PAM sequence: CTT
ttttatttttcctcttttaa

SEQ ID NO: 395027 - DNA, 20 bp, Artificial Sequence
  Description of Artificial Sequence: Synthetic oligonucleotide
  Target: LAMA2; (+) strand; PAM type: YTN; PAM sequence: TTT
tttatttttcctcttttaag

SEQ ID NO: 395028 - DNA, 20 bp, Artificial Sequence
  Description of Artificial Sequence: Synthetic oligonucleotide
  Target: LAMA2; (+) strand; PAM type: YTN; PAM sequence: TTT
ttatttttcctcttttaagc

SEQ ID NO: 395029 - DNA, 20 bp, Artificial Sequence
  Description of Artificial Sequence: Synthetic oligonucleotide
  Target: LAMA2; (+) strand; PAM type: YTN; PAM sequence: TTT
tatttttcctcttttaagct

SEQ ID NO: 395030 - DNA, 20 bp, Artificial Sequence
  Description of Artificial Sequence: Synthetic oligonucleotide
  Target: LAMA2; (+) strand; PAM type: YTN; PAM sequence: TTT
atttttcctcttttaagctc

SEQ ID NO: 395031 - DNA, 20 bp, Artificial Sequence
  Description of Artificial Sequence: Synthetic oligonucleotide
  Target: LAMA2; (+) strand; PAM type: YTN; PAM sequence: TTA
tttttcctcttttaagctcc

SEQ ID NO: 395032 - DNA, 20 bp, Artificial Sequence
  Description of Artificial Sequence: Synthetic oligonucleotide
  Target: LAMA2; (+) strand; PAM type: YTN; PAM sequence: TTT
ttcctcttttaagctccagg

SEQ ID NO: 395033 - DNA, 20 bp, Artificial Sequence
  Description of Artificial Sequence: Synthetic oligonucleotide
  Target: LAMA2; (+) strand; PAM type: YTN; PAM sequence: TTT
tcctcttttaagctccaggg

SEQ ID NO: 395034 - DNA, 20 bp, Artificial Sequence
  Description of Artificial Sequence: Synthetic oligonucleotide
  Target: LAMA2; (+) strand; PAM type: YTN; PAM sequence: TTT
cctcttttaagctccaggga

SEQ ID NO: 395035 - DNA, 20 bp, Artificial Sequence
  Description of Artificial Sequence: Synthetic oligonucleotide
  Target: LAMA2; (+) strand; PAM type: YTN; PAM sequence: TTC
ctcttttaagctccagggag

SEQ ID NO: 395036 - DNA, 20 bp, Artificial Sequence
  Description of Artificial Sequence: Synthetic oligonucleotide
  Target: LAMA2; (+) strand; PAM type: YTN; PAM sequence: CTC
ttttaagctccagggagaca

SEQ ID NO: 395037 - DNA, 20 bp, Artificial Sequence
  Description of Artificial Sequence: Synthetic oligonucleotide
  Target: LAMA2; (+) strand; PAM type: YTN; PAM sequence: CTT
ttaagctccagggagacatt

SEQ ID NO: 395038 - DNA, 20 bp, Artificial Sequence
  Description of Artificial Sequence: Synthetic oligonucleotide
  Target: LAMA2; (+) strand; PAM type: YTN; PAM sequence: TTT
taagctccagggagacatta

SEQ ID NO: 395039 - DNA, 20 bp, Artificial Sequence
  Description of Artificial Sequence: Synthetic oligonucleotide
  Target: LAMA2; (+) strand; PAM type: YTN; PAM sequence: TTT
aagctccagggagacattac

SEQ ID NO: 395040 - DNA, 20 bp, Artificial Sequence
  Description of Artificial Sequence: Synthetic oligonucleotide
  Target: LAMA2; (+) strand; PAM type: YTN; PAM sequence: TTA
agctccagggagacattaca

SEQ ID NO: 395041 - DNA, 20 bp, Artificial Sequence
  Description of Artificial Sequence: Synthetic oligonucleotide
  Target: LAMA2; (+) strand; PAM type: YTN; PAM sequence: CTC
cagggagacattacattttc

SEQ ID NO: 395042 - DNA, 20 bp, Artificial Sequence
  Description of Artificial Sequence: Synthetic oligonucleotide
  Target: LAMA2; (+) strand; PAM type: YTN; PAM sequence: TTA
cattttctcctgtaaaatag

SEQ ID NO: 395043 - DNA, 20 bp, Artificial Sequence
  Description of Artificial Sequence: Synthetic oligonucleotide
  Target: LAMA2; (+) strand; PAM type: YTN; PAM sequence: TTT
tctcctgtaaaatagcagct

SEQ ID NO: 395044 - DNA, 20 bp, Artificial Sequence
  Description of Artificial Sequence: Synthetic oligonucleotide
  Target: LAMA2; (+) strand; PAM type: YTN; PAM sequence: TTT
ctcctgtaaaatagcagctt

SEQ ID NO: 395045 - DNA, 20 bp, Artificial Sequence
  Description of Artificial Sequence: Synthetic oligonucleotide
  Target: LAMA2; (+) strand; PAM type: YTN; PAM sequence: TTC
tcctgtaaaatagcagctta

SEQ ID NO: 395046 - DNA, 20 bp, Artificial Sequence
  Description of Artificial Sequence: Synthetic oligonucleotide
  Target: LAMA2; (+) strand; PAM type: YTN; PAM sequence: CTC
ctgtaaaatagcagcttatt

SEQ ID NO: 395047 - DNA, 20 bp, Artificial Sequence
  Description of Artificial Sequence: Synthetic oligonucleotide
  Target: LAMA2; (+) strand; PAM type: YTN; PAM sequence: CTG
taaaatagcagcttattcta

SEQ ID NO: 395048 - DNA, 20 bp, Artificial Sequence
  Description of Artificial Sequence: Synthetic oligonucleotide
  Target: LAMA2; (+) strand; PAM type: YTN; PAM sequence: CTT
attctagctgggattattac

SEQ ID NO: 395049 - DNA, 20 bp, Artificial Sequence
  Description of Artificial Sequence: Synthetic oligonucleotide
  Target: LAMA2; (+) strand; PAM type: YTN; PAM sequence: TTA
ttctagctgggattattaca

SEQ ID NO: 395050 - DNA, 20 bp, Artificial Sequence
  Description of Artificial Sequence: Synthetic oligonucleotide
  Target: LAMA2; (+) strand; PAM type: YTN; PAM sequence: TTC
tagctgggattattacaaag

SEQ ID NO: 395051 - DNA, 20 bp, Artificial Sequence
  Description of Artificial Sequence: Synthetic oligonucleotide
  Target: LAMA2; (+) strand; PAM type: YTN; PAM sequence: CTA
gctgggattattacaaaggt

SEQ ID NO: 395052 - DNA, 20 bp, Artificial Sequence
  Description of Artificial Sequence: Synthetic oligonucleotide
  Target: LAMA2; (+) strand; PAM type: YTN; PAM sequence: CTG
ggattattacaaaggtcata

SEQ ID NO: 395053 - DNA, 20 bp, Artificial Sequence
  Description of Artificial Sequence: Synthetic oligonucleotide
  Target: LAMA2; (+) strand; PAM type: YTN; PAM sequence: TTA
ttacaaaggtcataggaggg

SEQ ID NO: 395054 - DNA, 20 bp, Artificial Sequence
  Description of Artificial Sequence: Synthetic oligonucleotide
  Target: LAMA2; (+) strand; PAM type: YTN; PAM sequence: TTA
caaaggtcataggagggaga

SEQ ID NO: 395055 - DNA, 20 bp, Artificial Sequence
  Description of Artificial Sequence: Synthetic oligonucleotide
  Target: LAMA2; (+) strand; PAM type: YTN; PAM sequence: TTT
gacttacaaacagccttctg

SEQ ID NO: 395056 - DNA, 20 bp, Artificial Sequence
  Description of Artificial Sequence: Synthetic oligonucleotide
  Target: LAMA2; (+) strand; PAM type: YTN; PAM sequence: TTG
acttacaaacagccttctgt

SEQ ID NO: 395057 - DNA, 20 bp, Artificial Sequence
  Description of Artificial Sequence: Synthetic oligonucleotide
  Target: LAMA2; (+) strand; PAM type: YTN; PAM sequence: CTT
acaaacagccttctgtgtat

SEQ ID NO: 395058 - DNA, 20 bp, Artificial Sequence
  Description of Artificial Sequence: Synthetic oligonucleotide
  Target: LAMA2; (+) strand; PAM type: YTN; PAM sequence: TTA
caaacagccttctgtgtata

SEQ ID NO: 395059 - DNA, 20 bp, Artificial Sequence
  Description of Artificial Sequence: Synthetic oligonucleotide
  Target: LAMA2; (+) strand; PAM type: YTN; PAM sequence: CTT
ctgtgtataactgatatgct

SEQ ID NO: 395060 - DNA, 20 bp, Artificial Sequence
  Description of Artificial Sequence: Synthetic oligonucleotide
  Target: LAMA2; (+) strand; PAM type: YTN; PAM sequence: TTC
tgtgtataactgatatgctt

SEQ ID NO: 395061 - DNA, 20 bp, Artificial Sequence
  Description of Artificial Sequence: Synthetic oligonucleotide
  Target: LAMA2; (+) strand; PAM type: YTN; PAM sequence: CTG
tgtataactgatatgctttt

SEQ ID NO: 395062 - DNA, 20 bp, Artificial Sequence
  Description of Artificial Sequence: Synthetic oligonucleotide
  Target: LAMA2; (+) strand; PAM type: YTN; PAM sequence: CTG
atatgcttttcctacaattt

SEQ ID NO: 395063 - DNA, 20 bp, Artificial Sequence
  Description of Artificial Sequence: Synthetic oligonucleotide
  Target: LAMA2; (+) strand; PAM type: YTN; PAM sequence: CTT
ttcctacaattttgggattg

SEQ ID NO: 395064 - DNA, 20 bp, Artificial Sequence
  Description of Artificial Sequence: Synthetic oligonucleotide
  Target: LAMA2; (+) strand; PAM type: YTN; PAM sequence: TTT
tcctacaattttgggattgt

SEQ ID NO: 395065 - DNA, 20 bp, Artificial Sequence
  Description of Artificial Sequence: Synthetic oligonucleotide
  Target: LAMA2; (+) strand; PAM type: YTN; PAM sequence: TTT
cctacaattttgggattgtc

SEQ ID NO: 395066 - DNA, 20 bp, Artificial Sequence
  Description of Artificial Sequence: Synthetic oligonucleotide
  Target: LAMA2; (+) strand; PAM type: YTN; PAM sequence: TTC
ctacaattttgggattgtcg

SEQ ID NO: 395067 - DNA, 20 bp, Artificial Sequence
  Description of Artificial Sequence: Synthetic oligonucleotide
  Target: LAMA2; (+) strand; PAM type: YTN; PAM sequence: CTA
caattttgggattgtcgtaa

SEQ ID NO: 395068 - DNA, 20 bp, Artificial Sequence
  Description of Artificial Sequence: Synthetic oligonucleotide
  Target: LAMA2; (+) strand; PAM type: YTN; PAM sequence: TTT
tgggattgtcgtaatttaat

SEQ ID NO: 395069 - DNA, 20 bp, Artificial Sequence
  Description of Artificial Sequence: Synthetic oligonucleotide
  Target: LAMA2; (+) strand; PAM type: YTN; PAM sequence: TTT
gggattgtcgtaatttaata

SEQ ID NO: 395070 - DNA, 20 bp, Artificial Sequence
  Description of Artificial Sequence: Synthetic oligonucleotide
  Target: LAMA2; (+) strand; PAM type: YTN; PAM sequence: TTG
ggattgtcgtaatttaatag

SEQ ID NO: 395071 - DNA, 20 bp, Artificial Sequence
  Description of Artificial Sequence: Synthetic oligonucleotide
  Target: LAMA2; (+) strand; PAM type: YTN; PAM sequence: TTG
tcgtaatttaatagcggtgc

SEQ ID NO: 395072 - DNA, 20 bp, Artificial Sequence
  Description of Artificial Sequence: Synthetic oligonucleotide
  Target: LAMA2; (+) strand; PAM type: YTN; PAM sequence: TTT
aatagcggtgctattagccc

SEQ ID NO: 395073 - DNA, 20 bp, Artificial Sequence
  Description of Artificial Sequence: Synthetic oligonucleotide
  Target: LAMA2; (+) strand; PAM type: YTN; PAM sequence: TTA
atagcggtgctattagcccc

SEQ ID NO: 395074 - DNA, 20 bp, Artificial Sequence
  Description of Artificial Sequence: Synthetic oligonucleotide
  Target: LAMA2; (+) strand; PAM type: YTN; PAM sequence: CTA
ttagccccaagaataatttg

SEQ ID NO: 395075 - DNA, 20 bp, Artificial Sequence
  Description of Artificial Sequence: Synthetic oligonucleotide
  Target: LAMA2; (+) strand; PAM type: YTN; PAM sequence: TTA
gccccaagaataatttgccc

SEQ ID NO: 395076 - DNA, 20 bp, Artificial Sequence
  Description of Artificial Sequence: Synthetic oligonucleotide
  Target: LAMA2; (+) strand; PAM type: YTN; PAM sequence: TTT
gcccagataaatctacatca

SEQ ID NO: 395077 - DNA, 20 bp, Artificial Sequence
  Description of Artificial Sequence: Synthetic oligonucleotide
  Target: LAMA2; (+) strand; PAM type: YTN; PAM sequence: TTG
cccagataaatctacatcac

SEQ ID NO: 395078 - DNA, 20 bp, Artificial Sequence
  Description of Artificial Sequence: Synthetic oligonucleotide
  Target: LAMA2; (+) strand; PAM type: YTN; PAM sequence: CTA
catcacatgcaaagctttgt

SEQ ID NO: 395079 - DNA, 20 bp, Artificial Sequence
  Description of Artificial Sequence: Synthetic oligonucleotide
  Target: LAMA2; (+) strand; PAM type: YTN; PAM sequence: CTT
tgttctcatacttaatactt

SEQ ID NO: 395080 - DNA, 20 bp, Artificial Sequence
  Description of Artificial Sequence: Synthetic oligonucleotide
  Target: LAMA2; (+) strand; PAM type: YTN; PAM sequence: TTT
gttctcatacttaatactta

SEQ ID NO: 395081 - DNA, 20 bp, Artificial Sequence
  Description of Artificial Sequence: Synthetic oligonucleotide
  Target: LAMA2; (+) strand; PAM type: YTN; PAM sequence: TTG
ttctcatacttaatacttac

SEQ ID NO: 395082 - DNA, 20 bp, Artificial Sequence
  Description of Artificial Sequence: Synthetic oligonucleotide
  Target: LAMA2; (+) strand; PAM type: YTN; PAM sequence: TTC
tcatacttaatacttactgt

SEQ ID NO: 395083 - DNA, 20 bp, Artificial Sequence
  Description of Artificial Sequence: Synthetic oligonucleotide
  Target: LAMA2; (+) strand; PAM type: YTN; PAM sequence: CTC
atacttaatacttactgtta

SEQ ID NO: 395084 - DNA, 20 bp, Artificial Sequence
  Description of Artificial Sequence: Synthetic oligonucleotide
  Target: LAMA2; (+) strand; PAM type: YTN; PAM sequence: CTT
aatacttactgttataaaga

SEQ ID NO: 395085 - DNA, 20 bp, Artificial Sequence
  Description of Artificial Sequence: Synthetic oligonucleotide
  Target: LAMA2; (+) strand; PAM type: YTN; PAM sequence: TTA
atacttactgttataaagaa

SEQ ID NO: 395086 - DNA, 20 bp, Artificial Sequence
  Description of Artificial Sequence: Synthetic oligonucleotide
  Target: LAMA2; (+) strand; PAM type: YTN; PAM sequence: CTT
actgttataaagaaaaaatg

SEQ ID NO: 395087 - DNA, 20 bp, Artificial Sequence
  Description of Artificial Sequence: Synthetic oligonucleotide
  Target: LAMA2; (+) strand; PAM type: YTN; PAM sequence: TTA
ctgttataaagaaaaaatgc

SEQ ID NO: 395088 - DNA, 20 bp, Artificial Sequence
  Description of Artificial Sequence: Synthetic oligonucleotide
  Target: LAMA2; (+) strand; PAM type: YTN; PAM sequence: CTG
ttataaagaaaaaatgctaa

SEQ ID NO: 395089 - DNA, 20 bp, Artificial Sequence
  Description of Artificial Sequence: Synthetic oligonucleotide
  Target: LAMA2; (+) strand; PAM type: YTN; PAM sequence: TTA
taaagaaaaaatgctaatgt

SEQ ID NO: 395090 - DNA, 20 bp, Artificial Sequence
  Description of Artificial Sequence: Synthetic oligonucleotide
  Target: LAMA2; (+) strand; PAM type: YTN; PAM sequence: CTA
atgtttgaagaccttggaca

SEQ ID NO: 395091 - DNA, 20 bp, Artificial Sequence
  Description of Artificial Sequence: Synthetic oligonucleotide
  Target: LAMA2; (+) strand; PAM type: YTN; PAM sequence: TTT
gaagaccttggacaatatat

SEQ ID NO: 395092 - DNA, 20 bp, Artificial Sequence
  Description of Artificial Sequence: Synthetic oligonucleotide
  Target: LAMA2; (+) strand; PAM type: YTN; PAM sequence: TTG
aagaccttggacaatatatg

SEQ ID NO: 395093 - DNA, 20 bp, Artificial Sequence
  Description of Artificial Sequence: Synthetic oligonucleotide
  Target: LAMA2; (+) strand; PAM type: YTN; PAM sequence: CTT
ggacaatatatgaactatca

SEQ ID NO: 395094 - DNA, 20 bp, Artificial Sequence
  Description of Artificial Sequence: Synthetic oligonucleotide
  Target: LAMA2; (+) strand; PAM type: YTN; PAM sequence: TTG
gacaatatatgaactatcat

SEQ ID NO: 395095 - DNA, 20 bp, Artificial Sequence
  Description of Artificial Sequence: Synthetic oligonucleotide
  Target: LAMA2; (+) strand; PAM type: YTN; PAM sequence: CTA
tcattttattttatgtcaaa

SEQ ID NO: 395096 - DNA, 20 bp, Artificial Sequence
  Description of Artificial Sequence: Synthetic oligonucleotide
  Target: LAMA2; (+) strand; PAM type: YTN; PAM sequence: TTT
tattttatgtcaaacttttg

SEQ ID NO: 395097 - DNA, 20 bp, Artificial Sequence
  Description of Artificial Sequence: Synthetic oligonucleotide
  Target: LAMA2; (+) strand; PAM type: YTN; PAM sequence: TTT
attttatgtcaaacttttgc

SEQ ID NO: 395098 - DNA, 20 bp, Artificial Sequence
  Description of Artificial Sequence: Synthetic oligonucleotide
  Target: LAMA2; (+) strand; PAM type: YTN; PAM sequence: TTA
ttttatgtcaaacttttgcc

SEQ ID NO: 395099 - DNA, 20 bp, Artificial Sequence
  Description of Artificial Sequence: Synthetic oligonucleotide
  Target: LAMA2; (+) strand; PAM type: YTN; PAM sequence: TTT
tatgtcaaacttttgccact

SEQ ID NO: 395100 - DNA, 20 bp, Artificial Sequence
  Description of Artificial Sequence: Synthetic oligonucleotide
  Target: LAMA2; (+) strand; PAM type: YTN; PAM sequence: TTT
atgtcaaacttttgccactt

SEQ ID NO: 395101 - DNA, 20 bp, Artificial Sequence
  Description of Artificial Sequence: Synthetic oligonucleotide
  Target: LAMA2; (+) strand; PAM type: YTN; PAM sequence: TTA
tgtcaaacttttgccacttt

SEQ ID NO: 395102 - DNA, 20 bp, Artificial Sequence
  Description of Artificial Sequence: Synthetic oligonucleotide
  Target: LAMA2; (+) strand; PAM type: YTN; PAM sequence: CTT
ttgccactttataatgaagg

SEQ ID NO: 395103 - DNA, 20 bp, Artificial Sequence
  Description of Artificial Sequence: Synthetic oligonucleotide
  Target: LAMA2; (+) strand; PAM type: YTN; PAM sequence: TTT
tgccactttataatgaaggg

SEQ ID NO: 395104 - DNA, 20 bp, Artificial Sequence
  Description of Artificial Sequence: Synthetic oligonucleotide
  Target: LAMA2; (+) strand; PAM type: YTN; PAM sequence: TTT
gccactttataatgaagggt

SEQ ID NO: 395105 - DNA, 20 bp, Artificial Sequence
  Description of Artificial Sequence: Synthetic oligonucleotide
  Target: LAMA2; (+) strand; PAM type: YTN; PAM sequence: TTG
ccactttataatgaagggtg

SEQ ID NO: 395106 - DNA, 20 bp, Artificial Sequence
  Description of Artificial Sequence: Synthetic oligonucleotide
  Target: LAMA2; (+) strand; PAM type: YTN; PAM sequence: CTT
tataatgaagggtgggtggc

SEQ ID NO: 395107 - DNA, 20 bp, Artificial Sequence
  Description of Artificial Sequence: Synthetic oligonucleotide
  Target: LAMA2; (+) strand; PAM type: YTN; PAM sequence: TTT
ataatgaagggtgggtggca

SEQ ID NO: 395108 - DNA, 20 bp, Artificial Sequence
  Description of Artificial Sequence: Synthetic oligonucleotide
  Target: LAMA2; (+) strand; PAM type: YTN; PAM sequence: TTA
taatgaagggtgggtggcag

SEQ ID NO: 395109 - DNA, 20 bp, Artificial Sequence
  Description of Artificial Sequence: Synthetic oligonucleotide
  Target: LAMA2; (+) strand; PAM type: YTN; PAM sequence: CTA
ggtatcatcagatccaggct

SEQ ID NO: 395110 - DNA, 20 bp, Artificial Sequence
  Description of Artificial Sequence: Synthetic oligonucleotide
  Target: LAMA2; (+) strand; PAM type: YTN; PAM sequence: CTC
taagtccttacttggggaca

SEQ ID NO: 395111 - DNA, 20 bp, Artificial Sequence
  Description of Artificial Sequence: Synthetic oligonucleotide
  Target: LAMA2; (+) strand; PAM type: YTN; PAM sequence: CTA
agtccttacttggggacata

SEQ ID NO: 395112 - DNA, 20 bp, Artificial Sequence
  Description of Artificial Sequence: Synthetic oligonucleotide
  Target: LAMA2; (+) strand; PAM type: YTN; PAM sequence: CTT
acttggggacatattggtca

SEQ ID NO: 395113 - DNA, 20 bp, Artificial Sequence
  Description of Artificial Sequence: Synthetic oligonucleotide
  Target: LAMA2; (+) strand; PAM type: YTN; PAM sequence: TTA
cttggggacatattggtcat

SEQ ID NO: 395114 - DNA, 20 bp, Artificial Sequence
  Description of Artificial Sequence: Synthetic oligonucleotide
  Target: LAMA2; (+) strand; PAM type: YTN; PAM sequence: CTT
ggggacatattggtcatttg

SEQ ID NO: 395115 - DNA, 20 bp, Artificial Sequence
  Description of Artificial Sequence: Synthetic oligonucleotide
  Target: LAMA2; (+) strand; PAM type: YTN; PAM sequence: TTG
gggacatattggtcatttgg

SEQ ID NO: 395116 - DNA, 20 bp, Artificial Sequence
  Description of Artificial Sequence: Synthetic oligonucleotide
  Target: LAMA2; (+) strand; PAM type: YTN; PAM sequence: TTG
gtcatttggcctgaaacagg

SEQ ID NO: 395117 - DNA, 20 bp, Artificial Sequence
  Description of Artificial Sequence: Synthetic oligonucleotide
  Target: LAMA2; (+) strand; PAM type: YTN; PAM sequence: TTT
ggcctgaaacaggccattta

SEQ ID NO: 395118 - DNA, 20 bp, Artificial Sequence
  Description of Artificial Sequence: Synthetic oligonucleotide
  Target: LAMA2; (+) strand; PAM type: YTN; PAM sequence: TTG
gcctgaaacaggccatttaa

SEQ ID NO: 395119 - DNA, 20 bp, Artificial Sequence
  Description of Artificial Sequence: Synthetic oligonucleotide
  Target: LAMA2; (+) strand; PAM type: YTN; PAM sequence: CTG
aaacaggccatttaaccttc

SEQ ID NO: 395120 - DNA, 20 bp, Artificial Sequence
  Description of Artificial Sequence: Synthetic oligonucleotide
  Target: LAMA2; (+) strand; PAM type: YTN; PAM sequence: TTT
aaccttctgaaattcacttg

SEQ ID NO: 395121 - DNA, 20 bp, Artificial Sequence
  Description of Artificial Sequence: Synthetic oligonucleotide
  Target: LAMA2; (+) strand; PAM type: YTN; PAM sequence: TTA
accttctgaaattcacttgg

SEQ ID NO: 395122 - DNA, 20 bp, Artificial Sequence
  Description of Artificial Sequence: Synthetic oligonucleotide
  Target: LAMA2; (+) strand; PAM type: YTN; PAM sequence: CTT
ctgaaattcacttggtctct

SEQ ID NO: 395123 - DNA, 20 bp, Artificial Sequence
  Description of Artificial Sequence: Synthetic oligonucleotide
  Target: LAMA2; (+) strand; PAM type: YTN; PAM sequence: TTC
tgaaattcacttggtctctt

SEQ ID NO: 395124 - DNA, 20 bp, Artificial Sequence
  Description of Artificial Sequence: Synthetic oligonucleotide
  Target: LAMA2; (+) strand; PAM type: YTN; PAM sequence: CTG
aaattcacttggtctcttct

SEQ ID NO: 395125 - DNA, 20 bp, Artificial Sequence
  Description of Artificial Sequence: Synthetic oligonucleotide
  Target: LAMA2; (+) strand; PAM type: YTN; PAM sequence: TTC
acttggtctcttctgggaag

SEQ ID NO: 395126 - DNA, 20 bp, Artificial Sequence
  Description of Artificial Sequence: Synthetic oligonucleotide
  Target: LAMA2; (+) strand; PAM type: YTN; PAM sequence: CTT
ggtctcttctgggaagtgca

SEQ ID NO: 395127 - DNA, 20 bp, Artificial Sequence
  Description of Artificial Sequence: Synthetic oligonucleotide
  Target: LAMA2; (+) strand; PAM type: YTN; PAM sequence: TTG
gtctcttctgggaagtgcac

SEQ ID NO: 395128 - DNA, 20 bp, Artificial Sequence
  Description of Artificial Sequence: Synthetic oligonucleotide
  Target: LAMA2; (+) strand; PAM type: YTN; PAM sequence: CTC
ttctgggaagtgcacctacc

SEQ ID NO: 395129 - DNA, 20 bp, Artificial Sequence
  Description of Artificial Sequence: Synthetic oligonucleotide
  Target: LAMA2; (+) strand; PAM type: YTN; PAM sequence: CTT
ctgggaagtgcacctacccc

SEQ ID NO: 395130 - DNA, 20 bp, Artificial Sequence
  Description of Artificial Sequence: Synthetic oligonucleotide
  Target: LAMA2; (+) strand; PAM type: YTN; PAM sequence: TTC
tgggaagtgcacctacccca

SEQ ID NO: 395131 - DNA, 20 bp, Artificial Sequence
  Description of Artificial Sequence: Synthetic oligonucleotide
  Target: LAMA2; (+) strand; PAM type: YTN; PAM sequence: CTG
ggaagtgcacctaccccaga

SEQ ID NO: 395132 - DNA, 20 bp, Artificial Sequence
  Description of Artificial Sequence: Synthetic oligonucleotide
  Target: LAMA2; (+) strand; PAM type: YTN; PAM sequence: CTA
ccccagaaagattttgtgaa

SEQ ID NO: 395133 - DNA, 20 bp, Artificial Sequence
  Description of Artificial Sequence: Synthetic oligonucleotide
  Target: LAMA2; (+) strand; PAM type: YTN; PAM sequence: TTT
tgtgaaattaattccagtaa

SEQ ID NO: 395134 - DNA, 20 bp, Artificial Sequence
  Description of Artificial Sequence: Synthetic oligonucleotide
  Target: LAMA2; (+) strand; PAM type: YTN; PAM sequence: TTT
gtgaaattaattccagtaat

SEQ ID NO: 395135 - DNA, 20 bp, Artificial Sequence
  Description of Artificial Sequence: Synthetic oligonucleotide
  Target: LAMA2; (+) strand; PAM type: YTN; PAM sequence: TTG
tgaaattaattccagtaatg

SEQ ID NO: 395136 - DNA, 20 bp, Artificial Sequence
  Description of Artificial Sequence: Synthetic oligonucleotide
  Target: LAMA2; (+) strand; PAM type: YTN; PAM sequence: TTA
attccagtaatgtagtacaa

SEQ ID NO: 395137 - DNA, 20 bp, Artificial Sequence
  Description of Artificial Sequence: Synthetic oligonucleotide
  Target: LAMA2; (+) strand; PAM type: YTN; PAM sequence: TTC
cagtaatgtagtacaagtgc

SEQ ID NO: 395138 - DNA, 20 bp, Artificial Sequence
  Description of Artificial Sequence: Synthetic oligonucleotide
  Target: LAMA2; (+) strand; PAM type: YTN; PAM sequence: CTC
tgaatctcacagcatgcttc

SEQ ID NO: 395139 - DNA, 20 bp, Artificial Sequence
  Description of Artificial Sequence: Synthetic oligonucleotide
  Target: LAMA2; (+) strand; PAM type: YTN; PAM sequence: CTG
aatctcacagcatgcttcac

SEQ ID NO: 395140 - DNA, 20 bp, Artificial Sequence
  Description of Artificial Sequence: Synthetic oligonucleotide
  Target: LAMA2; (+) strand; PAM type: YTN; PAM sequence: CTC
acagcatgcttcacaaataa

SEQ ID NO: 395141 - DNA, 20 bp, Artificial Sequence
  Description of Artificial Sequence: Synthetic oligonucleotide
  Target: LAMA2; (+) strand; PAM type: YTN; PAM sequence: CTT
cacaaataaggtgaagaatt

SEQ ID NO: 395142 - DNA, 20 bp, Artificial Sequence
  Description of Artificial Sequence: Synthetic oligonucleotide
  Target: LAMA2; (+) strand; PAM type: YTN; PAM sequence: TTC
acaaataaggtgaagaattg

SEQ ID NO: 395143 - DNA, 20 bp, Artificial Sequence
  Description of Artificial Sequence: Synthetic oligonucleotide
  Target: LAMA2; (+) strand; PAM type: YTN; PAM sequence: TTG
tctcatatcacacacctgct

SEQ ID NO: 395144 - DNA, 20 bp, Artificial Sequence
  Description of Artificial Sequence: Synthetic oligonucleotide
  Target: LAMA2; (+) strand; PAM type: YTN; PAM sequence: CTC
atatcacacacctgctagag

SEQ ID NO: 395145 - DNA, 20 bp, Artificial Sequence
  Description of Artificial Sequence: Synthetic oligonucleotide
  Target: LAMA2; (+) strand; PAM type: YTN; PAM sequence: CTG
ctagagcacctggttgcaga

SEQ ID NO: 395146 - DNA, 20 bp, Artificial Sequence
  Description of Artificial Sequence: Synthetic oligonucleotide
  Target: LAMA2; (+) strand; PAM type: YTN; PAM sequence: CTA
gagcacctggttgcagagac

SEQ ID NO: 395147 - DNA, 20 bp, Artificial Sequence
  Description of Artificial Sequence: Synthetic oligonucleotide
  Target: LAMA2; (+) strand; PAM type: YTN; PAM sequence: CTG
gttgcagagacttttggagg

SEQ ID NO: 395148 - DNA, 20 bp, Artificial Sequence
  Description of Artificial Sequence: Synthetic oligonucleotide
  Target: LAMA2; (+) strand; PAM type: YTN; PAM sequence: TTG
cagagacttttggaggatgc

SEQ ID NO: 395149 - DNA, 20 bp, Artificial Sequence
  Description of Artificial Sequence: Synthetic oligonucleotide
  Target: LAMA2; (+) strand; PAM type: YTN; PAM sequence: CTT
ttggaggatgctatgggtat

SEQ ID NO: 395150 - DNA, 20 bp, Artificial Sequence
  Description of Artificial Sequence: Synthetic oligonucleotide
  Target: LAMA2; (+) strand; PAM type: YTN; PAM sequence: TTT
tggaggatgctatgggtatt

SEQ ID NO: 395151 - DNA, 20 bp, Artificial Sequence
  Description of Artificial Sequence: Synthetic oligonucleotide
  Target: LAMA2; (+) strand; PAM type: YTN; PAM sequence: TTT
ggaggatgctatgggtattt

SEQ ID NO: 395152 - DNA, 20 bp, Artificial Sequence
  Description of Artificial Sequence: Synthetic oligonucleotide
  Target: LAMA2; (+) strand; PAM type: YTN; PAM sequence: TTG
gaggatgctatgggtattta

SEQ ID NO: 395153 - DNA, 20 bp, Artificial Sequence
  Description of Artificial Sequence: Synthetic oligonucleotide
  Target: LAMA2; (+) strand; PAM type: YTN; PAM sequence: CTA
tgggtatttaagatatgttg

SEQ ID NO: 395154 - DNA, 20 bp, Artificial Sequence
  Description of Artificial Sequence: Synthetic oligonucleotide
  Target: LAMA2; (+) strand; PAM type: YTN; PAM sequence: TTT
aagatatgttggtagtattt

SEQ ID NO: 395155 - DNA, 20 bp, Artificial Sequence
  Description of Artificial Sequence: Synthetic oligonucleotide
  Target: LAMA2; (+) strand; PAM type: YTN; PAM sequence: TTA
agatatgttggtagtatttc

SEQ ID NO: 395156 - DNA, 20 bp, Artificial Sequence
  Description of Artificial Sequence: Synthetic oligonucleotide
  Target: LAMA2; (+) strand; PAM type: YTN; PAM sequence: TTG
gtagtatttcatagctgaat

SEQ ID NO: 395157 - DNA, 20 bp, Artificial Sequence
  Description of Artificial Sequence: Synthetic oligonucleotide
  Target: LAMA2; (+) strand; PAM type: YTN; PAM sequence: TTT
catagctgaattattagaaa

SEQ ID NO: 395158 - DNA, 20 bp, Artificial Sequence
  Description of Artificial Sequence: Synthetic oligonucleotide
  Target: LAMA2; (+) strand; PAM type: YTN; PAM sequence: TTC
atagctgaattattagaaat

SEQ ID NO: 395159 - DNA, 20 bp, Artificial Sequence
  Description of Artificial Sequence: Synthetic oligonucleotide
  Target: LAMA2; (+) strand; PAM type: YTN; PAM sequence: CTG
aattattagaaatataagtt

SEQ ID NO: 395160 - DNA, 20 bp, Artificial Sequence
  Description of Artificial Sequence: Synthetic oligonucleotide
  Target: LAMA2; (+) strand; PAM type: YTN; PAM sequence: TTA
ttagaaatataagtttaggt

SEQ ID NO: 395161 - DNA, 20 bp, Artificial Sequence
  Description of Artificial Sequence: Synthetic oligonucleotide
  Target: LAMA2; (+) strand; PAM type: YTN; PAM sequence: TTA
gaaatataagtttaggttat

SEQ ID NO: 395162 - DNA, 20 bp, Artificial Sequence
  Description of Artificial Sequence: Synthetic oligonucleotide
  Target: LAMA2; (+) strand; PAM type: YTN; PAM sequence: TTT
aggttatagaaaactatagg

SEQ ID NO: 395163 - DNA, 20 bp, Artificial Sequence
  Description of Artificial Sequence: Synthetic oligonucleotide
  Target: LAMA2; (+) strand; PAM type: YTN; PAM sequence: TTA
ggttatagaaaactatagga

SEQ ID NO: 395164 - DNA, 20 bp, Artificial Sequence
  Description of Artificial Sequence: Synthetic oligonucleotide
  Target: LAMA2; (+) strand; PAM type: YTN; PAM sequence: TTA
tagaaaactataggacaata

SEQ ID NO: 395165 - DNA, 20 bp, Artificial Sequence
  Description of Artificial Sequence: Synthetic oligonucleotide
  Target: LAMA2; (+) strand; PAM type: YTN; PAM sequence: CTA
taggacaatataataagtag

SEQ ID NO: 395166 - DNA, 20 bp, Artificial Sequence
  Description of Artificial Sequence: Synthetic oligonucleotide
  Target: LAMA2; (+) strand; PAM type: YTN; PAM sequence: CTT
cactattatttggaattgtc

SEQ ID NO: 395167 - DNA, 20 bp, Artificial Sequence
  Description of Artificial Sequence: Synthetic oligonucleotide
  Target: LAMA2; (+) strand; PAM type: YTN; PAM sequence: TTC
actattatttggaattgtca

SEQ ID NO: 395168 - DNA, 20 bp, Artificial Sequence
  Description of Artificial Sequence: Synthetic oligonucleotide
  Target: LAMA2; (+) strand; PAM type: YTN; PAM sequence: CTA
ttatttggaattgtcataga

SEQ ID NO: 395169 - DNA, 20 bp, Artificial Sequence
  Description of Artificial Sequence: Synthetic oligonucleotide
  Target: LAMA2; (+) strand; PAM type: YTN; PAM sequence: TTA
tttggaattgtcatagatat

SEQ ID NO: 395170 - DNA, 20 bp, Artificial Sequence
  Description of Artificial Sequence: Synthetic oligonucleotide
  Target: LAMA2; (+) strand; PAM type: YTN; PAM sequence: TTT
ggaattgtcatagatatatt

SEQ ID NO: 395171 - DNA, 20 bp, Artificial Sequence
  Description of Artificial Sequence: Synthetic oligonucleotide
  Target: LAMA2; (+) strand; PAM type: YTN; PAM sequence: TTG
gaattgtcatagatatattg

SEQ ID NO: 395172 - DNA, 20 bp, Artificial Sequence
  Description of Artificial Sequence: Synthetic oligonucleotide
  Target: LAMA2; (+) strand; PAM type: YTN; PAM sequence: TTG
tcatagatatattggccatg

SEQ ID NO: 395173 - DNA, 20 bp, Artificial Sequence
  Description of Artificial Sequence: Synthetic oligonucleotide
  Target: LAMA2; (+) strand; PAM type: YTN; PAM sequence: TTG
gccatgatcatttggaagcc

SEQ ID NO: 395174 - DNA, 20 bp, Artificial Sequence
  Description of Artificial Sequence: Synthetic oligonucleotide
  Target: LAMA2; (+) strand; PAM type: YTN; PAM sequence: TTT
ggaagccagatttcatataa

SEQ ID NO: 395175 - DNA, 20 bp, Artificial Sequence
  Description of Artificial Sequence: Synthetic oligonucleotide
  Target: LAMA2; (+) strand; PAM type: YTN; PAM sequence: TTG
gaagccagatttcatataat

SEQ ID NO: 395176 - DNA, 20 bp, Artificial Sequence
  Description of Artificial Sequence: Synthetic oligonucleotide
  Target: LAMA2; (+) strand; PAM type: YTN; PAM sequence: TTT
catataattaggacgttctt

SEQ ID NO: 395177 - DNA, 20 bp, Artificial Sequence
  Description of Artificial Sequence: Synthetic oligonucleotide
  Target: LAMA2; (+) strand; PAM type: YTN; PAM sequence: TTC
atataattaggacgttcttc

SEQ ID NO: 395178 - DNA, 20 bp, Artificial Sequence
  Description of Artificial Sequence: Synthetic oligonucleotide
  Target: LAMA2; (+) strand; PAM type: YTN; PAM sequence: TTA
ggacgttcttcatttgagta

SEQ ID NO: 395179 - DNA, 20 bp, Artificial Sequence
  Description of Artificial Sequence: Synthetic oligonucleotide
  Target: LAMA2; (+) strand; PAM type: YTN; PAM sequence: TTC
ttcatttgagtaccattgag

SEQ ID NO: 395180 - DNA, 20 bp, Artificial Sequence
  Description of Artificial Sequence: Synthetic oligonucleotide
  Target: LAMA2; (+) strand; PAM type: YTN; PAM sequence: CTT
catttgagtaccattgagtg

SEQ ID NO: 395181 - DNA, 20 bp, Artificial Sequence
  Description of Artificial Sequence: Synthetic oligonucleotide
  Target: LAMA2; (+) strand; PAM type: YTN; PAM sequence: TTC
atttgagtaccattgagtgc

SEQ ID NO: 395182 - DNA, 20 bp, Artificial Sequence
  Description of Artificial Sequence: Synthetic oligonucleotide
  Target: LAMA2; (+) strand; PAM type: YTN; PAM sequence: TTT
gagtaccattgagtgccctg

SEQ ID NO: 395183 - DNA, 20 bp, Artificial Sequence
  Description of Artificial Sequence: Synthetic oligonucleotide
  Target: LAMA2; (+) strand; PAM type: YTN; PAM sequence: TTG
agtaccattgagtgccctga

SEQ ID NO: 395184 - DNA, 20 bp, Artificial Sequence
  Description of Artificial Sequence: Synthetic oligonucleotide
  Target: LAMA2; (+) strand; PAM type: YTN; PAM sequence: TTG
agtgccctgacattcctttt

SEQ ID NO: 395185 - DNA, 20 bp, Artificial Sequence
  Description of Artificial Sequence: Synthetic oligonucleotide
  Target: LAMA2; (+) strand; PAM type: YTN; PAM sequence: CTG
acattccttttttgaatcat

SEQ ID NO: 395186 - DNA, 20 bp, Artificial Sequence
  Description of Artificial Sequence: Synthetic oligonucleotide
  Target: LAMA2; (+) strand; PAM type: YTN; PAM sequence: TTC
cttttttgaatcatcccacc

SEQ ID NO: 395187 - DNA, 20 bp, Artificial Sequence
  Description of Artificial Sequence: Synthetic oligonucleotide
  Target: LAMA2; (+) strand; PAM type: YTN; PAM sequence: CTT
ttttgaatcatcccaccaga

SEQ ID NO: 395188 - DNA, 20 bp, Artificial Sequence
  Description of Artificial Sequence: Synthetic oligonucleotide
  Target: LAMA2; (+) strand; PAM type: YTN; PAM sequence: TTT
tttgaatcatcccaccagaa

SEQ ID NO: 395189 - DNA, 20 bp, Artificial Sequence
  Description of Artificial Sequence: Synthetic oligonucleotide
  Target: LAMA2; (+) strand; PAM type: YTN; PAM sequence: TTT
ttgaatcatcccaccagaat

SEQ ID NO: 395190 - DNA, 20 bp, Artificial Sequence
  Description of Artificial Sequence: Synthetic oligonucleotide
  Target: LAMA2; (+) strand; PAM type: YTN; PAM sequence: TTT
tgaatcatcccaccagaatc

SEQ ID NO: 395191 - DNA, 20 bp, Artificial Sequence
  Description of Artificial Sequence: Synthetic oligonucleotide
  Target: LAMA2; (+) strand; PAM type: YTN; PAM sequence: TTT
gaatcatcccaccagaatcc

SEQ ID NO: 395192 - DNA, 20 bp, Artificial Sequence
  Description of Artificial Sequence: Synthetic oligonucleotide
  Target: LAMA2; (+) strand; PAM type: YTN; PAM sequence: TTG
aatcatcccaccagaatcct

SEQ ID NO: 395193 - DNA, 20 bp, Artificial Sequence
  Description of Artificial Sequence: Synthetic oligonucleotide
  Target: LAMA2; (+) strand; PAM type: YTN; PAM sequence: CTT
gatgaggctaaaaacatctc

SEQ ID NO: 395194 - DNA, 20 bp, Artificial Sequence
  Description of Artificial Sequence: Synthetic oligonucleotide
  Target: LAMA2; (+) strand; PAM type: YTN; PAM sequence: TTG
atgaggctaaaaacatctcc

SEQ ID NO: 395195 - DNA, 20 bp, Artificial Sequence
  Description of Artificial Sequence: Synthetic oligonucleotide
  Target: LAMA2; (+) strand; PAM type: YTN; PAM sequence: CTA
aaaacatctccttcaatgcc

SEQ ID NO: 395196 - DNA, 20 bp, Artificial Sequence
  Description of Artificial Sequence: Synthetic oligonucleotide
  Target: LAMA2; (+) strand; PAM type: YTN; PAM sequence: CTC
cttcaatgccactgcagcct

SEQ ID NO: 395197 - DNA, 20 bp, Artificial Sequence
  Description of Artificial Sequence: Synthetic oligonucleotide
  Target: LAMA2; (+) strand; PAM type: YTN; PAM sequence: CTT
caatgccactgcagccttca

SEQ ID NO: 395198 - DNA, 20 bp, Artificial Sequence
  Description of Artificial Sequence: Synthetic oligonucleotide
  Target: LAMA2; (+) strand; PAM type: YTN; PAM sequence: TTC
aatgccactgcagccttcaa

SEQ ID NO: 395199 - DNA, 20 bp, Artificial Sequence
  Description of Artificial Sequence: Synthetic oligonucleotide
  Target: LAMA2; (+) strand; PAM type: YTN; PAM sequence: CTG
cagccttcaaagcttacagc

SEQ ID NO: 395200 - DNA, 20 bp, Artificial Sequence
  Description of Artificial Sequence: Synthetic oligonucleotide
  Target: LAMA2; (+) strand; PAM type: YTN; PAM sequence: CTT
caaagcttacagcaatatta

SEQ ID NO: 395201 - DNA, 20 bp, Artificial Sequence
  Description of Artificial Sequence: Synthetic oligonucleotide
  Target: LAMA2; (+) strand; PAM type: YTN; PAM sequence: TTC
aaagcttacagcaatattaa

SEQ ID NO: 395202 - DNA, 20 bp, Artificial Sequence
  Description of Artificial Sequence: Synthetic oligonucleotide
  Target: LAMA2; (+) strand; PAM type: YTN; PAM sequence: CTT
acagcaatattaaggactat

SEQ ID NO: 395203 - DNA, 20 bp, Artificial Sequence
  Description of Artificial Sequence: Synthetic oligonucleotide
  Target: LAMA2; (+) strand; PAM type: YTN; PAM sequence: TTA
cagcaatattaaggactata

SEQ ID NO: 395204 - DNA, 20 bp, Artificial Sequence
  Description of Artificial Sequence: Synthetic oligonucleotide
  Target: LAMA2; (+) strand; PAM type: YTN; PAM sequence: TTA
aggactatattgatgaagct

SEQ ID NO: 395205 - DNA, 20 bp, Artificial Sequence
  Description of Artificial Sequence: Synthetic oligonucleotide
  Target: LAMA2; (+) strand; PAM type: YTN; PAM sequence: CTA
tattgatgaagctgagaaag

SEQ ID NO: 395206 - DNA, 20 bp, Artificial Sequence
  Description of Artificial Sequence: Synthetic oligonucleotide
  Target: LAMA2; (+) strand; PAM type: YTN; PAM sequence: TTG
atgaagctgagaaagttgcc

SEQ ID NO: 395207 - DNA, 20 bp, Artificial Sequence
  Description of Artificial Sequence: Synthetic oligonucleotide
  Target: LAMA2; (+) strand; PAM type: YTN; PAM sequence: CTG
agaaagttgccaaagaagcc

SEQ ID NO: 395208 - DNA, 20 bp, Artificial Sequence
  Description of Artificial Sequence: Synthetic oligonucleotide
  Target: LAMA2; (+) strand; PAM type: YTN; PAM sequence: TTG
ccaaagaagccaaagatctt

SEQ ID NO: 395209 - DNA, 20 bp, Artificial Sequence
  Description of Artificial Sequence: Synthetic oligonucleotide
  Target: LAMA2; (+) strand; PAM type: YTN; PAM sequence: CTT
gcacatgaagctacaaaact

SEQ ID NO: 395210 - DNA, 20 bp, Artificial Sequence
  Description of Artificial Sequence: Synthetic oligonucleotide
  Target: LAMA2; (+) strand; PAM type: YTN; PAM sequence: TTG
cacatgaagctacaaaactg

SEQ ID NO: 395211 - DNA, 20 bp, Artificial Sequence
  Description of Artificial Sequence: Synthetic oligonucleotide
  Target: LAMA2; (+) strand; PAM type: YTN; PAM sequence: CTA
caaaactggtaagaaacaaa

SEQ ID NO: 395212 - DNA, 20 bp, Artificial Sequence
  Description of Artificial Sequence: Synthetic oligonucleotide
  Target: LAMA2; (+) strand; PAM type: YTN; PAM sequence: CTG
gtaagaaacaaatggcacat

SEQ ID NO: 395213 - DNA, 20 bp, Artificial Sequence
  Description of Artificial Sequence: Synthetic oligonucleotide
  Target: LAMA2; (+) strand; PAM type: YTN; PAM sequence: CTG
ggaatggaagtcaacctttt

SEQ ID NO: 395214 - DNA, 20 bp, Artificial Sequence
  Description of Artificial Sequence: Synthetic oligonucleotide
  Target: LAMA2; (+) strand; PAM type: YTN; PAM sequence: CTT
tttgaatttttcaaatgtaa

SEQ ID NO: 395215 - DNA, 20 bp, Artificial Sequence
  Description of Artificial Sequence: Synthetic oligonucleotide
  Target: LAMA2; (+) strand; PAM type: YTN; PAM sequence: TTT
ttgaatttttcaaatgtaag

SEQ ID NO: 395216 - DNA, 20 bp, Artificial Sequence
  Description of Artificial Sequence: Synthetic oligonucleotide
  Target: LAMA2; (+) strand; PAM type: YTN; PAM sequence: TTT
tgaatttttcaaatgtaagt

SEQ ID NO: 395217 - DNA, 20 bp, Artificial Sequence
  Description of Artificial Sequence: Synthetic oligonucleotide
  Target: LAMA2; (+) strand; PAM type: YTN; PAM sequence: TTT
gaatttttcaaatgtaagtc

SEQ ID NO: 395218 - DNA, 20 bp, Artificial Sequence
  Description of Artificial Sequence: Synthetic oligonucleotide
  Target: LAMA2; (+) strand; PAM type: YTN; PAM sequence: TTG
aatttttcaaatgtaagtca

SEQ ID NO: 395219 - DNA, 20 bp, Artificial Sequence
  Description of Artificial Sequence: Synthetic oligonucleotide
  Target: LAMA2; (+) strand; PAM type: YTN; PAM sequence: TTT
ttcaaatgtaagtcagtctg

SEQ ID NO: 395220 - DNA, 20 bp, Artificial Sequence
  Description of Artificial Sequence: Synthetic oligonucleotide
  Target: LAMA2; (+) strand; PAM type: YTN; PAM sequence: TTT
tcaaatgtaagtcagtctgg

SEQ ID NO: 395221 - DNA, 20 bp, Artificial Sequence
  Description of Artificial Sequence: Synthetic oligonucleotide
  Target: LAMA2; (+) strand; PAM type: YTN; PAM sequence: TTT
caaatgtaagtcagtctgga

SEQ ID NO: 395222 - DNA, 20 bp, Artificial Sequence
  Description of Artificial Sequence: Synthetic oligonucleotide
  Target: LAMA2; (+) strand; PAM type: YTN; PAM sequence: TTC
aaatgtaagtcagtctggaa

SEQ ID NO: 395223 - DNA, 20 bp, Artificial Sequence
  Description of Artificial Sequence: Synthetic oligonucleotide
  Target: LAMA2; (+) strand; PAM type: YTN; PAM sequence: CTG
gaaaatcccagtaaattggt

SEQ ID NO: 395224 - DNA, 20 bp, Artificial Sequence
  Description of Artificial Sequence: Synthetic oligonucleotide
  Target: LAMA2; (+) strand; PAM type: YTN; PAM sequence: TTG
gtatatttgttttgggttat

SEQ ID NO: 395225 - DNA, 20 bp, Artificial Sequence
  Description of Artificial Sequence: Synthetic oligonucleotide
  Target: LAMA2; (+) strand; PAM type: YTN; PAM sequence: TTT
gttttgggttatttttgaag

SEQ ID NO: 395226 - DNA, 20 bp, Artificial Sequence
  Description of Artificial Sequence: Synthetic oligonucleotide
  Target: LAMA2; (+) strand; PAM type: YTN; PAM sequence: TTG
ttttgggttatttttgaaga

SEQ ID NO: 395227 - DNA, 20 bp, Artificial Sequence
  Description of Artificial Sequence: Synthetic oligonucleotide
  Target: LAMA2; (+) strand; PAM type: YTN; PAM sequence: TTT
tgggttatttttgaagacct

SEQ ID NO: 395228 - DNA, 20 bp, Artificial Sequence
  Description of Artificial Sequence: Synthetic oligonucleotide
  Target: LAMA2; (+) strand; PAM type: YTN; PAM sequence: TTT
gggttatttttgaagacctc

SEQ ID NO: 395229 - DNA, 20 bp, Artificial Sequence
  Description of Artificial Sequence: Synthetic oligonucleotide
  Target: LAMA2; (+) strand; PAM type: YTN; PAM sequence: TTG
ggttatttttgaagacctct

SEQ ID NO: 395230 - DNA, 20 bp, Artificial Sequence
  Description of Artificial Sequence: Synthetic oligonucleotide
  Target: LAMA2; (+) strand; PAM type: YTN; PAM sequence: TTA
tttttgaagacctcttttaa

SEQ ID NO: 395231 - DNA, 20 bp, Artificial Sequence
  Description of Artificial Sequence: Synthetic oligonucleotide
  Target: LAMA2; (+) strand; PAM type: YTN; PAM sequence: TTT
ttgaagacctcttttaaaat

SEQ ID NO: 395232 - DNA, 20 bp, Artificial Sequence
  Description of Artificial Sequence: Synthetic oligonucleotide
  Target: LAMA2; (+) strand; PAM type: YTN; PAM sequence: TTT
tgaagacctcttttaaaatt

SEQ ID NO: 395233 - DNA, 20 bp, Artificial Sequence
  Description of Artificial Sequence: Synthetic oligonucleotide
  Target: LAMA2; (+) strand; PAM type: YTN; PAM sequence: TTT
gaagacctcttttaaaattt

SEQ ID NO: 395234 - DNA, 20 bp, Artificial Sequence
  Description of Artificial Sequence: Synthetic oligonucleotide
  Target: LAMA2; (+) strand; PAM type: YTN; PAM sequence: TTG
aagacctcttttaaaatttg

SEQ ID NO: 395235 - DNA, 20 bp, Artificial Sequence
  Description of Artificial Sequence: Synthetic oligonucleotide
  Target: LAMA2; (+) strand; PAM type: YTN; PAM sequence: CTC
ttttaaaatttgcctaaaat

SEQ ID NO: 395236 - DNA, 20 bp, Artificial Sequence
  Description of Artificial Sequence: Synthetic oligonucleotide
  Target: LAMA2; (+) strand; PAM type: YTN; PAM sequence: CTT
ttaaaatttgcctaaaataa

SEQ ID NO: 395237 - DNA, 20 bp, Artificial Sequence
  Description of Artificial Sequence: Synthetic oligonucleotide
  Target: LAMA2; (+) strand; PAM type: YTN; PAM sequence: TTT
taaaatttgcctaaaataaa

SEQ ID NO: 395238 - DNA, 20 bp, Artificial Sequence
  Description of Artificial Sequence: Synthetic oligonucleotide
  Target: LAMA2; (+) strand; PAM type: YTN; PAM sequence: TTT
aaaatttgcctaaaataaat

SEQ ID NO: 395239 - DNA, 20 bp, Artificial Sequence
  Description of Artificial Sequence: Synthetic oligonucleotide
  Target: LAMA2; (+) strand; PAM type: YTN; PAM sequence: TTA
aaatttgcctaaaataaatt

SEQ ID NO: 395240 - DNA, 20 bp, Artificial Sequence
  Description of Artificial Sequence: Synthetic oligonucleotide
  Target: LAMA2; (+) strand; PAM type: YTN; PAM sequence: TTT
gcctaaaataaattctcggt

SEQ ID NO: 395241 - DNA, 20 bp, Artificial Sequence
  Description of Artificial Sequence: Synthetic oligonucleotide
  Target: LAMA2; (+) strand; PAM type: YTN; PAM sequence: TTG
cctaaaataaattctcggta

SEQ ID NO: 395242 - DNA, 20 bp, Artificial Sequence
  Description of Artificial Sequence: Synthetic oligonucleotide
  Target: LAMA2; (+) strand; PAM type: YTN; PAM sequence: CTA
aaataaattctcggtatgct

SEQ ID NO: 395243 - DNA, 20 bp, Artificial Sequence
  Description of Artificial Sequence: Synthetic oligonucleotide
  Target: LAMA2; (+) strand; PAM type: YTN; PAM sequence: TTC
tcggtatgctataattatag

SEQ ID NO: 395244 - DNA, 20 bp, Artificial Sequence
  Description of Artificial Sequence: Synthetic oligonucleotide
  Target: LAMA2; (+) strand; PAM type: YTN; PAM sequence: CTC
ggtatgctataattatagca

SEQ ID NO: 395245 - DNA, 20 bp, Artificial Sequence
  Description of Artificial Sequence: Synthetic oligonucleotide
  Target: LAMA2; (+) strand; PAM type: YTN; PAM sequence: CTA
taattatagcagaactcttt

SEQ ID NO: 395246 - DNA, 20 bp, Artificial Sequence
  Description of Artificial Sequence: Synthetic oligonucleotide
  Target: LAMA2; (+) strand; PAM type: YTN; PAM sequence: TTA
tagcagaactcttttctcag

SEQ ID NO: 395247 - DNA, 20 bp, Artificial Sequence
  Description of Artificial Sequence: Synthetic oligonucleotide
  Target: LAMA2; (+) strand; PAM type: YTN; PAM sequence: CTC
ttttctcagtcacccactac

SEQ ID NO: 395248 - DNA, 20 bp, Artificial Sequence
  Description of Artificial Sequence: Synthetic oligonucleotide
  Target: LAMA2; (+) strand; PAM type: YTN; PAM sequence: CTT
ttctcagtcacccactacca

SEQ ID NO: 395249 - DNA, 20 bp, Artificial Sequence
  Description of Artificial Sequence: Synthetic oligonucleotide
  Target: LAMA2; (+) strand; PAM type: YTN; PAM sequence: TTT
tctcagtcacccactaccac

SEQ ID NO: 395250 - DNA, 20 bp, Artificial Sequence
  Description of Artificial Sequence: Synthetic oligonucleotide
  Target: LAMA2; (+) strand; PAM type: YTN; PAM sequence: TTT
ctcagtcacccactaccact

SEQ ID NO: 395251 - DNA, 20 bp, Artificial Sequence
  Description of Artificial Sequence: Synthetic oligonucleotide
  Target: LAMA2; (+) strand; PAM type: YTN; PAM sequence: TTC
tcagtcacccactaccactg

SEQ ID NO: 395252 - DNA, 20 bp, Artificial Sequence
  Description of Artificial Sequence: Synthetic oligonucleotide
  Target: LAMA2; (+) strand; PAM type: YTN; PAM sequence: CTC
agtcacccactaccactgtt

SEQ ID NO: 395253 - DNA, 20 bp, Artificial Sequence
  Description of Artificial Sequence: Synthetic oligonucleotide
  Target: LAMA2; (+) strand; PAM type: YTN; PAM sequence: CTA
ccactgttagggtcttaaaa

SEQ ID NO: 395254 - DNA, 20 bp, Artificial Sequence
  Description of Artificial Sequence: Synthetic oligonucleotide
  Target: LAMA2; (+) strand; PAM type: YTN; PAM sequence: CTG
ttagggtcttaaaattatct

SEQ ID NO: 395255 - DNA, 20 bp, Artificial Sequence
  Description of Artificial Sequence: Synthetic oligonucleotide
  Target: LAMA2; (+) strand; PAM type: YTN; PAM sequence: TTA
gggtcttaaaattatctcag

SEQ ID NO: 395256 - DNA, 20 bp, Artificial Sequence
  Description of Artificial Sequence: Synthetic oligonucleotide
  Target: LAMA2; (+) strand; PAM type: YTN; PAM sequence: CTT
aaaattatctcagaaaccaa

SEQ ID NO: 395257 - DNA, 20 bp, Artificial Sequence
  Description of Artificial Sequence: Synthetic oligonucleotide
  Target: LAMA2; (+) strand; PAM type: YTN; PAM sequence: TTA
aaattatctcagaaaccaag

SEQ ID NO: 395258 - DNA, 20 bp, Artificial Sequence
  Description of Artificial Sequence: Synthetic oligonucleotide
  Target: LAMA2; (+) strand; PAM type: YTN; PAM sequence: TTA
tctcagaaaccaagcaagtt

SEQ ID NO: 395259 - DNA, 20 bp, Artificial Sequence
  Description of Artificial Sequence: Synthetic oligonucleotide
  Target: LAMA2; (+) strand; PAM type: YTN; PAM sequence: CTC
agaaaccaagcaagtttgtg

SEQ ID NO: 395260 - DNA, 20 bp, Artificial Sequence
  Description of Artificial Sequence: Synthetic oligonucleotide
  Target: LAMA2; (+) strand; PAM type: YTN; PAM sequence: TTT
gtgctaccaactcacaaaat

SEQ ID NO: 395261 - DNA, 20 bp, Artificial Sequence
  Description of Artificial Sequence: Synthetic oligonucleotide
  Target: LAMA2; (+) strand; PAM type: YTN; PAM sequence: TTG
tgctaccaactcacaaaata

SEQ ID NO: 395262 - DNA, 20 bp, Artificial Sequence
  Description of Artificial Sequence: Synthetic oligonucleotide
  Target: LAMA2; (+) strand; PAM type: YTN; PAM sequence: CTA
ccaactcacaaaataaaaca

SEQ ID NO: 395263 - DNA, 20 bp, Artificial Sequence
  Description of Artificial Sequence: Synthetic oligonucleotide
  Target: LAMA2; (+) strand; PAM type: YTN; PAM sequence: CTC
acaaaataaaacaggcaaag

SEQ ID NO: 395264 - DNA, 20 bp, Artificial Sequence
  Description of Artificial Sequence: Synthetic oligonucleotide
  Target: LAMA2; (+) strand; PAM type: YTN; PAM sequence: CTC
tggatagggaattttatcac

SEQ ID NO: 395265 - DNA, 20 bp, Artificial Sequence
  Description of Artificial Sequence: Synthetic oligonucleotide
  Target: LAMA2; (+) strand; PAM type: YTN; PAM sequence: CTG
gatagggaattttatcacca

SEQ ID NO: 395266 - DNA, 20 bp, Artificial Sequence
  Description of Artificial Sequence: Synthetic oligonucleotide
  Target: LAMA2; (+) strand; PAM type: YTN; PAM sequence: TTT
tatcaccattatctcaaatg

SEQ ID NO: 395267 - DNA, 20 bp, Artificial Sequence
  Description of Artificial Sequence: Synthetic oligonucleotide
  Target: LAMA2; (+) strand; PAM type: YTN; PAM sequence: TTT
atcaccattatctcaaatgg

SEQ ID NO: 395268 - DNA, 20 bp, Artificial Sequence
  Description of Artificial Sequence: Synthetic oligonucleotide
  Target: LAMA2; (+) strand; PAM type: YTN; PAM sequence: TTA
tcaccattatctcaaatggc

SEQ ID NO: 395269 - DNA, 20 bp, Artificial Sequence
  Description of Artificial Sequence: Synthetic oligonucleotide
  Target: LAMA2; (+) strand; PAM type: YTN; PAM sequence: TTA
tctcaaatggcattagtaaa

SEQ ID NO: 395270 - DNA, 20 bp, Artificial Sequence
  Description of Artificial Sequence: Synthetic oligonucleotide
  Target: LAMA2; (+) strand; PAM type: YTN; PAM sequence: CTC
aaatggcattagtaaaaaag

SEQ ID NO: 395271 - DNA, 20 bp, Artificial Sequence
  Description of Artificial Sequence: Synthetic oligonucleotide
  Target: LAMA2; (+) strand; PAM type: YTN; PAM sequence: TTA
gtaaaaaagaaaaaaaagta

SEQ ID NO: 395272 - DNA, 20 bp, Artificial Sequence
  Description of Artificial Sequence: Synthetic oligonucleotide
  Target: LAMA2; (+) strand; PAM type: YTN; PAM sequence: TTG
tatataatcacacacaaatt

SEQ ID NO: 395273 - DNA, 20 bp, Artificial Sequence
  Description of Artificial Sequence: Synthetic oligonucleotide
  Target: LAMA2; (+) strand; PAM type: YTN; PAM sequence: TTG
gttacatatgaagtttggct

SEQ ID NO: 395274 - DNA, 20 bp, Artificial Sequence
  Description of Artificial Sequence: Synthetic oligonucleotide
  Target: LAMA2; (+) strand; PAM type: YTN; PAM sequence: TTA
catatgaagtttggctataa

SEQ ID NO: 395275 - DNA, 20 bp, Artificial Sequence
  Description of Artificial Sequence: Synthetic oligonucleotide
  Target: LAMA2; (+) strand; PAM type: YTN; PAM sequence: TTT
ggctataaaattcacttttt

SEQ ID NO: 395276 - DNA, 20 bp, Artificial Sequence
  Description of Artificial Sequence: Synthetic oligonucleotide
  Target: LAMA2; (+) strand; PAM type: YTN; PAM sequence: TTG
gctataaaattcacttttta

SEQ ID NO: 395277 - DNA, 20 bp, Artificial Sequence
  Description of Artificial Sequence: Synthetic oligonucleotide
  Target: LAMA2; (+) strand; PAM type: YTN; PAM sequence: CTA
taaaattcactttttaataa

SEQ ID NO: 395278 - DNA, 20 bp, Artificial Sequence
  Description of Artificial Sequence: Synthetic oligonucleotide
  Target: LAMA2; (+) strand; PAM type: YTN; PAM sequence: TTC
actttttaataaaaacatac

SEQ ID NO: 395279 - DNA, 20 bp, Artificial Sequence
  Description of Artificial Sequence: Synthetic oligonucleotide
  Target: LAMA2; (+) strand; PAM type: YTN; PAM sequence: CTT
tttaataaaaacatactgga

SEQ ID NO: 395280 - DNA, 20 bp, Artificial Sequence
  Description of Artificial Sequence: Synthetic oligonucleotide
  Target: LAMA2; (+) strand; PAM type: YTN; PAM sequence: TTT
ttaataaaaacatactggat

SEQ ID NO: 395281 - DNA, 20 bp, Artificial Sequence
  Description of Artificial Sequence: Synthetic oligonucleotide
  Target: LAMA2; (+) strand; PAM type: YTN; PAM sequence: TTT
taataaaaacatactggatc

SEQ ID NO: 395282 - DNA, 20 bp, Artificial Sequence
  Description of Artificial Sequence: Synthetic oligonucleotide
  Target: LAMA2; (+) strand; PAM type: YTN; PAM sequence: TTT
aataaaaacatactggatca

SEQ ID NO: 395283 - DNA, 20 bp, Artificial Sequence
  Description of Artificial Sequence: Synthetic oligonucleotide
  Target: LAMA2; (+) strand; PAM type: YTN; PAM sequence: TTA
ataaaaacatactggatcat

SEQ ID NO: 395284 - DNA, 20 bp, Artificial Sequence
  Description of Artificial Sequence: Synthetic oligonucleotide
  Target: LAMA2; (+) strand; PAM type: YTN; PAM sequence: CTG
gatcatatgcttctaaacaa

SEQ ID NO: 395285 - DNA, 20 bp, Artificial Sequence
  Description of Artificial Sequence: Synthetic oligonucleotide
  Target: LAMA2; (+) strand; PAM type: YTN; PAM sequence: CTT
ctaaacaatttataccatgt

SEQ ID NO: 395286 - DNA, 20 bp, Artificial Sequence
  Description of Artificial Sequence: Synthetic oligonucleotide
  Target: LAMA2; (+) strand; PAM type: YTN; PAM sequence: TTC
taaacaatttataccatgtt

SEQ ID NO: 395287 - DNA, 20 bp, Artificial Sequence
  Description of Artificial Sequence: Synthetic oligonucleotide
  Target: LAMA2; (+) strand; PAM type: YTN; PAM sequence: CTA
aacaatttataccatgttta

SEQ ID NO: 395288 - DNA, 20 bp, Artificial Sequence
  Description of Artificial Sequence: Synthetic oligonucleotide
  Target: LAMA2; (+) strand; PAM type: YTN; PAM sequence: TTT
ataccatgtttatgaattaa

SEQ ID NO: 395289 - DNA, 20 bp, Artificial Sequence
  Description of Artificial Sequence: Synthetic oligonucleotide
  Target: LAMA2; (+) strand; PAM type: YTN; PAM sequence: TTA
taccatgtttatgaattaat

SEQ ID NO: 395290 - DNA, 20 bp, Artificial Sequence
  Description of Artificial Sequence: Synthetic oligonucleotide
  Target: LAMA2; (+) strand; PAM type: YTN; PAM sequence: TTT
atgaattaatgaatttttat

SEQ ID NO: 395291 - DNA, 20 bp, Artificial Sequence
  Description of Artificial Sequence: Synthetic oligonucleotide
  Target: LAMA2; (+) strand; PAM type: YTN; PAM sequence: TTA
tgaattaatgaatttttatg

SEQ ID NO: 395292 - DNA, 20 bp, Artificial Sequence
  Description of Artificial Sequence: Synthetic oligonucleotide
  Target: LAMA2; (+) strand; PAM type: YTN; PAM sequence: TTA
atgaatttttatgaattttt

SEQ ID NO: 395293 - DNA, 20 bp, Artificial Sequence
  Description of Artificial Sequence: Synthetic oligonucleotide
  Target: LAMA2; (+) strand; PAM type: YTN; PAM sequence: TTT
ttatgaatttttgaattaaa

SEQ ID NO: 395294 - DNA, 20 bp, Artificial Sequence
  Description of Artificial Sequence: Synthetic oligonucleotide
  Target: LAMA2; (+) strand; PAM type: YTN; PAM sequence: TTT
tatgaatttttgaattaaaa

SEQ ID NO: 395295 - DNA, 20 bp, Artificial Sequence
  Description of Artificial Sequence: Synthetic oligonucleotide
  Target: LAMA2; (+) strand; PAM type: YTN; PAM sequence: TTT
atgaatttttgaattaaaaa

SEQ ID NO: 395296 - DNA, 20 bp, Artificial Sequence
  Description of Artificial Sequence: Synthetic oligonucleotide
  Target: LAMA2; (+) strand; PAM type: YTN; PAM sequence: TTA
tgaatttttgaattaaaaag

SEQ ID NO: 395297 - DNA, 20 bp, Artificial Sequence
  Description of Artificial Sequence: Synthetic oligonucleotide
  Target: LAMA2; (+) strand; PAM type: YTN; PAM sequence: TTT
ttgaattaaaaagctcttaa

SEQ ID NO: 395298 - DNA, 20 bp, Artificial Sequence
  Description of Artificial Sequence: Synthetic oligonucleotide
  Target: LAMA2; (+) strand; PAM type: YTN; PAM sequence: TTT
tgaattaaaaagctcttaac

SEQ ID NO: 395299 - DNA, 20 bp, Artificial Sequence
  Description of Artificial Sequence: Synthetic oligonucleotide
  Target: LAMA2; (+) strand; PAM type: YTN; PAM sequence: TTT
gaattaaaaagctcttaacc

SEQ ID NO: 395300 - DNA, 20 bp, Artificial Sequence
  Description of Artificial Sequence: Synthetic oligonucleotide
  Target: LAMA2; (+) strand; PAM type: YTN; PAM sequence: TTG
aattaaaaagctcttaacct

SEQ ID NO: 395301 - DNA, 20 bp, Artificial Sequence
  Description of Artificial Sequence: Synthetic oligonucleotide
  Target: LAMA2; (+) strand; PAM type: YTN; PAM sequence: TTA
aaaagctcttaacctttggc

SEQ ID NO: 395302 - DNA, 20 bp, Artificial Sequence
  Description of Artificial Sequence: Synthetic oligonucleotide
  Target: LAMA2; (+) strand; PAM type: YTN; PAM sequence: CTC
ttaacctttggctacaatca

SEQ ID NO: 395303 - DNA, 20 bp, Artificial Sequence
  Description of Artificial Sequence: Synthetic oligonucleotide
  Target: LAMA2; (+) strand; PAM type: YTN; PAM sequence: CTT
aacctttggctacaatcatt

SEQ ID NO: 395304 - DNA, 20 bp, Artificial Sequence
  Description of Artificial Sequence: Synthetic oligonucleotide
  Target: LAMA2; (+) strand; PAM type: YTN; PAM sequence: TTA
acctttggctacaatcattg

SEQ ID NO: 395305 - DNA, 20 bp, Artificial Sequence
  Description of Artificial Sequence: Synthetic oligonucleotide
  Target: LAMA2; (+) strand; PAM type: YTN; PAM sequence: CTT
tggctacaatcattgttcgt

SEQ ID NO: 395306 - DNA, 20 bp, Artificial Sequence
  Description of Artificial Sequence: Synthetic oligonucleotide
  Target: LAMA2; (+) strand; PAM type: YTN; PAM sequence: TTT
ggctacaatcattgttcgta

SEQ ID NO: 395307 - DNA, 20 bp, Artificial Sequence
  Description of Artificial Sequence: Synthetic oligonucleotide
  Target: LAMA2; (+) strand; PAM type: YTN; PAM sequence: TTG
gctacaatcattgttcgtaa

SEQ ID NO: 395308 - DNA, 20 bp, Artificial Sequence
  Description of Artificial Sequence: Synthetic oligonucleotide
  Target: LAMA2; (+) strand; PAM type: YTN; PAM sequence: CTA
caatcattgttcgtaataca

SEQ ID NO: 395309 - DNA, 20 bp, Artificial Sequence
  Description of Artificial Sequence: Synthetic oligonucleotide
  Target: LAMA2; (+) strand; PAM type: YTN; PAM sequence: TTG
ttcgtaatacatttggaaca

SEQ ID NO: 395310 - DNA, 20 bp, Artificial Sequence
  Description of Artificial Sequence: Synthetic oligonucleotide
  Target: LAMA2; (+) strand; PAM type: YTN; PAM sequence: TTC
gtaatacatttggaacaagt

SEQ ID NO: 395311 - DNA, 20 bp, Artificial Sequence
  Description of Artificial Sequence: Synthetic oligonucleotide
  Target: LAMA2; (+) strand; PAM type: YTN; PAM sequence: TTT
ggaacaagtattttagagtt

SEQ ID NO: 395312 - DNA, 20 bp, Artificial Sequence
  Description of Artificial Sequence: Synthetic oligonucleotide
  Target: LAMA2; (+) strand; PAM type: YTN; PAM sequence: TTG
gaacaagtattttagagttt

SEQ ID NO: 395313 - DNA, 20 bp, Artificial Sequence
  Description of Artificial Sequence: Synthetic oligonucleotide
  Target: LAMA2; (+) strand; PAM type: YTN; PAM sequence: TTT
tagagtttgggcattccaag

SEQ ID NO: 395314 - DNA, 20 bp, Artificial Sequence
  Description of Artificial Sequence: Synthetic oligonucleotide
  Target: LAMA2; (+) strand; PAM type: YTN; PAM sequence: TTT
agagtttgggcattccaagt

SEQ ID NO: 395315 - DNA, 20 bp, Artificial Sequence
  Description of Artificial Sequence: Synthetic oligonucleotide
  Target: LAMA2; (+) strand; PAM type: YTN; PAM sequence: TTA
gagtttgggcattccaagtt

SEQ ID NO: 395316 - DNA, 20 bp, Artificial Sequence
  Description of Artificial Sequence: Synthetic oligonucleotide
  Target: LAMA2; (+) strand; PAM type: YTN; PAM sequence: TTT
gggcattccaagttctatca

SEQ ID NO: 395317 - DNA, 20 bp, Artificial Sequence
  Description of Artificial Sequence: Synthetic oligonucleotide
  Target: LAMA2; (+) strand; PAM type: YTN; PAM sequence: TTG
ggcattccaagttctatcac

SEQ ID NO: 395318 - DNA, 20 bp, Artificial Sequence
  Description of Artificial Sequence: Synthetic oligonucleotide
  Target: LAMA2; (+) strand; PAM type: YTN; PAM sequence: TTC
caagttctatcacattattt

SEQ ID NO: 395319 - DNA, 20 bp, Artificial Sequence
  Description of Artificial Sequence: Synthetic oligonucleotide
  Target: LAMA2; (+) strand; PAM type: YTN; PAM sequence: TTC
tatcacattatttgaatgcc

SEQ ID NO: 395320 - DNA, 20 bp, Artificial Sequence
  Description of Artificial Sequence: Synthetic oligonucleotide
  Target: LAMA2; (+) strand; PAM type: YTN; PAM sequence: CTA
tcacattatttgaatgcctt

SEQ ID NO: 395321 - DNA, 20 bp, Artificial Sequence
  Description of Artificial Sequence: Synthetic oligonucleotide
  Target: LAMA2; (+) strand; PAM type: YTN; PAM sequence: TTA
tttgaatgccttcaatggtg

SEQ ID NO: 395322 - DNA, 20 bp, Artificial Sequence
  Description of Artificial Sequence: Synthetic oligonucleotide
  Target: LAMA2; (+) strand; PAM type: YTN; PAM sequence: TTT
gaatgccttcaatggtgaca

SEQ ID NO: 395323 - DNA, 20 bp, Artificial Sequence
  Description of Artificial Sequence: Synthetic oligonucleotide
  Target: LAMA2; (+) strand; PAM type: YTN; PAM sequence: TTG
aatgccttcaatggtgacaa

SEQ ID NO: 395324 - DNA, 20 bp, Artificial Sequence
  Description of Artificial Sequence: Synthetic oligonucleotide
  Target: LAMA2; (+) strand; PAM type: YTN; PAM sequence: CTT
caatggtgacaaatctttat

SEQ ID NO: 395325 - DNA, 20 bp, Artificial Sequence
  Description of Artificial Sequence: Synthetic oligonucleotide
  Target: LAMA2; (+) strand; PAM type: YTN; PAM sequence: TTC
aatggtgacaaatctttatg

SEQ ID NO: 395326 - DNA, 20 bp, Artificial Sequence
  Description of Artificial Sequence: Synthetic oligonucleotide
  Target: LAMA2; (+) strand; PAM type: YTN; PAM sequence: CTT
tatgctttagatgtaaagca

SEQ ID NO: 395327 - DNA, 20 bp, Artificial Sequence
  Description of Artificial Sequence: Synthetic oligonucleotide
  Target: LAMA2; (+) strand; PAM type: YTN; PAM sequence: TTT
atgctttagatgtaaagcaa

SEQ ID NO: 395328 - DNA, 20 bp, Artificial Sequence
  Description of Artificial Sequence: Synthetic oligonucleotide
  Target: LAMA2; (+) strand; PAM type: YTN; PAM sequence: TTA
tgctttagatgtaaagcaac

SEQ ID NO: 395329 - DNA, 20 bp, Artificial Sequence
  Description of Artificial Sequence: Synthetic oligonucleotide
  Target: LAMA2; (+) strand; PAM type: YTN; PAM sequence: CTT
tagatgtaaagcaacatttt

SEQ ID NO: 395330 - DNA, 20 bp, Artificial Sequence
  Description of Artificial Sequence: Synthetic oligonucleotide
  Target: LAMA2; (+) strand; PAM type: YTN; PAM sequence: TTT
agatgtaaagcaacattttg

SEQ ID NO: 395331 - DNA, 20 bp, Artificial Sequence
  Description of Artificial Sequence: Synthetic oligonucleotide
  Target: LAMA2; (+) strand; PAM type: YTN; PAM sequence: TTA
gatgtaaagcaacattttgt

SEQ ID NO: 395332 - DNA, 20 bp, Artificial Sequence
  Description of Artificial Sequence: Synthetic oligonucleotide
  Target: LAMA2; (+) strand; PAM type: YTN; PAM sequence: TTT
tgtacatgagttgtgtgata

SEQ ID NO: 395333 - DNA, 20 bp, Artificial Sequence
  Description of Artificial Sequence: Synthetic oligonucleotide
  Target: LAMA2; (+) strand; PAM type: YTN; PAM sequence: TTT
gtacatgagttgtgtgatag

SEQ ID NO: 395334 - DNA, 20 bp, Artificial Sequence
  Description of Artificial Sequence: Synthetic oligonucleotide
  Target: LAMA2; (+) strand; PAM type: YTN; PAM sequence: TTG
tacatgagttgtgtgatagt

SEQ ID NO: 395335 - DNA, 20 bp, Artificial Sequence
  Description of Artificial Sequence: Synthetic oligonucleotide
  Target: LAMA2; (+) strand; PAM type: YTN; PAM sequence: TTG
tgtgatagtaagttggtagt

SEQ ID NO: 395336 - DNA, 20 bp, Artificial Sequence
  Description of Artificial Sequence: Synthetic oligonucleotide
  Target: LAMA2; (+) strand; PAM type: YTN; PAM sequence: TTG
gtagtactatttcaggttaa

SEQ ID NO: 395337 - DNA, 20 bp, Artificial Sequence
  Description of Artificial Sequence: Synthetic oligonucleotide
  Target: LAMA2; (+) strand; PAM type: YTN; PAM sequence: CTA
tttcaggttaaaaaaatctc

SEQ ID NO: 395338 - DNA, 20 bp, Artificial Sequence
  Description of Artificial Sequence: Synthetic oligonucleotide
  Target: LAMA2; (+) strand; PAM type: YTN; PAM sequence: TTT
caggttaaaaaaatctcata

SEQ ID NO: 395339 - DNA, 20 bp, Artificial Sequence
  Description of Artificial Sequence: Synthetic oligonucleotide
  Target: LAMA2; (+) strand; PAM type: YTN; PAM sequence: TTC
aggttaaaaaaatctcatag

SEQ ID NO: 395340 - DNA, 20 bp, Artificial Sequence
  Description of Artificial Sequence: Synthetic oligonucleotide
  Target: LAMA2; (+) strand; PAM type: YTN; PAM sequence: TTA
aaaaaatctcataggaatca

SEQ ID NO: 395341 - DNA, 20 bp, Artificial Sequence
  Description of Artificial Sequence: Synthetic oligonucleotide
  Target: LAMA2; (+) strand; PAM type: YTN; PAM sequence: CTC
ataggaatcatcctgaataa

SEQ ID NO: 395342 - DNA, 20 bp, Artificial Sequence
  Description of Artificial Sequence: Synthetic oligonucleotide
  Target: LAMA2; (+) strand; PAM type: YTN; PAM sequence: CTG
aataaaatgttcagaaccat

SEQ ID NO: 395343 - DNA, 20 bp, Artificial Sequence
  Description of Artificial Sequence: Synthetic oligonucleotide
  Target: LAMA2; (+) strand; PAM type: YTN; PAM sequence: TTC
agaaccatcatttatttatt

SEQ ID NO: 395344 - DNA, 20 bp, Artificial Sequence
  Description of Artificial Sequence: Synthetic oligonucleotide
  Target: LAMA2; (+) strand; PAM type: YTN; PAM sequence: TTT
atttattttgtttcacatag

SEQ ID NO: 395345 - DNA, 20 bp, Artificial Sequence
  Description of Artificial Sequence: Synthetic oligonucleotide
  Target: LAMA2; (+) strand; PAM type: YTN; PAM sequence: TTA
tttattttgtttcacataga

SEQ ID NO: 395346 - DNA, 20 bp, Artificial Sequence
  Description of Artificial Sequence: Synthetic oligonucleotide
  Target: LAMA2; (+) strand; PAM type: YTN; PAM sequence: TTT
attttgtttcacatagaacc

SEQ ID NO: 395347 - DNA, 20 bp, Artificial Sequence
  Description of Artificial Sequence: Synthetic oligonucleotide
  Target: LAMA2; (+) strand; PAM type: YTN; PAM sequence: TTA
ttttgtttcacatagaacct

SEQ ID NO: 395348 - DNA, 20 bp, Artificial Sequence
  Description of Artificial Sequence: Synthetic oligonucleotide
  Target: LAMA2; (+) strand; PAM type: YTN; PAM sequence: TTT
tgtttcacatagaacctacc

SEQ ID NO: 395349 - DNA, 20 bp, Artificial Sequence
  Description of Artificial Sequence: Synthetic oligonucleotide
  Target: LAMA2; (+) strand; PAM type: YTN; PAM sequence: TTT
gtttcacatagaacctacca

SEQ ID NO: 395350 - DNA, 20 bp, Artificial Sequence
  Description of Artificial Sequence: Synthetic oligonucleotide
  Target: LAMA2; (+) strand; PAM type: YTN; PAM sequence: TTG
tttcacatagaacctaccaa

SEQ ID NO: 395351 - DNA, 20 bp, Artificial Sequence
  Description of Artificial Sequence: Synthetic oligonucleotide
  Target: LAMA2; (+) strand; PAM type: YTN; PAM sequence: TTT
cacatagaacctaccaaaca

SEQ ID NO: 395352 - DNA, 20 bp, Artificial Sequence
  Description of Artificial Sequence: Synthetic oligonucleotide
  Target: LAMA2; (+) strand; PAM type: YTN; PAM sequence: TTC
acatagaacctaccaaacac

SEQ ID NO: 395353 - DNA, 20 bp, Artificial Sequence
  Description of Artificial Sequence: Synthetic oligonucleotide
  Target: LAMA2; (+) strand; PAM type: YTN; PAM sequence: CTA
ccaaacacatgagaattttt

SEQ ID NO: 395354 - DNA, 20 bp, Artificial Sequence
  Description of Artificial Sequence: Synthetic oligonucleotide
  Target: LAMA2; (+) strand; PAM type: YTN; PAM sequence: TTT
tttgggggagaaatctgatt

SEQ ID NO: 395355 - DNA, 20 bp, Artificial Sequence
  Description of Artificial Sequence: Synthetic oligonucleotide
  Target: LAMA2; (+) strand; PAM type: YTN; PAM sequence: TTT
ttgggggagaaatctgattg

SEQ ID NO: 395356 - DNA, 20 bp, Artificial Sequence
  Description of Artificial Sequence: Synthetic oligonucleotide
  Target: LAMA2; (+) strand; PAM type: YTN; PAM sequence: TTT
tgggggagaaatctgattgg

SEQ ID NO: 395357 - DNA, 20 bp, Artificial Sequence
  Description of Artificial Sequence: Synthetic oligonucleotide
  Target: LAMA2; (+) strand; PAM type: YTN; PAM sequence: TTT
gggggagaaatctgattgga

SEQ ID NO: 395358 - DNA, 20 bp, Artificial Sequence
  Description of Artificial Sequence: Synthetic oligonucleotide
  Target: LAMA2; (+) strand; PAM type: YTN; PAM sequence: TTG
ggggagaaatctgattggac

SEQ ID NO: 395359 - DNA, 20 bp, Artificial Sequence
  Description of Artificial Sequence: Synthetic oligonucleotide
  Target: LAMA2; (+) strand; PAM type: YTN; PAM sequence: CTG
attggacatttgactgtgag

SEQ ID NO: 395360 - DNA, 20 bp, Artificial Sequence
  Description of Artificial Sequence: Synthetic oligonucleotide
  Target: LAMA2; (+) strand; PAM type: YTN; PAM sequence: TTG
gacatttgactgtgagtgaa

SEQ ID NO: 395361 - DNA, 20 bp, Artificial Sequence
  Description of Artificial Sequence: Synthetic oligonucleotide
  Target: LAMA2; (+) strand; PAM type: YTN; PAM sequence: TTT
gactgtgagtgaaatacaca

SEQ ID NO: 395362 - DNA, 20 bp, Artificial Sequence
  Description of Artificial Sequence: Synthetic oligonucleotide
  Target: LAMA2; (+) strand; PAM type: YTN; PAM sequence: TTG
actgtgagtgaaatacacat

SEQ ID NO: 395363 - DNA, 20 bp, Artificial Sequence
  Description of Artificial Sequence: Synthetic oligonucleotide
  Target: LAMA2; (+) strand; PAM type: YTN; PAM sequence: CTG
tgagtgaaatacacataagc

SEQ ID NO: 395364 - DNA, 20 bp, Artificial Sequence
  Description of Artificial Sequence: Synthetic oligonucleotide
  Target: LAMA2; (+) strand; PAM type: YTN; PAM sequence: TTA
aagaaactgatcaatatttt

SEQ ID NO: 395365 - DNA, 20 bp, Artificial Sequence
  Description of Artificial Sequence: Synthetic oligonucleotide
  Target: LAMA2; (+) strand; PAM type: YTN; PAM sequence: CTG
atcaatattttctttgcttc

SEQ ID NO: 395366 - DNA, 20 bp, Artificial Sequence
  Description of Artificial Sequence: Synthetic oligonucleotide
  Target: LAMA2; (+) strand; PAM type: YTN; PAM sequence: TTT
tctttgcttcagtgttgggc

SEQ ID NO: 395367 - DNA, 20 bp, Artificial Sequence
  Description of Artificial Sequence: Synthetic oligonucleotide
  Target: LAMA2; (+) strand; PAM type: YTN; PAM sequence: TTT
ctttgcttcagtgttgggca

SEQ ID NO: 395368 - DNA, 20 bp, Artificial Sequence
  Description of Artificial Sequence: Synthetic oligonucleotide
  Target: LAMA2; (+) strand; PAM type: YTN; PAM sequence: TTC
tttgcttcagtgttgggcaa

SEQ ID NO: 395369 - DNA, 20 bp, Artificial Sequence
  Description of Artificial Sequence: Synthetic oligonucleotide
  Target: LAMA2; (+) strand; PAM type: YTN; PAM sequence: CTT
tgcttcagtgttgggcaaaa

SEQ ID NO: 395370 - DNA, 20 bp, Artificial Sequence
  Description of Artificial Sequence: Synthetic oligonucleotide
  Target: LAMA2; (+) strand; PAM type: YTN; PAM sequence: TTT
gcttcagtgttgggcaaaaa

SEQ ID NO: 395371 - DNA, 20 bp, Artificial Sequence
  Description of Artificial Sequence: Synthetic oligonucleotide
  Target: LAMA2; (+) strand; PAM type: YTN; PAM sequence: TTG
cttcagtgttgggcaaaaat

SEQ ID NO: 395372 - DNA, 20 bp, Artificial Sequence
  Description of Artificial Sequence: Synthetic oligonucleotide
  Target: LAMA2; (+) strand; PAM type: YTN; PAM sequence: CTT
cagtgttgggcaaaaatact

SEQ ID NO: 395373 - DNA, 20 bp, Artificial Sequence
  Description of Artificial Sequence: Synthetic oligonucleotide
  Target: LAMA2; (+) strand; PAM type: YTN; PAM sequence: TTC
agtgttgggcaaaaatactt

SEQ ID NO: 395374 - DNA, 20 bp, Artificial Sequence
  Description of Artificial Sequence: Synthetic oligonucleotide
  Target: LAMA2; (+) strand; PAM type: YTN; PAM sequence: TTG
ggcaaaaatactttctagga

SEQ ID NO: 395375 - DNA, 20 bp, Artificial Sequence
  Description of Artificial Sequence: Synthetic oligonucleotide
  Target: LAMA2; (+) strand; PAM type: YTN; PAM sequence: CTT
tctaggatttaggggatatt

SEQ ID NO: 395376 - DNA, 20 bp, Artificial Sequence
  Description of Artificial Sequence: Synthetic oligonucleotide
  Target: LAMA2; (+) strand; PAM type: YTN; PAM sequence: TTT
ctaggatttaggggatatta

SEQ ID NO: 395377 - DNA, 20 bp, Artificial Sequence
  Description of Artificial Sequence: Synthetic oligonucleotide
  Target: LAMA2; (+) strand; PAM type: YTN; PAM sequence: TTC
taggatttaggggatattag

SEQ ID NO: 395378 - DNA, 20 bp, Artificial Sequence
  Description of Artificial Sequence: Synthetic oligonucleotide
  Target: LAMA2; (+) strand; PAM type: YTN; PAM sequence: CTA
ggatttaggggatattagag

SEQ ID NO: 395379 - DNA, 20 bp, Artificial Sequence
  Description of Artificial Sequence: Synthetic oligonucleotide
  Target: LAMA2; (+) strand; PAM type: YTN; PAM sequence: TTT
aggggatattagagatatcc

SEQ ID NO: 395380 - DNA, 20 bp, Artificial Sequence
  Description of Artificial Sequence: Synthetic oligonucleotide
  Target: LAMA2; (+) strand; PAM type: YTN; PAM sequence: TTA
ggggatattagagatatccc

SEQ ID NO: 395381 - DNA, 20 bp, Artificial Sequence
  Description of Artificial Sequence: Synthetic oligonucleotide
  Target: LAMA2; (+) strand; PAM type: YTN; PAM sequence: TTA
gagatatcccctaaatgaac

SEQ ID NO: 395382 - DNA, 20 bp, Artificial Sequence
  Description of Artificial Sequence: Synthetic oligonucleotide
  Target: LAMA2; (+) strand; PAM type: YTN; PAM sequence: CTA
aatgaaccagtcttagcagg

SEQ ID NO: 395383 - DNA, 20 bp, Artificial Sequence
  Description of Artificial Sequence: Synthetic oligonucleotide
  Target: LAMA2; (+) strand; PAM type: YTN; PAM sequence: CTT
agcaggttcattttgtgatc

SEQ ID NO: 395384 - DNA, 20 bp, Artificial Sequence
  Description of Artificial Sequence: Synthetic oligonucleotide
  Target: LAMA2; (+) strand; PAM type: YTN; PAM sequence: TTA
gcaggttcattttgtgatca

SEQ ID NO: 395385 - DNA, 20 bp, Artificial Sequence
  Description of Artificial Sequence: Synthetic oligonucleotide
  Target: LAMA2; (+) strand; PAM type: YTN; PAM sequence: TTC
attttgtgatcataatgaaa

SEQ ID NO: 395386 - DNA, 20 bp, Artificial Sequence
  Description of Artificial Sequence: Synthetic oligonucleotide
  Target: LAMA2; (+) strand; PAM type: YTN; PAM sequence: TTT
tgtgatcataatgaaacatc

SEQ ID NO: 395387 - DNA, 20 bp, Artificial Sequence
  Description of Artificial Sequence: Synthetic oligonucleotide
  Target: LAMA2; (+) strand; PAM type: YTN; PAM sequence: TTT
gtgatcataatgaaacatca

SEQ ID NO: 395388 - DNA, 20 bp, Artificial Sequence
  Description of Artificial Sequence: Synthetic oligonucleotide
  Target: LAMA2; (+) strand; PAM type: YTN; PAM sequence: TTG
tgatcataatgaaacatcat

SEQ ID NO: 395389 - DNA, 20 bp, Artificial Sequence
  Description of Artificial Sequence: Synthetic oligonucleotide
  Target: LAMA2; (+) strand; PAM type: YTN; PAM sequence: TTC
tatgagcaatttgtactgtt

SEQ ID NO: 395390 - DNA, 20 bp, Artificial Sequence
  Description of Artificial Sequence: Synthetic oligonucleotide
  Target: LAMA2; (+) strand; PAM type: YTN; PAM sequence: CTA
tgagcaatttgtactgtttt

SEQ ID NO: 395391 - DNA, 20 bp, Artificial Sequence
  Description of Artificial Sequence: Synthetic oligonucleotide
  Target: LAMA2; (+) strand; PAM type: YTN; PAM sequence: TTT
gtactgtttttggtttctct

SEQ ID NO: 395392 - DNA, 20 bp, Artificial Sequence
  Description of Artificial Sequence: Synthetic oligonucleotide
  Target: LAMA2; (+) strand; PAM type: YTN; PAM sequence: TTG
tactgtttttggtttctctt

SEQ ID NO: 395393 - DNA, 20 bp, Artificial Sequence
  Description of Artificial Sequence: Synthetic oligonucleotide
  Target: LAMA2; (+) strand; PAM type: YTN; PAM sequence: CTG
tttttggtttctcttgagtg

SEQ ID NO: 395394 - DNA, 20 bp, Artificial Sequence
  Description of Artificial Sequence: Synthetic oligonucleotide
  Target: LAMA2; (+) strand; PAM type: YTN; PAM sequence: TTT
ttggtttctcttgagtgagc

SEQ ID NO: 395395 - DNA, 20 bp, Artificial Sequence
  Description of Artificial Sequence: Synthetic oligonucleotide
  Target: LAMA2; (+) strand; PAM type: YTN; PAM sequence: TTT
tggtttctcttgagtgagcc

SEQ ID NO: 395396 - DNA, 20 bp, Artificial Sequence
  Description of Artificial Sequence: Synthetic oligonucleotide
  Target: LAMA2; (+) strand; PAM type: YTN; PAM sequence: TTT
ggtttctcttgagtgagccc

SEQ ID NO: 395397 - DNA, 20 bp, Artificial Sequence
  Description of Artificial Sequence: Synthetic oligonucleotide
  Target: LAMA2; (+) strand; PAM type: YTN; PAM sequence: TTG
gtttctcttgagtgagccct

SEQ ID NO: 395398 - DNA, 20 bp, Artificial Sequence
  Description of Artificial Sequence: Synthetic oligonucleotide
  Target: LAMA2; (+) strand; PAM type: YTN; PAM sequence: TTT
ctcttgagtgagccctacta

SEQ ID NO: 395399 - DNA, 20 bp, Artificial Sequence
  Description of Artificial Sequence: Synthetic oligonucleotide
  Target: LAMA2; (+) strand; PAM type: YTN; PAM sequence: TTC
tcttgagtgagccctactaa

SEQ ID NO: 395400 - DNA, 20 bp, Artificial Sequence
  Description of Artificial Sequence: Synthetic oligonucleotide
  Target: LAMA2; (+) strand; PAM type: YTN; PAM sequence: CTC
ttgagtgagccctactaatg

SEQ ID NO: 395401 - DNA, 20 bp, Artificial Sequence
  Description of Artificial Sequence: Synthetic oligonucleotide
  Target: LAMA2; (+) strand; PAM type: YTN; PAM sequence: CTT
gagtgagccctactaatgcc

SEQ ID NO: 395402 - DNA, 20 bp, Artificial Sequence
  Description of Artificial Sequence: Synthetic oligonucleotide
  Target: LAMA2; (+) strand; PAM type: YTN; PAM sequence: TTG
agtgagccctactaatgcca

SEQ ID NO: 395403 - DNA, 20 bp, Artificial Sequence
  Description of Artificial Sequence: Synthetic oligonucleotide
  Target: LAMA2; (+) strand; PAM type: YTN; PAM sequence: CTA
ctaatgccatatgttctgtt

SEQ ID NO: 395404 - DNA, 20 bp, Artificial Sequence
  Description of Artificial Sequence: Synthetic oligonucleotide
  Target: LAMA2; (+) strand; PAM type: YTN; PAM sequence: CTA
atgccatatgttctgttgac

SEQ ID NO: 395405 - DNA, 20 bp, Artificial Sequence
  Description of Artificial Sequence: Synthetic oligonucleotide
  Target: LAMA2; (+) strand; PAM type: YTN; PAM sequence: TTC
tgttgacttcttattcaaaa

SEQ ID NO: 395406 - DNA, 20 bp, Artificial Sequence
  Description of Artificial Sequence: Synthetic oligonucleotide
  Target: LAMA2; (+) strand; PAM type: YTN; PAM sequence: CTG
ttgacttcttattcaaaata

SEQ ID NO: 395407 - DNA, 20 bp, Artificial Sequence
  Description of Artificial Sequence: Synthetic oligonucleotide
  Target: LAMA2; (+) strand; PAM type: YTN; PAM sequence: TTG
acttcttattcaaaatagtg

SEQ ID NO: 395408 - DNA, 20 bp, Artificial Sequence
  Description of Artificial Sequence: Synthetic oligonucleotide
  Target: LAMA2; (+) strand; PAM type: YTN; PAM sequence: CTT
cttattcaaaatagtggcat

SEQ ID NO: 395409 - DNA, 20 bp, Artificial Sequence
  Description of Artificial Sequence: Synthetic oligonucleotide
  Target: LAMA2; (+) strand; PAM type: YTN; PAM sequence: TTC
ttattcaaaatagtggcatg

SEQ ID NO: 395410 - DNA, 20 bp, Artificial Sequence
  Description of Artificial Sequence: Synthetic oligonucleotide
  Target: LAMA2; (+) strand; PAM type: YTN; PAM sequence: CTT
attcaaaatagtggcatgat

SEQ ID NO: 395411 - DNA, 20 bp, Artificial Sequence
  Description of Artificial Sequence: Synthetic oligonucleotide
  Target: LAMA2; (+) strand; PAM type: YTN; PAM sequence: TTA
ttcaaaatagtggcatgatc

SEQ ID NO: 395412 - DNA, 20 bp, Artificial Sequence
  Description of Artificial Sequence: Synthetic oligonucleotide
  Target: LAMA2; (+) strand; PAM type: YTN; PAM sequence: TTC
aaaatagtggcatgatcatt

SEQ ID NO: 395413 - DNA, 20 bp, Artificial Sequence
  Description of Artificial Sequence: Synthetic oligonucleotide
  Target: LAMA2; (+) strand; PAM type: YTN; PAM sequence: TTG
cagaagcatttctatgttca

SEQ ID NO: 395414 - DNA, 20 bp, Artificial Sequence
  Description of Artificial Sequence: Synthetic oligonucleotide
  Target: LAMA2; (+) strand; PAM type: YTN; PAM sequence: TTT
ctatgttcagttatcctttc

SEQ ID NO: 395415 - DNA, 20 bp, Artificial Sequence
  Description of Artificial Sequence: Synthetic oligonucleotide
  Target: LAMA2; (+) strand; PAM type: YTN; PAM sequence: TTC
tatgttcagttatcctttca

SEQ ID NO: 395416 - DNA, 20 bp, Artificial Sequence
  Description of Artificial Sequence: Synthetic oligonucleotide
  Target: LAMA2; (+) strand; PAM type: YTN; PAM sequence: CTA
tgttcagttatcctttcaga

SEQ ID NO: 395417 - DNA, 20 bp, Artificial Sequence
  Description of Artificial Sequence: Synthetic oligonucleotide
  Target: LAMA2; (+) strand; PAM type: YTN; PAM sequence: TTC
agttatcctttcagaatgaa

SEQ ID NO: 395418 - DNA, 20 bp, Artificial Sequence
  Description of Artificial Sequence: Synthetic oligonucleotide
  Target: LAMA2; (+) strand; PAM type: YTN; PAM sequence: TTA
tcctttcagaatgaatctac

SEQ ID NO: 395419 - DNA, 20 bp, Artificial Sequence
  Description of Artificial Sequence: Synthetic oligonucleotide
  Target: LAMA2; (+) strand; PAM type: YTN; PAM sequence: CTT
tcagaatgaatctacttttc

SEQ ID NO: 395420 - DNA, 20 bp, Artificial Sequence
  Description of Artificial Sequence: Synthetic oligonucleotide
  Target: LAMA2; (+) strand; PAM type: YTN; PAM sequence: TTT
cagaatgaatctacttttca

SEQ ID NO: 395421 - DNA, 20 bp, Artificial Sequence
  Description of Artificial Sequence: Synthetic oligonucleotide
  Target: LAMA2; (+) strand; PAM type: YTN; PAM sequence: TTC
agaatgaatctacttttcaa

SEQ ID NO: 395422 - DNA, 20 bp, Artificial Sequence
  Description of Artificial Sequence: Synthetic oligonucleotide
  Target: LAMA2; (+) strand; PAM type: YTN; PAM sequence: CTA
cttttcaaatctaaactaaa

SEQ ID NO: 395423 - DNA, 20 bp, Artificial Sequence
  Description of Artificial Sequence: Synthetic oligonucleotide
  Target: LAMA2; (+) strand; PAM type: YTN; PAM sequence: CTT
ttcaaatctaaactaaattt

SEQ ID NO: 395424 - DNA, 20 bp, Artificial Sequence
  Description of Artificial Sequence: Synthetic oligonucleotide
  Target: LAMA2; (+) strand; PAM type: YTN; PAM sequence: TTT
tcaaatctaaactaaatttt

SEQ ID NO: 395425 - DNA, 20 bp, Artificial Sequence
  Description of Artificial Sequence: Synthetic oligonucleotide
  Target: LAMA2; (+) strand; PAM type: YTN; PAM sequence: TTT
caaatctaaactaaatttta

SEQ ID NO: 395426 - DNA, 20 bp, Artificial Sequence
  Description of Artificial Sequence: Synthetic oligonucleotide
  Target: LAMA2; (+) strand; PAM type: YTN; PAM sequence: TTC
aaatctaaactaaattttaa

SEQ ID NO: 395427 - DNA, 20 bp, Artificial Sequence
  Description of Artificial Sequence: Synthetic oligonucleotide
  Target: LAMA2; (+) strand; PAM type: YTN; PAM sequence: CTA
aactaaattttaatccatct

SEQ ID NO: 395428 - DNA, 20 bp, Artificial Sequence
  Description of Artificial Sequence: Synthetic oligonucleotide
  Target: LAMA2; (+) strand; PAM type: YTN; PAM sequence: CTA
aattttaatccatcttctgt

SEQ ID NO: 395429 - DNA, 20 bp, Artificial Sequence
  Description of Artificial Sequence: Synthetic oligonucleotide
  Target: LAMA2; (+) strand; PAM type: YTN; PAM sequence: TTT
taatccatcttctgttagat

SEQ ID NO: 395430 - DNA, 20 bp, Artificial Sequence
  Description of Artificial Sequence: Synthetic oligonucleotide
  Target: LAMA2; (+) strand; PAM type: YTN; PAM sequence: TTT
aatccatcttctgttagata

SEQ ID NO: 395431 - DNA, 20 bp, Artificial Sequence
  Description of Artificial Sequence: Synthetic oligonucleotide
  Target: LAMA2; (+) strand; PAM type: YTN; PAM sequence: TTA
atccatcttctgttagataa

SEQ ID NO: 395432 - DNA, 20 bp, Artificial Sequence
  Description of Artificial Sequence: Synthetic oligonucleotide
  Target: LAMA2; (+) strand; PAM type: YTN; PAM sequence: CTT
ctgttagataattttctatt

SEQ ID NO: 395433 - DNA, 20 bp, Artificial Sequence
  Description of Artificial Sequence: Synthetic oligonucleotide
  Target: LAMA2; (+) strand; PAM type: YTN; PAM sequence: TTC
tgttagataattttctattt

SEQ ID NO: 395434 - DNA, 20 bp, Artificial Sequence
  Description of Artificial Sequence: Synthetic oligonucleotide
  Target: LAMA2; (+) strand; PAM type: YTN; PAM sequence: CTG
ttagataattttctatttta

SEQ ID NO: 395435 - DNA, 20 bp, Artificial Sequence
  Description of Artificial Sequence: Synthetic oligonucleotide
  Target: LAMA2; (+) strand; PAM type: YTN; PAM sequence: TTA
gataattttctattttaaag

SEQ ID NO: 395436 - DNA, 20 bp, Artificial Sequence
  Description of Artificial Sequence: Synthetic oligonucleotide
  Target: LAMA2; (+) strand; PAM type: YTN; PAM sequence: TTT
tctattttaaagaccctaat

SEQ ID NO: 395437 - DNA, 20 bp, Artificial Sequence
  Description of Artificial Sequence: Synthetic oligonucleotide
  Target: LAMA2; (+) strand; PAM type: YTN; PAM sequence: TTT
ctattttaaagaccctaatt

SEQ ID NO: 395438 - DNA, 20 bp, Artificial Sequence
  Description of Artificial Sequence: Synthetic oligonucleotide
  Target: LAMA2; (+) strand; PAM type: YTN; PAM sequence: TTC
tattttaaagaccctaattt

SEQ ID NO: 395439 - DNA, 20 bp, Artificial Sequence
  Description of Artificial Sequence: Synthetic oligonucleotide
  Target: LAMA2; (+) strand; PAM type: YTN; PAM sequence: CTA
ttttaaagaccctaatttca

SEQ ID NO: 395440 - DNA, 20 bp, Artificial Sequence
  Description of Artificial Sequence: Synthetic oligonucleotide
  Target: LAMA2; (+) strand; PAM type: YTN; PAM sequence: TTT
taaagaccctaatttcaagt

SEQ ID NO: 395441 - DNA, 20 bp, Artificial Sequence
  Description of Artificial Sequence: Synthetic oligonucleotide
  Target: LAMA2; (+) strand; PAM type: YTN; PAM sequence: TTT
aaagaccctaatttcaagtt

SEQ ID NO: 395442 - DNA, 20 bp, Artificial Sequence
  Description of Artificial Sequence: Synthetic oligonucleotide
  Target: LAMA2; (+) strand; PAM type: YTN; PAM sequence: TTA
aagaccctaatttcaagttc

SEQ ID NO: 395443 - DNA, 20 bp, Artificial Sequence
  Description of Artificial Sequence: Synthetic oligonucleotide
  Target: LAMA2; (+) strand; PAM type: YTN; PAM sequence: CTA
atttcaagttcaccattttc

SEQ ID NO: 395444 - DNA, 20 bp, Artificial Sequence
  Description of Artificial Sequence: Synthetic oligonucleotide
  Target: LAMA2; (+) strand; PAM type: YTN; PAM sequence: TTT
caagttcaccattttcattt

SEQ ID NO: 395445 - DNA, 20 bp, Artificial Sequence
  Description of Artificial Sequence: Synthetic oligonucleotide
  Target: LAMA2; (+) strand; PAM type: YTN; PAM sequence: TTC
aagttcaccattttcatttc

SEQ ID NO: 395446 - DNA, 20 bp, Artificial Sequence
  Description of Artificial Sequence: Synthetic oligonucleotide
  Target: LAMA2; (+) strand; PAM type: YTN; PAM sequence: TTC
accattttcatttcacctgt

SEQ ID NO: 395447 - DNA, 20 bp, Artificial Sequence
  Description of Artificial Sequence: Synthetic oligonucleotide
  Target: LAMA2; (+) strand; PAM type: YTN; PAM sequence: TTT
tcatttcacctgttttattg

SEQ ID NO: 395448 - DNA, 20 bp, Artificial Sequence
  Description of Artificial Sequence: Synthetic oligonucleotide
  Target: LAMA2; (+) strand; PAM type: YTN; PAM sequence: TTT
catttcacctgttttattgt

SEQ ID NO: 395449 - DNA, 20 bp, Artificial Sequence
  Description of Artificial Sequence: Synthetic oligonucleotide
  Target: LAMA2; (+) strand; PAM type: YTN; PAM sequence: TTC
atttcacctgttttattgta

SEQ ID NO: 395450 - DNA, 20 bp, Artificial Sequence
  Description of Artificial Sequence: Synthetic oligonucleotide
  Target: LAMA2; (+) strand; PAM type: YTN; PAM sequence: TTT
cacctgttttattgtatgat

SEQ ID NO: 395451 - DNA, 20 bp, Artificial Sequence
  Description of Artificial Sequence: Synthetic oligonucleotide
  Target: LAMA2; (+) strand; PAM type: YTN; PAM sequence: TTC
acctgttttattgtatgatt

SEQ ID NO: 395452 - DNA, 20 bp, Artificial Sequence
  Description of Artificial Sequence: Synthetic oligonucleotide
  Target: LAMA2; (+) strand; PAM type: YTN; PAM sequence: CTG
ttttattgtatgattatttt

SEQ ID NO: 395453 - DNA, 20 bp, Artificial Sequence
  Description of Artificial Sequence: Synthetic oligonucleotide
  Target: LAMA2; (+) strand; PAM type: YTN; PAM sequence: TTT
tattgtatgattattttcag

SEQ ID NO: 395454 - DNA, 20 bp, Artificial Sequence
  Description of Artificial Sequence: Synthetic oligonucleotide
  Target: LAMA2; (+) strand; PAM type: YTN; PAM sequence: TTT
attgtatgattattttcagc

SEQ ID NO: 395455 - DNA, 20 bp, Artificial Sequence
  Description of Artificial Sequence: Synthetic oligonucleotide
  Target: LAMA2; (+) strand; PAM type: YTN; PAM sequence: TTA
ttgtatgattattttcagca

SEQ ID NO: 395456 - DNA, 20 bp, Artificial Sequence
  Description of Artificial Sequence: Synthetic oligonucleotide
  Target: LAMA2; (+) strand; PAM type: YTN; PAM sequence: TTG
tatgattattttcagcacct

SEQ ID NO: 395457 - DNA, 20 bp, Artificial Sequence
  Description of Artificial Sequence: Synthetic oligonucleotide
  Target: LAMA2; (+) strand; PAM type: YTN; PAM sequence: TTA
ttttcagcacctaaaatggt

SEQ ID NO: 395458 - DNA, 20 bp, Artificial Sequence
  Description of Artificial Sequence: Synthetic oligonucleotide
  Target: LAMA2; (+) strand; PAM type: YTN; PAM sequence: TTT
tcagcacctaaaatggtgcc

SEQ ID NO: 395459 - DNA, 20 bp, Artificial Sequence
  Description of Artificial Sequence: Synthetic oligonucleotide
  Target: LAMA2; (+) strand; PAM type: YTN; PAM sequence: TTT
cagcacctaaaatggtgcct

SEQ ID NO: 395460 - DNA, 20 bp, Artificial Sequence
  Description of Artificial Sequence: Synthetic oligonucleotide
  Target: LAMA2; (+) strand; PAM type: YTN; PAM sequence: TTC
agcacctaaaatggtgcctg

SEQ ID NO: 395461 - DNA, 20 bp, Artificial Sequence
  Description of Artificial Sequence: Synthetic oligonucleotide
  Target: LAMA2; (+) strand; PAM type: YTN; PAM sequence: CTA
aaatggtgcctggcaaatag

SEQ ID NO: 395462 - DNA, 20 bp, Artificial Sequence
  Description of Artificial Sequence: Synthetic oligonucleotide
  Target: LAMA2; (+) strand; PAM type: YTN; PAM sequence: CTG
gcaaatagtaggcacttata

SEQ ID NO: 395463 - DNA, 20 bp, Artificial Sequence
  Description of Artificial Sequence: Synthetic oligonucleotide
  Target: LAMA2; (+) strand; PAM type: YTN; PAM sequence: CTT
ataaatgaatgagtgtattt

SEQ ID NO: 395464 - DNA, 20 bp, Artificial Sequence
  Description of Artificial Sequence: Synthetic oligonucleotide
  Target: LAMA2; (+) strand; PAM type: YTN; PAM sequence: TTA
taaatgaatgagtgtatttt

SEQ ID NO: 395465 - DNA, 20 bp, Artificial Sequence
  Description of Artificial Sequence: Synthetic oligonucleotide
  Target: LAMA2; (+) strand; PAM type: YTN; PAM sequence: TTT
tttcattataattgacacct

SEQ ID NO: 395466 - DNA, 20 bp, Artificial Sequence
  Description of Artificial Sequence: Synthetic oligonucleotide
  Target: LAMA2; (+) strand; PAM type: YTN; PAM sequence: TTT
ttcattataattgacacctt

SEQ ID NO: 395467 - DNA, 20 bp, Artificial Sequence
  Description of Artificial Sequence: Synthetic oligonucleotide
  Target: LAMA2; (+) strand; PAM type: YTN; PAM sequence: TTT
tcattataattgacaccttt

SEQ ID NO: 395468 - DNA, 20 bp, Artificial Sequence
  Description of Artificial Sequence: Synthetic oligonucleotide
  Target: LAMA2; (+) strand; PAM type: YTN; PAM sequence: TTT
cattataattgacacctttt

SEQ ID NO: 395469 - DNA, 20 bp, Artificial Sequence
  Description of Artificial Sequence: Synthetic oligonucleotide
  Target: LAMA2; (+) strand; PAM type: YTN; PAM sequence: TTC
attataattgacacctttta

SEQ ID NO: 395470 - DNA, 20 bp, Artificial Sequence
  Description of Artificial Sequence: Synthetic oligonucleotide
  Target: LAMA2; (+) strand; PAM type: YTN; PAM sequence: TTA
taattgacaccttttatgcc

SEQ ID NO: 395471 - DNA, 20 bp, Artificial Sequence
  Description of Artificial Sequence: Synthetic oligonucleotide
  Target: LAMA2; (+) strand; PAM type: YTN; PAM sequence: TTG
acaccttttatgcctgttca

SEQ ID NO: 395472 - DNA, 20 bp, Artificial Sequence
  Description of Artificial Sequence: Synthetic oligonucleotide
  Target: LAMA2; (+) strand; PAM type: YTN; PAM sequence: CTT
ttatgcctgttcataatctt

SEQ ID NO: 395473 - DNA, 20 bp, Artificial Sequence
  Description of Artificial Sequence: Synthetic oligonucleotide
  Target: LAMA2; (+) strand; PAM type: YTN; PAM sequence: TTT
tatgcctgttcataatcttt

SEQ ID NO: 395474 - DNA, 20 bp, Artificial Sequence
  Description of Artificial Sequence: Synthetic oligonucleotide
  Target: LAMA2; (+) strand; PAM type: YTN; PAM sequence: TTT
atgcctgttcataatctttt

SEQ ID NO: 395475 - DNA, 20 bp, Artificial Sequence
  Description of Artificial Sequence: Synthetic oligonucleotide
  Target: LAMA2; (+) strand; PAM type: YTN; PAM sequence: TTA
tgcctgttcataatctttta

SEQ ID NO: 395476 - DNA, 20 bp, Artificial Sequence
  Description of Artificial Sequence: Synthetic oligonucleotide
  Target: LAMA2; (+) strand; PAM type: YTN; PAM sequence: CTG
ttcataatcttttataccaa

SEQ ID NO: 395477 - DNA, 20 bp, Artificial Sequence
  Description of Artificial Sequence: Synthetic oligonucleotide
  Target: LAMA2; (+) strand; PAM type: YTN; PAM sequence: TTC
ataatcttttataccaataa

SEQ ID NO: 395478 - DNA, 20 bp, Artificial Sequence
  Description of Artificial Sequence: Synthetic oligonucleotide
  Target: LAMA2; (+) strand; PAM type: YTN; PAM sequence: CTT
ttataccaataaaaatttgc

SEQ ID NO: 395479 - DNA, 20 bp, Artificial Sequence
  Description of Artificial Sequence: Synthetic oligonucleotide
  Target: LAMA2; (+) strand; PAM type: YTN; PAM sequence: TTT
tataccaataaaaatttgct

SEQ ID NO: 395480 - DNA, 20 bp, Artificial Sequence
  Description of Artificial Sequence: Synthetic oligonucleotide
  Target: LAMA2; (+) strand; PAM type: YTN; PAM sequence: TTT
ataccaataaaaatttgctg

SEQ ID NO: 395481 - DNA, 20 bp, Artificial Sequence
  Description of Artificial Sequence: Synthetic oligonucleotide
  Target: LAMA2; (+) strand; PAM type: YTN; PAM sequence: TTA
taccaataaaaatttgctgt

SEQ ID NO: 395482 - DNA, 20 bp, Artificial Sequence
  Description of Artificial Sequence: Synthetic oligonucleotide
  Target: LAMA2; (+) strand; PAM type: YTN; PAM sequence: TTT
gctgtagtaattgcttcatc

SEQ ID NO: 395483 - DNA, 20 bp, Artificial Sequence
  Description of Artificial Sequence: Synthetic oligonucleotide
  Target: LAMA2; (+) strand; PAM type: YTN; PAM sequence: TTG
ctgtagtaattgcttcatcc

SEQ ID NO: 395484 - DNA, 20 bp, Artificial Sequence
  Description of Artificial Sequence: Synthetic oligonucleotide
  Target: LAMA2; (+) strand; PAM type: YTN; PAM sequence: CTG
tagtaattgcttcatcctta

SEQ ID NO: 395485 - DNA, 20 bp, Artificial Sequence
  Description of Artificial Sequence: Synthetic oligonucleotide
  Target: LAMA2; (+) strand; PAM type: YTN; PAM sequence: TTG
cttcatccttataaatttct

SEQ ID NO: 395486 - DNA, 20 bp, Artificial Sequence
  Description of Artificial Sequence: Synthetic oligonucleotide
  Target: LAMA2; (+) strand; PAM type: YTN; PAM sequence: CTT
catccttataaatttcttgt

SEQ ID NO: 395487 - DNA, 20 bp, Artificial Sequence
  Description of Artificial Sequence: Synthetic oligonucleotide
  Target: LAMA2; (+) strand; PAM type: YTN; PAM sequence: TTC
atccttataaatttcttgta

SEQ ID NO: 395488 - DNA, 20 bp, Artificial Sequence
  Description of Artificial Sequence: Synthetic oligonucleotide
  Target: LAMA2; (+) strand; PAM type: YTN; PAM sequence: CTT
ataaatttcttgtaacattt

SEQ ID NO: 395489 - DNA, 20 bp, Artificial Sequence
  Description of Artificial Sequence: Synthetic oligonucleotide
  Target: LAMA2; (+) strand; PAM type: YTN; PAM sequence: TTA
taaatttcttgtaacatttt

SEQ ID NO: 395490 - DNA, 20 bp, Artificial Sequence
  Description of Artificial Sequence: Synthetic oligonucleotide
  Target: LAMA2; (+) strand; PAM type: YTN; PAM sequence: TTT
cttgtaacattttatgataa

SEQ ID NO: 395491 - DNA, 20 bp, Artificial Sequence
  Description of Artificial Sequence: Synthetic oligonucleotide
  Target: LAMA2; (+) strand; PAM type: YTN; PAM sequence: TTC
ttgtaacattttatgataag

SEQ ID NO: 395492 - DNA, 20 bp, Artificial Sequence
  Description of Artificial Sequence: Synthetic oligonucleotide
  Target: LAMA2; (+) strand; PAM type: YTN; PAM sequence: CTT
gtaacattttatgataagga

SEQ ID NO: 395493 - DNA, 20 bp, Artificial Sequence
  Description of Artificial Sequence: Synthetic oligonucleotide
  Target: LAMA2; (+) strand; PAM type: YTN; PAM sequence: TTG
taacattttatgataaggag

SEQ ID NO: 395494 - DNA, 20 bp, Artificial Sequence
  Description of Artificial Sequence: Synthetic oligonucleotide
  Target: LAMA2; (+) strand; PAM type: YTN; PAM sequence: TTT
tatgataaggaggtgtttaa

SEQ ID NO: 395495 - DNA, 20 bp, Artificial Sequence
  Description of Artificial Sequence: Synthetic oligonucleotide
  Target: LAMA2; (+) strand; PAM type: YTN; PAM sequence: TTT
atgataaggaggtgtttaat

SEQ ID NO: 395496 - DNA, 20 bp, Artificial Sequence
  Description of Artificial Sequence: Synthetic oligonucleotide
  Target: LAMA2; (+) strand; PAM type: YTN; PAM sequence: TTA
tgataaggaggtgtttaatt

SEQ ID NO: 395497 - DNA, 20 bp, Artificial Sequence
  Description of Artificial Sequence: Synthetic oligonucleotide
  Target: LAMA2; (+) strand; PAM type: YTN; PAM sequence: TTT
aattttaccctaatttaata

SEQ ID NO: 395498 - DNA, 20 bp, Artificial Sequence
  Description of Artificial Sequence: Synthetic oligonucleotide
  Target: LAMA2; (+) strand; PAM type: YTN; PAM sequence: TTA
attttaccctaatttaatac

SEQ ID NO: 395499 - DNA, 20 bp, Artificial Sequence
  Description of Artificial Sequence: Synthetic oligonucleotide
  Target: LAMA2; (+) strand; PAM type: YTN; PAM sequence: TTT
taccctaatttaataccttt

SEQ ID NO: 395500 - DNA, 20 bp, Artificial Sequence
  Description of Artificial Sequence: Synthetic oligonucleotide
  Target: LAMA2; (+) strand; PAM type: YTN; PAM sequence: TTT
accctaatttaataccttta

SEQ ID NO: 395501 - DNA, 20 bp, Artificial Sequence
  Description of Artificial Sequence: Synthetic oligonucleotide
  Target: LAMA2; (+) strand; PAM type: YTN; PAM sequence: TTA
ccctaatttaatacctttag

SEQ ID NO: 395502 - DNA, 20 bp, Artificial Sequence
  Description of Artificial Sequence: Synthetic oligonucleotide
  Target: LAMA2; (+) strand; PAM type: YTN; PAM sequence: CTA
atttaatacctttaggaaaa

SEQ ID NO: 395503 - DNA, 20 bp, Artificial Sequence
  Description of Artificial Sequence: Synthetic oligonucleotide
  Target: LAMA2; (+) strand; PAM type: YTN; PAM sequence: TTT
aatacctttaggaaaaatca

SEQ ID NO: 395504 - DNA, 20 bp, Artificial Sequence
  Description of Artificial Sequence: Synthetic oligonucleotide
  Target: LAMA2; (+) strand; PAM type: YTN; PAM sequence: TTA
atacctttaggaaaaatcat

SEQ ID NO: 395505 - DNA, 20 bp, Artificial Sequence
  Description of Artificial Sequence: Synthetic oligonucleotide
  Target: LAMA2; (+) strand; PAM type: YTN; PAM sequence: CTT
taggaaaaatcattttttgc

SEQ ID NO: 395506 - DNA, 20 bp, Artificial Sequence
  Description of Artificial Sequence: Synthetic oligonucleotide
  Target: LAMA2; (+) strand; PAM type: YTN; PAM sequence: TTT
aggaaaaatcattttttgcc

SEQ ID NO: 395507 - DNA, 20 bp, Artificial Sequence
  Description of Artificial Sequence: Synthetic oligonucleotide
  Target: LAMA2; (+) strand; PAM type: YTN; PAM sequence: TTA
ggaaaaatcattttttgcca

SEQ ID NO: 395508 - DNA, 20 bp, Artificial Sequence
  Description of Artificial Sequence: Synthetic oligonucleotide
  Target: LAMA2; (+) strand; PAM type: YTN; PAM sequence: TTT
tttgccaacatgaagtgtgc

SEQ ID NO: 395509 - DNA, 20 bp, Artificial Sequence
  Description of Artificial Sequence: Synthetic oligonucleotide
  Target: LAMA2; (+) strand; PAM type: YTN; PAM sequence: TTT
ttgccaacatgaagtgtgca

SEQ ID NO: 395510 - DNA, 20 bp, Artificial Sequence
  Description of Artificial Sequence: Synthetic oligonucleotide
  Target: LAMA2; (+) strand; PAM type: YTN; PAM sequence: TTT
tgccaacatgaagtgtgcac

SEQ ID NO: 395511 - DNA, 20 bp, Artificial Sequence
  Description of Artificial Sequence: Synthetic oligonucleotide
  Target: LAMA2; (+) strand; PAM type: YTN; PAM sequence: TTT
gccaacatgaagtgtgcact

SEQ ID NO: 395512 - DNA, 20 bp, Artificial Sequence
  Description of Artificial Sequence: Synthetic oligonucleotide
  Target: LAMA2; (+) strand; PAM type: YTN; PAM sequence: TTG
ccaacatgaagtgtgcactt

SEQ ID NO: 395513 - DNA, 20 bp, Artificial Sequence
  Description of Artificial Sequence: Synthetic oligonucleotide
  Target: LAMA2; (+) strand; PAM type: YTN; PAM sequence: CTT
acttcttaccacccatgctt

SEQ ID NO: 395514 - DNA, 20 bp, Artificial Sequence
  Description of Artificial Sequence: Synthetic oligonucleotide
  Target: LAMA2; (+) strand; PAM type: YTN; PAM sequence: TTA
cttcttaccacccatgctta

SEQ ID NO: 395515 - DNA, 20 bp, Artificial Sequence
  Description of Artificial Sequence: Synthetic oligonucleotide
  Target: LAMA2; (+) strand; PAM type: YTN; PAM sequence: CTT
cttaccacccatgcttatac

SEQ ID NO: 395516 - DNA, 20 bp, Artificial Sequence
  Description of Artificial Sequence: Synthetic oligonucleotide
  Target: LAMA2; (+) strand; PAM type: YTN; PAM sequence: TTC
ttaccacccatgcttataca

SEQ ID NO: 395517 - DNA, 20 bp, Artificial Sequence
  Description of Artificial Sequence: Synthetic oligonucleotide
  Target: LAMA2; (+) strand; PAM type: YTN; PAM sequence: CTT
accacccatgcttatacatg

SEQ ID NO: 395518 - DNA, 20 bp, Artificial Sequence
  Description of Artificial Sequence: Synthetic oligonucleotide
  Target: LAMA2; (+) strand; PAM type: YTN; PAM sequence: TTA
ccacccatgcttatacatgg

SEQ ID NO: 395519 - DNA, 20 bp, Artificial Sequence
  Description of Artificial Sequence: Synthetic oligonucleotide
  Target: LAMA2; (+) strand; PAM type: YTN; PAM sequence: CTT
atacatggtaggctaaccaa

SEQ ID NO: 395520 - DNA, 20 bp, Artificial Sequence
  Description of Artificial Sequence: Synthetic oligonucleotide
  Target: LAMA2; (+) strand; PAM type: YTN; PAM sequence: TTA
tacatggtaggctaaccaac

SEQ ID NO: 395521 - DNA, 20 bp, Artificial Sequence
  Description of Artificial Sequence: Synthetic oligonucleotide
  Target: LAMA2; (+) strand; PAM type: YTN; PAM sequence: CTA
accaacctcaaacagagagt

SEQ ID NO: 395522 - DNA, 20 bp, Artificial Sequence
  Description of Artificial Sequence: Synthetic oligonucleotide
  Target: LAMA2; (+) strand; PAM type: YTN; PAM sequence: CTC
aaacagagagtgatggtgag

SEQ ID NO: 395523 - DNA, 20 bp, Artificial Sequence
  Description of Artificial Sequence: Synthetic oligonucleotide
  Target: LAMA2; (+) strand; PAM type: YTN; PAM sequence: TTG
taatgcattacaccatgtct

SEQ ID NO: 395524 - DNA, 20 bp, Artificial Sequence
  Description of Artificial Sequence: Synthetic oligonucleotide
  Target: LAMA2; (+) strand; PAM type: YTN; PAM sequence: TTA
caccatgtctgctgttatca

SEQ ID NO: 395525 - DNA, 20 bp, Artificial Sequence
  Description of Artificial Sequence: Synthetic oligonucleotide
  Target: LAMA2; (+) strand; PAM type: YTN; PAM sequence: CTG
ctgttatcattattccttct

SEQ ID NO: 395526 - DNA, 20 bp, Artificial Sequence
  Description of Artificial Sequence: Synthetic oligonucleotide
  Target: LAMA2; (+) strand; PAM type: YTN; PAM sequence: CTG
ttatcattattccttctctc

SEQ ID NO: 395527 - DNA, 20 bp, Artificial Sequence
  Description of Artificial Sequence: Synthetic oligonucleotide
  Target: LAMA2; (+) strand; PAM type: YTN; PAM sequence: TTA
tcattattccttctctcttt

SEQ ID NO: 395528 - DNA, 20 bp, Artificial Sequence
  Description of Artificial Sequence: Synthetic oligonucleotide
  Target: LAMA2; (+) strand; PAM type: YTN; PAM sequence: TTA
ttccttctctctttccacaa

SEQ ID NO: 395529 - DNA, 20 bp, Artificial Sequence
  Description of Artificial Sequence: Synthetic oligonucleotide
  Target: LAMA2; (+) strand; PAM type: YTN; PAM sequence: TTC
cttctctctttccacaatca

SEQ ID NO: 395530 - DNA, 20 bp, Artificial Sequence
  Description of Artificial Sequence: Synthetic oligonucleotide
  Target: LAMA2; (+) strand; PAM type: YTN; PAM sequence: CTT
ctctctttccacaatcattt

SEQ ID NO: 395531 - DNA, 20 bp, Artificial Sequence
  Description of Artificial Sequence: Synthetic oligonucleotide
  Target: LAMA2; (+) strand; PAM type: YTN; PAM sequence: TTC
tctctttccacaatcattta

SEQ ID NO: 395532 - DNA, 20 bp, Artificial Sequence
  Description of Artificial Sequence: Synthetic oligonucleotide
  Target: LAMA2; (+) strand; PAM type: YTN; PAM sequence: CTC
tctttccacaatcatttaaa

SEQ ID NO: 395533 - DNA, 20 bp, Artificial Sequence
  Description of Artificial Sequence: Synthetic oligonucleotide
  Target: LAMA2; (+) strand; PAM type: YTN; PAM sequence: CTC
tttccacaatcatttaaaaa

SEQ ID NO: 395534 - DNA, 20 bp, Artificial Sequence
  Description of Artificial Sequence: Synthetic oligonucleotide
  Target: LAMA2; (+) strand; PAM type: YTN; PAM sequence: CTT
tccacaatcatttaaaaata

SEQ ID NO: 395535 - DNA, 20 bp, Artificial Sequence
  Description of Artificial Sequence: Synthetic oligonucleotide
  Target: LAMA2; (+) strand; PAM type: YTN; PAM sequence: TTT
ccacaatcatttaaaaataa

SEQ ID NO: 395536 - DNA, 20 bp, Artificial Sequence
  Description of Artificial Sequence: Synthetic oligonucleotide
  Target: LAMA2; (+) strand; PAM type: YTN; PAM sequence: TTC
cacaatcatttaaaaataat

SEQ ID NO: 395537 - DNA, 20 bp, Artificial Sequence
  Description of Artificial Sequence: Synthetic oligonucleotide
  Target: LAMA2; (+) strand; PAM type: YTN; PAM sequence: TTT
aaaaataattaaatgtctga

SEQ ID NO: 395538 - DNA, 20 bp, Artificial Sequence
  Description of Artificial Sequence: Synthetic oligonucleotide
  Target: LAMA2; (+) strand; PAM type: YTN; PAM sequence: TTA
aaaataattaaatgtctgaa

SEQ ID NO: 395539 - DNA, 20 bp, Artificial Sequence
  Description of Artificial Sequence: Synthetic oligonucleotide
  Target: LAMA2; (+) strand; PAM type: YTN; PAM sequence: TTA
aatgtctgaaaaattacaaa

SEQ ID NO: 395540 - DNA, 20 bp, Artificial Sequence
  Description of Artificial Sequence: Synthetic oligonucleotide
  Target: LAMA2; (+) strand; PAM type: YTN; PAM sequence: CTG
aaaaattacaaaataagtgc

SEQ ID NO: 395541 - DNA, 20 bp, Artificial Sequence
  Description of Artificial Sequence: Synthetic oligonucleotide
  Target: LAMA2; (+) strand; PAM type: YTN; PAM sequence: TTA
caaaataagtgctatagaga

SEQ ID NO: 395542 - DNA, 20 bp, Artificial Sequence
  Description of Artificial Sequence: Synthetic oligonucleotide
  Target: LAMA2; (+) strand; PAM type: YTN; PAM sequence: CTA
tagagaatcagtgatttatt

SEQ ID NO: 395543 - DNA, 20 bp, Artificial Sequence
  Description of Artificial Sequence: Synthetic oligonucleotide
  Target: LAMA2; (+) strand; PAM type: YTN; PAM sequence: TTT
attaaatgactattggataa

SEQ ID NO: 395544 - DNA, 20 bp, Artificial Sequence
  Description of Artificial Sequence: Synthetic oligonucleotide
  Target: LAMA2; (+) strand; PAM type: YTN; PAM sequence: TTA
ttaaatgactattggataag

SEQ ID NO: 395545 - DNA, 20 bp, Artificial Sequence
  Description of Artificial Sequence: Synthetic oligonucleotide
  Target: LAMA2; (+) strand; PAM type: YTN; PAM sequence: TTA
aatgactattggataagaaa

SEQ ID NO: 395546 - DNA, 20 bp, Artificial Sequence
  Description of Artificial Sequence: Synthetic oligonucleotide
  Target: LAMA2; (+) strand; PAM type: YTN; PAM sequence: CTA
ttggataagaaaaagaagac

SEQ ID NO: 395547 - DNA, 20 bp, Artificial Sequence
  Description of Artificial Sequence: Synthetic oligonucleotide
  Target: LAMA2; (+) strand; PAM type: YTN; PAM sequence: TTG
gataagaaaaagaagacaat

SEQ ID NO: 395548 - DNA, 20 bp, Artificial Sequence
  Description of Artificial Sequence: Synthetic oligonucleotide
  Target: LAMA2; (+) strand; PAM type: YTN; PAM sequence: CTG
tcccagaaattttgttggaa

SEQ ID NO: 395549 - DNA, 20 bp, Artificial Sequence
  Description of Artificial Sequence: Synthetic oligonucleotide
  Target: LAMA2; (+) strand; PAM type: YTN; PAM sequence: TTT
tgttggaatgtttttcatga

SEQ ID NO: 395550 - DNA, 20 bp, Artificial Sequence
  Description of Artificial Sequence: Synthetic oligonucleotide
  Target: LAMA2; (+) strand; PAM type: YTN; PAM sequence: TTT
gttggaatgtttttcatgaa

SEQ ID NO: 395551 - DNA, 20 bp, Artificial Sequence
  Description of Artificial Sequence: Synthetic oligonucleotide
  Target: LAMA2; (+) strand; PAM type: YTN; PAM sequence: TTG
ttggaatgtttttcatgaac

SEQ ID NO: 395552 - DNA, 20 bp, Artificial Sequence
  Description of Artificial Sequence: Synthetic oligonucleotide
  Target: LAMA2; (+) strand; PAM type: YTN; PAM sequence: TTG
gaatgtttttcatgaacaga

SEQ ID NO: 395553 - DNA, 20 bp, Artificial Sequence
  Description of Artificial Sequence: Synthetic oligonucleotide
  Target: LAMA2; (+) strand; PAM type: YTN; PAM sequence: TTT
ttcatgaacagaatgaataa

SEQ ID NO: 395554 - DNA, 20 bp, Artificial Sequence
  Description of Artificial Sequence: Synthetic oligonucleotide
  Target: LAMA2; (+) strand; PAM type: YTN; PAM sequence: TTT
tcatgaacagaatgaataaa

SEQ ID NO: 395555 - DNA, 20 bp, Artificial Sequence
  Description of Artificial Sequence: Synthetic oligonucleotide
  Target: LAMA2; (+) strand; PAM type: YTN; PAM sequence: TTT
catgaacagaatgaataaaa

SEQ ID NO: 395556 - DNA, 20 bp, Artificial Sequence
  Description of Artificial Sequence: Synthetic oligonucleotide
  Target: LAMA2; (+) strand; PAM type: YTN; PAM sequence: TTC
atgaacagaatgaataaaat

SEQ ID NO: 395557 - DNA, 20 bp, Artificial Sequence
  Description of Artificial Sequence: Synthetic oligonucleotide
  Target: LAMA2; (+) strand; PAM type: YTN; PAM sequence: TTT
tagtttaatagatcagtata

SEQ ID NO: 395558 - DNA, 20 bp, Artificial Sequence
  Description of Artificial Sequence: Synthetic oligonucleotide
  Target: LAMA2; (+) strand; PAM type: YTN; PAM sequence: TTT
agtttaatagatcagtataa

SEQ ID NO: 395559 - DNA, 20 bp, Artificial Sequence
  Description of Artificial Sequence: Synthetic oligonucleotide
  Target: LAMA2; (+) strand; PAM type: YTN; PAM sequence: TTA
gtttaatagatcagtataat

SEQ ID NO: 395560 - DNA, 20 bp, Artificial Sequence
  Description of Artificial Sequence: Synthetic oligonucleotide
  Target: LAMA2; (+) strand; PAM type: YTN; PAM sequence: TTT
aatagatcagtataatatag

SEQ ID NO: 395561 - DNA, 20 bp, Artificial Sequence
  Description of Artificial Sequence: Synthetic oligonucleotide
  Target: LAMA2; (+) strand; PAM type: YTN; PAM sequence: TTA
atagatcagtataatatagt

SEQ ID NO: 395562 - DNA, 20 bp, Artificial Sequence
  Description of Artificial Sequence: Synthetic oligonucleotide
  Target: LAMA2; (+) strand; PAM type: YTN; PAM sequence: TTC
tactttgctggaaaagaaat

SEQ ID NO: 395563 - DNA, 20 bp, Artificial Sequence
  Description of Artificial Sequence: Synthetic oligonucleotide
  Target: LAMA2; (+) strand; PAM type: YTN; PAM sequence: CTA
ctttgctggaaaagaaatat

SEQ ID NO: 395564 - DNA, 20 bp, Artificial Sequence
  Description of Artificial Sequence: Synthetic oligonucleotide
  Target: LAMA2; (+) strand; PAM type: YTN; PAM sequence: CTT
tgctggaaaagaaatatatt

SEQ ID NO: 395565 - DNA, 20 bp, Artificial Sequence
  Description of Artificial Sequence: Synthetic oligonucleotide
  Target: LAMA2; (+) strand; PAM type: YTN; PAM sequence: TTT
gctggaaaagaaatatattt

SEQ ID NO: 395566 - DNA, 20 bp, Artificial Sequence
  Description of Artificial Sequence: Synthetic oligonucleotide
  Target: LAMA2; (+) strand; PAM type: YTN; PAM sequence: TTG
ctggaaaagaaatatatttg

SEQ ID NO: 395567 - DNA, 20 bp, Artificial Sequence
  Description of Artificial Sequence: Synthetic oligonucleotide
  Target: LAMA2; (+) strand; PAM type: YTN; PAM sequence: CTG
gaaaagaaatatatttgaaa

SEQ ID NO: 395568 - DNA, 20 bp, Artificial Sequence
  Description of Artificial Sequence: Synthetic oligonucleotide
  Target: LAMA2; (+) strand; PAM type: YTN; PAM sequence: TTT
gaaaagcattacgttgagta

SEQ ID NO: 395569 - DNA, 20 bp, Artificial Sequence
  Description of Artificial Sequence: Synthetic oligonucleotide
  Target: LAMA2; (+) strand; PAM type: YTN; PAM sequence: TTG
aaaagcattacgttgagtaa

SEQ ID NO: 395570 - DNA, 20 bp, Artificial Sequence
  Description of Artificial Sequence: Synthetic oligonucleotide
  Target: LAMA2; (+) strand; PAM type: YTN; PAM sequence: TTA
cgttgagtaattatctagat

SEQ ID NO: 395571 - DNA, 20 bp, Artificial Sequence
  Description of Artificial Sequence: Synthetic oligonucleotide
  Target: LAMA2; (+) strand; PAM type: YTN; PAM sequence: TTG
agtaattatctagataggac

SEQ ID NO: 395572 - DNA, 20 bp, Artificial Sequence
  Description of Artificial Sequence: Synthetic oligonucleotide
  Target: LAMA2; (+) strand; PAM type: YTN; PAM sequence: TTA
tctagataggactaacatcc

SEQ ID NO: 395573 - DNA, 20 bp, Artificial Sequence
  Description of Artificial Sequence: Synthetic oligonucleotide
  Target: LAMA2; (+) strand; PAM type: YTN; PAM sequence: CTA
gataggactaacatcccata

SEQ ID NO: 395574 - DNA, 20 bp, Artificial Sequence
  Description of Artificial Sequence: Synthetic oligonucleotide
  Target: LAMA2; (+) strand; PAM type: YTN; PAM sequence: CTA
acatcccataaatataagat

SEQ ID NO: 395575 - DNA, 20 bp, Artificial Sequence
  Description of Artificial Sequence: Synthetic oligonucleotide
  Target: LAMA2; (+) strand; PAM type: YTN; PAM sequence: CTG
atataaaagctatagctcaa

SEQ ID NO: 395576 - DNA, 20 bp, Artificial Sequence
  Description of Artificial Sequence: Synthetic oligonucleotide
  Target: LAMA2; (+) strand; PAM type: YTN; PAM sequence: CTA
tagctcaacagagaagaatg

SEQ ID NO: 395577 - DNA, 20 bp, Artificial Sequence
  Description of Artificial Sequence: Synthetic oligonucleotide
  Target: LAMA2; (+) strand; PAM type: YTN; PAM sequence: CTC
aacagagaagaatgagatta

SEQ ID NO: 395578 - DNA, 20 bp, Artificial Sequence
  Description of Artificial Sequence: Synthetic oligonucleotide
  Target: LAMA2; (+) strand; PAM type: YTN; PAM sequence: TTA
aatgtattattaagtataga

SEQ ID NO: 395579 - DNA, 20 bp, Artificial Sequence
  Description of Artificial Sequence: Synthetic oligonucleotide
  Target: LAMA2; (+) strand; PAM type: YTN; PAM sequence: TTA
ttaagtatagaagagttcaa

SEQ ID NO: 395580 - DNA, 20 bp, Artificial Sequence
  Description of Artificial Sequence: Synthetic oligonucleotide
  Target: LAMA2; (+) strand; PAM type: YTN; PAM sequence: TTA
agtatagaagagttcaaagc

SEQ ID NO: 395581 - DNA, 20 bp, Artificial Sequence
  Description of Artificial Sequence: Synthetic oligonucleotide
  Target: LAMA2; (+) strand; PAM type: YTN; PAM sequence: TTC
aaagcttaacaatacagaag

SEQ ID NO: 395582 - DNA, 20 bp, Artificial Sequence
  Description of Artificial Sequence: Synthetic oligonucleotide
  Target: LAMA2; (+) strand; PAM type: YTN; PAM sequence: CTT
aacaatacagaagagtcctc

SEQ ID NO: 395583 - DNA, 20 bp, Artificial Sequence
  Description of Artificial Sequence: Synthetic oligonucleotide
  Target: LAMA2; (+) strand; PAM type: YTN; PAM sequence: TTA
acaatacagaagagtcctct

SEQ ID NO: 395584 - DNA, 20 bp, Artificial Sequence
  Description of Artificial Sequence: Synthetic oligonucleotide
  Target: LAMA2; (+) strand; PAM type: YTN; PAM sequence: CTC
tactcctttgagtctagccc

SEQ ID NO: 395585 - DNA, 20 bp, Artificial Sequence
  Description of Artificial Sequence: Synthetic oligonucleotide
  Target: LAMA2; (+) strand; PAM type: YTN; PAM sequence: CTA
ctcctttgagtctagcccta

SEQ ID NO: 395586 - DNA, 20 bp, Artificial Sequence
  Description of Artificial Sequence: Synthetic oligonucleotide
  Target: LAMA2; (+) strand; PAM type: YTN; PAM sequence: CTC
ctttgagtctagccctataa

SEQ ID NO: 395587 - DNA, 20 bp, Artificial Sequence
  Description of Artificial Sequence: Synthetic oligonucleotide
  Target: LAMA2; (+) strand; PAM type: YTN; PAM sequence: CTT
tgagtctagccctataaaga

SEQ ID NO: 395588 - DNA, 20 bp, Artificial Sequence
  Description of Artificial Sequence: Synthetic oligonucleotide
  Target: LAMA2; (+) strand; PAM type: YTN; PAM sequence: TTT
gagtctagccctataaagaa

SEQ ID NO: 395589 - DNA, 20 bp, Artificial Sequence
  Description of Artificial Sequence: Synthetic oligonucleotide
  Target: LAMA2; (+) strand; PAM type: YTN; PAM sequence: TTG
agtctagccctataaagaag

SEQ ID NO: 395590 - DNA, 20 bp, Artificial Sequence
  Description of Artificial Sequence: Synthetic oligonucleotide
  Target: LAMA2; (+) strand; PAM type: YTN; PAM sequence: CTA
gccctataaagaaggaagaa

SEQ ID NO: 395591 - DNA, 20 bp, Artificial Sequence
  Description of Artificial Sequence: Synthetic oligonucleotide
  Target: LAMA2; (+) strand; PAM type: YTN; PAM sequence: CTA
taaagaaggaagaatgtttt

SEQ ID NO: 395592 - DNA, 20 bp, Artificial Sequence
  Description of Artificial Sequence: Synthetic oligonucleotide
  Target: LAMA2; (+) strand; PAM type: YTN; PAM sequence: TTT
tcaataacttaaaaggaaaa

SEQ ID NO: 395593 - DNA, 20 bp, Artificial Sequence
  Description of Artificial Sequence: Synthetic oligonucleotide
  Target: LAMA2; (+) strand; PAM type: YTN; PAM sequence: TTT
caataacttaaaaggaaaaa

SEQ ID NO: 395594 - DNA, 20 bp, Artificial Sequence
  Description of Artificial Sequence: Synthetic oligonucleotide
  Target: LAMA2; (+) strand; PAM type: YTN; PAM sequence: TTC
aataacttaaaaggaaaaac

SEQ ID NO: 395595 - DNA, 20 bp, Artificial Sequence
  Description of Artificial Sequence: Synthetic oligonucleotide
  Target: LAMA2; (+) strand; PAM type: YTN; PAM sequence: CTT
aaaaggaaaaacaaagaaac

SEQ ID NO: 395596 - DNA, 20 bp, Artificial Sequence
  Description of Artificial Sequence: Synthetic oligonucleotide
  Target: LAMA2; (+) strand; PAM type: YTN; PAM sequence: TTA
aaaggaaaaacaaagaaaca

SEQ ID NO: 395597 - DNA, 20 bp, Artificial Sequence
  Description of Artificial Sequence: Synthetic oligonucleotide
  Target: LAMA2; (+) strand; PAM type: YTN; PAM sequence: TTT
atacatttgcaggagaaaag

SEQ ID NO: 395598 - DNA, 20 bp, Artificial Sequence
  Description of Artificial Sequence: Synthetic oligonucleotide
  Target: LAMA2; (+) strand; PAM type: YTN; PAM sequence: TTA
tacatttgcaggagaaaagg

SEQ ID NO: 395599 - DNA, 20 bp, Artificial Sequence
  Description of Artificial Sequence: Synthetic oligonucleotide
  Target: LAMA2; (+) strand; PAM type: YTN; PAM sequence: TTT
gcaggagaaaaggaaaaggt

SEQ ID NO: 395600 - DNA, 20 bp, Artificial Sequence
  Description of Artificial Sequence: Synthetic oligonucleotide
  Target: LAMA2; (+) strand; PAM type: YTN; PAM sequence: TTG
caggagaaaaggaaaaggtc

SEQ ID NO: 395601 - DNA, 20 bp, Artificial Sequence
  Description of Artificial Sequence: Synthetic oligonucleotide
  Target: LAMA2; (+) strand; PAM type: YTN; PAM sequence: CTA
tgaagaaagtggaggtcaga

SEQ ID NO: 395602 - DNA, 20 bp, Artificial Sequence
  Description of Artificial Sequence: Synthetic oligonucleotide
  Target: LAMA2; (+) strand; PAM type: YTN; PAM sequence: TTT
gagaagaaaaaaagcattga

SEQ ID NO: 395603 - DNA, 20 bp, Artificial Sequence
  Description of Artificial Sequence: Synthetic oligonucleotide
  Target: LAMA2; (+) strand; PAM type: YTN; PAM sequence: TTG
agaagaaaaaaagcattgaa

SEQ ID NO: 395604 - DNA, 20 bp, Artificial Sequence
  Description of Artificial Sequence: Synthetic oligonucleotide
  Target: LAMA2; (+) strand; PAM type: YTN; PAM sequence: TTG
aaaataccataagaaaagaa

SEQ ID NO: 395605 - DNA, 20 bp, Artificial Sequence
  Description of Artificial Sequence: Synthetic oligonucleotide
  Target: LAMA2; (+) strand; PAM type: YTN; PAM sequence: CTC
caagcataattaagacaatg

SEQ ID NO: 395606 - DNA, 20 bp, Artificial Sequence
  Description of Artificial Sequence: Synthetic oligonucleotide
  Target: LAMA2; (+) strand; PAM type: YTN; PAM sequence: TTA
agacaatgtttaaaatcaac

SEQ ID NO: 395607 - DNA, 20 bp, Artificial Sequence
  Description of Artificial Sequence: Synthetic oligonucleotide
  Target: LAMA2; (+) strand; PAM type: YTN; PAM sequence: TTT
aaaatcaactttgatttttt

SEQ ID NO: 395608 - DNA, 20 bp, Artificial Sequence
  Description of Artificial Sequence: Synthetic oligonucleotide
  Target: LAMA2; (+) strand; PAM type: YTN; PAM sequence: TTA
aaatcaactttgatttttta

SEQ ID NO: 395609 - DNA, 20 bp, Artificial Sequence
  Description of Artificial Sequence: Synthetic oligonucleotide
  Target: LAMA2; (+) strand; PAM type: YTN; PAM sequence: CTT
tgattttttaaaaatttact

SEQ ID NO: 395610 - DNA, 20 bp, Artificial Sequence
  Description of Artificial Sequence: Synthetic oligonucleotide
  Target: LAMA2; (+) strand; PAM type: YTN; PAM sequence: TTT
gattttttaaaaatttactt

SEQ ID NO: 395611 - DNA, 20 bp, Artificial Sequence
  Description of Artificial Sequence: Synthetic oligonucleotide
  Target: LAMA2; (+) strand; PAM type: YTN; PAM sequence: TTG
attttttaaaaatttacttg

SEQ ID NO: 395612 - DNA, 20 bp, Artificial Sequence
  Description of Artificial Sequence: Synthetic oligonucleotide
  Target: LAMA2; (+) strand; PAM type: YTN; PAM sequence: TTT
tttaaaaatttacttgtctt

SEQ ID NO: 395613 - DNA, 20 bp, Artificial Sequence
  Description of Artificial Sequence: Synthetic oligonucleotide
  Target: LAMA2; (+) strand; PAM type: YTN; PAM sequence: TTT
ttaaaaatttacttgtcttc

SEQ ID NO: 395614 - DNA, 20 bp, Artificial Sequence
  Description of Artificial Sequence: Synthetic oligonucleotide
  Target: LAMA2; (+) strand; PAM type: YTN; PAM sequence: TTT
taaaaatttacttgtcttcc

SEQ ID NO: 395615 - DNA, 20 bp, Artificial Sequence
  Description of Artificial Sequence: Synthetic oligonucleotide
  Target: LAMA2; (+) strand; PAM type: YTN; PAM sequence: TTT
aaaaatttacttgtcttcct

SEQ ID NO: 395616 - DNA, 20 bp, Artificial Sequence
  Description of Artificial Sequence: Synthetic oligonucleotide
  Target: LAMA2; (+) strand; PAM type: YTN; PAM sequence: TTA
aaaatttacttgtcttccta

SEQ ID NO: 395617 - DNA, 20 bp, Artificial Sequence
  Description of Artificial Sequence: Synthetic oligonucleotide
  Target: LAMA2; (+) strand; PAM type: YTN; PAM sequence: TTT
acttgtcttcctatatataa

SEQ ID NO: 395618 - DNA, 20 bp, Artificial Sequence
  Description of Artificial Sequence: Synthetic oligonucleotide
  Target: LAMA2; (+) strand; PAM type: YTN; PAM sequence: TTA
cttgtcttcctatatataaa

SEQ ID NO: 395619 - DNA, 20 bp, Artificial Sequence
  Description of Artificial Sequence: Synthetic oligonucleotide
  Target: LAMA2; (+) strand; PAM type: YTN; PAM sequence: CTT
gtcttcctatatataaacac

SEQ ID NO: 395620 - DNA, 20 bp, Artificial Sequence
  Description of Artificial Sequence: Synthetic oligonucleotide
  Target: LAMA2; (+) strand; PAM type: YTN; PAM sequence: TTG
tcttcctatatataaacaca

SEQ ID NO: 395621 - DNA, 20 bp, Artificial Sequence
  Description of Artificial Sequence: Synthetic oligonucleotide
  Target: LAMA2; (+) strand; PAM type: YTN; PAM sequence: CTT
cctatatataaacacacata

SEQ ID NO: 395622 - DNA, 20 bp, Artificial Sequence
  Description of Artificial Sequence: Synthetic oligonucleotide
  Target: LAMA2; (+) strand; PAM type: YTN; PAM sequence: TTC
ctatatataaacacacatag

SEQ ID NO: 395623 - DNA, 20 bp, Artificial Sequence
  Description of Artificial Sequence: Synthetic oligonucleotide
  Target: LAMA2; (+) strand; PAM type: YTN; PAM sequence: CTA
tatataaacacacatagaca

SEQ ID NO: 395624 - DNA, 20 bp, Artificial Sequence
  Description of Artificial Sequence: Synthetic oligonucleotide
  Target: LAMA2; (+) strand; PAM type: YTN; PAM sequence: CTG
aaaggaaaatatgagtgaga

SEQ ID NO: 395625 - DNA, 20 bp, Artificial Sequence
  Description of Artificial Sequence: Synthetic oligonucleotide
  Target: LAMA2; (+) strand; PAM type: YTN; PAM sequence: CTT
tataagcaggagaaagctaa

SEQ ID NO: 395626 - DNA, 20 bp, Artificial Sequence
  Description of Artificial Sequence: Synthetic oligonucleotide
  Target: LAMA2; (+) strand; PAM type: YTN; PAM sequence: TTT
ataagcaggagaaagctaat

SEQ ID NO: 395627 - DNA, 20 bp, Artificial Sequence
  Description of Artificial Sequence: Synthetic oligonucleotide
  Target: LAMA2; (+) strand; PAM type: YTN; PAM sequence: TTA
taagcaggagaaagctaata

SEQ ID NO: 395628 - DNA, 20 bp, Artificial Sequence
  Description of Artificial Sequence: Synthetic oligonucleotide
  Target: LAMA2; (+) strand; PAM type: YTN; PAM sequence: CTA
atacgatttgtttgtactgc

SEQ ID NO: 395629 - DNA, 20 bp, Artificial Sequence
  Description of Artificial Sequence: Synthetic oligonucleotide
  Target: LAMA2; (+) strand; PAM type: YTN; PAM sequence: TTT
gtttgtactgcagtattatt

SEQ ID NO: 395630 - DNA, 20 bp, Artificial Sequence
  Description of Artificial Sequence: Synthetic oligonucleotide
  Target: LAMA2; (+) strand; PAM type: YTN; PAM sequence: TTG
tttgtactgcagtattattt

SEQ ID NO: 395631 - DNA, 20 bp, Artificial Sequence
  Description of Artificial Sequence: Synthetic oligonucleotide
  Target: LAMA2; (+) strand; PAM type: YTN; PAM sequence: TTT
gtactgcagtattattttgt

SEQ ID NO: 395632 - DNA, 20 bp, Artificial Sequence
  Description of Artificial Sequence: Synthetic oligonucleotide
  Target: LAMA2; (+) strand; PAM type: YTN; PAM sequence: TTG
tactgcagtattattttgta

SEQ ID NO: 395633 - DNA, 20 bp, Artificial Sequence
  Description of Artificial Sequence: Synthetic oligonucleotide
  Target: LAMA2; (+) strand; PAM type: YTN; PAM sequence: CTG
cagtattattttgtaaagag

SEQ ID NO: 395634 - DNA, 20 bp, Artificial Sequence
  Description of Artificial Sequence: Synthetic oligonucleotide
  Target: LAMA2; (+) strand; PAM type: YTN; PAM sequence: TTA
ttttgtaaagagtaatagct

SEQ ID NO: 395635 - DNA, 20 bp, Artificial Sequence
  Description of Artificial Sequence: Synthetic oligonucleotide
  Target: LAMA2; (+) strand; PAM type: YTN; PAM sequence: TTT
tgtaaagagtaatagctact

SEQ ID NO: 395636 - DNA, 20 bp, Artificial Sequence
  Description of Artificial Sequence: Synthetic oligonucleotide
  Target: LAMA2; (+) strand; PAM type: YTN; PAM sequence: TTT
gtaaagagtaatagctactt

SEQ ID NO: 395637 - DNA, 20 bp, Artificial Sequence
  Description of Artificial Sequence: Synthetic oligonucleotide
  Target: LAMA2; (+) strand; PAM type: YTN; PAM sequence: TTG
taaagagtaatagctacttg

SEQ ID NO: 395638 - DNA, 20 bp, Artificial Sequence
  Description of Artificial Sequence: Synthetic oligonucleotide
  Target: LAMA2; (+) strand; PAM type: YTN; PAM sequence: CTA
cttgtcttgcataactaatt

SEQ ID NO: 395639 - DNA, 20 bp, Artificial Sequence
  Description of Artificial Sequence: Synthetic oligonucleotide
  Target: LAMA2; (+) strand; PAM type: YTN; PAM sequence: CTT
gtcttgcataactaatttct

SEQ ID NO: 395640 - DNA, 20 bp, Artificial Sequence
  Description of Artificial Sequence: Synthetic oligonucleotide
  Target: LAMA2; (+) strand; PAM type: YTN; PAM sequence: TTG
tcttgcataactaatttctt

SEQ ID NO: 395641 - DNA, 20 bp, Artificial Sequence
  Description of Artificial Sequence: Synthetic oligonucleotide
  Target: LAMA2; (+) strand; PAM type: YTN; PAM sequence: CTT
gcataactaatttctttaaa

SEQ ID NO: 395642 - DNA, 20 bp, Artificial Sequence
  Description of Artificial Sequence: Synthetic oligonucleotide
  Target: LAMA2; (+) strand; PAM type: YTN; PAM sequence: TTG
cataactaatttctttaaat

SEQ ID NO: 395643 - DNA, 20 bp, Artificial Sequence
  Description of Artificial Sequence: Synthetic oligonucleotide
  Target: LAMA2; (+) strand; PAM type: YTN; PAM sequence: CTA
atttctttaaatatcagaat

SEQ ID NO: 395644 - DNA, 20 bp, Artificial Sequence
  Description of Artificial Sequence: Synthetic oligonucleotide
  Target: LAMA2; (+) strand; PAM type: YTN; PAM sequence: TTT
ctttaaatatcagaatgaaa

SEQ ID NO: 395645 - DNA, 20 bp, Artificial Sequence
  Description of Artificial Sequence: Synthetic oligonucleotide
  Target: LAMA2; (+) strand; PAM type: YTN; PAM sequence: TTC
tttaaatatcagaatgaaat

SEQ ID NO: 395646 - DNA, 20 bp, Artificial Sequence
  Description of Artificial Sequence: Synthetic oligonucleotide
  Target: LAMA2; (+) strand; PAM type: YTN; PAM sequence: CTT
taaatatcagaatgaaatgt

SEQ ID NO: 395647 - DNA, 20 bp, Artificial Sequence
  Description of Artificial Sequence: Synthetic oligonucleotide
  Target: LAMA2; (+) strand; PAM type: YTN; PAM sequence: TTT
aaatatcagaatgaaatgtt

SEQ ID NO: 395648 - DNA, 20 bp, Artificial Sequence
  Description of Artificial Sequence: Synthetic oligonucleotide
  Target: LAMA2; (+) strand; PAM type: YTN; PAM sequence: TTA
aatatcagaatgaaatgtta

SEQ ID NO: 395649 - DNA, 20 bp, Artificial Sequence
  Description of Artificial Sequence: Synthetic oligonucleotide
  Target: LAMA2; (+) strand; PAM type: YTN; PAM sequence: TTA
ttttaagaatttagacatca

SEQ ID NO: 395650 - DNA, 20 bp, Artificial Sequence
  Description of Artificial Sequence: Synthetic oligonucleotide
  Target: LAMA2; (+) strand; PAM type: YTN; PAM sequence: TTT
taagaatttagacatcatga

SEQ ID NO: 395651 - DNA, 20 bp, Artificial Sequence
  Description of Artificial Sequence: Synthetic oligonucleotide
  Target: LAMA2; (+) strand; PAM type: YTN; PAM sequence: TTT
aagaatttagacatcatgaa

SEQ ID NO: 395652 - DNA, 20 bp, Artificial Sequence
  Description of Artificial Sequence: Synthetic oligonucleotide
  Target: LAMA2; (+) strand; PAM type: YTN; PAM sequence: TTA
agaatttagacatcatgaaa

SEQ ID NO: 395653 - DNA, 20 bp, Artificial Sequence
  Description of Artificial Sequence: Synthetic oligonucleotide
  Target: LAMA2; (+) strand; PAM type: YTN; PAM sequence: TTT
agacatcatgaaataacaaa

SEQ ID NO: 395654 - DNA, 20 bp, Artificial Sequence
  Description of Artificial Sequence: Synthetic oligonucleotide
  Target: LAMA2; (+) strand; PAM type: YTN; PAM sequence: TTA
gacatcatgaaataacaaat

SEQ ID NO: 395655 - DNA, 20 bp, Artificial Sequence
  Description of Artificial Sequence: Synthetic oligonucleotide
  Target: LAMA2; (+) strand; PAM type: YTN; PAM sequence: CTA
tttttctattggtgtcgggt

SEQ ID NO: 395656 - DNA, 20 bp, Artificial Sequence
  Description of Artificial Sequence: Synthetic oligonucleotide
  Target: LAMA2; (+) strand; PAM type: YTN; PAM sequence: TTT
ttctattggtgtcgggtgag

SEQ ID NO: 395657 - DNA, 20 bp, Artificial Sequence
  Description of Artificial Sequence: Synthetic oligonucleotide
  Target: LAMA2; (+) strand; PAM type: YTN; PAM sequence: TTT
tctattggtgtcgggtgagg

SEQ ID NO: 395658 - DNA, 20 bp, Artificial Sequence
  Description of Artificial Sequence: Synthetic oligonucleotide
  Target: LAMA2; (+) strand; PAM type: YTN; PAM sequence: TTT
ctattggtgtcgggtgagga

SEQ ID NO: 395659 - DNA, 20 bp, Artificial Sequence
  Description of Artificial Sequence: Synthetic oligonucleotide
  Target: LAMA2; (+) strand; PAM type: YTN; PAM sequence: TTC
tattggtgtcgggtgaggaa

SEQ ID NO: 395660 - DNA, 20 bp, Artificial Sequence
  Description of Artificial Sequence: Synthetic oligonucleotide
  Target: LAMA2; (+) strand; PAM type: YTN; PAM sequence: CTA
ttggtgtcgggtgaggaaag

SEQ ID NO: 395661 - DNA, 20 bp, Artificial Sequence
  Description of Artificial Sequence: Synthetic oligonucleotide
  Target: LAMA2; (+) strand; PAM type: YTN; PAM sequence: TTG
gtgtcgggtgaggaaagtac

SEQ ID NO: 395662 - DNA, 20 bp, Artificial Sequence
  Description of Artificial Sequence: Synthetic oligonucleotide
  Target: LAMA2; (+) strand; PAM type: YTN; PAM sequence: CTA
taaagcatttgttttcctac

SEQ ID NO: 395663 - DNA, 20 bp, Artificial Sequence
  Description of Artificial Sequence: Synthetic oligonucleotide
  Target: LAMA2; (+) strand; PAM type: YTN; PAM sequence: TTT
gttttcctacatataatcac

SEQ ID NO: 395664 - DNA, 20 bp, Artificial Sequence
  Description of Artificial Sequence: Synthetic oligonucleotide
  Target: LAMA2; (+) strand; PAM type: YTN; PAM sequence: TTG
ttttcctacatataatcacc

SEQ ID NO: 395665 - DNA, 20 bp, Artificial Sequence
  Description of Artificial Sequence: Synthetic oligonucleotide
  Target: LAMA2; (+) strand; PAM type: YTN; PAM sequence: TTT
tcctacatataatcaccaag

SEQ ID NO: 395666 - DNA, 20 bp, Artificial Sequence
  Description of Artificial Sequence: Synthetic oligonucleotide
  Target: LAMA2; (+) strand; PAM type: YTN; PAM sequence: TTT
cctacatataatcaccaaga

SEQ ID NO: 395667 - DNA, 20 bp, Artificial Sequence
  Description of Artificial Sequence: Synthetic oligonucleotide
  Target: LAMA2; (+) strand; PAM type: YTN; PAM sequence: TTC
ctacatataatcaccaagaa

SEQ ID NO: 395668 - DNA, 20 bp, Artificial Sequence
  Description of Artificial Sequence: Synthetic oligonucleotide
  Target: LAMA2; (+) strand; PAM type: YTN; PAM sequence: CTA
catataatcaccaagaaaat

SEQ ID NO: 395669 - DNA, 20 bp, Artificial Sequence
  Description of Artificial Sequence: Synthetic oligonucleotide
  Target: LAMA2; (+) strand; PAM type: YTN; PAM sequence: CTC
atttagtacttctctagagg

SEQ ID NO: 395670 - DNA, 20 bp, Artificial Sequence
  Description of Artificial Sequence: Synthetic oligonucleotide
  Target: LAMA2; (+) strand; PAM type: YTN; PAM sequence: TTT
agtacttctctagagggtgc

SEQ ID NO: 395671 - DNA, 20 bp, Artificial Sequence
  Description of Artificial Sequence: Synthetic oligonucleotide
  Target: LAMA2; (+) strand; PAM type: YTN; PAM sequence: TTA
gtacttctctagagggtgca

SEQ ID NO: 395672 - DNA, 20 bp, Artificial Sequence
  Description of Artificial Sequence: Synthetic oligonucleotide
  Target: LAMA2; (+) strand; PAM type: YTN; PAM sequence: CTT
ctctagagggtgcaaggaaa

SEQ ID NO: 395673 - DNA, 20 bp, Artificial Sequence
  Description of Artificial Sequence: Synthetic oligonucleotide
  Target: LAMA2; (+) strand; PAM type: YTN; PAM sequence: TTC
tctagagggtgcaaggaaaa

SEQ ID NO: 395674 - DNA, 20 bp, Artificial Sequence
  Description of Artificial Sequence: Synthetic oligonucleotide
  Target: LAMA2; (+) strand; PAM type: YTN; PAM sequence: CTC
tagagggtgcaaggaaaaca

SEQ ID NO: 395675 - DNA, 20 bp, Artificial Sequence
  Description of Artificial Sequence: Synthetic oligonucleotide
  Target: LAMA2; (+) strand; PAM type: YTN; PAM sequence: CTA
gagggtgcaaggaaaacaga

SEQ ID NO: 395676 - DNA, 20 bp, Artificial Sequence
  Description of Artificial Sequence: Synthetic oligonucleotide
  Target: LAMA2; (+) strand; PAM type: YTN; PAM sequence: CTC
ataaaatggaataaaaatgg

SEQ ID NO: 395677 - DNA, 20 bp, Artificial Sequence
  Description of Artificial Sequence: Synthetic oligonucleotide
  Target: LAMA2; (+) strand; PAM type: YTN; PAM sequence: TTT
tttctcatcttagttgcttt

SEQ ID NO: 395678 - DNA, 20 bp, Artificial Sequence
  Description of Artificial Sequence: Synthetic oligonucleotide
  Target: LAMA2; (+) strand; PAM type: YTN; PAM sequence: TTT
ttctcatcttagttgctttg

SEQ ID NO: 395679 - DNA, 20 bp, Artificial Sequence
  Description of Artificial Sequence: Synthetic oligonucleotide
  Target: LAMA2; (+) strand; PAM type: YTN; PAM sequence: TTT
tctcatcttagttgctttga

SEQ ID NO: 395680 - DNA, 20 bp, Artificial Sequence
  Description of Artificial Sequence: Synthetic oligonucleotide
  Target: LAMA2; (+) strand; PAM type: YTN; PAM sequence: TTT
ctcatcttagttgctttgat

SEQ ID NO: 395681 - DNA, 20 bp, Artificial Sequence
  Description of Artificial Sequence: Synthetic oligonucleotide
  Target: LAMA2; (+) strand; PAM type: YTN; PAM sequence: TTC
tcatcttagttgctttgatc

SEQ ID NO: 395682 - DNA, 20 bp, Artificial Sequence
  Description of Artificial Sequence: Synthetic oligonucleotide
  Target: LAMA2; (+) strand; PAM type: YTN; PAM sequence: CTC
atcttagttgctttgatcct

SEQ ID NO: 395683 - DNA, 20 bp, Artificial Sequence
  Description of Artificial Sequence: Synthetic oligonucleotide
  Target: LAMA2; (+) strand; PAM type: YTN; PAM sequence: CTT
agttgctttgatcctataag

SEQ ID NO: 395684 - DNA, 20 bp, Artificial Sequence
  Description of Artificial Sequence: Synthetic oligonucleotide
  Target: LAMA2; (+) strand; PAM type: YTN; PAM sequence: TTA
gttgctttgatcctataaga

SEQ ID NO: 395685 - DNA, 20 bp, Artificial Sequence
  Description of Artificial Sequence: Synthetic oligonucleotide
  Target: LAMA2; (+) strand; PAM type: YTN; PAM sequence: TTG
ctttgatcctataagagact

SEQ ID NO: 395686 - DNA, 20 bp, Artificial Sequence
  Description of Artificial Sequence: Synthetic oligonucleotide
  Target: LAMA2; (+) strand; PAM type: YTN; PAM sequence: CTT
tgatcctataagagactcta

SEQ ID NO: 395687 - DNA, 20 bp, Artificial Sequence
  Description of Artificial Sequence: Synthetic oligonucleotide
  Target: LAMA2; (+) strand; PAM type: YTN; PAM sequence: TTT
gatcctataagagactctaa

SEQ ID NO: 395688 - DNA, 20 bp, Artificial Sequence
  Description of Artificial Sequence: Synthetic oligonucleotide
  Target: LAMA2; (+) strand; PAM type: YTN; PAM sequence: TTG
atcctataagagactctaaa

SEQ ID NO: 395689 - DNA, 20 bp, Artificial Sequence
  Description of Artificial Sequence: Synthetic oligonucleotide
  Target: LAMA2; (+) strand; PAM type: YTN; PAM sequence: CTA
taagagactctaaaataaca

SEQ ID NO: 395690 - DNA, 20 bp, Artificial Sequence
  Description of Artificial Sequence: Synthetic oligonucleotide
  Target: LAMA2; (+) strand; PAM type: YTN; PAM sequence: CTC
taaaataacagagaattaga

SEQ ID NO: 395691 - DNA, 20 bp, Artificial Sequence
  Description of Artificial Sequence: Synthetic oligonucleotide
  Target: LAMA2; (+) strand; PAM type: YTN; PAM sequence: CTA
aaataacagagaattagatg

SEQ ID NO: 395692 - DNA, 20 bp, Artificial Sequence
  Description of Artificial Sequence: Synthetic oligonucleotide
  Target: LAMA2; (+) strand; PAM type: YTN; PAM sequence: TTA
gatgtttttaaaacatttcc

SEQ ID NO: 395693 - DNA, 20 bp, Artificial Sequence
  Description of Artificial Sequence: Synthetic oligonucleotide
  Target: LAMA2; (+) strand; PAM type: YTN; PAM sequence: TTT
ttaaaacatttccaggtcat

SEQ ID NO: 395694 - DNA, 20 bp, Artificial Sequence
  Description of Artificial Sequence: Synthetic oligonucleotide
  Target: LAMA2; (+) strand; PAM type: YTN; PAM sequence: TTT
taaaacatttccaggtcata

SEQ ID NO: 395695 - DNA, 20 bp, Artificial Sequence
  Description of Artificial Sequence: Synthetic oligonucleotide
  Target: LAMA2; (+) strand; PAM type: YTN; PAM sequence: TTT
aaaacatttccaggtcatag

SEQ ID NO: 395696 - DNA, 20 bp, Artificial Sequence
  Description of Artificial Sequence: Synthetic oligonucleotide
  Target: LAMA2; (+) strand; PAM type: YTN; PAM sequence: TTA
aaacatttccaggtcatagt

SEQ ID NO: 395697 - DNA, 20 bp, Artificial Sequence
  Description of Artificial Sequence: Synthetic oligonucleotide
  Target: LAMA2; (+) strand; PAM type: YTN; PAM sequence: TTT
ccaggtcatagtaaactcaa

SEQ ID NO: 395698 - DNA, 20 bp, Artificial Sequence
  Description of Artificial Sequence: Synthetic oligonucleotide
  Target: LAMA2; (+) strand; PAM type: YTN; PAM sequence: TTC
caggtcatagtaaactcaaa

SEQ ID NO: 395699 - DNA, 20 bp, Artificial Sequence
  Description of Artificial Sequence: Synthetic oligonucleotide
  Target: LAMA2; (+) strand; PAM type: YTN; PAM sequence: CTC
aaagcctacattatctatca

SEQ ID NO: 395700 - DNA, 20 bp, Artificial Sequence
  Description of Artificial Sequence: Synthetic oligonucleotide
  Target: LAMA2; (+) strand; PAM type: YTN; PAM sequence: CTA
cattatctatcagatcagat

SEQ ID NO: 395701 - DNA, 20 bp, Artificial Sequence
  Description of Artificial Sequence: Synthetic oligonucleotide
  Target: LAMA2; (+) strand; PAM type: YTN; PAM sequence: TTA
tctatcagatcagattttta

SEQ ID NO: 395702 - DNA, 20 bp, Artificial Sequence
  Description of Artificial Sequence: Synthetic oligonucleotide
  Target: LAMA2; (+) strand; PAM type: YTN; PAM sequence: CTA
tcagatcagatttttaaaat

SEQ ID NO: 395703 - DNA, 20 bp, Artificial Sequence
  Description of Artificial Sequence: Synthetic oligonucleotide
  Target: LAMA2; (+) strand; PAM type: YTN; PAM sequence: TTT
ttaaaattgatgaatgtatt

SEQ ID NO: 395704 - DNA, 20 bp, Artificial Sequence
  Description of Artificial Sequence: Synthetic oligonucleotide
  Target: LAMA2; (+) strand; PAM type: YTN; PAM sequence: TTT
taaaattgatgaatgtatta

SEQ ID NO: 395705 - DNA, 20 bp, Artificial Sequence
  Description of Artificial Sequence: Synthetic oligonucleotide
  Target: LAMA2; (+) strand; PAM type: YTN; PAM sequence: TTT
aaaattgatgaatgtattaa

SEQ ID NO: 395706 - DNA, 20 bp, Artificial Sequence
  Description of Artificial Sequence: Synthetic oligonucleotide
  Target: LAMA2; (+) strand; PAM type: YTN; PAM sequence: TTA
aaattgatgaatgtattaat

SEQ ID NO: 395707 - DNA, 20 bp, Artificial Sequence
  Description of Artificial Sequence: Synthetic oligonucleotide
  Target: LAMA2; (+) strand; PAM type: YTN; PAM sequence: TTG
atgaatgtattaatgttctc

SEQ ID NO: 395708 - DNA, 20 bp, Artificial Sequence
  Description of Artificial Sequence: Synthetic oligonucleotide
  Target: LAMA2; (+) strand; PAM type: YTN; PAM sequence: TTA
atgttctctagaaggacaga

SEQ ID NO: 395709 - DNA, 20 bp, Artificial Sequence
  Description of Artificial Sequence: Synthetic oligonucleotide
  Target: LAMA2; (+) strand; PAM type: YTN; PAM sequence: TTC
tctagaaggacagaactaat

SEQ ID NO: 395710 - DNA, 20 bp, Artificial Sequence
  Description of Artificial Sequence: Synthetic oligonucleotide
  Target: LAMA2; (+) strand; PAM type: YTN; PAM sequence: CTC
tagaaggacagaactaatag

SEQ ID NO: 395711 - DNA, 20 bp, Artificial Sequence
  Description of Artificial Sequence: Synthetic oligonucleotide
  Target: LAMA2; (+) strand; PAM type: YTN; PAM sequence: CTA
gaaggacagaactaatagga

SEQ ID NO: 395712 - DNA, 20 bp, Artificial Sequence
  Description of Artificial Sequence: Synthetic oligonucleotide
  Target: LAMA2; (+) strand; PAM type: YTN; PAM sequence: CTA
ataggatagatgtatacaag

SEQ ID NO: 395713 - DNA, 20 bp, Artificial Sequence
  Description of Artificial Sequence: Synthetic oligonucleotide
  Target: LAMA2; (+) strand; PAM type: YTN; PAM sequence: TTT
actaaggaatattgacccac

SEQ ID NO: 395714 - DNA, 20 bp, Artificial Sequence
  Description of Artificial Sequence: Synthetic oligonucleotide
  Target: LAMA2; (+) strand; PAM type: YTN; PAM sequence: TTA
ctaaggaatattgacccacg

SEQ ID NO: 395715 - DNA, 20 bp, Artificial Sequence
  Description of Artificial Sequence: Synthetic oligonucleotide
  Target: LAMA2; (+) strand; PAM type: YTN; PAM sequence: CTA
aggaatattgacccacgcca

SEQ ID NO: 395716 - DNA, 20 bp, Artificial Sequence
  Description of Artificial Sequence: Synthetic oligonucleotide
  Target: LAMA2; (+) strand; PAM type: YTN; PAM sequence: TTG
acccacgccatcacaagatg

SEQ ID NO: 395717 - DNA, 20 bp, Artificial Sequence
  Description of Artificial Sequence: Synthetic oligonucleotide
  Target: LAMA2; (+) strand; PAM type: YTN; PAM sequence: CTG
caagctgaggagcagggaag

SEQ ID NO: 395718 - DNA, 20 bp, Artificial Sequence
  Description of Artificial Sequence: Synthetic oligonucleotide
  Target: LAMA2; (+) strand; PAM type: YTN; PAM sequence: CTG
aggagcagggaagccagccc

SEQ ID NO: 395719 - DNA, 20 bp, Artificial Sequence
  Description of Artificial Sequence: Synthetic oligonucleotide
  Target: LAMA2; (+) strand; PAM type: YTN; PAM sequence: CTC
aaaagtagggaagctgacag

SEQ ID NO: 395720 - DNA, 20 bp, Artificial Sequence
  Description of Artificial Sequence: Synthetic oligonucleotide
  Target: LAMA2; (+) strand; PAM type: YTN; PAM sequence: CTG
acagtgcagccttcagtctg

SEQ ID NO: 395721 - DNA, 20 bp, Artificial Sequence
  Description of Artificial Sequence: Synthetic oligonucleotide
  Target: LAMA2; (+) strand; PAM type: YTN; PAM sequence: CTT
cagtctgtggttaaaggcct

SEQ ID NO: 395722 - DNA, 20 bp, Artificial Sequence
  Description of Artificial Sequence: Synthetic oligonucleotide
  Target: LAMA2; (+) strand; PAM type: YTN; PAM sequence: TTC
agtctgtggttaaaggcctg

SEQ ID NO: 395723 - DNA, 20 bp, Artificial Sequence
  Description of Artificial Sequence: Synthetic oligonucleotide
  Target: LAMA2; (+) strand; PAM type: YTN; PAM sequence: CTG
tggttaaaggcctgacagcc

SEQ ID NO: 395724 - DNA, 20 bp, Artificial Sequence
  Description of Artificial Sequence: Synthetic oligonucleotide
  Target: LAMA2; (+) strand; PAM type: YTN; PAM sequence: TTA
aaggcctgacagcccctggc

SEQ ID NO: 395725 - DNA, 20 bp, Artificial Sequence
  Description of Artificial Sequence: Synthetic oligonucleotide
  Target: LAMA2; (+) strand; PAM type: YTN; PAM sequence: CTG
acagcccctggcaaacccct

SEQ ID NO: 395726 - DNA, 20 bp, Artificial Sequence
  Description of Artificial Sequence: Synthetic oligonucleotide
  Target: LAMA2; (+) strand; PAM type: YTN; PAM sequence: CTG
gcaaacccctggtgtaagtc

SEQ ID NO: 395727 - DNA, 20 bp, Artificial Sequence
  Description of Artificial Sequence: Synthetic oligonucleotide
  Target: LAMA2; (+) strand; PAM type: YTN; PAM sequence: CTG
gtgtaagtccaggaatccaa

SEQ ID NO: 395728 - DNA, 20 bp, Artificial Sequence
  Description of Artificial Sequence: Synthetic oligonucleotide
  Target: LAMA2; (+) strand; PAM type: YTN; PAM sequence: CTG
aagaacttggagtgtgatgt

SEQ ID NO: 395729 - DNA, 20 bp, Artificial Sequence
  Description of Artificial Sequence: Synthetic oligonucleotide
  Target: LAMA2; (+) strand; PAM type: YTN; PAM sequence: CTT
ggagtgtgatgttcaagggc

SEQ ID NO: 395730 - DNA, 20 bp, Artificial Sequence
  Description of Artificial Sequence: Synthetic oligonucleotide
  Target: LAMA2; (+) strand; PAM type: YTN; PAM sequence: TTG
gagtgtgatgttcaagggca

SEQ ID NO: 395731 - DNA, 20 bp, Artificial Sequence
  Description of Artificial Sequence: Synthetic oligonucleotide
  Target: LAMA2; (+) strand; PAM type: YTN; PAM sequence: TTC
aagggcaggaagtatccagc

SEQ ID NO: 395732 - DNA, 20 bp, Artificial Sequence
  Description of Artificial Sequence: Synthetic oligonucleotide
  Target: LAMA2; (+) strand; PAM type: YTN; PAM sequence: CTG
gaagagtcagaagatctact

SEQ ID NO: 395733 - DNA, 20 bp, Artificial Sequence
  Description of Artificial Sequence: Synthetic oligonucleotide
  Target: LAMA2; (+) strand; PAM type: YTN; PAM sequence: CTA
ctctttccactttcttctgc

SEQ ID NO: 395734 - DNA, 20 bp, Artificial Sequence
  Description of Artificial Sequence: Synthetic oligonucleotide
  Target: LAMA2; (+) strand; PAM type: YTN; PAM sequence: CTC
tttccactttcttctgcctg

SEQ ID NO: 395735 - DNA, 20 bp, Artificial Sequence
  Description of Artificial Sequence: Synthetic oligonucleotide
  Target: LAMA2; (+) strand; PAM type: YTN; PAM sequence: CTT
tccactttcttctgcctgct

SEQ ID NO: 395736 - DNA, 20 bp, Artificial Sequence
  Description of Artificial Sequence: Synthetic oligonucleotide
  Target: LAMA2; (+) strand; PAM type: YTN; PAM sequence: TTT
ccactttcttctgcctgctt

SEQ ID NO: 395737 - DNA, 20 bp, Artificial Sequence
  Description of Artificial Sequence: Synthetic oligonucleotide
  Target: LAMA2; (+) strand; PAM type: YTN; PAM sequence: TTC
cactttcttctgcctgcttt

SEQ ID NO: 395738 - DNA, 20 bp, Artificial Sequence
  Description of Artificial Sequence: Synthetic oligonucleotide
  Target: LAMA2; (+) strand; PAM type: YTN; PAM sequence: CTT
tcttctgcctgcttttattc

SEQ ID NO: 395739 - DNA, 20 bp, Artificial Sequence
  Description of Artificial Sequence: Synthetic oligonucleotide
  Target: LAMA2; (+) strand; PAM type: YTN; PAM sequence: TTT
cttctgcctgcttttattct

SEQ ID NO: 395740 - DNA, 20 bp, Artificial Sequence
  Description of Artificial Sequence: Synthetic oligonucleotide
  Target: LAMA2; (+) strand; PAM type: YTN; PAM sequence: TTC
ttctgcctgcttttattcta

SEQ ID NO: 395741 - DNA, 20 bp, Artificial Sequence
  Description of Artificial Sequence: Synthetic oligonucleotide
  Target: LAMA2; (+) strand; PAM type: YTN; PAM sequence: CTT
ctgcctgcttttattctagc

SEQ ID NO: 395742 - DNA, 20 bp, Artificial Sequence
  Description of Artificial Sequence: Synthetic oligonucleotide
  Target: LAMA2; (+) strand; PAM type: YTN; PAM sequence: TTC
tgcctgcttttattctagcc

SEQ ID NO: 395743 - DNA, 20 bp, Artificial Sequence
  Description of Artificial Sequence: Synthetic oligonucleotide
  Target: LAMA2; (+) strand; PAM type: YTN; PAM sequence: CTG
cctgcttttattctagccac

SEQ ID NO: 395744 - DNA, 20 bp, Artificial Sequence
  Description of Artificial Sequence: Synthetic oligonucleotide
  Target: LAMA2; (+) strand; PAM type: YTN; PAM sequence: CTG
cttttattctagccacactg

SEQ ID NO: 395745 - DNA, 20 bp, Artificial Sequence
  Description of Artificial Sequence: Synthetic oligonucleotide
  Target: LAMA2; (+) strand; PAM type: YTN; PAM sequence: CTT
ttattctagccacactggca

SEQ ID NO: 395746 - DNA, 20 bp, Artificial Sequence
  Description of Artificial Sequence: Synthetic oligonucleotide
  Target: LAMA2; (+) strand; PAM type: YTN; PAM sequence: TTT
tattctagccacactggcag

SEQ ID NO: 395747 - DNA, 20 bp, Artificial Sequence
  Description of Artificial Sequence: Synthetic oligonucleotide
  Target: LAMA2; (+) strand; PAM type: YTN; PAM sequence: TTT
attctagccacactggcagc

SEQ ID NO: 395748 - DNA, 20 bp, Artificial Sequence
  Description of Artificial Sequence: Synthetic oligonucleotide
  Target: LAMA2; (+) strand; PAM type: YTN; PAM sequence: TTA
ttctagccacactggcagct

SEQ ID NO: 395749 - DNA, 20 bp, Artificial Sequence
  Description of Artificial Sequence: Synthetic oligonucleotide
  Target: LAMA2; (+) strand; PAM type: YTN; PAM sequence: TTC
tagccacactggcagcttat

SEQ ID NO: 395750 - DNA, 20 bp, Artificial Sequence
  Description of Artificial Sequence: Synthetic oligonucleotide
  Target: LAMA2; (+) strand; PAM type: YTN; PAM sequence: CTA
gccacactggcagcttatta

SEQ ID NO: 395751 - DNA, 20 bp, Artificial Sequence
  Description of Artificial Sequence: Synthetic oligonucleotide
  Target: LAMA2; (+) strand; PAM type: YTN; PAM sequence: CTG
gcagcttattagatggtgcc

SEQ ID NO: 395752 - DNA, 20 bp, Artificial Sequence
  Description of Artificial Sequence: Synthetic oligonucleotide
  Target: LAMA2; (+) strand; PAM type: YTN; PAM sequence: CTT
attagatggtgcccacccac

SEQ ID NO: 395753 - DNA, 20 bp, Artificial Sequence
  Description of Artificial Sequence: Synthetic oligonucleotide
  Target: LAMA2; (+) strand; PAM type: YTN; PAM sequence: TTA
ttagatggtgcccacccaca

SEQ ID NO: 395754 - DNA, 20 bp, Artificial Sequence
  Description of Artificial Sequence: Synthetic oligonucleotide
  Target: LAMA2; (+) strand; PAM type: YTN; PAM sequence: TTA
gatggtgcccacccacattg

SEQ ID NO: 395755 - DNA, 20 bp, Artificial Sequence
  Description of Artificial Sequence: Synthetic oligonucleotide
  Target: LAMA2; (+) strand; PAM type: YTN; PAM sequence: TTG
agggtgggtctgcctcttcc

SEQ ID NO: 395756 - DNA, 20 bp, Artificial Sequence
  Description of Artificial Sequence: Synthetic oligonucleotide
  Target: LAMA2; (+) strand; PAM type: YTN; PAM sequence: CTG
cctcttccagtccagtgact

SEQ ID NO: 395757 - DNA, 20 bp, Artificial Sequence
  Description of Artificial Sequence: Synthetic oligonucleotide
  Target: LAMA2; (+) strand; PAM type: YTN; PAM sequence: CTC
ttccagtccagtgactcaaa

SEQ ID NO: 395758 - DNA, 20 bp, Artificial Sequence
  Description of Artificial Sequence: Synthetic oligonucleotide
  Target: LAMA2; (+) strand; PAM type: YTN; PAM sequence: CTT
ccagtccagtgactcaaatt

SEQ ID NO: 395759 - DNA, 20 bp, Artificial Sequence
  Description of Artificial Sequence: Synthetic oligonucleotide
  Target: LAMA2; (+) strand; PAM type: YTN; PAM sequence: TTC
cagtccagtgactcaaattt

SEQ ID NO: 395760 - DNA, 20 bp, Artificial Sequence
  Description of Artificial Sequence: Synthetic oligonucleotide
  Target: LAMA2; (+) strand; PAM type: YTN; PAM sequence: CTC
aaattttaatctcctttggc

SEQ ID NO: 395761 - DNA, 20 bp, Artificial Sequence
  Description of Artificial Sequence: Synthetic oligonucleotide
  Target: LAMA2; (+) strand; PAM type: YTN; PAM sequence: TTT
taatctcctttggcaacacc

SEQ ID NO: 395762 - DNA, 20 bp, Artificial Sequence
  Description of Artificial Sequence: Synthetic oligonucleotide
  Target: LAMA2; (+) strand; PAM type: YTN; PAM sequence: TTT
aatctcctttggcaacaccc

SEQ ID NO: 395763 - DNA, 20 bp, Artificial Sequence
  Description of Artificial Sequence: Synthetic oligonucleotide
  Target: LAMA2; (+) strand; PAM type: YTN; PAM sequence: TTA
atctcctttggcaacaccct

SEQ ID NO: 395764 - DNA, 20 bp, Artificial Sequence
  Description of Artificial Sequence: Synthetic oligonucleotide
  Target: LAMA2; (+) strand; PAM type: YTN; PAM sequence: CTC
ctttggcaacaccctcacag

SEQ ID NO: 395765 - DNA, 20 bp, Artificial Sequence
  Description of Artificial Sequence: Synthetic oligonucleotide
  Target: LAMA2; (+) strand; PAM type: YTN; PAM sequence: CTT
tggcaacaccctcacagaga

SEQ ID NO: 395766 - DNA, 20 bp, Artificial Sequence
  Description of Artificial Sequence: Synthetic oligonucleotide
  Target: LAMA2; (+) strand; PAM type: YTN; PAM sequence: TTT
ggcaacaccctcacagagac

SEQ ID NO: 395767 - DNA, 20 bp, Artificial Sequence
  Description of Artificial Sequence: Synthetic oligonucleotide
  Target: LAMA2; (+) strand; PAM type: YTN; PAM sequence: TTG
gcaacaccctcacagagaca

SEQ ID NO: 395768 - DNA, 20 bp, Artificial Sequence
  Description of Artificial Sequence: Synthetic oligonucleotide
  Target: LAMA2; (+) strand; PAM type: YTN; PAM sequence: CTC
acagagacacccaggaacaa

SEQ ID NO: 395769 - DNA, 20 bp, Artificial Sequence
  Description of Artificial Sequence: Synthetic oligonucleotide
  Target: LAMA2; (+) strand; PAM type: YTN; PAM sequence: CTT
tgcatcgttcaatccaatca

SEQ ID NO: 395770 - DNA, 20 bp, Artificial Sequence
  Description of Artificial Sequence: Synthetic oligonucleotide
  Target: LAMA2; (+) strand; PAM type: YTN; PAM sequence: TTT
gcatcgttcaatccaatcaa

SEQ ID NO: 395771 - DNA, 20 bp, Artificial Sequence
  Description of Artificial Sequence: Synthetic oligonucleotide
  Target: LAMA2; (+) strand; PAM type: YTN; PAM sequence: TTG
catcgttcaatccaatcaag

SEQ ID NO: 395772 - DNA, 20 bp, Artificial Sequence
  Description of Artificial Sequence: Synthetic oligonucleotide
  Target: LAMA2; (+) strand; PAM type: YTN; PAM sequence: TTC
aatccaatcaagctgatact

SEQ ID NO: 395773 - DNA, 20 bp, Artificial Sequence
  Description of Artificial Sequence: Synthetic oligonucleotide
  Target: LAMA2; (+) strand; PAM type: YTN; PAM sequence: CTG
atactcaatattagtcatca

SEQ ID NO: 395774 - DNA, 20 bp, Artificial Sequence
  Description of Artificial Sequence: Synthetic oligonucleotide
  Target: LAMA2; (+) strand; PAM type: YTN; PAM sequence: CTC
aatattagtcatcacaagtc

SEQ ID NO: 395775 - DNA, 20 bp, Artificial Sequence
  Description of Artificial Sequence: Synthetic oligonucleotide
  Target: LAMA2; (+) strand; PAM type: YTN; PAM sequence: TTA
gtcatcacaagtccacccct

SEQ ID NO: 395776 - DNA, 20 bp, Artificial Sequence
  Description of Artificial Sequence: Synthetic oligonucleotide
  Target: LAMA2; (+) strand; PAM type: YTN; PAM sequence: CTT
gtcaacttgaacccatacac

SEQ ID NO: 395777 - DNA, 20 bp, Artificial Sequence
  Description of Artificial Sequence: Synthetic oligonucleotide
  Target: LAMA2; (+) strand; PAM type: YTN; PAM sequence: TTG
tcaacttgaacccatacaca

SEQ ID NO: 395778 - DNA, 20 bp, Artificial Sequence
  Description of Artificial Sequence: Synthetic oligonucleotide
  Target: LAMA2; (+) strand; PAM type: YTN; PAM sequence: CTT
gaacccatacacatctcctg

SEQ ID NO: 395779 - DNA, 20 bp, Artificial Sequence
  Description of Artificial Sequence: Synthetic oligonucleotide
  Target: LAMA2; (+) strand; PAM type: YTN; PAM sequence: TTG
aacccatacacatctcctga

SEQ ID NO: 395780 - DNA, 20 bp, Artificial Sequence
  Description of Artificial Sequence: Synthetic oligonucleotide
  Target: LAMA2; (+) strand; PAM type: YTN; PAM sequence: CTC
ctgaaatcatacataatctc

SEQ ID NO: 395781 - DNA, 20 bp, Artificial Sequence
  Description of Artificial Sequence: Synthetic oligonucleotide
  Target: LAMA2; (+) strand; PAM type: YTN; PAM sequence: CTG
aaatcatacataatctccaa

SEQ ID NO: 395782 - DNA, 20 bp, Artificial Sequence
  Description of Artificial Sequence: Synthetic oligonucleotide
  Target: LAMA2; (+) strand; PAM type: YTN; PAM sequence: CTC
caaataaagacaataataac

SEQ ID NO: 395783 - DNA, 20 bp, Artificial Sequence
  Description of Artificial Sequence: Synthetic oligonucleotide
  Target: LAMA2; (+) strand; PAM type: YTN; PAM sequence: TTA
tacctaacataatacagcta

SEQ ID NO: 395784 - DNA, 20 bp, Artificial Sequence
  Description of Artificial Sequence: Synthetic oligonucleotide
  Target: LAMA2; (+) strand; PAM type: YTN; PAM sequence: CTA
acataatacagctatccctt

SEQ ID NO: 395785 - DNA, 20 bp, Artificial Sequence
  Description of Artificial Sequence: Synthetic oligonucleotide
  Target: LAMA2; (+) strand; PAM type: YTN; PAM sequence: CTA
tcccttgtacaatcagaagc

SEQ ID NO: 395786 - DNA, 20 bp, Artificial Sequence
  Description of Artificial Sequence: Synthetic oligonucleotide
  Target: LAMA2; (+) strand; PAM type: YTN; PAM sequence: CTT
gtacaatcagaagcacacta

SEQ ID NO: 395787 - DNA, 20 bp, Artificial Sequence
  Description of Artificial Sequence: Synthetic oligonucleotide
  Target: LAMA2; (+) strand; PAM type: YTN; PAM sequence: TTG
tacaatcagaagcacactaa

SEQ ID NO: 395788 - DNA, 20 bp, Artificial Sequence
  Description of Artificial Sequence: Synthetic oligonucleotide
  Target: LAMA2; (+) strand; PAM type: YTN; PAM sequence: CTA
atccttaacctaaatgctat

SEQ ID NO: 395789 - DNA, 20 bp, Artificial Sequence
  Description of Artificial Sequence: Synthetic oligonucleotide
  Target: LAMA2; (+) strand; PAM type: YTN; PAM sequence: CTT
aacctaaatgctattacata

SEQ ID NO: 395790 - DNA, 20 bp, Artificial Sequence
  Description of Artificial Sequence: Synthetic oligonucleotide
  Target: LAMA2; (+) strand; PAM type: YTN; PAM sequence: TTA
acctaaatgctattacataa

SEQ ID NO: 395791 - DNA, 20 bp, Artificial Sequence
  Description of Artificial Sequence: Synthetic oligonucleotide
  Target: LAMA2; (+) strand; PAM type: YTN; PAM sequence: CTA
aatgctattacataaagtta

SEQ ID NO: 395792 - DNA, 20 bp, Artificial Sequence
  Description of Artificial Sequence: Synthetic oligonucleotide
  Target: LAMA2; (+) strand; PAM type: YTN; PAM sequence: CTA
ttacataaagttaacaacac

SEQ ID NO: 395793 - DNA, 20 bp, Artificial Sequence
  Description of Artificial Sequence: Synthetic oligonucleotide
  Target: LAMA2; (+) strand; PAM type: YTN; PAM sequence: TTA
cataaagttaacaacactta

SEQ ID NO: 395794 - DNA, 20 bp, Artificial Sequence
  Description of Artificial Sequence: Synthetic oligonucleotide
  Target: LAMA2; (+) strand; PAM type: YTN; PAM sequence: TTA
acaacacttaaatgctgata

SEQ ID NO: 395795 - DNA, 20 bp, Artificial Sequence
  Description of Artificial Sequence: Synthetic oligonucleotide
  Target: LAMA2; (+) strand; PAM type: YTN; PAM sequence: CTT
aaatgctgatatgaagtcaa

SEQ ID NO: 395796 - DNA, 20 bp, Artificial Sequence
  Description of Artificial Sequence: Synthetic oligonucleotide
  Target: LAMA2; (+) strand; PAM type: YTN; PAM sequence: TTA
aatgctgatatgaagtcaat

SEQ ID NO: 395797 - DNA, 20 bp, Artificial Sequence
  Description of Artificial Sequence: Synthetic oligonucleotide
  Target: LAMA2; (+) strand; PAM type: YTN; PAM sequence: CTG
atatgaagtcaataaatttt

SEQ ID NO: 395798 - DNA, 20 bp, Artificial Sequence
  Description of Artificial Sequence: Synthetic oligonucleotide
  Target: LAMA2; (+) strand; PAM type: YTN; PAM sequence: TTT
tatgtcacatgataaaggaa

SEQ ID NO: 395799 - DNA, 20 bp, Artificial Sequence
  Description of Artificial Sequence: Synthetic oligonucleotide
  Target: LAMA2; (+) strand; PAM type: YTN; PAM sequence: TTT
atgtcacatgataaaggaaa

SEQ ID NO: 395800 - DNA, 20 bp, Artificial Sequence
  Description of Artificial Sequence: Synthetic oligonucleotide
  Target: LAMA2; (+) strand; PAM type: YTN; PAM sequence: TTA
tgtcacatgataaaggaaaa

SEQ ID NO: 395801 - DNA, 20 bp, Artificial Sequence
  Description of Artificial Sequence: Synthetic oligonucleotide
  Target: LAMA2; (+) strand; PAM type: YTN; PAM sequence: TTT
tcctagtacaagtgtataca

SEQ ID NO: 395802 - DNA, 20 bp, Artificial Sequence
  Description of Artificial Sequence: Synthetic oligonucleotide
  Target: LAMA2; (+) strand; PAM type: YTN; PAM sequence: TTT
cctagtacaagtgtatacat

SEQ ID NO: 395803 - DNA, 20 bp, Artificial Sequence
  Description of Artificial Sequence: Synthetic oligonucleotide
  Target: LAMA2; (+) strand; PAM type: YTN; PAM sequence: TTC
ctagtacaagtgtatacatg

SEQ ID NO: 395804 - DNA, 20 bp, Artificial Sequence
  Description of Artificial Sequence: Synthetic oligonucleotide
  Target: LAMA2; (+) strand; PAM type: YTN; PAM sequence: CTA
gtacaagtgtatacatgcac

SEQ ID NO: 395805 - DNA, 20 bp, Artificial Sequence
  Description of Artificial Sequence: Synthetic oligonucleotide
  Target: LAMA2; (+) strand; PAM type: YTN; PAM sequence: TTC
ttaacagaataaggaggaaa

SEQ ID NO: 395806 - DNA, 20 bp, Artificial Sequence
  Description of Artificial Sequence: Synthetic oligonucleotide
  Target: LAMA2; (+) strand; PAM type: YTN; PAM sequence: CTT
aacagaataaggaggaaata

SEQ ID NO: 395807 - DNA, 20 bp, Artificial Sequence
  Description of Artificial Sequence: Synthetic oligonucleotide
  Target: LAMA2; (+) strand; PAM type: YTN; PAM sequence: TTA
acagaataaggaggaaatat

SEQ ID NO: 395808 - DNA, 20 bp, Artificial Sequence
  Description of Artificial Sequence: Synthetic oligonucleotide
  Target: LAMA2; (+) strand; PAM type: YTN; PAM sequence: TTA
cagtcttcatttctgcaact

SEQ ID NO: 395809 - DNA, 20 bp, Artificial Sequence
  Description of Artificial Sequence: Synthetic oligonucleotide
  Target: LAMA2; (+) strand; PAM type: YTN; PAM sequence: CTT
catttctgcaactggccacg

SEQ ID NO: 395810 - DNA, 20 bp, Artificial Sequence
  Description of Artificial Sequence: Synthetic oligonucleotide
  Target: LAMA2; (+) strand; PAM type: YTN; PAM sequence: TTC
atttctgcaactggccacgt

SEQ ID NO: 395811 - DNA, 20 bp, Artificial Sequence
  Description of Artificial Sequence: Synthetic oligonucleotide
  Target: LAMA2; (+) strand; PAM type: YTN; PAM sequence: TTT
ctgcaactggccacgtggtt

SEQ ID NO: 395812 - DNA, 20 bp, Artificial Sequence
  Description of Artificial Sequence: Synthetic oligonucleotide
  Target: LAMA2; (+) strand; PAM type: YTN; PAM sequence: TTC
tgcaactggccacgtggttg

SEQ ID NO: 395813 - DNA, 20 bp, Artificial Sequence
  Description of Artificial Sequence: Synthetic oligonucleotide
  Target: LAMA2; (+) strand; PAM type: YTN; PAM sequence: CTG
caactggccacgtggttgta

SEQ ID NO: 395814 - DNA, 20 bp, Artificial Sequence
  Description of Artificial Sequence: Synthetic oligonucleotide
  Target: LAMA2; (+) strand; PAM type: YTN; PAM sequence: CTG
gccacgtggttgtagctggt

SEQ ID NO: 395815 - DNA, 20 bp, Artificial Sequence
  Description of Artificial Sequence: Synthetic oligonucleotide
  Target: LAMA2; (+) strand; PAM type: YTN; PAM sequence: TTG
tagctggtattgatgactac

SEQ ID NO: 395816 - DNA, 20 bp, Artificial Sequence
  Description of Artificial Sequence: Synthetic oligonucleotide
  Target: LAMA2; (+) strand; PAM type: YTN; PAM sequence: CTG
gtattgatgactaccttctt

SEQ ID NO: 395817 - DNA, 20 bp, Artificial Sequence
  Description of Artificial Sequence: Synthetic oligonucleotide
  Target: LAMA2; (+) strand; PAM type: YTN; PAM sequence: TTG
atgactaccttcttctacta

SEQ ID NO: 395818 - DNA, 20 bp, Artificial Sequence
  Description of Artificial Sequence: Synthetic oligonucleotide
  Target: LAMA2; (+) strand; PAM type: YTN; PAM sequence: CTA
ccttcttctactaaccatta

SEQ ID NO: 395819 - DNA, 20 bp, Artificial Sequence
  Description of Artificial Sequence: Synthetic oligonucleotide
  Target: LAMA2; (+) strand; PAM type: YTN; PAM sequence: CTT
cttctactaaccattatgta

SEQ ID NO: 395820 - DNA, 20 bp, Artificial Sequence
  Description of Artificial Sequence: Synthetic oligonucleotide
  Target: LAMA2; (+) strand; PAM type: YTN; PAM sequence: TTC
ttctactaaccattatgtat

SEQ ID NO: 395821 - DNA, 20 bp, Artificial Sequence
  Description of Artificial Sequence: Synthetic oligonucleotide
  Target: LAMA2; (+) strand; PAM type: YTN; PAM sequence: CTT
ctactaaccattatgtattc

SEQ ID NO: 395822 - DNA, 20 bp, Artificial Sequence
  Description of Artificial Sequence: Synthetic oligonucleotide
  Target: LAMA2; (+) strand; PAM type: YTN; PAM sequence: TTC
tactaaccattatgtattcc

SEQ ID NO: 395823 - DNA, 20 bp, Artificial Sequence
  Description of Artificial Sequence: Synthetic oligonucleotide
  Target: LAMA2; (+) strand; PAM type: YTN; PAM sequence: CTA
ctaaccattatgtattccct

SEQ ID NO: 395824 - DNA, 20 bp, Artificial Sequence
  Description of Artificial Sequence: Synthetic oligonucleotide
  Target: LAMA2; (+) strand; PAM type: YTN; PAM sequence: CTA
accattatgtattccctttg

SEQ ID NO: 395825 - DNA, 20 bp, Artificial Sequence
  Description of Artificial Sequence: Synthetic oligonucleotide
  Target: LAMA2; (+) strand; PAM type: YTN; PAM sequence: TTA
tgtattccctttgccttctg

SEQ ID NO: 395826 - DNA, 20 bp, Artificial Sequence
  Description of Artificial Sequence: Synthetic oligonucleotide
  Target: LAMA2; (+) strand; PAM type: YTN; PAM sequence: TTC
cctttgccttctgcaagcac

SEQ ID NO: 395827 - DNA, 20 bp, Artificial Sequence
  Description of Artificial Sequence: Synthetic oligonucleotide
  Target: LAMA2; (+) strand; PAM type: YTN; PAM sequence: CTT
tgccttctgcaagcacctca

SEQ ID NO: 395828 - DNA, 20 bp, Artificial Sequence
  Description of Artificial Sequence: Synthetic oligonucleotide
  Target: LAMA2; (+) strand; PAM type: YTN; PAM sequence: TTT
gccttctgcaagcacctcag

SEQ ID NO: 395829 - DNA, 20 bp, Artificial Sequence
  Description of Artificial Sequence: Synthetic oligonucleotide
  Target: LAMA2; (+) strand; PAM type: YTN; PAM sequence: TTG
ccttctgcaagcacctcagc

SEQ ID NO: 395830 - DNA, 20 bp, Artificial Sequence
  Description of Artificial Sequence: Synthetic oligonucleotide
  Target: LAMA2; (+) strand; PAM type: YTN; PAM sequence: CTT
ctgcaagcacctcagcgggt

SEQ ID NO: 395831 - DNA, 20 bp, Artificial Sequence
  Description of Artificial Sequence: Synthetic oligonucleotide
  Target: LAMA2; (+) strand; PAM type: YTN; PAM sequence: TTC
tgcaagcacctcagcgggtc

SEQ ID NO: 395832 - DNA, 20 bp, Artificial Sequence
  Description of Artificial Sequence: Synthetic oligonucleotide
  Target: LAMA2; (+) strand; PAM type: YTN; PAM sequence: CTG
caagcacctcagcgggtcat

SEQ ID NO: 395833 - DNA, 20 bp, Artificial Sequence
  Description of Artificial Sequence: Synthetic oligonucleotide
  Target: LAMA2; (+) strand; PAM type: YTN; PAM sequence: CTC
agcgggtcatggctttttac

SEQ ID NO: 395834 - DNA, 20 bp, Artificial Sequence
  Description of Artificial Sequence: Synthetic oligonucleotide
  Target: LAMA2; (+) strand; PAM type: YTN; PAM sequence: CTT
tttacctggtggggtgaccc

SEQ ID NO: 395835 - DNA, 20 bp, Artificial Sequence
  Description of Artificial Sequence: Synthetic oligonucleotide
  Target: LAMA2; (+) strand; PAM type: YTN; PAM sequence: TTT
ttacctggtggggtgaccca

SEQ ID NO: 395836 - DNA, 20 bp, Artificial Sequence
  Description of Artificial Sequence: Synthetic oligonucleotide
  Target: LAMA2; (+) strand; PAM type: YTN; PAM sequence: TTT
tacctggtggggtgacccaa

SEQ ID NO: 395837 - DNA, 20 bp, Artificial Sequence
  Description of Artificial Sequence: Synthetic oligonucleotide
  Target: LAMA2; (+) strand; PAM type: YTN; PAM sequence: TTT
acctggtggggtgacccaaa

SEQ ID NO: 395838 - DNA, 20 bp, Artificial Sequence
  Description of Artificial Sequence: Synthetic oligonucleotide
  Target: LAMA2; (+) strand; PAM type: YTN; PAM sequence: TTA
cctggtggggtgacccaaac

SEQ ID NO: 395839 - DNA, 20 bp, Artificial Sequence
  Description of Artificial Sequence: Synthetic oligonucleotide
  Target: LAMA2; (+) strand; PAM type: YTN; PAM sequence: CTG
gtggggtgacccaaaccttt

SEQ ID NO: 395840 - DNA, 20 bp, Artificial Sequence
  Description of Artificial Sequence: Synthetic oligonucleotide
  Target: LAMA2; (+) strand; PAM type: YTN; PAM sequence: CTT
tattctggaaggacctgtgc

SEQ ID NO: 395841 - DNA, 20 bp, Artificial Sequence
  Description of Artificial Sequence: Synthetic oligonucleotide
  Target: LAMA2; (+) strand; PAM type: YTN; PAM sequence: TTT
attctggaaggacctgtgcc

SEQ ID NO: 395842 - DNA, 20 bp, Artificial Sequence
  Description of Artificial Sequence: Synthetic oligonucleotide
  Target: LAMA2; (+) strand; PAM type: YTN; PAM sequence: TTA
ttctggaaggacctgtgcca

SEQ ID NO: 395843 - DNA, 20 bp, Artificial Sequence
  Description of Artificial Sequence: Synthetic oligonucleotide
  Target: LAMA2; (+) strand; PAM type: YTN; PAM sequence: TTC
tggaaggacctgtgccattt

SEQ ID NO: 395844 - DNA, 20 bp, Artificial Sequence
  Description of Artificial Sequence: Synthetic oligonucleotide
  Target: LAMA2; (+) strand; PAM type: YTN; PAM sequence: CTG
gaaggacctgtgccatttgt

SEQ ID NO: 395845 - DNA, 20 bp, Artificial Sequence
  Description of Artificial Sequence: Synthetic oligonucleotide
  Target: LAMA2; (+) strand; PAM type: YTN; PAM sequence: CTG
tgccatttgtagtcctgtct

SEQ ID NO: 395846 - DNA, 20 bp, Artificial Sequence
  Description of Artificial Sequence: Synthetic oligonucleotide
  Target: LAMA2; (+) strand; PAM type: YTN; PAM sequence: TTT
gtagtcctgtctggattggg

SEQ ID NO: 395847 - DNA, 20 bp, Artificial Sequence
  Description of Artificial Sequence: Synthetic oligonucleotide
  Target: LAMA2; (+) strand; PAM type: YTN; PAM sequence: TTG
tagtcctgtctggattgggt

SEQ ID NO: 395848 - DNA, 20 bp, Artificial Sequence
  Description of Artificial Sequence: Synthetic oligonucleotide
  Target: LAMA2; (+) strand; PAM type: YTN; PAM sequence: CTG
tctggattgggttggattgg

SEQ ID NO: 395849 - DNA, 20 bp, Artificial Sequence
  Description of Artificial Sequence: Synthetic oligonucleotide
  Target: LAMA2; (+) strand; PAM type: YTN; PAM sequence: CTG
gattgggttggattgggttg

SEQ ID NO: 395850 - DNA, 20 bp, Artificial Sequence
  Description of Artificial Sequence: Synthetic oligonucleotide
  Target: LAMA2; (+) strand; PAM type: YTN; PAM sequence: TTG
ggttggattgggttgttgta

SEQ ID NO: 395851 - DNA, 20 bp, Artificial Sequence
  Description of Artificial Sequence: Synthetic oligonucleotide
  Target: LAMA2; (+) strand; PAM type: YTN; PAM sequence: TTG
gattgggttgttgtagtttc

SEQ ID NO: 395852 - DNA, 20 bp, Artificial Sequence
  Description of Artificial Sequence: Synthetic oligonucleotide
  Target: LAMA2; (+) strand; PAM type: YTN; PAM sequence: TTG
ggttgttgtagtttcccatt

SEQ ID NO: 395853 - DNA, 20 bp, Artificial Sequence
  Description of Artificial Sequence: Synthetic oligonucleotide
  Target: LAMA2; (+) strand; PAM type: YTN; PAM sequence: TTG
ttgtagtttcccattgacct

SEQ ID NO: 395854 - DNA, 20 bp, Artificial Sequence
  Description of Artificial Sequence: Synthetic oligonucleotide
  Target: LAMA2; (+) strand; PAM type: YTN; PAM sequence: TTG
tagtttcccattgaccttaa

SEQ ID NO: 395855 - DNA, 20 bp, Artificial Sequence
  Description of Artificial Sequence: Synthetic oligonucleotide
  Target: LAMA2; (+) strand; PAM type: YTN; PAM sequence: TTT
cccattgaccttaaacacag

SEQ ID NO: 395856 - DNA, 20 bp, Artificial Sequence
  Description of Artificial Sequence: Synthetic oligonucleotide
  Target: LAMA2; (+) strand; PAM type: YTN; PAM sequence: TTC
ccattgaccttaaacacaga

SEQ ID NO: 395857 - DNA, 20 bp, Artificial Sequence
  Description of Artificial Sequence: Synthetic oligonucleotide
  Target: LAMA2; (+) strand; PAM type: YTN; PAM sequence: TTG
accttaaacacagaggatgg

SEQ ID NO: 395858 - DNA, 20 bp, Artificial Sequence
  Description of Artificial Sequence: Synthetic oligonucleotide
  Target: LAMA2; (+) strand; PAM type: YTN; PAM sequence: CTT
aaacacagaggatggtaata

SEQ ID NO: 395859 - DNA, 20 bp, Artificial Sequence
  Description of Artificial Sequence: Synthetic oligonucleotide
  Target: LAMA2; (+) strand; PAM type: YTN; PAM sequence: TTA
aacacagaggatggtaatat

SEQ ID NO: 395860 - DNA, 20 bp, Artificial Sequence
  Description of Artificial Sequence: Synthetic oligonucleotide
  Target: LAMA2; (+) strand; PAM type: YTN; PAM sequence: TTA
agagatgccctatgggatct

SEQ ID NO: 395861 - DNA, 20 bp, Artificial Sequence
  Description of Artificial Sequence: Synthetic oligonucleotide
  Target: LAMA2; (+) strand; PAM type: YTN; PAM sequence: CTA
tgggatctcctgtattccat

SEQ ID NO: 395862 - DNA, 20 bp, Artificial Sequence
  Description of Artificial Sequence: Synthetic oligonucleotide
  Target: LAMA2; (+) strand; PAM type: YTN; PAM sequence: CTC
ctgtattccatgcatgctct

SEQ ID NO: 395863 - DNA, 20 bp, Artificial Sequence
  Description of Artificial Sequence: Synthetic oligonucleotide
  Target: LAMA2; (+) strand; PAM type: YTN; PAM sequence: CTG
tattccatgcatgctcttcc

SEQ ID NO: 395864 - DNA, 20 bp, Artificial Sequence
  Description of Artificial Sequence: Synthetic oligonucleotide
  Target: LAMA2; (+) strand; PAM type: YTN; PAM sequence: TTC
catgcatgctcttccttgcc

SEQ ID NO: 395865 - DNA, 20 bp, Artificial Sequence
  Description of Artificial Sequence: Synthetic oligonucleotide
  Target: LAMA2; (+) strand; PAM type: YTN; PAM sequence: CTC
ttccttgccttcattgtgga

SEQ ID NO: 395866 - DNA, 20 bp, Artificial Sequence
  Description of Artificial Sequence: Synthetic oligonucleotide
  Target: LAMA2; (+) strand; PAM type: YTN; PAM sequence: CTT
ccttgccttcattgtggaat

SEQ ID NO: 395867 - DNA, 20 bp, Artificial Sequence
  Description of Artificial Sequence: Synthetic oligonucleotide
  Target: LAMA2; (+) strand; PAM type: YTN; PAM sequence: TTC
cttgccttcattgtggaata

SEQ ID NO: 395868 - DNA, 20 bp, Artificial Sequence
  Description of Artificial Sequence: Synthetic oligonucleotide
  Target: LAMA2; (+) strand; PAM type: YTN; PAM sequence: CTT
gccttcattgtggaatagta

SEQ ID NO: 395869 - DNA, 20 bp, Artificial Sequence
  Description of Artificial Sequence: Synthetic oligonucleotide
  Target: LAMA2; (+) strand; PAM type: YTN; PAM sequence: TTG
ccttcattgtggaatagtag

SEQ ID NO: 395870 - DNA, 20 bp, Artificial Sequence
  Description of Artificial Sequence: Synthetic oligonucleotide
  Target: LAMA2; (+) strand; PAM type: YTN; PAM sequence: CTT
cattgtggaatagtagactg

SEQ ID NO: 395871 - DNA, 20 bp, Artificial Sequence
  Description of Artificial Sequence: Synthetic oligonucleotide
  Target: LAMA2; (+) strand; PAM type: YTN; PAM sequence: TTC
attgtggaatagtagactga

SEQ ID NO: 395872 - DNA, 20 bp, Artificial Sequence
  Description of Artificial Sequence: Synthetic oligonucleotide
  Target: LAMA2; (+) strand; PAM type: YTN; PAM sequence: TTG
tggaatagtagactgatttc

SEQ ID NO: 395873 - DNA, 20 bp, Artificial Sequence
  Description of Artificial Sequence: Synthetic oligonucleotide
  Target: LAMA2; (+) strand; PAM type: YTN; PAM sequence: CTG
atttcaccttgatattctgg

SEQ ID NO: 395874 - DNA, 20 bp, Artificial Sequence
  Description of Artificial Sequence: Synthetic oligonucleotide
  Target: LAMA2; (+) strand; PAM type: YTN; PAM sequence: TTT
caccttgatattctgggtca

SEQ ID NO: 395875 - DNA, 20 bp, Artificial Sequence
  Description of Artificial Sequence: Synthetic oligonucleotide
  Target: LAMA2; (+) strand; PAM type: YTN; PAM sequence: TTC
accttgatattctgggtcaa

SEQ ID NO: 395876 - DNA, 20 bp, Artificial Sequence
  Description of Artificial Sequence: Synthetic oligonucleotide
  Target: LAMA2; (+) strand; PAM type: YTN; PAM sequence: CTT
gatattctgggtcaattacc

SEQ ID NO: 395877 - DNA, 20 bp, Artificial Sequence
  Description of Artificial Sequence: Synthetic oligonucleotide
  Target: LAMA2; (+) strand; PAM type: YTN; PAM sequence: TTG
atattctgggtcaattaccc

SEQ ID NO: 395878 - DNA, 20 bp, Artificial Sequence
  Description of Artificial Sequence: Synthetic oligonucleotide
  Target: LAMA2; (+) strand; PAM type: YTN; PAM sequence: TTC
tgggtcaattacccagccaa

SEQ ID NO: 395879 - DNA, 20 bp, Artificial Sequence
  Description of Artificial Sequence: Synthetic oligonucleotide
  Target: LAMA2; (+) strand; PAM type: YTN; PAM sequence: CTG
ggtcaattacccagccaaca

SEQ ID NO: 395880 - DNA, 20 bp, Artificial Sequence
  Description of Artificial Sequence: Synthetic oligonucleotide
  Target: LAMA2; (+) strand; PAM type: YTN; PAM sequence: TTA
cccagccaacactgaaaccc

SEQ ID NO: 395881 - DNA, 20 bp, Artificial Sequence
  Description of Artificial Sequence: Synthetic oligonucleotide
  Target: LAMA2; (+) strand; PAM type: YTN; PAM sequence: CTG
aaacccccttcttagcctgt

SEQ ID NO: 395882 - DNA, 20 bp, Artificial Sequence
  Description of Artificial Sequence: Synthetic oligonucleotide
  Target: LAMA2; (+) strand; PAM type: YTN; PAM sequence: CTT
cttagcctgttgacttggag

SEQ ID NO: 395883 - DNA, 20 bp, Artificial Sequence
  Description of Artificial Sequence: Synthetic oligonucleotide
  Target: LAMA2; (+) strand; PAM type: YTN; PAM sequence: TTC
ttagcctgttgacttggagg

SEQ ID NO: 395884 - DNA, 20 bp, Artificial Sequence
  Description of Artificial Sequence: Synthetic oligonucleotide
  Target: LAMA2; (+) strand; PAM type: YTN; PAM sequence: CTT
agcctgttgacttggaggta

SEQ ID NO: 395885 - DNA, 20 bp, Artificial Sequence
  Description of Artificial Sequence: Synthetic oligonucleotide
  Target: LAMA2; (+) strand; PAM type: YTN; PAM sequence: TTA
gcctgttgacttggaggtag

SEQ ID NO: 395886 - DNA, 20 bp, Artificial Sequence
  Description of Artificial Sequence: Synthetic oligonucleotide
  Target: LAMA2; (+) strand; PAM type: YTN; PAM sequence: CTG
ttgacttggaggtaggaggg

SEQ ID NO: 395887 - DNA, 20 bp, Artificial Sequence
  Description of Artificial Sequence: Synthetic oligonucleotide
  Target: LAMA2; (+) strand; PAM type: YTN; PAM sequence: TTG
acttggaggtaggagggccc

SEQ ID NO: 395888 - DNA, 20 bp, Artificial Sequence
  Description of Artificial Sequence: Synthetic oligonucleotide
  Target: LAMA2; (+) strand; PAM type: YTN; PAM sequence: CTT
ggaggtaggagggccccaat

SEQ ID NO: 395889 - DNA, 20 bp, Artificial Sequence
  Description of Artificial Sequence: Synthetic oligonucleotide
  Target: LAMA2; (+) strand; PAM type: YTN; PAM sequence: TTG
gaggtaggagggccccaatt

SEQ ID NO: 395890 - DNA, 20 bp, Artificial Sequence
  Description of Artificial Sequence: Synthetic oligonucleotide
  Target: LAMA2; (+) strand; PAM type: YTN; PAM sequence: TTG
gccaggtggtaatcttaact

SEQ ID NO: 395891 - DNA, 20 bp, Artificial Sequence
  Description of Artificial Sequence: Synthetic oligonucleotide
  Target: LAMA2; (+) strand; PAM type: YTN; PAM sequence: CTT
aacttccagtttaatggaat

SEQ ID NO: 395892 - DNA, 20 bp, Artificial Sequence
  Description of Artificial Sequence: Synthetic oligonucleotide
  Target: LAMA2; (+) strand; PAM type: YTN; PAM sequence: TTA
acttccagtttaatggaatc

SEQ ID NO: 395893 - DNA, 20 bp, Artificial Sequence
  Description of Artificial Sequence: Synthetic oligonucleotide
  Target: LAMA2; (+) strand; PAM type: YTN; PAM sequence: CTT
ccagtttaatggaatcattg

SEQ ID NO: 395894 - DNA, 20 bp, Artificial Sequence
  Description of Artificial Sequence: Synthetic oligonucleotide
  Target: LAMA2; (+) strand; PAM type: YTN; PAM sequence: TTC
cagtttaatggaatcattgt

SEQ ID NO: 395895 - DNA, 20 bp, Artificial Sequence
  Description of Artificial Sequence: Synthetic oligonucleotide
  Target: LAMA2; (+) strand; PAM type: YTN; PAM sequence: TTT
aatggaatcattgttgtatc

SEQ ID NO: 395896 - DNA, 20 bp, Artificial Sequence
  Description of Artificial Sequence: Synthetic oligonucleotide
  Target: LAMA2; (+) strand; PAM type: YTN; PAM sequence: TTA
atggaatcattgttgtatcc

SEQ ID NO: 395897 - DNA, 20 bp, Artificial Sequence
  Description of Artificial Sequence: Synthetic oligonucleotide
  Target: LAMA2; (+) strand; PAM type: YTN; PAM sequence: TTG
ttgtatcccttggtgacagc

SEQ ID NO: 395898 - DNA, 20 bp, Artificial Sequence
  Description of Artificial Sequence: Synthetic oligonucleotide
  Target: LAMA2; (+) strand; PAM type: YTN; PAM sequence: TTG
tatcccttggtgacagcatt

SEQ ID NO: 395899 - DNA, 20 bp, Artificial Sequence
  Description of Artificial Sequence: Synthetic oligonucleotide
  Target: LAMA2; (+) strand; PAM type: YTN; PAM sequence: CTT
ggtgacagcattcttccctc

SEQ ID NO: 395900 - DNA, 20 bp, Artificial Sequence
  Description of Artificial Sequence: Synthetic oligonucleotide
  Target: LAMA2; (+) strand; PAM type: YTN; PAM sequence: TTG
gtgacagcattcttccctct

SEQ ID NO: 395901 - DNA, 20 bp, Artificial Sequence
  Description of Artificial Sequence: Synthetic oligonucleotide
  Target: LAMA2; (+) strand; PAM type: YTN; PAM sequence: TTC
ttccctctggaactaagatg

SEQ ID NO: 395902 - DNA, 20 bp, Artificial Sequence
  Description of Artificial Sequence: Synthetic oligonucleotide
  Target: LAMA2; (+) strand; PAM type: YTN; PAM sequence: CTT
ccctctggaactaagatgtc

SEQ ID NO: 395903 - DNA, 20 bp, Artificial Sequence
  Description of Artificial Sequence: Synthetic oligonucleotide
  Target: LAMA2; (+) strand; PAM type: YTN; PAM sequence: TTC
cctctggaactaagatgtct

SEQ ID NO: 395904 - DNA, 20 bp, Artificial Sequence
  Description of Artificial Sequence: Synthetic oligonucleotide
  Target: LAMA2; (+) strand; PAM type: YTN; PAM sequence: CTC
tggaactaagatgtctaggc

SEQ ID NO: 395905 - DNA, 20 bp, Artificial Sequence
  Description of Artificial Sequence: Synthetic oligonucleotide
  Target: LAMA2; (+) strand; PAM type: YTN; PAM sequence: CTG
gaactaagatgtctaggcca

SEQ ID NO: 395906 - DNA, 20 bp, Artificial Sequence
  Description of Artificial Sequence: Synthetic oligonucleotide
  Target: LAMA2; (+) strand; PAM type: YTN; PAM sequence: CTA
agatgtctaggccagcagaa

SEQ ID NO: 395907 - DNA, 20 bp, Artificial Sequence
  Description of Artificial Sequence: Synthetic oligonucleotide
  Target: LAMA2; (+) strand; PAM type: YTN; PAM sequence: CTA
ggccagcagaacataatgtt

SEQ ID NO: 395908 - DNA, 20 bp, Artificial Sequence
  Description of Artificial Sequence: Synthetic oligonucleotide
  Target: LAMA2; (+) strand; PAM type: YTN; PAM sequence: TTG
tgggaacaggaagcaaaatt

SEQ ID NO: 395909 - DNA, 20 bp, Artificial Sequence
  Description of Artificial Sequence: Synthetic oligonucleotide
  Target: LAMA2; (+) strand; PAM type: YTN; PAM sequence: TTT
tgctagtgggtcactagtgg

SEQ ID NO: 395910 - DNA, 20 bp, Artificial Sequence
  Description of Artificial Sequence: Synthetic oligonucleotide
  Target: LAMA2; (+) strand; PAM type: YTN; PAM sequence: TTT
gctagtgggtcactagtggt

SEQ ID NO: 395911 - DNA, 20 bp, Artificial Sequence
  Description of Artificial Sequence: Synthetic oligonucleotide
  Target: LAMA2; (+) strand; PAM type: YTN; PAM sequence: TTG
ctagtgggtcactagtggtg

SEQ ID NO: 395912 - DNA, 20 bp, Artificial Sequence
  Description of Artificial Sequence: Synthetic oligonucleotide
  Target: LAMA2; (+) strand; PAM type: YTN; PAM sequence: CTA
gtgggtcactagtggtgatg

SEQ ID NO: 395913 - DNA, 20 bp, Artificial Sequence
  Description of Artificial Sequence: Synthetic oligonucleotide
  Target: LAMA2; (+) strand; PAM type: YTN; PAM sequence: CTA
gtggtgatggtgagtggtgc

SEQ ID NO: 395914 - DNA, 20 bp, Artificial Sequence
  Description of Artificial Sequence: Synthetic oligonucleotide
  Target: LAMA2; (+) strand; PAM type: YTN; PAM sequence: CTT
ccgcttccaccccttgattc

SEQ ID NO: 395915 - DNA, 20 bp, Artificial Sequence
  Description of Artificial Sequence: Synthetic oligonucleotide
  Target: LAMA2; (+) strand; PAM type: YTN; PAM sequence: TTC
cgcttccaccccttgattct

SEQ ID NO: 395916 - DNA, 20 bp, Artificial Sequence
  Description of Artificial Sequence: Synthetic oligonucleotide
  Target: LAMA2; (+) strand; PAM type: YTN; PAM sequence: CTT
ccaccccttgattctgggac

SEQ ID NO: 395917 - DNA, 20 bp, Artificial Sequence
  Description of Artificial Sequence: Synthetic oligonucleotide
  Target: LAMA2; (+) strand; PAM type: YTN; PAM sequence: TTC
caccccttgattctgggaca

SEQ ID NO: 395918 - DNA, 20 bp, Artificial Sequence
  Description of Artificial Sequence: Synthetic oligonucleotide
  Target: LAMA2; (+) strand; PAM type: YTN; PAM sequence: CTT
gattctgggacacgtgaaca

SEQ ID NO: 395919 - DNA, 20 bp, Artificial Sequence
  Description of Artificial Sequence: Synthetic oligonucleotide
  Target: LAMA2; (+) strand; PAM type: YTN; PAM sequence: TTG
attctgggacacgtgaacac

SEQ ID NO: 395920 - DNA, 20 bp, Artificial Sequence
  Description of Artificial Sequence: Synthetic oligonucleotide
  Target: LAMA2; (+) strand; PAM type: YTN; PAM sequence: TTC
tgggacacgtgaacactggc

SEQ ID NO: 395921 - DNA, 20 bp, Artificial Sequence
  Description of Artificial Sequence: Synthetic oligonucleotide
  Target: LAMA2; (+) strand; PAM type: YTN; PAM sequence: CTG
ggacacgtgaacactggcta

SEQ ID NO: 395922 - DNA, 20 bp, Artificial Sequence
  Description of Artificial Sequence: Synthetic oligonucleotide
  Target: LAMA2; (+) strand; PAM type: YTN; PAM sequence: CTG
gctatgggagaaacagtacc

SEQ ID NO: 395923 - DNA, 20 bp, Artificial Sequence
  Description of Artificial Sequence: Synthetic oligonucleotide
  Target: LAMA2; (+) strand; PAM type: YTN; PAM sequence: CTA
tgggagaaacagtaccatat

SEQ ID NO: 395924 - DNA, 20 bp, Artificial Sequence
  Description of Artificial Sequence: Synthetic oligonucleotide
  Target: LAMA2; (+) strand; PAM type: YTN; PAM sequence: TTT
tggacactgattcaaggcat

SEQ ID NO: 395925 - DNA, 20 bp, Artificial Sequence
  Description of Artificial Sequence: Synthetic oligonucleotide
  Target: LAMA2; (+) strand; PAM type: YTN; PAM sequence: TTT
ggacactgattcaaggcata

SEQ ID NO: 395926 - DNA, 20 bp, Artificial Sequence
  Description of Artificial Sequence: Synthetic oligonucleotide
  Target: LAMA2; (+) strand; PAM type: YTN; PAM sequence: TTG
gacactgattcaaggcatac

SEQ ID NO: 395927 - DNA, 20 bp, Artificial Sequence
  Description of Artificial Sequence: Synthetic oligonucleotide
  Target: LAMA2; (+) strand; PAM type: YTN; PAM sequence: CTG
attcaaggcatacacagcct

SEQ ID NO: 395928 - DNA, 20 bp, Artificial Sequence
  Description of Artificial Sequence: Synthetic oligonucleotide
  Target: LAMA2; (+) strand; PAM type: YTN; PAM sequence: TTC
aaggcatacacagccttctg

SEQ ID NO: 395929 - DNA, 20 bp, Artificial Sequence
  Description of Artificial Sequence: Synthetic oligonucleotide
  Target: LAMA2; (+) strand; PAM type: YTN; PAM sequence: CTT
ctggagaactttgccccagt

SEQ ID NO: 395930 - DNA, 20 bp, Artificial Sequence
  Description of Artificial Sequence: Synthetic oligonucleotide
  Target: LAMA2; (+) strand; PAM type: YTN; PAM sequence: TTC
tggagaactttgccccagtc

SEQ ID NO: 395931 - DNA, 20 bp, Artificial Sequence
  Description of Artificial Sequence: Synthetic oligonucleotide
  Target: LAMA2; (+) strand; PAM type: YTN; PAM sequence: CTG
gagaactttgccccagtccg

SEQ ID NO: 395932 - DNA, 20 bp, Artificial Sequence
  Description of Artificial Sequence: Synthetic oligonucleotide
  Target: LAMA2; (+) strand; PAM type: YTN; PAM sequence: CTT
tgccccagtccggcaaagta

SEQ ID NO: 395933 - DNA, 20 bp, Artificial Sequence
  Description of Artificial Sequence: Synthetic oligonucleotide
  Target: LAMA2; (+) strand; PAM type: YTN; PAM sequence: TTT
gccccagtccggcaaagtat

SEQ ID NO: 395934 - DNA, 20 bp, Artificial Sequence
  Description of Artificial Sequence: Synthetic oligonucleotide
  Target: LAMA2; (+) strand; PAM type: YTN; PAM sequence: TTG
ccccagtccggcaaagtatt

SEQ ID NO: 395935 - DNA, 20 bp, Artificial Sequence
  Description of Artificial Sequence: Synthetic oligonucleotide
  Target: LAMA2; (+) strand; PAM type: YTN; PAM sequence: TTG
tcacctagttggcattgtaa

SEQ ID NO: 395936 - DNA, 20 bp, Artificial Sequence
  Description of Artificial Sequence: Synthetic oligonucleotide
  Target: LAMA2; (+) strand; PAM type: YTN; PAM sequence: CTA
gttggcattgtaattatgac

SEQ ID NO: 395937 - DNA, 20 bp, Artificial Sequence
  Description of Artificial Sequence: Synthetic oligonucleotide
  Target: LAMA2; (+) strand; PAM type: YTN; PAM sequence: TTG
gcattgtaattatgacttca

SEQ ID NO: 395938 - DNA, 20 bp, Artificial Sequence
  Description of Artificial Sequence: Synthetic oligonucleotide
  Target: LAMA2; (+) strand; PAM type: YTN; PAM sequence: TTG
taattatgacttcaaaaggg

SEQ ID NO: 395939 - DNA, 20 bp, Artificial Sequence
  Description of Artificial Sequence: Synthetic oligonucleotide
  Target: LAMA2; (+) strand; PAM type: YTN; PAM sequence: TTA
tgacttcaaaagggcattcc

SEQ ID NO: 395940 - DNA, 20 bp, Artificial Sequence
  Description of Artificial Sequence: Synthetic oligonucleotide
  Target: LAMA2; (+) strand; PAM type: YTN; PAM sequence: CTT
caaaagggcattccacaatt

SEQ ID NO: 395941 - DNA, 20 bp, Artificial Sequence
  Description of Artificial Sequence: Synthetic oligonucleotide
  Target: LAMA2; (+) strand; PAM type: YTN; PAM sequence: TTC
aaaagggcattccacaattc

SEQ ID NO: 395942 - DNA, 20 bp, Artificial Sequence
  Description of Artificial Sequence: Synthetic oligonucleotide
  Target: LAMA2; (+) strand; PAM type: YTN; PAM sequence: TTC
cacaattctatcaatccacc

SEQ ID NO: 395943 - DNA, 20 bp, Artificial Sequence
  Description of Artificial Sequence: Synthetic oligonucleotide
  Target: LAMA2; (+) strand; PAM type: YTN; PAM sequence: TTC
tatcaatccacctgcttcag

SEQ ID NO: 395944 - DNA, 20 bp, Artificial Sequence
  Description of Artificial Sequence: Synthetic oligonucleotide
  Target: LAMA2; (+) strand; PAM type: YTN; PAM sequence: CTA
tcaatccacctgcttcagga

SEQ ID NO: 395945 - DNA, 20 bp, Artificial Sequence
  Description of Artificial Sequence: Synthetic oligonucleotide
  Target: LAMA2; (+) strand; PAM type: YTN; PAM sequence: CTG
cttcaggatgatgggaaaca

SEQ ID NO: 395946 - DNA, 20 bp, Artificial Sequence
  Description of Artificial Sequence: Synthetic oligonucleotide
  Target: LAMA2; (+) strand; PAM type: YTN; PAM sequence: CTT
caggatgatgggaaacatga

SEQ ID NO: 395947 - DNA, 20 bp, Artificial Sequence
  Description of Artificial Sequence: Synthetic oligonucleotide
  Target: LAMA2; (+) strand; PAM type: YTN; PAM sequence: TTC
aggatgatgggaaacatgat

SEQ ID NO: 395948 - DNA, 20 bp, Artificial Sequence
  Description of Artificial Sequence: Synthetic oligonucleotide
  Target: LAMA2; (+) strand; PAM type: YTN; PAM sequence: TTC
catgagcatgagcccagtgc

SEQ ID NO: 395949 - DNA, 20 bp, Artificial Sequence
  Description of Artificial Sequence: Synthetic oligonucleotide
  Target: LAMA2; (+) strand; PAM type: YTN; PAM sequence: CTG
cacttctttagctgtaaagt

SEQ ID NO: 395950 - DNA, 20 bp, Artificial Sequence
  Description of Artificial Sequence: Synthetic oligonucleotide
  Target: LAMA2; (+) strand; PAM type: YTN; PAM sequence: CTT
ctttagctgtaaagtgagtg

SEQ ID NO: 395951 - DNA, 20 bp, Artificial Sequence
  Description of Artificial Sequence: Synthetic oligonucleotide
  Target: LAMA2; (+) strand; PAM type: YTN; PAM sequence: TTC
tttagctgtaaagtgagtgc

SEQ ID NO: 395952 - DNA, 20 bp, Artificial Sequence
  Description of Artificial Sequence: Synthetic oligonucleotide
  Target: LAMA2; (+) strand; PAM type: YTN; PAM sequence: CTT
tagctgtaaagtgagtgcct

SEQ ID NO: 395953 - DNA, 20 bp, Artificial Sequence
  Description of Artificial Sequence: Synthetic oligonucleotide
  Target: LAMA2; (+) strand; PAM type: YTN; PAM sequence: TTT
agctgtaaagtgagtgcctt

SEQ ID NO: 395954 - DNA, 20 bp, Artificial Sequence
  Description of Artificial Sequence: Synthetic oligonucleotide
  Target: LAMA2; (+) strand; PAM type: YTN; PAM sequence: TTA
gctgtaaagtgagtgccttg

SEQ ID NO: 395955 - DNA, 20 bp, Artificial Sequence
  Description of Artificial Sequence: Synthetic oligonucleotide
  Target: LAMA2; (+) strand; PAM type: YTN; PAM sequence: CTG
taaagtgagtgccttgttca

SEQ ID NO: 395956 - DNA, 20 bp, Artificial Sequence
  Description of Artificial Sequence: Synthetic oligonucleotide
  Target: LAMA2; (+) strand; PAM type: YTN; PAM sequence: CTT
gttcagaggcaatgctgtgt

SEQ ID NO: 395957 - DNA, 20 bp, Artificial Sequence
  Description of Artificial Sequence: Synthetic oligonucleotide
  Target: LAMA2; (+) strand; PAM type: YTN; PAM sequence: TTG
ttcagaggcaatgctgtgtg

SEQ ID NO: 395958 - DNA, 20 bp, Artificial Sequence
  Description of Artificial Sequence: Synthetic oligonucleotide
  Target: LAMA2; (+) strand; PAM type: YTN; PAM sequence: TTC
agaggcaatgctgtgtggaa

SEQ ID NO: 395959 - DNA, 20 bp, Artificial Sequence
  Description of Artificial Sequence: Synthetic oligonucleotide
  Target: LAMA2; (+) strand; PAM type: YTN; PAM sequence: CTG
tgtggaataccatgacagcg

SEQ ID NO: 395960 - DNA, 20 bp, Artificial Sequence
  Description of Artificial Sequence: Synthetic oligonucleotide
  Target: LAMA2; (+) strand; PAM type: YTN; PAM sequence: TTC
tgggagttcacggatggtac

SEQ ID NO: 395961 - DNA, 20 bp, Artificial Sequence
  Description of Artificial Sequence: Synthetic oligonucleotide
  Target: LAMA2; (+) strand; PAM type: YTN; PAM sequence: CTG
ggagttcacggatggtactc

SEQ ID NO: 395962 - DNA, 20 bp, Artificial Sequence
  Description of Artificial Sequence: Synthetic oligonucleotide
  Target: LAMA2; (+) strand; PAM type: YTN; PAM sequence: TTC
acggatggtactcttggcag

SEQ ID NO: 395963 - DNA, 20 bp, Artificial Sequence
  Description of Artificial Sequence: Synthetic oligonucleotide
  Target: LAMA2; (+) strand; PAM type: YTN; PAM sequence: CTC
ttggcagaaacattgggcgt

SEQ ID NO: 395964 - DNA, 20 bp, Artificial Sequence
  Description of Artificial Sequence: Synthetic oligonucleotide
  Target: LAMA2; (+) strand; PAM type: YTN; PAM sequence: CTT
ggcagaaacattgggcgtag

SEQ ID NO: 395965 - DNA, 20 bp, Artificial Sequence
  Description of Artificial Sequence: Synthetic oligonucleotide
  Target: LAMA2; (+) strand; PAM type: YTN; PAM sequence: TTG
gcagaaacattgggcgtagg

SEQ ID NO: 395966 - DNA, 20 bp, Artificial Sequence
  Description of Artificial Sequence: Synthetic oligonucleotide
  Target: LAMA2; (+) strand; PAM type: YTN; PAM sequence: TTG
ggcgtaggatgggcaaatcc

SEQ ID NO: 395967 - DNA, 20 bp, Artificial Sequence
  Description of Artificial Sequence: Synthetic oligonucleotide
  Target: LAMA2; (+) strand; PAM type: YTN; PAM sequence: CTA
ttccattgaggacaaacctc

SEQ ID NO: 395968 - DNA, 20 bp, Artificial Sequence
  Description of Artificial Sequence: Synthetic oligonucleotide
  Target: LAMA2; (+) strand; PAM type: YTN; PAM sequence: TTC
cattgaggacaaacctctgc

SEQ ID NO: 395969 - DNA, 20 bp, Artificial Sequence
  Description of Artificial Sequence: Synthetic oligonucleotide
  Target: LAMA2; (+) strand; PAM type: YTN; PAM sequence: TTG
aggacaaacctctgcctttg

SEQ ID NO: 395970 - DNA, 20 bp, Artificial Sequence
  Description of Artificial Sequence: Synthetic oligonucleotide
  Target: LAMA2; (+) strand; PAM type: YTN; PAM sequence: CTC
tgcctttgcatgatggaaga

SEQ ID NO: 395971 - DNA, 20 bp, Artificial Sequence
  Description of Artificial Sequence: Synthetic oligonucleotide
  Target: LAMA2; (+) strand; PAM type: YTN; PAM sequence: CTG
cctttgcatgatggaagagg

SEQ ID NO: 395972 - DNA, 20 bp, Artificial Sequence
  Description of Artificial Sequence: Synthetic oligonucleotide
  Target: LAMA2; (+) strand; PAM type: YTN; PAM sequence: CTT
tgcatgatggaagaggtctg

SEQ ID NO: 395973 - DNA, 20 bp, Artificial Sequence
  Description of Artificial Sequence: Synthetic oligonucleotide
  Target: LAMA2; (+) strand; PAM type: YTN; PAM sequence: TTT
gcatgatggaagaggtctga

SEQ ID NO: 395974 - DNA, 20 bp, Artificial Sequence
  Description of Artificial Sequence: Synthetic oligonucleotide
  Target: LAMA2; (+) strand; PAM type: YTN; PAM sequence: TTG
catgatggaagaggtctgat

SEQ ID NO: 395975 - DNA, 20 bp, Artificial Sequence
  Description of Artificial Sequence: Synthetic oligonucleotide
  Target: LAMA2; (+) strand; PAM type: YTN; PAM sequence: CTG
atataatcaacctgccacca

SEQ ID NO: 395976 - DNA, 20 bp, Artificial Sequence
  Description of Artificial Sequence: Synthetic oligonucleotide
  Target: LAMA2; (+) strand; PAM type: YTN; PAM sequence: CTG
ccaccaagaagctggctgat

SEQ ID NO: 395977 - DNA, 20 bp, Artificial Sequence
  Description of Artificial Sequence: Synthetic oligonucleotide
  Target: LAMA2; (+) strand; PAM type: YTN; PAM sequence: CTG
gctgatcaccctgaggaagg

SEQ ID NO: 395978 - DNA, 20 bp, Artificial Sequence
  Description of Artificial Sequence: Synthetic oligonucleotide
  Target: LAMA2; (+) strand; PAM type: YTN; PAM sequence: CTG
atcaccctgaggaaggatgc

SEQ ID NO: 395979 - DNA, 20 bp, Artificial Sequence
  Description of Artificial Sequence: Synthetic oligonucleotide
  Target: LAMA2; (+) strand; PAM type: YTN; PAM sequence: CTG
aggaaggatgccagacggag

SEQ ID NO: 395980 - DNA, 20 bp, Artificial Sequence
  Description of Artificial Sequence: Synthetic oligonucleotide
  Target: LAMA2; (+) strand; PAM type: YTN; PAM sequence: CTC
agtgttggtttctgctgctg

SEQ ID NO: 395981 - DNA, 20 bp, Artificial Sequence
  Description of Artificial Sequence: Synthetic oligonucleotide
  Target: LAMA2; (+) strand; PAM type: YTN; PAM sequence: TTG
gtttctgctgctggcaaatt

SEQ ID NO: 395982 - DNA, 20 bp, Artificial Sequence
  Description of Artificial Sequence: Synthetic oligonucleotide
  Target: LAMA2; (+) strand; PAM type: YTN; PAM sequence: TTT
ctgctgctggcaaattgggc

SEQ ID NO: 395983 - DNA, 20 bp, Artificial Sequence
  Description of Artificial Sequence: Synthetic oligonucleotide
  Target: LAMA2; (+) strand; PAM type: YTN; PAM sequence: TTC
tgctgctggcaaattgggca

SEQ ID NO: 395984 - DNA, 20 bp, Artificial Sequence
  Description of Artificial Sequence: Synthetic oligonucleotide
  Target: LAMA2; (+) strand; PAM type: YTN; PAM sequence: CTG
ctgctggcaaattgggcact

SEQ ID NO: 395985 - DNA, 20 bp, Artificial Sequence
  Description of Artificial Sequence: Synthetic oligonucleotide
  Target: LAMA2; (+) strand; PAM type: YTN; PAM sequence: CTG
ctggcaaattgggcactcag

SEQ ID NO: 395986 - DNA, 20 bp, Artificial Sequence
  Description of Artificial Sequence: Synthetic oligonucleotide
  Target: LAMA2; (+) strand; PAM type: YTN; PAM sequence: CTG
gcaaattgggcactcagcgg

SEQ ID NO: 395987 - DNA, 20 bp, Artificial Sequence
  Description of Artificial Sequence: Synthetic oligonucleotide
  Target: LAMA2; (+) strand; PAM type: YTN; PAM sequence: TTG
ggcactcagcggtggctata

SEQ ID NO: 395988 - DNA, 20 bp, Artificial Sequence
  Description of Artificial Sequence: Synthetic oligonucleotide
  Target: LAMA2; (+) strand; PAM type: YTN; PAM sequence: CTC
agcggtggctatagtcaggt

SEQ ID NO: 395989 - DNA, 20 bp, Artificial Sequence
  Description of Artificial Sequence: Synthetic oligonucleotide
  Target: LAMA2; (+) strand; PAM type: YTN; PAM sequence: CTA
tagtcaggtcagtccatgtt

SEQ ID NO: 395990 - DNA, 20 bp, Artificial Sequence
  Description of Artificial Sequence: Synthetic oligonucleotide
  Target: LAMA2; (+) strand; PAM type: YTN; PAM sequence: TTG
ctgagcctatgcataacctc

SEQ ID NO: 395991 - DNA, 20 bp, Artificial Sequence
  Description of Artificial Sequence: Synthetic oligonucleotide
  Target: LAMA2; (+) strand; PAM type: YTN; PAM sequence: CTG
agcctatgcataacctccat

SEQ ID NO: 395992 - DNA, 20 bp, Artificial Sequence
  Description of Artificial Sequence: Synthetic oligonucleotide
  Target: LAMA2; (+) strand; PAM type: YTN; PAM sequence: CTA
tgcataacctccattcctgc

SEQ ID NO: 395993 - DNA, 20 bp, Artificial Sequence
  Description of Artificial Sequence: Synthetic oligonucleotide
  Target: LAMA2; (+) strand; PAM type: YTN; PAM sequence: CTC
cattcctgccaccatggcca

SEQ ID NO: 395994 - DNA, 20 bp, Artificial Sequence
  Description of Artificial Sequence: Synthetic oligonucleotide
  Target: LAMA2; (+) strand; PAM type: YTN; PAM sequence: TTC
ctgccaccatggccactttg

SEQ ID NO: 395995 - DNA, 20 bp, Artificial Sequence
  Description of Artificial Sequence: Synthetic oligonucleotide
  Target: LAMA2; (+) strand; PAM type: YTN; PAM sequence: CTG
ccaccatggccactttgttc

SEQ ID NO: 395996 - DNA, 20 bp, Artificial Sequence
  Description of Artificial Sequence: Synthetic oligonucleotide
  Target: LAMA2; (+) strand; PAM type: YTN; PAM sequence: CTT
tgttcatgagcccattgagc

SEQ ID NO: 395997 - DNA, 20 bp, Artificial Sequence
  Description of Artificial Sequence: Synthetic oligonucleotide
  Target: LAMA2; (+) strand; PAM type: YTN; PAM sequence: TTT
gttcatgagcccattgagcg

SEQ ID NO: 395998 - DNA, 20 bp, Artificial Sequence
  Description of Artificial Sequence: Synthetic oligonucleotide
  Target: LAMA2; (+) strand; PAM type: YTN; PAM sequence: TTG
ttcatgagcccattgagcga

SEQ ID NO: 395999 - DNA, 20 bp, Artificial Sequence
  Description of Artificial Sequence: Synthetic oligonucleotide
  Target: LAMA2; (+) strand; PAM type: YTN; PAM sequence: TTC
atgagcccattgagcgatga

SEQ ID NO: 396000 - DNA, 20 bp, Artificial Sequence
  Description of Artificial Sequence: Synthetic oligonucleotide
  Target: LAMA2; (+) strand; PAM type: YTN; PAM sequence: TTG
agcgatgacagggtggctgg

SEQ ID NO: 396001 - DNA, 20 bp, Artificial Sequence
  Description of Artificial Sequence: Synthetic oligonucleotide
  Target: LAMA2; (+) strand; PAM type: YTN; PAM sequence: CTG
gggaaagaggctgagtggtg

SEQ ID NO: 396002 - DNA, 20 bp, Artificial Sequence
  Description of Artificial Sequence: Synthetic oligonucleotide
  Target: LAMA2; (+) strand; PAM type: YTN; PAM sequence: CTG
agtggtgtacacagaatgag

SEQ ID NO: 396003 - DNA, 20 bp, Artificial Sequence
  Description of Artificial Sequence: Synthetic oligonucleotide
  Target: LAMA2; (+) strand; PAM type: YTN; PAM sequence: CTA
tccacttgattattaaaatc

SEQ ID NO: 396004 - DNA, 20 bp, Artificial Sequence
  Description of Artificial Sequence: Synthetic oligonucleotide
  Target: LAMA2; (+) strand; PAM type: YTN; PAM sequence: CTT
gattattaaaatcctcctca

SEQ ID NO: 396005 - DNA, 20 bp, Artificial Sequence
  Description of Artificial Sequence: Synthetic oligonucleotide
  Target: LAMA2; (+) strand; PAM type: YTN; PAM sequence: TTG
attattaaaatcctcctcag

SEQ ID NO: 396006 - DNA, 20 bp, Artificial Sequence
  Description of Artificial Sequence: Synthetic oligonucleotide
  Target: LAMA2; (+) strand; PAM type: YTN; PAM sequence: TTA
ttaaaatcctcctcagctga

SEQ ID NO: 396007 - DNA, 20 bp, Artificial Sequence
  Description of Artificial Sequence: Synthetic oligonucleotide
  Target: LAMA2; (+) strand; PAM type: YTN; PAM sequence: TTA
aaatcctcctcagctgaggt

SEQ ID NO: 396008 - DNA, 20 bp, Artificial Sequence
  Description of Artificial Sequence: Synthetic oligonucleotide
  Target: LAMA2; (+) strand; PAM type: YTN; PAM sequence: CTC
ctcagctgaggtcacccgtt

SEQ ID NO: 396009 - DNA, 20 bp, Artificial Sequence
  Description of Artificial Sequence: Synthetic oligonucleotide
  Target: LAMA2; (+) strand; PAM type: YTN; PAM sequence: CTC
agctgaggtcacccgttggt

SEQ ID NO: 396010 - DNA, 20 bp, Artificial Sequence
  Description of Artificial Sequence: Synthetic oligonucleotide
  Target: LAMA2; (+) strand; PAM type: YTN; PAM sequence: CTG
aggtcacccgttggtgagca

SEQ ID NO: 396011 - DNA, 20 bp, Artificial Sequence
  Description of Artificial Sequence: Synthetic oligonucleotide
  Target: LAMA2; (+) strand; PAM type: YTN; PAM sequence: TTG
gtgagcactcacataggata

SEQ ID NO: 396012 - DNA, 20 bp, Artificial Sequence
  Description of Artificial Sequence: Synthetic oligonucleotide
  Target: LAMA2; (+) strand; PAM type: YTN; PAM sequence: CTC
acataggatacaaatatctt

SEQ ID NO: 396013 - DNA, 20 bp, Artificial Sequence
  Description of Artificial Sequence: Synthetic oligonucleotide
  Target: LAMA2; (+) strand; PAM type: YTN; PAM sequence: CTT
cacagtttttgaccactcag

SEQ ID NO: 396014 - DNA, 20 bp, Artificial Sequence
  Description of Artificial Sequence: Synthetic oligonucleotide
  Target: LAMA2; (+) strand; PAM type: YTN; PAM sequence: TTC
acagtttttgaccactcaga

SEQ ID NO: 396015 - DNA, 20 bp, Artificial Sequence
  Description of Artificial Sequence: Synthetic oligonucleotide
  Target: LAMA2; (+) strand; PAM type: YTN; PAM sequence: TTT
ttgaccactcagagaggtcc

SEQ ID NO: 396016 - DNA, 20 bp, Artificial Sequence
  Description of Artificial Sequence: Synthetic oligonucleotide
  Target: LAMA2; (+) strand; PAM type: YTN; PAM sequence: TTT
tgaccactcagagaggtcca

SEQ ID NO: 396017 - DNA, 20 bp, Artificial Sequence
  Description of Artificial Sequence: Synthetic oligonucleotide
  Target: LAMA2; (+) strand; PAM type: YTN; PAM sequence: TTT
gaccactcagagaggtccat

SEQ ID NO: 396018 - DNA, 20 bp, Artificial Sequence
  Description of Artificial Sequence: Synthetic oligonucleotide
  Target: LAMA2; (+) strand; PAM type: YTN; PAM sequence: TTG
accactcagagaggtccatc

SEQ ID NO: 396019 - DNA, 20 bp, Artificial Sequence
  Description of Artificial Sequence: Synthetic oligonucleotide
  Target: LAMA2; (+) strand; PAM type: YTN; PAM sequence: CTC
agagaggtccatccacatac

SEQ ID NO: 396020 - DNA, 20 bp, Artificial Sequence
  Description of Artificial Sequence: Synthetic oligonucleotide
  Target: LAMA2; (+) strand; PAM type: YTN; PAM sequence: CTC
ttccccagattactttgcca

SEQ ID NO: 396021 - DNA, 20 bp, Artificial Sequence
  Description of Artificial Sequence: Synthetic oligonucleotide
  Target: LAMA2; (+) strand; PAM type: YTN; PAM sequence: CTT
ccccagattactttgccacc

SEQ ID NO: 396022 - DNA, 20 bp, Artificial Sequence
  Description of Artificial Sequence: Synthetic oligonucleotide
  Target: LAMA2; (+) strand; PAM type: YTN; PAM sequence: TTC
cccagattactttgccacca

SEQ ID NO: 396023 - DNA, 20 bp, Artificial Sequence
  Description of Artificial Sequence: Synthetic oligonucleotide
  Target: LAMA2; (+) strand; PAM type: YTN; PAM sequence: TTA
ctttgccaccaattttttaa

SEQ ID NO: 396024 - DNA, 20 bp, Artificial Sequence
  Description of Artificial Sequence: Synthetic oligonucleotide
  Target: LAMA2; (+) strand; PAM type: YTN; PAM sequence: CTT
tgccaccaattttttaatca

SEQ ID NO: 396025 - DNA, 20 bp, Artificial Sequence
  Description of Artificial Sequence: Synthetic oligonucleotide
  Target: LAMA2; (+) strand; PAM type: YTN; PAM sequence: TTT
gccaccaattttttaatcat

SEQ ID NO: 396026 - DNA, 20 bp, Artificial Sequence
  Description of Artificial Sequence: Synthetic oligonucleotide
  Target: LAMA2; (+) strand; PAM type: YTN; PAM sequence: TTG
ccaccaattttttaatcatg

SEQ ID NO: 396027 - DNA, 20 bp, Artificial Sequence
  Description of Artificial Sequence: Synthetic oligonucleotide
  Target: LAMA2; (+) strand; PAM type: YTN; PAM sequence: TTT
tttaatcatgcttcttccaa

SEQ ID NO: 396028 - DNA, 20 bp, Artificial Sequence
  Description of Artificial Sequence: Synthetic oligonucleotide
  Target: LAMA2; (+) strand; PAM type: YTN; PAM sequence: TTT
ttaatcatgcttcttccaag

SEQ ID NO: 396029 - DNA, 20 bp, Artificial Sequence
  Description of Artificial Sequence: Synthetic oligonucleotide
  Target: LAMA2; (+) strand; PAM type: YTN; PAM sequence: TTT
taatcatgcttcttccaagt

SEQ ID NO: 396030 - DNA, 20 bp, Artificial Sequence
  Description of Artificial Sequence: Synthetic oligonucleotide
  Target: LAMA2; (+) strand; PAM type: YTN; PAM sequence: TTT
aatcatgcttcttccaagtc

SEQ ID NO: 396031 - DNA, 20 bp, Artificial Sequence
  Description of Artificial Sequence: Synthetic oligonucleotide
  Target: LAMA2; (+) strand; PAM type: YTN; PAM sequence: TTA
atcatgcttcttccaagtcc

SEQ ID NO: 396032 - DNA, 20 bp, Artificial Sequence
  Description of Artificial Sequence: Synthetic oligonucleotide
  Target: LAMA2; (+) strand; PAM type: YTN; PAM sequence: CTT
cttccaagtccctgaccatc

SEQ ID NO: 396033 - DNA, 20 bp, Artificial Sequence
  Description of Artificial Sequence: Synthetic oligonucleotide
  Target: LAMA2; (+) strand; PAM type: YTN; PAM sequence: TTC
ttccaagtccctgaccatcc

SEQ ID NO: 396034 - DNA, 20 bp, Artificial Sequence
  Description of Artificial Sequence: Synthetic oligonucleotide
  Target: LAMA2; (+) strand; PAM type: YTN; PAM sequence: CTT
ccaagtccctgaccatccag

SEQ ID NO: 396035 - DNA, 20 bp, Artificial Sequence
  Description of Artificial Sequence: Synthetic oligonucleotide
  Target: LAMA2; (+) strand; PAM type: YTN; PAM sequence: TTC
caagtccctgaccatccagc

SEQ ID NO: 396036 - DNA, 20 bp, Artificial Sequence
  Description of Artificial Sequence: Synthetic oligonucleotide
  Target: LAMA2; (+) strand; PAM type: YTN; PAM sequence: CTG
accatccagccaaaccattg

SEQ ID NO: 396037 - DNA, 20 bp, Artificial Sequence
  Description of Artificial Sequence: Synthetic oligonucleotide
  Target: LAMA2; (+) strand; PAM type: YTN; PAM sequence: TTG
gctacagcacattaattagt

SEQ ID NO: 396038 - DNA, 20 bp, Artificial Sequence
  Description of Artificial Sequence: Synthetic oligonucleotide
  Target: LAMA2; (+) strand; PAM type: YTN; PAM sequence: CTA
cagcacattaattagtatat

SEQ ID NO: 396039 - DNA, 20 bp, Artificial Sequence
  Description of Artificial Sequence: Synthetic oligonucleotide
  Target: LAMA2; (+) strand; PAM type: YTN; PAM sequence: TTA
attagtatataattacacat

SEQ ID NO: 396040 - DNA, 20 bp, Artificial Sequence
  Description of Artificial Sequence: Synthetic oligonucleotide
  Target: LAMA2; (+) strand; PAM type: YTN; PAM sequence: TTA
gtatataattacacatctgg

SEQ ID NO: 396041 - DNA, 20 bp, Artificial Sequence
  Description of Artificial Sequence: Synthetic oligonucleotide
  Target: LAMA2; (+) strand; PAM type: YTN; PAM sequence: TTA
cacatctggccatttcttct

SEQ ID NO: 396042 - DNA, 20 bp, Artificial Sequence
  Description of Artificial Sequence: Synthetic oligonucleotide
  Target: LAMA2; (+) strand; PAM type: YTN; PAM sequence: CTG
gccatttcttcttccaagca

SEQ ID NO: 396043 - DNA, 20 bp, Artificial Sequence
  Description of Artificial Sequence: Synthetic oligonucleotide
  Target: LAMA2; (+) strand; PAM type: YTN; PAM sequence: TTT
cttcttccaagcaagtgcac

SEQ ID NO: 396044 - DNA, 20 bp, Artificial Sequence
  Description of Artificial Sequence: Synthetic oligonucleotide
  Target: LAMA2; (+) strand; PAM type: YTN; PAM sequence: TTC
ttcttccaagcaagtgcaca

SEQ ID NO: 396045 - DNA, 20 bp, Artificial Sequence
  Description of Artificial Sequence: Synthetic oligonucleotide
  Target: LAMA2; (+) strand; PAM type: YTN; PAM sequence: CTT
cttccaagcaagtgcacaac

SEQ ID NO: 396046 - DNA, 20 bp, Artificial Sequence
  Description of Artificial Sequence: Synthetic oligonucleotide
  Target: LAMA2; (+) strand; PAM type: YTN; PAM sequence: TTC
ttccaagcaagtgcacaacc

SEQ ID NO: 396047 - DNA, 20 bp, Artificial Sequence
  Description of Artificial Sequence: Synthetic oligonucleotide
  Target: LAMA2; (+) strand; PAM type: YTN; PAM sequence: CTT
ccaagcaagtgcacaaccag

SEQ ID NO: 396048 - DNA, 20 bp, Artificial Sequence
  Description of Artificial Sequence: Synthetic oligonucleotide
  Target: LAMA2; (+) strand; PAM type: YTN; PAM sequence: TTC
caagcaagtgcacaaccagg

SEQ ID NO: 396049 - DNA, 20 bp, Artificial Sequence
  Description of Artificial Sequence: Synthetic oligonucleotide
  Target: LAMA2; (+) strand; PAM type: YTN; PAM sequence: CTG
ctcaaaattctgccccctgg

SEQ ID NO: 396050 - DNA, 20 bp, Artificial Sequence
  Description of Artificial Sequence: Synthetic oligonucleotide
  Target: LAMA2; (+) strand; PAM type: YTN; PAM sequence: CTC
aaaattctgccccctgggaa

SEQ ID NO: 396051 - DNA, 20 bp, Artificial Sequence
  Description of Artificial Sequence: Synthetic oligonucleotide
  Target: LAMA2; (+) strand; PAM type: YTN; PAM sequence: TTC
tgccccctgggaagacttcc

SEQ ID NO: 396052 - DNA, 20 bp, Artificial Sequence
  Description of Artificial Sequence: Synthetic oligonucleotide
  Target: LAMA2; (+) strand; PAM type: YTN; PAM sequence: CTG
ccccctgggaagacttccct

SEQ ID NO: 396053 - DNA, 20 bp, Artificial Sequence
  Description of Artificial Sequence: Synthetic oligonucleotide
  Target: LAMA2; (+) strand; PAM type: YTN; PAM sequence: CTG
ggaagacttccctttgctac

SEQ ID NO: 396054 - DNA, 20 bp, Artificial Sequence
  Description of Artificial Sequence: Synthetic oligonucleotide
  Target: LAMA2; (+) strand; PAM type: YTN; PAM sequence: CTT
ccctttgctactgtccttca

SEQ ID NO: 396055 - DNA, 20 bp, Artificial Sequence
  Description of Artificial Sequence: Synthetic oligonucleotide
  Target: LAMA2; (+) strand; PAM type: YTN; PAM sequence: TTC
cctttgctactgtccttcag

SEQ ID NO: 396056 - DNA, 20 bp, Artificial Sequence
  Description of Artificial Sequence: Synthetic oligonucleotide
  Target: LAMA2; (+) strand; PAM type: YTN; PAM sequence: CTT
tgctactgtccttcagggat

SEQ ID NO: 396057 - DNA, 20 bp, Artificial Sequence
  Description of Artificial Sequence: Synthetic oligonucleotide
  Target: LAMA2; (+) strand; PAM type: YTN; PAM sequence: TTT
gctactgtccttcagggatg

SEQ ID NO: 396058 - DNA, 20 bp, Artificial Sequence
  Description of Artificial Sequence: Synthetic oligonucleotide
  Target: LAMA2; (+) strand; PAM type: YTN; PAM sequence: TTG
ctactgtccttcagggatgt

SEQ ID NO: 396059 - DNA, 20 bp, Artificial Sequence
  Description of Artificial Sequence: Synthetic oligonucleotide
  Target: LAMA2; (+) strand; PAM type: YTN; PAM sequence: CTA
ctgtccttcagggatgtcct

SEQ ID NO: 396060 - DNA, 20 bp, Artificial Sequence
  Description of Artificial Sequence: Synthetic oligonucleotide
  Target: LAMA2; (+) strand; PAM type: YTN; PAM sequence: CTG
tccttcagggatgtcctaga

SEQ ID NO: 396061 - DNA, 20 bp, Artificial Sequence
  Description of Artificial Sequence: Synthetic oligonucleotide
  Target: LAMA2; (+) strand; PAM type: YTN; PAM sequence: CTT
cagggatgtcctagaaaggg

SEQ ID NO: 396062 - DNA, 20 bp, Artificial Sequence
  Description of Artificial Sequence: Synthetic oligonucleotide
  Target: LAMA2; (+) strand; PAM type: YTN; PAM sequence: TTC
agggatgtcctagaaagggg

SEQ ID NO: 396063 - DNA, 20 bp, Artificial Sequence
  Description of Artificial Sequence: Synthetic oligonucleotide
  Target: LAMA2; (+) strand; PAM type: YTN; PAM sequence: CTA
gaaaggggctgtagtgctgc

SEQ ID NO: 396064 - DNA, 20 bp, Artificial Sequence
  Description of Artificial Sequence: Synthetic oligonucleotide
  Target: LAMA2; (+) strand; PAM type: YTN; PAM sequence: CTG
tagtgctgcagctgtccact

SEQ ID NO: 396065 - DNA, 20 bp, Artificial Sequence
  Description of Artificial Sequence: Synthetic oligonucleotide
  Target: LAMA2; (+) strand; PAM type: YTN; PAM sequence: CTG
cagctgtccacttttgggtg

SEQ ID NO: 396066 - DNA, 20 bp, Artificial Sequence
  Description of Artificial Sequence: Synthetic oligonucleotide
  Target: LAMA2; (+) strand; PAM type: YTN; PAM sequence: CTG
tccacttttgggtgctacct

SEQ ID NO: 396067 - DNA, 20 bp, Artificial Sequence
  Description of Artificial Sequence: Synthetic oligonucleotide
  Target: LAMA2; (+) strand; PAM type: YTN; PAM sequence: CTT
ttgggtgctacctgcatatc

SEQ ID NO: 396068 - DNA, 20 bp, Artificial Sequence
  Description of Artificial Sequence: Synthetic oligonucleotide
  Target: LAMA2; (+) strand; PAM type: YTN; PAM sequence: TTT
tgggtgctacctgcatatct

SEQ ID NO: 396069 - DNA, 20 bp, Artificial Sequence
  Description of Artificial Sequence: Synthetic oligonucleotide
  Target: LAMA2; (+) strand; PAM type: YTN; PAM sequence: TTT
gggtgctacctgcatatctt

SEQ ID NO: 396070 - DNA, 20 bp, Artificial Sequence
  Description of Artificial Sequence: Synthetic oligonucleotide
  Target: LAMA2; (+) strand; PAM type: YTN; PAM sequence: TTG
ggtgctacctgcatatcttg

SEQ ID NO: 396071 - DNA, 20 bp, Artificial Sequence
  Description of Artificial Sequence: Synthetic oligonucleotide
  Target: LAMA2; (+) strand; PAM type: YTN; PAM sequence: CTA
cctgcatatcttgcagaatc

SEQ ID NO: 396072 - DNA, 20 bp, Artificial Sequence
  Description of Artificial Sequence: Synthetic oligonucleotide
  Target: LAMA2; (+) strand; PAM type: YTN; PAM sequence: CTG
catatcttgcagaatcatct

SEQ ID NO: 396073 - DNA, 20 bp, Artificial Sequence
  Description of Artificial Sequence: Synthetic oligonucleotide
  Target: LAMA2; (+) strand; PAM type: YTN; PAM sequence: CTT
gcagaatcatctgtgaacca

SEQ ID NO: 396074 - DNA, 20 bp, Artificial Sequence
  Description of Artificial Sequence: Synthetic oligonucleotide
  Target: LAMA2; (+) strand; PAM type: YTN; PAM sequence: TTG
cagaatcatctgtgaaccag

SEQ ID NO: 396075 - DNA, 20 bp, Artificial Sequence
  Description of Artificial Sequence: Synthetic oligonucleotide
  Target: LAMA2; (+) strand; PAM type: YTN; PAM sequence: CTG
tgaaccaggccctagtcttc

SEQ ID NO: 396076 - DNA, 20 bp, Artificial Sequence
  Description of Artificial Sequence: Synthetic oligonucleotide
  Target: LAMA2; (+) strand; PAM type: YTN; PAM sequence: CTA
gtcttctctgcctctgtcaa

SEQ ID NO: 396077 - DNA, 20 bp, Artificial Sequence
  Description of Artificial Sequence: Synthetic oligonucleotide
  Target: LAMA2; (+) strand; PAM type: YTN; PAM sequence: CTT
ctctgcctctgtcaactgat

SEQ ID NO: 396078 - DNA, 20 bp, Artificial Sequence
  Description of Artificial Sequence: Synthetic oligonucleotide
  Target: LAMA2; (+) strand; PAM type: YTN; PAM sequence: TTC
tctgcctctgtcaactgatc

SEQ ID NO: 396079 - DNA, 20 bp, Artificial Sequence
  Description of Artificial Sequence: Synthetic oligonucleotide
  Target: LAMA2; (+) strand; PAM type: YTN; PAM sequence: CTC
tgcctctgtcaactgatcat

SEQ ID NO: 396080 - DNA, 20 bp, Artificial Sequence
  Description of Artificial Sequence: Synthetic oligonucleotide
  Target: LAMA2; (+) strand; PAM type: YTN; PAM sequence: CTG
cctctgtcaactgatcatgg

SEQ ID NO: 396081 - DNA, 20 bp, Artificial Sequence
  Description of Artificial Sequence: Synthetic oligonucleotide
  Target: LAMA2; (+) strand; PAM type: YTN; PAM sequence: CTC
tgtcaactgatcatggggaa

SEQ ID NO: 396082 - DNA, 20 bp, Artificial Sequence
  Description of Artificial Sequence: Synthetic oligonucleotide
  Target: LAMA2; (+) strand; PAM type: YTN; PAM sequence: CTG
tcaactgatcatggggaact

SEQ ID NO: 396083 - DNA, 20 bp, Artificial Sequence
  Description of Artificial Sequence: Synthetic oligonucleotide
  Target: LAMA2; (+) strand; PAM type: YTN; PAM sequence: CTG
atcatggggaactccctgtg

SEQ ID NO: 396084 - DNA, 20 bp, Artificial Sequence
  Description of Artificial Sequence: Synthetic oligonucleotide
  Target: LAMA2; (+) strand; PAM type: YTN; PAM sequence: CTC
cctgtgaggccatcagtgca

SEQ ID NO: 396085 - DNA, 20 bp, Artificial Sequence
  Description of Artificial Sequence: Synthetic oligonucleotide
  Target: LAMA2; (+) strand; PAM type: YTN; PAM sequence: CTG
tgaggccatcagtgcaggct

SEQ ID NO: 396086 - DNA, 20 bp, Artificial Sequence
  Description of Artificial Sequence: Synthetic oligonucleotide
  Target: LAMA2; (+) strand; PAM type: YTN; PAM sequence: CTT
ggggagagaaggcagggtgg

SEQ ID NO: 396087 - DNA, 20 bp, Artificial Sequence
  Description of Artificial Sequence: Synthetic oligonucleotide
  Target: LAMA2; (+) strand; PAM type: YTN; PAM sequence: TTG
gggagagaaggcagggtggc

SEQ ID NO: 396088 - DNA, 20 bp, Artificial Sequence
  Description of Artificial Sequence: Synthetic oligonucleotide
  Target: LAMA2; (+) strand; PAM type: YTN; PAM sequence: TTT
gagccacttcctcatgcaac

SEQ ID NO: 396089 - DNA, 20 bp, Artificial Sequence
  Description of Artificial Sequence: Synthetic oligonucleotide
  Target: LAMA2; (+) strand; PAM type: YTN; PAM sequence: TTG
agccacttcctcatgcaact

SEQ ID NO: 396090 - DNA, 20 bp, Artificial Sequence
  Description of Artificial Sequence: Synthetic oligonucleotide
  Target: LAMA2; (+) strand; PAM type: YTN; PAM sequence: CTT
cctcatgcaactgacttgtg

SEQ ID NO: 396091 - DNA, 20 bp, Artificial Sequence
  Description of Artificial Sequence: Synthetic oligonucleotide
  Target: LAMA2; (+) strand; PAM type: YTN; PAM sequence: TTC
ctcatgcaactgacttgtgc

SEQ ID NO: 396092 - DNA, 20 bp, Artificial Sequence
  Description of Artificial Sequence: Synthetic oligonucleotide
  Target: LAMA2; (+) strand; PAM type: YTN; PAM sequence: CTC
atgcaactgacttgtgcctt

SEQ ID NO: 396093 - DNA, 20 bp, Artificial Sequence
  Description of Artificial Sequence: Synthetic oligonucleotide
  Target: LAMA2; (+) strand; PAM type: YTN; PAM sequence: CTG
acttgtgcctttaggactgg

SEQ ID NO: 396094 - DNA, 20 bp, Artificial Sequence
  Description of Artificial Sequence: Synthetic oligonucleotide
  Target: LAMA2; (+) strand; PAM type: YTN; PAM sequence: CTT
gtgcctttaggactggctcg

SEQ ID NO: 396095 - DNA, 20 bp, Artificial Sequence
  Description of Artificial Sequence: Synthetic oligonucleotide
  Target: LAMA2; (+) strand; PAM type: YTN; PAM sequence: TTG
tgcctttaggactggctcga

SEQ ID NO: 396096 - DNA, 20 bp, Artificial Sequence
  Description of Artificial Sequence: Synthetic oligonucleotide
  Target: LAMA2; (+) strand; PAM type: YTN; PAM sequence: CTT
taggactggctcgagcctga

SEQ ID NO: 396097 - DNA, 20 bp, Artificial Sequence
  Description of Artificial Sequence: Synthetic oligonucleotide
  Target: LAMA2; (+) strand; PAM type: YTN; PAM sequence: TTT
aggactggctcgagcctgat

SEQ ID NO: 396098 - DNA, 20 bp, Artificial Sequence
  Description of Artificial Sequence: Synthetic oligonucleotide
  Target: LAMA2; (+) strand; PAM type: YTN; PAM sequence: TTA
ggactggctcgagcctgatc

SEQ ID NO: 396099 - DNA, 20 bp, Artificial Sequence
  Description of Artificial Sequence: Synthetic oligonucleotide
  Target: LAMA2; (+) strand; PAM type: YTN; PAM sequence: CTG
gctcgagcctgatcatgtat

SEQ ID NO: 396100 - DNA, 20 bp, Artificial Sequence
  Description of Artificial Sequence: Synthetic oligonucleotide
  Target: LAMA2; (+) strand; PAM type: YTN; PAM sequence: CTC
gagcctgatcatgtatatac

SEQ ID NO: 396101 - DNA, 20 bp, Artificial Sequence
  Description of Artificial Sequence: Synthetic oligonucleotide
  Target: LAMA2; (+) strand; PAM type: YTN; PAM sequence: CTG
atcatgtatataccacttac

SEQ ID NO: 396102 - DNA, 20 bp, Artificial Sequence
  Description of Artificial Sequence: Synthetic oligonucleotide
  Target: LAMA2; (+) strand; PAM type: YTN; PAM sequence: CTT
acagttgatgatggaaggct

SEQ ID NO: 396103 - DNA, 20 bp, Artificial Sequence
  Description of Artificial Sequence: Synthetic oligonucleotide
  Target: LAMA2; (+) strand; PAM type: YTN; PAM sequence: TTA
cagttgatgatggaaggctg

SEQ ID NO: 396104 - DNA, 20 bp, Artificial Sequence
  Description of Artificial Sequence: Synthetic oligonucleotide
  Target: LAMA2; (+) strand; PAM type: YTN; PAM sequence: TTG
atgatggaaggctgctgtgt

SEQ ID NO: 396105 - DNA, 20 bp, Artificial Sequence
  Description of Artificial Sequence: Synthetic oligonucleotide
  Target: LAMA2; (+) strand; PAM type: YTN; PAM sequence: CTG
ctgtgtatgcccaactttat

SEQ ID NO: 396106 - DNA, 20 bp, Artificial Sequence
  Description of Artificial Sequence: Synthetic oligonucleotide
  Target: LAMA2; (+) strand; PAM type: YTN; PAM sequence: CTG
tgtatgcccaactttatggc

SEQ ID NO: 396107 - DNA, 20 bp, Artificial Sequence
  Description of Artificial Sequence: Synthetic oligonucleotide
  Target: LAMA2; (+) strand; PAM type: YTN; PAM sequence: CTT
tatggctagatgggtcagaa

SEQ ID NO: 396108 - DNA, 20 bp, Artificial Sequence
  Description of Artificial Sequence: Synthetic oligonucleotide
  Target: LAMA2; (+) strand; PAM type: YTN; PAM sequence: TTT
atggctagatgggtcagaaa

SEQ ID NO: 396109 - DNA, 20 bp, Artificial Sequence
  Description of Artificial Sequence: Synthetic oligonucleotide
  Target: LAMA2; (+) strand; PAM type: YTN; PAM sequence: TTA
tggctagatgggtcagaaag

SEQ ID NO: 396110 - DNA, 20 bp, Artificial Sequence
  Description of Artificial Sequence: Synthetic oligonucleotide
  Target: LAMA2; (+) strand; PAM type: YTN; PAM sequence: CTA
gatgggtcagaaagcatcca

SEQ ID NO: 396111 - DNA, 20 bp, Artificial Sequence
  Description of Artificial Sequence: Synthetic oligonucleotide
  Target: LAMA2; (+) strand; PAM type: YTN; PAM sequence: TTC
atgaaaggcagtttaggttg

SEQ ID NO: 396112 - DNA, 20 bp, Artificial Sequence
  Description of Artificial Sequence: Synthetic oligonucleotide
  Target: LAMA2; (+) strand; PAM type: YTN; PAM sequence: TTT
aggttgcatggtgacttgat

SEQ ID NO: 396113 - DNA, 20 bp, Artificial Sequence
  Description of Artificial Sequence: Synthetic oligonucleotide
  Target: LAMA2; (+) strand; PAM type: YTN; PAM sequence: TTA
ggttgcatggtgacttgatg

SEQ ID NO: 396114 - DNA, 20 bp, Artificial Sequence
  Description of Artificial Sequence: Synthetic oligonucleotide
  Target: LAMA2; (+) strand; PAM type: YTN; PAM sequence: TTG
catggtgacttgatgaccta

SEQ ID NO: 396115 - DNA, 20 bp, Artificial Sequence
  Description of Artificial Sequence: Synthetic oligonucleotide
  Target: LAMA2; (+) strand; PAM type: YTN; PAM sequence: CTT
gatgacctacagtcaaacat

SEQ ID NO: 396116 - DNA, 20 bp, Artificial Sequence
  Description of Artificial Sequence: Synthetic oligonucleotide
  Target: LAMA2; (+) strand; PAM type: YTN; PAM sequence: TTG
atgacctacagtcaaacatt

SEQ ID NO: 396117 - DNA, 20 bp, Artificial Sequence
  Description of Artificial Sequence: Synthetic oligonucleotide
  Target: LAMA2; (+) strand; PAM type: YTN; PAM sequence: CTA
cagtcaaacattcagtttct

SEQ ID NO: 396118 - DNA, 20 bp, Artificial Sequence
  Description of Artificial Sequence: Synthetic oligonucleotide
  Target: LAMA2; (+) strand; PAM type: YTN; PAM sequence: TTC
agtttctaccaaagcccagt

SEQ ID NO: 396119 - DNA, 20 bp, Artificial Sequence
  Description of Artificial Sequence: Synthetic oligonucleotide
  Target: LAMA2; (+) strand; PAM type: YTN; PAM sequence: TTT
ctaccaaagcccagtaacag

SEQ ID NO: 396120 - DNA, 20 bp, Artificial Sequence
  Description of Artificial Sequence: Synthetic oligonucleotide
  Target: LAMA2; (+) strand; PAM type: YTN; PAM sequence: TTC
taccaaagcccagtaacagg

SEQ ID NO: 396121 - DNA, 20 bp, Artificial Sequence
  Description of Artificial Sequence: Synthetic oligonucleotide
  Target: LAMA2; (+) strand; PAM type: YTN; PAM sequence: CTA
ccaaagcccagtaacaggcc

SEQ ID NO: 396122 - DNA, 20 bp, Artificial Sequence
  Description of Artificial Sequence: Synthetic oligonucleotide
  Target: LAMA2; (+) strand; PAM type: YTN; PAM sequence: TTG
tctctcaaatggagagtagt

SEQ ID NO: 396123 - DNA, 20 bp, Artificial Sequence
  Description of Artificial Sequence: Synthetic oligonucleotide
  Target: LAMA2; (+) strand; PAM type: YTN; PAM sequence: CTC
tcaaatggagagtagtgatc

SEQ ID NO: 396124 - DNA, 20 bp, Artificial Sequence
  Description of Artificial Sequence: Synthetic oligonucleotide
  Target: LAMA2; (+) strand; PAM type: YTN; PAM sequence: CTC
aaatggagagtagtgatctg

SEQ ID NO: 396125 - DNA, 20 bp, Artificial Sequence
  Description of Artificial Sequence: Synthetic oligonucleotide
  Target: LAMA2; (+) strand; PAM type: YTN; PAM sequence: CTG
cagaagatggcagggccttg

SEQ ID NO: 396126 - DNA, 20 bp, Artificial Sequence
  Description of Artificial Sequence: Synthetic oligonucleotide
  Target: LAMA2; (+) strand; PAM type: YTN; PAM sequence: CTT
gctccaaaatcctagaggct

SEQ ID NO: 396127 - DNA, 20 bp, Artificial Sequence
  Description of Artificial Sequence: Synthetic oligonucleotide
  Target: LAMA2; (+) strand; PAM type: YTN; PAM sequence: TTG
ctccaaaatcctagaggctt

SEQ ID NO: 396128 - DNA, 20 bp, Artificial Sequence
  Description of Artificial Sequence: Synthetic oligonucleotide
  Target: LAMA2; (+) strand; PAM type: YTN; PAM sequence: CTC
caaaatcctagaggcttcca

SEQ ID NO: 396129 - DNA, 20 bp, Artificial Sequence
  Description of Artificial Sequence: Synthetic oligonucleotide
  Target: LAMA2; (+) strand; PAM type: YTN; PAM sequence: CTA
gaggcttccacctctaggag

SEQ ID NO: 396130 - DNA, 20 bp, Artificial Sequence
  Description of Artificial Sequence: Synthetic oligonucleotide
  Target: LAMA2; (+) strand; PAM type: YTN; PAM sequence: CTT
ccacctctaggagtcaccta

SEQ ID NO: 396131 - DNA, 20 bp, Artificial Sequence
  Description of Artificial Sequence: Synthetic oligonucleotide
  Target: LAMA2; (+) strand; PAM type: YTN; PAM sequence: TTC
cacctctaggagtcacctat

SEQ ID NO: 396132 - DNA, 20 bp, Artificial Sequence
  Description of Artificial Sequence: Synthetic oligonucleotide
  Target: LAMA2; (+) strand; PAM type: YTN; PAM sequence: CTC
taggagtcacctatgggagc

SEQ ID NO: 396133 - DNA, 20 bp, Artificial Sequence
  Description of Artificial Sequence: Synthetic oligonucleotide
  Target: LAMA2; (+) strand; PAM type: YTN; PAM sequence: CTA
ggagtcacctatgggagcct

SEQ ID NO: 396134 - DNA, 20 bp, Artificial Sequence
  Description of Artificial Sequence: Synthetic oligonucleotide
  Target: LAMA2; (+) strand; PAM type: YTN; PAM sequence: CTA
tgggagcctgccaaaggctt

SEQ ID NO: 396135 - DNA, 20 bp, Artificial Sequence
  Description of Artificial Sequence: Synthetic oligonucleotide
  Target: LAMA2; (+) strand; PAM type: YTN; PAM sequence: CTG
ccaaaggcttcaaacaggat

SEQ ID NO: 396136 - DNA, 20 bp, Artificial Sequence
  Description of Artificial Sequence: Synthetic oligonucleotide
  Target: LAMA2; (+) strand; PAM type: YTN; PAM sequence: CTT
caaacaggatccctgtctgc

SEQ ID NO: 396137 - DNA, 20 bp, Artificial Sequence
  Description of Artificial Sequence: Synthetic oligonucleotide
  Target: LAMA2; (+) strand; PAM type: YTN; PAM sequence: TTC
aaacaggatccctgtctgcc

SEQ ID NO: 396138 - DNA, 20 bp, Artificial Sequence
  Description of Artificial Sequence: Synthetic oligonucleotide
  Target: LAMA2; (+) strand; PAM type: YTN; PAM sequence: CTG
tctgccattgacacctcaag

SEQ ID NO: 396139 - DNA, 20 bp, Artificial Sequence
  Description of Artificial Sequence: Synthetic oligonucleotide
  Target: LAMA2; (+) strand; PAM type: YTN; PAM sequence: CTG
ccattgacacctcaaggact

SEQ ID NO: 396140 - DNA, 20 bp, Artificial Sequence
  Description of Artificial Sequence: Synthetic oligonucleotide
  Target: LAMA2; (+) strand; PAM type: YTN; PAM sequence: TTG
acacctcaaggactattgga

SEQ ID NO: 396141 - DNA, 20 bp, Artificial Sequence
  Description of Artificial Sequence: Synthetic oligonucleotide
  Target: LAMA2; (+) strand; PAM type: YTN; PAM sequence: CTC
aaggactattggatctgcta

SEQ ID NO: 396142 - DNA, 20 bp, Artificial Sequence
  Description of Artificial Sequence: Synthetic oligonucleotide
  Target: LAMA2; (+) strand; PAM type: YTN; PAM sequence: CTA
ttggatctgctaggtcatac

SEQ ID NO: 396143 - DNA, 20 bp, Artificial Sequence
  Description of Artificial Sequence: Synthetic oligonucleotide
  Target: LAMA2; (+) strand; PAM type: YTN; PAM sequence: TTG
gatctgctaggtcatacggc

SEQ ID NO: 396144 - DNA, 20 bp, Artificial Sequence
  Description of Artificial Sequence: Synthetic oligonucleotide
  Target: LAMA2; (+) strand; PAM type: YTN; PAM sequence: CTG
ctaggtcatacggcccaatc

SEQ ID NO: 396145 - DNA, 20 bp, Artificial Sequence
  Description of Artificial Sequence: Synthetic oligonucleotide
  Target: LAMA2; (+) strand; PAM type: YTN; PAM sequence: CTA
ggtcatacggcccaatcggc

SEQ ID NO: 396146 - DNA, 20 bp, Artificial Sequence
  Description of Artificial Sequence: Synthetic oligonucleotide
  Target: LAMA2; (+) strand; PAM type: YTN; PAM sequence: TTT
gcacagcagtctggacttgt

SEQ ID NO: 396147 - DNA, 20 bp, Artificial Sequence
  Description of Artificial Sequence: Synthetic oligonucleotide
  Target: LAMA2; (+) strand; PAM type: YTN; PAM sequence: TTG
cacagcagtctggacttgtt

SEQ ID NO: 396148 - DNA, 20 bp, Artificial Sequence
  Description of Artificial Sequence: Synthetic oligonucleotide
  Target: LAMA2; (+) strand; PAM type: YTN; PAM sequence: CTG
gacttgttgcagagcccact

SEQ ID NO: 396149 - DNA, 20 bp, Artificial Sequence
  Description of Artificial Sequence: Synthetic oligonucleotide
  Target: LAMA2; (+) strand; PAM type: YTN; PAM sequence: CTT
gttgcagagcccacttaaaa

SEQ ID NO: 396150 - DNA, 20 bp, Artificial Sequence
  Description of Artificial Sequence: Synthetic oligonucleotide
  Target: LAMA2; (+) strand; PAM type: YTN; PAM sequence: TTG
ttgcagagcccacttaaaat

SEQ ID NO: 396151 - DNA, 20 bp, Artificial Sequence
  Description of Artificial Sequence: Synthetic oligonucleotide
  Target: LAMA2; (+) strand; PAM type: YTN; PAM sequence: TTG
cagagcccacttaaaattgg

SEQ ID NO: 396152 - DNA, 20 bp, Artificial Sequence
  Description of Artificial Sequence: Synthetic oligonucleotide
  Target: LAMA2; (+) strand; PAM type: YTN; PAM sequence: CTT
aaaattggcagcctttcagg

SEQ ID NO: 396153 - DNA, 20 bp, Artificial Sequence
  Description of Artificial Sequence: Synthetic oligonucleotide
  Target: LAMA2; (+) strand; PAM type: YTN; PAM sequence: TTA
aaattggcagcctttcaggt

SEQ ID NO: 396154 - DNA, 20 bp, Artificial Sequence
  Description of Artificial Sequence: Synthetic oligonucleotide
  Target: LAMA2; (+) strand; PAM type: YTN; PAM sequence: TTG
gcagcctttcaggtcactca

SEQ ID NO: 396155 - DNA, 20 bp, Artificial Sequence
  Description of Artificial Sequence: Synthetic oligonucleotide
  Target: LAMA2; (+) strand; PAM type: YTN; PAM sequence: CTT
tcaggtcactcaataaatgg

SEQ ID NO: 396156 - DNA, 20 bp, Artificial Sequence
  Description of Artificial Sequence: Synthetic oligonucleotide
  Target: LAMA2; (+) strand; PAM type: YTN; PAM sequence: TTT
caggtcactcaataaatggg

SEQ ID NO: 396157 - DNA, 20 bp, Artificial Sequence
  Description of Artificial Sequence: Synthetic oligonucleotide
  Target: LAMA2; (+) strand; PAM type: YTN; PAM sequence: TTC
aggtcactcaataaatgggc

SEQ ID NO: 396158 - DNA, 20 bp, Artificial Sequence
  Description of Artificial Sequence: Synthetic oligonucleotide
  Target: LAMA2; (+) strand; PAM type: YTN; PAM sequence: CTC
aataaatgggcccattttaa

SEQ ID NO: 396159 - DNA, 20 bp, Artificial Sequence
  Description of Artificial Sequence: Synthetic oligonucleotide
  Target: LAMA2; (+) strand; PAM type: YTN; PAM sequence: TTT
taacacacccaggaacaatg

SEQ ID NO: 396160 - DNA, 20 bp, Artificial Sequence
  Description of Artificial Sequence: Synthetic oligonucleotide
  Target: LAMA2; (+) strand; PAM type: YTN; PAM sequence: TTT
aacacacccaggaacaatgc

SEQ ID NO: 396161 - DNA, 20 bp, Artificial Sequence
  Description of Artificial Sequence: Synthetic oligonucleotide
  Target: LAMA2; (+) strand; PAM type: YTN; PAM sequence: TTA
acacacccaggaacaatgct

SEQ ID NO: 396162 - DNA, 20 bp, Artificial Sequence
  Description of Artificial Sequence: Synthetic oligonucleotide
  Target: LAMA2; (+) strand; PAM type: YTN; PAM sequence: CTT
tgcatccttcaatacaatca

SEQ ID NO: 396163 - DNA, 20 bp, Artificial Sequence
  Description of Artificial Sequence: Synthetic oligonucleotide
  Target: LAMA2; (+) strand; PAM type: YTN; PAM sequence: TTT
gcatccttcaatacaatcaa

SEQ ID NO: 396164 - DNA, 20 bp, Artificial Sequence
  Description of Artificial Sequence: Synthetic oligonucleotide
  Target: LAMA2; (+) strand; PAM type: YTN; PAM sequence: TTG
catccttcaatacaatcaag

SEQ ID NO: 396165 - DNA, 20 bp, Artificial Sequence
  Description of Artificial Sequence: Synthetic oligonucleotide
  Target: LAMA2; (+) strand; PAM type: YTN; PAM sequence: CTT
caatacaatcaagttggcac

SEQ ID NO: 396166 - DNA, 20 bp, Artificial Sequence
  Description of Artificial Sequence: Synthetic oligonucleotide
  Target: LAMA2; (+) strand; PAM type: YTN; PAM sequence: TTC
aatacaatcaagttggcact

SEQ ID NO: 396167 - DNA, 20 bp, Artificial Sequence
  Description of Artificial Sequence: Synthetic oligonucleotide
  Target: LAMA2; (+) strand; PAM type: YTN; PAM sequence: TTG
gcactcagtattaaccatca

SEQ ID NO: 396168 - DNA, 20 bp, Artificial Sequence
  Description of Artificial Sequence: Synthetic oligonucleotide
  Target: LAMA2; (+) strand; PAM type: YTN; PAM sequence: CTC
agtattaaccatcacagtga

SEQ ID NO: 396169 - DNA, 20 bp, Artificial Sequence
  Description of Artificial Sequence: Synthetic oligonucleotide
  Target: LAMA2; (+) strand; PAM type: YTN; PAM sequence: TTA
accatcacagtgaatgaata

SEQ ID NO: 396170 - DNA, 20 bp, Artificial Sequence
  Description of Artificial Sequence: Synthetic oligonucleotide
  Target: LAMA2; (+) strand; PAM type: YTN; PAM sequence: TTT
tctatgacgttgactccttg

SEQ ID NO: 396171 - DNA, 20 bp, Artificial Sequence
  Description of Artificial Sequence: Synthetic oligonucleotide
  Target: LAMA2; (+) strand; PAM type: YTN; PAM sequence: TTT
ctatgacgttgactccttgg

SEQ ID NO: 396172 - DNA, 20 bp, Artificial Sequence
  Description of Artificial Sequence: Synthetic oligonucleotide
  Target: LAMA2; (+) strand; PAM type: YTN; PAM sequence: TTC
tatgacgttgactccttgga

SEQ ID NO: 396173 - DNA, 20 bp, Artificial Sequence
  Description of Artificial Sequence: Synthetic oligonucleotide
  Target: LAMA2; (+) strand; PAM type: YTN; PAM sequence: CTA
tgacgttgactccttggaat

SEQ ID NO: 396174 - DNA, 20 bp, Artificial Sequence
  Description of Artificial Sequence: Synthetic oligonucleotide
  Target: LAMA2; (+) strand; PAM type: YTN; PAM sequence: TTG
actccttggaatgaccacca

SEQ ID NO: 396175 - DNA, 20 bp, Artificial Sequence
  Description of Artificial Sequence: Synthetic oligonucleotide
  Target: LAMA2; (+) strand; PAM type: YTN; PAM sequence: CTC
cttggaatgaccaccagagg

SEQ ID NO: 396176 - DNA, 20 bp, Artificial Sequence
  Description of Artificial Sequence: Synthetic oligonucleotide
  Target: LAMA2; (+) strand; PAM type: YTN; PAM sequence: CTT
ggaatgaccaccagaggcaa

SEQ ID NO: 396177 - DNA, 20 bp, Artificial Sequence
  Description of Artificial Sequence: Synthetic oligonucleotide
  Target: LAMA2; (+) strand; PAM type: YTN; PAM sequence: TTG
gaatgaccaccagaggcaat

SEQ ID NO: 396178 - DNA, 20 bp, Artificial Sequence
  Description of Artificial Sequence: Synthetic oligonucleotide
  Target: LAMA2; (+) strand; PAM type: YTN; PAM sequence: CTC
tcagtgacacgaggatatga

SEQ ID NO: 396179 - DNA, 20 bp, Artificial Sequence
  Description of Artificial Sequence: Synthetic oligonucleotide
  Target: LAMA2; (+) strand; PAM type: YTN; PAM sequence: CTC
agtgacacgaggatatgagg

SEQ ID NO: 396180 - DNA, 20 bp, Artificial Sequence
  Description of Artificial Sequence: Synthetic oligonucleotide
  Target: LAMA2; (+) strand; PAM type: YTN; PAM sequence: CTC
ctctgcccatttacactgga

SEQ ID NO: 396181 - DNA, 20 bp, Artificial Sequence
  Description of Artificial Sequence: Synthetic oligonucleotide
  Target: LAMA2; (+) strand; PAM type: YTN; PAM sequence: CTC
tgcccatttacactggaaat

SEQ ID NO: 396182 - DNA, 20 bp, Artificial Sequence
  Description of Artificial Sequence: Synthetic oligonucleotide
  Target: LAMA2; (+) strand; PAM type: YTN; PAM sequence: CTG
cccatttacactggaaatgt

SEQ ID NO: 396183 - DNA, 20 bp, Artificial Sequence
  Description of Artificial Sequence: Synthetic oligonucleotide
  Target: LAMA2; (+) strand; PAM type: YTN; PAM sequence: TTT
acactggaaatgtcttagat

SEQ ID NO: 396184 - DNA, 20 bp, Artificial Sequence
  Description of Artificial Sequence: Synthetic oligonucleotide
  Target: LAMA2; (+) strand; PAM type: YTN; PAM sequence: TTA
cactggaaatgtcttagatg

SEQ ID NO: 396185 - DNA, 20 bp, Artificial Sequence
  Description of Artificial Sequence: Synthetic oligonucleotide
  Target: LAMA2; (+) strand; PAM type: YTN; PAM sequence: CTG
gaaatgtcttagatgtctta

SEQ ID NO: 396186 - DNA, 20 bp, Artificial Sequence
  Description of Artificial Sequence: Synthetic oligonucleotide
  Target: LAMA2; (+) strand; PAM type: YTN; PAM sequence: CTT
agatgtcttagtgcttttca

SEQ ID NO: 396187 - DNA, 20 bp, Artificial Sequence
  Description of Artificial Sequence: Synthetic oligonucleotide
  Target: LAMA2; (+) strand; PAM type: YTN; PAM sequence: TTA
gatgtcttagtgcttttcaa

SEQ ID NO: 396188 - DNA, 20 bp, Artificial Sequence
  Description of Artificial Sequence: Synthetic oligonucleotide
  Target: LAMA2; (+) strand; PAM type: YTN; PAM sequence: CTT
agtgcttttcaatcaggtat

SEQ ID NO: 396189 - DNA, 20 bp, Artificial Sequence
  Description of Artificial Sequence: Synthetic oligonucleotide
  Target: LAMA2; (+) strand; PAM type: YTN; PAM sequence: TTA
gtgcttttcaatcaggtata

SEQ ID NO: 396190 - DNA, 20 bp, Artificial Sequence
  Description of Artificial Sequence: Synthetic oligonucleotide
  Target: LAMA2; (+) strand; PAM type: YTN; PAM sequence: CTT
ttcaatcaggtatatccaaa

SEQ ID NO: 396191 - DNA, 20 bp, Artificial Sequence
  Description of Artificial Sequence: Synthetic oligonucleotide
  Target: LAMA2; (+) strand; PAM type: YTN; PAM sequence: TTT
tcaatcaggtatatccaaac

SEQ ID NO: 396192 - DNA, 20 bp, Artificial Sequence
  Description of Artificial Sequence: Synthetic oligonucleotide
  Target: LAMA2; (+) strand; PAM type: YTN; PAM sequence: TTT
caatcaggtatatccaaaca

SEQ ID NO: 396193 - DNA, 20 bp, Artificial Sequence
  Description of Artificial Sequence: Synthetic oligonucleotide
  Target: LAMA2; (+) strand; PAM type: YTN; PAM sequence: TTC
aatcaggtatatccaaacaa

SEQ ID NO: 396194 - DNA, 20 bp, Artificial Sequence
  Description of Artificial Sequence: Synthetic oligonucleotide
  Target: LAMA2; (+) strand; PAM type: YTN; PAM sequence: CTA
atgcagaatgaattccatag

SEQ ID NO: 396195 - DNA, 20 bp, Artificial Sequence
  Description of Artificial Sequence: Synthetic oligonucleotide
  Target: LAMA2; (+) strand; PAM type: YTN; PAM sequence: TTC
catagttcagattcttcaag

SEQ ID NO: 396196 - DNA, 20 bp, Artificial Sequence
  Description of Artificial Sequence: Synthetic oligonucleotide
  Target: LAMA2; (+) strand; PAM type: YTN; PAM sequence: TTC
agattcttcaagataatgga

SEQ ID NO: 396197 - DNA, 20 bp, Artificial Sequence
  Description of Artificial Sequence: Synthetic oligonucleotide
  Target: LAMA2; (+) strand; PAM type: YTN; PAM sequence: TTC
ttcaagataatggaaaatta

SEQ ID NO: 396198 - DNA, 20 bp, Artificial Sequence
  Description of Artificial Sequence: Synthetic oligonucleotide
  Target: LAMA2; (+) strand; PAM type: YTN; PAM sequence: CTT
caagataatggaaaattatc

SEQ ID NO: 396199 - DNA, 20 bp, Artificial Sequence
  Description of Artificial Sequence: Synthetic oligonucleotide
  Target: LAMA2; (+) strand; PAM type: YTN; PAM sequence: TTC
aagataatggaaaattatca

SEQ ID NO: 396200 - DNA, 20 bp, Artificial Sequence
  Description of Artificial Sequence: Synthetic oligonucleotide
  Target: LAMA2; (+) strand; PAM type: YTN; PAM sequence: TTA
tcacataatctccacctgtt

SEQ ID NO: 396201 - DNA, 20 bp, Artificial Sequence
  Description of Artificial Sequence: Synthetic oligonucleotide
  Target: LAMA2; (+) strand; PAM type: YTN; PAM sequence: CTC
cacctgttttgaaacattat

SEQ ID NO: 396202 - DNA, 20 bp, Artificial Sequence
  Description of Artificial Sequence: Synthetic oligonucleotide
  Target: LAMA2; (+) strand; PAM type: YTN; PAM sequence: CTG
ttttgaaacattatcttctt

SEQ ID NO: 396203 - DNA, 20 bp, Artificial Sequence
  Description of Artificial Sequence: Synthetic oligonucleotide
  Target: LAMA2; (+) strand; PAM type: YTN; PAM sequence: TTT
tgaaacattatcttctttcc

SEQ ID NO: 396204 - DNA, 20 bp, Artificial Sequence
  Description of Artificial Sequence: Synthetic oligonucleotide
  Target: LAMA2; (+) strand; PAM type: YTN; PAM sequence: TTT
gaaacattatcttctttcct

SEQ ID NO: 396205 - DNA, 20 bp, Artificial Sequence
  Description of Artificial Sequence: Synthetic oligonucleotide
  Target: LAMA2; (+) strand; PAM type: YTN; PAM sequence: TTG
aaacattatcttctttcctt

SEQ ID NO: 396206 - DNA, 20 bp, Artificial Sequence
  Description of Artificial Sequence: Synthetic oligonucleotide
  Target: LAMA2; (+) strand; PAM type: YTN; PAM sequence: TTA
tcttctttccttcctttcct

SEQ ID NO: 396207 - DNA, 20 bp, Artificial Sequence
  Description of Artificial Sequence: Synthetic oligonucleotide
  Target: LAMA2; (+) strand; PAM type: YTN; PAM sequence: CTT
ctttccttcctttcctccct

SEQ ID NO: 396208 - DNA, 20 bp, Artificial Sequence
  Description of Artificial Sequence: Synthetic oligonucleotide
  Target: LAMA2; (+) strand; PAM type: YTN; PAM sequence: TTC
tttccttcctttcctccctt

SEQ ID NO: 396209 - DNA, 20 bp, Artificial Sequence
  Description of Artificial Sequence: Synthetic oligonucleotide
  Target: LAMA2; (+) strand; PAM type: YTN; PAM sequence: CTT
tccttcctttcctccctttc

SEQ ID NO: 396210 - DNA, 20 bp, Artificial Sequence
  Description of Artificial Sequence: Synthetic oligonucleotide
  Target: LAMA2; (+) strand; PAM type: YTN; PAM sequence: TTT
ccttcctttcctccctttct

SEQ ID NO: 396211 - DNA, 20 bp, Artificial Sequence
  Description of Artificial Sequence: Synthetic oligonucleotide
  Target: LAMA2; (+) strand; PAM type: YTN; PAM sequence: TTC
cttcctttcctccctttctc

SEQ ID NO: 396212 - DNA, 20 bp, Artificial Sequence
  Description of Artificial Sequence: Synthetic oligonucleotide
  Target: LAMA2; (+) strand; PAM type: YTN; PAM sequence: CTT
cctttcctccctttctccct

SEQ ID NO: 396213 - DNA, 20 bp, Artificial Sequence
  Description of Artificial Sequence: Synthetic oligonucleotide
  Target: LAMA2; (+) strand; PAM type: YTN; PAM sequence: TTC
ctttcctccctttctccctt

SEQ ID NO: 396214 - DNA, 20 bp, Artificial Sequence
  Description of Artificial Sequence: Synthetic oligonucleotide
  Target: LAMA2; (+) strand; PAM type: YTN; PAM sequence: CTT
tcctccctttctccctttct

SEQ ID NO: 396215 - DNA, 20 bp, Artificial Sequence
  Description of Artificial Sequence: Synthetic oligonucleotide
  Target: LAMA2; (+) strand; PAM type: YTN; PAM sequence: TTT
cctccctttctccctttctc

SEQ ID NO: 396216 - DNA, 20 bp, Artificial Sequence
  Description of Artificial Sequence: Synthetic oligonucleotide
  Target: LAMA2; (+) strand; PAM type: YTN; PAM sequence: TTC
ctccctttctccctttctct

SEQ ID NO: 396217 - DNA, 20 bp, Artificial Sequence
  Description of Artificial Sequence: Synthetic oligonucleotide
  Target: LAMA2; (+) strand; PAM type: YTN; PAM sequence: CTC
cctttctccctttctctaag

SEQ ID NO: 396218 - DNA, 20 bp, Artificial Sequence
  Description of Artificial Sequence: Synthetic oligonucleotide
  Target: LAMA2; (+) strand; PAM type: YTN; PAM sequence: CTT
tctccctttctctaagtcag

SEQ ID NO: 396219 - DNA, 20 bp, Artificial Sequence
  Description of Artificial Sequence: Synthetic oligonucleotide
  Target: LAMA2; (+) strand; PAM type: YTN; PAM sequence: TTT
ctccctttctctaagtcagt

SEQ ID NO: 396220 - DNA, 20 bp, Artificial Sequence
  Description of Artificial Sequence: Synthetic oligonucleotide
  Target: LAMA2; (+) strand; PAM type: YTN; PAM sequence: TTC
tccctttctctaagtcagtg

SEQ ID NO: 396221 - DNA, 20 bp, Artificial Sequence
  Description of Artificial Sequence: Synthetic oligonucleotide
  Target: LAMA2; (+) strand; PAM type: YTN; PAM sequence: CTC
cctttctctaagtcagtgga

SEQ ID NO: 396222 - DNA, 20 bp, Artificial Sequence
  Description of Artificial Sequence: Synthetic oligonucleotide
  Target: LAMA2; (+) strand; PAM type: YTN; PAM sequence: CTT
tctctaagtcagtggaatag

SEQ ID NO: 396223 - DNA, 20 bp, Artificial Sequence
  Description of Artificial Sequence: Synthetic oligonucleotide
  Target: LAMA2; (+) strand; PAM type: YTN; PAM sequence: TTT
ctctaagtcagtggaatagt

SEQ ID NO: 396224 - DNA, 20 bp, Artificial Sequence
  Description of Artificial Sequence: Synthetic oligonucleotide
  Target: LAMA2; (+) strand; PAM type: YTN; PAM sequence: TTC
tctaagtcagtggaatagtc

SEQ ID NO: 396225 - DNA, 20 bp, Artificial Sequence
  Description of Artificial Sequence: Synthetic oligonucleotide
  Target: LAMA2; (+) strand; PAM type: YTN; PAM sequence: CTC
taagtcagtggaatagtcta

SEQ ID NO: 396226 - DNA, 20 bp, Artificial Sequence
  Description of Artificial Sequence: Synthetic oligonucleotide
  Target: LAMA2; (+) strand; PAM type: YTN; PAM sequence: CTA
agtcagtggaatagtctagt

SEQ ID NO: 396227 - DNA, 20 bp, Artificial Sequence
  Description of Artificial Sequence: Synthetic oligonucleotide
  Target: LAMA2; (+) strand; PAM type: YTN; PAM sequence: CTA
gtttaactttgatgtagaaa

SEQ ID NO: 396228 - DNA, 20 bp, Artificial Sequence
  Description of Artificial Sequence: Synthetic oligonucleotide
  Target: LAMA2; (+) strand; PAM type: YTN; PAM sequence: TTT
aactttgatgtagaaaattt

SEQ ID NO: 396229 - DNA, 20 bp, Artificial Sequence
  Description of Artificial Sequence: Synthetic oligonucleotide
  Target: LAMA2; (+) strand; PAM type: YTN; PAM sequence: TTA
actttgatgtagaaaattta

SEQ ID NO: 396230 - DNA, 20 bp, Artificial Sequence
  Description of Artificial Sequence: Synthetic oligonucleotide
  Target: LAMA2; (+) strand; PAM type: YTN; PAM sequence: CTT
tgatgtagaaaatttaggca

SEQ ID NO: 396231 - DNA, 20 bp, Artificial Sequence
  Description of Artificial Sequence: Synthetic oligonucleotide
  Target: LAMA2; (+) strand; PAM type: YTN; PAM sequence: TTT
gatgtagaaaatttaggcag

SEQ ID NO: 396232 - DNA, 20 bp, Artificial Sequence
  Description of Artificial Sequence: Synthetic oligonucleotide
  Target: LAMA2; (+) strand; PAM type: YTN; PAM sequence: TTG
atgtagaaaatttaggcagt

SEQ ID NO: 396233 - DNA, 20 bp, Artificial Sequence
  Description of Artificial Sequence: Synthetic oligonucleotide
  Target: LAMA2; (+) strand; PAM type: YTN; PAM sequence: TTT
aggcagtcctcaacctctct

SEQ ID NO: 396234 - DNA, 20 bp, Artificial Sequence
  Description of Artificial Sequence: Synthetic oligonucleotide
  Target: LAMA2; (+) strand; PAM type: YTN; PAM sequence: TTA
ggcagtcctcaacctctcta

SEQ ID NO: 396235 - DNA, 20 bp, Artificial Sequence
  Description of Artificial Sequence: Synthetic oligonucleotide
  Target: LAMA2; (+) strand; PAM type: YTN; PAM sequence: CTC
aacctctctaggtatgctga

SEQ ID NO: 396236 - DNA, 20 bp, Artificial Sequence
  Description of Artificial Sequence: Synthetic oligonucleotide
  Target: LAMA2; (+) strand; PAM type: YTN; PAM sequence: CTC
tctaggtatgctgaattaaa

SEQ ID NO: 396237 - DNA, 20 bp, Artificial Sequence
  Description of Artificial Sequence: Synthetic oligonucleotide
  Target: LAMA2; (+) strand; PAM type: YTN; PAM sequence: CTC
taggtatgctgaattaaaaa

SEQ ID NO: 396238 - DNA, 20 bp, Artificial Sequence
  Description of Artificial Sequence: Synthetic oligonucleotide
  Target: LAMA2; (+) strand; PAM type: YTN; PAM sequence: CTA
ggtatgctgaattaaaaaaa

SEQ ID NO: 396239 - DNA, 20 bp, Artificial Sequence
  Description of Artificial Sequence: Synthetic oligonucleotide
  Target: LAMA2; (+) strand; PAM type: YTN; PAM sequence: CTG
aattaaaaaaaaaaaagaat

SEQ ID NO: 396240 - DNA, 20 bp, Artificial Sequence
  Description of Artificial Sequence: Synthetic oligonucleotide
  Target: LAMA2; (+) strand; PAM type: YTN; PAM sequence: TTA
aaaaaaaaaaagaatgacat

SEQ ID NO: 396241 - DNA, 20 bp, Artificial Sequence
  Description of Artificial Sequence: Synthetic oligonucleotide
  Target: LAMA2; (+) strand; PAM type: YTN; PAM sequence: TTT
ttaattcccatggcaaatgg

SEQ ID NO: 396242 - DNA, 20 bp, Artificial Sequence
  Description of Artificial Sequence: Synthetic oligonucleotide
  Target: LAMA2; (+) strand; PAM type: YTN; PAM sequence: TTT
taattcccatggcaaatgga

SEQ ID NO: 396243 - DNA, 20 bp, Artificial Sequence
  Description of Artificial Sequence: Synthetic oligonucleotide
  Target: LAMA2; (+) strand; PAM type: YTN; PAM sequence: TTT
aattcccatggcaaatggag

SEQ ID NO: 396244 - DNA, 20 bp, Artificial Sequence
  Description of Artificial Sequence: Synthetic oligonucleotide
  Target: LAMA2; (+) strand; PAM type: YTN; PAM sequence: TTA
attcccatggcaaatggagt

SEQ ID NO: 396245 - DNA, 20 bp, Artificial Sequence
  Description of Artificial Sequence: Synthetic oligonucleotide
  Target: LAMA2; (+) strand; PAM type: YTN; PAM sequence: TTC
ccatggcaaatggagttctc

SEQ ID NO: 396246 - DNA, 20 bp, Artificial Sequence
  Description of Artificial Sequence: Synthetic oligonucleotide
  Target: LAMA2; (+) strand; PAM type: YTN; PAM sequence: TTC
tcctctttcttctgttcctc

SEQ ID NO: 396247 - DNA, 20 bp, Artificial Sequence
  Description of Artificial Sequence: Synthetic oligonucleotide
  Target: LAMA2; (+) strand; PAM type: YTN; PAM sequence: CTC
ctctttcttctgttcctctt

SEQ ID NO: 396248 - DNA, 20 bp, Artificial Sequence
  Description of Artificial Sequence: Synthetic oligonucleotide
  Target: LAMA2; (+) strand; PAM type: YTN; PAM sequence: CTC
tttcttctgttcctcttctt

SEQ ID NO: 396249 - DNA, 20 bp, Artificial Sequence
  Description of Artificial Sequence: Synthetic oligonucleotide
  Target: LAMA2; (+) strand; PAM type: YTN; PAM sequence: CTT
tcttctgttcctcttcttca

SEQ ID NO: 396250 - DNA, 20 bp, Artificial Sequence
  Description of Artificial Sequence: Synthetic oligonucleotide
  Target: LAMA2; (+) strand; PAM type: YTN; PAM sequence: TTT
cttctgttcctcttcttcac

SEQ ID NO: 396251 - DNA, 20 bp, Artificial Sequence
  Description of Artificial Sequence: Synthetic oligonucleotide
  Target: LAMA2; (+) strand; PAM type: YTN; PAM sequence: TTC
ttctgttcctcttcttcacc

SEQ ID NO: 396252 - DNA, 20 bp, Artificial Sequence
  Description of Artificial Sequence: Synthetic oligonucleotide
  Target: LAMA2; (+) strand; PAM type: YTN; PAM sequence: CTT
ctgttcctcttcttcacctt

SEQ ID NO: 396253 - DNA, 20 bp, Artificial Sequence
  Description of Artificial Sequence: Synthetic oligonucleotide
  Target: LAMA2; (+) strand; PAM type: YTN; PAM sequence: TTC
tgttcctcttcttcaccttg

SEQ ID NO: 396254 - DNA, 20 bp, Artificial Sequence
  Description of Artificial Sequence: Synthetic oligonucleotide
  Target: LAMA2; (+) strand; PAM type: YTN; PAM sequence: CTG
ttcctcttcttcaccttgca

SEQ ID NO: 396255 - DNA, 20 bp, Artificial Sequence
  Description of Artificial Sequence: Synthetic oligonucleotide
  Target: LAMA2; (+) strand; PAM type: YTN; PAM sequence: TTC
ctcttcttcaccttgcaatg

SEQ ID NO: 396256 - DNA, 20 bp, Artificial Sequence
  Description of Artificial Sequence: Synthetic oligonucleotide
  Target: LAMA2; (+) strand; PAM type: YTN; PAM sequence: CTC
ttcttcaccttgcaatgact

SEQ ID NO: 396257 - DNA, 20 bp, Artificial Sequence
  Description of Artificial Sequence: Synthetic oligonucleotide
  Target: LAMA2; (+) strand; PAM type: YTN; PAM sequence: CTT
cttcaccttgcaatgactgt

SEQ ID NO: 396258 - DNA, 20 bp, Artificial Sequence
  Description of Artificial Sequence: Synthetic oligonucleotide
  Target: LAMA2; (+) strand; PAM type: YTN; PAM sequence: TTC
ttcaccttgcaatgactgtc

SEQ ID NO: 396259 - DNA, 20 bp, Artificial Sequence
  Description of Artificial Sequence: Synthetic oligonucleotide
  Target: LAMA2; (+) strand; PAM type: YTN; PAM sequence: CTT
caccttgcaatgactgtcat

SEQ ID NO: 396260 - DNA, 20 bp, Artificial Sequence
  Description of Artificial Sequence: Synthetic oligonucleotide
  Target: LAMA2; (+) strand; PAM type: YTN; PAM sequence: TTC
accttgcaatgactgtcatt

SEQ ID NO: 396261 - DNA, 20 bp, Artificial Sequence
  Description of Artificial Sequence: Synthetic oligonucleotide
  Target: LAMA2; (+) strand; PAM type: YTN; PAM sequence: CTT
gcaatgactgtcattttgta

SEQ ID NO: 396262 - DNA, 20 bp, Artificial Sequence
  Description of Artificial Sequence: Synthetic oligonucleotide
  Target: LAMA2; (+) strand; PAM type: YTN; PAM sequence: TTG
caatgactgtcattttgtaa

SEQ ID NO: 396263 - DNA, 20 bp, Artificial Sequence
  Description of Artificial Sequence: Synthetic oligonucleotide
  Target: LAMA2; (+) strand; PAM type: YTN; PAM sequence: CTG
tcattttgtaaaactttctc

SEQ ID NO: 396264 - DNA, 20 bp, Artificial Sequence
  Description of Artificial Sequence: Synthetic oligonucleotide
  Target: LAMA2; (+) strand; PAM type: YTN; PAM sequence: TTT
tgtaaaactttctctctgtc

SEQ ID NO: 396265 - DNA, 20 bp, Artificial Sequence
  Description of Artificial Sequence: Synthetic oligonucleotide
  Target: LAMA2; (+) strand; PAM type: YTN; PAM sequence: TTT
gtaaaactttctctctgtct

SEQ ID NO: 396266 - DNA, 20 bp, Artificial Sequence
  Description of Artificial Sequence: Synthetic oligonucleotide
  Target: LAMA2; (+) strand; PAM type: YTN; PAM sequence: TTG
taaaactttctctctgtctc

SEQ ID NO: 396267 - DNA, 20 bp, Artificial Sequence
  Description of Artificial Sequence: Synthetic oligonucleotide
  Target: LAMA2; (+) strand; PAM type: YTN; PAM sequence: CTT
tctctctgtctctgtctctc

SEQ ID NO: 396268 - DNA, 20 bp, Artificial Sequence
  Description of Artificial Sequence: Synthetic oligonucleotide
  Target: LAMA2; (+) strand; PAM type: YTN; PAM sequence: TTT
ctctctgtctctgtctctct

SEQ ID NO: 396269 - DNA, 20 bp, Artificial Sequence
  Description of Artificial Sequence: Synthetic oligonucleotide
  Target: LAMA2; (+) strand; PAM type: YTN; PAM sequence: TTC
tctctgtctctgtctctctt

SEQ ID NO: 396270 - DNA, 20 bp, Artificial Sequence
  Description of Artificial Sequence: Synthetic oligonucleotide
  Target: LAMA2; (+) strand; PAM type: YTN; PAM sequence: CTC
tctgtctctgtctctcttac

SEQ ID NO: 396271 - DNA, 20 bp, Artificial Sequence
  Description of Artificial Sequence: Synthetic oligonucleotide
  Target: LAMA2; (+) strand; PAM type: YTN; PAM sequence: CTC
tgtctctgtctctcttactc

SEQ ID NO: 396272 - DNA, 20 bp, Artificial Sequence
  Description of Artificial Sequence: Synthetic oligonucleotide
  Target: LAMA2; (+) strand; PAM type: YTN; PAM sequence: CTG
tctctgtctctcttactcac

SEQ ID NO: 396273 - DNA, 20 bp, Artificial Sequence
  Description of Artificial Sequence: Synthetic oligonucleotide
  Target: LAMA2; (+) strand; PAM type: YTN; PAM sequence: CTC
tgtctctcttactcacacat

SEQ ID NO: 396274 - DNA, 20 bp, Artificial Sequence
  Description of Artificial Sequence: Synthetic oligonucleotide
  Target: LAMA2; (+) strand; PAM type: YTN; PAM sequence: CTG
tctctcttactcacacatac

SEQ ID NO: 396275 - DNA, 20 bp, Artificial Sequence
  Description of Artificial Sequence: Synthetic oligonucleotide
  Target: LAMA2; (+) strand; PAM type: YTN; PAM sequence: CTC
tcttactcacacatacactc

SEQ ID NO: 396276 - DNA, 20 bp, Artificial Sequence
  Description of Artificial Sequence: Synthetic oligonucleotide
  Target: LAMA2; (+) strand; PAM type: YTN; PAM sequence: CTC
ttactcacacatacactcac

SEQ ID NO: 396277 - DNA, 20 bp, Artificial Sequence
  Description of Artificial Sequence: Synthetic oligonucleotide
  Target: LAMA2; (+) strand; PAM type: YTN; PAM sequence: CTT
actcacacatacactcacaa

SEQ ID NO: 396278 - DNA, 20 bp, Artificial Sequence
  Description of Artificial Sequence: Synthetic oligonucleotide
  Target: LAMA2; (+) strand; PAM type: YTN; PAM sequence: TTA
ctcacacatacactcacaat

SEQ ID NO: 396279 - DNA, 20 bp, Artificial Sequence
  Description of Artificial Sequence: Synthetic oligonucleotide
  Target: LAMA2; (+) strand; PAM type: YTN; PAM sequence: CTC
acacatacactcacaatgtt

SEQ ID NO: 396280 - DNA, 20 bp, Artificial Sequence
  Description of Artificial Sequence: Synthetic oligonucleotide
  Target: LAMA2; (+) strand; PAM type: YTN; PAM sequence: CTC
acaatgttccttaatatctt

SEQ ID NO: 396281 - DNA, 20 bp, Artificial Sequence
  Description of Artificial Sequence: Synthetic oligonucleotide
  Target: LAMA2; (+) strand; PAM type: YTN; PAM sequence: TTC
cttaatatcttctaatcctg

SEQ ID NO: 396282 - DNA, 20 bp, Artificial Sequence
  Description of Artificial Sequence: Synthetic oligonucleotide
  Target: LAMA2; (+) strand; PAM type: YTN; PAM sequence: CTT
aatatcttctaatcctgaat

SEQ ID NO: 396283 - DNA, 20 bp, Artificial Sequence
  Description of Artificial Sequence: Synthetic oligonucleotide
  Target: LAMA2; (+) strand; PAM type: YTN; PAM sequence: TTA
atatcttctaatcctgaatt

SEQ ID NO: 396284 - DNA, 20 bp, Artificial Sequence
  Description of Artificial Sequence: Synthetic oligonucleotide
  Target: LAMA2; (+) strand; PAM type: YTN; PAM sequence: CTT
ctaatcctgaatttcctttc

SEQ ID NO: 396285 - DNA, 20 bp, Artificial Sequence
  Description of Artificial Sequence: Synthetic oligonucleotide
  Target: LAMA2; (+) strand; PAM type: YTN; PAM sequence: TTC
taatcctgaatttcctttct

SEQ ID NO: 396286 - DNA, 20 bp, Artificial Sequence
  Description of Artificial Sequence: Synthetic oligonucleotide
  Target: LAMA2; (+) strand; PAM type: YTN; PAM sequence: CTA
atcctgaatttcctttctca

SEQ ID NO: 396287 - DNA, 20 bp, Artificial Sequence
  Description of Artificial Sequence: Synthetic oligonucleotide
  Target: LAMA2; (+) strand; PAM type: YTN; PAM sequence: CTG
aatttcctttctcaatttgt

SEQ ID NO: 396288 - DNA, 20 bp, Artificial Sequence
  Description of Artificial Sequence: Synthetic oligonucleotide
  Target: LAMA2; (+) strand; PAM type: YTN; PAM sequence: TTT
cctttctcaatttgtttagt

SEQ ID NO: 396289 - DNA, 20 bp, Artificial Sequence
  Description of Artificial Sequence: Synthetic oligonucleotide
  Target: LAMA2; (+) strand; PAM type: YTN; PAM sequence: TTC
ctttctcaatttgtttagtt

SEQ ID NO: 396290 - DNA, 20 bp, Artificial Sequence
  Description of Artificial Sequence: Synthetic oligonucleotide
  Target: LAMA2; (+) strand; PAM type: YTN; PAM sequence: CTT
tctcaatttgtttagttaga

SEQ ID NO: 396291 - DNA, 20 bp, Artificial Sequence
  Description of Artificial Sequence: Synthetic oligonucleotide
  Target: LAMA2; (+) strand; PAM type: YTN; PAM sequence: TTT
ctcaatttgtttagttagat

SEQ ID NO: 396292 - DNA, 20 bp, Artificial Sequence
  Description of Artificial Sequence: Synthetic oligonucleotide
  Target: LAMA2; (+) strand; PAM type: YTN; PAM sequence: TTC
tcaatttgtttagttagatc

SEQ ID NO: 396293 - DNA, 20 bp, Artificial Sequence
  Description of Artificial Sequence: Synthetic oligonucleotide
  Target: LAMA2; (+) strand; PAM type: YTN; PAM sequence: CTC
aatttgtttagttagatctt

SEQ ID NO: 396294 - DNA, 20 bp, Artificial Sequence
  Description of Artificial Sequence: Synthetic oligonucleotide
  Target: LAMA2; (+) strand; PAM type: YTN; PAM sequence: TTT
gtttagttagatcttcacta

SEQ ID NO: 396295 - DNA, 20 bp, Artificial Sequence
  Description of Artificial Sequence: Synthetic oligonucleotide
  Target: LAMA2; (+) strand; PAM type: YTN; PAM sequence: TTG
tttagttagatcttcactag

SEQ ID NO: 396296 - DNA, 20 bp, Artificial Sequence
  Description of Artificial Sequence: Synthetic oligonucleotide
  Target: LAMA2; (+) strand; PAM type: YTN; PAM sequence: TTT
agttagatcttcactagaaa

SEQ ID NO: 396297 - DNA, 20 bp, Artificial Sequence
  Description of Artificial Sequence: Synthetic oligonucleotide
  Target: LAMA2; (+) strand; PAM type: YTN; PAM sequence: TTA
gttagatcttcactagaaat

SEQ ID NO: 396298 - DNA, 20 bp, Artificial Sequence
  Description of Artificial Sequence: Synthetic oligonucleotide
  Target: LAMA2; (+) strand; PAM type: YTN; PAM sequence: TTA
gatcttcactagaaataagt

SEQ ID NO: 396299 - DNA, 20 bp, Artificial Sequence
  Description of Artificial Sequence: Synthetic oligonucleotide
  Target: LAMA2; (+) strand; PAM type: YTN; PAM sequence: CTT
cactagaaataagtattaga

SEQ ID NO: 396300 - DNA, 20 bp, Artificial Sequence
  Description of Artificial Sequence: Synthetic oligonucleotide
  Target: LAMA2; (+) strand; PAM type: YTN; PAM sequence: TTC
actagaaataagtattagaa

SEQ ID NO: 396301 - DNA, 20 bp, Artificial Sequence
  Description of Artificial Sequence: Synthetic oligonucleotide
  Target: LAMA2; (+) strand; PAM type: YTN; PAM sequence: CTA
gaaataagtattagaaattg

SEQ ID NO: 396302 - DNA, 20 bp, Artificial Sequence
  Description of Artificial Sequence: Synthetic oligonucleotide
  Target: LAMA2; (+) strand; PAM type: YTN; PAM sequence: TTA
gaaattgggaaaagtttata

SEQ ID NO: 396303 - DNA, 20 bp, Artificial Sequence
  Description of Artificial Sequence: Synthetic oligonucleotide
  Target: LAMA2; (+) strand; PAM type: YTN; PAM sequence: TTG
ggaaaagtttatactggttg

SEQ ID NO: 396304 - DNA, 20 bp, Artificial Sequence
  Description of Artificial Sequence: Synthetic oligonucleotide
  Target: LAMA2; (+) strand; PAM type: YTN; PAM sequence: TTT
atactggttgtattagggtt

SEQ ID NO: 396305 - DNA, 20 bp, Artificial Sequence
  Description of Artificial Sequence: Synthetic oligonucleotide
  Target: LAMA2; (+) strand; PAM type: YTN; PAM sequence: TTA
tactggttgtattagggttc

SEQ ID NO: 396306 - DNA, 20 bp, Artificial Sequence
  Description of Artificial Sequence: Synthetic oligonucleotide
  Target: LAMA2; (+) strand; PAM type: YTN; PAM sequence: CTG
gttgtattagggttctccaa

SEQ ID NO: 396307 - DNA, 20 bp, Artificial Sequence
  Description of Artificial Sequence: Synthetic oligonucleotide
  Target: LAMA2; (+) strand; PAM type: YTN; PAM sequence: TTG
tattagggttctccaaataa

SEQ ID NO: 396308 - DNA, 20 bp, Artificial Sequence
  Description of Artificial Sequence: Synthetic oligonucleotide
  Target: LAMA2; (+) strand; PAM type: YTN; PAM sequence: TTA
gggttctccaaataaacaga

SEQ ID NO: 396309 - DNA, 20 bp, Artificial Sequence
  Description of Artificial Sequence: Synthetic oligonucleotide
  Target: LAMA2; (+) strand; PAM type: YTN; PAM sequence: TTC
tccaaataaacagaactatt

SEQ ID NO: 396310 - DNA, 20 bp, Artificial Sequence
  Description of Artificial Sequence: Synthetic oligonucleotide
  Target: LAMA2; (+) strand; PAM type: YTN; PAM sequence: CTC
caaataaacagaactattag

SEQ ID NO: 396311 - DNA, 20 bp, Artificial Sequence
  Description of Artificial Sequence: Synthetic oligonucleotide
  Target: LAMA2; (+) strand; PAM type: YTN; PAM sequence: CTA
ttaggagatggatagataga

SEQ ID NO: 396312 - DNA, 20 bp, Artificial Sequence
  Description of Artificial Sequence: Synthetic oligonucleotide
  Target: LAMA2; (+) strand; PAM type: YTN; PAM sequence: TTA
ggagatggatagatagatag

SEQ ID NO: 396313 - DNA, 20 bp, Artificial Sequence
  Description of Artificial Sequence: Synthetic oligonucleotide
  Target: LAMA2; (+) strand; PAM type: YTN; PAM sequence: TTG
attgatagatgacagataga

SEQ ID NO: 396314 - DNA, 20 bp, Artificial Sequence
  Description of Artificial Sequence: Synthetic oligonucleotide
  Target: LAMA2; (+) strand; PAM type: YTN; PAM sequence: TTG
atagatgacagatagatgaa

SEQ ID NO: 396315 - DNA, 20 bp, Artificial Sequence
  Description of Artificial Sequence: Synthetic oligonucleotide
  Target: LAMA2; (+) strand; PAM type: YTN; PAM sequence: CTG
gtagatgatagatggatgat

SEQ ID NO: 396316 - DNA, 20 bp, Artificial Sequence
  Description of Artificial Sequence: Synthetic oligonucleotide
  Target: LAMA2; (+) strand; PAM type: YTN; PAM sequence: TTA
gatagatagatagatagata

SEQ ID NO: 396317 - DNA, 20 bp, Artificial Sequence
  Description of Artificial Sequence: Synthetic oligonucleotide
  Target: LAMA2; (+) strand; PAM type: YTN; PAM sequence: TTA
gatgatagacagaaagaata

SEQ ID NO: 396318 - DNA, 20 bp, Artificial Sequence
  Description of Artificial Sequence: Synthetic oligonucleotide
  Target: LAMA2; (+) strand; PAM type: YTN; PAM sequence: TTT
attatgaagaattggcttac

SEQ ID NO: 396319 - DNA, 20 bp, Artificial Sequence
  Description of Artificial Sequence: Synthetic oligonucleotide
  Target: LAMA2; (+) strand; PAM type: YTN; PAM sequence: TTA
ttatgaagaattggcttacg

SEQ ID NO: 396320 - DNA, 20 bp, Artificial Sequence
  Description of Artificial Sequence: Synthetic oligonucleotide
  Target: LAMA2; (+) strand; PAM type: YTN; PAM sequence: TTA
tgaagaattggcttacgtga

SEQ ID NO: 396321 - DNA, 20 bp, Artificial Sequence
  Description of Artificial Sequence: Synthetic oligonucleotide
  Target: LAMA2; (+) strand; PAM type: YTN; PAM sequence: TTG
gcttacgtgattatggaggc

SEQ ID NO: 396322 - DNA, 20 bp, Artificial Sequence
  Description of Artificial Sequence: Synthetic oligonucleotide
  Target: LAMA2; (+) strand; PAM type: YTN; PAM sequence: CTT
acgtgattatggaggctgca

SEQ ID NO: 396323 - DNA, 20 bp, Artificial Sequence
  Description of Artificial Sequence: Synthetic oligonucleotide
  Target: LAMA2; (+) strand; PAM type: YTN; PAM sequence: TTA
cgtgattatggaggctgcaa

SEQ ID NO: 396324 - DNA, 20 bp, Artificial Sequence
  Description of Artificial Sequence: Synthetic oligonucleotide
  Target: LAMA2; (+) strand; PAM type: YTN; PAM sequence: TTA
tggaggctgcaaagtcccag

SEQ ID NO: 396325 - DNA, 20 bp, Artificial Sequence
  Description of Artificial Sequence: Synthetic oligonucleotide
  Target: LAMA2; (+) strand; PAM type: YTN; PAM sequence: CTG
caaagtcccagtatctgtga

SEQ ID NO: 396326 - DNA, 20 bp, Artificial Sequence
  Description of Artificial Sequence: Synthetic oligonucleotide
  Target: LAMA2; (+) strand; PAM type: YTN; PAM sequence: CTG
tgagctgcagatccatgata

SEQ ID NO: 396327 - DNA, 20 bp, Artificial Sequence
  Description of Artificial Sequence: Synthetic oligonucleotide
  Target: LAMA2; (+) strand; PAM type: YTN; PAM sequence: CTG
cagatccatgatatagttca

SEQ ID NO: 396328 - DNA, 20 bp, Artificial Sequence
  Description of Artificial Sequence: Synthetic oligonucleotide
  Target: LAMA2; (+) strand; PAM type: YTN; PAM sequence: TTC
actttgagtccaaaggccag

SEQ ID NO: 396329 - DNA, 20 bp, Artificial Sequence
  Description of Artificial Sequence: Synthetic oligonucleotide
  Target: LAMA2; (+) strand; PAM type: YTN; PAM sequence: CTT
tgagtccaaaggccagagaa

SEQ ID NO: 396330 - DNA, 20 bp, Artificial Sequence
  Description of Artificial Sequence: Synthetic oligonucleotide
  Target: LAMA2; (+) strand; PAM type: YTN; PAM sequence: TTT
gagtccaaaggccagagaat

SEQ ID NO: 396331 - DNA, 20 bp, Artificial Sequence
  Description of Artificial Sequence: Synthetic oligonucleotide
  Target: LAMA2; (+) strand; PAM type: YTN; PAM sequence: TTG
agtccaaaggccagagaatc

SEQ ID NO: 396332 - DNA, 20 bp, Artificial Sequence
  Description of Artificial Sequence: Synthetic oligonucleotide
  Target: LAMA2; (+) strand; PAM type: YTN; PAM sequence: CTG
atggtacaaaccacagttca

SEQ ID NO: 396333 - DNA, 20 bp, Artificial Sequence
  Description of Artificial Sequence: Synthetic oligonucleotide
  Target: LAMA2; (+) strand; PAM type: YTN; PAM sequence: TTC
aagaactagagagaaaatga

SEQ ID NO: 396334 - DNA, 20 bp, Artificial Sequence
  Description of Artificial Sequence: Synthetic oligonucleotide
  Target: LAMA2; (+) strand; PAM type: YTN; PAM sequence: CTA
gagagaaaatgagatgagat

SEQ ID NO: 396335 - DNA, 20 bp, Artificial Sequence
  Description of Artificial Sequence: Synthetic oligonucleotide
  Target: LAMA2; (+) strand; PAM type: YTN; PAM sequence: CTC
aatctgtaaggcagaaaaga

SEQ ID NO: 396336 - DNA, 20 bp, Artificial Sequence
  Description of Artificial Sequence: Synthetic oligonucleotide
  Target: LAMA2; (+) strand; PAM type: YTN; PAM sequence: CTG
taaggcagaaaagaagggaa

SEQ ID NO: 396337 - DNA, 20 bp, Artificial Sequence
  Description of Artificial Sequence: Synthetic oligonucleotide
  Target: LAMA2; (+) strand; PAM type: YTN; PAM sequence: TTC
ctcctttctttgctttttgt

SEQ ID NO: 396338 - DNA, 20 bp, Artificial Sequence
  Description of Artificial Sequence: Synthetic oligonucleotide
  Target: LAMA2; (+) strand; PAM type: YTN; PAM sequence: CTC
ctttctttgctttttgttct

SEQ ID NO: 396339 - DNA, 20 bp, Artificial Sequence
  Description of Artificial Sequence: Synthetic oligonucleotide
  Target: LAMA2; (+) strand; PAM type: YTN; PAM sequence: CTT
tctttgctttttgttctatt

SEQ ID NO: 396340 - DNA, 20 bp, Artificial Sequence
  Description of Artificial Sequence: Synthetic oligonucleotide
  Target: LAMA2; (+) strand; PAM type: YTN; PAM sequence: TTT
ctttgctttttgttctattc

SEQ ID NO: 396341 - DNA, 20 bp, Artificial Sequence
  Description of Artificial Sequence: Synthetic oligonucleotide
  Target: LAMA2; (+) strand; PAM type: YTN; PAM sequence: TTC
tttgctttttgttctattca

SEQ ID NO: 396342 - DNA, 20 bp, Artificial Sequence
  Description of Artificial Sequence: Synthetic oligonucleotide
  Target: LAMA2; (+) strand; PAM type: YTN; PAM sequence: CTT
tgctttttgttctattcagc

SEQ ID NO: 396343 - DNA, 20 bp, Artificial Sequence
  Description of Artificial Sequence: Synthetic oligonucleotide
  Target: LAMA2; (+) strand; PAM type: YTN; PAM sequence: TTT
gctttttgttctattcagcc

SEQ ID NO: 396344 - DNA, 20 bp, Artificial Sequence
  Description of Artificial Sequence: Synthetic oligonucleotide
  Target: LAMA2; (+) strand; PAM type: YTN; PAM sequence: TTG
ctttttgttctattcagccc

SEQ ID NO: 396345 - DNA, 20 bp, Artificial Sequence
  Description of Artificial Sequence: Synthetic oligonucleotide
  Target: LAMA2; (+) strand; PAM type: YTN; PAM sequence: CTT
tttgttctattcagccctca

SEQ ID NO: 396346 - DNA, 20 bp, Artificial Sequence
  Description of Artificial Sequence: Synthetic oligonucleotide
  Target: LAMA2; (+) strand; PAM type: YTN; PAM sequence: TTT
ttgttctattcagccctcaa

SEQ ID NO: 396347 - DNA, 20 bp, Artificial Sequence
  Description of Artificial Sequence: Synthetic oligonucleotide
  Target: LAMA2; (+) strand; PAM type: YTN; PAM sequence: TTT
tgttctattcagccctcaag

SEQ ID NO: 396348 - DNA, 20 bp, Artificial Sequence
  Description of Artificial Sequence: Synthetic oligonucleotide
  Target: LAMA2; (+) strand; PAM type: YTN; PAM sequence: TTT
gttctattcagccctcaaga

SEQ ID NO: 396349 - DNA, 20 bp, Artificial Sequence
  Description of Artificial Sequence: Synthetic oligonucleotide
  Target: LAMA2; (+) strand; PAM type: YTN; PAM sequence: TTG
ttctattcagccctcaagag

SEQ ID NO: 396350 - DNA, 20 bp, Artificial Sequence
  Description of Artificial Sequence: Synthetic oligonucleotide
  Target: LAMA2; (+) strand; PAM type: YTN; PAM sequence: TTC
tattcagccctcaagagatt

SEQ ID NO: 396351 - DNA, 20 bp, Artificial Sequence
  Description of Artificial Sequence: Synthetic oligonucleotide
  Target: LAMA2; (+) strand; PAM type: YTN; PAM sequence: CTA
ttcagccctcaagagattgg

SEQ ID NO: 396352 - DNA, 20 bp, Artificial Sequence
  Description of Artificial Sequence: Synthetic oligonucleotide
  Target: LAMA2; (+) strand; PAM type: YTN; PAM sequence: TTC
agccctcaagagattgggtg

SEQ ID NO: 396353 - DNA, 20 bp, Artificial Sequence
  Description of Artificial Sequence: Synthetic oligonucleotide
  Target: LAMA2; (+) strand; PAM type: YTN; PAM sequence: CTC
aagagattgggtgatgcaca

SEQ ID NO: 396354 - DNA, 20 bp, Artificial Sequence
  Description of Artificial Sequence: Synthetic oligonucleotide
  Target: LAMA2; (+) strand; PAM type: YTN; PAM sequence: TTG
ggtgatgcacagcaatattg

SEQ ID NO: 396355 - DNA, 20 bp, Artificial Sequence
  Description of Artificial Sequence: Synthetic oligonucleotide
  Target: LAMA2; (+) strand; PAM type: YTN; PAM sequence: TTG
aggagggcaatctcttttac

SEQ ID NO: 396356 - DNA, 20 bp, Artificial Sequence
  Description of Artificial Sequence: Synthetic oligonucleotide
  Target: LAMA2; (+) strand; PAM type: YTN; PAM sequence: CTC
ttttactgtcatccagaaac

SEQ ID NO: 396357 - DNA, 20 bp, Artificial Sequence
  Description of Artificial Sequence: Synthetic oligonucleotide
  Target: LAMA2; (+) strand; PAM type: YTN; PAM sequence: CTT
ttactgtcatccagaaacac

SEQ ID NO: 396358 - DNA, 20 bp, Artificial Sequence
  Description of Artificial Sequence: Synthetic oligonucleotide
  Target: LAMA2; (+) strand; PAM type: YTN; PAM sequence: TTT
tactgtcatccagaaacacc

SEQ ID NO: 396359 - DNA, 20 bp, Artificial Sequence
  Description of Artificial Sequence: Synthetic oligonucleotide
  Target: LAMA2; (+) strand; PAM type: YTN; PAM sequence: TTT
actgtcatccagaaacaccc

SEQ ID NO: 396360 - DNA, 20 bp, Artificial Sequence
  Description of Artificial Sequence: Synthetic oligonucleotide
  Target: LAMA2; (+) strand; PAM type: YTN; PAM sequence: TTA
ctgtcatccagaaacaccct

SEQ ID NO: 396361 - DNA, 20 bp, Artificial Sequence
  Description of Artificial Sequence: Synthetic oligonucleotide
  Target: LAMA2; (+) strand; PAM type: YTN; PAM sequence: CTG
tcatccagaaacaccctcac

SEQ ID NO: 396362 - DNA, 20 bp, Artificial Sequence
  Description of Artificial Sequence: Synthetic oligonucleotide
  Target: LAMA2; (+) strand; PAM type: YTN; PAM sequence: CTC
acagacacacccggaaataa

SEQ ID NO: 396363 - DNA, 20 bp, Artificial Sequence
  Description of Artificial Sequence: Synthetic oligonucleotide
  Target: LAMA2; (+) strand; PAM type: YTN; PAM sequence: TTT
aatttaggtgcccatggcca

SEQ ID NO: 396364 - DNA, 20 bp, Artificial Sequence
  Description of Artificial Sequence: Synthetic oligonucleotide
  Target: LAMA2; (+) strand; PAM type: YTN; PAM sequence: TTA
atttaggtgcccatggccag

SEQ ID NO: 396365 - DNA, 20 bp, Artificial Sequence
  Description of Artificial Sequence: Synthetic oligonucleotide
  Target: LAMA2; (+) strand; PAM type: YTN; PAM sequence: TTT
aggtgcccatggccagtcaa

SEQ ID NO: 396366 - DNA, 20 bp, Artificial Sequence
  Description of Artificial Sequence: Synthetic oligonucleotide
  Target: LAMA2; (+) strand; PAM type: YTN; PAM sequence: TTA
ggtgcccatggccagtcaag

SEQ ID NO: 396367 - DNA, 20 bp, Artificial Sequence
  Description of Artificial Sequence: Synthetic oligonucleotide
  Target: LAMA2; (+) strand; PAM type: YTN; PAM sequence: TTG
acacatacaatttacaatga

SEQ ID NO: 396368 - DNA, 20 bp, Artificial Sequence
  Description of Artificial Sequence: Synthetic oligonucleotide
  Target: LAMA2; (+) strand; PAM type: YTN; PAM sequence: TTT
acaatgacactggccttcaa

SEQ ID NO: 396369 - DNA, 20 bp, Artificial Sequence
  Description of Artificial Sequence: Synthetic oligonucleotide
  Target: LAMA2; (+) strand; PAM type: YTN; PAM sequence: TTA
caatgacactggccttcaac

SEQ ID NO: 396370 - DNA, 20 bp, Artificial Sequence
  Description of Artificial Sequence: Synthetic oligonucleotide
  Target: LAMA2; (+) strand; PAM type: YTN; PAM sequence: CTG
gccttcaactccagtgcaca

SEQ ID NO: 396371 - DNA, 20 bp, Artificial Sequence
  Description of Artificial Sequence: Synthetic oligonucleotide
  Target: LAMA2; (+) strand; PAM type: YTN; PAM sequence: CTT
caactccagtgcacaatgtg

SEQ ID NO: 396372 - DNA, 20 bp, Artificial Sequence
  Description of Artificial Sequence: Synthetic oligonucleotide
  Target: LAMA2; (+) strand; PAM type: YTN; PAM sequence: TTC
aactccagtgcacaatgtgg

SEQ ID NO: 396373 - DNA, 20 bp, Artificial Sequence
  Description of Artificial Sequence: Synthetic oligonucleotide
  Target: LAMA2; (+) strand; PAM type: YTN; PAM sequence: CTC
cagtgcacaatgtggtcttc

SEQ ID NO: 396374 - DNA, 20 bp, Artificial Sequence
  Description of Artificial Sequence: Synthetic oligonucleotide
  Target: LAMA2; (+) strand; PAM type: YTN; PAM sequence: CTT
cctctttattctccaaattc

SEQ ID NO: 396375 - DNA, 20 bp, Artificial Sequence
  Description of Artificial Sequence: Synthetic oligonucleotide
  Target: LAMA2; (+) strand; PAM type: YTN; PAM sequence: TTC
ctctttattctccaaattca

SEQ ID NO: 396376 - DNA, 20 bp, Artificial Sequence
  Description of Artificial Sequence: Synthetic oligonucleotide
  Target: LAMA2; (+) strand; PAM type: YTN; PAM sequence: CTC
tttattctccaaattcaagt

SEQ ID NO: 396377 - DNA, 20 bp, Artificial Sequence
  Description of Artificial Sequence: Synthetic oligonucleotide
  Target: LAMA2; (+) strand; PAM type: YTN; PAM sequence: CTT
tattctccaaattcaagttc

SEQ ID NO: 396378 - DNA, 20 bp, Artificial Sequence
  Description of Artificial Sequence: Synthetic oligonucleotide
  Target: LAMA2; (+) strand; PAM type: YTN; PAM sequence: TTT
attctccaaattcaagttct

SEQ ID NO: 396379 - DNA, 20 bp, Artificial Sequence
  Description of Artificial Sequence: Synthetic oligonucleotide
  Target: LAMA2; (+) strand; PAM type: YTN; PAM sequence: TTA
ttctccaaattcaagttctc

SEQ ID NO: 396380 - DNA, 20 bp, Artificial Sequence
  Description of Artificial Sequence: Synthetic oligonucleotide
  Target: LAMA2; (+) strand; PAM type: YTN; PAM sequence: TTC
tccaaattcaagttctctta

SEQ ID NO: 396381 - DNA, 20 bp, Artificial Sequence
  Description of Artificial Sequence: Synthetic oligonucleotide
  Target: LAMA2; (+) strand; PAM type: YTN; PAM sequence: CTC
caaattcaagttctcttact

SEQ ID NO: 396382 - DNA, 20 bp, Artificial Sequence
  Description of Artificial Sequence: Synthetic oligonucleotide
  Target: LAMA2; (+) strand; PAM type: YTN; PAM sequence: TTC
aagttctcttacttgctaca

SEQ ID NO: 396383 - DNA, 20 bp, Artificial Sequence
  Description of Artificial Sequence: Synthetic oligonucleotide
  Target: LAMA2; (+) strand; PAM type: YTN; PAM sequence: TTC
tcttacttgctacagttgtc

SEQ ID NO: 396384 - DNA, 20 bp, Artificial Sequence
  Description of Artificial Sequence: Synthetic oligonucleotide
  Target: LAMA2; (+) strand; PAM type: YTN; PAM sequence: CTC
ttacttgctacagttgtcca

SEQ ID NO: 396385 - DNA, 20 bp, Artificial Sequence
  Description of Artificial Sequence: Synthetic oligonucleotide
  Target: LAMA2; (+) strand; PAM type: YTN; PAM sequence: CTT
acttgctacagttgtccata

SEQ ID NO: 396386 - DNA, 20 bp, Artificial Sequence
  Description of Artificial Sequence: Synthetic oligonucleotide
  Target: LAMA2; (+) strand; PAM type: YTN; PAM sequence: TTA
cttgctacagttgtccatat

SEQ ID NO: 396387 - DNA, 20 bp, Artificial Sequence
  Description of Artificial Sequence: Synthetic oligonucleotide
  Target: LAMA2; (+) strand; PAM type: YTN; PAM sequence: CTT
gctacagttgtccatatttc

SEQ ID NO: 396388 - DNA, 20 bp, Artificial Sequence
  Description of Artificial Sequence: Synthetic oligonucleotide
  Target: LAMA2; (+) strand; PAM type: YTN; PAM sequence: TTG
ctacagttgtccatatttct

SEQ ID NO: 396389 - DNA, 20 bp, Artificial Sequence
  Description of Artificial Sequence: Synthetic oligonucleotide
  Target: LAMA2; (+) strand; PAM type: YTN; PAM sequence: CTA
cagttgtccatatttcttgg

SEQ ID NO: 396390 - DNA, 20 bp, Artificial Sequence
  Description of Artificial Sequence: Synthetic oligonucleotide
  Target: LAMA2; (+) strand; PAM type: YTN; PAM sequence: TTG
tccatatttcttgggaacca

SEQ ID NO: 396391 - DNA, 20 bp, Artificial Sequence
  Description of Artificial Sequence: Synthetic oligonucleotide
  Target: LAMA2; (+) strand; PAM type: YTN; PAM sequence: TTT
cttgggaaccatcattctaa

SEQ ID NO: 396392 - DNA, 20 bp, Artificial Sequence
  Description of Artificial Sequence: Synthetic oligonucleotide
  Target: LAMA2; (+) strand; PAM type: YTN; PAM sequence: TTC
ttgggaaccatcattctaaa

SEQ ID NO: 396393 - DNA, 20 bp, Artificial Sequence
  Description of Artificial Sequence: Synthetic oligonucleotide
  Target: LAMA2; (+) strand; PAM type: YTN; PAM sequence: CTT
gggaaccatcattctaaaaa

SEQ ID NO: 396394 - DNA, 20 bp, Artificial Sequence
  Description of Artificial Sequence: Synthetic oligonucleotide
  Target: LAMA2; (+) strand; PAM type: YTN; PAM sequence: TTG
ggaaccatcattctaaaaaa

SEQ ID NO: 396395 - DNA, 20 bp, Artificial Sequence
  Description of Artificial Sequence: Synthetic oligonucleotide
  Target: LAMA2; (+) strand; PAM type: YTN; PAM sequence: TTC
taaaaaatgttgaccaggcc

SEQ ID NO: 396396 - DNA, 20 bp, Artificial Sequence
  Description of Artificial Sequence: Synthetic oligonucleotide
  Target: LAMA2; (+) strand; PAM type: YTN; PAM sequence: CTA
aaaaatgttgaccaggcctt

SEQ ID NO: 396397 - DNA, 20 bp, Artificial Sequence
  Description of Artificial Sequence: Synthetic oligonucleotide
  Target: LAMA2; (+) strand; PAM type: YTN; PAM sequence: TTG
accaggcctttcttaggcat

SEQ ID NO: 396398 - DNA, 20 bp, Artificial Sequence
  Description of Artificial Sequence: Synthetic oligonucleotide
  Target: LAMA2; (+) strand; PAM type: YTN; PAM sequence: CTT
tcttaggcatttctaggaaa

SEQ ID NO: 396399 - DNA, 20 bp, Artificial Sequence
  Description of Artificial Sequence: Synthetic oligonucleotide
  Target: LAMA2; (+) strand; PAM type: YTN; PAM sequence: TTT
cttaggcatttctaggaaaa

SEQ ID NO: 396400 - DNA, 20 bp, Artificial Sequence
  Description of Artificial Sequence: Synthetic oligonucleotide
  Target: LAMA2; (+) strand; PAM type: YTN; PAM sequence: TTC
ttaggcatttctaggaaaaa

SEQ ID NO: 396401 - DNA, 20 bp, Artificial Sequence
  Description of Artificial Sequence: Synthetic oligonucleotide
  Target: LAMA2; (+) strand; PAM type: YTN; PAM sequence: CTT
aggcatttctaggaaaaata

SEQ ID NO: 396402 - DNA, 20 bp, Artificial Sequence
  Description of Artificial Sequence: Synthetic oligonucleotide
  Target: LAMA2; (+) strand; PAM type: YTN; PAM sequence: TTA
ggcatttctaggaaaaataa

SEQ ID NO: 396403 - DNA, 20 bp, Artificial Sequence
  Description of Artificial Sequence: Synthetic oligonucleotide
  Target: LAMA2; (+) strand; PAM type: YTN; PAM sequence: TTT
ctaggaaaaataatataaaa

SEQ ID NO: 396404 - DNA, 20 bp, Artificial Sequence
  Description of Artificial Sequence: Synthetic oligonucleotide
  Target: LAMA2; (+) strand; PAM type: YTN; PAM sequence: TTC
taggaaaaataatataaaat

SEQ ID NO: 396405 - DNA, 20 bp, Artificial Sequence
  Description of Artificial Sequence: Synthetic oligonucleotide
  Target: LAMA2; (+) strand; PAM type: YTN; PAM sequence: CTA
ggaaaaataatataaaatac

SEQ ID NO: 396406 - DNA, 20 bp, Artificial Sequence
  Description of Artificial Sequence: Synthetic oligonucleotide
  Target: LAMA2; (+) strand; PAM type: YTN; PAM sequence: TTC
agatataatgcatttctcat

SEQ ID NO: 396407 - DNA, 20 bp, Artificial Sequence
  Description of Artificial Sequence: Synthetic oligonucleotide
  Target: LAMA2; (+) strand; PAM type: YTN; PAM sequence: TTT
ctcatagaaaaaatgatagt

SEQ ID NO: 396408 - DNA, 20 bp, Artificial Sequence
  Description of Artificial Sequence: Synthetic oligonucleotide
  Target: LAMA2; (+) strand; PAM type: YTN; PAM sequence: TTC
tcatagaaaaaatgatagtg

SEQ ID NO: 396409 - DNA, 20 bp, Artificial Sequence
  Description of Artificial Sequence: Synthetic oligonucleotide
  Target: LAMA2; (+) strand; PAM type: YTN; PAM sequence: CTC
atagaaaaaatgatagtggg

SEQ ID NO: 396410 - DNA, 20 bp, Artificial Sequence
  Description of Artificial Sequence: Synthetic oligonucleotide
  Target: LAMA2; (+) strand; PAM type: YTN; PAM sequence: TTA
gtaaagaactgtgctgtgta

SEQ ID NO: 396411 - DNA, 20 bp, Artificial Sequence
  Description of Artificial Sequence: Synthetic oligonucleotide
  Target: LAMA2; (+) strand; PAM type: YTN; PAM sequence: CTG
tgctgtgtaagcaagatgta

SEQ ID NO: 396412 - DNA, 20 bp, Artificial Sequence
  Description of Artificial Sequence: Synthetic oligonucleotide
  Target: LAMA2; (+) strand; PAM type: YTN; PAM sequence: CTG
tgtaagcaagatgtaagctt

SEQ ID NO: 396413 - DNA, 20 bp, Artificial Sequence
  Description of Artificial Sequence: Synthetic oligonucleotide
  Target: LAMA2; (+) strand; PAM type: YTN; PAM sequence: CTT
taaacaaagtgaagaaaagg

SEQ ID NO: 396414 - DNA, 20 bp, Artificial Sequence
  Description of Artificial Sequence: Synthetic oligonucleotide
  Target: LAMA2; (+) strand; PAM type: YTN; PAM sequence: TTT
aaacaaagtgaagaaaaggg

SEQ ID NO: 396415 - DNA, 20 bp, Artificial Sequence
  Description of Artificial Sequence: Synthetic oligonucleotide
  Target: LAMA2; (+) strand; PAM type: YTN; PAM sequence: TTA
aacaaagtgaagaaaagggg

SEQ ID NO: 396416 - DNA, 20 bp, Artificial Sequence
  Description of Artificial Sequence: Synthetic oligonucleotide
  Target: LAMA2; (+) strand; PAM type: YTN; PAM sequence: CTA
gaaaaaataacattatacag

SEQ ID NO: 396417 - DNA, 20 bp, Artificial Sequence
  Description of Artificial Sequence: Synthetic oligonucleotide
  Target: LAMA2; (+) strand; PAM type: YTN; PAM sequence: TTA
tacagaaagagaatattctt

SEQ ID NO: 396418 - DNA, 20 bp, Artificial Sequence
  Description of Artificial Sequence: Synthetic oligonucleotide
  Target: LAMA2; (+) strand; PAM type: YTN; PAM sequence: TTC
ttaaatatgtcaacttctct

SEQ ID NO: 396419 - DNA, 20 bp, Artificial Sequence
  Description of Artificial Sequence: Synthetic oligonucleotide
  Target: LAMA2; (+) strand; PAM type: YTN; PAM sequence: CTT
aaatatgtcaacttctctta

SEQ ID NO: 396420 - DNA, 20 bp, Artificial Sequence
  Description of Artificial Sequence: Synthetic oligonucleotide
  Target: LAMA2; (+) strand; PAM type: YTN; PAM sequence: TTA
aatatgtcaacttctcttat

SEQ ID NO: 396421 - DNA, 20 bp, Artificial Sequence
  Description of Artificial Sequence: Synthetic oligonucleotide
  Target: LAMA2; (+) strand; PAM type: YTN; PAM sequence: CTT
ctcttatagcaaatttccca

SEQ ID NO: 396422 - DNA, 20 bp, Artificial Sequence
  Description of Artificial Sequence: Synthetic oligonucleotide
  Target: LAMA2; (+) strand; PAM type: YTN; PAM sequence: TTC
tcttatagcaaatttcccag

SEQ ID NO: 396423 - DNA, 20 bp, Artificial Sequence
  Description of Artificial Sequence: Synthetic oligonucleotide
  Target: LAMA2; (+) strand; PAM type: YTN; PAM sequence: CTC
ttatagcaaatttcccagtg

SEQ ID NO: 396424 - DNA, 20 bp, Artificial Sequence
  Description of Artificial Sequence: Synthetic oligonucleotide
  Target: LAMA2; (+) strand; PAM type: YTN; PAM sequence: CTT
atagcaaatttcccagtgtt

SEQ ID NO: 396425 - DNA, 20 bp, Artificial Sequence
  Description of Artificial Sequence: Synthetic oligonucleotide
  Target: LAMA2; (+) strand; PAM type: YTN; PAM sequence: TTA
tagcaaatttcccagtgttc

SEQ ID NO: 396426 - DNA, 20 bp, Artificial Sequence
  Description of Artificial Sequence: Synthetic oligonucleotide
  Target: LAMA2; (+) strand; PAM type: YTN; PAM sequence: TTT
cccagtgttcattcctaata

SEQ ID NO: 396427 - DNA, 20 bp, Artificial Sequence
  Description of Artificial Sequence: Synthetic oligonucleotide
  Target: LAMA2; (+) strand; PAM type: YTN; PAM sequence: TTC
ccagtgttcattcctaatac

SEQ ID NO: 396428 - DNA, 20 bp, Artificial Sequence
  Description of Artificial Sequence: Synthetic oligonucleotide
  Target: LAMA2; (+) strand; PAM type: YTN; PAM sequence: TTC
attcctaatacaaggagagt

SEQ ID NO: 396429 - DNA, 20 bp, Artificial Sequence
  Description of Artificial Sequence: Synthetic oligonucleotide
  Target: LAMA2; (+) strand; PAM type: YTN; PAM sequence: TTC
ctaatacaaggagagtaaaa

SEQ ID NO: 396430 - DNA, 20 bp, Artificial Sequence
  Description of Artificial Sequence: Synthetic oligonucleotide
  Target: LAMA2; (+) strand; PAM type: YTN; PAM sequence: CTA
atacaaggagagtaaaaact

SEQ ID NO: 396431 - DNA, 20 bp, Artificial Sequence
  Description of Artificial Sequence: Synthetic oligonucleotide
  Target: LAMA2; (+) strand; PAM type: YTN; PAM sequence: CTC
catagaaacctcaaaaagag

SEQ ID NO: 396432 - DNA, 20 bp, Artificial Sequence
  Description of Artificial Sequence: Synthetic oligonucleotide
  Target: LAMA2; (+) strand; PAM type: YTN; PAM sequence: CTC
aaaaagagctttttcttgca

SEQ ID NO: 396433 - DNA, 20 bp, Artificial Sequence
  Description of Artificial Sequence: Synthetic oligonucleotide
  Target: LAMA2; (+) strand; PAM type: YTN; PAM sequence: CTT
tttcttgcaatggggttagg

SEQ ID NO: 396434 - DNA, 20 bp, Artificial Sequence
  Description of Artificial Sequence: Synthetic oligonucleotide
  Target: LAMA2; (+) strand; PAM type: YTN; PAM sequence: TTT
ttcttgcaatggggttaggt

SEQ ID NO: 396435 - DNA, 20 bp, Artificial Sequence
  Description of Artificial Sequence: Synthetic oligonucleotide
  Target: LAMA2; (+) strand; PAM type: YTN; PAM sequence: TTT
tcttgcaatggggttaggtg

SEQ ID NO: 396436 - DNA, 20 bp, Artificial Sequence
  Description of Artificial Sequence: Synthetic oligonucleotide
  Target: LAMA2; (+) strand; PAM type: YTN; PAM sequence: TTT
cttgcaatggggttaggtgt

SEQ ID NO: 396437 - DNA, 20 bp, Artificial Sequence
  Description of Artificial Sequence: Synthetic oligonucleotide
  Target: LAMA2; (+) strand; PAM type: YTN; PAM sequence: TTC
ttgcaatggggttaggtgtc

SEQ ID NO: 396438 - DNA, 20 bp, Artificial Sequence
  Description of Artificial Sequence: Synthetic oligonucleotide
  Target: LAMA2; (+) strand; PAM type: YTN; PAM sequence: CTT
gcaatggggttaggtgtcta

SEQ ID NO: 396439 - DNA, 20 bp, Artificial Sequence
  Description of Artificial Sequence: Synthetic oligonucleotide
  Target: LAMA2; (+) strand; PAM type: YTN; PAM sequence: TTG
caatggggttaggtgtctaa

SEQ ID NO: 396440 - DNA, 20 bp, Artificial Sequence
  Description of Artificial Sequence: Synthetic oligonucleotide
  Target: LAMA2; (+) strand; PAM type: YTN; PAM sequence: TTA
ggtgtctaaggaataaacag

SEQ ID NO: 396441 - DNA, 20 bp, Artificial Sequence
  Description of Artificial Sequence: Synthetic oligonucleotide
  Target: LAMA2; (+) strand; PAM type: YTN; PAM sequence: CTA
aggaataaacaggacttttg

SEQ ID NO: 396442 - DNA, 20 bp, Artificial Sequence
  Description of Artificial Sequence: Synthetic oligonucleotide
  Target: LAMA2; (+) strand; PAM type: YTN; PAM sequence: CTT
ttgaaactttactcttatgt

SEQ ID NO: 396443 - DNA, 20 bp, Artificial Sequence
  Description of Artificial Sequence: Synthetic oligonucleotide
  Target: LAMA2; (+) strand; PAM type: YTN; PAM sequence: TTT
tgaaactttactcttatgtg

SEQ ID NO: 396444 - DNA, 20 bp, Artificial Sequence
  Description of Artificial Sequence: Synthetic oligonucleotide
  Target: LAMA2; (+) strand; PAM type: YTN; PAM sequence: TTT
gaaactttactcttatgtga

SEQ ID NO: 396445 - DNA, 20 bp, Artificial Sequence
  Description of Artificial Sequence: Synthetic oligonucleotide
  Target: LAMA2; (+) strand; PAM type: YTN; PAM sequence: TTG
aaactttactcttatgtgac

SEQ ID NO: 396446 - DNA, 20 bp, Artificial Sequence
  Description of Artificial Sequence: Synthetic oligonucleotide
  Target: LAMA2; (+) strand; PAM type: YTN; PAM sequence: CTT
tactcttatgtgacagatca

SEQ ID NO: 396447 - DNA, 20 bp, Artificial Sequence
  Description of Artificial Sequence: Synthetic oligonucleotide
  Target: LAMA2; (+) strand; PAM type: YTN; PAM sequence: TTT
actcttatgtgacagatcag

SEQ ID NO: 396448 - DNA, 20 bp, Artificial Sequence
  Description of Artificial Sequence: Synthetic oligonucleotide
  Target: LAMA2; (+) strand; PAM type: YTN; PAM sequence: TTA
ctcttatgtgacagatcagt

SEQ ID NO: 396449 - DNA, 20 bp, Artificial Sequence
  Description of Artificial Sequence: Synthetic oligonucleotide
  Target: LAMA2; (+) strand; PAM type: YTN; PAM sequence: CTC
ttatgtgacagatcagtgag

SEQ ID NO: 396450 - DNA, 20 bp, Artificial Sequence
  Description of Artificial Sequence: Synthetic oligonucleotide
  Target: LAMA2; (+) strand; PAM type: YTN; PAM sequence: CTT
atgtgacagatcagtgagga

SEQ ID NO: 396451 - DNA, 20 bp, Artificial Sequence
  Description of Artificial Sequence: Synthetic oligonucleotide
  Target: LAMA2; (+) strand; PAM type: YTN; PAM sequence: TTA
tgtgacagatcagtgaggag

SEQ ID NO: 396452 - DNA, 20 bp, Artificial Sequence
  Description of Artificial Sequence: Synthetic oligonucleotide
  Target: LAMA2; (+) strand; PAM type: YTN; PAM sequence: CTG
ataagaagcactgaactact

SEQ ID NO: 396453 - DNA, 20 bp, Artificial Sequence
  Description of Artificial Sequence: Synthetic oligonucleotide
  Target: LAMA2; (+) strand; PAM type: YTN; PAM sequence: CTG
aactactacaaatacgcttc

SEQ ID NO: 396454 - DNA, 20 bp, Artificial Sequence
  Description of Artificial Sequence: Synthetic oligonucleotide
  Target: LAMA2; (+) strand; PAM type: YTN; PAM sequence: CTA
ctacaaatacgcttcatttg

SEQ ID NO: 396455 - DNA, 20 bp, Artificial Sequence
  Description of Artificial Sequence: Synthetic oligonucleotide
  Target: LAMA2; (+) strand; PAM type: YTN; PAM sequence: CTA
caaatacgcttcatttgcta

SEQ ID NO: 396456 - DNA, 20 bp, Artificial Sequence
  Description of Artificial Sequence: Synthetic oligonucleotide
  Target: LAMA2; (+) strand; PAM type: YTN; PAM sequence: CTT
catttgctataaatacactt

SEQ ID NO: 396457 - DNA, 20 bp, Artificial Sequence
  Description of Artificial Sequence: Synthetic oligonucleotide
  Target: LAMA2; (+) strand; PAM type: YTN; PAM sequence: TTC
atttgctataaatacacttc

SEQ ID NO: 396458 - DNA, 20 bp, Artificial Sequence
  Description of Artificial Sequence: Synthetic oligonucleotide
  Target: LAMA2; (+) strand; PAM type: YTN; PAM sequence: TTT
gctataaatacacttcattc

SEQ ID NO: 396459 - DNA, 20 bp, Artificial Sequence
  Description of Artificial Sequence: Synthetic oligonucleotide
  Target: LAMA2; (+) strand; PAM type: YTN; PAM sequence: TTG
ctataaatacacttcattca

SEQ ID NO: 396460 - DNA, 20 bp, Artificial Sequence
  Description of Artificial Sequence: Synthetic oligonucleotide
  Target: LAMA2; (+) strand; PAM type: YTN; PAM sequence: CTA
taaatacacttcattcactg

SEQ ID NO: 396461 - DNA, 20 bp, Artificial Sequence
  Description of Artificial Sequence: Synthetic oligonucleotide
  Target: LAMA2; (+) strand; PAM type: YTN; PAM sequence: CTT
cattcactgaactataataa

SEQ ID NO: 396462 - DNA, 20 bp, Artificial Sequence
  Description of Artificial Sequence: Synthetic oligonucleotide
  Target: LAMA2; (+) strand; PAM type: YTN; PAM sequence: TTC
attcactgaactataataaa

SEQ ID NO: 396463 - DNA, 20 bp, Artificial Sequence
  Description of Artificial Sequence: Synthetic oligonucleotide
  Target: LAMA2; (+) strand; PAM type: YTN; PAM sequence: TTC
actgaactataataaaattc

SEQ ID NO: 396464 - DNA, 20 bp, Artificial Sequence
  Description of Artificial Sequence: Synthetic oligonucleotide
  Target: LAMA2; (+) strand; PAM type: YTN; PAM sequence: CTG
aactataataaaattcactt

SEQ ID NO: 396465 - DNA, 20 bp, Artificial Sequence
  Description of Artificial Sequence: Synthetic oligonucleotide
  Target: LAMA2; (+) strand; PAM type: YTN; PAM sequence: CTA
taataaaattcacttcaaaa

SEQ ID NO: 396466 - DNA, 20 bp, Artificial Sequence
  Description of Artificial Sequence: Synthetic oligonucleotide
  Target: LAMA2; (+) strand; PAM type: YTN; PAM sequence: TTC
acttcaaaaggaatgtgaac

SEQ ID NO: 396467 - DNA, 20 bp, Artificial Sequence
  Description of Artificial Sequence: Synthetic oligonucleotide
  Target: LAMA2; (+) strand; PAM type: YTN; PAM sequence: CTT
caaaaggaatgtgaacaaaa

SEQ ID NO: 396468 - DNA, 20 bp, Artificial Sequence
  Description of Artificial Sequence: Synthetic oligonucleotide
  Target: LAMA2; (+) strand; PAM type: YTN; PAM sequence: TTC
aaaaggaatgtgaacaaaat

SEQ ID NO: 396469 - DNA, 20 bp, Artificial Sequence
  Description of Artificial Sequence: Synthetic oligonucleotide
  Target: LAMA2; (+) strand; PAM type: YTN; PAM sequence: CTT
ggatataaaggggcaaaagt

SEQ ID NO: 396470 - DNA, 20 bp, Artificial Sequence
  Description of Artificial Sequence: Synthetic oligonucleotide
  Target: LAMA2; (+) strand; PAM type: YTN; PAM sequence: TTG
gatataaaggggcaaaagtg

SEQ ID NO: 396471 - DNA, 20 bp, Artificial Sequence
  Description of Artificial Sequence: Synthetic oligonucleotide
  Target: LAMA2; (+) strand; PAM type: YTN; PAM sequence: CTA
agtaagcattatggaaagca

SEQ ID NO: 396472 - DNA, 20 bp, Artificial Sequence
  Description of Artificial Sequence: Synthetic oligonucleotide
  Target: LAMA2; (+) strand; PAM type: YTN; PAM sequence: TTA
tggaaagcataatgataata

SEQ ID NO: 396473 - DNA, 20 bp, Artificial Sequence
  Description of Artificial Sequence: Synthetic oligonucleotide
  Target: LAMA2; (+) strand; PAM type: YTN; PAM sequence: TTA
ttaaatatgtggaattaaaa

SEQ ID NO: 396474 - DNA, 20 bp, Artificial Sequence
  Description of Artificial Sequence: Synthetic oligonucleotide
  Target: LAMA2; (+) strand; PAM type: YTN; PAM sequence: TTA
aatatgtggaattaaaaaca

SEQ ID NO: 396475 - DNA, 20 bp, Artificial Sequence
  Description of Artificial Sequence: Synthetic oligonucleotide
  Target: LAMA2; (+) strand; PAM type: YTN; PAM sequence: TTA
aaaacaaagtggaactaaaa

SEQ ID NO: 396476 - DNA, 20 bp, Artificial Sequence
  Description of Artificial Sequence: Synthetic oligonucleotide
  Target: LAMA2; (+) strand; PAM type: YTN; PAM sequence: CTA
aaacacaagagactaataaa

SEQ ID NO: 396477 - DNA, 20 bp, Artificial Sequence
  Description of Artificial Sequence: Synthetic oligonucleotide
  Target: LAMA2; (+) strand; PAM type: YTN; PAM sequence: CTA
ataaaatggaaaatggggca

SEQ ID NO: 396478 - DNA, 20 bp, Artificial Sequence
  Description of Artificial Sequence: Synthetic oligonucleotide
  Target: LAMA2; (+) strand; PAM type: YTN; PAM sequence: TTA
tttaataaaagtttttaata

SEQ ID NO: 396479 - DNA, 20 bp, Artificial Sequence
  Description of Artificial Sequence: Synthetic oligonucleotide
  Target: LAMA2; (+) strand; PAM type: YTN; PAM sequence: TTT
aataaaagtttttaatattc

SEQ ID NO: 396480 - DNA, 20 bp, Artificial Sequence
  Description of Artificial Sequence: Synthetic oligonucleotide
  Target: LAMA2; (+) strand; PAM type: YTN; PAM sequence: TTA
ataaaagtttttaatattct

SEQ ID NO: 396481 - DNA, 20 bp, Artificial Sequence
  Description of Artificial Sequence: Synthetic oligonucleotide
  Target: LAMA2; (+) strand; PAM type: YTN; PAM sequence: TTT
ttaatattcttgaattctgg

SEQ ID NO: 396482 - DNA, 20 bp, Artificial Sequence
  Description of Artificial Sequence: Synthetic oligonucleotide
  Target: LAMA2; (+) strand; PAM type: YTN; PAM sequence: TTT
taatattcttgaattctggg

SEQ ID NO: 396483 - DNA, 20 bp, Artificial Sequence
  Description of Artificial Sequence: Synthetic oligonucleotide
  Target: LAMA2; (+) strand; PAM type: YTN; PAM sequence: TTT
aatattcttgaattctgggg

SEQ ID NO: 396484 - DNA, 20 bp, Artificial Sequence
  Description of Artificial Sequence: Synthetic oligonucleotide
  Target: LAMA2; (+) strand; PAM type: YTN; PAM sequence: TTA
atattcttgaattctgggga

SEQ ID NO: 396485 - DNA, 20 bp, Artificial Sequence
  Description of Artificial Sequence: Synthetic oligonucleotide
  Target: LAMA2; (+) strand; PAM type: YTN; PAM sequence: TTC
ttgaattctggggaggaaag

SEQ ID NO: 396486 - DNA, 20 bp, Artificial Sequence
  Description of Artificial Sequence: Synthetic oligonucleotide
  Target: LAMA2; (+) strand; PAM type: YTN; PAM sequence: CTT
gaattctggggaggaaagca

SEQ ID NO: 396487 - DNA, 20 bp, Artificial Sequence
  Description of Artificial Sequence: Synthetic oligonucleotide
  Target: LAMA2; (+) strand; PAM type: YTN; PAM sequence: TTG
aattctggggaggaaagcaa

SEQ ID NO: 396488 - DNA, 20 bp, Artificial Sequence
  Description of Artificial Sequence: Synthetic oligonucleotide
  Target: LAMA2; (+) strand; PAM type: YTN; PAM sequence: TTC
tggggaggaaagcaaaaagc

SEQ ID NO: 396489 - DNA, 20 bp, Artificial Sequence
  Description of Artificial Sequence: Synthetic oligonucleotide
  Target: LAMA2; (+) strand; PAM type: YTN; PAM sequence: CTG
gggaggaaagcaaaaagcta

SEQ ID NO: 396490 - DNA, 20 bp, Artificial Sequence
  Description of Artificial Sequence: Synthetic oligonucleotide
  Target: LAMA2; (+) strand; PAM type: YTN; PAM sequence: CTA
attaactttagttttcacta

SEQ ID NO: 396491 - DNA, 20 bp, Artificial Sequence
  Description of Artificial Sequence: Synthetic oligonucleotide
  Target: LAMA2; (+) strand; PAM type: YTN; PAM sequence: TTA
actttagttttcactaagaa

SEQ ID NO: 396492 - DNA, 20 bp, Artificial Sequence
  Description of Artificial Sequence: Synthetic oligonucleotide
  Target: LAMA2; (+) strand; PAM type: YTN; PAM sequence: CTT
tagttttcactaagaatatg

SEQ ID NO: 396493 - DNA, 20 bp, Artificial Sequence
  Description of Artificial Sequence: Synthetic oligonucleotide
  Target: LAMA2; (+) strand; PAM type: YTN; PAM sequence: TTT
agttttcactaagaatatgt

SEQ ID NO: 396494 - DNA, 20 bp, Artificial Sequence
  Description of Artificial Sequence: Synthetic oligonucleotide
  Target: LAMA2; (+) strand; PAM type: YTN; PAM sequence: TTA
gttttcactaagaatatgta

SEQ ID NO: 396495 - DNA, 20 bp, Artificial Sequence
  Description of Artificial Sequence: Synthetic oligonucleotide
  Target: LAMA2; (+) strand; PAM type: YTN; PAM sequence: TTT
tcactaagaatatgtattaa

SEQ ID NO: 396496 - DNA, 20 bp, Artificial Sequence
  Description of Artificial Sequence: Synthetic oligonucleotide
  Target: LAMA2; (+) strand; PAM type: YTN; PAM sequence: TTT
cactaagaatatgtattaaa

SEQ ID NO: 396497 - DNA, 20 bp, Artificial Sequence
  Description of Artificial Sequence: Synthetic oligonucleotide
  Target: LAMA2; (+) strand; PAM type: YTN; PAM sequence: TTC
actaagaatatgtattaaac

SEQ ID NO: 396498 - DNA, 20 bp, Artificial Sequence
  Description of Artificial Sequence: Synthetic oligonucleotide
  Target: LAMA2; (+) strand; PAM type: YTN; PAM sequence: CTA
agaatatgtattaaacattg

SEQ ID NO: 396499 - DNA, 20 bp, Artificial Sequence
  Description of Artificial Sequence: Synthetic oligonucleotide
  Target: LAMA2; (+) strand; PAM type: YTN; PAM sequence: TTA
aacattgaaaaaaaatctgg

SEQ ID NO: 396500 - DNA, 20 bp, Artificial Sequence
  Description of Artificial Sequence: Synthetic oligonucleotide
  Target: LAMA2; (+) strand; PAM type: YTN; PAM sequence: TTG
aaaaaaaatctggaaaaata

SEQ ID NO: 396501 - DNA, 20 bp, Artificial Sequence
  Description of Artificial Sequence: Synthetic oligonucleotide
  Target: LAMA2; (+) strand; PAM type: YTN; PAM sequence: CTG
gaaaaataaaattgacaata

SEQ ID NO: 396502 - DNA, 20 bp, Artificial Sequence
  Description of Artificial Sequence: Synthetic oligonucleotide
  Target: LAMA2; (+) strand; PAM type: YTN; PAM sequence: TTG
acaatattcgagttctccag

SEQ ID NO: 396503 - DNA, 20 bp, Artificial Sequence
  Description of Artificial Sequence: Synthetic oligonucleotide
  Target: LAMA2; (+) strand; PAM type: YTN; PAM sequence: TTC
gagttctccagagaaacaga

SEQ ID NO: 396504 - DNA, 20 bp, Artificial Sequence
  Description of Artificial Sequence: Synthetic oligonucleotide
  Target: LAMA2; (+) strand; PAM type: YTN; PAM sequence: TTC
tccagagaaacagaacaaat

SEQ ID NO: 396505 - DNA, 20 bp, Artificial Sequence
  Description of Artificial Sequence: Synthetic oligonucleotide
  Target: LAMA2; (+) strand; PAM type: YTN; PAM sequence: CTC
cagagaaacagaacaaattg

SEQ ID NO: 396506 - DNA, 20 bp, Artificial Sequence
  Description of Artificial Sequence: Synthetic oligonucleotide
  Target: LAMA2; (+) strand; PAM type: YTN; PAM sequence: TTG
gaagtgtatatatacacaga

SEQ ID NO: 396507 - DNA, 20 bp, Artificial Sequence
  Description of Artificial Sequence: Synthetic oligonucleotide
  Target: LAMA2; (+) strand; PAM type: YTN; PAM sequence: TTA
tatattttaaagaattgact

SEQ ID NO: 396508 - DNA, 20 bp, Artificial Sequence
  Description of Artificial Sequence: Synthetic oligonucleotide
  Target: LAMA2; (+) strand; PAM type: YTN; PAM sequence: TTT
taaagaattgactcatgaga

SEQ ID NO: 396509 - DNA, 20 bp, Artificial Sequence
  Description of Artificial Sequence: Synthetic oligonucleotide
  Target: LAMA2; (+) strand; PAM type: YTN; PAM sequence: TTT
aaagaattgactcatgagat

SEQ ID NO: 396510 - DNA, 20 bp, Artificial Sequence
  Description of Artificial Sequence: Synthetic oligonucleotide
  Target: LAMA2; (+) strand; PAM type: YTN; PAM sequence: TTA
aagaattgactcatgagatt

SEQ ID NO: 396511 - DNA, 20 bp, Artificial Sequence
  Description of Artificial Sequence: Synthetic oligonucleotide
  Target: LAMA2; (+) strand; PAM type: YTN; PAM sequence: TTG
actcatgagattgtggggtc

SEQ ID NO: 396512 - DNA, 20 bp, Artificial Sequence
  Description of Artificial Sequence: Synthetic oligonucleotide
  Target: LAMA2; (+) strand; PAM type: YTN; PAM sequence: CTC
atgagattgtggggtctggc

SEQ ID NO: 396513 - DNA, 20 bp, Artificial Sequence
  Description of Artificial Sequence: Synthetic oligonucleotide
  Target: LAMA2; (+) strand; PAM type: YTN; PAM sequence: TTG
tggggtctggctgcagggaa

SEQ ID NO: 396514 - DNA, 20 bp, Artificial Sequence
  Description of Artificial Sequence: Synthetic oligonucleotide
  Target: LAMA2; (+) strand; PAM type: YTN; PAM sequence: CTG
gctgcagggaataggtgaat

SEQ ID NO: 396515 - DNA, 20 bp, Artificial Sequence
  Description of Artificial Sequence: Synthetic oligonucleotide
  Target: LAMA2; (+) strand; PAM type: YTN; PAM sequence: CTG
cagggaataggtgaatattg

SEQ ID NO: 396516 - DNA, 20 bp, Artificial Sequence
  Description of Artificial Sequence: Synthetic oligonucleotide
  Target: LAMA2; (+) strand; PAM type: YTN; PAM sequence: TTG
ccgtcttgaatccaaaggca

SEQ ID NO: 396517 - DNA, 20 bp, Artificial Sequence
  Description of Artificial Sequence: Synthetic oligonucleotide
  Target: LAMA2; (+) strand; PAM type: YTN; PAM sequence: CTT
gaatccaaaggcagtttgga

SEQ ID NO: 396518 - DNA, 20 bp, Artificial Sequence
  Description of Artificial Sequence: Synthetic oligonucleotide
  Target: LAMA2; (+) strand; PAM type: YTN; PAM sequence: TTG
aatccaaaggcagtttggag

SEQ ID NO: 396519 - DNA, 20 bp, Artificial Sequence
  Description of Artificial Sequence: Synthetic oligonucleotide
  Target: LAMA2; (+) strand; PAM type: YTN; PAM sequence: TTT
ggaggcagaatttcttcttc

SEQ ID NO: 396520 - DNA, 20 bp, Artificial Sequence
  Description of Artificial Sequence: Synthetic oligonucleotide
  Target: LAMA2; (+) strand; PAM type: YTN; PAM sequence: TTG
gaggcagaatttcttcttct

SEQ ID NO: 396521 - DNA, 20 bp, Artificial Sequence
  Description of Artificial Sequence: Synthetic oligonucleotide
  Target: LAMA2; (+) strand; PAM type: YTN; PAM sequence: TTT
cttcttcttcaggggacctc

SEQ ID NO: 396522 - DNA, 20 bp, Artificial Sequence
  Description of Artificial Sequence: Synthetic oligonucleotide
  Target: LAMA2; (+) strand; PAM type: YTN; PAM sequence: TTC
ttcttcttcaggggacctca

SEQ ID NO: 396523 - DNA, 20 bp, Artificial Sequence
  Description of Artificial Sequence: Synthetic oligonucleotide
  Target: LAMA2; (+) strand; PAM type: YTN; PAM sequence: CTT
cttcttcaggggacctcagt

SEQ ID NO: 396524 - DNA, 20 bp, Artificial Sequence
  Description of Artificial Sequence: Synthetic oligonucleotide
  Target: LAMA2; (+) strand; PAM type: YTN; PAM sequence: TTC
ttcttcaggggacctcagta

SEQ ID NO: 396525 - DNA, 20 bp, Artificial Sequence
  Description of Artificial Sequence: Synthetic oligonucleotide
  Target: LAMA2; (+) strand; PAM type: YTN; PAM sequence: CTT
cttcaggggacctcagtaat

SEQ ID NO: 396526 - DNA, 20 bp, Artificial Sequence
  Description of Artificial Sequence: Synthetic oligonucleotide
  Target: LAMA2; (+) strand; PAM type: YTN; PAM sequence: TTC
ttcaggggacctcagtaatt

SEQ ID NO: 396527 - DNA, 20 bp, Artificial Sequence
  Description of Artificial Sequence: Synthetic oligonucleotide
  Target: LAMA2; (+) strand; PAM type: YTN; PAM sequence: CTT
caggggacctcagtaattct

SEQ ID NO: 396528 - DNA, 20 bp, Artificial Sequence
  Description of Artificial Sequence: Synthetic oligonucleotide
  Target: LAMA2; (+) strand; PAM type: YTN; PAM sequence: TTC
aggggacctcagtaattctt

SEQ ID NO: 396529 - DNA, 20 bp, Artificial Sequence
  Description of Artificial Sequence: Synthetic oligonucleotide
  Target: LAMA2; (+) strand; PAM type: YTN; PAM sequence: CTC
agtaattcttcttaaggcct

SEQ ID NO: 396530 - DNA, 20 bp, Artificial Sequence
  Description of Artificial Sequence: Synthetic oligonucleotide
  Target: LAMA2; (+) strand; PAM type: YTN; PAM sequence: TTC
ttcttaaggcctctgactgt

SEQ ID NO: 396531 - DNA, 20 bp, Artificial Sequence
  Description of Artificial Sequence: Synthetic oligonucleotide
  Target: LAMA2; (+) strand; PAM type: YTN; PAM sequence: CTT
cttaaggcctctgactgttg

SEQ ID NO: 396532 - DNA, 20 bp, Artificial Sequence
  Description of Artificial Sequence: Synthetic oligonucleotide
  Target: LAMA2; (+) strand; PAM type: YTN; PAM sequence: TTC
ttaaggcctctgactgttgg

SEQ ID NO: 396533 - DNA, 20 bp, Artificial Sequence
  Description of Artificial Sequence: Synthetic oligonucleotide
  Target: LAMA2; (+) strand; PAM type: YTN; PAM sequence: CTT
aaggcctctgactgttggat

SEQ ID NO: 396534 - DNA, 20 bp, Artificial Sequence
  Description of Artificial Sequence: Synthetic oligonucleotide
  Target: LAMA2; (+) strand; PAM type: YTN; PAM sequence: TTA
aggcctctgactgttggatg

SEQ ID NO: 396535 - DNA, 20 bp, Artificial Sequence
  Description of Artificial Sequence: Synthetic oligonucleotide
  Target: LAMA2; (+) strand; PAM type: YTN; PAM sequence: CTC
tgactgttggatgaggttcc

SEQ ID NO: 396536 - DNA, 20 bp, Artificial Sequence
  Description of Artificial Sequence: Synthetic oligonucleotide
  Target: LAMA2; (+) strand; PAM type: YTN; PAM sequence: CTG
actgttggatgaggttcccc

SEQ ID NO: 396537 - DNA, 20 bp, Artificial Sequence
  Description of Artificial Sequence: Synthetic oligonucleotide
  Target: LAMA2; (+) strand; PAM type: YTN; PAM sequence: CTG
ttggatgaggttccccaaca

SEQ ID NO: 396538 - DNA, 20 bp, Artificial Sequence
  Description of Artificial Sequence: Synthetic oligonucleotide
  Target: LAMA2; (+) strand; PAM type: YTN; PAM sequence: TTG
gatgaggttccccaacatca

SEQ ID NO: 396539 - DNA, 20 bp, Artificial Sequence
  Description of Artificial Sequence: Synthetic oligonucleotide
  Target: LAMA2; (+) strand; PAM type: YTN; PAM sequence: TTC
cccaacatcatggagggtga

SEQ ID NO: 396540 - DNA, 20 bp, Artificial Sequence
  Description of Artificial Sequence: Synthetic oligonucleotide
  Target: LAMA2; (+) strand; PAM type: YTN; PAM sequence: CTG
ctttactcaaagtctactga

SEQ ID NO: 396541 - DNA, 20 bp, Artificial Sequence
  Description of Artificial Sequence: Synthetic oligonucleotide
  Target: LAMA2; (+) strand; PAM type: YTN; PAM sequence: CTT
tactcaaagtctactgactg

SEQ ID NO: 396542 - DNA, 20 bp, Artificial Sequence
  Description of Artificial Sequence: Synthetic oligonucleotide
  Target: LAMA2; (+) strand; PAM type: YTN; PAM sequence: TTT
actcaaagtctactgactga

SEQ ID NO: 396543 - DNA, 20 bp, Artificial Sequence
  Description of Artificial Sequence: Synthetic oligonucleotide
  Target: LAMA2; (+) strand; PAM type: YTN; PAM sequence: TTA
ctcaaagtctactgactgaa

SEQ ID NO: 396544 - DNA, 20 bp, Artificial Sequence
  Description of Artificial Sequence: Synthetic oligonucleotide
  Target: LAMA2; (+) strand; PAM type: YTN; PAM sequence: CTC
aaagtctactgactgaaacg

SEQ ID NO: 396545 - DNA, 20 bp, Artificial Sequence
  Description of Artificial Sequence: Synthetic oligonucleotide
  Target: LAMA2; (+) strand; PAM type: YTN; PAM sequence: CTA
ctgactgaaacgttaatcac

SEQ ID NO: 396546 - DNA, 20 bp, Artificial Sequence
  Description of Artificial Sequence: Synthetic oligonucleotide
  Target: LAMA2; (+) strand; PAM type: YTN; PAM sequence: CTG
actgaaacgttaatcacatc

SEQ ID NO: 396547 - DNA, 20 bp, Artificial Sequence
  Description of Artificial Sequence: Synthetic oligonucleotide
  Target: LAMA2; (+) strand; PAM type: YTN; PAM sequence: CTG
aaacgttaatcacatctaaa

SEQ ID NO: 396548 - DNA, 20 bp, Artificial Sequence
  Description of Artificial Sequence: Synthetic oligonucleotide
  Target: LAMA2; (+) strand; PAM type: YTN; PAM sequence: TTA
atcacatctaaaaaatacat

SEQ ID NO: 396549 - DNA, 20 bp, Artificial Sequence
  Description of Artificial Sequence: Synthetic oligonucleotide
  Target: LAMA2; (+) strand; PAM type: YTN; PAM sequence: CTA
aaaaatacattcacagcaac

SEQ ID NO: 396550 - DNA, 20 bp, Artificial Sequence
  Description of Artificial Sequence: Synthetic oligonucleotide
  Target: LAMA2; (+) strand; PAM type: YTN; PAM sequence: TTC
acagcaacatctagactgct

SEQ ID NO: 396551 - DNA, 20 bp, Artificial Sequence
  Description of Artificial Sequence: Synthetic oligonucleotide
  Target: LAMA2; (+) strand; PAM type: YTN; PAM sequence: CTA
gactgctgttttaccaaaaa

SEQ ID NO: 396552 - DNA, 20 bp, Artificial Sequence
  Description of Artificial Sequence: Synthetic oligonucleotide
  Target: LAMA2; (+) strand; PAM type: YTN; PAM sequence: CTG
ctgttttaccaaaaaccaag

SEQ ID NO: 396553 - DNA, 20 bp, Artificial Sequence
  Description of Artificial Sequence: Synthetic oligonucleotide
  Target: LAMA2; (+) strand; PAM type: YTN; PAM sequence: CTG
ttttaccaaaaaccaagtac

SEQ ID NO: 396554 - DNA, 20 bp, Artificial Sequence
  Description of Artificial Sequence: Synthetic oligonucleotide
  Target: LAMA2; (+) strand; PAM type: YTN; PAM sequence: TTT
taccaaaaaccaagtaccat

SEQ ID NO: 396555 - DNA, 20 bp, Artificial Sequence
  Description of Artificial Sequence: Synthetic oligonucleotide
  Target: LAMA2; (+) strand; PAM type: YTN; PAM sequence: TTT
accaaaaaccaagtaccata

SEQ ID NO: 396556 - DNA, 20 bp, Artificial Sequence
  Description of Artificial Sequence: Synthetic oligonucleotide
  Target: LAMA2; (+) strand; PAM type: YTN; PAM sequence: TTA
ccaaaaaccaagtaccatag

SEQ ID NO: 396557 - DNA, 20 bp, Artificial Sequence
  Description of Artificial Sequence: Synthetic oligonucleotide
  Target: LAMA2; (+) strand; PAM type: YTN; PAM sequence: CTA
gccaagtggatataaattaa

SEQ ID NO: 396558 - DNA, 20 bp, Artificial Sequence
  Description of Artificial Sequence: Synthetic oligonucleotide
  Target: LAMA2; (+) strand; PAM type: YTN; PAM sequence: TTA
acgatcacaaacagctaaac

SEQ ID NO: 396559 - DNA, 20 bp, Artificial Sequence
  Description of Artificial Sequence: Synthetic oligonucleotide
  Target: LAMA2; (+) strand; PAM type: YTN; PAM sequence: CTA
aacattccaaacaagcagac

SEQ ID NO: 396560 - DNA, 20 bp, Artificial Sequence
  Description of Artificial Sequence: Synthetic oligonucleotide
  Target: LAMA2; (+) strand; PAM type: YTN; PAM sequence: TTC
caaacaagcagacagagaga

SEQ ID NO: 396561 - DNA, 20 bp, Artificial Sequence
  Description of Artificial Sequence: Synthetic oligonucleotide
  Target: LAMA2; (+) strand; PAM type: YTN; PAM sequence: TTT
tcaatcaattctggaaaaga

SEQ ID NO: 396562 - DNA, 20 bp, Artificial Sequence
  Description of Artificial Sequence: Synthetic oligonucleotide
  Target: LAMA2; (+) strand; PAM type: YTN; PAM sequence: TTT
caatcaattctggaaaagac

SEQ ID NO: 396563 - DNA, 20 bp, Artificial Sequence
  Description of Artificial Sequence: Synthetic oligonucleotide
  Target: LAMA2; (+) strand; PAM type: YTN; PAM sequence: TTC
aatcaattctggaaaagaca

SEQ ID NO: 396564 - DNA, 20 bp, Artificial Sequence
  Description of Artificial Sequence: Synthetic oligonucleotide
  Target: LAMA2; (+) strand; PAM type: YTN; PAM sequence: TTC
tggaaaagacaaaaaaagag

SEQ ID NO: 396565 - DNA, 20 bp, Artificial Sequence
  Description of Artificial Sequence: Synthetic oligonucleotide
  Target: LAMA2; (+) strand; PAM type: YTN; PAM sequence: CTG
gaaaagacaaaaaaagagaa

SEQ ID NO: 396566 - DNA, 20 bp, Artificial Sequence
  Description of Artificial Sequence: Synthetic oligonucleotide
  Target: LAMA2; (+) strand; PAM type: YTN; PAM sequence: TTA
aatccatatacaacaatcag

SEQ ID NO: 396567 - DNA, 20 bp, Artificial Sequence
  Description of Artificial Sequence: Synthetic oligonucleotide
  Target: LAMA2; (+) strand; PAM type: YTN; PAM sequence: TTA
tcaccagctgcctcaagaaa

SEQ ID NO: 396568 - DNA, 20 bp, Artificial Sequence
  Description of Artificial Sequence: Synthetic oligonucleotide
  Target: LAMA2; (+) strand; PAM type: YTN; PAM sequence: CTG
cctcaagaaataacccctga

SEQ ID NO: 396569 - DNA, 20 bp, Artificial Sequence
  Description of Artificial Sequence: Synthetic oligonucleotide
  Target: LAMA2; (+) strand; PAM type: YTN; PAM sequence: CTC
aagaaataacccctgaaatc

SEQ ID NO: 396570 - DNA, 20 bp, Artificial Sequence
  Description of Artificial Sequence: Synthetic oligonucleotide
  Target: LAMA2; (+) strand; PAM type: YTN; PAM sequence: CTG
aaatctcacatgatggacat

SEQ ID NO: 396571 - DNA, 20 bp, Artificial Sequence
  Description of Artificial Sequence: Synthetic oligonucleotide
  Target: LAMA2; (+) strand; PAM type: YTN; PAM sequence: CTC
acatgatggacataattcaa

SEQ ID NO: 396572 - DNA, 20 bp, Artificial Sequence
  Description of Artificial Sequence: Synthetic oligonucleotide
  Target: LAMA2; (+) strand; PAM type: YTN; PAM sequence: TTC
aagtttatgtctcacatcac

SEQ ID NO: 396573 - DNA, 20 bp, Artificial Sequence
  Description of Artificial Sequence: Synthetic oligonucleotide
  Target: LAMA2; (+) strand; PAM type: YTN; PAM sequence: TTT
atgtctcacatcacaacaca

SEQ ID NO: 396574 - DNA, 20 bp, Artificial Sequence
  Description of Artificial Sequence: Synthetic oligonucleotide
  Target: LAMA2; (+) strand; PAM type: YTN; PAM sequence: TTA
tgtctcacatcacaacacaa

SEQ ID NO: 396575 - DNA, 20 bp, Artificial Sequence
  Description of Artificial Sequence: Synthetic oligonucleotide
  Target: LAMA2; (+) strand; PAM type: YTN; PAM sequence: CTC
acatcacaacacaatgtgag

SEQ ID NO: 396576 - DNA, 20 bp, Artificial Sequence
  Description of Artificial Sequence: Synthetic oligonucleotide
  Target: LAMA2; (+) strand; PAM type: YTN; PAM sequence: TTA
taccaccttttgcatcttgt

SEQ ID NO: 396577 - DNA, 20 bp, Artificial Sequence
  Description of Artificial Sequence: Synthetic oligonucleotide
  Target: LAMA2; (+) strand; PAM type: YTN; PAM sequence: CTT
ttgcatcttgtagtgacacc

SEQ ID NO: 396578 - DNA, 20 bp, Artificial Sequence
  Description of Artificial Sequence: Synthetic oligonucleotide
  Target: LAMA2; (+) strand; PAM type: YTN; PAM sequence: TTT
tgcatcttgtagtgacacca

SEQ ID NO: 396579 - DNA, 20 bp, Artificial Sequence
  Description of Artificial Sequence: Synthetic oligonucleotide
  Target: LAMA2; (+) strand; PAM type: YTN; PAM sequence: TTT
gcatcttgtagtgacaccat

SEQ ID NO: 396580 - DNA, 20 bp, Artificial Sequence
  Description of Artificial Sequence: Synthetic oligonucleotide
  Target: LAMA2; (+) strand; PAM type: YTN; PAM sequence: TTG
catcttgtagtgacaccata

SEQ ID NO: 396581 - DNA, 20 bp, Artificial Sequence
  Description of Artificial Sequence: Synthetic oligonucleotide
  Target: LAMA2; (+) strand; PAM type: YTN; PAM sequence: CTT
gtagtgacaccatacagtgt

SEQ ID NO: 396582 - DNA, 20 bp, Artificial Sequence
  Description of Artificial Sequence: Synthetic oligonucleotide
  Target: LAMA2; (+) strand; PAM type: YTN; PAM sequence: TTG
tagtgacaccatacagtgta

SEQ ID NO: 396583 - DNA, 20 bp, Artificial Sequence
  Description of Artificial Sequence: Synthetic oligonucleotide
  Target: LAMA2; (+) strand; PAM type: YTN; PAM sequence: CTC
caaggcagggaagagaaaaa

SEQ ID NO: 396584 - DNA, 20 bp, Artificial Sequence
  Description of Artificial Sequence: Synthetic oligonucleotide
  Target: LAMA2; (+) strand; PAM type: YTN; PAM sequence: CTA
ccatactggctcatgaagcc

SEQ ID NO: 396585 - DNA, 20 bp, Artificial Sequence
  Description of Artificial Sequence: Synthetic oligonucleotide
  Target: LAMA2; (+) strand; PAM type: YTN; PAM sequence: CTG
gctcatgaagcctggaccac

SEQ ID NO: 396586 - DNA, 20 bp, Artificial Sequence
  Description of Artificial Sequence: Synthetic oligonucleotide
  Target: LAMA2; (+) strand; PAM type: YTN; PAM sequence: CTC
atgaagcctggaccacgtct

SEQ ID NO: 396587 - DNA, 20 bp, Artificial Sequence
  Description of Artificial Sequence: Synthetic oligonucleotide
  Target: LAMA2; (+) strand; PAM type: YTN; PAM sequence: CTG
gaccacgtctggtctgagtc

SEQ ID NO: 396588 - DNA, 20 bp, Artificial Sequence
  Description of Artificial Sequence: Synthetic oligonucleotide
  Target: LAMA2; (+) strand; PAM type: YTN; PAM sequence: CTG
gtctgagtcattgaccagaa

SEQ ID NO: 396589 - DNA, 20 bp, Artificial Sequence
  Description of Artificial Sequence: Synthetic oligonucleotide
  Target: LAMA2; (+) strand; PAM type: YTN; PAM sequence: CTG
agtcattgaccagaagtagc

SEQ ID NO: 396590 - DNA, 20 bp, Artificial Sequence
  Description of Artificial Sequence: Synthetic oligonucleotide
  Target: LAMA2; (+) strand; PAM type: YTN; PAM sequence: TTG
accagaagtagccgtgtgcc

SEQ ID NO: 396591 - DNA, 20 bp, Artificial Sequence
  Description of Artificial Sequence: Synthetic oligonucleotide
  Target: LAMA2; (+) strand; PAM type: YTN; PAM sequence: CTA
actgtaagggaggtctggaa

SEQ ID NO: 396592 - DNA, 20 bp, Artificial Sequence
  Description of Artificial Sequence: Synthetic oligonucleotide
  Target: LAMA2; (+) strand; PAM type: YTN; PAM sequence: CTG
taagggaggtctggaaaagt

SEQ ID NO: 396593 - DNA, 20 bp, Artificial Sequence
  Description of Artificial Sequence: Synthetic oligonucleotide
  Target: LAMA2; (+) strand; PAM type: YTN; PAM sequence: CTG
gaaaagtaggaggcacatag

SEQ ID NO: 396594 - DNA, 20 bp, Artificial Sequence
  Description of Artificial Sequence: Synthetic oligonucleotide
  Target: LAMA2; (+) strand; PAM type: YTN; PAM sequence: TTT
gatgagcactaactatctct

SEQ ID NO: 396595 - DNA, 20 bp, Artificial Sequence
  Description of Artificial Sequence: Synthetic oligonucleotide
  Target: LAMA2; (+) strand; PAM type: YTN; PAM sequence: TTG
atgagcactaactatctctg

SEQ ID NO: 396596 - DNA, 20 bp, Artificial Sequence
  Description of Artificial Sequence: Synthetic oligonucleotide
  Target: LAMA2; (+) strand; PAM type: YTN; PAM sequence: CTA
actatctctgcttcaggttg

SEQ ID NO: 396597 - DNA, 20 bp, Artificial Sequence
  Description of Artificial Sequence: Synthetic oligonucleotide
  Target: LAMA2; (+) strand; PAM type: YTN; PAM sequence: CTA
tctctgcttcaggttgtctt

SEQ ID NO: 396598 - DNA, 20 bp, Artificial Sequence
  Description of Artificial Sequence: Synthetic oligonucleotide
  Target: LAMA2; (+) strand; PAM type: YTN; PAM sequence: CTC
tgcttcaggttgtcttcata

SEQ ID NO: 396599 - DNA, 20 bp, Artificial Sequence
  Description of Artificial Sequence: Synthetic oligonucleotide
  Target: LAMA2; (+) strand; PAM type: YTN; PAM sequence: CTG
cttcaggttgtcttcataat

SEQ ID NO: 396600 - DNA, 20 bp, Artificial Sequence
  Description of Artificial Sequence: Synthetic oligonucleotide
  Target: LAMA2; (+) strand; PAM type: YTN; PAM sequence: CTT
caggttgtcttcataataaa

SEQ ID NO: 396601 - DNA, 20 bp, Artificial Sequence
  Description of Artificial Sequence: Synthetic oligonucleotide
  Target: LAMA2; (+) strand; PAM type: YTN; PAM sequence: TTC
aggttgtcttcataataaat

SEQ ID NO: 396602 - DNA, 20 bp, Artificial Sequence
  Description of Artificial Sequence: Synthetic oligonucleotide
  Target: LAMA2; (+) strand; PAM type: YTN; PAM sequence: TTG
tcttcataataaatgcaaac

SEQ ID NO: 396603 - DNA, 20 bp, Artificial Sequence
  Description of Artificial Sequence: Synthetic oligonucleotide
  Target: LAMA2; (+) strand; PAM type: YTN; PAM sequence: CTT
cataataaatgcaaacatta

SEQ ID NO: 396604 - DNA, 20 bp, Artificial Sequence
  Description of Artificial Sequence: Synthetic oligonucleotide
  Target: LAMA2; (+) strand; PAM type: YTN; PAM sequence: TTC
ataataaatgcaaacattaa

SEQ ID NO: 396605 - DNA, 20 bp, Artificial Sequence
  Description of Artificial Sequence: Synthetic oligonucleotide
  Target: LAMA2; (+) strand; PAM type: YTN; PAM sequence: TTA
aaattgacaggttactatga

SEQ ID NO: 396606 - DNA, 20 bp, Artificial Sequence
  Description of Artificial Sequence: Synthetic oligonucleotide
  Target: LAMA2; (+) strand; PAM type: YTN; PAM sequence: TTG
acaggttactatgattttca

SEQ ID NO: 396607 - DNA, 20 bp, Artificial Sequence
  Description of Artificial Sequence: Synthetic oligonucleotide
  Target: LAMA2; (+) strand; PAM type: YTN; PAM sequence: TTA
ctatgattttcatattggat

SEQ ID NO: 396608 - DNA, 20 bp, Artificial Sequence
  Description of Artificial Sequence: Synthetic oligonucleotide
  Target: LAMA2; (+) strand; PAM type: YTN; PAM sequence: CTA
tgattttcatattggattaa

SEQ ID NO: 396609 - DNA, 20 bp, Artificial Sequence
  Description of Artificial Sequence: Synthetic oligonucleotide
  Target: LAMA2; (+) strand; PAM type: YTN; PAM sequence: TTT
tcatattggattaaaatgtc

SEQ ID NO: 396610 - DNA, 20 bp, Artificial Sequence
  Description of Artificial Sequence: Synthetic oligonucleotide
  Target: LAMA2; (+) strand; PAM type: YTN; PAM sequence: TTT
catattggattaaaatgtct

SEQ ID NO: 396611 - DNA, 20 bp, Artificial Sequence
  Description of Artificial Sequence: Synthetic oligonucleotide
  Target: LAMA2; (+) strand; PAM type: YTN; PAM sequence: TTC
atattggattaaaatgtcta

SEQ ID NO: 396612 - DNA, 20 bp, Artificial Sequence
  Description of Artificial Sequence: Synthetic oligonucleotide
  Target: LAMA2; (+) strand; PAM type: YTN; PAM sequence: TTG
gattaaaatgtctaaaacaa

SEQ ID NO: 396613 - DNA, 20 bp, Artificial Sequence
  Description of Artificial Sequence: Synthetic oligonucleotide
  Target: LAMA2; (+) strand; PAM type: YTN; PAM sequence: TTA
aaatgtctaaaacaaaggga

SEQ ID NO: 396614 - DNA, 20 bp, Artificial Sequence
  Description of Artificial Sequence: Synthetic oligonucleotide
  Target: LAMA2; (+) strand; PAM type: YTN; PAM sequence: CTA
aaacaaagggattcgtctat

SEQ ID NO: 396615 - DNA, 20 bp, Artificial Sequence
  Description of Artificial Sequence: Synthetic oligonucleotide
  Target: LAMA2; (+) strand; PAM type: YTN; PAM sequence: TTC
gtctatgtatgacttacaca

SEQ ID NO: 396616 - DNA, 20 bp, Artificial Sequence
  Description of Artificial Sequence: Synthetic oligonucleotide
  Target: LAMA2; (+) strand; PAM type: YTN; PAM sequence: CTA
tgtatgacttacacaaatac

SEQ ID NO: 396617 - DNA, 20 bp, Artificial Sequence
  Description of Artificial Sequence: Synthetic oligonucleotide
  Target: LAMA2; (+) strand; PAM type: YTN; PAM sequence: CTT
acacaaatactgcaaatctt

SEQ ID NO: 396618 - DNA, 20 bp, Artificial Sequence
  Description of Artificial Sequence: Synthetic oligonucleotide
  Target: LAMA2; (+) strand; PAM type: YTN; PAM sequence: TTA
cacaaatactgcaaatctta

SEQ ID NO: 396619 - DNA, 20 bp, Artificial Sequence
  Description of Artificial Sequence: Synthetic oligonucleotide
  Target: LAMA2; (+) strand; PAM type: YTN; PAM sequence: CTG
caaatcttaggggaacagaa

SEQ ID NO: 396620 - DNA, 20 bp, Artificial Sequence
  Description of Artificial Sequence: Synthetic oligonucleotide
  Target: LAMA2; (+) strand; PAM type: YTN; PAM sequence: CTT
aggggaacagaaagactgaa

SEQ ID NO: 396621 - DNA, 20 bp, Artificial Sequence
  Description of Artificial Sequence: Synthetic oligonucleotide
  Target: LAMA2; (+) strand; PAM type: YTN; PAM sequence: TTA
ggggaacagaaagactgaaa

SEQ ID NO: 396622 - DNA, 20 bp, Artificial Sequence
  Description of Artificial Sequence: Synthetic oligonucleotide
  Target: LAMA2; (+) strand; PAM type: YTN; PAM sequence: CTG
aaaatgagagataagataca

SEQ ID NO: 396623 - DNA, 20 bp, Artificial Sequence
  Description of Artificial Sequence: Synthetic oligonucleotide
  Target: LAMA2; (+) strand; PAM type: YTN; PAM sequence: CTA
tgcaaactctaaccagaaga

SEQ ID NO: 396624 - DNA, 20 bp, Artificial Sequence
  Description of Artificial Sequence: Synthetic oligonucleotide
  Target: LAMA2; (+) strand; PAM type: YTN; PAM sequence: CTC
taaccagaagaaagctggta

SEQ ID NO: 396625 - DNA, 20 bp, Artificial Sequence
  Description of Artificial Sequence: Synthetic oligonucleotide
  Target: LAMA2; (+) strand; PAM type: YTN; PAM sequence: CTA
accagaagaaagctggtatg

SEQ ID NO: 396626 - DNA, 20 bp, Artificial Sequence
  Description of Artificial Sequence: Synthetic oligonucleotide
  Target: LAMA2; (+) strand; PAM type: YTN; PAM sequence: CTG
gtatgctaccattaatagca

SEQ ID NO: 396627 - DNA, 20 bp, Artificial Sequence
  Description of Artificial Sequence: Synthetic oligonucleotide
  Target: LAMA2; (+) strand; PAM type: YTN; PAM sequence: CTA
ccattaatagcaatcaaaaa

SEQ ID NO: 396628 - DNA, 20 bp, Artificial Sequence
  Description of Artificial Sequence: Synthetic oligonucleotide
  Target: LAMA2; (+) strand; PAM type: YTN; PAM sequence: TTA
atagcaatcaaaaagacttt

SEQ ID NO: 396629 - DNA, 20 bp, Artificial Sequence
  Description of Artificial Sequence: Synthetic oligonucleotide
  Target: LAMA2; (+) strand; PAM type: YTN; PAM sequence: CTT
taatttttttaaaagaatta

SEQ ID NO: 396630 - DNA, 20 bp, Artificial Sequence
  Description of Artificial Sequence: Synthetic oligonucleotide
  Target: LAMA2; (+) strand; PAM type: YTN; PAM sequence: TTT
aatttttttaaaagaattat

SEQ ID NO: 396631 - DNA, 20 bp, Artificial Sequence
  Description of Artificial Sequence: Synthetic oligonucleotide
  Target: LAMA2; (+) strand; PAM type: YTN; PAM sequence: TTA
atttttttaaaagaattatt

SEQ ID NO: 396632 - DNA, 20 bp, Artificial Sequence
  Description of Artificial Sequence: Synthetic oligonucleotide
  Target: LAMA2; (+) strand; PAM type: YTN; PAM sequence: TTT
ttttaaaagaattattaagg

SEQ ID NO: 396633 - DNA, 20 bp, Artificial Sequence
  Description of Artificial Sequence: Synthetic oligonucleotide
  Target: LAMA2; (+) strand; PAM type: YTN; PAM sequence: TTT
tttaaaagaattattaagga

SEQ ID NO: 396634 - DNA, 20 bp, Artificial Sequence
  Description of Artificial Sequence: Synthetic oligonucleotide
  Target: LAMA2; (+) strand; PAM type: YTN; PAM sequence: TTT
ttaaaagaattattaaggac

SEQ ID NO: 396635 - DNA, 20 bp, Artificial Sequence
  Description of Artificial Sequence: Synthetic oligonucleotide
  Target: LAMA2; (+) strand; PAM type: YTN; PAM sequence: TTT
taaaagaattattaaggaca

SEQ ID NO: 396636 - DNA, 20 bp, Artificial Sequence
  Description of Artificial Sequence: Synthetic oligonucleotide
  Target: LAMA2; (+) strand; PAM type: YTN; PAM sequence: TTT
aaaagaattattaaggacaa

SEQ ID NO: 396637 - DNA, 20 bp, Artificial Sequence
  Description of Artificial Sequence: Synthetic oligonucleotide
  Target: LAMA2; (+) strand; PAM type: YTN; PAM sequence: TTA
aaagaattattaaggacaaa

SEQ ID NO: 396638 - DNA, 20 bp, Artificial Sequence
  Description of Artificial Sequence: Synthetic oligonucleotide
  Target: LAMA2; (+) strand; PAM type: YTN; PAM sequence: TTA
ttaaggacaaagaaagtgat

SEQ ID NO: 396639 - DNA, 20 bp, Artificial Sequence
  Description of Artificial Sequence: Synthetic oligonucleotide
  Target: LAMA2; (+) strand; PAM type: YTN; PAM sequence: TTA
aggacaaagaaagtgatcat

SEQ ID NO: 396640 - DNA, 20 bp, Artificial Sequence
  Description of Artificial Sequence: Synthetic oligonucleotide
  Target: LAMA2; (+) strand; PAM type: YTN; PAM sequence: CTA
aaaaattatgagcctgcaag

SEQ ID NO: 396641 - DNA, 20 bp, Artificial Sequence
  Description of Artificial Sequence: Synthetic oligonucleotide
  Target: LAMA2; (+) strand; PAM type: YTN; PAM sequence: TTA
tgagcctgcaaggtcataat

SEQ ID NO: 396642 - DNA, 20 bp, Artificial Sequence
  Description of Artificial Sequence: Synthetic oligonucleotide
  Target: LAMA2; (+) strand; PAM type: YTN; PAM sequence: CTG
caaggtcataataacaaagc

SEQ ID NO: 396643 - DNA, 20 bp, Artificial Sequence
  Description of Artificial Sequence: Synthetic oligonucleotide
  Target: LAMA2; (+) strand; PAM type: YTN; PAM sequence: CTA
tggataaataaagataaata

SEQ ID NO: 396644 - DNA, 20 bp, Artificial Sequence
  Description of Artificial Sequence: Synthetic oligonucleotide
  Target: LAMA2; (+) strand; PAM type: YTN; PAM sequence: TTT
tcatatatataatagggaat

SEQ ID NO: 396645 - DNA, 20 bp, Artificial Sequence
  Description of Artificial Sequence: Synthetic oligonucleotide
  Target: LAMA2; (+) strand; PAM type: YTN; PAM sequence: TTT
catatatataatagggaatg

SEQ ID NO: 396646 - DNA, 20 bp, Artificial Sequence
  Description of Artificial Sequence: Synthetic oligonucleotide
  Target: LAMA2; (+) strand; PAM type: YTN; PAM sequence: TTC
atatatataatagggaatga

SEQ ID NO: 396647 - DNA, 20 bp, Artificial Sequence
  Description of Artificial Sequence: Synthetic oligonucleotide
  Target: LAMA2; (+) strand; PAM type: YTN; PAM sequence: TTT
taccatatctctcttaaaaa

SEQ ID NO: 396648 - DNA, 20 bp, Artificial Sequence
  Description of Artificial Sequence: Synthetic oligonucleotide
  Target: LAMA2; (+) strand; PAM type: YTN; PAM sequence: TTT
accatatctctcttaaaaag

SEQ ID NO: 396649 - DNA, 20 bp, Artificial Sequence
  Description of Artificial Sequence: Synthetic oligonucleotide
  Target: LAMA2; (+) strand; PAM type: YTN; PAM sequence: TTA
ccatatctctcttaaaaagt

SEQ ID NO: 396650 - DNA, 20 bp, Artificial Sequence
  Description of Artificial Sequence: Synthetic oligonucleotide
  Target: LAMA2; (+) strand; PAM type: YTN; PAM sequence: CTC
tcttaaaaagtgatagatca

SEQ ID NO: 396651 - DNA, 20 bp, Artificial Sequence
  Description of Artificial Sequence: Synthetic oligonucleotide
  Target: LAMA2; (+) strand; PAM type: YTN; PAM sequence: CTC
ttaaaaagtgatagatcaag

SEQ ID NO: 396652 - DNA, 20 bp, Artificial Sequence
  Description of Artificial Sequence: Synthetic oligonucleotide
  Target: LAMA2; (+) strand; PAM type: YTN; PAM sequence: CTT
aaaaagtgatagatcaagca

SEQ ID NO: 396653 - DNA, 20 bp, Artificial Sequence
  Description of Artificial Sequence: Synthetic oligonucleotide
  Target: LAMA2; (+) strand; PAM type: YTN; PAM sequence: TTA
aaaagtgatagatcaagcaa

SEQ ID NO: 396654 - DNA, 20 bp, Artificial Sequence
  Description of Artificial Sequence: Synthetic oligonucleotide
  Target: LAMA2; (+) strand; PAM type: YTN; PAM sequence: TTT
taaaagtaccttacacaaga

SEQ ID NO: 396655 - DNA, 20 bp, Artificial Sequence
  Description of Artificial Sequence: Synthetic oligonucleotide
  Target: LAMA2; (+) strand; PAM type: YTN; PAM sequence: TTT
aaaagtaccttacacaagat

SEQ ID NO: 396656 - DNA, 20 bp, Artificial Sequence
  Description of Artificial Sequence: Synthetic oligonucleotide
  Target: LAMA2; (+) strand; PAM type: YTN; PAM sequence: TTA
aaagtaccttacacaagata

SEQ ID NO: 396657 - DNA, 20 bp, Artificial Sequence
  Description of Artificial Sequence: Synthetic oligonucleotide
  Target: LAMA2; (+) strand; PAM type: YTN; PAM sequence: CTT
acacaagataacttaatggc

SEQ ID NO: 396658 - DNA, 20 bp, Artificial Sequence
  Description of Artificial Sequence: Synthetic oligonucleotide
  Target: LAMA2; (+) strand; PAM type: YTN; PAM sequence: TTA
cacaagataacttaatggcc

SEQ ID NO: 396659 - DNA, 20 bp, Artificial Sequence
  Description of Artificial Sequence: Synthetic oligonucleotide
  Target: LAMA2; (+) strand; PAM type: YTN; PAM sequence: CTT
aatggccttatagaactcta

SEQ ID NO: 396660 - DNA, 20 bp, Artificial Sequence
  Description of Artificial Sequence: Synthetic oligonucleotide
  Target: LAMA2; (+) strand; PAM type: YTN; PAM sequence: TTA
atggccttatagaactctat

SEQ ID NO: 396661 - DNA, 20 bp, Artificial Sequence
  Description of Artificial Sequence: Synthetic oligonucleotide
  Target: LAMA2; (+) strand; PAM type: YTN; PAM sequence: CTT
atagaactctatgtcaacta

SEQ ID NO: 396662 - DNA, 20 bp, Artificial Sequence
  Description of Artificial Sequence: Synthetic oligonucleotide
  Target: LAMA2; (+) strand; PAM type: YTN; PAM sequence: TTA
tagaactctatgtcaactag

SEQ ID NO: 396663 - DNA, 20 bp, Artificial Sequence
  Description of Artificial Sequence: Synthetic oligonucleotide
  Target: LAMA2; (+) strand; PAM type: YTN; PAM sequence: CTC
tatgtcaactagataattaa

SEQ ID NO: 396664 - DNA, 20 bp, Artificial Sequence
  Description of Artificial Sequence: Synthetic oligonucleotide
  Target: LAMA2; (+) strand; PAM type: YTN; PAM sequence: CTA
tgtcaactagataattaatt

SEQ ID NO: 396665 - DNA, 20 bp, Artificial Sequence
  Description of Artificial Sequence: Synthetic oligonucleotide
  Target: LAMA2; (+) strand; PAM type: YTN; PAM sequence: CTA
gataattaattctacatgcc

SEQ ID NO: 396666 - DNA, 20 bp, Artificial Sequence
  Description of Artificial Sequence: Synthetic oligonucleotide
  Target: LAMA2; (+) strand; PAM type: YTN; PAM sequence: TTA
attctacatgccccattcga

SEQ ID NO: 396667 - DNA, 20 bp, Artificial Sequence
  Description of Artificial Sequence: Synthetic oligonucleotide
  Target: LAMA2; (+) strand; PAM type: YTN; PAM sequence: TTC
tacatgccccattcgatgaa

SEQ ID NO: 396668 - DNA, 20 bp, Artificial Sequence
  Description of Artificial Sequence: Synthetic oligonucleotide
  Target: LAMA2; (+) strand; PAM type: YTN; PAM sequence: CTA
catgccccattcgatgaagt

SEQ ID NO: 396669 - DNA, 20 bp, Artificial Sequence
  Description of Artificial Sequence: Synthetic oligonucleotide
  Target: LAMA2; (+) strand; PAM type: YTN; PAM sequence: TTC
gatgaagtaactcatgaaac

SEQ ID NO: 396670 - DNA, 20 bp, Artificial Sequence
  Description of Artificial Sequence: Synthetic oligonucleotide
  Target: LAMA2; (+) strand; PAM type: YTN; PAM sequence: CTC
atgaaacaaacaaaggacca

SEQ ID NO: 396671 - DNA, 20 bp, Artificial Sequence
  Description of Artificial Sequence: Synthetic oligonucleotide
  Target: LAMA2; (+) strand; PAM type: YTN; PAM sequence: CTA
gatcataaagcaagtatcag

SEQ ID NO: 396672 - DNA, 20 bp, Artificial Sequence
  Description of Artificial Sequence: Synthetic oligonucleotide
  Target: LAMA2; (+) strand; PAM type: YTN; PAM sequence: CTA
atgatccaatagcatctaga

SEQ ID NO: 396673 - DNA, 20 bp, Artificial Sequence
  Description of Artificial Sequence: Synthetic oligonucleotide
  Target: LAMA2; (+) strand; PAM type: YTN; PAM sequence: CTA
gactacatcctcttatcata

SEQ ID NO: 396674 - DNA, 20 bp, Artificial Sequence
  Description of Artificial Sequence: Synthetic oligonucleotide
  Target: LAMA2; (+) strand; PAM type: YTN; PAM sequence: CTA
catcctcttatcataatgca

SEQ ID NO: 396675 - DNA, 20 bp, Artificial Sequence
  Description of Artificial Sequence: Synthetic oligonucleotide
  Target: LAMA2; (+) strand; PAM type: YTN; PAM sequence: CTC
ttatcataatgcaatacaat

SEQ ID NO: 396676 - DNA, 20 bp, Artificial Sequence
  Description of Artificial Sequence: Synthetic oligonucleotide
  Target: LAMA2; (+) strand; PAM type: YTN; PAM sequence: CTT
atcataatgcaatacaatta

SEQ ID NO: 396677 - DNA, 20 bp, Artificial Sequence
  Description of Artificial Sequence: Synthetic oligonucleotide
  Target: LAMA2; (+) strand; PAM type: YTN; PAM sequence: TTA
tcataatgcaatacaattag

SEQ ID NO: 396678 - DNA, 20 bp, Artificial Sequence
  Description of Artificial Sequence: Synthetic oligonucleotide
  Target: LAMA2; (+) strand; PAM type: YTN; PAM sequence: TTA
gaaattggtacaaaacaatt

SEQ ID NO: 396679 - DNA, 20 bp, Artificial Sequence
  Description of Artificial Sequence: Synthetic oligonucleotide
  Target: LAMA2; (+) strand; PAM type: YTN; PAM sequence: TTG
gtacaaaacaattgacaaaa

SEQ ID NO: 396680 - DNA, 20 bp, Artificial Sequence
  Description of Artificial Sequence: Synthetic oligonucleotide
  Target: LAMA2; (+) strand; PAM type: YTN; PAM sequence: TTG
acaaaaagttttaaaataaa

SEQ ID NO: 396681 - DNA, 20 bp, Artificial Sequence
  Description of Artificial Sequence: Synthetic oligonucleotide
  Target: LAMA2; (+) strand; PAM type: YTN; PAM sequence: TTT
taaaataaaaaacatacttc

SEQ ID NO: 396682 - DNA, 20 bp, Artificial Sequence
  Description of Artificial Sequence: Synthetic oligonucleotide
  Target: LAMA2; (+) strand; PAM type: YTN; PAM sequence: TTT
aaaataaaaaacatacttca

SEQ ID NO: 396683 - DNA, 20 bp, Artificial Sequence
  Description of Artificial Sequence: Synthetic oligonucleotide
  Target: LAMA2; (+) strand; PAM type: YTN; PAM sequence: TTA
aaataaaaaacatacttcaa

SEQ ID NO: 396684 - DNA, 20 bp, Artificial Sequence
  Description of Artificial Sequence: Synthetic oligonucleotide
  Target: LAMA2; (+) strand; PAM type: YTN; PAM sequence: CTT
caaagtaatccatggcttga

SEQ ID NO: 396685 - DNA, 20 bp, Artificial Sequence
  Description of Artificial Sequence: Synthetic oligonucleotide
  Target: LAMA2; (+) strand; PAM type: YTN; PAM sequence: TTC
aaagtaatccatggcttgag

SEQ ID NO: 396686 - DNA, 20 bp, Artificial Sequence
  Description of Artificial Sequence: Synthetic oligonucleotide
  Target: LAMA2; (+) strand; PAM type: YTN; PAM sequence: CTT
gagaaaaaaacacagtttaa

SEQ ID NO: 396687 - DNA, 20 bp, Artificial Sequence
  Description of Artificial Sequence: Synthetic oligonucleotide
  Target: LAMA2; (+) strand; PAM type: YTN; PAM sequence: TTG
agaaaaaaacacagtttaaa

SEQ ID NO: 396688 - DNA, 20 bp, Artificial Sequence
  Description of Artificial Sequence: Synthetic oligonucleotide
  Target: LAMA2; (+) strand; PAM type: YTN; PAM sequence: TTT
aaatttacgaagtatttaat

SEQ ID NO: 396689 - DNA, 20 bp, Artificial Sequence
  Description of Artificial Sequence: Synthetic oligonucleotide
  Target: LAMA2; (+) strand; PAM type: YTN; PAM sequence: TTA
aatttacgaagtatttaata

SEQ ID NO: 396690 - DNA, 20 bp, Artificial Sequence
  Description of Artificial Sequence: Synthetic oligonucleotide
  Target: LAMA2; (+) strand; PAM type: YTN; PAM sequence: TTT
acgaagtatttaataacaga

SEQ ID NO: 396691 - DNA, 20 bp, Artificial Sequence
  Description of Artificial Sequence: Synthetic oligonucleotide
  Target: LAMA2; (+) strand; PAM type: YTN; PAM sequence: TTA
cgaagtatttaataacagaa

SEQ ID NO: 396692 - DNA, 20 bp, Artificial Sequence
  Description of Artificial Sequence: Synthetic oligonucleotide
  Target: LAMA2; (+) strand; PAM type: YTN; PAM sequence: TTT
aataacagaatggaaataaa

SEQ ID NO: 396693 - DNA, 20 bp, Artificial Sequence
  Description of Artificial Sequence: Synthetic oligonucleotide
  Target: LAMA2; (+) strand; PAM type: YTN; PAM sequence: TTA
ataacagaatggaaataaaa

SEQ ID NO: 396694 - DNA, 20 bp, Artificial Sequence
  Description of Artificial Sequence: Synthetic oligonucleotide
  Target: LAMA2; (+) strand; PAM type: YTN; PAM sequence: TTT
cacctcaaaatttgtgtgtg

SEQ ID NO: 396695 - DNA, 20 bp, Artificial Sequence
  Description of Artificial Sequence: Synthetic oligonucleotide
  Target: LAMA2; (+) strand; PAM type: YTN; PAM sequence: TTC
acctcaaaatttgtgtgtgc

SEQ ID NO: 396696 - DNA, 20 bp, Artificial Sequence
  Description of Artificial Sequence: Synthetic oligonucleotide
  Target: LAMA2; (+) strand; PAM type: YTN; PAM sequence: CTC
aaaatttgtgtgtgcaaata

SEQ ID NO: 396697 - DNA, 20 bp, Artificial Sequence
  Description of Artificial Sequence: Synthetic oligonucleotide
  Target: LAMA2; (+) strand; PAM type: YTN; PAM sequence: TTT
gtgtgtgcaaataaagtggt

SEQ ID NO: 396698 - DNA, 20 bp, Artificial Sequence
  Description of Artificial Sequence: Synthetic oligonucleotide
  Target: LAMA2; (+) strand; PAM type: YTN; PAM sequence: TTG
tgtgtgcaaataaagtggta

SEQ ID NO: 396699 - DNA, 20 bp, Artificial Sequence
  Description of Artificial Sequence: Synthetic oligonucleotide
  Target: LAMA2; (+) strand; PAM type: YTN; PAM sequence: TTT
ggaatgcagatattaggcaa

SEQ ID NO: 396700 - DNA, 20 bp, Artificial Sequence
  Description of Artificial Sequence: Synthetic oligonucleotide
  Target: LAMA2; (+) strand; PAM type: YTN; PAM sequence: TTG
gaatgcagatattaggcaag

SEQ ID NO: 396701 - DNA, 20 bp, Artificial Sequence
  Description of Artificial Sequence: Synthetic oligonucleotide
  Target: LAMA2; (+) strand; PAM type: YTN; PAM sequence: TTA
ggcaagggtaagaactgata

SEQ ID NO: 396702 - DNA, 20 bp, Artificial Sequence
  Description of Artificial Sequence: Synthetic oligonucleotide
  Target: LAMA2; (+) strand; PAM type: YTN; PAM sequence: CTG
atactaattatctaaggttt

SEQ ID NO: 396703 - DNA, 20 bp, Artificial Sequence
  Description of Artificial Sequence: Synthetic oligonucleotide
  Target: LAMA2; (+) strand; PAM type: YTN; PAM sequence: CTA
attatctaaggtttctgctc

SEQ ID NO: 396704 - DNA, 20 bp, Artificial Sequence
  Description of Artificial Sequence: Synthetic oligonucleotide
  Target: LAMA2; (+) strand; PAM type: YTN; PAM sequence: TTA
tctaaggtttctgctcaaga

SEQ ID NO: 396705 - DNA, 20 bp, Artificial Sequence
  Description of Artificial Sequence: Synthetic oligonucleotide
  Target: LAMA2; (+) strand; PAM type: YTN; PAM sequence: CTA
aggtttctgctcaagatgtt

SEQ ID NO: 396706 - DNA, 20 bp, Artificial Sequence
  Description of Artificial Sequence: Synthetic oligonucleotide
  Target: LAMA2; (+) strand; PAM type: YTN; PAM sequence: TTT
ctgctcaagatgtttaaaaa

SEQ ID NO: 396707 - DNA, 20 bp, Artificial Sequence
  Description of Artificial Sequence: Synthetic oligonucleotide
  Target: LAMA2; (+) strand; PAM type: YTN; PAM sequence: TTC
tgctcaagatgtttaaaaaa

SEQ ID NO: 396708 - DNA, 20 bp, Artificial Sequence
  Description of Artificial Sequence: Synthetic oligonucleotide
  Target: LAMA2; (+) strand; PAM type: YTN; PAM sequence: CTG
ctcaagatgtttaaaaaagt

SEQ ID NO: 396709 - DNA, 20 bp, Artificial Sequence
  Description of Artificial Sequence: Synthetic oligonucleotide
  Target: LAMA2; (+) strand; PAM type: YTN; PAM sequence: CTC
aagatgtttaaaaaagtaca

SEQ ID NO: 396710 - DNA, 20 bp, Artificial Sequence
  Description of Artificial Sequence: Synthetic oligonucleotide
  Target: LAMA2; (+) strand; PAM type: YTN; PAM sequence: TTT
aaaaaagtacacagaaagaa

SEQ ID NO: 396711 - DNA, 20 bp, Artificial Sequence
  Description of Artificial Sequence: Synthetic oligonucleotide
  Target: LAMA2; (+) strand; PAM type: YTN; PAM sequence: TTA
aaaaagtacacagaaagaaa

SEQ ID NO: 396712 - DNA, 20 bp, Artificial Sequence
  Description of Artificial Sequence: Synthetic oligonucleotide
  Target: LAMA2; (+) strand; PAM type: YTN; PAM sequence: TTA
atgacctaaggaaaggcatt

SEQ ID NO: 396713 - DNA, 20 bp, Artificial Sequence
  Description of Artificial Sequence: Synthetic oligonucleotide
  Target: LAMA2; (+) strand; PAM type: YTN; PAM sequence: CTA
aggaaaggcattagacaggg

SEQ ID NO: 396714 - DNA, 20 bp, Artificial Sequence
  Description of Artificial Sequence: Synthetic oligonucleotide
  Target: LAMA2; (+) strand; PAM type: YTN; PAM sequence: TTA
gacagggttgacaaaacagc

SEQ ID NO: 396715 - DNA, 20 bp, Artificial Sequence
  Description of Artificial Sequence: Synthetic oligonucleotide
  Target: LAMA2; (+) strand; PAM type: YTN; PAM sequence: TTG
acaaaacagcaagttgattc

SEQ ID NO: 396716 - DNA, 20 bp, Artificial Sequence
  Description of Artificial Sequence: Synthetic oligonucleotide
  Target: LAMA2; (+) strand; PAM type: YTN; PAM sequence: TTG
attcttagaataaactagca

SEQ ID NO: 396717 - DNA, 20 bp, Artificial Sequence
  Description of Artificial Sequence: Synthetic oligonucleotide
  Target: LAMA2; (+) strand; PAM type: YTN; PAM sequence: TTC
ttagaataaactagcaaata

SEQ ID NO: 396718 - DNA, 20 bp, Artificial Sequence
  Description of Artificial Sequence: Synthetic oligonucleotide
  Target: LAMA2; (+) strand; PAM type: YTN; PAM sequence: CTT
agaataaactagcaaataaa

SEQ ID NO: 396719 - DNA, 20 bp, Artificial Sequence
  Description of Artificial Sequence: Synthetic oligonucleotide
  Target: LAMA2; (+) strand; PAM type: YTN; PAM sequence: TTA
gaataaactagcaaataaac

SEQ ID NO: 396720 - DNA, 20 bp, Artificial Sequence
  Description of Artificial Sequence: Synthetic oligonucleotide
  Target: LAMA2; (+) strand; PAM type: YTN; PAM sequence: CTA
gcaaataaacagaagacaag

SEQ ID NO: 396721 - DNA, 20 bp, Artificial Sequence
  Description of Artificial Sequence: Synthetic oligonucleotide
  Target: LAMA2; (+) strand; PAM type: YTN; PAM sequence: TTA
agcaaagagagacaacacaa

SEQ ID NO: 396722 - DNA, 20 bp, Artificial Sequence
  Description of Artificial Sequence: Synthetic oligonucleotide
  Target: LAMA2; (+) strand; PAM type: YTN; PAM sequence: CTG
tagatacattatagattgaa

SEQ ID NO: 396723 - DNA, 20 bp, Artificial Sequence
  Description of Artificial Sequence: Synthetic oligonucleotide
  Target: LAMA2; (+) strand; PAM type: YTN; PAM sequence: TTA
tagattgaaaaataaaaatg

SEQ ID NO: 396724 - DNA, 20 bp, Artificial Sequence
  Description of Artificial Sequence: Synthetic oligonucleotide
  Target: LAMA2; (+) strand; PAM type: YTN; PAM sequence: TTG
aaaaataaaaatggatatat

SEQ ID NO: 396725 - DNA, 20 bp, Artificial Sequence
  Description of Artificial Sequence: Synthetic oligonucleotide
  Target: LAMA2; (+) strand; PAM type: YTN; PAM sequence: TTG
gaggatatgcgcaattttat

SEQ ID NO: 396726 - DNA, 20 bp, Artificial Sequence
  Description of Artificial Sequence: Synthetic oligonucleotide
  Target: LAMA2; (+) strand; PAM type: YTN; PAM sequence: TTT
tattcaaacacatttgaata

SEQ ID NO: 396727 - DNA, 20 bp, Artificial Sequence
  Description of Artificial Sequence: Synthetic oligonucleotide
  Target: LAMA2; (+) strand; PAM type: YTN; PAM sequence: TTT
attcaaacacatttgaatac

SEQ ID NO: 396728 - DNA, 20 bp, Artificial Sequence
  Description of Artificial Sequence: Synthetic oligonucleotide
  Target: LAMA2; (+) strand; PAM type: YTN; PAM sequence: TTA
ttcaaacacatttgaatact

SEQ ID NO: 396729 - DNA, 20 bp, Artificial Sequence
  Description of Artificial Sequence: Synthetic oligonucleotide
  Target: LAMA2; (+) strand; PAM type: YTN; PAM sequence: TTC
aaacacatttgaatacttag

SEQ ID NO: 396730 - DNA, 20 bp, Artificial Sequence
  Description of Artificial Sequence: Synthetic oligonucleotide
  Target: LAMA2; (+) strand; PAM type: YTN; PAM sequence: TTT
gaatacttaggtgaagtaaa

SEQ ID NO: 396731 - DNA, 20 bp, Artificial Sequence
  Description of Artificial Sequence: Synthetic oligonucleotide
  Target: LAMA2; (+) strand; PAM type: YTN; PAM sequence: TTG
aatacttaggtgaagtaaac

SEQ ID NO: 396732 - DNA, 20 bp, Artificial Sequence
  Description of Artificial Sequence: Synthetic oligonucleotide
  Target: LAMA2; (+) strand; PAM type: YTN; PAM sequence: CTT
aggtgaagtaaacagtaagt

SEQ ID NO: 396733 - DNA, 20 bp, Artificial Sequence
  Description of Artificial Sequence: Synthetic oligonucleotide
  Target: LAMA2; (+) strand; PAM type: YTN; PAM sequence: TTA
ggtgaagtaaacagtaagtt

SEQ ID NO: 396734 - DNA, 20 bp, Artificial Sequence
  Description of Artificial Sequence: Synthetic oligonucleotide
  Target: LAMA2; (+) strand; PAM type: YTN; PAM sequence: TTT
agagcaaaatttactcaaaa

SEQ ID NO: 396735 - DNA, 20 bp, Artificial Sequence
  Description of Artificial Sequence: Synthetic oligonucleotide
  Target: LAMA2; (+) strand; PAM type: YTN; PAM sequence: TTA
gagcaaaatttactcaaaaa

SEQ ID NO: 396736 - DNA, 20 bp, Artificial Sequence
  Description of Artificial Sequence: Synthetic oligonucleotide
  Target: LAMA2; (+) strand; PAM type: YTN; PAM sequence: TTT
actcaaaaagaaatagtaca

SEQ ID NO: 396737 - DNA, 20 bp, Artificial Sequence
  Description of Artificial Sequence: Synthetic oligonucleotide
  Target: LAMA2; (+) strand; PAM type: YTN; PAM sequence: TTA
ctcaaaaagaaatagtacac

SEQ ID NO: 396738 - DNA, 20 bp, Artificial Sequence
  Description of Artificial Sequence: Synthetic oligonucleotide
  Target: LAMA2; (+) strand; PAM type: YTN; PAM sequence: CTC
aaaaagaaatagtacacctg

SEQ ID NO: 396739 - DNA, 20 bp, Artificial Sequence
  Description of Artificial Sequence: Synthetic oligonucleotide
  Target: LAMA2; (+) strand; PAM type: YTN; PAM sequence: CTG
agaactataaccgttaaata

SEQ ID NO: 396740 - DNA, 20 bp, Artificial Sequence
  Description of Artificial Sequence: Synthetic oligonucleotide
  Target: LAMA2; (+) strand; PAM type: YTN; PAM sequence: CTA
taaccgttaaataaattgca

SEQ ID NO: 396741 - DNA, 20 bp, Artificial Sequence
  Description of Artificial Sequence: Synthetic oligonucleotide
  Target: LAMA2; (+) strand; PAM type: YTN; PAM sequence: TTA
aataaattgcatcagtagtt

SEQ ID NO: 396742 - DNA, 20 bp, Artificial Sequence
  Description of Artificial Sequence: Synthetic oligonucleotide
  Target: LAMA2; (+) strand; PAM type: YTN; PAM sequence: TTG
catcagtagttaatacaaca

SEQ ID NO: 396743 - DNA, 20 bp, Artificial Sequence
  Description of Artificial Sequence: Synthetic oligonucleotide
  Target: LAMA2; (+) strand; PAM type: YTN; PAM sequence: TTA
atacaacaaaataacaatat

SEQ ID NO: 396744 - DNA, 20 bp, Artificial Sequence
  Description of Artificial Sequence: Synthetic oligonucleotide
  Target: LAMA2; (+) strand; PAM type: YTN; PAM sequence: TTA
tgcaatttgttcccaagaat

SEQ ID NO: 396745 - DNA, 20 bp, Artificial Sequence
  Description of Artificial Sequence: Synthetic oligonucleotide
  Target: LAMA2; (+) strand; PAM type: YTN; PAM sequence: TTT
gttcccaagaatggaaaaag

SEQ ID NO: 396746 - DNA, 20 bp, Artificial Sequence
  Description of Artificial Sequence: Synthetic oligonucleotide
  Target: LAMA2; (+) strand; PAM type: YTN; PAM sequence: TTG
ttcccaagaatggaaaaaga

SEQ ID NO: 396747 - DNA, 20 bp, Artificial Sequence
  Description of Artificial Sequence: Synthetic oligonucleotide
  Target: LAMA2; (+) strand; PAM type: YTN; PAM sequence: TTC
ccaagaatggaaaaagaaga

SEQ ID NO: 396748 - DNA, 20 bp, Artificial Sequence
  Description of Artificial Sequence: Synthetic oligonucleotide
  Target: LAMA2; (+) strand; PAM type: YTN; PAM sequence: TTT
cctcagcttattttatgagg

SEQ ID NO: 396749 - DNA, 20 bp, Artificial Sequence
  Description of Artificial Sequence: Synthetic oligonucleotide
  Target: LAMA2; (+) strand; PAM type: YTN; PAM sequence: TTC
ctcagcttattttatgaggc

SEQ ID NO: 396750 - DNA, 20 bp, Artificial Sequence
  Description of Artificial Sequence: Synthetic oligonucleotide
  Target: LAMA2; (+) strand; PAM type: YTN; PAM sequence: CTC
agcttattttatgaggctga

SEQ ID NO: 396751 - DNA, 20 bp, Artificial Sequence
  Description of Artificial Sequence: Synthetic oligonucleotide
  Target: LAMA2; (+) strand; PAM type: YTN; PAM sequence: CTT
attttatgaggctgatacaa

SEQ ID NO: 396752 - DNA, 20 bp, Artificial Sequence
  Description of Artificial Sequence: Synthetic oligonucleotide
  Target: LAMA2; (+) strand; PAM type: YTN; PAM sequence: TTA
ttttatgaggctgatacaat

SEQ ID NO: 396753 - DNA, 20 bp, Artificial Sequence
  Description of Artificial Sequence: Synthetic oligonucleotide
  Target: LAMA2; (+) strand; PAM type: YTN; PAM sequence: TTT
tatgaggctgatacaatctt

SEQ ID NO: 396754 - DNA, 20 bp, Artificial Sequence
  Description of Artificial Sequence: Synthetic oligonucleotide
  Target: LAMA2; (+) strand; PAM type: YTN; PAM sequence: TTT
atgaggctgatacaatcttg

SEQ ID NO: 396755 - DNA, 20 bp, Artificial Sequence
  Description of Artificial Sequence: Synthetic oligonucleotide
  Target: LAMA2; (+) strand; PAM type: YTN; PAM sequence: TTA
tgaggctgatacaatcttga

SEQ ID NO: 396756 - DNA, 20 bp, Artificial Sequence
  Description of Artificial Sequence: Synthetic oligonucleotide
  Target: LAMA2; (+) strand; PAM type: YTN; PAM sequence: CTG
atacaatcttgatggcaagc

SEQ ID NO: 396757 - DNA, 20 bp, Artificial Sequence
  Description of Artificial Sequence: Synthetic oligonucleotide
  Target: LAMA2; (+) strand; PAM type: YTN; PAM sequence: CTT
gatggcaagccctacagagg

SEQ ID NO: 396758 - DNA, 20 bp, Artificial Sequence
  Description of Artificial Sequence: Synthetic oligonucleotide
  Target: LAMA2; (+) strand; PAM type: YTN; PAM sequence: TTG
atggcaagccctacagagga

SEQ ID NO: 396759 - DNA, 20 bp, Artificial Sequence
  Description of Artificial Sequence: Synthetic oligonucleotide
  Target: LAMA2; (+) strand; PAM type: YTN; PAM sequence: CTA
cagaggacagtactacaaag

SEQ ID NO: 396760 - DNA, 20 bp, Artificial Sequence
  Description of Artificial Sequence: Synthetic oligonucleotide
  Target: LAMA2; (+) strand; PAM type: YTN; PAM sequence: CTA
caaagaaaaactataggcca

SEQ ID NO: 396761 - DNA, 20 bp, Artificial Sequence
  Description of Artificial Sequence: Synthetic oligonucleotide
  Target: LAMA2; (+) strand; PAM type: YTN; PAM sequence: CTA
taggccagttatttaaatag

SEQ ID NO: 396762 - DNA, 20 bp, Artificial Sequence
  Description of Artificial Sequence: Synthetic oligonucleotide
  Target: LAMA2; (+) strand; PAM type: YTN; PAM sequence: TTA
tttaaatagagaagctacaa

SEQ ID NO: 396763 - DNA, 20 bp, Artificial Sequence
  Description of Artificial Sequence: Synthetic oligonucleotide
  Target: LAMA2; (+) strand; PAM type: YTN; PAM sequence: TTT
aaatagagaagctacaaatg

SEQ ID NO: 396764 - DNA, 20 bp, Artificial Sequence
  Description of Artificial Sequence: Synthetic oligonucleotide
  Target: LAMA2; (+) strand; PAM type: YTN; PAM sequence: TTA
aatagagaagctacaaatga

SEQ ID NO: 396765 - DNA, 20 bp, Artificial Sequence
  Description of Artificial Sequence: Synthetic oligonucleotide
  Target: LAMA2; (+) strand; PAM type: YTN; PAM sequence: CTA
caaatgaaatattataaaac

SEQ ID NO: 396766 - DNA, 20 bp, Artificial Sequence
  Description of Artificial Sequence: Synthetic oligonucleotide
  Target: LAMA2; (+) strand; PAM type: YTN; PAM sequence: TTA
taaaacccagttcaaatgta

SEQ ID NO: 396767 - DNA, 20 bp, Artificial Sequence
  Description of Artificial Sequence: Synthetic oligonucleotide
  Target: LAMA2; (+) strand; PAM type: YTN; PAM sequence: TTC
aaatgtacatattttaaaga

SEQ ID NO: 396768 - DNA, 20 bp, Artificial Sequence
  Description of Artificial Sequence: Synthetic oligonucleotide
  Target: LAMA2; (+) strand; PAM type: YTN; PAM sequence: TTT
taaagatctgtaaatataca

SEQ ID NO: 396769 - DNA, 20 bp, Artificial Sequence
  Description of Artificial Sequence: Synthetic oligonucleotide
  Target: LAMA2; (+) strand; PAM type: YTN; PAM sequence: TTT
aaagatctgtaaatatacag

SEQ ID NO: 396770 - DNA, 20 bp, Artificial Sequence
  Description of Artificial Sequence: Synthetic oligonucleotide
  Target: LAMA2; (+) strand; PAM type: YTN; PAM sequence: TTA
aagatctgtaaatatacagt

SEQ ID NO: 396771 - DNA, 20 bp, Artificial Sequence
  Description of Artificial Sequence: Synthetic oligonucleotide
  Target: LAMA2; (+) strand; PAM type: YTN; PAM sequence: CTG
taaatatacagtaaaacatt

SEQ ID NO: 396772 - DNA, 20 bp, Artificial Sequence
  Description of Artificial Sequence: Synthetic oligonucleotide
  Target: LAMA2; (+) strand; PAM type: YTN; PAM sequence: TTA
acatttgccagatacagatg

SEQ ID NO: 396773 - DNA, 20 bp, Artificial Sequence
  Description of Artificial Sequence: Synthetic oligonucleotide
  Target: LAMA2; (+) strand; PAM type: YTN; PAM sequence: TTT
gccagatacagatgatggga

SEQ ID NO: 396774 - DNA, 20 bp, Artificial Sequence
  Description of Artificial Sequence: Synthetic oligonucleotide
  Target: LAMA2; (+) strand; PAM type: YTN; PAM sequence: TTG
ccagatacagatgatgggaa

SEQ ID NO: 396775 - DNA, 20 bp, Artificial Sequence
  Description of Artificial Sequence: Synthetic oligonucleotide
  Target: LAMA2; (+) strand; PAM type: YTN; PAM sequence: CTG
tattaatttctaatcgtatc

SEQ ID NO: 396776 - DNA, 20 bp, Artificial Sequence
  Description of Artificial Sequence: Synthetic oligonucleotide
  Target: LAMA2; (+) strand; PAM type: YTN; PAM sequence: TTA
atttctaatcgtatctatct

SEQ ID NO: 396777 - DNA, 20 bp, Artificial Sequence
  Description of Artificial Sequence: Synthetic oligonucleotide
  Target: LAMA2; (+) strand; PAM type: YTN; PAM sequence: TTT
ctaatcgtatctatcttatt

SEQ ID NO: 396778 - DNA, 20 bp, Artificial Sequence
  Description of Artificial Sequence: Synthetic oligonucleotide
  Target: LAMA2; (+) strand; PAM type: YTN; PAM sequence: TTC
taatcgtatctatcttattt

SEQ ID NO: 396779 - DNA, 20 bp, Artificial Sequence
  Description of Artificial Sequence: Synthetic oligonucleotide
  Target: LAMA2; (+) strand; PAM type: YTN; PAM sequence: CTA
atcgtatctatcttatttcc

SEQ ID NO: 396780 - DNA, 20 bp, Artificial Sequence
  Description of Artificial Sequence: Synthetic oligonucleotide
  Target: LAMA2; (+) strand; PAM type: YTN; PAM sequence: CTA
tcttatttcctacttaaata

SEQ ID NO: 396781 - DNA, 20 bp, Artificial Sequence
  Description of Artificial Sequence: Synthetic oligonucleotide
  Target: LAMA2; (+) strand; PAM type: YTN; PAM sequence: CTT
atttcctacttaaatagttt

SEQ ID NO: 396782 - DNA, 20 bp, Artificial Sequence
  Description of Artificial Sequence: Synthetic oligonucleotide
  Target: LAMA2; (+) strand; PAM type: YTN; PAM sequence: TTA
tttcctacttaaatagttta

SEQ ID NO: 396783 - DNA, 20 bp, Artificial Sequence
  Description of Artificial Sequence: Synthetic oligonucleotide
  Target: LAMA2; (+) strand; PAM type: YTN; PAM sequence: TTT
cctacttaaatagtttaatt

SEQ ID NO: 396784 - DNA, 20 bp, Artificial Sequence
  Description of Artificial Sequence: Synthetic oligonucleotide
  Target: LAMA2; (+) strand; PAM type: YTN; PAM sequence: TTC
ctacttaaatagtttaatta

SEQ ID NO: 396785 - DNA, 20 bp, Artificial Sequence
  Description of Artificial Sequence: Synthetic oligonucleotide
  Target: LAMA2; (+) strand; PAM type: YTN; PAM sequence: CTA
cttaaatagtttaattaaaa

SEQ ID NO: 396786 - DNA, 20 bp, Artificial Sequence
  Description of Artificial Sequence: Synthetic oligonucleotide
  Target: LAMA2; (+) strand; PAM type: YTN; PAM sequence: CTT
aaatagtttaattaaaatga

SEQ ID NO: 396787 - DNA, 20 bp, Artificial Sequence
  Description of Artificial Sequence: Synthetic oligonucleotide
  Target: LAMA2; (+) strand; PAM type: YTN; PAM sequence: TTA
aatagtttaattaaaatgaa

SEQ ID NO: 396788 - DNA, 20 bp, Artificial Sequence
  Description of Artificial Sequence: Synthetic oligonucleotide
  Target: LAMA2; (+) strand; PAM type: YTN; PAM sequence: TTT
aattaaaatgaacctcagag

SEQ ID NO: 396789 - DNA, 20 bp, Artificial Sequence
  Description of Artificial Sequence: Synthetic oligonucleotide
  Target: LAMA2; (+) strand; PAM type: YTN; PAM sequence: TTA
attaaaatgaacctcagagg

SEQ ID NO: 396790 - DNA, 20 bp, Artificial Sequence
  Description of Artificial Sequence: Synthetic oligonucleotide
  Target: LAMA2; (+) strand; PAM type: YTN; PAM sequence: TTA
aaatgaacctcagaggagat

SEQ ID NO: 396791 - DNA, 20 bp, Artificial Sequence
  Description of Artificial Sequence: Synthetic oligonucleotide
  Target: LAMA2; (+) strand; PAM type: YTN; PAM sequence: CTC
agaggagatagaaaatctgt

SEQ ID NO: 396792 - DNA, 20 bp, Artificial Sequence
  Description of Artificial Sequence: Synthetic oligonucleotide
  Target: LAMA2; (+) strand; PAM type: YTN; PAM sequence: CTG
tcctgcaataaaatctgttc

SEQ ID NO: 396793 - DNA, 20 bp, Artificial Sequence
  Description of Artificial Sequence: Synthetic oligonucleotide
  Target: LAMA2; (+) strand; PAM type: YTN; PAM sequence: CTG
caataaaatctgttctaaaa

SEQ ID NO: 396794 - DNA, 20 bp, Artificial Sequence
  Description of Artificial Sequence: Synthetic oligonucleotide
  Target: LAMA2; (+) strand; PAM type: YTN; PAM sequence: CTG
ttctaaaataataaagaaaa

SEQ ID NO: 396795 - DNA, 20 bp, Artificial Sequence
  Description of Artificial Sequence: Synthetic oligonucleotide
  Target: LAMA2; (+) strand; PAM type: YTN; PAM sequence: TTC
taaaataataaagaaaatag

SEQ ID NO: 396796 - DNA, 20 bp, Artificial Sequence
  Description of Artificial Sequence: Synthetic oligonucleotide
  Target: LAMA2; (+) strand; PAM type: YTN; PAM sequence: CTA
aaataataaagaaaataggt

SEQ ID NO: 396797 - DNA, 20 bp, Artificial Sequence
  Description of Artificial Sequence: Synthetic oligonucleotide
  Target: LAMA2; (+) strand; PAM type: YTN; PAM sequence: CTA
aaatgggtctggaaatgaaa

SEQ ID NO: 396798 - DNA, 20 bp, Artificial Sequence
  Description of Artificial Sequence: Synthetic oligonucleotide
  Target: LAMA2; (+) strand; PAM type: YTN; PAM sequence: CTG
gaaatgaaacaacaaccctc

SEQ ID NO: 396799 - DNA, 20 bp, Artificial Sequence
  Description of Artificial Sequence: Synthetic oligonucleotide
  Target: LAMA2; (+) strand; PAM type: YTN; PAM sequence: CTC
atcctttacaccagcaagaa

SEQ ID NO: 396800 - DNA, 20 bp, Artificial Sequence
  Description of Artificial Sequence: Synthetic oligonucleotide
  Target: LAMA2; (+) strand; PAM type: YTN; PAM sequence: CTT
tacaccagcaagaagttcta

SEQ ID NO: 396801 - DNA, 20 bp, Artificial Sequence
  Description of Artificial Sequence: Synthetic oligonucleotide
  Target: LAMA2; (+) strand; PAM type: YTN; PAM sequence: TTT
acaccagcaagaagttctaa

SEQ ID NO: 396802 - DNA, 20 bp, Artificial Sequence
  Description of Artificial Sequence: Synthetic oligonucleotide
  Target: LAMA2; (+) strand; PAM type: YTN; PAM sequence: TTA
caccagcaagaagttctaaa

SEQ ID NO: 396803 - DNA, 20 bp, Artificial Sequence
  Description of Artificial Sequence: Synthetic oligonucleotide
  Target: LAMA2; (+) strand; PAM type: YTN; PAM sequence: TTC
taaatttctttctttttcta

SEQ ID NO: 396804 - DNA, 20 bp, Artificial Sequence
  Description of Artificial Sequence: Synthetic oligonucleotide
  Target: LAMA2; (+) strand; PAM type: YTN; PAM sequence: CTA
aatttctttctttttctaaa

SEQ ID NO: 396805 - DNA, 20 bp, Artificial Sequence
  Description of Artificial Sequence: Synthetic oligonucleotide
  Target: LAMA2; (+) strand; PAM type: YTN; PAM sequence: TTT
ctttctttttctaaattcat

SEQ ID NO: 396806 - DNA, 20 bp, Artificial Sequence
  Description of Artificial Sequence: Synthetic oligonucleotide
  Target: LAMA2; (+) strand; PAM type: YTN; PAM sequence: TTC
tttctttttctaaattcatg

SEQ ID NO: 396807 - DNA, 20 bp, Artificial Sequence
  Description of Artificial Sequence: Synthetic oligonucleotide
  Target: LAMA2; (+) strand; PAM type: YTN; PAM sequence: CTT
tctttttctaaattcatgat

SEQ ID NO: 396808 - DNA, 20 bp, Artificial Sequence
  Description of Artificial Sequence: Synthetic oligonucleotide
  Target: LAMA2; (+) strand; PAM type: YTN; PAM sequence: TTT
ctttttctaaattcatgatg

SEQ ID NO: 396809 - DNA, 20 bp, Artificial Sequence
  Description of Artificial Sequence: Synthetic oligonucleotide
  Target: LAMA2; (+) strand; PAM type: YTN; PAM sequence: TTC
tttttctaaattcatgatgc

SEQ ID NO: 396810 - DNA, 20 bp, Artificial Sequence
  Description of Artificial Sequence: Synthetic oligonucleotide
  Target: LAMA2; (+) strand; PAM type: YTN; PAM sequence: CTT
tttctaaattcatgatgcat

SEQ ID NO: 396811 - DNA, 20 bp, Artificial Sequence
  Description of Artificial Sequence: Synthetic oligonucleotide
  Target: LAMA2; (+) strand; PAM type: YTN; PAM sequence: TTT
ttctaaattcatgatgcata

SEQ ID NO: 396812 - DNA, 20 bp, Artificial Sequence
  Description of Artificial Sequence: Synthetic oligonucleotide
  Target: LAMA2; (+) strand; PAM type: YTN; PAM sequence: TTT
tctaaattcatgatgcatac

SEQ ID NO: 396813 - DNA, 20 bp, Artificial Sequence
  Description of Artificial Sequence: Synthetic oligonucleotide
  Target: LAMA2; (+) strand; PAM type: YTN; PAM sequence: TTT
ctaaattcatgatgcataca

SEQ ID NO: 396814 - DNA, 20 bp, Artificial Sequence
  Description of Artificial Sequence: Synthetic oligonucleotide
  Target: LAMA2; (+) strand; PAM type: YTN; PAM sequence: TTC
taaattcatgatgcatacat

SEQ ID NO: 396815 - DNA, 20 bp, Artificial Sequence
  Description of Artificial Sequence: Synthetic oligonucleotide
  Target: LAMA2; (+) strand; PAM type: YTN; PAM sequence: CTA
aattcatgatgcatacatgt

SEQ ID NO: 396816 - DNA, 20 bp, Artificial Sequence
  Description of Artificial Sequence: Synthetic oligonucleotide
  Target: LAMA2; (+) strand; PAM type: YTN; PAM sequence: TTC
atgatgcatacatgttttaa

SEQ ID NO: 396817 - DNA, 20 bp, Artificial Sequence
  Description of Artificial Sequence: Synthetic oligonucleotide
  Target: LAMA2; (+) strand; PAM type: YTN; PAM sequence: TTT
taatttcttttaaatgatca

SEQ ID NO: 396818 - DNA, 20 bp, Artificial Sequence
  Description of Artificial Sequence: Synthetic oligonucleotide
  Target: LAMA2; (+) strand; PAM type: YTN; PAM sequence: TTT
aatttcttttaaatgatcag

SEQ ID NO: 396819 - DNA, 20 bp, Artificial Sequence
  Description of Artificial Sequence: Synthetic oligonucleotide
  Target: LAMA2; (+) strand; PAM type: YTN; PAM sequence: TTA
atttcttttaaatgatcaga

SEQ ID NO: 396820 - DNA, 20 bp, Artificial Sequence
  Description of Artificial Sequence: Synthetic oligonucleotide
  Target: LAMA2; (+) strand; PAM type: YTN; PAM sequence: TTT
cttttaaatgatcagaggct

SEQ ID NO: 396821 - DNA, 20 bp, Artificial Sequence
  Description of Artificial Sequence: Synthetic oligonucleotide
  Target: LAMA2; (+) strand; PAM type: YTN; PAM sequence: TTC
ttttaaatgatcagaggctg

SEQ ID NO: 396822 - DNA, 20 bp, Artificial Sequence
  Description of Artificial Sequence: Synthetic oligonucleotide
  Target: LAMA2; (+) strand; PAM type: YTN; PAM sequence: CTT
ttaaatgatcagaggctgat

SEQ ID NO: 396823 - DNA, 20 bp, Artificial Sequence
  Description of Artificial Sequence: Synthetic oligonucleotide
  Target: LAMA2; (+) strand; PAM type: YTN; PAM sequence: TTT
taaatgatcagaggctgata

SEQ ID NO: 396824 - DNA, 20 bp, Artificial Sequence
  Description of Artificial Sequence: Synthetic oligonucleotide
  Target: LAMA2; (+) strand; PAM type: YTN; PAM sequence: TTT
aaatgatcagaggctgataa

SEQ ID NO: 396825 - DNA, 20 bp, Artificial Sequence
  Description of Artificial Sequence: Synthetic oligonucleotide
  Target: LAMA2; (+) strand; PAM type: YTN; PAM sequence: TTA
aatgatcagaggctgataat

SEQ ID NO: 396826 - DNA, 20 bp, Artificial Sequence
  Description of Artificial Sequence: Synthetic oligonucleotide
  Target: LAMA2; (+) strand; PAM type: YTN; PAM sequence: CTG
ataattgcaagcaacaatcc

SEQ ID NO: 396827 - DNA, 20 bp, Artificial Sequence
  Description of Artificial Sequence: Synthetic oligonucleotide
  Target: LAMA2; (+) strand; PAM type: YTN; PAM sequence: TTG
caagcaacaatcccctaacc

SEQ ID NO: 396828 - DNA, 20 bp, Artificial Sequence
  Description of Artificial Sequence: Synthetic oligonucleotide
  Target: LAMA2; (+) strand; PAM type: YTN; PAM sequence: CTA
acctaacttttctctcaact

SEQ ID NO: 396829 - DNA, 20 bp, Artificial Sequence
  Description of Artificial Sequence: Synthetic oligonucleotide
  Target: LAMA2; (+) strand; PAM type: YTN; PAM sequence: CTA
acttttctctcaactaagct

SEQ ID NO: 396830 - DNA, 20 bp, Artificial Sequence
  Description of Artificial Sequence: Synthetic oligonucleotide
  Target: LAMA2; (+) strand; PAM type: YTN; PAM sequence: CTT
ttctctcaactaagctcaca

SEQ ID NO: 396831 - DNA, 20 bp, Artificial Sequence
  Description of Artificial Sequence: Synthetic oligonucleotide
  Target: LAMA2; (+) strand; PAM type: YTN; PAM sequence: TTT
tctctcaactaagctcacag

SEQ ID NO: 396832 - DNA, 20 bp, Artificial Sequence
  Description of Artificial Sequence: Synthetic oligonucleotide
  Target: LAMA2; (+) strand; PAM type: YTN; PAM sequence: TTT
ctctcaactaagctcacagc

SEQ ID NO: 396833 - DNA, 20 bp, Artificial Sequence
  Description of Artificial Sequence: Synthetic oligonucleotide
  Target: LAMA2; (+) strand; PAM type: YTN; PAM sequence: TTC
tctcaactaagctcacagct

SEQ ID NO: 396834 - DNA, 20 bp, Artificial Sequence
  Description of Artificial Sequence: Synthetic oligonucleotide
  Target: LAMA2; (+) strand; PAM type: YTN; PAM sequence: CTC
tcaactaagctcacagctcc

SEQ ID NO: 396835 - DNA, 20 bp, Artificial Sequence
  Description of Artificial Sequence: Synthetic oligonucleotide
  Target: LAMA2; (+) strand; PAM type: YTN; PAM sequence: CTC
aactaagctcacagctccag

SEQ ID NO: 396836 - DNA, 20 bp, Artificial Sequence
  Description of Artificial Sequence: Synthetic oligonucleotide
  Target: LAMA2; (+) strand; PAM type: YTN; PAM sequence: CTA
agctcacagctccaggatca

SEQ ID NO: 396837 - DNA, 20 bp, Artificial Sequence
  Description of Artificial Sequence: Synthetic oligonucleotide
  Target: LAMA2; (+) strand; PAM type: YTN; PAM sequence: CTC
acagctccaggatcaacaat

SEQ ID NO: 396838 - DNA, 20 bp, Artificial Sequence
  Description of Artificial Sequence: Synthetic oligonucleotide
  Target: LAMA2; (+) strand; PAM type: YTN; PAM sequence: CTC
caggatcaacaattccaaat

SEQ ID NO: 396839 - DNA, 20 bp, Artificial Sequence
  Description of Artificial Sequence: Synthetic oligonucleotide
  Target: LAMA2; (+) strand; PAM type: YTN; PAM sequence: TTC
caaatctttcaaatattctt

SEQ ID NO: 396840 - DNA, 20 bp, Artificial Sequence
  Description of Artificial Sequence: Synthetic oligonucleotide
  Target: LAMA2; (+) strand; PAM type: YTN; PAM sequence: CTT
tcaaatattcttcttttact

SEQ ID NO: 396841 - DNA, 20 bp, Artificial Sequence
  Description of Artificial Sequence: Synthetic oligonucleotide
  Target: LAMA2; (+) strand; PAM type: YTN; PAM sequence: TTT
caaatattcttcttttacta

SEQ ID NO: 396842 - DNA, 20 bp, Artificial Sequence
  Description of Artificial Sequence: Synthetic oligonucleotide
  Target: LAMA2; (+) strand; PAM type: YTN; PAM sequence: TTC
aaatattcttcttttactac

SEQ ID NO: 396843 - DNA, 20 bp, Artificial Sequence
  Description of Artificial Sequence: Synthetic oligonucleotide
  Target: LAMA2; (+) strand; PAM type: YTN; PAM sequence: TTC
ttcttttactacatctctta

SEQ ID NO: 396844 - DNA, 20 bp, Artificial Sequence
  Description of Artificial Sequence: Synthetic oligonucleotide
  Target: LAMA2; (+) strand; PAM type: YTN; PAM sequence: CTT
cttttactacatctcttagt

SEQ ID NO: 396845 - DNA, 20 bp, Artificial Sequence
  Description of Artificial Sequence: Synthetic oligonucleotide
  Target: LAMA2; (+) strand; PAM type: YTN; PAM sequence: TTC
ttttactacatctcttagta

SEQ ID NO: 396846 - DNA, 20 bp, Artificial Sequence
  Description of Artificial Sequence: Synthetic oligonucleotide
  Target: LAMA2; (+) strand; PAM type: YTN; PAM sequence: CTT
ttactacatctcttagtaat

SEQ ID NO: 396847 - DNA, 20 bp, Artificial Sequence
  Description of Artificial Sequence: Synthetic oligonucleotide
  Target: LAMA2; (+) strand; PAM type: YTN; PAM sequence: TTT
tactacatctcttagtaata

SEQ ID NO: 396848 - DNA, 20 bp, Artificial Sequence
  Description of Artificial Sequence: Synthetic oligonucleotide
  Target: LAMA2; (+) strand; PAM type: YTN; PAM sequence: TTT
actacatctcttagtaatat

SEQ ID NO: 396849 - DNA, 20 bp, Artificial Sequence
  Description of Artificial Sequence: Synthetic oligonucleotide
  Target: LAMA2; (+) strand; PAM type: YTN; PAM sequence: TTA
ctacatctcttagtaatatt

SEQ ID NO: 396850 - DNA, 20 bp, Artificial Sequence
  Description of Artificial Sequence: Synthetic oligonucleotide
  Target: LAMA2; (+) strand; PAM type: YTN; PAM sequence: CTA
catctcttagtaatattatt

SEQ ID NO: 396851 - DNA, 20 bp, Artificial Sequence
  Description of Artificial Sequence: Synthetic oligonucleotide
  Target: LAMA2; (+) strand; PAM type: YTN; PAM sequence: CTC
ttagtaatattattgtgcca

SEQ ID NO: 396852 - DNA, 20 bp, Artificial Sequence
  Description of Artificial Sequence: Synthetic oligonucleotide
  Target: LAMA2; (+) strand; PAM type: YTN; PAM sequence: CTT
agtaatattattgtgccatc

SEQ ID NO: 396853 - DNA, 20 bp, Artificial Sequence
  Description of Artificial Sequence: Synthetic oligonucleotide
  Target: LAMA2; (+) strand; PAM type: YTN; PAM sequence: TTA
gtaatattattgtgccatca

SEQ ID NO: 396854 - DNA, 20 bp, Artificial Sequence
  Description of Artificial Sequence: Synthetic oligonucleotide
  Target: LAMA2; (+) strand; PAM type: YTN; PAM sequence: TTA
ttgtgccatcacgtatttca

SEQ ID NO: 396855 - DNA, 20 bp, Artificial Sequence
  Description of Artificial Sequence: Synthetic oligonucleotide
  Target: LAMA2; (+) strand; PAM type: YTN; PAM sequence: TTG
tgccatcacgtatttcatta

SEQ ID NO: 396856 - DNA, 20 bp, Artificial Sequence
  Description of Artificial Sequence: Synthetic oligonucleotide
  Target: LAMA2; (+) strand; PAM type: YTN; PAM sequence: TTT
cattaagtggggcattatct

SEQ ID NO: 396857 - DNA, 20 bp, Artificial Sequence
  Description of Artificial Sequence: Synthetic oligonucleotide
  Target: LAMA2; (+) strand; PAM type: YTN; PAM sequence: TTC
attaagtggggcattatcta

SEQ ID NO: 396858 - DNA, 20 bp, Artificial Sequence
  Description of Artificial Sequence: Synthetic oligonucleotide
  Target: LAMA2; (+) strand; PAM type: YTN; PAM sequence: TTA
agtggggcattatctattta

SEQ ID NO: 396859 - DNA, 20 bp, Artificial Sequence
  Description of Artificial Sequence: Synthetic oligonucleotide
  Target: LAMA2; (+) strand; PAM type: YTN; PAM sequence: TTA
tctatttaattactgctatg

SEQ ID NO: 396860 - DNA, 20 bp, Artificial Sequence
  Description of Artificial Sequence: Synthetic oligonucleotide
  Target: LAMA2; (+) strand; PAM type: YTN; PAM sequence: CTA
tttaattactgctatgatga

SEQ ID NO: 396861 - DNA, 20 bp, Artificial Sequence
  Description of Artificial Sequence: Synthetic oligonucleotide
  Target: LAMA2; (+) strand; PAM type: YTN; PAM sequence: TTT
aattactgctatgatgaagg

SEQ ID NO: 396862 - DNA, 20 bp, Artificial Sequence
  Description of Artificial Sequence: Synthetic oligonucleotide
  Target: LAMA2; (+) strand; PAM type: YTN; PAM sequence: TTA
attactgctatgatgaagga

SEQ ID NO: 396863 - DNA, 20 bp, Artificial Sequence
  Description of Artificial Sequence: Synthetic oligonucleotide
  Target: LAMA2; (+) strand; PAM type: YTN; PAM sequence: TTA
ctgctatgatgaaggagatg

SEQ ID NO: 396864 - DNA, 20 bp, Artificial Sequence
  Description of Artificial Sequence: Synthetic oligonucleotide
  Target: LAMA2; (+) strand; PAM type: YTN; PAM sequence: CTG
ctatgatgaaggagatgtag

SEQ ID NO: 396865 - DNA, 20 bp, Artificial Sequence
  Description of Artificial Sequence: Synthetic oligonucleotide
  Target: LAMA2; (+) strand; PAM type: YTN; PAM sequence: CTA
tgatgaaggagatgtagttc

SEQ ID NO: 396866 - DNA, 20 bp, Artificial Sequence
  Description of Artificial Sequence: Synthetic oligonucleotide
  Target: LAMA2; (+) strand; PAM type: YTN; PAM sequence: TTC
acttacagaatatcacatca

SEQ ID NO: 396867 - DNA, 20 bp, Artificial Sequence
  Description of Artificial Sequence: Synthetic oligonucleotide
  Target: LAMA2; (+) strand; PAM type: YTN; PAM sequence: CTT
acagaatatcacatcacatt

SEQ ID NO: 396868 - DNA, 20 bp, Artificial Sequence
  Description of Artificial Sequence: Synthetic oligonucleotide
  Target: LAMA2; (+) strand; PAM type: YTN; PAM sequence: TTA
cagaatatcacatcacattt

SEQ ID NO: 396869 - DNA, 20 bp, Artificial Sequence
  Description of Artificial Sequence: Synthetic oligonucleotide
  Target: LAMA2; (+) strand; PAM type: YTN; PAM sequence: TTT
tcccacccttcagtttccca

SEQ ID NO: 396870 - DNA, 20 bp, Artificial Sequence
  Description of Artificial Sequence: Synthetic oligonucleotide
  Target: LAMA2; (+) strand; PAM type: YTN; PAM sequence: TTT
cccacccttcagtttcccaa

SEQ ID NO: 396871 - DNA, 20 bp, Artificial Sequence
  Description of Artificial Sequence: Synthetic oligonucleotide
  Target: LAMA2; (+) strand; PAM type: YTN; PAM sequence: TTC
ccacccttcagtttcccaat

SEQ ID NO: 396872 - DNA, 20 bp, Artificial Sequence
  Description of Artificial Sequence: Synthetic oligonucleotide
  Target: LAMA2; (+) strand; PAM type: YTN; PAM sequence: CTT
cagtttcccaatataggtac

SEQ ID NO: 396873 - DNA, 20 bp, Artificial Sequence
  Description of Artificial Sequence: Synthetic oligonucleotide
  Target: LAMA2; (+) strand; PAM type: YTN; PAM sequence: TTC
agtttcccaatataggtaca

SEQ ID NO: 396874 - DNA, 20 bp, Artificial Sequence
  Description of Artificial Sequence: Synthetic oligonucleotide
  Target: LAMA2; (+) strand; PAM type: YTN; PAM sequence: TTT
cccaatataggtacattact

SEQ ID NO: 396875 - DNA, 20 bp, Artificial Sequence
  Description of Artificial Sequence: Synthetic oligonucleotide
  Target: LAMA2; (+) strand; PAM type: YTN; PAM sequence: TTC
ccaatataggtacattactg

SEQ ID NO: 396876 - DNA, 20 bp, Artificial Sequence
  Description of Artificial Sequence: Synthetic oligonucleotide
  Target: LAMA2; (+) strand; PAM type: YTN; PAM sequence: TTA
ctgtgcttagattcttcatt

SEQ ID NO: 396877 - DNA, 20 bp, Artificial Sequence
  Description of Artificial Sequence: Synthetic oligonucleotide
  Target: LAMA2; (+) strand; PAM type: YTN; PAM sequence: CTG
tgcttagattcttcattttt

SEQ ID NO: 396878 - DNA, 20 bp, Artificial Sequence
  Description of Artificial Sequence: Synthetic oligonucleotide
  Target: LAMA2; (+) strand; PAM type: YTN; PAM sequence: CTT
agattcttcatttttaacct

SEQ ID NO: 396879 - DNA, 20 bp, Artificial Sequence
  Description of Artificial Sequence: Synthetic oligonucleotide
  Target: LAMA2; (+) strand; PAM type: YTN; PAM sequence: TTA
gattcttcatttttaaccta

SEQ ID NO: 396880 - DNA, 20 bp, Artificial Sequence
  Description of Artificial Sequence: Synthetic oligonucleotide
  Target: LAMA2; (+) strand; PAM type: YTN; PAM sequence: TTC
ttcatttttaacctaatata

SEQ ID NO: 396881 - DNA, 20 bp, Artificial Sequence
  Description of Artificial Sequence: Synthetic oligonucleotide
  Target: LAMA2; (+) strand; PAM type: YTN; PAM sequence: CTT
catttttaacctaatatact

SEQ ID NO: 396882 - DNA, 20 bp, Artificial Sequence
  Description of Artificial Sequence: Synthetic oligonucleotide
  Target: LAMA2; (+) strand; PAM type: YTN; PAM sequence: TTC
atttttaacctaatatactg

SEQ ID NO: 396883 - DNA, 20 bp, Artificial Sequence
  Description of Artificial Sequence: Synthetic oligonucleotide
  Target: LAMA2; (+) strand; PAM type: YTN; PAM sequence: TTT
ttaacctaatatactgagag

SEQ ID NO: 396884 - DNA, 20 bp, Artificial Sequence
  Description of Artificial Sequence: Synthetic oligonucleotide
  Target: LAMA2; (+) strand; PAM type: YTN; PAM sequence: TTT
taacctaatatactgagagc

SEQ ID NO: 396885 - DNA, 20 bp, Artificial Sequence
  Description of Artificial Sequence: Synthetic oligonucleotide
  Target: LAMA2; (+) strand; PAM type: YTN; PAM sequence: TTT
aacctaatatactgagagca

SEQ ID NO: 396886 - DNA, 20 bp, Artificial Sequence
  Description of Artificial Sequence: Synthetic oligonucleotide
  Target: LAMA2; (+) strand; PAM type: YTN; PAM sequence: TTA
acctaatatactgagagcat

SEQ ID NO: 396887 - DNA, 20 bp, Artificial Sequence
  Description of Artificial Sequence: Synthetic oligonucleotide
  Target: LAMA2; (+) strand; PAM type: YTN; PAM sequence: CTA
atatactgagagcattattt

SEQ ID NO: 396888 - DNA, 20 bp, Artificial Sequence
  Description of Artificial Sequence: Synthetic oligonucleotide
  Target: LAMA2; (+) strand; PAM type: YTN; PAM sequence: CTG
agagcattatttcctgtata

SEQ ID NO: 396889 - DNA, 20 bp, Artificial Sequence
  Description of Artificial Sequence: Synthetic oligonucleotide
  Target: LAMA2; (+) strand; PAM type: YTN; PAM sequence: TTA
tttcctgtataaatgataga

SEQ ID NO: 396890 - DNA, 20 bp, Artificial Sequence
  Description of Artificial Sequence: Synthetic oligonucleotide
  Target: LAMA2; (+) strand; PAM type: YTN; PAM sequence: TTT
cctgtataaatgatagactc

SEQ ID NO: 396891 - DNA, 20 bp, Artificial Sequence
  Description of Artificial Sequence: Synthetic oligonucleotide
  Target: LAMA2; (+) strand; PAM type: YTN; PAM sequence: TTC
ctgtataaatgatagactct

SEQ ID NO: 396892 - DNA, 20 bp, Artificial Sequence
  Description of Artificial Sequence: Synthetic oligonucleotide
  Target: LAMA2; (+) strand; PAM type: YTN; PAM sequence: CTG
tataaatgatagactctgca

SEQ ID NO: 396893 - DNA, 20 bp, Artificial Sequence
  Description of Artificial Sequence: Synthetic oligonucleotide
  Target: LAMA2; (+) strand; PAM type: YTN; PAM sequence: CTC
tgcactctttaagatgaagc

SEQ ID NO: 396894 - DNA, 20 bp, Artificial Sequence
  Description of Artificial Sequence: Synthetic oligonucleotide
  Target: LAMA2; (+) strand; PAM type: YTN; PAM sequence: CTG
cactctttaagatgaagcta

SEQ ID NO: 396895 - DNA, 20 bp, Artificial Sequence
  Description of Artificial Sequence: Synthetic oligonucleotide
  Target: LAMA2; (+) strand; PAM type: YTN; PAM sequence: CTC
tttaagatgaagctatttat

SEQ ID NO: 396896 - DNA, 20 bp, Artificial Sequence
  Description of Artificial Sequence: Synthetic oligonucleotide
  Target: LAMA2; (+) strand; PAM type: YTN; PAM sequence: CTT
taagatgaagctatttatgt

SEQ ID NO: 396897 - DNA, 20 bp, Artificial Sequence
  Description of Artificial Sequence: Synthetic oligonucleotide
  Target: LAMA2; (+) strand; PAM type: YTN; PAM sequence: TTT
aagatgaagctatttatgtc

SEQ ID NO: 396898 - DNA, 20 bp, Artificial Sequence
  Description of Artificial Sequence: Synthetic oligonucleotide
  Target: LAMA2; (+) strand; PAM type: YTN; PAM sequence: TTA
agatgaagctatttatgtcc

SEQ ID NO: 396899 - DNA, 20 bp, Artificial Sequence
  Description of Artificial Sequence: Synthetic oligonucleotide
  Target: LAMA2; (+) strand; PAM type: YTN; PAM sequence: CTA
tttatgtcctcattcttccc

SEQ ID NO: 396900 - DNA, 20 bp, Artificial Sequence
  Description of Artificial Sequence: Synthetic oligonucleotide
  Target: LAMA2; (+) strand; PAM type: YTN; PAM sequence: TTT
atgtcctcattcttcccttt

SEQ ID NO: 396901 - DNA, 20 bp, Artificial Sequence
  Description of Artificial Sequence: Synthetic oligonucleotide
  Target: LAMA2; (+) strand; PAM type: YTN; PAM sequence: TTA
tgtcctcattcttcccttta

SEQ ID NO: 396902 - DNA, 20 bp, Artificial Sequence
  Description of Artificial Sequence: Synthetic oligonucleotide
  Target: LAMA2; (+) strand; PAM type: YTN; PAM sequence: CTC
attcttccctttagcttcct

SEQ ID NO: 396903 - DNA, 20 bp, Artificial Sequence
  Description of Artificial Sequence: Synthetic oligonucleotide
  Target: LAMA2; (+) strand; PAM type: YTN; PAM sequence: TTC
ttccctttagcttccttttt

SEQ ID NO: 396904 - DNA, 20 bp, Artificial Sequence
  Description of Artificial Sequence: Synthetic oligonucleotide
  Target: LAMA2; (+) strand; PAM type: YTN; PAM sequence: CTT
ccctttagcttccttttttc

SEQ ID NO: 396905 - DNA, 20 bp, Artificial Sequence
  Description of Artificial Sequence: Synthetic oligonucleotide
  Target: LAMA2; (+) strand; PAM type: YTN; PAM sequence: TTC
cctttagcttccttttttcc

SEQ ID NO: 396906 - DNA, 20 bp, Artificial Sequence
  Description of Artificial Sequence: Synthetic oligonucleotide
  Target: LAMA2; (+) strand; PAM type: YTN; PAM sequence: CTT
tagcttccttttttcctcgt

SEQ ID NO: 396907 - DNA, 20 bp, Artificial Sequence
  Description of Artificial Sequence: Synthetic oligonucleotide
  Target: LAMA2; (+) strand; PAM type: YTN; PAM sequence: TTT
agcttccttttttcctcgtc

SEQ ID NO: 396908 - DNA, 20 bp, Artificial Sequence
  Description of Artificial Sequence: Synthetic oligonucleotide
  Target: LAMA2; (+) strand; PAM type: YTN; PAM sequence: TTA
gcttccttttttcctcgtcc

SEQ ID NO: 396909 - DNA, 20 bp, Artificial Sequence
  Description of Artificial Sequence: Synthetic oligonucleotide
  Target: LAMA2; (+) strand; PAM type: YTN; PAM sequence: CTT
ccttttttcctcgtcctctc

SEQ ID NO: 396910 - DNA, 20 bp, Artificial Sequence
  Description of Artificial Sequence: Synthetic oligonucleotide
  Target: LAMA2; (+) strand; PAM type: YTN; PAM sequence: TTC
cttttttcctcgtcctctca

SEQ ID NO: 396911 - DNA, 20 bp, Artificial Sequence
  Description of Artificial Sequence: Synthetic oligonucleotide
  Target: LAMA2; (+) strand; PAM type: YTN; PAM sequence: CTT
ttttcctcgtcctctcagct

SEQ ID NO: 396912 - DNA, 20 bp, Artificial Sequence
  Description of Artificial Sequence: Synthetic oligonucleotide
  Target: LAMA2; (+) strand; PAM type: YTN; PAM sequence: TTT
tttcctcgtcctctcagctt

SEQ ID NO: 396913 - DNA, 20 bp, Artificial Sequence
  Description of Artificial Sequence: Synthetic oligonucleotide
  Target: LAMA2; (+) strand; PAM type: YTN; PAM sequence: TTT
ttcctcgtcctctcagcttc

SEQ ID NO: 396914 - DNA, 20 bp, Artificial Sequence
  Description of Artificial Sequence: Synthetic oligonucleotide
  Target: LAMA2; (+) strand; PAM type: YTN; PAM sequence: TTT
tcctcgtcctctcagcttct

SEQ ID NO: 396915 - DNA, 20 bp, Artificial Sequence
  Description of Artificial Sequence: Synthetic oligonucleotide
  Target: LAMA2; (+) strand; PAM type: YTN; PAM sequence: TTT
cctcgtcctctcagcttcta

SEQ ID NO: 396916 - DNA, 20 bp, Artificial Sequence
  Description of Artificial Sequence: Synthetic oligonucleotide
  Target: LAMA2; (+) strand; PAM type: YTN; PAM sequence: TTC
ctcgtcctctcagcttctac

SEQ ID NO: 396917 - DNA, 20 bp, Artificial Sequence
  Description of Artificial Sequence: Synthetic oligonucleotide
  Target: LAMA2; (+) strand; PAM type: YTN; PAM sequence: CTC
gtcctctcagcttctacctc

SEQ ID NO: 396918 - DNA, 20 bp, Artificial Sequence
  Description of Artificial Sequence: Synthetic oligonucleotide
  Target: LAMA2; (+) strand; PAM type: YTN; PAM sequence: CTC
tcagcttctacctctttaac

SEQ ID NO: 396919 - DNA, 20 bp, Artificial Sequence
  Description of Artificial Sequence: Synthetic oligonucleotide
  Target: LAMA2; (+) strand; PAM type: YTN; PAM sequence: CTC
agcttctacctctttaactt

SEQ ID NO: 396920 - DNA, 20 bp, Artificial Sequence
  Description of Artificial Sequence: Synthetic oligonucleotide
  Target: LAMA2; (+) strand; PAM type: YTN; PAM sequence: CTT
ctacctctttaactttgata

SEQ ID NO: 396921 - DNA, 20 bp, Artificial Sequence
  Description of Artificial Sequence: Synthetic oligonucleotide
  Target: LAMA2; (+) strand; PAM type: YTN; PAM sequence: TTC
tacctctttaactttgatat

SEQ ID NO: 396922 - DNA, 20 bp, Artificial Sequence
  Description of Artificial Sequence: Synthetic oligonucleotide
  Target: LAMA2; (+) strand; PAM type: YTN; PAM sequence: CTA
cctctttaactttgatattg

SEQ ID NO: 396923 - DNA, 20 bp, Artificial Sequence
  Description of Artificial Sequence: Synthetic oligonucleotide
  Target: LAMA2; (+) strand; PAM type: YTN; PAM sequence: CTC
tttaactttgatattgtgat

SEQ ID NO: 396924 - DNA, 20 bp, Artificial Sequence
  Description of Artificial Sequence: Synthetic oligonucleotide
  Target: LAMA2; (+) strand; PAM type: YTN; PAM sequence: CTT
taactttgatattgtgatgg

SEQ ID NO: 396925 - DNA, 20 bp, Artificial Sequence
  Description of Artificial Sequence: Synthetic oligonucleotide
  Target: LAMA2; (+) strand; PAM type: YTN; PAM sequence: TTT
aactttgatattgtgatggt

SEQ ID NO: 396926 - DNA, 20 bp, Artificial Sequence
  Description of Artificial Sequence: Synthetic oligonucleotide
  Target: LAMA2; (+) strand; PAM type: YTN; PAM sequence: TTA
actttgatattgtgatggtc

SEQ ID NO: 396927 - DNA, 20 bp, Artificial Sequence
  Description of Artificial Sequence: Synthetic oligonucleotide
  Target: LAMA2; (+) strand; PAM type: YTN; PAM sequence: CTT
tgatattgtgatggtcaata

SEQ ID NO: 396928 - DNA, 20 bp, Artificial Sequence
  Description of Artificial Sequence: Synthetic oligonucleotide
  Target: LAMA2; (+) strand; PAM type: YTN; PAM sequence: TTT
gatattgtgatggtcaataa

SEQ ID NO: 396929 - DNA, 20 bp, Artificial Sequence
  Description of Artificial Sequence: Synthetic oligonucleotide
  Target: LAMA2; (+) strand; PAM type: YTN; PAM sequence: TTG
atattgtgatggtcaataac

SEQ ID NO: 396930 - DNA, 20 bp, Artificial Sequence
  Description of Artificial Sequence: Synthetic oligonucleotide
  Target: LAMA2; (+) strand; PAM type: YTN; PAM sequence: TTG
tgatggtcaataacatttac

SEQ ID NO: 396931 - DNA, 20 bp, Artificial Sequence
  Description of Artificial Sequence: Synthetic oligonucleotide
  Target: LAMA2; (+) strand; PAM type: YTN; PAM sequence: TTT
acattttatctataaccata

SEQ ID NO: 396932 - DNA, 20 bp, Artificial Sequence
  Description of Artificial Sequence: Synthetic oligonucleotide
  Target: LAMA2; (+) strand; PAM type: YTN; PAM sequence: TTA
cattttatctataaccataa

SEQ ID NO: 396933 - DNA, 20 bp, Artificial Sequence
  Description of Artificial Sequence: Synthetic oligonucleotide
  Target: LAMA2; (+) strand; PAM type: YTN; PAM sequence: TTT
tatctataaccataattgtg

SEQ ID NO: 396934 - DNA, 20 bp, Artificial Sequence
  Description of Artificial Sequence: Synthetic oligonucleotide
  Target: LAMA2; (+) strand; PAM type: YTN; PAM sequence: TTT
atctataaccataattgtgc

SEQ ID NO: 396935 - DNA, 20 bp, Artificial Sequence
  Description of Artificial Sequence: Synthetic oligonucleotide
  Target: LAMA2; (+) strand; PAM type: YTN; PAM sequence: TTA
tctataaccataattgtgcc

SEQ ID NO: 396936 - DNA, 20 bp, Artificial Sequence
  Description of Artificial Sequence: Synthetic oligonucleotide
  Target: LAMA2; (+) strand; PAM type: YTN; PAM sequence: CTA
taaccataattgtgccatgg

SEQ ID NO: 396937 - DNA, 20 bp, Artificial Sequence
  Description of Artificial Sequence: Synthetic oligonucleotide
  Target: LAMA2; (+) strand; PAM type: YTN; PAM sequence: TTG
tgccatggcagaatacagaa

SEQ ID NO: 396938 - DNA, 20 bp, Artificial Sequence
  Description of Artificial Sequence: Synthetic oligonucleotide
  Target: LAMA2; (+) strand; PAM type: YTN; PAM sequence: CTT
ctctgaagacattttattcc

SEQ ID NO: 396939 - DNA, 20 bp, Artificial Sequence
  Description of Artificial Sequence: Synthetic oligonucleotide
  Target: LAMA2; (+) strand; PAM type: YTN; PAM sequence: TTC
tctgaagacattttattcct

SEQ ID NO: 396940 - DNA, 20 bp, Artificial Sequence
  Description of Artificial Sequence: Synthetic oligonucleotide
  Target: LAMA2; (+) strand; PAM type: YTN; PAM sequence: CTC
tgaagacattttattcctta

SEQ ID NO: 396941 - DNA, 20 bp, Artificial Sequence
  Description of Artificial Sequence: Synthetic oligonucleotide
  Target: LAMA2; (+) strand; PAM type: YTN; PAM sequence: CTG
aagacattttattccttaaa

SEQ ID NO: 396942 - DNA, 20 bp, Artificial Sequence
  Description of Artificial Sequence: Synthetic oligonucleotide
  Target: LAMA2; (+) strand; PAM type: YTN; PAM sequence: TTT
tattccttaaaggactccct

SEQ ID NO: 396943 - DNA, 20 bp, Artificial Sequence
  Description of Artificial Sequence: Synthetic oligonucleotide
  Target: LAMA2; (+) strand; PAM type: YTN; PAM sequence: TTT
attccttaaaggactccctt

SEQ ID NO: 396944 - DNA, 20 bp, Artificial Sequence
  Description of Artificial Sequence: Synthetic oligonucleotide
  Target: LAMA2; (+) strand; PAM type: YTN; PAM sequence: TTA
ttccttaaaggactcccttt

SEQ ID NO: 396945 - DNA, 20 bp, Artificial Sequence
  Description of Artificial Sequence: Synthetic oligonucleotide
  Target: LAMA2; (+) strand; PAM type: YTN; PAM sequence: TTC
cttaaaggactccctttgat

SEQ ID NO: 396946 - DNA, 20 bp, Artificial Sequence
  Description of Artificial Sequence: Synthetic oligonucleotide
  Target: LAMA2; (+) strand; PAM type: YTN; PAM sequence: CTT
aaaggactccctttgatttt

SEQ ID NO: 396947 - DNA, 20 bp, Artificial Sequence
  Description of Artificial Sequence: Synthetic oligonucleotide
  Target: LAMA2; (+) strand; PAM type: YTN; PAM sequence: TTA
aaggactccctttgattttt

SEQ ID NO: 396948 - DNA, 20 bp, Artificial Sequence
  Description of Artificial Sequence: Synthetic oligonucleotide
  Target: LAMA2; (+) strand; PAM type: YTN; PAM sequence: CTC
cctttgattttttttcagtg

SEQ ID NO: 396949 - DNA, 20 bp, Artificial Sequence
  Description of Artificial Sequence: Synthetic oligonucleotide
  Target: LAMA2; (+) strand; PAM type: YTN; PAM sequence: CTT
tgattttttttcagtgggcc

SEQ ID NO: 396950 - DNA, 20 bp, Artificial Sequence
  Description of Artificial Sequence: Synthetic oligonucleotide
  Target: LAMA2; (+) strand; PAM type: YTN; PAM sequence: TTT
gattttttttcagtgggcca

SEQ ID NO: 396951 - DNA, 20 bp, Artificial Sequence
  Description of Artificial Sequence: Synthetic oligonucleotide
  Target: LAMA2; (+) strand; PAM type: YTN; PAM sequence: TTG
attttttttcagtgggccat

SEQ ID NO: 396952 - DNA, 20 bp, Artificial Sequence
  Description of Artificial Sequence: Synthetic oligonucleotide
  Target: LAMA2; (+) strand; PAM type: YTN; PAM sequence: TTT
tttttcagtgggccatttga

SEQ ID NO: 396953 - DNA, 20 bp, Artificial Sequence
  Description of Artificial Sequence: Synthetic oligonucleotide
  Target: LAMA2; (+) strand; PAM type: YTN; PAM sequence: TTT
ttttcagtgggccatttgat

SEQ ID NO: 396954 - DNA, 20 bp, Artificial Sequence
  Description of Artificial Sequence: Synthetic oligonucleotide
  Target: LAMA2; (+) strand; PAM type: YTN; PAM sequence: TTT
tttcagtgggccatttgatg

SEQ ID NO: 396955 - DNA, 20 bp, Artificial Sequence
  Description of Artificial Sequence: Synthetic oligonucleotide
  Target: LAMA2; (+) strand; PAM type: YTN; PAM sequence: TTT
ttcagtgggccatttgatgc

SEQ ID NO: 396956 - DNA, 20 bp, Artificial Sequence
  Description of Artificial Sequence: Synthetic oligonucleotide
  Target: LAMA2; (+) strand; PAM type: YTN; PAM sequence: TTT
tcagtgggccatttgatgct

SEQ ID NO: 396957 - DNA, 20 bp, Artificial Sequence
  Description of Artificial Sequence: Synthetic oligonucleotide
  Target: LAMA2; (+) strand; PAM type: YTN; PAM sequence: TTT
cagtgggccatttgatgctt

SEQ ID NO: 396958 - DNA, 20 bp, Artificial Sequence
  Description of Artificial Sequence: Synthetic oligonucleotide
  Target: LAMA2; (+) strand; PAM type: YTN; PAM sequence: TTC
agtgggccatttgatgcttg

SEQ ID NO: 396959 - DNA, 20 bp, Artificial Sequence
  Description of Artificial Sequence: Synthetic oligonucleotide
  Target: LAMA2; (+) strand; PAM type: YTN; PAM sequence: TTT
gatgcttgattgccagttgc

SEQ ID NO: 396960 - DNA, 20 bp, Artificial Sequence
  Description of Artificial Sequence: Synthetic oligonucleotide
  Target: LAMA2; (+) strand; PAM type: YTN; PAM sequence: TTG
atgcttgattgccagttgct

SEQ ID NO: 396961 - DNA, 20 bp, Artificial Sequence
  Description of Artificial Sequence: Synthetic oligonucleotide
  Target: LAMA2; (+) strand; PAM type: YTN; PAM sequence: CTT
gattgccagttgctctgtgc

SEQ ID NO: 396962 - DNA, 20 bp, Artificial Sequence
  Description of Artificial Sequence: Synthetic oligonucleotide
  Target: LAMA2; (+) strand; PAM type: YTN; PAM sequence: TTG
attgccagttgctctgtgca

SEQ ID NO: 396963 - DNA, 20 bp, Artificial Sequence
  Description of Artificial Sequence: Synthetic oligonucleotide
  Target: LAMA2; (+) strand; PAM type: YTN; PAM sequence: TTG
ccagttgctctgtgcagaag

SEQ ID NO: 396964 - DNA, 20 bp, Artificial Sequence
  Description of Artificial Sequence: Synthetic oligonucleotide
  Target: LAMA2; (+) strand; PAM type: YTN; PAM sequence: TTG
ctctgtgcagaagagaaggg

SEQ ID NO: 396965 - DNA, 20 bp, Artificial Sequence
  Description of Artificial Sequence: Synthetic oligonucleotide
  Target: LAMA2; (+) strand; PAM type: YTN; PAM sequence: CTC
tgtgcagaagagaaggggta

SEQ ID NO: 396966 - DNA, 20 bp, Artificial Sequence
  Description of Artificial Sequence: Synthetic oligonucleotide
  Target: LAMA2; (+) strand; PAM type: YTN; PAM sequence: CTG
tgcagaagagaaggggtatt

SEQ ID NO: 396967 - DNA, 20 bp, Artificial Sequence
  Description of Artificial Sequence: Synthetic oligonucleotide
  Target: LAMA2; (+) strand; PAM type: YTN; PAM sequence: TTT
tattccataaaataacttgc

SEQ ID NO: 396968 - DNA, 20 bp, Artificial Sequence
  Description of Artificial Sequence: Synthetic oligonucleotide
  Target: LAMA2; (+) strand; PAM type: YTN; PAM sequence: TTT
attccataaaataacttgca

SEQ ID NO: 396969 - DNA, 20 bp, Artificial Sequence
  Description of Artificial Sequence: Synthetic oligonucleotide
  Target: LAMA2; (+) strand; PAM type: YTN; PAM sequence: TTA
ttccataaaataacttgcag

SEQ ID NO: 396970 - DNA, 20 bp, Artificial Sequence
  Description of Artificial Sequence: Synthetic oligonucleotide
  Target: LAMA2; (+) strand; PAM type: YTN; PAM sequence: TTC
cataaaataacttgcagtga

SEQ ID NO: 396971 - DNA, 20 bp, Artificial Sequence
  Description of Artificial Sequence: Synthetic oligonucleotide
  Target: LAMA2; (+) strand; PAM type: YTN; PAM sequence: CTT
gcagtgaattattccttttt

SEQ ID NO: 396972 - DNA, 20 bp, Artificial Sequence
  Description of Artificial Sequence: Synthetic oligonucleotide
  Target: LAMA2; (+) strand; PAM type: YTN; PAM sequence: TTG
cagtgaattattccttttta

SEQ ID NO: 396973 - DNA, 20 bp, Artificial Sequence
  Description of Artificial Sequence: Synthetic oligonucleotide
  Target: LAMA2; (+) strand; PAM type: YTN; PAM sequence: TTA
ttcctttttattttcacaac

SEQ ID NO: 396974 - DNA, 20 bp, Artificial Sequence
  Description of Artificial Sequence: Synthetic oligonucleotide
  Target: LAMA2; (+) strand; PAM type: YTN; PAM sequence: TTC
ctttttattttcacaactga

SEQ ID NO: 396975 - DNA, 20 bp, Artificial Sequence
  Description of Artificial Sequence: Synthetic oligonucleotide
  Target: LAMA2; (+) strand; PAM type: YTN; PAM sequence: CTT
tttattttcacaactgactc

SEQ ID NO: 396976 - DNA, 20 bp, Artificial Sequence
  Description of Artificial Sequence: Synthetic oligonucleotide
  Target: LAMA2; (+) strand; PAM type: YTN; PAM sequence: TTT
ttattttcacaactgactct

SEQ ID NO: 396977 - DNA, 20 bp, Artificial Sequence
  Description of Artificial Sequence: Synthetic oligonucleotide
  Target: LAMA2; (+) strand; PAM type: YTN; PAM sequence: TTT
tattttcacaactgactctc

SEQ ID NO: 396978 - DNA, 20 bp, Artificial Sequence
  Description of Artificial Sequence: Synthetic oligonucleotide
  Target: LAMA2; (+) strand; PAM type: YTN; PAM sequence: TTT
attttcacaactgactctca

SEQ ID NO: 396979 - DNA, 20 bp, Artificial Sequence
  Description of Artificial Sequence: Synthetic oligonucleotide
  Target: LAMA2; (+) strand; PAM type: YTN; PAM sequence: TTA
ttttcacaactgactctcat

SEQ ID NO: 396980 - DNA, 20 bp, Artificial Sequence
  Description of Artificial Sequence: Synthetic oligonucleotide
  Target: LAMA2; (+) strand; PAM type: YTN; PAM sequence: TTT
tcacaactgactctcattct

SEQ ID NO: 396981 - DNA, 20 bp, Artificial Sequence
  Description of Artificial Sequence: Synthetic oligonucleotide
  Target: LAMA2; (+) strand; PAM type: YTN; PAM sequence: TTT
cacaactgactctcattctc

SEQ ID NO: 396982 - DNA, 20 bp, Artificial Sequence
  Description of Artificial Sequence: Synthetic oligonucleotide
  Target: LAMA2; (+) strand; PAM type: YTN; PAM sequence: TTC
acaactgactctcattctct

SEQ ID NO: 396983 - DNA, 20 bp, Artificial Sequence
  Description of Artificial Sequence: Synthetic oligonucleotide
  Target: LAMA2; (+) strand; PAM type: YTN; PAM sequence: CTG
actctcattctctaccttac

SEQ ID NO: 396984 - DNA, 20 bp, Artificial Sequence
  Description of Artificial Sequence: Synthetic oligonucleotide
  Target: LAMA2; (+) strand; PAM type: YTN; PAM sequence: CTC
tcattctctaccttacctgt

SEQ ID NO: 396985 - DNA, 20 bp, Artificial Sequence
  Description of Artificial Sequence: Synthetic oligonucleotide
  Target: LAMA2; (+) strand; PAM type: YTN; PAM sequence: CTC
attctctaccttacctgttc

SEQ ID NO: 396986 - DNA, 20 bp, Artificial Sequence
  Description of Artificial Sequence: Synthetic oligonucleotide
  Target: LAMA2; (+) strand; PAM type: YTN; PAM sequence: TTC
tctaccttacctgttctttc

SEQ ID NO: 396987 - DNA, 20 bp, Artificial Sequence
  Description of Artificial Sequence: Synthetic oligonucleotide
  Target: LAMA2; (+) strand; PAM type: YTN; PAM sequence: CTC
taccttacctgttctttctg

SEQ ID NO: 396988 - DNA, 20 bp, Artificial Sequence
  Description of Artificial Sequence: Synthetic oligonucleotide
  Target: LAMA2; (+) strand; PAM type: YTN; PAM sequence: CTA
ccttacctgttctttctgag

SEQ ID NO: 396989 - DNA, 20 bp, Artificial Sequence
  Description of Artificial Sequence: Synthetic oligonucleotide
  Target: LAMA2; (+) strand; PAM type: YTN; PAM sequence: CTT
acctgttctttctgaggcct

SEQ ID NO: 396990 - DNA, 20 bp, Artificial Sequence
  Description of Artificial Sequence: Synthetic oligonucleotide
  Target: LAMA2; (+) strand; PAM type: YTN; PAM sequence: TTA
cctgttctttctgaggcctg

SEQ ID NO: 396991 - DNA, 20 bp, Artificial Sequence
  Description of Artificial Sequence: Synthetic oligonucleotide
  Target: LAMA2; (+) strand; PAM type: YTN; PAM sequence: CTG
ttctttctgaggcctggcct

SEQ ID NO: 396992 - DNA, 20 bp, Artificial Sequence
  Description of Artificial Sequence: Synthetic oligonucleotide
  Target: LAMA2; (+) strand; PAM type: YTN; PAM sequence: TTC
tttctgaggcctggccttct

SEQ ID NO: 396993 - DNA, 20 bp, Artificial Sequence
  Description of Artificial Sequence: Synthetic oligonucleotide
  Target: LAMA2; (+) strand; PAM type: YTN; PAM sequence: CTT
tctgaggcctggccttctcc

SEQ ID NO: 396994 - DNA, 20 bp, Artificial Sequence
  Description of Artificial Sequence: Synthetic oligonucleotide
  Target: LAMA2; (+) strand; PAM type: YTN; PAM sequence: TTT
ctgaggcctggccttctcca

SEQ ID NO: 396995 - DNA, 20 bp, Artificial Sequence
  Description of Artificial Sequence: Synthetic oligonucleotide
  Target: LAMA2; (+) strand; PAM type: YTN; PAM sequence: TTC
tgaggcctggccttctccaa

SEQ ID NO: 396996 - DNA, 20 bp, Artificial Sequence
  Description of Artificial Sequence: Synthetic oligonucleotide
  Target: LAMA2; (+) strand; PAM type: YTN; PAM sequence: CTG
aggcctggccttctccaaat

SEQ ID NO: 396997 - DNA, 20 bp, Artificial Sequence
  Description of Artificial Sequence: Synthetic oligonucleotide
  Target: LAMA2; (+) strand; PAM type: YTN; PAM sequence: CTG
gccttctccaaattttttct

SEQ ID NO: 396998 - DNA, 20 bp, Artificial Sequence
  Description of Artificial Sequence: Synthetic oligonucleotide
  Target: LAMA2; (+) strand; PAM type: YTN; PAM sequence: CTT
ctccaaattttttctatctc

SEQ ID NO: 396999 - DNA, 20 bp, Artificial Sequence
  Description of Artificial Sequence: Synthetic oligonucleotide
  Target: LAMA2; (+) strand; PAM type: YTN; PAM sequence: TTC
tccaaattttttctatctcc

SEQ ID NO: 397000 - DNA, 20 bp, Artificial Sequence
  Description of Artificial Sequence: Synthetic oligonucleotide
  Target: LAMA2; (+) strand; PAM type: YTN; PAM sequence: CTC
caaattttttctatctcctt

SEQ ID NO: 397001 - DNA, 20 bp, Artificial Sequence
  Description of Artificial Sequence: Synthetic oligonucleotide
  Target: LAMA2; (+) strand; PAM type: YTN; PAM sequence: TTT
tttctatctccttgctggca

SEQ ID NO: 397002 - DNA, 20 bp, Artificial Sequence
  Description of Artificial Sequence: Synthetic oligonucleotide
  Target: LAMA2; (+) strand; PAM type: YTN; PAM sequence: TTT
ttctatctccttgctggcat

SEQ ID NO: 397003 - DNA, 20 bp, Artificial Sequence
  Description of Artificial Sequence: Synthetic oligonucleotide
  Target: LAMA2; (+) strand; PAM type: YTN; PAM sequence: TTT
tctatctccttgctggcata

SEQ ID NO: 397004 - DNA, 20 bp, Artificial Sequence
  Description of Artificial Sequence: Synthetic oligonucleotide
  Target: LAMA2; (+) strand; PAM type: YTN; PAM sequence: TTT
ctatctccttgctggcatat

SEQ ID NO: 397005 - DNA, 20 bp, Artificial Sequence
  Description of Artificial Sequence: Synthetic oligonucleotide
  Target: LAMA2; (+) strand; PAM type: YTN; PAM sequence: TTC
tatctccttgctggcatata

SEQ ID NO: 397006 - DNA, 20 bp, Artificial Sequence
  Description of Artificial Sequence: Synthetic oligonucleotide
  Target: LAMA2; (+) strand; PAM type: YTN; PAM sequence: CTA
tctccttgctggcatatacc

SEQ ID NO: 397007 - DNA, 20 bp, Artificial Sequence
  Description of Artificial Sequence: Synthetic oligonucleotide
  Target: LAMA2; (+) strand; PAM type: YTN; PAM sequence: CTC
cttgctggcatataccctat

SEQ ID NO: 397008 - DNA, 20 bp, Artificial Sequence
  Description of Artificial Sequence: Synthetic oligonucleotide
  Target: LAMA2; (+) strand; PAM type: YTN; PAM sequence: CTT
gctggcatataccctatagt

SEQ ID NO: 397009 - DNA, 20 bp, Artificial Sequence
  Description of Artificial Sequence: Synthetic oligonucleotide
  Target: LAMA2; (+) strand; PAM type: YTN; PAM sequence: TTG
ctggcatataccctatagtg

SEQ ID NO: 397010 - DNA, 20 bp, Artificial Sequence
  Description of Artificial Sequence: Synthetic oligonucleotide
  Target: LAMA2; (+) strand; PAM type: YTN; PAM sequence: CTG
gcatataccctatagtgcaa

SEQ ID NO: 397011 - DNA, 20 bp, Artificial Sequence
  Description of Artificial Sequence: Synthetic oligonucleotide
  Target: LAMA2; (+) strand; PAM type: YTN; PAM sequence: CTA
tagtgcaagttgtgggtaca

SEQ ID NO: 397012 - DNA, 20 bp, Artificial Sequence
  Description of Artificial Sequence: Synthetic oligonucleotide
  Target: LAMA2; (+) strand; PAM type: YTN; PAM sequence: TTG
tgggtacaataactgcaaaa

SEQ ID NO: 397013 - DNA, 20 bp, Artificial Sequence
  Description of Artificial Sequence: Synthetic oligonucleotide
  Target: LAMA2; (+) strand; PAM type: YTN; PAM sequence: CTG
caaaagattgaggagcagga

SEQ ID NO: 397014 - DNA, 20 bp, Artificial Sequence
  Description of Artificial Sequence: Synthetic oligonucleotide
  Target: LAMA2; (+) strand; PAM type: YTN; PAM sequence: TTG
aggagcaggaactatctaaa

SEQ ID NO: 397015 - DNA, 20 bp, Artificial Sequence
  Description of Artificial Sequence: Synthetic oligonucleotide
  Target: LAMA2; (+) strand; PAM type: YTN; PAM sequence: CTA
tctaaataaccatggtggct

SEQ ID NO: 397016 - DNA, 20 bp, Artificial Sequence
  Description of Artificial Sequence: Synthetic oligonucleotide
  Target: LAMA2; (+) strand; PAM type: YTN; PAM sequence: CTA
aataaccatggtggctgggt

SEQ ID NO: 397017 - DNA, 20 bp, Artificial Sequence
  Description of Artificial Sequence: Synthetic oligonucleotide
  Target: LAMA2; (+) strand; PAM type: YTN; PAM sequence: CTG
ggtgcagtgactcatgccgg

SEQ ID NO: 397018 - DNA, 20 bp, Artificial Sequence
  Description of Artificial Sequence: Synthetic oligonucleotide
  Target: LAMA2; (+) strand; PAM type: YTN; PAM sequence: CTC
atgccggtaatcccagcact

SEQ ID NO: 397019 - DNA, 20 bp, Artificial Sequence
  Description of Artificial Sequence: Synthetic oligonucleotide
  Target: LAMA2; (+) strand; PAM type: YTN; PAM sequence: CTT
tgggaggctgaggtgggaag

SEQ ID NO: 397020 - DNA, 20 bp, Artificial Sequence
  Description of Artificial Sequence: Synthetic oligonucleotide
  Target: LAMA2; (+) strand; PAM type: YTN; PAM sequence: TTT
gggaggctgaggtgggaaga

SEQ ID NO: 397021 - DNA, 20 bp, Artificial Sequence
  Description of Artificial Sequence: Synthetic oligonucleotide
  Target: LAMA2; (+) strand; PAM type: YTN; PAM sequence: TTG
ggaggctgaggtgggaagat

SEQ ID NO: 397022 - DNA, 20 bp, Artificial Sequence
  Description of Artificial Sequence: Synthetic oligonucleotide
  Target: LAMA2; (+) strand; PAM type: YTN; PAM sequence: CTG
aggtgggaagattgcttgag

SEQ ID NO: 397023 - DNA, 20 bp, Artificial Sequence
  Description of Artificial Sequence: Synthetic oligonucleotide
  Target: LAMA2; (+) strand; PAM type: YTN; PAM sequence: TTG
cttgagcccaggagtttgag

SEQ ID NO: 397024 - DNA, 20 bp, Artificial Sequence
  Description of Artificial Sequence: Synthetic oligonucleotide
  Target: LAMA2; (+) strand; PAM type: YTN; PAM sequence: CTT
gagcccaggagtttgagacc

SEQ ID NO: 397025 - DNA, 20 bp, Artificial Sequence
  Description of Artificial Sequence: Synthetic oligonucleotide
  Target: LAMA2; (+) strand; PAM type: YTN; PAM sequence: TTG
agcccaggagtttgagacca

SEQ ID NO: 397026 - DNA, 20 bp, Artificial Sequence
  Description of Artificial Sequence: Synthetic oligonucleotide
  Target: LAMA2; (+) strand; PAM type: YTN; PAM sequence: TTT
gagaccagcctggacaacat

SEQ ID NO: 397027 - DNA, 20 bp, Artificial Sequence
  Description of Artificial Sequence: Synthetic oligonucleotide
  Target: LAMA2; (+) strand; PAM type: YTN; PAM sequence: TTG
agaccagcctggacaacatg

SEQ ID NO: 397028 - DNA, 20 bp, Artificial Sequence
  Description of Artificial Sequence: Synthetic oligonucleotide
  Target: LAMA2; (+) strand; PAM type: YTN; PAM sequence: CTG
gacaacatggcgaaacccca

SEQ ID NO: 397029 - DNA, 20 bp, Artificial Sequence
  Description of Artificial Sequence: Synthetic oligonucleotide
  Target: LAMA2; (+) strand; PAM type: YTN; PAM sequence: CTC
tactaaaaatacaaaaatta

SEQ ID NO: 397030 - DNA, 20 bp, Artificial Sequence
  Description of Artificial Sequence: Synthetic oligonucleotide
  Target: LAMA2; (+) strand; PAM type: YTN; PAM sequence: CTA
ctaaaaatacaaaaattagc

SEQ ID NO: 397031 - DNA, 20 bp, Artificial Sequence
  Description of Artificial Sequence: Synthetic oligonucleotide
  Target: LAMA2; (+) strand; PAM type: YTN; PAM sequence: CTA
aaaatacaaaaattagccag

SEQ ID NO: 397032 - DNA, 20 bp, Artificial Sequence
  Description of Artificial Sequence: Synthetic oligonucleotide
  Target: LAMA2; (+) strand; PAM type: YTN; PAM sequence: TTA
gccaggcatggtgacacatg

SEQ ID NO: 397033 - DNA, 20 bp, Artificial Sequence
  Description of Artificial Sequence: Synthetic oligonucleotide
  Target: LAMA2; (+) strand; PAM type: YTN; PAM sequence: CTG
taatccaggctactcaggag

SEQ ID NO: 397034 - DNA, 20 bp, Artificial Sequence
  Description of Artificial Sequence: Synthetic oligonucleotide
  Target: LAMA2; (+) strand; PAM type: YTN; PAM sequence: CTA
ctcaggaggctgaggtggga

SEQ ID NO: 397035 - DNA, 20 bp, Artificial Sequence
  Description of Artificial Sequence: Synthetic oligonucleotide
  Target: LAMA2; (+) strand; PAM type: YTN; PAM sequence: CTC
aggaggctgaggtgggagga

SEQ ID NO: 397036 - DNA, 20 bp, Artificial Sequence
  Description of Artificial Sequence: Synthetic oligonucleotide
  Target: LAMA2; (+) strand; PAM type: YTN; PAM sequence: CTG
aggtgggaggatcccctgag

SEQ ID NO: 397037 - DNA, 20 bp, Artificial Sequence
  Description of Artificial Sequence: Synthetic oligonucleotide
  Target: LAMA2; (+) strand; PAM type: YTN; PAM sequence: CTG
agcctgggaagtcaaggctg

SEQ ID NO: 397038 - DNA, 20 bp, Artificial Sequence
  Description of Artificial Sequence: Synthetic oligonucleotide
  Target: LAMA2; (+) strand; PAM type: YTN; PAM sequence: CTG
ggaagtcaaggctgcagtga

SEQ ID NO: 397039 - DNA, 20 bp, Artificial Sequence
  Description of Artificial Sequence: Synthetic oligonucleotide
  Target: LAMA2; (+) strand; PAM type: YTN; PAM sequence: CTG
cagtgagccaagatcatgcc

SEQ ID NO: 397040 - DNA, 20 bp, Artificial Sequence
  Description of Artificial Sequence: Synthetic oligonucleotide
  Target: LAMA2; (+) strand; PAM type: YTN; PAM sequence: CTG
cactccagcctgcgtgacag

SEQ ID NO: 397041 - DNA, 20 bp, Artificial Sequence
  Description of Artificial Sequence: Synthetic oligonucleotide
  Target: LAMA2; (+) strand; PAM type: YTN; PAM sequence: CTC
cagcctgcgtgacagagcaa

SEQ ID NO: 397042 - DNA, 20 bp, Artificial Sequence
  Description of Artificial Sequence: Synthetic oligonucleotide
  Target: LAMA2; (+) strand; PAM type: YTN; PAM sequence: CTG
cgtgacagagcaagacctta

SEQ ID NO: 397043 - DNA, 20 bp, Artificial Sequence
  Description of Artificial Sequence: Synthetic oligonucleotide
  Target: LAMA2; (+) strand; PAM type: YTN; PAM sequence: CTT
atctcacaaaaaagaaaata

SEQ ID NO: 397044 - DNA, 20 bp, Artificial Sequence
  Description of Artificial Sequence: Synthetic oligonucleotide
  Target: LAMA2; (+) strand; PAM type: YTN; PAM sequence: TTA
tctcacaaaaaagaaaataa

SEQ ID NO: 397045 - DNA, 20 bp, Artificial Sequence
  Description of Artificial Sequence: Synthetic oligonucleotide
  Target: LAMA2; (+) strand; PAM type: YTN; PAM sequence: CTC
acaaaaaagaaaataaaagg

SEQ ID NO: 397046 - DNA, 20 bp, Artificial Sequence
  Description of Artificial Sequence: Synthetic oligonucleotide
  Target: LAMA2; (+) strand; PAM type: YTN; PAM sequence: CTA
ggaaagagtgccaaccctgt

SEQ ID NO: 397047 - DNA, 20 bp, Artificial Sequence
  Description of Artificial Sequence: Synthetic oligonucleotide
  Target: LAMA2; (+) strand; PAM type: YTN; PAM sequence: CTG
tccaaagggaagctttcttt

SEQ ID NO: 397048 - DNA, 20 bp, Artificial Sequence
  Description of Artificial Sequence: Synthetic oligonucleotide
  Target: LAMA2; (+) strand; PAM type: YTN; PAM sequence: CTT
tctttgctgaaattatacac

SEQ ID NO: 397049 - DNA, 20 bp, Artificial Sequence
  Description of Artificial Sequence: Synthetic oligonucleotide
  Target: LAMA2; (+) strand; PAM type: YTN; PAM sequence: TTT
ctttgctgaaattatacact

SEQ ID NO: 397050 - DNA, 20 bp, Artificial Sequence
  Description of Artificial Sequence: Synthetic oligonucleotide
  Target: LAMA2; (+) strand; PAM type: YTN; PAM sequence: TTC
tttgctgaaattatacactt

SEQ ID NO: 397051 - DNA, 20 bp, Artificial Sequence
  Description of Artificial Sequence: Synthetic oligonucleotide
  Target: LAMA2; (+) strand; PAM type: YTN; PAM sequence: CTT
tgctgaaattatacactttc

SEQ ID NO: 397052 - DNA, 20 bp, Artificial Sequence
  Description of Artificial Sequence: Synthetic oligonucleotide
  Target: LAMA2; (+) strand; PAM type: YTN; PAM sequence: TTT
gctgaaattatacactttct

SEQ ID NO: 397053 - DNA, 20 bp, Artificial Sequence
  Description of Artificial Sequence: Synthetic oligonucleotide
  Target: LAMA2; (+) strand; PAM type: YTN; PAM sequence: TTG
ctgaaattatacactttctt

SEQ ID NO: 397054 - DNA, 20 bp, Artificial Sequence
  Description of Artificial Sequence: Synthetic oligonucleotide
  Target: LAMA2; (+) strand; PAM type: YTN; PAM sequence: CTG
aaattatacactttctttct

SEQ ID NO: 397055 - DNA, 20 bp, Artificial Sequence
  Description of Artificial Sequence: Synthetic oligonucleotide
  Target: LAMA2; (+) strand; PAM type: YTN; PAM sequence: TTA
tacactttctttcttttttt

SEQ ID NO: 397056 - DNA, 20 bp, Artificial Sequence
  Description of Artificial Sequence: Synthetic oligonucleotide
  Target: LAMA2; (+) strand; PAM type: YTN; PAM sequence: CTT
tctttctttttttttttttt

SEQ ID NO: 397057 - DNA, 20 bp, Artificial Sequence
  Description of Artificial Sequence: Synthetic oligonucleotide
  Target: LAMA2; (+) strand; PAM type: YTN; PAM sequence: TTT
ctttcttttttttttttttt

SEQ ID NO: 397058 - DNA, 20 bp, Artificial Sequence
  Description of Artificial Sequence: Synthetic oligonucleotide
  Target: LAMA2; (+) strand; PAM type: YTN; PAM sequence: TTC
tttctttttttttttttttt

SEQ ID NO: 397059 - DNA, 20 bp, Artificial Sequence
  Description of Artificial Sequence: Synthetic oligonucleotide
  Target: LAMA2; (+) strand; PAM type: YTN; PAM sequence: CTT
tctttttttttttttttttt

SEQ ID NO: 397060 - DNA, 20 bp, Artificial Sequence
  Description of Artificial Sequence: Synthetic oligonucleotide
  Target: LAMA2; (+) strand; PAM type: YTN; PAM sequence: TTT
cttttttttttttttttttt

SEQ ID NO: 397061 - DNA, 20 bp, Artificial Sequence
  Description of Artificial Sequence: Synthetic oligonucleotide
  Target: LAMA2; (+) strand; PAM type: YTN; PAM sequence: TTC
tttttttttttttttttttt

SEQ ID NO: 397062 - DNA, 20 bp, Artificial Sequence
  Description of Artificial Sequence: Synthetic oligonucleotide
  Target: LAMA2; (+) strand; PAM type: YTN; PAM sequence: CTT
tttttttttttttttttttg

SEQ ID NO: 397063 - DNA, 20 bp, Artificial Sequence
  Description of Artificial Sequence: Synthetic oligonucleotide
  Target: LAMA2; (+) strand; PAM type: YTN; PAM sequence: TTT
ttttttttttttttttttga

SEQ ID NO: 397064 - DNA, 20 bp, Artificial Sequence
  Description of Artificial Sequence: Synthetic oligonucleotide
  Target: LAMA2; (+) strand; PAM type: YTN; PAM sequence: TTT
tttttttttttttttttgag

SEQ ID NO: 397065 - DNA, 20 bp, Artificial Sequence
  Description of Artificial Sequence: Synthetic oligonucleotide
  Target: LAMA2; (+) strand; PAM type: YTN; PAM sequence: TTT
ttttttttttttttttgaga

SEQ ID NO: 397066 - DNA, 20 bp, Artificial Sequence
  Description of Artificial Sequence: Synthetic oligonucleotide
  Target: LAMA2; (+) strand; PAM type: YTN; PAM sequence: TTT
tttttttttttttttgagac

SEQ ID NO: 397067 - DNA, 20 bp, Artificial Sequence
  Description of Artificial Sequence: Synthetic oligonucleotide
  Target: LAMA2; (+) strand; PAM type: YTN; PAM sequence: TTT
ttttttttttttttgagacg

SEQ ID NO: 397068 - DNA, 20 bp, Artificial Sequence
  Description of Artificial Sequence: Synthetic oligonucleotide
  Target: LAMA2; (+) strand; PAM type: YTN; PAM sequence: TTT
tttttttttttttgagacgg

SEQ ID NO: 397069 - DNA, 20 bp, Artificial Sequence
  Description of Artificial Sequence: Synthetic oligonucleotide
  Target: LAMA2; (+) strand; PAM type: YTN; PAM sequence: TTT
ttttttttttttgagacgga

SEQ ID NO: 397070 - DNA, 20 bp, Artificial Sequence
  Description of Artificial Sequence: Synthetic oligonucleotide
  Target: LAMA2; (+) strand; PAM type: YTN; PAM sequence: TTT
tttttttttttgagacggag

SEQ ID NO: 397071 - DNA, 20 bp, Artificial Sequence
  Description of Artificial Sequence: Synthetic oligonucleotide
  Target: LAMA2; (+) strand; PAM type: YTN; PAM sequence: TTT
ttttttttttgagacggagt

SEQ ID NO: 397072 - DNA, 20 bp, Artificial Sequence
  Description of Artificial Sequence: Synthetic oligonucleotide
  Target: LAMA2; (+) strand; PAM type: YTN; PAM sequence: TTT
tttttttttgagacggagtc

SEQ ID NO: 397073 - DNA, 20 bp, Artificial Sequence
  Description of Artificial Sequence: Synthetic oligonucleotide
  Target: LAMA2; (+) strand; PAM type: YTN; PAM sequence: TTT
ttttttttgagacggagtct

SEQ ID NO: 397074 - DNA, 20 bp, Artificial Sequence
  Description of Artificial Sequence: Synthetic oligonucleotide
  Target: LAMA2; (+) strand; PAM type: YTN; PAM sequence: TTT
tttttttgagacggagtctc

SEQ ID NO: 397075 - DNA, 20 bp, Artificial Sequence
  Description of Artificial Sequence: Synthetic oligonucleotide
  Target: LAMA2; (+) strand; PAM type: YTN; PAM sequence: TTT
ttttttgagacggagtctcg

SEQ ID NO: 397076 - DNA, 20 bp, Artificial Sequence
  Description of Artificial Sequence: Synthetic oligonucleotide
  Target: LAMA2; (+) strand; PAM type: YTN; PAM sequence: TTT
tttttgagacggagtctcgc

SEQ ID NO: 397077 - DNA, 20 bp, Artificial Sequence
  Description of Artificial Sequence: Synthetic oligonucleotide
  Target: LAMA2; (+) strand; PAM type: YTN; PAM sequence: TTT
ttttgagacggagtctcgct

SEQ ID NO: 397078 - DNA, 20 bp, Artificial Sequence
  Description of Artificial Sequence: Synthetic oligonucleotide
  Target: LAMA2; (+) strand; PAM type: YTN; PAM sequence: TTT
tttgagacggagtctcgctc

SEQ ID NO: 397079 - DNA, 20 bp, Artificial Sequence
  Description of Artificial Sequence: Synthetic oligonucleotide
  Target: LAMA2; (+) strand; PAM type: YTN; PAM sequence: TTT
ttgagacggagtctcgctct

SEQ ID NO: 397080 - DNA, 20 bp, Artificial Sequence
  Description of Artificial Sequence: Synthetic oligonucleotide
  Target: LAMA2; (+) strand; PAM type: YTN; PAM sequence: TTT
tgagacggagtctcgctctg

SEQ ID NO: 397081 - DNA, 20 bp, Artificial Sequence
  Description of Artificial Sequence: Synthetic oligonucleotide
  Target: LAMA2; (+) strand; PAM type: YTN; PAM sequence: TTT
gagacggagtctcgctctgt

SEQ ID NO: 397082 - DNA, 20 bp, Artificial Sequence
  Description of Artificial Sequence: Synthetic oligonucleotide
  Target: LAMA2; (+) strand; PAM type: YTN; PAM sequence: TTG
agacggagtctcgctctgtc

SEQ ID NO: 397083 - DNA, 20 bp, Artificial Sequence
  Description of Artificial Sequence: Synthetic oligonucleotide
  Target: LAMA2; (+) strand; PAM type: YTN; PAM sequence: CTC
gctctgtcgcccaggctgga

SEQ ID NO: 397084 - DNA, 20 bp, Artificial Sequence
  Description of Artificial Sequence: Synthetic oligonucleotide
  Target: LAMA2; (+) strand; PAM type: YTN; PAM sequence: CTC
tgtcgcccaggctggagtgc

SEQ ID NO: 397085 - DNA, 20 bp, Artificial Sequence
  Description of Artificial Sequence: Synthetic oligonucleotide
  Target: LAMA2; (+) strand; PAM type: YTN; PAM sequence: CTG
tcgcccaggctggagtgcag

SEQ ID NO: 397086 - DNA, 20 bp, Artificial Sequence
  Description of Artificial Sequence: Synthetic oligonucleotide
  Target: LAMA2; (+) strand; PAM type: YTN; PAM sequence: CTG
gagtgcagtggcgggatctc

SEQ ID NO: 397087 - DNA, 20 bp, Artificial Sequence
  Description of Artificial Sequence: Synthetic oligonucleotide
  Target: LAMA2; (+) strand; PAM type: YTN; PAM sequence: CTC
ggctcactgcaagctccgcc

SEQ ID NO: 397088 - DNA, 20 bp, Artificial Sequence
  Description of Artificial Sequence: Synthetic oligonucleotide
  Target: LAMA2; (+) strand; PAM type: YTN; PAM sequence: CTC
actgcaagctccgcctcccg

SEQ ID NO: 397089 - DNA, 20 bp, Artificial Sequence
  Description of Artificial Sequence: Synthetic oligonucleotide
  Target: LAMA2; (+) strand; PAM type: YTN; PAM sequence: CTG
caagctccgcctcccgggtt

SEQ ID NO: 397090 - DNA, 20 bp, Artificial Sequence
  Description of Artificial Sequence: Synthetic oligonucleotide
  Target: LAMA2; (+) strand; PAM type: YTN; PAM sequence: CTC
cgcctcccgggttcacgcca

SEQ ID NO: 397091 - DNA, 20 bp, Artificial Sequence
  Description of Artificial Sequence: Synthetic oligonucleotide
  Target: LAMA2; (+) strand; PAM type: YTN; PAM sequence: CTC
ccgggttcacgccattctcc

SEQ ID NO: 397092 - DNA, 20 bp, Artificial Sequence
  Description of Artificial Sequence: Synthetic oligonucleotide
  Target: LAMA2; (+) strand; PAM type: YTN; PAM sequence: TTC
acgccattctcctgcctcag

SEQ ID NO: 397093 - DNA, 20 bp, Artificial Sequence
  Description of Artificial Sequence: Synthetic oligonucleotide
  Target: LAMA2; (+) strand; PAM type: YTN; PAM sequence: TTC
tcctgcctcagcctcccaag

SEQ ID NO: 397094 - DNA, 20 bp, Artificial Sequence
  Description of Artificial Sequence: Synthetic oligonucleotide
  Target: LAMA2; (+) strand; PAM type: YTN; PAM sequence: CTC
ctgcctcagcctcccaagta

SEQ ID NO: 397095 - DNA, 20 bp, Artificial Sequence
  Description of Artificial Sequence: Synthetic oligonucleotide
  Target: LAMA2; (+) strand; PAM type: YTN; PAM sequence: CTG
cctcagcctcccaagtagct

SEQ ID NO: 397096 - DNA, 20 bp, Artificial Sequence
  Description of Artificial Sequence: Synthetic oligonucleotide
  Target: LAMA2; (+) strand; PAM type: YTN; PAM sequence: CTC
agcctcccaagtagctggga

SEQ ID NO: 397097 - DNA, 20 bp, Artificial Sequence
  Description of Artificial Sequence: Synthetic oligonucleotide
  Target: LAMA2; (+) strand; PAM type: YTN; PAM sequence: CTC
ccaagtagctgggactacag

SEQ ID NO: 397098 - DNA, 20 bp, Artificial Sequence
  Description of Artificial Sequence: Synthetic oligonucleotide
  Target: LAMA2; (+) strand; PAM type: YTN; PAM sequence: CTG
ggactacaggcgcccgccac

SEQ ID NO: 397099 - DNA, 20 bp, Artificial Sequence
  Description of Artificial Sequence: Synthetic oligonucleotide
  Target: LAMA2; (+) strand; PAM type: YTN; PAM sequence: CTA
caggcgcccgccactacgcc

SEQ ID NO: 397100 - DNA, 20 bp, Artificial Sequence
  Description of Artificial Sequence: Synthetic oligonucleotide
  Target: LAMA2; (+) strand; PAM type: YTN; PAM sequence: CTA
cgcccggctaatttttttgt

SEQ ID NO: 397101 - DNA, 20 bp, Artificial Sequence
  Description of Artificial Sequence: Synthetic oligonucleotide
  Target: LAMA2; (+) strand; PAM type: YTN; PAM sequence: CTA
atttttttgtatttttagta

SEQ ID NO: 397102 - DNA, 20 bp, Artificial Sequence
  Description of Artificial Sequence: Synthetic oligonucleotide
  Target: LAMA2; (+) strand; PAM type: YTN; PAM sequence: TTT
ttttgtatttttagtagaga

SEQ ID NO: 397103 - DNA, 20 bp, Artificial Sequence
  Description of Artificial Sequence: Synthetic oligonucleotide
  Target: LAMA2; (+) strand; PAM type: YTN; PAM sequence: TTT
tttgtatttttagtagagac

SEQ ID NO: 397104 - DNA, 20 bp, Artificial Sequence
  Description of Artificial Sequence: Synthetic oligonucleotide
  Target: LAMA2; (+) strand; PAM type: YTN; PAM sequence: TTT
ttgtatttttagtagagacg

SEQ ID NO: 397105 - DNA, 20 bp, Artificial Sequence
  Description of Artificial Sequence: Synthetic oligonucleotide
  Target: LAMA2; (+) strand; PAM type: YTN; PAM sequence: TTT
tgtatttttagtagagacgg

SEQ ID NO: 397106 - DNA, 20 bp, Artificial Sequence
  Description of Artificial Sequence: Synthetic oligonucleotide
  Target: LAMA2; (+) strand; PAM type: YTN; PAM sequence: TTT
gtatttttagtagagacggg

SEQ ID NO: 397107 - DNA, 20 bp, Artificial Sequence
  Description of Artificial Sequence: Synthetic oligonucleotide
  Target: LAMA2; (+) strand; PAM type: YTN; PAM sequence: TTG
tatttttagtagagacgggg

SEQ ID NO: 397108 - DNA, 20 bp, Artificial Sequence
  Description of Artificial Sequence: Synthetic oligonucleotide
  Target: LAMA2; (+) strand; PAM type: YTN; PAM sequence: TTT
ttagtagagacggggtttca

SEQ ID NO: 397109 - DNA, 20 bp, Artificial Sequence
  Description of Artificial Sequence: Synthetic oligonucleotide
  Target: LAMA2; (+) strand; PAM type: YTN; PAM sequence: TTT
tagtagagacggggtttcac

SEQ ID NO: 397110 - DNA, 20 bp, Artificial Sequence
  Description of Artificial Sequence: Synthetic oligonucleotide
  Target: LAMA2; (+) strand; PAM type: YTN; PAM sequence: TTT
agtagagacggggtttcacc

SEQ ID NO: 397111 - DNA, 20 bp, Artificial Sequence
  Description of Artificial Sequence: Synthetic oligonucleotide
  Target: LAMA2; (+) strand; PAM type: YTN; PAM sequence: TTA
gtagagacggggtttcaccg

SEQ ID NO: 397112 - DNA, 20 bp, Artificial Sequence
  Description of Artificial Sequence: Synthetic oligonucleotide
  Target: LAMA2; (+) strand; PAM type: YTN; PAM sequence: TTT
caccgttttagccgggatgg

SEQ ID NO: 397113 - DNA, 20 bp, Artificial Sequence
  Description of Artificial Sequence: Synthetic oligonucleotide
  Target: LAMA2; (+) strand; PAM type: YTN; PAM sequence: TTC
accgttttagccgggatggt

SEQ ID NO: 397114 - DNA, 20 bp, Artificial Sequence
  Description of Artificial Sequence: Synthetic oligonucleotide
  Target: LAMA2; (+) strand; PAM type: YTN; PAM sequence: TTT
tagccgggatggtctcgatc

SEQ ID NO: 397115 - DNA, 20 bp, Artificial Sequence
  Description of Artificial Sequence: Synthetic oligonucleotide
  Target: LAMA2; (+) strand; PAM type: YTN; PAM sequence: TTT
agccgggatggtctcgatct

SEQ ID NO: 397116 - DNA, 20 bp, Artificial Sequence
  Description of Artificial Sequence: Synthetic oligonucleotide
  Target: LAMA2; (+) strand; PAM type: YTN; PAM sequence: TTA
gccgggatggtctcgatctc

SEQ ID NO: 397117 - DNA, 20 bp, Artificial Sequence
  Description of Artificial Sequence: Synthetic oligonucleotide
  Target: LAMA2; (+) strand; PAM type: YTN; PAM sequence: CTC
gatctcctgacctcgtgatc

SEQ ID NO: 397118 - DNA, 20 bp, Artificial Sequence
  Description of Artificial Sequence: Synthetic oligonucleotide
  Target: LAMA2; (+) strand; PAM type: YTN; PAM sequence: CTC
ctgacctcgtgatccgcccg

SEQ ID NO: 397119 - DNA, 20 bp, Artificial Sequence
  Description of Artificial Sequence: Synthetic oligonucleotide
  Target: LAMA2; (+) strand; PAM type: YTN; PAM sequence: CTG
acctcgtgatccgcccgccc

SEQ ID NO: 397120 - DNA, 20 bp, Artificial Sequence
  Description of Artificial Sequence: Synthetic oligonucleotide
  Target: LAMA2; (+) strand; PAM type: YTN; PAM sequence: CTC
gtgatccgcccgcccaaagt

SEQ ID NO: 397121 - DNA, 20 bp, Artificial Sequence
  Description of Artificial Sequence: Synthetic oligonucleotide
  Target: LAMA2; (+) strand; PAM type: YTN; PAM sequence: CTG
ggattacaggcgtgagccac

SEQ ID NO: 397122 - DNA, 20 bp, Artificial Sequence
  Description of Artificial Sequence: Synthetic oligonucleotide
  Target: LAMA2; (+) strand; PAM type: YTN; PAM sequence: TTA
caggcgtgagccaccgcgcc

SEQ ID NO: 397123 - DNA, 20 bp, Artificial Sequence
  Description of Artificial Sequence: Synthetic oligonucleotide
  Target: LAMA2; (+) strand; PAM type: YTN; PAM sequence: TTA
tacactttctttgatcaact

SEQ ID NO: 397124 - DNA, 20 bp, Artificial Sequence
  Description of Artificial Sequence: Synthetic oligonucleotide
  Target: LAMA2; (+) strand; PAM type: YTN; PAM sequence: CTT
tctttgatcaacttcttttt

SEQ ID NO: 397125 - DNA, 20 bp, Artificial Sequence
  Description of Artificial Sequence: Synthetic oligonucleotide
  Target: LAMA2; (+) strand; PAM type: YTN; PAM sequence: TTT
ctttgatcaacttcttttta

SEQ ID NO: 397126 - DNA, 20 bp, Artificial Sequence
  Description of Artificial Sequence: Synthetic oligonucleotide
  Target: LAMA2; (+) strand; PAM type: YTN; PAM sequence: TTC
tttgatcaacttctttttac

SEQ ID NO: 397127 - DNA, 20 bp, Artificial Sequence
  Description of Artificial Sequence: Synthetic oligonucleotide
  Target: LAMA2; (+) strand; PAM type: YTN; PAM sequence: CTT
tgatcaacttctttttactc

SEQ ID NO: 397128 - DNA, 20 bp, Artificial Sequence
  Description of Artificial Sequence: Synthetic oligonucleotide
  Target: LAMA2; (+) strand; PAM type: YTN; PAM sequence: TTT
gatcaacttctttttactcc

SEQ ID NO: 397129 - DNA, 20 bp, Artificial Sequence
  Description of Artificial Sequence: Synthetic oligonucleotide
  Target: LAMA2; (+) strand; PAM type: YTN; PAM sequence: TTG
atcaacttctttttactccg

SEQ ID NO: 397130 - DNA, 20 bp, Artificial Sequence
  Description of Artificial Sequence: Synthetic oligonucleotide
  Target: LAMA2; (+) strand; PAM type: YTN; PAM sequence: CTT
ctttttactccgtcatagtt

SEQ ID NO: 397131 - DNA, 20 bp, Artificial Sequence
  Description of Artificial Sequence: Synthetic oligonucleotide
  Target: LAMA2; (+) strand; PAM type: YTN; PAM sequence: TTC
tttttactccgtcatagttt

SEQ ID NO: 397132 - DNA, 20 bp, Artificial Sequence
  Description of Artificial Sequence: Synthetic oligonucleotide
  Target: LAMA2; (+) strand; PAM type: YTN; PAM sequence: CTT
tttactccgtcatagtttta

SEQ ID NO: 397133 - DNA, 20 bp, Artificial Sequence
  Description of Artificial Sequence: Synthetic oligonucleotide
  Target: LAMA2; (+) strand; PAM type: YTN; PAM sequence: TTT
ttactccgtcatagttttat

SEQ ID NO: 397134 - DNA, 20 bp, Artificial Sequence
  Description of Artificial Sequence: Synthetic oligonucleotide
  Target: LAMA2; (+) strand; PAM type: YTN; PAM sequence: TTT
tactccgtcatagttttatt

SEQ ID NO: 397135 - DNA, 20 bp, Artificial Sequence
  Description of Artificial Sequence: Synthetic oligonucleotide
  Target: LAMA2; (+) strand; PAM type: YTN; PAM sequence: TTT
actccgtcatagttttattc

SEQ ID NO: 397136 - DNA, 20 bp, Artificial Sequence
  Description of Artificial Sequence: Synthetic oligonucleotide
  Target: LAMA2; (+) strand; PAM type: YTN; PAM sequence: TTA
ctccgtcatagttttattcc

SEQ ID NO: 397137 - DNA, 20 bp, Artificial Sequence
  Description of Artificial Sequence: Synthetic oligonucleotide
  Target: LAMA2; (+) strand; PAM type: YTN; PAM sequence: CTC
cgtcatagttttattcccca

SEQ ID NO: 397138 - DNA, 20 bp, Artificial Sequence
  Description of Artificial Sequence: Synthetic oligonucleotide
  Target: LAMA2; (+) strand; PAM type: YTN; PAM sequence: TTT
tattccccaccaatctcccc

SEQ ID NO: 397139 - DNA, 20 bp, Artificial Sequence
  Description of Artificial Sequence: Synthetic oligonucleotide
  Target: LAMA2; (+) strand; PAM type: YTN; PAM sequence: TTT
attccccaccaatctccccc

SEQ ID NO: 397140 - DNA, 20 bp, Artificial Sequence
  Description of Artificial Sequence: Synthetic oligonucleotide
  Target: LAMA2; (+) strand; PAM type: YTN; PAM sequence: TTA
ttccccaccaatctcccccg

SEQ ID NO: 397141 - DNA, 20 bp, Artificial Sequence
  Description of Artificial Sequence: Synthetic oligonucleotide
  Target: LAMA2; (+) strand; PAM type: YTN; PAM sequence: TTC
cccaccaatctcccccggac

SEQ ID NO: 397142 - DNA, 20 bp, Artificial Sequence
  Description of Artificial Sequence: Synthetic oligonucleotide
  Target: LAMA2; (+) strand; PAM type: YTN; PAM sequence: CTC
ccccggacagtcactccatt

SEQ ID NO: 397143 - DNA, 20 bp, Artificial Sequence
  Description of Artificial Sequence: Synthetic oligonucleotide
  Target: LAMA2; (+) strand; PAM type: YTN; PAM sequence: CTC
cattttacttagtctcttgg

SEQ ID NO: 397144 - DNA, 20 bp, Artificial Sequence
  Description of Artificial Sequence: Synthetic oligonucleotide
  Target: LAMA2; (+) strand; PAM type: YTN; PAM sequence: TTT
tacttagtctcttggtacta

SEQ ID NO: 397145 - DNA, 20 bp, Artificial Sequence
  Description of Artificial Sequence: Synthetic oligonucleotide
  Target: LAMA2; (+) strand; PAM type: YTN; PAM sequence: TTT
acttagtctcttggtactat

SEQ ID NO: 397146 - DNA, 20 bp, Artificial Sequence
  Description of Artificial Sequence: Synthetic oligonucleotide
  Target: LAMA2; (+) strand; PAM type: YTN; PAM sequence: TTA
cttagtctcttggtactatt

SEQ ID NO: 397147 - DNA, 20 bp, Artificial Sequence
  Description of Artificial Sequence: Synthetic oligonucleotide
  Target: LAMA2; (+) strand; PAM type: YTN; PAM sequence: CTT
agtctcttggtactattctc

SEQ ID NO: 397148 - DNA, 20 bp, Artificial Sequence
  Description of Artificial Sequence: Synthetic oligonucleotide
  Target: LAMA2; (+) strand; PAM type: YTN; PAM sequence: TTA
gtctcttggtactattctca

SEQ ID NO: 397149 - DNA, 20 bp, Artificial Sequence
  Description of Artificial Sequence: Synthetic oligonucleotide
  Target: LAMA2; (+) strand; PAM type: YTN; PAM sequence: CTC
ttggtactattctcagaatt

SEQ ID NO: 397150 - DNA, 20 bp, Artificial Sequence
  Description of Artificial Sequence: Synthetic oligonucleotide
  Target: LAMA2; (+) strand; PAM type: YTN; PAM sequence: CTT
ggtactattctcagaattca

SEQ ID NO: 397151 - DNA, 20 bp, Artificial Sequence
  Description of Artificial Sequence: Synthetic oligonucleotide
  Target: LAMA2; (+) strand; PAM type: YTN; PAM sequence: TTG
gtactattctcagaattcaa

SEQ ID NO: 397152 - DNA, 20 bp, Artificial Sequence
  Description of Artificial Sequence: Synthetic oligonucleotide
  Target: LAMA2; (+) strand; PAM type: YTN; PAM sequence: CTA
ttctcagaattcaaatttta

SEQ ID NO: 397153 - DNA, 20 bp, Artificial Sequence
  Description of Artificial Sequence: Synthetic oligonucleotide
  Target: LAMA2; (+) strand; PAM type: YTN; PAM sequence: TTC
tcagaattcaaattttaaat

SEQ ID NO: 397154 - DNA, 20 bp, Artificial Sequence
  Description of Artificial Sequence: Synthetic oligonucleotide
  Target: LAMA2; (+) strand; PAM type: YTN; PAM sequence: CTC
agaattcaaattttaaatta

SEQ ID NO: 397155 - DNA, 20 bp, Artificial Sequence
  Description of Artificial Sequence: Synthetic oligonucleotide
  Target: LAMA2; (+) strand; PAM type: YTN; PAM sequence: TTC
aaattttaaattaattaatc

SEQ ID NO: 397156 - DNA, 20 bp, Artificial Sequence
  Description of Artificial Sequence: Synthetic oligonucleotide
  Target: LAMA2; (+) strand; PAM type: YTN; PAM sequence: TTT
taaattaattaatctgtatt

SEQ ID NO: 397157 - DNA, 20 bp, Artificial Sequence
  Description of Artificial Sequence: Synthetic oligonucleotide
  Target: LAMA2; (+) strand; PAM type: YTN; PAM sequence: TTT
aaattaattaatctgtattt

SEQ ID NO: 397158 - DNA, 20 bp, Artificial Sequence
  Description of Artificial Sequence: Synthetic oligonucleotide
  Target: LAMA2; (+) strand; PAM type: YTN; PAM sequence: TTA
aattaattaatctgtatttc

SEQ ID NO: 397159 - DNA, 20 bp, Artificial Sequence
  Description of Artificial Sequence: Synthetic oligonucleotide
  Target: LAMA2; (+) strand; PAM type: YTN; PAM sequence: TTA
attaatctgtatttctgaag

SEQ ID NO: 397160 - DNA, 20 bp, Artificial Sequence
  Description of Artificial Sequence: Synthetic oligonucleotide
  Target: LAMA2; (+) strand; PAM type: YTN; PAM sequence: TTA
atctgtatttctgaagagct

SEQ ID NO: 397161 - DNA, 20 bp, Artificial Sequence
  Description of Artificial Sequence: Synthetic oligonucleotide
  Target: LAMA2; (+) strand; PAM type: YTN; PAM sequence: CTG
tatttctgaagagctgtttg

SEQ ID NO: 397162 - DNA, 20 bp, Artificial Sequence
  Description of Artificial Sequence: Synthetic oligonucleotide
  Target: LAMA2; (+) strand; PAM type: YTN; PAM sequence: TTT
ctgaagagctgtttgttttc

SEQ ID NO: 397163 - DNA, 20 bp, Artificial Sequence
  Description of Artificial Sequence: Synthetic oligonucleotide
  Target: LAMA2; (+) strand; PAM type: YTN; PAM sequence: TTC
tgaagagctgtttgttttct

SEQ ID NO: 397164 - DNA, 20 bp, Artificial Sequence
  Description of Artificial Sequence: Synthetic oligonucleotide
  Target: LAMA2; (+) strand; PAM type: YTN; PAM sequence: CTG
aagagctgtttgttttctta

SEQ ID NO: 397165 - DNA, 20 bp, Artificial Sequence
  Description of Artificial Sequence: Synthetic oligonucleotide
  Target: LAMA2; (+) strand; PAM type: YTN; PAM sequence: CTG
tttgttttcttactgtatat

SEQ ID NO: 397166 - DNA, 20 bp, Artificial Sequence
  Description of Artificial Sequence: Synthetic oligonucleotide
  Target: LAMA2; (+) strand; PAM type: YTN; PAM sequence: TTT
gttttcttactgtatatttt

SEQ ID NO: 397167 - DNA, 20 bp, Artificial Sequence
  Description of Artificial Sequence: Synthetic oligonucleotide
  Target: LAMA2; (+) strand; PAM type: YTN; PAM sequence: TTG
ttttcttactgtatattttg

SEQ ID NO: 397168 - DNA, 20 bp, Artificial Sequence
  Description of Artificial Sequence: Synthetic oligonucleotide
  Target: LAMA2; (+) strand; PAM type: YTN; PAM sequence: TTT
tcttactgtatattttgctt

SEQ ID NO: 397169 - DNA, 20 bp, Artificial Sequence
  Description of Artificial Sequence: Synthetic oligonucleotide
  Target: LAMA2; (+) strand; PAM type: YTN; PAM sequence: TTT
cttactgtatattttgcttt

SEQ ID NO: 397170 - DNA, 20 bp, Artificial Sequence
  Description of Artificial Sequence: Synthetic oligonucleotide
  Target: LAMA2; (+) strand; PAM type: YTN; PAM sequence: TTC
ttactgtatattttgctttc

SEQ ID NO: 397171 - DNA, 20 bp, Artificial Sequence
  Description of Artificial Sequence: Synthetic oligonucleotide
  Target: LAMA2; (+) strand; PAM type: YTN; PAM sequence: CTT
actgtatattttgctttctc

SEQ ID NO: 397172 - DNA, 20 bp, Artificial Sequence
  Description of Artificial Sequence: Synthetic oligonucleotide
  Target: LAMA2; (+) strand; PAM type: YTN; PAM sequence: TTA
ctgtatattttgctttctcc

SEQ ID NO: 397173 - DNA, 20 bp, Artificial Sequence
  Description of Artificial Sequence: Synthetic oligonucleotide
  Target: LAMA2; (+) strand; PAM type: YTN; PAM sequence: CTG
tatattttgctttctccatg

SEQ ID NO: 397174 - DNA, 20 bp, Artificial Sequence
  Description of Artificial Sequence: Synthetic oligonucleotide
  Target: LAMA2; (+) strand; PAM type: YTN; PAM sequence: TTT
tgctttctccatgggaaaga

SEQ ID NO: 397175 - DNA, 20 bp, Artificial Sequence
  Description of Artificial Sequence: Synthetic oligonucleotide
  Target: LAMA2; (+) strand; PAM type: YTN; PAM sequence: TTT
gctttctccatgggaaagat

SEQ ID NO: 397176 - DNA, 20 bp, Artificial Sequence
  Description of Artificial Sequence: Synthetic oligonucleotide
  Target: LAMA2; (+) strand; PAM type: YTN; PAM sequence: TTG
ctttctccatgggaaagata

SEQ ID NO: 397177 - DNA, 20 bp, Artificial Sequence
  Description of Artificial Sequence: Synthetic oligonucleotide
  Target: LAMA2; (+) strand; PAM type: YTN; PAM sequence: CTT
tctccatgggaaagatatgc

SEQ ID NO: 397178 - DNA, 20 bp, Artificial Sequence
  Description of Artificial Sequence: Synthetic oligonucleotide
  Target: LAMA2; (+) strand; PAM type: YTN; PAM sequence: TTT
ctccatgggaaagatatgct

SEQ ID NO: 397179 - DNA, 20 bp, Artificial Sequence
  Description of Artificial Sequence: Synthetic oligonucleotide
  Target: LAMA2; (+) strand; PAM type: YTN; PAM sequence: TTC
tccatgggaaagatatgctt

SEQ ID NO: 397180 - DNA, 20 bp, Artificial Sequence
  Description of Artificial Sequence: Synthetic oligonucleotide
  Target: LAMA2; (+) strand; PAM type: YTN; PAM sequence: CTC
catgggaaagatatgcttgg

SEQ ID NO: 397181 - DNA, 20 bp, Artificial Sequence
  Description of Artificial Sequence: Synthetic oligonucleotide
  Target: LAMA2; (+) strand; PAM type: YTN; PAM sequence: CTT
gggagcctcatgcagtcttg

SEQ ID NO: 397182 - DNA, 20 bp, Artificial Sequence
  Description of Artificial Sequence: Synthetic oligonucleotide
  Target: LAMA2; (+) strand; PAM type: YTN; PAM sequence: TTG
ggagcctcatgcagtcttgg

SEQ ID NO: 397183 - DNA, 20 bp, Artificial Sequence
  Description of Artificial Sequence: Synthetic oligonucleotide
  Target: LAMA2; (+) strand; PAM type: YTN; PAM sequence: CTC
atgcagtcttggtgggagtt

SEQ ID NO: 397184 - DNA, 20 bp, Artificial Sequence
  Description of Artificial Sequence: Synthetic oligonucleotide
  Target: LAMA2; (+) strand; PAM type: YTN; PAM sequence: CTT
ggtgggagttatgtaaccac

SEQ ID NO: 397185 - DNA, 20 bp, Artificial Sequence
  Description of Artificial Sequence: Synthetic oligonucleotide
  Target: LAMA2; (+) strand; PAM type: YTN; PAM sequence: TTG
gtgggagttatgtaaccact

SEQ ID NO: 397186 - DNA, 20 bp, Artificial Sequence
  Description of Artificial Sequence: Synthetic oligonucleotide
  Target: LAMA2; (+) strand; PAM type: YTN; PAM sequence: TTA
tgtaaccactgggccagata

SEQ ID NO: 397187 - DNA, 20 bp, Artificial Sequence
  Description of Artificial Sequence: Synthetic oligonucleotide
  Target: LAMA2; (+) strand; PAM type: YTN; PAM sequence: CTG
ggccagatatgtcagggcac

SEQ ID NO: 397188 - DNA, 20 bp, Artificial Sequence
  Description of Artificial Sequence: Synthetic oligonucleotide
  Target: LAMA2; (+) strand; PAM type: YTN; PAM sequence: TTC
cctggccagttccatcgccc

SEQ ID NO: 397189 - DNA, 20 bp, Artificial Sequence
  Description of Artificial Sequence: Synthetic oligonucleotide
  Target: LAMA2; (+) strand; PAM type: YTN; PAM sequence: CTG
gccagttccatcgcccagag

SEQ ID NO: 397190 - DNA, 20 bp, Artificial Sequence
  Description of Artificial Sequence: Synthetic oligonucleotide
  Target: LAMA2; (+) strand; PAM type: YTN; PAM sequence: TTC
catcgcccagagccagaccc

SEQ ID NO: 397191 - DNA, 20 bp, Artificial Sequence
  Description of Artificial Sequence: Synthetic oligonucleotide
  Target: LAMA2; (+) strand; PAM type: YTN; PAM sequence: CTT
tgggccctacacagactgca

SEQ ID NO: 397192 - DNA, 20 bp, Artificial Sequence
  Description of Artificial Sequence: Synthetic oligonucleotide
  Target: LAMA2; (+) strand; PAM type: YTN; PAM sequence: TTT
gggccctacacagactgcac

SEQ ID NO: 397193 - DNA, 20 bp, Artificial Sequence
  Description of Artificial Sequence: Synthetic oligonucleotide
  Target: LAMA2; (+) strand; PAM type: YTN; PAM sequence: TTG
ggccctacacagactgcaca

SEQ ID NO: 397194 - DNA, 20 bp, Artificial Sequence
  Description of Artificial Sequence: Synthetic oligonucleotide
  Target: LAMA2; (+) strand; PAM type: YTN; PAM sequence: CTA
cacagactgcacagccccag

SEQ ID NO: 397195 - DNA, 20 bp, Artificial Sequence
  Description of Artificial Sequence: Synthetic oligonucleotide
  Target: LAMA2; (+) strand; PAM type: YTN; PAM sequence: CTG
cacagccccagcatgtgggg

SEQ ID NO: 397196 - DNA, 20 bp, Artificial Sequence
  Description of Artificial Sequence: Synthetic oligonucleotide
  Target: LAMA2; (+) strand; PAM type: YTN; PAM sequence: CTT
gtataagggaagttctgatg

SEQ ID NO: 397197 - DNA, 20 bp, Artificial Sequence
  Description of Artificial Sequence: Synthetic oligonucleotide
  Target: LAMA2; (+) strand; PAM type: YTN; PAM sequence: TTG
tataagggaagttctgatgt

SEQ ID NO: 397198 - DNA, 20 bp, Artificial Sequence
  Description of Artificial Sequence: Synthetic oligonucleotide
  Target: LAMA2; (+) strand; PAM type: YTN; PAM sequence: TTC
tgatgtcacaggatccttgg

SEQ ID NO: 397199 - DNA, 20 bp, Artificial Sequence
  Description of Artificial Sequence: Synthetic oligonucleotide
  Target: LAMA2; (+) strand; PAM type: YTN; PAM sequence: CTG
atgtcacaggatccttgggg

SEQ ID NO: 397200 - DNA, 20 bp, Artificial Sequence
  Description of Artificial Sequence: Synthetic oligonucleotide
  Target: LAMA2; (+) strand; PAM type: YTN; PAM sequence: CTT
ggggtgtttcttcaccagct

SEQ ID NO: 397201 - DNA, 20 bp, Artificial Sequence
  Description of Artificial Sequence: Synthetic oligonucleotide
  Target: LAMA2; (+) strand; PAM type: YTN; PAM sequence: TTG
gggtgtttcttcaccagctg

SEQ ID NO: 397202 - DNA, 20 bp, Artificial Sequence
  Description of Artificial Sequence: Synthetic oligonucleotide
  Target: LAMA2; (+) strand; PAM type: YTN; PAM sequence: TTT
cttcaccagctggaaacctc

SEQ ID NO: 397203 - DNA, 20 bp, Artificial Sequence
  Description of Artificial Sequence: Synthetic oligonucleotide
  Target: LAMA2; (+) strand; PAM type: YTN; PAM sequence: TTC
ttcaccagctggaaacctct

SEQ ID NO: 397204 - DNA, 20 bp, Artificial Sequence
  Description of Artificial Sequence: Synthetic oligonucleotide
  Target: LAMA2; (+) strand; PAM type: YTN; PAM sequence: CTT
caccagctggaaacctctgt

SEQ ID NO: 397205 - DNA, 20 bp, Artificial Sequence
  Description of Artificial Sequence: Synthetic oligonucleotide
  Target: LAMA2; (+) strand; PAM type: YTN; PAM sequence: TTC
accagctggaaacctctgtg

SEQ ID NO: 397206 - DNA, 20 bp, Artificial Sequence
  Description of Artificial Sequence: Synthetic oligonucleotide
  Target: LAMA2; (+) strand; PAM type: YTN; PAM sequence: CTG
gaaacctctgtggccagtgg

SEQ ID NO: 397207 - DNA, 20 bp, Artificial Sequence
  Description of Artificial Sequence: Synthetic oligonucleotide
  Target: LAMA2; (+) strand; PAM type: YTN; PAM sequence: CTC
tgtggccagtggcacctttg

SEQ ID NO: 397208 - DNA, 20 bp, Artificial Sequence
  Description of Artificial Sequence: Synthetic oligonucleotide
  Target: LAMA2; (+) strand; PAM type: YTN; PAM sequence: CTG
tggccagtggcacctttgcc

SEQ ID NO: 397209 - DNA, 20 bp, Artificial Sequence
  Description of Artificial Sequence: Synthetic oligonucleotide
  Target: LAMA2; (+) strand; PAM type: YTN; PAM sequence: CTT
tgcctgagttttgctgaggt

SEQ ID NO: 397210 - DNA, 20 bp, Artificial Sequence
  Description of Artificial Sequence: Synthetic oligonucleotide
  Target: LAMA2; (+) strand; PAM type: YTN; PAM sequence: TTT
gcctgagttttgctgaggtc

SEQ ID NO: 397211 - DNA, 20 bp, Artificial Sequence
  Description of Artificial Sequence: Synthetic oligonucleotide
  Target: LAMA2; (+) strand; PAM type: YTN; PAM sequence: TTG
cctgagttttgctgaggtcc

SEQ ID NO: 397212 - DNA, 20 bp, Artificial Sequence
  Description of Artificial Sequence: Synthetic oligonucleotide
  Target: LAMA2; (+) strand; PAM type: YTN; PAM sequence: CTG
agttttgctgaggtccactg

SEQ ID NO: 397213 - DNA, 20 bp, Artificial Sequence
  Description of Artificial Sequence: Synthetic oligonucleotide
  Target: LAMA2; (+) strand; PAM type: YTN; PAM sequence: TTT
tgctgaggtccactgggcac

SEQ ID NO: 397214 - DNA, 20 bp, Artificial Sequence
  Description of Artificial Sequence: Synthetic oligonucleotide
  Target: LAMA2; (+) strand; PAM type: YTN; PAM sequence: TTT
gctgaggtccactgggcaca

SEQ ID NO: 397215 - DNA, 20 bp, Artificial Sequence
  Description of Artificial Sequence: Synthetic oligonucleotide
  Target: LAMA2; (+) strand; PAM type: YTN; PAM sequence: TTG
ctgaggtccactgggcacat

SEQ ID NO: 397216 - DNA, 20 bp, Artificial Sequence
  Description of Artificial Sequence: Synthetic oligonucleotide
  Target: LAMA2; (+) strand; PAM type: YTN; PAM sequence: CTG
aggtccactgggcacattcc

SEQ ID NO: 397217 - DNA, 20 bp, Artificial Sequence
  Description of Artificial Sequence: Synthetic oligonucleotide
  Target: LAMA2; (+) strand; PAM type: YTN; PAM sequence: CTG
ggcacattccgcccactcag

SEQ ID NO: 397218 - DNA, 20 bp, Artificial Sequence
  Description of Artificial Sequence: Synthetic oligonucleotide
  Target: LAMA2; (+) strand; PAM type: YTN; PAM sequence: TTC
cgcccactcagcctggcagg

SEQ ID NO: 397219 - DNA, 20 bp, Artificial Sequence
  Description of Artificial Sequence: Synthetic oligonucleotide
  Target: LAMA2; (+) strand; PAM type: YTN; PAM sequence: CTC
agcctggcaggctacacttg

SEQ ID NO: 397220 - DNA, 20 bp, Artificial Sequence
  Description of Artificial Sequence: Synthetic oligonucleotide
  Target: LAMA2; (+) strand; PAM type: YTN; PAM sequence: CTG
gcaggctacacttggctcac

SEQ ID NO: 397221 - DNA, 20 bp, Artificial Sequence
  Description of Artificial Sequence: Synthetic oligonucleotide
  Target: LAMA2; (+) strand; PAM type: YTN; PAM sequence: CTA
cacttggctcacactaccac

SEQ ID NO: 397222 - DNA, 20 bp, Artificial Sequence
  Description of Artificial Sequence: Synthetic oligonucleotide
  Target: LAMA2; (+) strand; PAM type: YTN; PAM sequence: CTT
ggctcacactaccactactg

SEQ ID NO: 397223 - DNA, 20 bp, Artificial Sequence
  Description of Artificial Sequence: Synthetic oligonucleotide
  Target: LAMA2; (+) strand; PAM type: YTN; PAM sequence: TTG
gctcacactaccactactgg

SEQ ID NO: 397224 - DNA, 20 bp, Artificial Sequence
  Description of Artificial Sequence: Synthetic oligonucleotide
  Target: LAMA2; (+) strand; PAM type: YTN; PAM sequence: CTC
acactaccactactgggctg

SEQ ID NO: 397225 - DNA, 20 bp, Artificial Sequence
  Description of Artificial Sequence: Synthetic oligonucleotide
  Target: LAMA2; (+) strand; PAM type: YTN; PAM sequence: CTA
ccactactgggctggatccc

SEQ ID NO: 397226 - DNA, 20 bp, Artificial Sequence
  Description of Artificial Sequence: Synthetic oligonucleotide
  Target: LAMA2; (+) strand; PAM type: YTN; PAM sequence: CTA
ctgggctggatcccacacct

SEQ ID NO: 397227 - DNA, 20 bp, Artificial Sequence
  Description of Artificial Sequence: Synthetic oligonucleotide
  Target: LAMA2; (+) strand; PAM type: YTN; PAM sequence: CTG
ggctggatcccacacctgcc

SEQ ID NO: 397228 - DNA, 20 bp, Artificial Sequence
  Description of Artificial Sequence: Synthetic oligonucleotide
  Target: LAMA2; (+) strand; PAM type: YTN; PAM sequence: CTG
gatcccacacctgccaaggg

SEQ ID NO: 397229 - DNA, 20 bp, Artificial Sequence
  Description of Artificial Sequence: Synthetic oligonucleotide
  Target: LAMA2; (+) strand; PAM type: YTN; PAM sequence: CTG
ccaagggtgattcagggcag

SEQ ID NO: 397230 - DNA, 20 bp, Artificial Sequence
  Description of Artificial Sequence: Synthetic oligonucleotide
  Target: LAMA2; (+) strand; PAM type: YTN; PAM sequence: TTC
agggcagagtggcgaggggt

SEQ ID NO: 397231 - DNA, 20 bp, Artificial Sequence
  Description of Artificial Sequence: Synthetic oligonucleotide
  Target: LAMA2; (+) strand; PAM type: YTN; PAM sequence: CTC
cagccactgtgcacagctaa

SEQ ID NO: 397232 - DNA, 20 bp, Artificial Sequence
  Description of Artificial Sequence: Synthetic oligonucleotide
  Target: LAMA2; (+) strand; PAM type: YTN; PAM sequence: CTG
tgcacagctaagcgtgccag

SEQ ID NO: 397233 - DNA, 20 bp, Artificial Sequence
  Description of Artificial Sequence: Synthetic oligonucleotide
  Target: LAMA2; (+) strand; PAM type: YTN; PAM sequence: CTA
agcgtgccagctgcagtggg

SEQ ID NO: 397234 - DNA, 20 bp, Artificial Sequence
  Description of Artificial Sequence: Synthetic oligonucleotide
  Target: LAMA2; (+) strand; PAM type: YTN; PAM sequence: CTG
cagtgggctgggcagctcca

SEQ ID NO: 397235 - DNA, 20 bp, Artificial Sequence
  Description of Artificial Sequence: Synthetic oligonucleotide
  Target: LAMA2; (+) strand; PAM type: YTN; PAM sequence: CTG
ggcagctccaggtcctggct

SEQ ID NO: 397236 - DNA, 20 bp, Artificial Sequence
  Description of Artificial Sequence: Synthetic oligonucleotide
  Target: LAMA2; (+) strand; PAM type: YTN; PAM sequence: CTC
caggtcctggctctatgtga

SEQ ID NO: 397237 - DNA, 20 bp, Artificial Sequence
  Description of Artificial Sequence: Synthetic oligonucleotide
  Target: LAMA2; (+) strand; PAM type: YTN; PAM sequence: CTG
gctctatgtgaggctgtggc

SEQ ID NO: 397238 - DNA, 20 bp, Artificial Sequence
  Description of Artificial Sequence: Synthetic oligonucleotide
  Target: LAMA2; (+) strand; PAM type: YTN; PAM sequence: CTC
tatgtgaggctgtggctgaa

SEQ ID NO: 397239 - DNA, 20 bp, Artificial Sequence
  Description of Artificial Sequence: Synthetic oligonucleotide
  Target: LAMA2; (+) strand; PAM type: YTN; PAM sequence: CTA
tgtgaggctgtggctgaacc

SEQ ID NO: 397240 - DNA, 20 bp, Artificial Sequence
  Description of Artificial Sequence: Synthetic oligonucleotide
  Target: LAMA2; (+) strand; PAM type: YTN; PAM sequence: CTG
tggctgaaccagacatacta

SEQ ID NO: 397241 - DNA, 20 bp, Artificial Sequence
  Description of Artificial Sequence: Synthetic oligonucleotide
  Target: LAMA2; (+) strand; PAM type: YTN; PAM sequence: CTG
aaccagacatactacaattg

SEQ ID NO: 397242 - DNA, 20 bp, Artificial Sequence
  Description of Artificial Sequence: Synthetic oligonucleotide
  Target: LAMA2; (+) strand; PAM type: YTN; PAM sequence: CTA
caattggcttccaccactgg

SEQ ID NO: 397243 - DNA, 20 bp, Artificial Sequence
  Description of Artificial Sequence: Synthetic oligonucleotide
  Target: LAMA2; (+) strand; PAM type: YTN; PAM sequence: TTG
gcttccaccactggtaccag

SEQ ID NO: 397244 - DNA, 20 bp, Artificial Sequence
  Description of Artificial Sequence: Synthetic oligonucleotide
  Target: LAMA2; (+) strand; PAM type: YTN; PAM sequence: CTT
ccaccactggtaccagggaa

SEQ ID NO: 397245 - DNA, 20 bp, Artificial Sequence
  Description of Artificial Sequence: Synthetic oligonucleotide
  Target: LAMA2; (+) strand; PAM type: YTN; PAM sequence: TTC
caccactggtaccagggaat

SEQ ID NO: 397246 - DNA, 20 bp, Artificial Sequence
  Description of Artificial Sequence: Synthetic oligonucleotide
  Target: LAMA2; (+) strand; PAM type: YTN; PAM sequence: CTG
gtaccagggaatgcggtggc

SEQ ID NO: 397247 - DNA, 20 bp, Artificial Sequence
  Description of Artificial Sequence: Synthetic oligonucleotide
  Target: LAMA2; (+) strand; PAM type: YTN; PAM sequence: CTT
ggagatgccaggaaccacag

SEQ ID NO: 397248 - DNA, 20 bp, Artificial Sequence
  Description of Artificial Sequence: Synthetic oligonucleotide
  Target: LAMA2; (+) strand; PAM type: YTN; PAM sequence: TTG
gagatgccaggaaccacaga

SEQ ID NO: 397249 - DNA, 20 bp, Artificial Sequence
  Description of Artificial Sequence: Synthetic oligonucleotide
  Target: LAMA2; (+) strand; PAM type: YTN; PAM sequence: CTG
aaagagggtctcacagccct

SEQ ID NO: 397250 - DNA, 20 bp, Artificial Sequence
  Description of Artificial Sequence: Synthetic oligonucleotide
  Target: LAMA2; (+) strand; PAM type: YTN; PAM sequence: CTC
acagccctggctcagggagt

SEQ ID NO: 397251 - DNA, 20 bp, Artificial Sequence
  Description of Artificial Sequence: Synthetic oligonucleotide
  Target: LAMA2; (+) strand; PAM type: YTN; PAM sequence: CTG
gctcagggagtccataggtc

SEQ ID NO: 397252 - DNA, 20 bp, Artificial Sequence
  Description of Artificial Sequence: Synthetic oligonucleotide
  Target: LAMA2; (+) strand; PAM type: YTN; PAM sequence: CTC
agggagtccataggtctcag

SEQ ID NO: 397253 - DNA, 20 bp, Artificial Sequence
  Description of Artificial Sequence: Synthetic oligonucleotide
  Target: LAMA2; (+) strand; PAM type: YTN; PAM sequence: CTC
agctccccaaaaggccacag

SEQ ID NO: 397254 - DNA, 20 bp, Artificial Sequence
  Description of Artificial Sequence: Synthetic oligonucleotide
  Target: LAMA2; (+) strand; PAM type: YTN; PAM sequence: CTC
cccaaaaggccacagccctt

SEQ ID NO: 397255 - DNA, 20 bp, Artificial Sequence
  Description of Artificial Sequence: Synthetic oligonucleotide
  Target: LAMA2; (+) strand; PAM type: YTN; PAM sequence: CTT
ctctcctgctcattgctgtc

SEQ ID NO: 397256 - DNA, 20 bp, Artificial Sequence
  Description of Artificial Sequence: Synthetic oligonucleotide
  Target: LAMA2; (+) strand; PAM type: YTN; PAM sequence: TTC
tctcctgctcattgctgtca

SEQ ID NO: 397257 - DNA, 20 bp, Artificial Sequence
  Description of Artificial Sequence: Synthetic oligonucleotide
  Target: LAMA2; (+) strand; PAM type: YTN; PAM sequence: CTC
tcctgctcattgctgtcaac

SEQ ID NO: 397258 - DNA, 20 bp, Artificial Sequence
  Description of Artificial Sequence: Synthetic oligonucleotide
  Target: LAMA2; (+) strand; PAM type: YTN; PAM sequence: CTC
ctgctcattgctgtcaacat

SEQ ID NO: 397259 - DNA, 20 bp, Artificial Sequence
  Description of Artificial Sequence: Synthetic oligonucleotide
  Target: LAMA2; (+) strand; PAM type: YTN; PAM sequence: CTG
ctcattgctgtcaacatggt

SEQ ID NO: 397260 - DNA, 20 bp, Artificial Sequence
  Description of Artificial Sequence: Synthetic oligonucleotide
  Target: LAMA2; (+) strand; PAM type: YTN; PAM sequence: CTC
attgctgtcaacatggtgag

SEQ ID NO: 397261 - DNA, 20 bp, Artificial Sequence
  Description of Artificial Sequence: Synthetic oligonucleotide
  Target: LAMA2; (+) strand; PAM type: YTN; PAM sequence: TTG
ctgtcaacatggtgagctgg

SEQ ID NO: 397262 - DNA, 20 bp, Artificial Sequence
  Description of Artificial Sequence: Synthetic oligonucleotide
  Target: LAMA2; (+) strand; PAM type: YTN; PAM sequence: CTG
tcaacatggtgagctgggga

SEQ ID NO: 397263 - DNA, 20 bp, Artificial Sequence
  Description of Artificial Sequence: Synthetic oligonucleotide
  Target: LAMA2; (+) strand; PAM type: YTN; PAM sequence: CTG
gggaagggggtgtgtttcaa

SEQ ID NO: 397264 - DNA, 20 bp, Artificial Sequence
  Description of Artificial Sequence: Synthetic oligonucleotide
  Target: LAMA2; (+) strand; PAM type: YTN; PAM sequence: TTT
caaccctgtttgtgttgtag

SEQ ID NO: 397265 - DNA, 20 bp, Artificial Sequence
  Description of Artificial Sequence: Synthetic oligonucleotide
  Target: LAMA2; (+) strand; PAM type: YTN; PAM sequence: TTC
aaccctgtttgtgttgtagc

SEQ ID NO: 397266 - DNA, 20 bp, Artificial Sequence
  Description of Artificial Sequence: Synthetic oligonucleotide
  Target: LAMA2; (+) strand; PAM type: YTN; PAM sequence: CTG
tttgtgttgtagctctctca

SEQ ID NO: 397267 - DNA, 20 bp, Artificial Sequence
  Description of Artificial Sequence: Synthetic oligonucleotide
  Target: LAMA2; (+) strand; PAM type: YTN; PAM sequence: TTT
gtgttgtagctctctcattt

SEQ ID NO: 397268 - DNA, 20 bp, Artificial Sequence
  Description of Artificial Sequence: Synthetic oligonucleotide
  Target: LAMA2; (+) strand; PAM type: YTN; PAM sequence: TTG
tgttgtagctctctcatttc

SEQ ID NO: 397269 - DNA, 20 bp, Artificial Sequence
  Description of Artificial Sequence: Synthetic oligonucleotide
  Target: LAMA2; (+) strand; PAM type: YTN; PAM sequence: TTG
tagctctctcatttccacca

SEQ ID NO: 397270 - DNA, 20 bp, Artificial Sequence
  Description of Artificial Sequence: Synthetic oligonucleotide
  Target: LAMA2; (+) strand; PAM type: YTN; PAM sequence: CTC
tctcatttccaccatttgcg

SEQ ID NO: 397271 - DNA, 20 bp, Artificial Sequence
  Description of Artificial Sequence: Synthetic oligonucleotide
  Target: LAMA2; (+) strand; PAM type: YTN; PAM sequence: CTC
tcatttccaccatttgcggg

SEQ ID NO: 397272 - DNA, 20 bp, Artificial Sequence
  Description of Artificial Sequence: Synthetic oligonucleotide
  Target: LAMA2; (+) strand; PAM type: YTN; PAM sequence: CTC
atttccaccatttgcggggg

SEQ ID NO: 397273 - DNA, 20 bp, Artificial Sequence
  Description of Artificial Sequence: Synthetic oligonucleotide
  Target: LAMA2; (+) strand; PAM type: YTN; PAM sequence: TTT
ccaccatttgcgggggggtc

SEQ ID NO: 397274 - DNA, 20 bp, Artificial Sequence
  Description of Artificial Sequence: Synthetic oligonucleotide
  Target: LAMA2; (+) strand; PAM type: YTN; PAM sequence: TTC
caccatttgcgggggggtcc

SEQ ID NO: 397275 - DNA, 20 bp, Artificial Sequence
  Description of Artificial Sequence: Synthetic oligonucleotide
  Target: LAMA2; (+) strand; PAM type: YTN; PAM sequence: TTT
gcgggggggtcccaagttct

SEQ ID NO: 397276 - DNA, 20 bp, Artificial Sequence
  Description of Artificial Sequence: Synthetic oligonucleotide
  Target: LAMA2; (+) strand; PAM type: YTN; PAM sequence: TTG
cgggggggtcccaagttctt

SEQ ID NO: 397277 - DNA, 20 bp, Artificial Sequence
  Description of Artificial Sequence: Synthetic oligonucleotide
  Target: LAMA2; (+) strand; PAM type: YTN; PAM sequence: TTC
ttgtcccacatcctggaaga

SEQ ID NO: 397278 - DNA, 20 bp, Artificial Sequence
  Description of Artificial Sequence: Synthetic oligonucleotide
  Target: LAMA2; (+) strand; PAM type: YTN; PAM sequence: CTT
gtcccacatcctggaagaat

SEQ ID NO: 397279 - DNA, 20 bp, Artificial Sequence
  Description of Artificial Sequence: Synthetic oligonucleotide
  Target: LAMA2; (+) strand; PAM type: YTN; PAM sequence: TTG
tcccacatcctggaagaatg

SEQ ID NO: 397280 - DNA, 20 bp, Artificial Sequence
  Description of Artificial Sequence: Synthetic oligonucleotide
  Target: LAMA2; (+) strand; PAM type: YTN; PAM sequence: CTG
gaagaatgaggtttgcagac

SEQ ID NO: 397281 - DNA, 20 bp, Artificial Sequence
  Description of Artificial Sequence: Synthetic oligonucleotide
  Target: LAMA2; (+) strand; PAM type: YTN; PAM sequence: TTT
gcagacaactggagggttag

SEQ ID NO: 397282 - DNA, 20 bp, Artificial Sequence
  Description of Artificial Sequence: Synthetic oligonucleotide
  Target: LAMA2; (+) strand; PAM type: YTN; PAM sequence: TTG
cagacaactggagggttagc

SEQ ID NO: 397283 - DNA, 20 bp, Artificial Sequence
  Description of Artificial Sequence: Synthetic oligonucleotide
  Target: LAMA2; (+) strand; PAM type: YTN; PAM sequence: CTG
gagggttagcaaggtgaaga

SEQ ID NO: 397284 - DNA, 20 bp, Artificial Sequence
  Description of Artificial Sequence: Synthetic oligonucleotide
  Target: LAMA2; (+) strand; PAM type: YTN; PAM sequence: TTA
gcaaggtgaagaggtgcttt

SEQ ID NO: 397285 - DNA, 20 bp, Artificial Sequence
  Description of Artificial Sequence: Synthetic oligonucleotide
  Target: LAMA2; (+) strand; PAM type: YTN; PAM sequence: CTT
tattgagtgacagtgcaact

SEQ ID NO: 397286 - DNA, 20 bp, Artificial Sequence
  Description of Artificial Sequence: Synthetic oligonucleotide
  Target: LAMA2; (+) strand; PAM type: YTN; PAM sequence: TTT
attgagtgacagtgcaactc

SEQ ID NO: 397287 - DNA, 20 bp, Artificial Sequence
  Description of Artificial Sequence: Synthetic oligonucleotide
  Target: LAMA2; (+) strand; PAM type: YTN; PAM sequence: TTA
ttgagtgacagtgcaactct

SEQ ID NO: 397288 - DNA, 20 bp, Artificial Sequence
  Description of Artificial Sequence: Synthetic oligonucleotide
  Target: LAMA2; (+) strand; PAM type: YTN; PAM sequence: TTG
agtgacagtgcaactctcag

SEQ ID NO: 397289 - DNA, 20 bp, Artificial Sequence
  Description of Artificial Sequence: Synthetic oligonucleotide
  Target: LAMA2; (+) strand; PAM type: YTN; PAM sequence: CTC
tcaggaggcctgaaatgggt

SEQ ID NO: 397290 - DNA, 20 bp, Artificial Sequence
  Description of Artificial Sequence: Synthetic oligonucleotide
  Target: LAMA2; (+) strand; PAM type: YTN; PAM sequence: CTC
aggaggcctgaaatgggtag

SEQ ID NO: 397291 - DNA, 20 bp, Artificial Sequence
  Description of Artificial Sequence: Synthetic oligonucleotide
  Target: LAMA2; (+) strand; PAM type: YTN; PAM sequence: CTG
aaatgggtagctccgttcca

SEQ ID NO: 397292 - DNA, 20 bp, Artificial Sequence
  Description of Artificial Sequence: Synthetic oligonucleotide
  Target: LAMA2; (+) strand; PAM type: YTN; PAM sequence: CTC
cgttccacaggcaggtaatt

SEQ ID NO: 397293 - DNA, 20 bp, Artificial Sequence
  Description of Artificial Sequence: Synthetic oligonucleotide
  Target: LAMA2; (+) strand; PAM type: YTN; PAM sequence: TTC
cacaggcaggtaattccagc

SEQ ID NO: 397294 - DNA, 20 bp, Artificial Sequence
  Description of Artificial Sequence: Synthetic oligonucleotide
  Target: LAMA2; (+) strand; PAM type: YTN; PAM sequence: TTC
cagcatctgtgcagcaccct

SEQ ID NO: 397295 - DNA, 20 bp, Artificial Sequence
  Description of Artificial Sequence: Synthetic oligonucleotide
  Target: LAMA2; (+) strand; PAM type: YTN; PAM sequence: CTG
tgcagcaccctcaacagagg

SEQ ID NO: 397296 - DNA, 20 bp, Artificial Sequence
  Description of Artificial Sequence: Synthetic oligonucleotide
  Target: LAMA2; (+) strand; PAM type: YTN; PAM sequence: CTC
aacagaggtgagacacacag

SEQ ID NO: 397297 - DNA, 20 bp, Artificial Sequence
  Description of Artificial Sequence: Synthetic oligonucleotide
  Target: LAMA2; (+) strand; PAM type: YTN; PAM sequence: CTC
ctatccacaggtagatcatc

SEQ ID NO: 397298 - DNA, 20 bp, Artificial Sequence
  Description of Artificial Sequence: Synthetic oligonucleotide
  Target: LAMA2; (+) strand; PAM type: YTN; PAM sequence: CTA
tccacaggtagatcatcctg

SEQ ID NO: 397299 - DNA, 20 bp, Artificial Sequence
  Description of Artificial Sequence: Synthetic oligonucleotide
  Target: LAMA2; (+) strand; PAM type: YTN; PAM sequence: CTG
ttgtctgcccacgtctggct

SEQ ID NO: 397300 - DNA, 20 bp, Artificial Sequence
  Description of Artificial Sequence: Synthetic oligonucleotide
  Target: LAMA2; (+) strand; PAM type: YTN; PAM sequence: TTG
tctgcccacgtctggctgag

SEQ ID NO: 397301 - DNA, 20 bp, Artificial Sequence
  Description of Artificial Sequence: Synthetic oligonucleotide
  Target: LAMA2; (+) strand; PAM type: YTN; PAM sequence: CTG
cccacgtctggctgagtccg

SEQ ID NO: 397302 - DNA, 20 bp, Artificial Sequence
  Description of Artificial Sequence: Synthetic oligonucleotide
  Target: LAMA2; (+) strand; PAM type: YTN; PAM sequence: CTG
gctgagtccggggtttttta

SEQ ID NO: 397303 - DNA, 20 bp, Artificial Sequence
  Description of Artificial Sequence: Synthetic oligonucleotide
  Target: LAMA2; (+) strand; PAM type: YTN; PAM sequence: CTG
agtccggggttttttatggg

SEQ ID NO: 397304 - DNA, 20 bp, Artificial Sequence
  Description of Artificial Sequence: Synthetic oligonucleotide
  Target: LAMA2; (+) strand; PAM type: YTN; PAM sequence: TTT
tttatgggcctcagagggga

SEQ ID NO: 397305 - DNA, 20 bp, Artificial Sequence
  Description of Artificial Sequence: Synthetic oligonucleotide
  Target: LAMA2; (+) strand; PAM type: YTN; PAM sequence: TTT
ttatgggcctcagaggggag

SEQ ID NO: 397306 - DNA, 20 bp, Artificial Sequence
  Description of Artificial Sequence: Synthetic oligonucleotide
  Target: LAMA2; (+) strand; PAM type: YTN; PAM sequence: TTT
tatgggcctcagaggggagg

SEQ ID NO: 397307 - DNA, 20 bp, Artificial Sequence
  Description of Artificial Sequence: Synthetic oligonucleotide
  Target: LAMA2; (+) strand; PAM type: YTN; PAM sequence: TTT
atgggcctcagaggggagga

SEQ ID NO: 397308 - DNA, 20 bp, Artificial Sequence
  Description of Artificial Sequence: Synthetic oligonucleotide
  Target: LAMA2; (+) strand; PAM type: YTN; PAM sequence: TTA
tgggcctcagaggggaggaa

SEQ ID NO: 397309 - DNA, 20 bp, Artificial Sequence
  Description of Artificial Sequence: Synthetic oligonucleotide
  Target: LAMA2; (+) strand; PAM type: YTN; PAM sequence: CTC
agaggggaggaagtgtatgc

SEQ ID NO: 397310 - DNA, 20 bp, Artificial Sequence
  Description of Artificial Sequence: Synthetic oligonucleotide
  Target: LAMA2; (+) strand; PAM type: YTN; PAM sequence: CTG
attggtccatgggtggccat

SEQ ID NO: 397311 - DNA, 20 bp, Artificial Sequence
  Description of Artificial Sequence: Synthetic oligonucleotide
  Target: LAMA2; (+) strand; PAM type: YTN; PAM sequence: TTG
gtccatgggtggccatgagc

SEQ ID NO: 397312 - DNA, 20 bp, Artificial Sequence
  Description of Artificial Sequence: Synthetic oligonucleotide
  Target: LAMA2; (+) strand; PAM type: YTN; PAM sequence: CTG
gcccaaaaaaagcaccataa

SEQ ID NO: 397313 - DNA, 20 bp, Artificial Sequence
  Description of Artificial Sequence: Synthetic oligonucleotide
  Target: LAMA2; (+) strand; PAM type: YTN; PAM sequence: TTC
tcactccagtttgtggaacc

SEQ ID NO: 397314 - DNA, 20 bp, Artificial Sequence
  Description of Artificial Sequence: Synthetic oligonucleotide
  Target: LAMA2; (+) strand; PAM type: YTN; PAM sequence: CTC
actccagtttgtggaaccga

SEQ ID NO: 397315 - DNA, 20 bp, Artificial Sequence
  Description of Artificial Sequence: Synthetic oligonucleotide
  Target: LAMA2; (+) strand; PAM type: YTN; PAM sequence: CTC
cagtttgtggaaccgacagt

SEQ ID NO: 397316 - DNA, 20 bp, Artificial Sequence
  Description of Artificial Sequence: Synthetic oligonucleotide
  Target: LAMA2; (+) strand; PAM type: YTN; PAM sequence: TTT
gtggaaccgacagtccagcc

SEQ ID NO: 397317 - DNA, 20 bp, Artificial Sequence
  Description of Artificial Sequence: Synthetic oligonucleotide
  Target: LAMA2; (+) strand; PAM type: YTN; PAM sequence: TTG
tggaaccgacagtccagccc

SEQ ID NO: 397318 - DNA, 20 bp, Artificial Sequence
  Description of Artificial Sequence: Synthetic oligonucleotide
  Target: LAMA2; (+) strand; PAM type: YTN; PAM sequence: CTT
ccttcaggcagtccctggct

SEQ ID NO: 397319 - DNA, 20 bp, Artificial Sequence
  Description of Artificial Sequence: Synthetic oligonucleotide
  Target: LAMA2; (+) strand; PAM type: YTN; PAM sequence: TTC
cttcaggcagtccctggctt

SEQ ID NO: 397320 - DNA, 20 bp, Artificial Sequence
  Description of Artificial Sequence: Synthetic oligonucleotide
  Target: LAMA2; (+) strand; PAM type: YTN; PAM sequence: CTT
caggcagtccctggcttgaa

SEQ ID NO: 397321 - DNA, 20 bp, Artificial Sequence
  Description of Artificial Sequence: Synthetic oligonucleotide
  Target: LAMA2; (+) strand; PAM type: YTN; PAM sequence: TTC
aggcagtccctggcttgaag

SEQ ID NO: 397322 - DNA, 20 bp, Artificial Sequence
  Description of Artificial Sequence: Synthetic oligonucleotide
  Target: LAMA2; (+) strand; PAM type: YTN; PAM sequence: CTG
gcttgaaggtggagcttcac

SEQ ID NO: 397323 - DNA, 20 bp, Artificial Sequence
  Description of Artificial Sequence: Synthetic oligonucleotide
  Target: LAMA2; (+) strand; PAM type: YTN; PAM sequence: CTT
gaaggtggagcttcactgag

SEQ ID NO: 397324 - DNA, 20 bp, Artificial Sequence
  Description of Artificial Sequence: Synthetic oligonucleotide
  Target: LAMA2; (+) strand; PAM type: YTN; PAM sequence: TTG
aaggtggagcttcactgagg

SEQ ID NO: 397325 - DNA, 20 bp, Artificial Sequence
  Description of Artificial Sequence: Synthetic oligonucleotide
  Target: LAMA2; (+) strand; PAM type: YTN; PAM sequence: CTT
cactgagggcccaccccttt

SEQ ID NO: 397326 - DNA, 20 bp, Artificial Sequence
  Description of Artificial Sequence: Synthetic oligonucleotide
  Target: LAMA2; (+) strand; PAM type: YTN; PAM sequence: TTC
actgagggcccacccctttc

SEQ ID NO: 397327 - DNA, 20 bp, Artificial Sequence
  Description of Artificial Sequence: Synthetic oligonucleotide
  Target: LAMA2; (+) strand; PAM type: YTN; PAM sequence: CTG
agggcccacccctttccacc

SEQ ID NO: 397328 - DNA, 20 bp, Artificial Sequence
  Description of Artificial Sequence: Synthetic oligonucleotide
  Target: LAMA2; (+) strand; PAM type: YTN; PAM sequence: CTT
tccacccaggaacctgtatg

SEQ ID NO: 397329 - DNA, 20 bp, Artificial Sequence
  Description of Artificial Sequence: Synthetic oligonucleotide
  Target: LAMA2; (+) strand; PAM type: YTN; PAM sequence: TTT
ccacccaggaacctgtatgc

SEQ ID NO: 397330 - DNA, 20 bp, Artificial Sequence
  Description of Artificial Sequence: Synthetic oligonucleotide
  Target: LAMA2; (+) strand; PAM type: YTN; PAM sequence: TTC
cacccaggaacctgtatgcc

SEQ ID NO: 397331 - DNA, 20 bp, Artificial Sequence
  Description of Artificial Sequence: Synthetic oligonucleotide
  Target: LAMA2; (+) strand; PAM type: YTN; PAM sequence: CTG
tatgcctcctgccaccacca

SEQ ID NO: 397332 - DNA, 20 bp, Artificial Sequence
  Description of Artificial Sequence: Synthetic oligonucleotide
  Target: LAMA2; (+) strand; PAM type: YTN; PAM sequence: CTC
ctgccaccaccaacctgcca

SEQ ID NO: 397333 - DNA, 20 bp, Artificial Sequence
  Description of Artificial Sequence: Synthetic oligonucleotide
  Target: LAMA2; (+) strand; PAM type: YTN; PAM sequence: CTG
ccaccaccaacctgccatcc

SEQ ID NO: 397334 - DNA, 20 bp, Artificial Sequence
  Description of Artificial Sequence: Synthetic oligonucleotide
  Target: LAMA2; (+) strand; PAM type: YTN; PAM sequence: CTG
ccatccacggcgcccactgg

SEQ ID NO: 397335 - DNA, 20 bp, Artificial Sequence
  Description of Artificial Sequence: Synthetic oligonucleotide
  Target: LAMA2; (+) strand; PAM type: YTN; PAM sequence: CTG
gcacccaggctgttcatgcc

SEQ ID NO: 397336 - DNA, 20 bp, Artificial Sequence
  Description of Artificial Sequence: Synthetic oligonucleotide
  Target: LAMA2; (+) strand; PAM type: YTN; PAM sequence: CTG
ttcatgcctagggtcacctt

SEQ ID NO: 397337 - DNA, 20 bp, Artificial Sequence
  Description of Artificial Sequence: Synthetic oligonucleotide
  Target: LAMA2; (+) strand; PAM type: YTN; PAM sequence: TTC
atgcctagggtcaccttcag

SEQ ID NO: 397338 - DNA, 20 bp, Artificial Sequence
  Description of Artificial Sequence: Synthetic oligonucleotide
  Target: LAMA2; (+) strand; PAM type: YTN; PAM sequence: CTA
gggtcaccttcaggcccatg

SEQ ID NO: 397339 - DNA, 20 bp, Artificial Sequence
  Description of Artificial Sequence: Synthetic oligonucleotide
  Target: LAMA2; (+) strand; PAM type: YTN; PAM sequence: CTT
caggcccatgcagagccacc

SEQ ID NO: 397340 - DNA, 20 bp, Artificial Sequence
  Description of Artificial Sequence: Synthetic oligonucleotide
  Target: LAMA2; (+) strand; PAM type: YTN; PAM sequence: TTC
aggcccatgcagagccaccc

SEQ ID NO: 397341 - DNA, 20 bp, Artificial Sequence
  Description of Artificial Sequence: Synthetic oligonucleotide
  Target: LAMA2; (+) strand; PAM type: YTN; PAM sequence: CTC
aactcccccttggcctccct

SEQ ID NO: 397342 - DNA, 20 bp, Artificial Sequence
  Description of Artificial Sequence: Synthetic oligonucleotide
  Target: LAMA2; (+) strand; PAM type: YTN; PAM sequence: CTC
ccccttggcctccctaatgt

SEQ ID NO: 397343 - DNA, 20 bp, Artificial Sequence
  Description of Artificial Sequence: Synthetic oligonucleotide
  Target: LAMA2; (+) strand; PAM type: YTN; PAM sequence: CTT
ggcctccctaatgtgctcct

SEQ ID NO: 397344 - DNA, 20 bp, Artificial Sequence
  Description of Artificial Sequence: Synthetic oligonucleotide
  Target: LAMA2; (+) strand; PAM type: YTN; PAM sequence: TTG
gcctccctaatgtgctcctt

SEQ ID NO: 397345 - DNA, 20 bp, Artificial Sequence
  Description of Artificial Sequence: Synthetic oligonucleotide
  Target: LAMA2; (+) strand; PAM type: YTN; PAM sequence: CTC
cctaatgtgctccttggcac

SEQ ID NO: 397346 - DNA, 20 bp, Artificial Sequence
  Description of Artificial Sequence: Synthetic oligonucleotide
  Target: LAMA2; (+) strand; PAM type: YTN; PAM sequence: CTA
atgtgctccttggcacccaa

SEQ ID NO: 397347 - DNA, 20 bp, Artificial Sequence
  Description of Artificial Sequence: Synthetic oligonucleotide
  Target: LAMA2; (+) strand; PAM type: YTN; PAM sequence: CTC
cttggcacccaaaatccaga

SEQ ID NO: 397348 - DNA, 20 bp, Artificial Sequence
  Description of Artificial Sequence: Synthetic oligonucleotide
  Target: LAMA2; (+) strand; PAM type: YTN; PAM sequence: CTT
ggcacccaaaatccagaagg

SEQ ID NO: 397349 - DNA, 20 bp, Artificial Sequence
  Description of Artificial Sequence: Synthetic oligonucleotide
  Target: LAMA2; (+) strand; PAM type: YTN; PAM sequence: TTG
gcacccaaaatccagaaggg

SEQ ID NO: 397350 - DNA, 20 bp, Artificial Sequence
  Description of Artificial Sequence: Synthetic oligonucleotide
  Target: LAMA2; (+) strand; PAM type: YTN; PAM sequence: CTA
gagtgtcagtgctgccccga

SEQ ID NO: 397351 - DNA, 20 bp, Artificial Sequence
  Description of Artificial Sequence: Synthetic oligonucleotide
  Target: LAMA2; (+) strand; PAM type: YTN; PAM sequence: CTG
ccccgagcatatgcacacct

SEQ ID NO: 397352 - DNA, 20 bp, Artificial Sequence
  Description of Artificial Sequence: Synthetic oligonucleotide
  Target: LAMA2; (+) strand; PAM type: YTN; PAM sequence: CTG
gctgggttgcaacagcctca

SEQ ID NO: 397353 - DNA, 20 bp, Artificial Sequence
  Description of Artificial Sequence: Synthetic oligonucleotide
  Target: LAMA2; (+) strand; PAM type: YTN; PAM sequence: CTG
ggttgcaacagcctcagctt

SEQ ID NO: 397354 - DNA, 20 bp, Artificial Sequence
  Description of Artificial Sequence: Synthetic oligonucleotide
  Target: LAMA2; (+) strand; PAM type: YTN; PAM sequence: TTG
caacagcctcagctttgctc

SEQ ID NO: 397355 - DNA, 20 bp, Artificial Sequence
  Description of Artificial Sequence: Synthetic oligonucleotide
  Target: LAMA2; (+) strand; PAM type: YTN; PAM sequence: CTC
agctttgctctgaaatcagc

SEQ ID NO: 397356 - DNA, 20 bp, Artificial Sequence
  Description of Artificial Sequence: Synthetic oligonucleotide
  Target: LAMA2; (+) strand; PAM type: YTN; PAM sequence: CTT
tgctctgaaatcagcctggg

SEQ ID NO: 397357 - DNA, 20 bp, Artificial Sequence
  Description of Artificial Sequence: Synthetic oligonucleotide
  Target: LAMA2; (+) strand; PAM type: YTN; PAM sequence: TTT
gctctgaaatcagcctgggt

SEQ ID NO: 397358 - DNA, 20 bp, Artificial Sequence
  Description of Artificial Sequence: Synthetic oligonucleotide
  Target: LAMA2; (+) strand; PAM type: YTN; PAM sequence: TTG
ctctgaaatcagcctgggtg

SEQ ID NO: 397359 - DNA, 20 bp, Artificial Sequence
  Description of Artificial Sequence: Synthetic oligonucleotide
  Target: LAMA2; (+) strand; PAM type: YTN; PAM sequence: CTC
tgaaatcagcctgggtgccg

SEQ ID NO: 397360 - DNA, 20 bp, Artificial Sequence
  Description of Artificial Sequence: Synthetic oligonucleotide
  Target: LAMA2; (+) strand; PAM type: YTN; PAM sequence: CTG
aaatcagcctgggtgccggg

SEQ ID NO: 397361 - DNA, 20 bp, Artificial Sequence
  Description of Artificial Sequence: Synthetic oligonucleotide
  Target: LAMA2; (+) strand; PAM type: YTN; PAM sequence: CTG
ggtgccgggaacagtgagag

SEQ ID NO: 397362 - DNA, 20 bp, Artificial Sequence
  Description of Artificial Sequence: Synthetic oligonucleotide
  Target: LAMA2; (+) strand; PAM type: YTN; PAM sequence: CTT
ctgagcctgtaggggaagag

SEQ ID NO: 397363 - DNA, 20 bp, Artificial Sequence
  Description of Artificial Sequence: Synthetic oligonucleotide
  Target: LAMA2; (+) strand; PAM type: YTN; PAM sequence: TTC
tgagcctgtaggggaagaga

SEQ ID NO: 397364 - DNA, 20 bp, Artificial Sequence
  Description of Artificial Sequence: Synthetic oligonucleotide
  Target: LAMA2; (+) strand; PAM type: YTN; PAM sequence: CTG
agcctgtaggggaagagagg

SEQ ID NO: 397365 - DNA, 20 bp, Artificial Sequence
  Description of Artificial Sequence: Synthetic oligonucleotide
  Target: LAMA2; (+) strand; PAM type: YTN; PAM sequence: CTG
taggggaagagaggtggctg

SEQ ID NO: 397366 - DNA, 20 bp, Artificial Sequence
  Description of Artificial Sequence: Synthetic oligonucleotide
  Target: LAMA2; (+) strand; PAM type: YTN; PAM sequence: CTG
agggcacagggatgcctggg

SEQ ID NO: 397367 - DNA, 20 bp, Artificial Sequence
  Description of Artificial Sequence: Synthetic oligonucleotide
  Target: LAMA2; (+) strand; PAM type: YTN; PAM sequence: CTG
ggtccacagctggctgggtg

SEQ ID NO: 397368 - DNA, 20 bp, Artificial Sequence
  Description of Artificial Sequence: Synthetic oligonucleotide
  Target: LAMA2; (+) strand; PAM type: YTN; PAM sequence: CTG
gctgggtggctgcagctgca

SEQ ID NO: 397369 - DNA, 20 bp, Artificial Sequence
  Description of Artificial Sequence: Synthetic oligonucleotide
  Target: LAMA2; (+) strand; PAM type: YTN; PAM sequence: CTG
ggtggctgcagctgcaccca

SEQ ID NO: 397370 - DNA, 20 bp, Artificial Sequence
  Description of Artificial Sequence: Synthetic oligonucleotide
  Target: LAMA2; (+) strand; PAM type: YTN; PAM sequence: CTG
cagctgcacccagtagggca

SEQ ID NO: 397371 - DNA, 20 bp, Artificial Sequence
  Description of Artificial Sequence: Synthetic oligonucleotide
  Target: LAMA2; (+) strand; PAM type: YTN; PAM sequence: CTG
cacccagtagggcagggttc

SEQ ID NO: 397372 - DNA, 20 bp, Artificial Sequence
  Description of Artificial Sequence: Synthetic oligonucleotide
  Target: LAMA2; (+) strand; PAM type: YTN; PAM sequence: TTC
ccccaccttcaactcggaag

SEQ ID NO: 397373 - DNA, 20 bp, Artificial Sequence
  Description of Artificial Sequence: Synthetic oligonucleotide
  Target: LAMA2; (+) strand; PAM type: YTN; PAM sequence: CTT
caactcggaaggggacatgg

SEQ ID NO: 397374 - DNA, 20 bp, Artificial Sequence
  Description of Artificial Sequence: Synthetic oligonucleotide
  Target: LAMA2; (+) strand; PAM type: YTN; PAM sequence: TTC
aactcggaaggggacatggc

SEQ ID NO: 397375 - DNA, 20 bp, Artificial Sequence
  Description of Artificial Sequence: Synthetic oligonucleotide
  Target: LAMA2; (+) strand; PAM type: YTN; PAM sequence: CTC
ggaaggggacatggctccca

SEQ ID NO: 397376 - DNA, 20 bp, Artificial Sequence
  Description of Artificial Sequence: Synthetic oligonucleotide
  Target: LAMA2; (+) strand; PAM type: YTN; PAM sequence: CTC
ccacttgttcctggctccca

SEQ ID NO: 397377 - DNA, 20 bp, Artificial Sequence
  Description of Artificial Sequence: Synthetic oligonucleotide
  Target: LAMA2; (+) strand; PAM type: YTN; PAM sequence: CTT
gttcctggctcccaccagct

SEQ ID NO: 397378 - DNA, 20 bp, Artificial Sequence
  Description of Artificial Sequence: Synthetic oligonucleotide
  Target: LAMA2; (+) strand; PAM type: YTN; PAM sequence: TTG
ttcctggctcccaccagctc

SEQ ID NO: 397379 - DNA, 20 bp, Artificial Sequence
  Description of Artificial Sequence: Synthetic oligonucleotide
  Target: LAMA2; (+) strand; PAM type: YTN; PAM sequence: TTC
ctggctcccaccagctctgt

SEQ ID NO: 397380 - DNA, 20 bp, Artificial Sequence
  Description of Artificial Sequence: Synthetic oligonucleotide
  Target: LAMA2; (+) strand; PAM type: YTN; PAM sequence: CTG
gctcccaccagctctgtgga

SEQ ID NO: 397381 - DNA, 20 bp, Artificial Sequence
  Description of Artificial Sequence: Synthetic oligonucleotide
  Target: LAMA2; (+) strand; PAM type: YTN; PAM sequence: CTC
ccaccagctctgtggagcac

SEQ ID NO: 397382 - DNA, 20 bp, Artificial Sequence
  Description of Artificial Sequence: Synthetic oligonucleotide
  Target: LAMA2; (+) strand; PAM type: YTN; PAM sequence: CTC
tgtggagcacaaagccagac

SEQ ID NO: 397383 - DNA, 20 bp, Artificial Sequence
  Description of Artificial Sequence: Synthetic oligonucleotide
  Target: LAMA2; (+) strand; PAM type: YTN; PAM sequence: CTG
tggagcacaaagccagacag

SEQ ID NO: 397384 - DNA, 20 bp, Artificial Sequence
  Description of Artificial Sequence: Synthetic oligonucleotide
  Target: LAMA2; (+) strand; PAM type: YTN; PAM sequence: CTG
acactgccattactgagacc

SEQ ID NO: 397385 - DNA, 20 bp, Artificial Sequence
  Description of Artificial Sequence: Synthetic oligonucleotide
  Target: LAMA2; (+) strand; PAM type: YTN; PAM sequence: CTG
ccattactgagaccctcttg

SEQ ID NO: 397386 - DNA, 20 bp, Artificial Sequence
  Description of Artificial Sequence: Synthetic oligonucleotide
  Target: LAMA2; (+) strand; PAM type: YTN; PAM sequence: TTA
ctgagaccctcttgctctca

SEQ ID NO: 397387 - DNA, 20 bp, Artificial Sequence
  Description of Artificial Sequence: Synthetic oligonucleotide
  Target: LAMA2; (+) strand; PAM type: YTN; PAM sequence: CTG
agaccctcttgctctcagaa

SEQ ID NO: 397388 - DNA, 20 bp, Artificial Sequence
  Description of Artificial Sequence: Synthetic oligonucleotide
  Target: LAMA2; (+) strand; PAM type: YTN; PAM sequence: CTC
ttgctctcagaagagttttc

SEQ ID NO: 397389 - DNA, 20 bp, Artificial Sequence
  Description of Artificial Sequence: Synthetic oligonucleotide
  Target: LAMA2; (+) strand; PAM type: YTN; PAM sequence: CTT
gctctcagaagagttttcat

SEQ ID NO: 397390 - DNA, 20 bp, Artificial Sequence
  Description of Artificial Sequence: Synthetic oligonucleotide
  Target: LAMA2; (+) strand; PAM type: YTN; PAM sequence: TTG
ctctcagaagagttttcatc

SEQ ID NO: 397391 - DNA, 20 bp, Artificial Sequence
  Description of Artificial Sequence: Synthetic oligonucleotide
  Target: LAMA2; (+) strand; PAM type: YTN; PAM sequence: CTC
tcagaagagttttcatcgcc

SEQ ID NO: 397392 - DNA, 20 bp, Artificial Sequence
  Description of Artificial Sequence: Synthetic oligonucleotide
  Target: LAMA2; (+) strand; PAM type: YTN; PAM sequence: CTC
agaagagttttcatcgcctg

SEQ ID NO: 397393 - DNA, 20 bp, Artificial Sequence
  Description of Artificial Sequence: Synthetic oligonucleotide
  Target: LAMA2; (+) strand; PAM type: YTN; PAM sequence: TTT
tcatcgcctgctccctctgt

SEQ ID NO: 397394 - DNA, 20 bp, Artificial Sequence
  Description of Artificial Sequence: Synthetic oligonucleotide
  Target: LAMA2; (+) strand; PAM type: YTN; PAM sequence: TTT
catcgcctgctccctctgtt

SEQ ID NO: 397395 - DNA, 20 bp, Artificial Sequence
  Description of Artificial Sequence: Synthetic oligonucleotide
  Target: LAMA2; (+) strand; PAM type: YTN; PAM sequence: TTC
atcgcctgctccctctgttt

SEQ ID NO: 397396 - DNA, 20 bp, Artificial Sequence
  Description of Artificial Sequence: Synthetic oligonucleotide
  Target: LAMA2; (+) strand; PAM type: YTN; PAM sequence: CTG
ctccctctgttttcactgct

SEQ ID NO: 397397 - DNA, 20 bp, Artificial Sequence
  Description of Artificial Sequence: Synthetic oligonucleotide
  Target: LAMA2; (+) strand; PAM type: YTN; PAM sequence: CTC
cctctgttttcactgcttgg

SEQ ID NO: 397398 - DNA, 20 bp, Artificial Sequence
  Description of Artificial Sequence: Synthetic oligonucleotide
  Target: LAMA2; (+) strand; PAM type: YTN; PAM sequence: CTC
tgttttcactgcttggtgac

SEQ ID NO: 397399 - DNA, 20 bp, Artificial Sequence
  Description of Artificial Sequence: Synthetic oligonucleotide
  Target: LAMA2; (+) strand; PAM type: YTN; PAM sequence: CTG
ttttcactgcttggtgactg

SEQ ID NO: 397400 - DNA, 20 bp, Artificial Sequence
  Description of Artificial Sequence: Synthetic oligonucleotide
  Target: LAMA2; (+) strand; PAM type: YTN; PAM sequence: TTT
tcactgcttggtgactgtgg

SEQ ID NO: 397401 - DNA, 20 bp, Artificial Sequence
  Description of Artificial Sequence: Synthetic oligonucleotide
  Target: LAMA2; (+) strand; PAM type: YTN; PAM sequence: TTT
cactgcttggtgactgtggt

SEQ ID NO: 397402 - DNA, 20 bp, Artificial Sequence
  Description of Artificial Sequence: Synthetic oligonucleotide
  Target: LAMA2; (+) strand; PAM type: YTN; PAM sequence: TTC
actgcttggtgactgtggtg

SEQ ID NO: 397403 - DNA, 20 bp, Artificial Sequence
  Description of Artificial Sequence: Synthetic oligonucleotide
  Target: LAMA2; (+) strand; PAM type: YTN; PAM sequence: CTG
cttggtgactgtggtgtttt

SEQ ID NO: 397404 - DNA, 20 bp, Artificial Sequence
  Description of Artificial Sequence: Synthetic oligonucleotide
  Target: LAMA2; (+) strand; PAM type: YTN; PAM sequence: CTT
ggtgactgtggtgttttgtt

SEQ ID NO: 397405 - DNA, 20 bp, Artificial Sequence
  Description of Artificial Sequence: Synthetic oligonucleotide
  Target: LAMA2; (+) strand; PAM type: YTN; PAM sequence: TTG
gtgactgtggtgttttgttt

SEQ ID NO: 397406 - DNA, 20 bp, Artificial Sequence
  Description of Artificial Sequence: Synthetic oligonucleotide
  Target: LAMA2; (+) strand; PAM type: YTN; PAM sequence: CTG
tggtgttttgttttgttcct

SEQ ID NO: 397407 - DNA, 20 bp, Artificial Sequence
  Description of Artificial Sequence: Synthetic oligonucleotide
  Target: LAMA2; (+) strand; PAM type: YTN; PAM sequence: TTT
tgttttgttcctatttcctt

SEQ ID NO: 397408 - DNA, 20 bp, Artificial Sequence
  Description of Artificial Sequence: Synthetic oligonucleotide
  Target: LAMA2; (+) strand; PAM type: YTN; PAM sequence: TTT
gttttgttcctatttccttt

SEQ ID NO: 397409 - DNA, 20 bp, Artificial Sequence
  Description of Artificial Sequence: Synthetic oligonucleotide
  Target: LAMA2; (+) strand; PAM type: YTN; PAM sequence: TTG
ttttgttcctatttcctttt

SEQ ID NO: 397410 - DNA, 20 bp, Artificial Sequence
  Description of Artificial Sequence: Synthetic oligonucleotide
  Target: LAMA2; (+) strand; PAM type: YTN; PAM sequence: TTT
tgttcctatttccttttctc

SEQ ID NO: 397411 - DNA, 20 bp, Artificial Sequence
  Description of Artificial Sequence: Synthetic oligonucleotide
  Target: LAMA2; (+) strand; PAM type: YTN; PAM sequence: TTT
gttcctatttccttttctca

SEQ ID NO: 397412 - DNA, 20 bp, Artificial Sequence
  Description of Artificial Sequence: Synthetic oligonucleotide
  Target: LAMA2; (+) strand; PAM type: YTN; PAM sequence: TTG
ttcctatttccttttctcag

SEQ ID NO: 397413 - DNA, 20 bp, Artificial Sequence
  Description of Artificial Sequence: Synthetic oligonucleotide
  Target: LAMA2; (+) strand; PAM type: YTN; PAM sequence: TTC
ctatttccttttctcagaaa

SEQ ID NO: 397414 - DNA, 20 bp, Artificial Sequence
  Description of Artificial Sequence: Synthetic oligonucleotide
  Target: LAMA2; (+) strand; PAM type: YTN; PAM sequence: CTA
tttccttttctcagaaaaga

SEQ ID NO: 397415 - DNA, 20 bp, Artificial Sequence
  Description of Artificial Sequence: Synthetic oligonucleotide
  Target: LAMA2; (+) strand; PAM type: YTN; PAM sequence: TTT
ccttttctcagaaaagaaag

SEQ ID NO: 397416 - DNA, 20 bp, Artificial Sequence
  Description of Artificial Sequence: Synthetic oligonucleotide
  Target: LAMA2; (+) strand; PAM type: YTN; PAM sequence: TTC
cttttctcagaaaagaaagt

SEQ ID NO: 397417 - DNA, 20 bp, Artificial Sequence
  Description of Artificial Sequence: Synthetic oligonucleotide
  Target: LAMA2; (+) strand; PAM type: YTN; PAM sequence: CTT
ttctcagaaaagaaagtctt

SEQ ID NO: 397418 - DNA, 20 bp, Artificial Sequence
  Description of Artificial Sequence: Synthetic oligonucleotide
  Target: LAMA2; (+) strand; PAM type: YTN; PAM sequence: TTT
tctcagaaaagaaagtcttt

SEQ ID NO: 397419 - DNA, 20 bp, Artificial Sequence
  Description of Artificial Sequence: Synthetic oligonucleotide
  Target: LAMA2; (+) strand; PAM type: YTN; PAM sequence: TTT
ctcagaaaagaaagtcttta

SEQ ID NO: 397420 - DNA, 20 bp, Artificial Sequence
  Description of Artificial Sequence: Synthetic oligonucleotide
  Target: LAMA2; (+) strand; PAM type: YTN; PAM sequence: TTC
tcagaaaagaaagtctttag

SEQ ID NO: 397421 - DNA, 20 bp, Artificial Sequence
  Description of Artificial Sequence: Synthetic oligonucleotide
  Target: LAMA2; (+) strand; PAM type: YTN; PAM sequence: CTC
agaaaagaaagtctttagaa

SEQ ID NO: 397422 - DNA, 20 bp, Artificial Sequence
  Description of Artificial Sequence: Synthetic oligonucleotide
  Target: LAMA2; (+) strand; PAM type: YTN; PAM sequence: CTT
tagaattaaaatttaagctg

SEQ ID NO: 397423 - DNA, 20 bp, Artificial Sequence
  Description of Artificial Sequence: Synthetic oligonucleotide
  Target: LAMA2; (+) strand; PAM type: YTN; PAM sequence: TTT
agaattaaaatttaagctga

SEQ ID NO: 397424 - DNA, 20 bp, Artificial Sequence
  Description of Artificial Sequence: Synthetic oligonucleotide
  Target: LAMA2; (+) strand; PAM type: YTN; PAM sequence: TTA
gaattaaaatttaagctgac

SEQ ID NO: 397425 - DNA, 20 bp, Artificial Sequence
  Description of Artificial Sequence: Synthetic oligonucleotide
  Target: LAMA2; (+) strand; PAM type: YTN; PAM sequence: TTA
aaatttaagctgacaataga

SEQ ID NO: 397426 - DNA, 20 bp, Artificial Sequence
  Description of Artificial Sequence: Synthetic oligonucleotide
  Target: LAMA2; (+) strand; PAM type: YTN; PAM sequence: TTT
aagctgacaatagatcccct

SEQ ID NO: 397427 - DNA, 20 bp, Artificial Sequence
  Description of Artificial Sequence: Synthetic oligonucleotide
  Target: LAMA2; (+) strand; PAM type: YTN; PAM sequence: TTA
agctgacaatagatcccctc

SEQ ID NO: 397428 - DNA, 20 bp, Artificial Sequence
  Description of Artificial Sequence: Synthetic oligonucleotide
  Target: LAMA2; (+) strand; PAM type: YTN; PAM sequence: CTG
acaatagatcccctctcccc

SEQ ID NO: 397429 - DNA, 20 bp, Artificial Sequence
  Description of Artificial Sequence: Synthetic oligonucleotide
  Target: LAMA2; (+) strand; PAM type: YTN; PAM sequence: CTC
tccccagggagcagaaatat

SEQ ID NO: 397430 - DNA, 20 bp, Artificial Sequence
  Description of Artificial Sequence: Synthetic oligonucleotide
  Target: LAMA2; (+) strand; PAM type: YTN; PAM sequence: CTC
cccagggagcagaaatatgg

SEQ ID NO: 397431 - DNA, 20 bp, Artificial Sequence
  Description of Artificial Sequence: Synthetic oligonucleotide
  Target: LAMA2; (+) strand; PAM type: YTN; PAM sequence: CTA
aaggtcttgagtgtttcggt

SEQ ID NO: 397432 - DNA, 20 bp, Artificial Sequence
  Description of Artificial Sequence: Synthetic oligonucleotide
  Target: LAMA2; (+) strand; PAM type: YTN; PAM sequence: CTT
gagtgtttcggtctttcact

SEQ ID NO: 397433 - DNA, 20 bp, Artificial Sequence
  Description of Artificial Sequence: Synthetic oligonucleotide
  Target: LAMA2; (+) strand; PAM type: YTN; PAM sequence: TTG
agtgtttcggtctttcacta

SEQ ID NO: 397434 - DNA, 20 bp, Artificial Sequence
  Description of Artificial Sequence: Synthetic oligonucleotide
  Target: LAMA2; (+) strand; PAM type: YTN; PAM sequence: TTT
cggtctttcactattttata

SEQ ID NO: 397435 - DNA, 20 bp, Artificial Sequence
  Description of Artificial Sequence: Synthetic oligonucleotide
  Target: LAMA2; (+) strand; PAM type: YTN; PAM sequence: TTC
ggtctttcactattttatac

SEQ ID NO: 397436 - DNA, 20 bp, Artificial Sequence
  Description of Artificial Sequence: Synthetic oligonucleotide
  Target: LAMA2; (+) strand; PAM type: YTN; PAM sequence: CTT
tcactattttatactcaata

SEQ ID NO: 397437 - DNA, 20 bp, Artificial Sequence
  Description of Artificial Sequence: Synthetic oligonucleotide
  Target: LAMA2; (+) strand; PAM type: YTN; PAM sequence: TTT
cactattttatactcaatat

SEQ ID NO: 397438 - DNA, 20 bp, Artificial Sequence
  Description of Artificial Sequence: Synthetic oligonucleotide
  Target: LAMA2; (+) strand; PAM type: YTN; PAM sequence: TTC
actattttatactcaatatt

SEQ ID NO: 397439 - DNA, 20 bp, Artificial Sequence
  Description of Artificial Sequence: Synthetic oligonucleotide
  Target: LAMA2; (+) strand; PAM type: YTN; PAM sequence: CTA
ttttatactcaatattccat

SEQ ID NO: 397440 - DNA, 20 bp, Artificial Sequence
  Description of Artificial Sequence: Synthetic oligonucleotide
  Target: LAMA2; (+) strand; PAM type: YTN; PAM sequence: TTT
tatactcaatattccatgat

SEQ ID NO: 397441 - DNA, 20 bp, Artificial Sequence
  Description of Artificial Sequence: Synthetic oligonucleotide
  Target: LAMA2; (+) strand; PAM type: YTN; PAM sequence: TTT
atactcaatattccatgatt

SEQ ID NO: 397442 - DNA, 20 bp, Artificial Sequence
  Description of Artificial Sequence: Synthetic oligonucleotide
  Target: LAMA2; (+) strand; PAM type: YTN; PAM sequence: TTA
tactcaatattccatgattt

SEQ ID NO: 397443 - DNA, 20 bp, Artificial Sequence
  Description of Artificial Sequence: Synthetic oligonucleotide
  Target: LAMA2; (+) strand; PAM type: YTN; PAM sequence: CTC
aatattccatgatttttatc

SEQ ID NO: 397444 - DNA, 20 bp, Artificial Sequence
  Description of Artificial Sequence: Synthetic oligonucleotide
  Target: LAMA2; (+) strand; PAM type: YTN; PAM sequence: TTC
catgatttttatctagatat

SEQ ID NO: 397445 - DNA, 20 bp, Artificial Sequence
  Description of Artificial Sequence: Synthetic oligonucleotide
  Target: LAMA2; (+) strand; PAM type: YTN; PAM sequence: TTT
ttatctagatatgcctggtg

SEQ ID NO: 397446 - DNA, 20 bp, Artificial Sequence
  Description of Artificial Sequence: Synthetic oligonucleotide
  Target: LAMA2; (+) strand; PAM type: YTN; PAM sequence: TTT
tatctagatatgcctggtgg

SEQ ID NO: 397447 - DNA, 20 bp, Artificial Sequence
  Description of Artificial Sequence: Synthetic oligonucleotide
  Target: LAMA2; (+) strand; PAM type: YTN; PAM sequence: TTT
atctagatatgcctggtgga

SEQ ID NO: 397448 - DNA, 20 bp, Artificial Sequence
  Description of Artificial Sequence: Synthetic oligonucleotide
  Target: LAMA2; (+) strand; PAM type: YTN; PAM sequence: TTA
tctagatatgcctggtggac

SEQ ID NO: 397449 - DNA, 20 bp, Artificial Sequence
  Description of Artificial Sequence: Synthetic oligonucleotide
  Target: LAMA2; (+) strand; PAM type: YTN; PAM sequence: CTA
gatatgcctggtggacaaca

SEQ ID NO: 397450 - DNA, 20 bp, Artificial Sequence
  Description of Artificial Sequence: Synthetic oligonucleotide
  Target: LAMA2; (+) strand; PAM type: YTN; PAM sequence: CTG
gtggacaacaggtgatcgcc

SEQ ID NO: 397451 - DNA, 20 bp, Artificial Sequence
  Description of Artificial Sequence: Synthetic oligonucleotide
  Target: LAMA2; (+) strand; PAM type: YTN; PAM sequence: TTG
tccctcccatctccaaattc

SEQ ID NO: 397452 - DNA, 20 bp, Artificial Sequence
  Description of Artificial Sequence: Synthetic oligonucleotide
  Target: LAMA2; (+) strand; PAM type: YTN; PAM sequence: CTC
ccatctccaaattctgatgc

SEQ ID NO: 397453 - DNA, 20 bp, Artificial Sequence
  Description of Artificial Sequence: Synthetic oligonucleotide
  Target: LAMA2; (+) strand; PAM type: YTN; PAM sequence: CTC
caaattctgatgctagaaat

SEQ ID NO: 397454 - DNA, 20 bp, Artificial Sequence
  Description of Artificial Sequence: Synthetic oligonucleotide
  Target: LAMA2; (+) strand; PAM type: YTN; PAM sequence: TTC
tgatgctagaaatcaggaat

SEQ ID NO: 397455 - DNA, 20 bp, Artificial Sequence
  Description of Artificial Sequence: Synthetic oligonucleotide
  Target: LAMA2; (+) strand; PAM type: YTN; PAM sequence: CTG
atgctagaaatcaggaatgg

SEQ ID NO: 397456 - DNA, 20 bp, Artificial Sequence
  Description of Artificial Sequence: Synthetic oligonucleotide
  Target: LAMA2; (+) strand; PAM type: YTN; PAM sequence: CTA
gaaatcaggaatggctatga

SEQ ID NO: 397457 - DNA, 20 bp, Artificial Sequence
  Description of Artificial Sequence: Synthetic oligonucleotide
  Target: LAMA2; (+) strand; PAM type: YTN; PAM sequence: CTA
tgatagtccagattttcaga

SEQ ID NO: 397458 - DNA, 20 bp, Artificial Sequence
  Description of Artificial Sequence: Synthetic oligonucleotide
  Target: LAMA2; (+) strand; PAM type: YTN; PAM sequence: TTT
tcagaattgataagatattt

SEQ ID NO: 397459 - DNA, 20 bp, Artificial Sequence
  Description of Artificial Sequence: Synthetic oligonucleotide
  Target: LAMA2; (+) strand; PAM type: YTN; PAM sequence: TTT
cagaattgataagatattta

SEQ ID NO: 397460 - DNA, 20 bp, Artificial Sequence
  Description of Artificial Sequence: Synthetic oligonucleotide
  Target: LAMA2; (+) strand; PAM type: YTN; PAM sequence: TTC
agaattgataagatatttat

SEQ ID NO: 397461 - DNA, 20 bp, Artificial Sequence
  Description of Artificial Sequence: Synthetic oligonucleotide
  Target: LAMA2; (+) strand; PAM type: YTN; PAM sequence: TTG
ataagatatttatattaccc

SEQ ID NO: 397462 - DNA, 20 bp, Artificial Sequence
  Description of Artificial Sequence: Synthetic oligonucleotide
  Target: LAMA2; (+) strand; PAM type: YTN; PAM sequence: TTT
atattaccctaagagatacg

SEQ ID NO: 397463 - DNA, 20 bp, Artificial Sequence
  Description of Artificial Sequence: Synthetic oligonucleotide
  Target: LAMA2; (+) strand; PAM type: YTN; PAM sequence: TTA
tattaccctaagagatacgg

SEQ ID NO: 397464 - DNA, 20 bp, Artificial Sequence
  Description of Artificial Sequence: Synthetic oligonucleotide
  Target: LAMA2; (+) strand; PAM type: YTN; PAM sequence: TTA
ccctaagagatacggaagtt

SEQ ID NO: 397465 - DNA, 20 bp, Artificial Sequence
  Description of Artificial Sequence: Synthetic oligonucleotide
  Target: LAMA2; (+) strand; PAM type: YTN; PAM sequence: CTA
agagatacggaagttgaaca

SEQ ID NO: 397466 - DNA, 20 bp, Artificial Sequence
  Description of Artificial Sequence: Synthetic oligonucleotide
  Target: LAMA2; (+) strand; PAM type: YTN; PAM sequence: TTG
aacagaataaaaaaattcaa

SEQ ID NO: 397467 - DNA, 20 bp, Artificial Sequence
  Description of Artificial Sequence: Synthetic oligonucleotide
  Target: LAMA2; (+) strand; PAM type: YTN; PAM sequence: TTC
aaaataaaagtaaataaaat

SEQ ID NO: 397468 - DNA, 20 bp, Artificial Sequence
  Description of Artificial Sequence: Synthetic oligonucleotide
  Target: LAMA2; (+) strand; PAM type: YTN; PAM sequence: TTA
ctttctttccctgtttagtt

SEQ ID NO: 397469 - DNA, 20 bp, Artificial Sequence
  Description of Artificial Sequence: Synthetic oligonucleotide
  Target: LAMA2; (+) strand; PAM type: YTN; PAM sequence: CTT
tctttccctgtttagtttga

SEQ ID NO: 397470 - DNA, 20 bp, Artificial Sequence
  Description of Artificial Sequence: Synthetic oligonucleotide
  Target: LAMA2; (+) strand; PAM type: YTN; PAM sequence: TTT
ctttccctgtttagtttgag

SEQ ID NO: 397471 - DNA, 20 bp, Artificial Sequence
  Description of Artificial Sequence: Synthetic oligonucleotide
  Target: LAMA2; (+) strand; PAM type: YTN; PAM sequence: TTC
tttccctgtttagtttgaga

SEQ ID NO: 397472 - DNA, 20 bp, Artificial Sequence
  Description of Artificial Sequence: Synthetic oligonucleotide
  Target: LAMA2; (+) strand; PAM type: YTN; PAM sequence: CTT
tccctgtttagtttgagatc

SEQ ID NO: 397473 - DNA, 20 bp, Artificial Sequence
  Description of Artificial Sequence: Synthetic oligonucleotide
  Target: LAMA2; (+) strand; PAM type: YTN; PAM sequence: TTT
ccctgtttagtttgagatca

SEQ ID NO: 397474 - DNA, 20 bp, Artificial Sequence
  Description of Artificial Sequence: Synthetic oligonucleotide
  Target: LAMA2; (+) strand; PAM type: YTN; PAM sequence: TTC
cctgtttagtttgagatcat

SEQ ID NO: 397475 - DNA, 20 bp, Artificial Sequence
  Description of Artificial Sequence: Synthetic oligonucleotide
  Target: LAMA2; (+) strand; PAM type: YTN; PAM sequence: CTG
tttagtttgagatcatgtgt

SEQ ID NO: 397476 - DNA, 20 bp, Artificial Sequence
  Description of Artificial Sequence: Synthetic oligonucleotide
  Target: LAMA2; (+) strand; PAM type: YTN; PAM sequence: TTT
agtttgagatcatgtgtaaa

SEQ ID NO: 397477 - DNA, 20 bp, Artificial Sequence
  Description of Artificial Sequence: Synthetic oligonucleotide
  Target: LAMA2; (+) strand; PAM type: YTN; PAM sequence: TTA
gtttgagatcatgtgtaaat

SEQ ID NO: 397478 - DNA, 20 bp, Artificial Sequence
  Description of Artificial Sequence: Synthetic oligonucleotide
  Target: LAMA2; (+) strand; PAM type: YTN; PAM sequence: TTT
gagatcatgtgtaaatatca

SEQ ID NO: 397479 - DNA, 20 bp, Artificial Sequence
  Description of Artificial Sequence: Synthetic oligonucleotide
  Target: LAMA2; (+) strand; PAM type: YTN; PAM sequence: TTG
agatcatgtgtaaatatcag

SEQ ID NO: 397480 - DNA, 20 bp, Artificial Sequence
  Description of Artificial Sequence: Synthetic oligonucleotide
  Target: LAMA2; (+) strand; PAM type: YTN; PAM sequence: TTT
ttttttattgatcagaatta

SEQ ID NO: 397481 - DNA, 20 bp, Artificial Sequence
  Description of Artificial Sequence: Synthetic oligonucleotide
  Target: LAMA2; (+) strand; PAM type: YTN; PAM sequence: TTT
tttttattgatcagaattag

SEQ ID NO: 397482 - DNA, 20 bp, Artificial Sequence
  Description of Artificial Sequence: Synthetic oligonucleotide
  Target: LAMA2; (+) strand; PAM type: YTN; PAM sequence: TTT
ttttattgatcagaattagg

SEQ ID NO: 397483 - DNA, 20 bp, Artificial Sequence
  Description of Artificial Sequence: Synthetic oligonucleotide
  Target: LAMA2; (+) strand; PAM type: YTN; PAM sequence: TTT
tttattgatcagaattaggt

SEQ ID NO: 397484 - DNA, 20 bp, Artificial Sequence
  Description of Artificial Sequence: Synthetic oligonucleotide
  Target: LAMA2; (+) strand; PAM type: YTN; PAM sequence: TTT
ttattgatcagaattaggtt

SEQ ID NO: 397485 - DNA, 20 bp, Artificial Sequence
  Description of Artificial Sequence: Synthetic oligonucleotide
  Target: LAMA2; (+) strand; PAM type: YTN; PAM sequence: TTT
tattgatcagaattaggttc

SEQ ID NO: 397486 - DNA, 20 bp, Artificial Sequence
  Description of Artificial Sequence: Synthetic oligonucleotide
  Target: LAMA2; (+) strand; PAM type: YTN; PAM sequence: TTT
attgatcagaattaggttca

SEQ ID NO: 397487 - DNA, 20 bp, Artificial Sequence
  Description of Artificial Sequence: Synthetic oligonucleotide
  Target: LAMA2; (+) strand; PAM type: YTN; PAM sequence: TTA
ttgatcagaattaggttcaa

SEQ ID NO: 397488 - DNA, 20 bp, Artificial Sequence
  Description of Artificial Sequence: Synthetic oligonucleotide
  Target: LAMA2; (+) strand; PAM type: YTN; PAM sequence: TTG
atcagaattaggttcaagtt

SEQ ID NO: 397489 - DNA, 20 bp, Artificial Sequence
  Description of Artificial Sequence: Synthetic oligonucleotide
  Target: LAMA2; (+) strand; PAM type: YTN; PAM sequence: TTA
ggttcaagttgtgttctgga

SEQ ID NO: 397490 - DNA, 20 bp, Artificial Sequence
  Description of Artificial Sequence: Synthetic oligonucleotide
  Target: LAMA2; (+) strand; PAM type: YTN; PAM sequence: TTC
aagttgtgttctggaaactt

SEQ ID NO: 397491 - DNA, 20 bp, Artificial Sequence
  Description of Artificial Sequence: Synthetic oligonucleotide
  Target: LAMA2; (+) strand; PAM type: YTN; PAM sequence: TTG
tgttctggaaacttctaatt

SEQ ID NO: 397492 - DNA, 20 bp, Artificial Sequence
  Description of Artificial Sequence: Synthetic oligonucleotide
  Target: LAMA2; (+) strand; PAM type: YTN; PAM sequence: TTC
tggaaacttctaattaaatt

SEQ ID NO: 397493 - DNA, 20 bp, Artificial Sequence
  Description of Artificial Sequence: Synthetic oligonucleotide
  Target: LAMA2; (+) strand; PAM type: YTN; PAM sequence: CTG
gaaacttctaattaaattga

SEQ ID NO: 397494 - DNA, 20 bp, Artificial Sequence
  Description of Artificial Sequence: Synthetic oligonucleotide
  Target: LAMA2; (+) strand; PAM type: YTN; PAM sequence: CTT
ctaattaaattgagggaaga

SEQ ID NO: 397495 - DNA, 20 bp, Artificial Sequence
  Description of Artificial Sequence: Synthetic oligonucleotide
  Target: LAMA2; (+) strand; PAM type: YTN; PAM sequence: TTC
taattaaattgagggaagat

SEQ ID NO: 397496 - DNA, 20 bp, Artificial Sequence
  Description of Artificial Sequence: Synthetic oligonucleotide
  Target: LAMA2; (+) strand; PAM type: YTN; PAM sequence: CTA
attaaattgagggaagatgc

SEQ ID NO: 397497 - DNA, 20 bp, Artificial Sequence
  Description of Artificial Sequence: Synthetic oligonucleotide
  Target: LAMA2; (+) strand; PAM type: YTN; PAM sequence: TTA
aattgagggaagatgctagc

SEQ ID NO: 397498 - DNA, 20 bp, Artificial Sequence
  Description of Artificial Sequence: Synthetic oligonucleotide
  Target: LAMA2; (+) strand; PAM type: YTN; PAM sequence: TTG
agggaagatgctagcaggcc

SEQ ID NO: 397499 - DNA, 20 bp, Artificial Sequence
  Description of Artificial Sequence: Synthetic oligonucleotide
  Target: LAMA2; (+) strand; PAM type: YTN; PAM sequence: CTA
gcaggccagaatttgggaat

SEQ ID NO: 397500 - DNA, 20 bp, Artificial Sequence
  Description of Artificial Sequence: Synthetic oligonucleotide
  Target: LAMA2; (+) strand; PAM type: YTN; PAM sequence: TTT
gggaattagatgatctggct

SEQ ID NO: 397501 - DNA, 20 bp, Artificial Sequence
  Description of Artificial Sequence: Synthetic oligonucleotide
  Target: LAMA2; (+) strand; PAM type: YTN; PAM sequence: TTG
ggaattagatgatctggctc

SEQ ID NO: 397502 - DNA, 20 bp, Artificial Sequence
  Description of Artificial Sequence: Synthetic oligonucleotide
  Target: LAMA2; (+) strand; PAM type: YTN; PAM sequence: TTA
gatgatctggctccaaattc

SEQ ID NO: 397503 - DNA, 20 bp, Artificial Sequence
  Description of Artificial Sequence: Synthetic oligonucleotide
  Target: LAMA2; (+) strand; PAM type: YTN; PAM sequence: CTG
gctccaaattcaatacatat

SEQ ID NO: 397504 - DNA, 20 bp, Artificial Sequence
  Description of Artificial Sequence: Synthetic oligonucleotide
  Target: LAMA2; (+) strand; PAM type: YTN; PAM sequence: CTC
caaattcaatacatattgtc

SEQ ID NO: 397505 - DNA, 20 bp, Artificial Sequence
  Description of Artificial Sequence: Synthetic oligonucleotide
  Target: LAMA2; (+) strand; PAM type: YTN; PAM sequence: TTC
aatacatattgtctatgtaa

SEQ ID NO: 397506 - DNA, 20 bp, Artificial Sequence
  Description of Artificial Sequence: Synthetic oligonucleotide
  Target: LAMA2; (+) strand; PAM type: YTN; PAM sequence: TTG
tctatgtaattagctgtgtc

SEQ ID NO: 397507 - DNA, 20 bp, Artificial Sequence
  Description of Artificial Sequence: Synthetic oligonucleotide
  Target: LAMA2; (+) strand; PAM type: YTN; PAM sequence: CTA
tgtaattagctgtgtcacct

SEQ ID NO: 397508 - DNA, 20 bp, Artificial Sequence
  Description of Artificial Sequence: Synthetic oligonucleotide
  Target: LAMA2; (+) strand; PAM type: YTN; PAM sequence: TTA
gctgtgtcacctaatgtacc

SEQ ID NO: 397509 - DNA, 20 bp, Artificial Sequence
  Description of Artificial Sequence: Synthetic oligonucleotide
  Target: LAMA2; (+) strand; PAM type: YTN; PAM sequence: CTG
tgtcacctaatgtaccaata

SEQ ID NO: 397510 - DNA, 20 bp, Artificial Sequence
  Description of Artificial Sequence: Synthetic oligonucleotide
  Target: LAMA2; (+) strand; PAM type: YTN; PAM sequence: CTA
atgtaccaataatgcctttt

SEQ ID NO: 397511 - DNA, 20 bp, Artificial Sequence
  Description of Artificial Sequence: Synthetic oligonucleotide
  Target: LAMA2; (+) strand; PAM type: YTN; PAM sequence: CTT
ttcaagaaacactgtgcagt

SEQ ID NO: 397512 - DNA, 20 bp, Artificial Sequence
  Description of Artificial Sequence: Synthetic oligonucleotide
  Target: LAMA2; (+) strand; PAM type: YTN; PAM sequence: TTT
tcaagaaacactgtgcagtc

SEQ ID NO: 397513 - DNA, 20 bp, Artificial Sequence
  Description of Artificial Sequence: Synthetic oligonucleotide
  Target: LAMA2; (+) strand; PAM type: YTN; PAM sequence: TTT
caagaaacactgtgcagtct

SEQ ID NO: 397514 - DNA, 20 bp, Artificial Sequence
  Description of Artificial Sequence: Synthetic oligonucleotide
  Target: LAMA2; (+) strand; PAM type: YTN; PAM sequence: TTC
aagaaacactgtgcagtctg

SEQ ID NO: 397515 - DNA, 20 bp, Artificial Sequence
  Description of Artificial Sequence: Synthetic oligonucleotide
  Target: LAMA2; (+) strand; PAM type: YTN; PAM sequence: CTG
tgcagtctgttctgattcct

SEQ ID NO: 397516 - DNA, 20 bp, Artificial Sequence
  Description of Artificial Sequence: Synthetic oligonucleotide
  Target: LAMA2; (+) strand; PAM type: YTN; PAM sequence: CTG
ttctgattcctccattggct

SEQ ID NO: 397517 - DNA, 20 bp, Artificial Sequence
  Description of Artificial Sequence: Synthetic oligonucleotide
  Target: LAMA2; (+) strand; PAM type: YTN; PAM sequence: TTC
tgattcctccattggcttaa

SEQ ID NO: 397518 - DNA, 20 bp, Artificial Sequence
  Description of Artificial Sequence: Synthetic oligonucleotide
  Target: LAMA2; (+) strand; PAM type: YTN; PAM sequence: CTG
attcctccattggcttaatt

SEQ ID NO: 397519 - DNA, 20 bp, Artificial Sequence
  Description of Artificial Sequence: Synthetic oligonucleotide
  Target: LAMA2; (+) strand; PAM type: YTN; PAM sequence: TTC
ctccattggcttaattccta

SEQ ID NO: 397520 - DNA, 20 bp, Artificial Sequence
  Description of Artificial Sequence: Synthetic oligonucleotide
  Target: LAMA2; (+) strand; PAM type: YTN; PAM sequence: CTC
cattggcttaattcctataa

SEQ ID NO: 397521 - DNA, 20 bp, Artificial Sequence
  Description of Artificial Sequence: Synthetic oligonucleotide
  Target: LAMA2; (+) strand; PAM type: YTN; PAM sequence: TTG
gcttaattcctataataaat

SEQ ID NO: 397522 - DNA, 20 bp, Artificial Sequence
  Description of Artificial Sequence: Synthetic oligonucleotide
  Target: LAMA2; (+) strand; PAM type: YTN; PAM sequence: CTT
aattcctataataaatatag

SEQ ID NO: 397523 - DNA, 20 bp, Artificial Sequence
  Description of Artificial Sequence: Synthetic oligonucleotide
  Target: LAMA2; (+) strand; PAM type: YTN; PAM sequence: TTA
attcctataataaatatagt

SEQ ID NO: 397524 - DNA, 20 bp, Artificial Sequence
  Description of Artificial Sequence: Synthetic oligonucleotide
  Target: LAMA2; (+) strand; PAM type: YTN; PAM sequence: TTC
ctataataaatatagtttcc

SEQ ID NO: 397525 - DNA, 20 bp, Artificial Sequence
  Description of Artificial Sequence: Synthetic oligonucleotide
  Target: LAMA2; (+) strand; PAM type: YTN; PAM sequence: CTA
taataaatatagtttccaaa

SEQ ID NO: 397526 - DNA, 20 bp, Artificial Sequence
  Description of Artificial Sequence: Synthetic oligonucleotide
  Target: LAMA2; (+) strand; PAM type: YTN; PAM sequence: TTT
ccaaagtttataacttaatt

SEQ ID NO: 397527 - DNA, 20 bp, Artificial Sequence
  Description of Artificial Sequence: Synthetic oligonucleotide
  Target: LAMA2; (+) strand; PAM type: YTN; PAM sequence: TTC
caaagtttataacttaattt

SEQ ID NO: 397528 - DNA, 20 bp, Artificial Sequence
  Description of Artificial Sequence: Synthetic oligonucleotide
  Target: LAMA2; (+) strand; PAM type: YTN; PAM sequence: TTT
ataacttaattttcagaatt

SEQ ID NO: 397529 - DNA, 20 bp, Artificial Sequence
  Description of Artificial Sequence: Synthetic oligonucleotide
  Target: LAMA2; (+) strand; PAM type: YTN; PAM sequence: TTA
taacttaattttcagaattt

SEQ ID NO: 397530 - DNA, 20 bp, Artificial Sequence
  Description of Artificial Sequence: Synthetic oligonucleotide
  Target: LAMA2; (+) strand; PAM type: YTN; PAM sequence: CTT
aattttcagaatttatttat

SEQ ID NO: 397531 - DNA, 20 bp, Artificial Sequence
  Description of Artificial Sequence: Synthetic oligonucleotide
  Target: LAMA2; (+) strand; PAM type: YTN; PAM sequence: TTA
attttcagaatttatttatt

SEQ ID NO: 397532 - DNA, 20 bp, Artificial Sequence
  Description of Artificial Sequence: Synthetic oligonucleotide
  Target: LAMA2; (+) strand; PAM type: YTN; PAM sequence: TTT
tcagaatttatttattttaa

SEQ ID NO: 397533 - DNA, 20 bp, Artificial Sequence
  Description of Artificial Sequence: Synthetic oligonucleotide
  Target: LAMA2; (+) strand; PAM type: YTN; PAM sequence: TTT
cagaatttatttattttaat

SEQ ID NO: 397534 - DNA, 20 bp, Artificial Sequence
  Description of Artificial Sequence: Synthetic oligonucleotide
  Target: LAMA2; (+) strand; PAM type: YTN; PAM sequence: TTC
agaatttatttattttaatt

SEQ ID NO: 397535 - DNA, 20 bp, Artificial Sequence
  Description of Artificial Sequence: Synthetic oligonucleotide
  Target: LAMA2; (+) strand; PAM type: YTN; PAM sequence: TTT
atttattttaattgacagat

SEQ ID NO: 397536 - DNA, 20 bp, Artificial Sequence
  Description of Artificial Sequence: Synthetic oligonucleotide
  Target: LAMA2; (+) strand; PAM type: YTN; PAM sequence: TTA
tttattttaattgacagata

SEQ ID NO: 397537 - DNA, 20 bp, Artificial Sequence
  Description of Artificial Sequence: Synthetic oligonucleotide
  Target: LAMA2; (+) strand; PAM type: YTN; PAM sequence: TTT
attttaattgacagataaaa

SEQ ID NO: 397538 - DNA, 20 bp, Artificial Sequence
  Description of Artificial Sequence: Synthetic oligonucleotide
  Target: LAMA2; (+) strand; PAM type: YTN; PAM sequence: TTA
ttttaattgacagataaaag

SEQ ID NO: 397539 - DNA, 20 bp, Artificial Sequence
  Description of Artificial Sequence: Synthetic oligonucleotide
  Target: LAMA2; (+) strand; PAM type: YTN; PAM sequence: TTT
taattgacagataaaagtgg

SEQ ID NO: 397540 - DNA, 20 bp, Artificial Sequence
  Description of Artificial Sequence: Synthetic oligonucleotide
  Target: LAMA2; (+) strand; PAM type: YTN; PAM sequence: TTT
aattgacagataaaagtggt

SEQ ID NO: 397541 - DNA, 20 bp, Artificial Sequence
  Description of Artificial Sequence: Synthetic oligonucleotide
  Target: LAMA2; (+) strand; PAM type: YTN; PAM sequence: TTA
attgacagataaaagtggta

SEQ ID NO: 397542 - DNA, 20 bp, Artificial Sequence
  Description of Artificial Sequence: Synthetic oligonucleotide
  Target: LAMA2; (+) strand; PAM type: YTN; PAM sequence: TTG
acagataaaagtggtatata

SEQ ID NO: 397543 - DNA, 20 bp, Artificial Sequence
  Description of Artificial Sequence: Synthetic oligonucleotide
  Target: LAMA2; (+) strand; PAM type: YTN; PAM sequence: TTT
atcatgtacaacatgatgct

SEQ ID NO: 397544 - DNA, 20 bp, Artificial Sequence
  Description of Artificial Sequence: Synthetic oligonucleotide
  Target: LAMA2; (+) strand; PAM type: YTN; PAM sequence: TTA
tcatgtacaacatgatgctt

SEQ ID NO: 397545 - DNA, 20 bp, Artificial Sequence
  Description of Artificial Sequence: Synthetic oligonucleotide
  Target: LAMA2; (+) strand; PAM type: YTN; PAM sequence: CTT
tgaaataagtatacattgtg

SEQ ID NO: 397546 - DNA, 20 bp, Artificial Sequence
  Description of Artificial Sequence: Synthetic oligonucleotide
  Target: LAMA2; (+) strand; PAM type: YTN; PAM sequence: TTT
gaaataagtatacattgtgg

SEQ ID NO: 397547 - DNA, 20 bp, Artificial Sequence
  Description of Artificial Sequence: Synthetic oligonucleotide
  Target: LAMA2; (+) strand; PAM type: YTN; PAM sequence: TTG
aaataagtatacattgtgga

SEQ ID NO: 397548 - DNA, 20 bp, Artificial Sequence
  Description of Artificial Sequence: Synthetic oligonucleotide
  Target: LAMA2; (+) strand; PAM type: YTN; PAM sequence: TTG
tggaatggctaaatcgaggt

SEQ ID NO: 397549 - DNA, 20 bp, Artificial Sequence
  Description of Artificial Sequence: Synthetic oligonucleotide
  Target: LAMA2; (+) strand; PAM type: YTN; PAM sequence: CTA
aatcgaggtatttaaaaata

SEQ ID NO: 397550 - DNA, 20 bp, Artificial Sequence
  Description of Artificial Sequence: Synthetic oligonucleotide
  Target: LAMA2; (+) strand; PAM type: YTN; PAM sequence: TTT
aaaaatatgcactacctcac

SEQ ID NO: 397551 - DNA, 20 bp, Artificial Sequence
  Description of Artificial Sequence: Synthetic oligonucleotide
  Target: LAMA2; (+) strand; PAM type: YTN; PAM sequence: TTA
aaaatatgcactacctcaca

SEQ ID NO: 397552 - DNA, 20 bp, Artificial Sequence
  Description of Artificial Sequence: Synthetic oligonucleotide
  Target: LAMA2; (+) strand; PAM type: YTN; PAM sequence: CTA
cctcacatactggtcatttt

SEQ ID NO: 397553 - DNA, 20 bp, Artificial Sequence
  Description of Artificial Sequence: Synthetic oligonucleotide
  Target: LAMA2; (+) strand; PAM type: YTN; PAM sequence: CTC
acatactggtcatttttctg

SEQ ID NO: 397554 - DNA, 20 bp, Artificial Sequence
  Description of Artificial Sequence: Synthetic oligonucleotide
  Target: LAMA2; (+) strand; PAM type: YTN; PAM sequence: CTG
gtcatttttctgtgttgaga

SEQ ID NO: 397555 - DNA, 20 bp, Artificial Sequence
  Description of Artificial Sequence: Synthetic oligonucleotide
  Target: LAMA2; (+) strand; PAM type: YTN; PAM sequence: TTT
ttctgtgttgagaacactta

SEQ ID NO: 397556 - DNA, 20 bp, Artificial Sequence
  Description of Artificial Sequence: Synthetic oligonucleotide
  Target: LAMA2; (+) strand; PAM type: YTN; PAM sequence: TTT
tctgtgttgagaacacttaa

SEQ ID NO: 397557 - DNA, 20 bp, Artificial Sequence
  Description of Artificial Sequence: Synthetic oligonucleotide
  Target: LAMA2; (+) strand; PAM type: YTN; PAM sequence: TTT
ctgtgttgagaacacttaaa

SEQ ID NO: 397558 - DNA, 20 bp, Artificial Sequence
  Description of Artificial Sequence: Synthetic oligonucleotide
  Target: LAMA2; (+) strand; PAM type: YTN; PAM sequence: TTC
tgtgttgagaacacttaaaa

SEQ ID NO: 397559 - DNA, 20 bp, Artificial Sequence
  Description of Artificial Sequence: Synthetic oligonucleotide
  Target: LAMA2; (+) strand; PAM type: YTN; PAM sequence: CTG
tgttgagaacacttaaaatc

SEQ ID NO: 397560 - DNA, 20 bp, Artificial Sequence
  Description of Artificial Sequence: Synthetic oligonucleotide
  Target: LAMA2; (+) strand; PAM type: YTN; PAM sequence: TTG
agaacacttaaaatctactc

SEQ ID NO: 397561 - DNA, 20 bp, Artificial Sequence
  Description of Artificial Sequence: Synthetic oligonucleotide
  Target: LAMA2; (+) strand; PAM type: YTN; PAM sequence: CTT
aaaatctactctcttagcaa

SEQ ID NO: 397562 - DNA, 20 bp, Artificial Sequence
  Description of Artificial Sequence: Synthetic oligonucleotide
  Target: LAMA2; (+) strand; PAM type: YTN; PAM sequence: TTA
aaatctactctcttagcaaa

SEQ ID NO: 397563 - DNA, 20 bp, Artificial Sequence
  Description of Artificial Sequence: Synthetic oligonucleotide
  Target: LAMA2; (+) strand; PAM type: YTN; PAM sequence: CTA
ctctcttagcaaagccatgc

SEQ ID NO: 397564 - DNA, 20 bp, Artificial Sequence
  Description of Artificial Sequence: Synthetic oligonucleotide
  Target: LAMA2; (+) strand; PAM type: YTN; PAM sequence: CTC
tcttagcaaagccatgctgg

SEQ ID NO: 397565 - DNA, 20 bp, Artificial Sequence
  Description of Artificial Sequence: Synthetic oligonucleotide
  Target: LAMA2; (+) strand; PAM type: YTN; PAM sequence: CTC
ttagcaaagccatgctggct

SEQ ID NO: 397566 - DNA, 20 bp, Artificial Sequence
  Description of Artificial Sequence: Synthetic oligonucleotide
  Target: LAMA2; (+) strand; PAM type: YTN; PAM sequence: CTT
agcaaagccatgctggcttt

SEQ ID NO: 397567 - DNA, 20 bp, Artificial Sequence
  Description of Artificial Sequence: Synthetic oligonucleotide
  Target: LAMA2; (+) strand; PAM type: YTN; PAM sequence: TTA
gcaaagccatgctggcttta

SEQ ID NO: 397568 - DNA, 20 bp, Artificial Sequence
  Description of Artificial Sequence: Synthetic oligonucleotide
  Target: LAMA2; (+) strand; PAM type: YTN; PAM sequence: CTG
gctttagtgatttttttttt

SEQ ID NO: 397569 - DNA, 20 bp, Artificial Sequence
  Description of Artificial Sequence: Synthetic oligonucleotide
  Target: LAMA2; (+) strand; PAM type: YTN; PAM sequence: CTT
tagtgatttttttttttgta

SEQ ID NO: 397570 - DNA, 20 bp, Artificial Sequence
  Description of Artificial Sequence: Synthetic oligonucleotide
  Target: LAMA2; (+) strand; PAM type: YTN; PAM sequence: TTT
agtgatttttttttttgtac

SEQ ID NO: 397571 - DNA, 20 bp, Artificial Sequence
  Description of Artificial Sequence: Synthetic oligonucleotide
  Target: LAMA2; (+) strand; PAM type: YTN; PAM sequence: TTA
gtgatttttttttttgtaca

SEQ ID NO: 397572 - DNA, 20 bp, Artificial Sequence
  Description of Artificial Sequence: Synthetic oligonucleotide
  Target: LAMA2; (+) strand; PAM type: YTN; PAM sequence: TTT
ttttttttgtacatgatact

SEQ ID NO: 397573 - DNA, 20 bp, Artificial Sequence
  Description of Artificial Sequence: Synthetic oligonucleotide
  Target: LAMA2; (+) strand; PAM type: YTN; PAM sequence: TTT
tttttttgtacatgatactc

SEQ ID NO: 397574 - DNA, 20 bp, Artificial Sequence
  Description of Artificial Sequence: Synthetic oligonucleotide
  Target: LAMA2; (+) strand; PAM type: YTN; PAM sequence: TTT
ttttttgtacatgatactct

SEQ ID NO: 397575 - DNA, 20 bp, Artificial Sequence
  Description of Artificial Sequence: Synthetic oligonucleotide
  Target: LAMA2; (+) strand; PAM type: YTN; PAM sequence: TTT
tttttgtacatgatactctc

SEQ ID NO: 397576 - DNA, 20 bp, Artificial Sequence
  Description of Artificial Sequence: Synthetic oligonucleotide
  Target: LAMA2; (+) strand; PAM type: YTN; PAM sequence: TTT
ttttgtacatgatactctca

SEQ ID NO: 397577 - DNA, 20 bp, Artificial Sequence
  Description of Artificial Sequence: Synthetic oligonucleotide
  Target: LAMA2; (+) strand; PAM type: YTN; PAM sequence: TTT
tttgtacatgatactctcat

SEQ ID NO: 397578 - DNA, 20 bp, Artificial Sequence
  Description of Artificial Sequence: Synthetic oligonucleotide
  Target: LAMA2; (+) strand; PAM type: YTN; PAM sequence: TTT
ttgtacatgatactctcatt

SEQ ID NO: 397579 - DNA, 20 bp, Artificial Sequence
  Description of Artificial Sequence: Synthetic oligonucleotide
  Target: LAMA2; (+) strand; PAM type: YTN; PAM sequence: TTT
tgtacatgatactctcattt

SEQ ID NO: 397580 - DNA, 20 bp, Artificial Sequence
  Description of Artificial Sequence: Synthetic oligonucleotide
  Target: LAMA2; (+) strand; PAM type: YTN; PAM sequence: TTT
gtacatgatactctcatttg

SEQ ID NO: 397581 - DNA, 20 bp, Artificial Sequence
  Description of Artificial Sequence: Synthetic oligonucleotide
  Target: LAMA2; (+) strand; PAM type: YTN; PAM sequence: TTG
tacatgatactctcatttgg

SEQ ID NO: 397582 - DNA, 20 bp, Artificial Sequence
  Description of Artificial Sequence: Synthetic oligonucleotide
  Target: LAMA2; (+) strand; PAM type: YTN; PAM sequence: CTC
tcatttgggtcaataatttt

SEQ ID NO: 397583 - DNA, 20 bp, Artificial Sequence
  Description of Artificial Sequence: Synthetic oligonucleotide
  Target: LAMA2; (+) strand; PAM type: YTN; PAM sequence: CTC
atttgggtcaataatttttt

SEQ ID NO: 397584 - DNA, 20 bp, Artificial Sequence
  Description of Artificial Sequence: Synthetic oligonucleotide
  Target: LAMA2; (+) strand; PAM type: YTN; PAM sequence: TTT
gggtcaataatttttttaaa

SEQ ID NO: 397585 - DNA, 20 bp, Artificial Sequence
  Description of Artificial Sequence: Synthetic oligonucleotide
  Target: LAMA2; (+) strand; PAM type: YTN; PAM sequence: TTG
ggtcaataatttttttaaaa

SEQ ID NO: 397586 - DNA, 20 bp, Artificial Sequence
  Description of Artificial Sequence: Synthetic oligonucleotide
  Target: LAMA2; (+) strand; PAM type: YTN; PAM sequence: TTT
ttttaaaagtctattggaag

SEQ ID NO: 397587 - DNA, 20 bp, Artificial Sequence
  Description of Artificial Sequence: Synthetic oligonucleotide
  Target: LAMA2; (+) strand; PAM type: YTN; PAM sequence: TTT
tttaaaagtctattggaagc

SEQ ID NO: 397588 - DNA, 20 bp, Artificial Sequence
  Description of Artificial Sequence: Synthetic oligonucleotide
  Target: LAMA2; (+) strand; PAM type: YTN; PAM sequence: TTT
ttaaaagtctattggaagca

SEQ ID NO: 397589 - DNA, 20 bp, Artificial Sequence
  Description of Artificial Sequence: Synthetic oligonucleotide
  Target: LAMA2; (+) strand; PAM type: YTN; PAM sequence: TTT
taaaagtctattggaagcag

SEQ ID NO: 397590 - DNA, 20 bp, Artificial Sequence
  Description of Artificial Sequence: Synthetic oligonucleotide
  Target: LAMA2; (+) strand; PAM type: YTN; PAM sequence: TTT
aaaagtctattggaagcaga

SEQ ID NO: 397591 - DNA, 20 bp, Artificial Sequence
  Description of Artificial Sequence: Synthetic oligonucleotide
  Target: LAMA2; (+) strand; PAM type: YTN; PAM sequence: TTA
aaagtctattggaagcagag

SEQ ID NO: 397592 - DNA, 20 bp, Artificial Sequence
  Description of Artificial Sequence: Synthetic oligonucleotide
  Target: LAMA2; (+) strand; PAM type: YTN; PAM sequence: CTA
ttggaagcagagaaataaat

SEQ ID NO: 397593 - DNA, 20 bp, Artificial Sequence
  Description of Artificial Sequence: Synthetic oligonucleotide
  Target: LAMA2; (+) strand; PAM type: YTN; PAM sequence: TTG
gaagcagagaaataaatttt

SEQ ID NO: 397594 - DNA, 20 bp, Artificial Sequence
  Description of Artificial Sequence: Synthetic oligonucleotide
  Target: LAMA2; (+) strand; PAM type: YTN; PAM sequence: TTT
tttgacccagccttagatgt

SEQ ID NO: 397595 - DNA, 20 bp, Artificial Sequence
  Description of Artificial Sequence: Synthetic oligonucleotide
  Target: LAMA2; (+) strand; PAM type: YTN; PAM sequence: TTT
ttgacccagccttagatgta

SEQ ID NO: 397596 - DNA, 20 bp, Artificial Sequence
  Description of Artificial Sequence: Synthetic oligonucleotide
  Target: LAMA2; (+) strand; PAM type: YTN; PAM sequence: TTT
tgacccagccttagatgtat

SEQ ID NO: 397597 - DNA, 20 bp, Artificial Sequence
  Description of Artificial Sequence: Synthetic oligonucleotide
  Target: LAMA2; (+) strand; PAM type: YTN; PAM sequence: TTT
gacccagccttagatgtatt

SEQ ID NO: 397598 - DNA, 20 bp, Artificial Sequence
  Description of Artificial Sequence: Synthetic oligonucleotide
  Target: LAMA2; (+) strand; PAM type: YTN; PAM sequence: TTG
acccagccttagatgtattt

SEQ ID NO: 397599 - DNA, 20 bp, Artificial Sequence
  Description of Artificial Sequence: Synthetic oligonucleotide
  Target: LAMA2; (+) strand; PAM type: YTN; PAM sequence: CTT
agatgtatttaaaagttcag

SEQ ID NO: 397600 - DNA, 20 bp, Artificial Sequence
  Description of Artificial Sequence: Synthetic oligonucleotide
  Target: LAMA2; (+) strand; PAM type: YTN; PAM sequence: TTA
gatgtatttaaaagttcagg

SEQ ID NO: 397601 - DNA, 20 bp, Artificial Sequence
  Description of Artificial Sequence: Synthetic oligonucleotide
  Target: LAMA2; (+) strand; PAM type: YTN; PAM sequence: TTT
aaaagttcagggcataaaat

SEQ ID NO: 397602 - DNA, 20 bp, Artificial Sequence
  Description of Artificial Sequence: Synthetic oligonucleotide
  Target: LAMA2; (+) strand; PAM type: YTN; PAM sequence: TTA
aaagttcagggcataaaatg

SEQ ID NO: 397603 - DNA, 20 bp, Artificial Sequence
  Description of Artificial Sequence: Synthetic oligonucleotide
  Target: LAMA2; (+) strand; PAM type: YTN; PAM sequence: TTC
agggcataaaatgatagatg

SEQ ID NO: 397604 - DNA, 20 bp, Artificial Sequence
  Description of Artificial Sequence: Synthetic oligonucleotide
  Target: LAMA2; (+) strand; PAM type: YTN; PAM sequence: CTC
agggtttgtgtcatcagtcg

SEQ ID NO: 397605 - DNA, 20 bp, Artificial Sequence
  Description of Artificial Sequence: Synthetic oligonucleotide
  Target: LAMA2; (+) strand; PAM type: YTN; PAM sequence: TTT
gtgtcatcagtcggaaacac

SEQ ID NO: 397606 - DNA, 20 bp, Artificial Sequence
  Description of Artificial Sequence: Synthetic oligonucleotide
  Target: LAMA2; (+) strand; PAM type: YTN; PAM sequence: TTG
tgtcatcagtcggaaacaca

SEQ ID NO: 397607 - DNA, 20 bp, Artificial Sequence
  Description of Artificial Sequence: Synthetic oligonucleotide
  Target: LAMA2; (+) strand; PAM type: YTN; PAM sequence: CTC
ttttgaacaatgccacaatg

SEQ ID NO: 397608 - DNA, 20 bp, Artificial Sequence
  Description of Artificial Sequence: Synthetic oligonucleotide
  Target: LAMA2; (+) strand; PAM type: YTN; PAM sequence: CTT
ttgaacaatgccacaatgca

SEQ ID NO: 397609 - DNA, 20 bp, Artificial Sequence
  Description of Artificial Sequence: Synthetic oligonucleotide
  Target: LAMA2; (+) strand; PAM type: YTN; PAM sequence: TTT
tgaacaatgccacaatgcaa

SEQ ID NO: 397610 - DNA, 20 bp, Artificial Sequence
  Description of Artificial Sequence: Synthetic oligonucleotide
  Target: LAMA2; (+) strand; PAM type: YTN; PAM sequence: TTT
gaacaatgccacaatgcaat

SEQ ID NO: 397611 - DNA, 20 bp, Artificial Sequence
  Description of Artificial Sequence: Synthetic oligonucleotide
  Target: LAMA2; (+) strand; PAM type: YTN; PAM sequence: TTG
aacaatgccacaatgcaatc

SEQ ID NO: 397612 - DNA, 20 bp, Artificial Sequence
  Description of Artificial Sequence: Synthetic oligonucleotide
  Target: LAMA2; (+) strand; PAM type: YTN; PAM sequence: CTA
agtttgatctaattttcttc

SEQ ID NO: 397613 - DNA, 20 bp, Artificial Sequence
  Description of Artificial Sequence: Synthetic oligonucleotide
  Target: LAMA2; (+) strand; PAM type: YTN; PAM sequence: TTT
gatctaattttcttcaagac

SEQ ID NO: 397614 - DNA, 20 bp, Artificial Sequence
  Description of Artificial Sequence: Synthetic oligonucleotide
  Target: LAMA2; (+) strand; PAM type: YTN; PAM sequence: TTG
atctaattttcttcaagaca

SEQ ID NO: 397615 - DNA, 20 bp, Artificial Sequence
  Description of Artificial Sequence: Synthetic oligonucleotide
  Target: LAMA2; (+) strand; PAM type: YTN; PAM sequence: CTA
attttcttcaagacaataat

SEQ ID NO: 397616 - DNA, 20 bp, Artificial Sequence
  Description of Artificial Sequence: Synthetic oligonucleotide
  Target: LAMA2; (+) strand; PAM type: YTN; PAM sequence: TTT
tcttcaagacaataatgctc

SEQ ID NO: 397617 - DNA, 20 bp, Artificial Sequence
  Description of Artificial Sequence: Synthetic oligonucleotide
  Target: LAMA2; (+) strand; PAM type: YTN; PAM sequence: TTT
cttcaagacaataatgctct

SEQ ID NO: 397618 - DNA, 20 bp, Artificial Sequence
  Description of Artificial Sequence: Synthetic oligonucleotide
  Target: LAMA2; (+) strand; PAM type: YTN; PAM sequence: TTC
ttcaagacaataatgctctt

SEQ ID NO: 397619 - DNA, 20 bp, Artificial Sequence
  Description of Artificial Sequence: Synthetic oligonucleotide
  Target: LAMA2; (+) strand; PAM type: YTN; PAM sequence: CTT
caagacaataatgctcttgg

SEQ ID NO: 397620 - DNA, 20 bp, Artificial Sequence
  Description of Artificial Sequence: Synthetic oligonucleotide
  Target: LAMA2; (+) strand; PAM type: YTN; PAM sequence: TTC
aagacaataatgctcttggt

SEQ ID NO: 397621 - DNA, 20 bp, Artificial Sequence
  Description of Artificial Sequence: Synthetic oligonucleotide
  Target: LAMA2; (+) strand; PAM type: YTN; PAM sequence: CTC
ttggtgccatcctacctgct

SEQ ID NO: 397622 - DNA, 20 bp, Artificial Sequence
  Description of Artificial Sequence: Synthetic oligonucleotide
  Target: LAMA2; (+) strand; PAM type: YTN; PAM sequence: CTT
ggtgccatcctacctgctct

SEQ ID NO: 397623 - DNA, 20 bp, Artificial Sequence
  Description of Artificial Sequence: Synthetic oligonucleotide
  Target: LAMA2; (+) strand; PAM type: YTN; PAM sequence: TTG
gtgccatcctacctgctctt

SEQ ID NO: 397624 - DNA, 20 bp, Artificial Sequence
  Description of Artificial Sequence: Synthetic oligonucleotide
  Target: LAMA2; (+) strand; PAM type: YTN; PAM sequence: CTA
cctgctctttatgatttcta

SEQ ID NO: 397625 - DNA, 20 bp, Artificial Sequence
  Description of Artificial Sequence: Synthetic oligonucleotide
  Target: LAMA2; (+) strand; PAM type: YTN; PAM sequence: CTG
ctctttatgatttctacccg

SEQ ID NO: 397626 - DNA, 20 bp, Artificial Sequence
  Description of Artificial Sequence: Synthetic oligonucleotide
  Target: LAMA2; (+) strand; PAM type: YTN; PAM sequence: CTC
tttatgatttctacccgtag

SEQ ID NO: 397627 - DNA, 20 bp, Artificial Sequence
  Description of Artificial Sequence: Synthetic oligonucleotide
  Target: LAMA2; (+) strand; PAM type: YTN; PAM sequence: CTT
tatgatttctacccgtaggt

SEQ ID NO: 397628 - DNA, 20 bp, Artificial Sequence
  Description of Artificial Sequence: Synthetic oligonucleotide
  Target: LAMA2; (+) strand; PAM type: YTN; PAM sequence: TTT
atgatttctacccgtaggta

SEQ ID NO: 397629 - DNA, 20 bp, Artificial Sequence
  Description of Artificial Sequence: Synthetic oligonucleotide
  Target: LAMA2; (+) strand; PAM type: YTN; PAM sequence: TTA
tgatttctacccgtaggtag

SEQ ID NO: 397630 - DNA, 20 bp, Artificial Sequence
  Description of Artificial Sequence: Synthetic oligonucleotide
  Target: LAMA2; (+) strand; PAM type: YTN; PAM sequence: TTT
ctacccgtaggtagaataat

SEQ ID NO: 397631 - DNA, 20 bp, Artificial Sequence
  Description of Artificial Sequence: Synthetic oligonucleotide
  Target: LAMA2; (+) strand; PAM type: YTN; PAM sequence: TTC
tacccgtaggtagaataatc

SEQ ID NO: 397632 - DNA, 20 bp, Artificial Sequence
  Description of Artificial Sequence: Synthetic oligonucleotide
  Target: LAMA2; (+) strand; PAM type: YTN; PAM sequence: CTA
cccgtaggtagaataatcaa

SEQ ID NO: 397633 - DNA, 20 bp, Artificial Sequence
  Description of Artificial Sequence: Synthetic oligonucleotide
  Target: LAMA2; (+) strand; PAM type: YTN; PAM sequence: TTG
atgttgtttttgattctgga

SEQ ID NO: 397634 - DNA, 20 bp, Artificial Sequence
  Description of Artificial Sequence: Synthetic oligonucleotide
  Target: LAMA2; (+) strand; PAM type: YTN; PAM sequence: TTG
tttttgattctggacattaa

SEQ ID NO: 397635 - DNA, 20 bp, Artificial Sequence
  Description of Artificial Sequence: Synthetic oligonucleotide
  Target: LAMA2; (+) strand; PAM type: YTN; PAM sequence: TTT
ttgattctggacattaacta

SEQ ID NO: 397636 - DNA, 20 bp, Artificial Sequence
  Description of Artificial Sequence: Synthetic oligonucleotide
  Target: LAMA2; (+) strand; PAM type: YTN; PAM sequence: TTT
tgattctggacattaactag

SEQ ID NO: 397637 - DNA, 20 bp, Artificial Sequence
  Description of Artificial Sequence: Synthetic oligonucleotide
  Target: LAMA2; (+) strand; PAM type: YTN; PAM sequence: TTT
gattctggacattaactaga

SEQ ID NO: 397638 - DNA, 20 bp, Artificial Sequence
  Description of Artificial Sequence: Synthetic oligonucleotide
  Target: LAMA2; (+) strand; PAM type: YTN; PAM sequence: TTG
attctggacattaactagag

SEQ ID NO: 397639 - DNA, 20 bp, Artificial Sequence
  Description of Artificial Sequence: Synthetic oligonucleotide
  Target: LAMA2; (+) strand; PAM type: YTN; PAM sequence: TTC
tggacattaactagagggaa

SEQ ID NO: 397640 - DNA, 20 bp, Artificial Sequence
  Description of Artificial Sequence: Synthetic oligonucleotide
  Target: LAMA2; (+) strand; PAM type: YTN; PAM sequence: CTG
gacattaactagagggaaaa

SEQ ID NO: 397641 - DNA, 20 bp, Artificial Sequence
  Description of Artificial Sequence: Synthetic oligonucleotide
  Target: LAMA2; (+) strand; PAM type: YTN; PAM sequence: TTA
actagagggaaaattcgaag

SEQ ID NO: 397642 - DNA, 20 bp, Artificial Sequence
  Description of Artificial Sequence: Synthetic oligonucleotide
  Target: LAMA2; (+) strand; PAM type: YTN; PAM sequence: CTA
gagggaaaattcgaagccct

SEQ ID NO: 397643 - DNA, 20 bp, Artificial Sequence
  Description of Artificial Sequence: Synthetic oligonucleotide
  Target: LAMA2; (+) strand; PAM type: YTN; PAM sequence: TTC
gaagccctctaagaatggta

SEQ ID NO: 397644 - DNA, 20 bp, Artificial Sequence
  Description of Artificial Sequence: Synthetic oligonucleotide
  Target: LAMA2; (+) strand; PAM type: YTN; PAM sequence: CTC
taagaatggtatctaactta

SEQ ID NO: 397645 - DNA, 20 bp, Artificial Sequence
  Description of Artificial Sequence: Synthetic oligonucleotide
  Target: LAMA2; (+) strand; PAM type: YTN; PAM sequence: CTA
agaatggtatctaacttaat

SEQ ID NO: 397646 - DNA, 20 bp, Artificial Sequence
  Description of Artificial Sequence: Synthetic oligonucleotide
  Target: LAMA2; (+) strand; PAM type: YTN; PAM sequence: CTA
acttaatagacacctctcca

SEQ ID NO: 397647 - DNA, 20 bp, Artificial Sequence
  Description of Artificial Sequence: Synthetic oligonucleotide
  Target: LAMA2; (+) strand; PAM type: YTN; PAM sequence: CTT
aatagacacctctccattac

SEQ ID NO: 397648 - DNA, 20 bp, Artificial Sequence
  Description of Artificial Sequence: Synthetic oligonucleotide
  Target: LAMA2; (+) strand; PAM type: YTN; PAM sequence: TTA
atagacacctctccattacc

SEQ ID NO: 397649 - DNA, 20 bp, Artificial Sequence
  Description of Artificial Sequence: Synthetic oligonucleotide
  Target: LAMA2; (+) strand; PAM type: YTN; PAM sequence: CTC
tccattacctttactcaaaa

SEQ ID NO: 397650 - DNA, 20 bp, Artificial Sequence
  Description of Artificial Sequence: Synthetic oligonucleotide
  Target: LAMA2; (+) strand; PAM type: YTN; PAM sequence: CTC
cattacctttactcaaaact

SEQ ID NO: 397651 - DNA, 20 bp, Artificial Sequence
  Description of Artificial Sequence: Synthetic oligonucleotide
  Target: LAMA2; (+) strand; PAM type: YTN; PAM sequence: TTA
cctttactcaaaactaagac

SEQ ID NO: 397652 - DNA, 20 bp, Artificial Sequence
  Description of Artificial Sequence: Synthetic oligonucleotide
  Target: LAMA2; (+) strand; PAM type: YTN; PAM sequence: CTT
tactcaaaactaagactctt

SEQ ID NO: 397653 - DNA, 20 bp, Artificial Sequence
  Description of Artificial Sequence: Synthetic oligonucleotide
  Target: LAMA2; (+) strand; PAM type: YTN; PAM sequence: TTT
actcaaaactaagactcttt

SEQ ID NO: 397654 - DNA, 20 bp, Artificial Sequence
  Description of Artificial Sequence: Synthetic oligonucleotide
  Target: LAMA2; (+) strand; PAM type: YTN; PAM sequence: TTA
ctcaaaactaagactctttg

SEQ ID NO: 397655 - DNA, 20 bp, Artificial Sequence
  Description of Artificial Sequence: Synthetic oligonucleotide
  Target: LAMA2; (+) strand; PAM type: YTN; PAM sequence: CTC
aaaactaagactctttgtgg

SEQ ID NO: 397656 - DNA, 20 bp, Artificial Sequence
  Description of Artificial Sequence: Synthetic oligonucleotide
  Target: LAMA2; (+) strand; PAM type: YTN; PAM sequence: CTA
agactctttgtggtatgggc

SEQ ID NO: 397657 - DNA, 20 bp, Artificial Sequence
  Description of Artificial Sequence: Synthetic oligonucleotide
  Target: LAMA2; (+) strand; PAM type: YTN; PAM sequence: CTC
tttgtggtatgggcccaccc

SEQ ID NO: 397658 - DNA, 20 bp, Artificial Sequence
  Description of Artificial Sequence: Synthetic oligonucleotide
  Target: LAMA2; (+) strand; PAM type: YTN; PAM sequence: CTT
tgtggtatgggcccacccca

SEQ ID NO: 397659 - DNA, 20 bp, Artificial Sequence
  Description of Artificial Sequence: Synthetic oligonucleotide
  Target: LAMA2; (+) strand; PAM type: YTN; PAM sequence: TTT
gtggtatgggcccaccccac

SEQ ID NO: 397660 - DNA, 20 bp, Artificial Sequence
  Description of Artificial Sequence: Synthetic oligonucleotide
  Target: LAMA2; (+) strand; PAM type: YTN; PAM sequence: TTG
tggtatgggcccaccccacc

SEQ ID NO: 397661 - DNA, 20 bp, Artificial Sequence
  Description of Artificial Sequence: Synthetic oligonucleotide
  Target: LAMA2; (+) strand; PAM type: YTN; PAM sequence: CTC
tagtagccagctgctagtcc

SEQ ID NO: 397662 - DNA, 20 bp, Artificial Sequence
  Description of Artificial Sequence: Synthetic oligonucleotide
  Target: LAMA2; (+) strand; PAM type: YTN; PAM sequence: CTA
gtagccagctgctagtccag

SEQ ID NO: 397663 - DNA, 20 bp, Artificial Sequence
  Description of Artificial Sequence: Synthetic oligonucleotide
  Target: LAMA2; (+) strand; PAM type: YTN; PAM sequence: CTG
ctagtccagtgtctgtctca

SEQ ID NO: 397664 - DNA, 20 bp, Artificial Sequence
  Description of Artificial Sequence: Synthetic oligonucleotide
  Target: LAMA2; (+) strand; PAM type: YTN; PAM sequence: CTA
gtccagtgtctgtctcactg

SEQ ID NO: 397665 - DNA, 20 bp, Artificial Sequence
  Description of Artificial Sequence: Synthetic oligonucleotide
  Target: LAMA2; (+) strand; PAM type: YTN; PAM sequence: CTG
tctcactgaagcagtctagt

SEQ ID NO: 397666 - DNA, 20 bp, Artificial Sequence
  Description of Artificial Sequence: Synthetic oligonucleotide
  Target: LAMA2; (+) strand; PAM type: YTN; PAM sequence: CTC
actgaagcagtctagtggta

SEQ ID NO: 397667 - DNA, 20 bp, Artificial Sequence
  Description of Artificial Sequence: Synthetic oligonucleotide
  Target: LAMA2; (+) strand; PAM type: YTN; PAM sequence: CTG
aagcagtctagtggtacaca

SEQ ID NO: 397668 - DNA, 20 bp, Artificial Sequence
  Description of Artificial Sequence: Synthetic oligonucleotide
  Target: LAMA2; (+) strand; PAM type: YTN; PAM sequence: CTA
gtggtacacataggtactga

SEQ ID NO: 397669 - DNA, 20 bp, Artificial Sequence
  Description of Artificial Sequence: Synthetic oligonucleotide
  Target: LAMA2; (+) strand; PAM type: YTN; PAM sequence: CTG
agcaattatgtctgtcatgc

SEQ ID NO: 397670 - DNA, 20 bp, Artificial Sequence
  Description of Artificial Sequence: Synthetic oligonucleotide
  Target: LAMA2; (+) strand; PAM type: YTN; PAM sequence: TTA
tgtctgtcatgctgtaattg

SEQ ID NO: 397671 - DNA, 20 bp, Artificial Sequence
  Description of Artificial Sequence: Synthetic oligonucleotide
  Target: LAMA2; (+) strand; PAM type: YTN; PAM sequence: CTG
tcatgctgtaattgaggaaa

SEQ ID NO: 397672 - DNA, 20 bp, Artificial Sequence
  Description of Artificial Sequence: Synthetic oligonucleotide
  Target: LAMA2; (+) strand; PAM type: YTN; PAM sequence: CTG
taattgaggaaaaccatcct

SEQ ID NO: 397673 - DNA, 20 bp, Artificial Sequence
  Description of Artificial Sequence: Synthetic oligonucleotide
  Target: LAMA2; (+) strand; PAM type: YTN; PAM sequence: TTG
aggaaaaccatccttacttc

SEQ ID NO: 397674 - DNA, 20 bp, Artificial Sequence
  Description of Artificial Sequence: Synthetic oligonucleotide
  Target: LAMA2; (+) strand; PAM type: YTN; PAM sequence: CTT
acttcattttatatttttga

SEQ ID NO: 397675 - DNA, 20 bp, Artificial Sequence
  Description of Artificial Sequence: Synthetic oligonucleotide
  Target: LAMA2; (+) strand; PAM type: YTN; PAM sequence: TTA
cttcattttatatttttgaa

SEQ ID NO: 397676 - DNA, 20 bp, Artificial Sequence
  Description of Artificial Sequence: Synthetic oligonucleotide
  Target: LAMA2; (+) strand; PAM type: YTN; PAM sequence: CTT
cattttatatttttgaatgc

SEQ ID NO: 397677 - DNA, 20 bp, Artificial Sequence
  Description of Artificial Sequence: Synthetic oligonucleotide
  Target: LAMA2; (+) strand; PAM type: YTN; PAM sequence: TTC
attttatatttttgaatgct

SEQ ID NO: 397678 - DNA, 20 bp, Artificial Sequence
  Description of Artificial Sequence: Synthetic oligonucleotide
  Target: LAMA2; (+) strand; PAM type: YTN; PAM sequence: TTT
tatatttttgaatgctccct

SEQ ID NO: 397679 - DNA, 20 bp, Artificial Sequence
  Description of Artificial Sequence: Synthetic oligonucleotide
  Target: LAMA2; (+) strand; PAM type: YTN; PAM sequence: TTT
atatttttgaatgctccctt

SEQ ID NO: 397680 - DNA, 20 bp, Artificial Sequence
  Description of Artificial Sequence: Synthetic oligonucleotide
  Target: LAMA2; (+) strand; PAM type: YTN; PAM sequence: TTA
tatttttgaatgctcccttg

SEQ ID NO: 397681 - DNA, 20 bp, Artificial Sequence
  Description of Artificial Sequence: Synthetic oligonucleotide
  Target: LAMA2; (+) strand; PAM type: YTN; PAM sequence: TTT
ttgaatgctcccttgattgt

SEQ ID NO: 397682 - DNA, 20 bp, Artificial Sequence
  Description of Artificial Sequence: Synthetic oligonucleotide
  Target: LAMA2; (+) strand; PAM type: YTN; PAM sequence: TTT
tgaatgctcccttgattgtc

SEQ ID NO: 397683 - DNA, 20 bp, Artificial Sequence
  Description of Artificial Sequence: Synthetic oligonucleotide
  Target: LAMA2; (+) strand; PAM type: YTN; PAM sequence: TTT
gaatgctcccttgattgtcc

SEQ ID NO: 397684 - DNA, 20 bp, Artificial Sequence
  Description of Artificial Sequence: Synthetic oligonucleotide
  Target: LAMA2; (+) strand; PAM type: YTN; PAM sequence: TTG
aatgctcccttgattgtcct

SEQ ID NO: 397685 - DNA, 20 bp, Artificial Sequence
  Description of Artificial Sequence: Synthetic oligonucleotide
  Target: LAMA2; (+) strand; PAM type: YTN; PAM sequence: CTC
ccttgattgtccttcttggt

SEQ ID NO: 397686 - DNA, 20 bp, Artificial Sequence
  Description of Artificial Sequence: Synthetic oligonucleotide
  Target: LAMA2; (+) strand; PAM type: YTN; PAM sequence: CTT
gattgtccttcttggtgttc

SEQ ID NO: 397687 - DNA, 20 bp, Artificial Sequence
  Description of Artificial Sequence: Synthetic oligonucleotide
  Target: LAMA2; (+) strand; PAM type: YTN; PAM sequence: TTG
attgtccttcttggtgttcc

SEQ ID NO: 397688 - DNA, 20 bp, Artificial Sequence
  Description of Artificial Sequence: Synthetic oligonucleotide
  Target: LAMA2; (+) strand; PAM type: YTN; PAM sequence: TTG
tccttcttggtgttcccata

SEQ ID NO: 397689 - DNA, 20 bp, Artificial Sequence
  Description of Artificial Sequence: Synthetic oligonucleotide
  Target: LAMA2; (+) strand; PAM type: YTN; PAM sequence: CTT
cttggtgttcccataaagct

SEQ ID NO: 397690 - DNA, 20 bp, Artificial Sequence
  Description of Artificial Sequence: Synthetic oligonucleotide
  Target: LAMA2; (+) strand; PAM type: YTN; PAM sequence: TTC
ttggtgttcccataaagcta

SEQ ID NO: 397691 - DNA, 20 bp, Artificial Sequence
  Description of Artificial Sequence: Synthetic oligonucleotide
  Target: LAMA2; (+) strand; PAM type: YTN; PAM sequence: CTT
ggtgttcccataaagctaaa

SEQ ID NO: 397692 - DNA, 20 bp, Artificial Sequence
  Description of Artificial Sequence: Synthetic oligonucleotide
  Target: LAMA2; (+) strand; PAM type: YTN; PAM sequence: TTG
gtgttcccataaagctaaaa

SEQ ID NO: 397693 - DNA, 20 bp, Artificial Sequence
  Description of Artificial Sequence: Synthetic oligonucleotide
  Target: LAMA2; (+) strand; PAM type: YTN; PAM sequence: TTC
ccataaagctaaaaattcac

SEQ ID NO: 397694 - DNA, 20 bp, Artificial Sequence
  Description of Artificial Sequence: Synthetic oligonucleotide
  Target: LAMA2; (+) strand; PAM type: YTN; PAM sequence: CTA
aaaattcacactcacgaatt

SEQ ID NO: 397695 - DNA, 20 bp, Artificial Sequence
  Description of Artificial Sequence: Synthetic oligonucleotide
  Target: LAMA2; (+) strand; PAM type: YTN; PAM sequence: TTC
acactcacgaattttaaatt

SEQ ID NO: 397696 - DNA, 20 bp, Artificial Sequence
  Description of Artificial Sequence: Synthetic oligonucleotide
  Target: LAMA2; (+) strand; PAM type: YTN; PAM sequence: CTC
acgaattttaaattatcatg

SEQ ID NO: 397697 - DNA, 20 bp, Artificial Sequence
  Description of Artificial Sequence: Synthetic oligonucleotide
  Target: LAMA2; (+) strand; PAM type: YTN; PAM sequence: TTT
taaattatcatgagcaattt

SEQ ID NO: 397698 - DNA, 20 bp, Artificial Sequence
  Description of Artificial Sequence: Synthetic oligonucleotide
  Target: LAMA2; (+) strand; PAM type: YTN; PAM sequence: TTT
aaattatcatgagcaatttg

SEQ ID NO: 397699 - DNA, 20 bp, Artificial Sequence
  Description of Artificial Sequence: Synthetic oligonucleotide
  Target: LAMA2; (+) strand; PAM type: YTN; PAM sequence: TTA
aattatcatgagcaatttgg

SEQ ID NO: 397700 - DNA, 20 bp, Artificial Sequence
  Description of Artificial Sequence: Synthetic oligonucleotide
  Target: LAMA2; (+) strand; PAM type: YTN; PAM sequence: TTA
tcatgagcaatttgggggat

SEQ ID NO: 397701 - DNA, 20 bp, Artificial Sequence
  Description of Artificial Sequence: Synthetic oligonucleotide
  Target: LAMA2; (+) strand; PAM type: YTN; PAM sequence: TTT
gggggatttcctattttatc

SEQ ID NO: 397702 - DNA, 20 bp, Artificial Sequence
  Description of Artificial Sequence: Synthetic oligonucleotide
  Target: LAMA2; (+) strand; PAM type: YTN; PAM sequence: TTG
ggggatttcctattttatca

SEQ ID NO: 397703 - DNA, 20 bp, Artificial Sequence
  Description of Artificial Sequence: Synthetic oligonucleotide
  Target: LAMA2; (+) strand; PAM type: YTN; PAM sequence: TTT
cctattttatcactgagtct

SEQ ID NO: 397704 - DNA, 20 bp, Artificial Sequence
  Description of Artificial Sequence: Synthetic oligonucleotide
  Target: LAMA2; (+) strand; PAM type: YTN; PAM sequence: TTC
ctattttatcactgagtctc

SEQ ID NO: 397705 - DNA, 20 bp, Artificial Sequence
  Description of Artificial Sequence: Synthetic oligonucleotide
  Target: LAMA2; (+) strand; PAM type: YTN; PAM sequence: CTA
ttttatcactgagtctcctt

SEQ ID NO: 397706 - DNA, 20 bp, Artificial Sequence
  Description of Artificial Sequence: Synthetic oligonucleotide
  Target: LAMA2; (+) strand; PAM type: YTN; PAM sequence: TTT
tatcactgagtctcctttga

SEQ ID NO: 397707 - DNA, 20 bp, Artificial Sequence
  Description of Artificial Sequence: Synthetic oligonucleotide
  Target: LAMA2; (+) strand; PAM type: YTN; PAM sequence: TTT
atcactgagtctcctttgag

SEQ ID NO: 397708 - DNA, 20 bp, Artificial Sequence
  Description of Artificial Sequence: Synthetic oligonucleotide
  Target: LAMA2; (+) strand; PAM type: YTN; PAM sequence: TTA
tcactgagtctcctttgagt

SEQ ID NO: 397709 - DNA, 20 bp, Artificial Sequence
  Description of Artificial Sequence: Synthetic oligonucleotide
  Target: LAMA2; (+) strand; PAM type: YTN; PAM sequence: CTG
agtctcctttgagtgctcag

SEQ ID NO: 397710 - DNA, 20 bp, Artificial Sequence
  Description of Artificial Sequence: Synthetic oligonucleotide
  Target: LAMA2; (+) strand; PAM type: YTN; PAM sequence: CTC
ctttgagtgctcagctgctt

SEQ ID NO: 397711 - DNA, 20 bp, Artificial Sequence
  Description of Artificial Sequence: Synthetic oligonucleotide
  Target: LAMA2; (+) strand; PAM type: YTN; PAM sequence: CTT
tgagtgctcagctgctttca

SEQ ID NO: 397712 - DNA, 20 bp, Artificial Sequence
  Description of Artificial Sequence: Synthetic oligonucleotide
  Target: LAMA2; (+) strand; PAM type: YTN; PAM sequence: TTT
gagtgctcagctgctttcaa

SEQ ID NO: 397713 - DNA, 20 bp, Artificial Sequence
  Description of Artificial Sequence: Synthetic oligonucleotide
  Target: LAMA2; (+) strand; PAM type: YTN; PAM sequence: TTG
agtgctcagctgctttcaat

SEQ ID NO: 397714 - DNA, 20 bp, Artificial Sequence
  Description of Artificial Sequence: Synthetic oligonucleotide
  Target: LAMA2; (+) strand; PAM type: YTN; PAM sequence: CTC
agctgctttcaatcttgaca

SEQ ID NO: 397715 - DNA, 20 bp, Artificial Sequence
  Description of Artificial Sequence: Synthetic oligonucleotide
  Target: LAMA2; (+) strand; PAM type: YTN; PAM sequence: CTG
ctttcaatcttgacagatac

SEQ ID NO: 397716 - DNA, 20 bp, Artificial Sequence
  Description of Artificial Sequence: Synthetic oligonucleotide
  Target: LAMA2; (+) strand; PAM type: YTN; PAM sequence: CTT
tcaatcttgacagatactca

SEQ ID NO: 397717 - DNA, 20 bp, Artificial Sequence
  Description of Artificial Sequence: Synthetic oligonucleotide
  Target: LAMA2; (+) strand; PAM type: YTN; PAM sequence: TTT
caatcttgacagatactcat

SEQ ID NO: 397718 - DNA, 20 bp, Artificial Sequence
  Description of Artificial Sequence: Synthetic oligonucleotide
  Target: LAMA2; (+) strand; PAM type: YTN; PAM sequence: TTC
aatcttgacagatactcatc

SEQ ID NO: 397719 - DNA, 20 bp, Artificial Sequence
  Description of Artificial Sequence: Synthetic oligonucleotide
  Target: LAMA2; (+) strand; PAM type: YTN; PAM sequence: CTT
gacagatactcatctgaccc

SEQ ID NO: 397720 - DNA, 20 bp, Artificial Sequence
  Description of Artificial Sequence: Synthetic oligonucleotide
  Target: LAMA2; (+) strand; PAM type: YTN; PAM sequence: TTG
acagatactcatctgaccca

SEQ ID NO: 397721 - DNA, 20 bp, Artificial Sequence
  Description of Artificial Sequence: Synthetic oligonucleotide
  Target: LAMA2; (+) strand; PAM type: YTN; PAM sequence: CTC
atctgacccatctaccaccc

SEQ ID NO: 397722 - DNA, 20 bp, Artificial Sequence
  Description of Artificial Sequence: Synthetic oligonucleotide
  Target: LAMA2; (+) strand; PAM type: YTN; PAM sequence: CTG
acccatctaccacccttagg

SEQ ID NO: 397723 - DNA, 20 bp, Artificial Sequence
  Description of Artificial Sequence: Synthetic oligonucleotide
  Target: LAMA2; (+) strand; PAM type: YTN; PAM sequence: CTA
ccacccttagggtatgctat

SEQ ID NO: 397724 - DNA, 20 bp, Artificial Sequence
  Description of Artificial Sequence: Synthetic oligonucleotide
  Target: LAMA2; (+) strand; PAM type: YTN; PAM sequence: CTT
agggtatgctatgcgatgcc

SEQ ID NO: 397725 - DNA, 20 bp, Artificial Sequence
  Description of Artificial Sequence: Synthetic oligonucleotide
  Target: LAMA2; (+) strand; PAM type: YTN; PAM sequence: TTA
gggtatgctatgcgatgcca

SEQ ID NO: 397726 - DNA, 20 bp, Artificial Sequence
  Description of Artificial Sequence: Synthetic oligonucleotide
  Target: LAMA2; (+) strand; PAM type: YTN; PAM sequence: CTA
tgcgatgccagggacctaca

SEQ ID NO: 397727 - DNA, 20 bp, Artificial Sequence
  Description of Artificial Sequence: Synthetic oligonucleotide
  Target: LAMA2; (+) strand; PAM type: YTN; PAM sequence: CTA
cagccttttaagagattttt

SEQ ID NO: 397728 - DNA, 20 bp, Artificial Sequence
  Description of Artificial Sequence: Synthetic oligonucleotide
  Target: LAMA2; (+) strand; PAM type: YTN; PAM sequence: CTT
ttaagagatttttgaccaaa

SEQ ID NO: 397729 - DNA, 20 bp, Artificial Sequence
  Description of Artificial Sequence: Synthetic oligonucleotide
  Target: LAMA2; (+) strand; PAM type: YTN; PAM sequence: TTT
taagagatttttgaccaaag

SEQ ID NO: 397730 - DNA, 20 bp, Artificial Sequence
  Description of Artificial Sequence: Synthetic oligonucleotide
  Target: LAMA2; (+) strand; PAM type: YTN; PAM sequence: TTT
aagagatttttgaccaaagc

SEQ ID NO: 397731 - DNA, 20 bp, Artificial Sequence
  Description of Artificial Sequence: Synthetic oligonucleotide
  Target: LAMA2; (+) strand; PAM type: YTN; PAM sequence: TTA
agagatttttgaccaaagcc

SEQ ID NO: 397732 - DNA, 20 bp, Artificial Sequence
  Description of Artificial Sequence: Synthetic oligonucleotide
  Target: LAMA2; (+) strand; PAM type: YTN; PAM sequence: TTT
ttgaccaaagccgtctcttt

SEQ ID NO: 397733 - DNA, 20 bp, Artificial Sequence
  Description of Artificial Sequence: Synthetic oligonucleotide
  Target: LAMA2; (+) strand; PAM type: YTN; PAM sequence: TTT
tgaccaaagccgtctctttg

SEQ ID NO: 397734 - DNA, 20 bp, Artificial Sequence
  Description of Artificial Sequence: Synthetic oligonucleotide
  Target: LAMA2; (+) strand; PAM type: YTN; PAM sequence: TTT
gaccaaagccgtctctttgg

SEQ ID NO: 397735 - DNA, 20 bp, Artificial Sequence
  Description of Artificial Sequence: Synthetic oligonucleotide
  Target: LAMA2; (+) strand; PAM type: YTN; PAM sequence: TTG
accaaagccgtctctttggg

SEQ ID NO: 397736 - DNA, 20 bp, Artificial Sequence
  Description of Artificial Sequence: Synthetic oligonucleotide
  Target: LAMA2; (+) strand; PAM type: YTN; PAM sequence: CTC
tttggggtgtttcttgactc

SEQ ID NO: 397737 - DNA, 20 bp, Artificial Sequence
  Description of Artificial Sequence: Synthetic oligonucleotide
  Target: LAMA2; (+) strand; PAM type: YTN; PAM sequence: CTT
tggggtgtttcttgactcat

SEQ ID NO: 397738 - DNA, 20 bp, Artificial Sequence
  Description of Artificial Sequence: Synthetic oligonucleotide
  Target: LAMA2; (+) strand; PAM type: YTN; PAM sequence: TTT
ggggtgtttcttgactcatt

SEQ ID NO: 397739 - DNA, 20 bp, Artificial Sequence
  Description of Artificial Sequence: Synthetic oligonucleotide
  Target: LAMA2; (+) strand; PAM type: YTN; PAM sequence: TTG
gggtgtttcttgactcattt

SEQ ID NO: 397740 - DNA, 20 bp, Artificial Sequence
  Description of Artificial Sequence: Synthetic oligonucleotide
  Target: LAMA2; (+) strand; PAM type: YTN; PAM sequence: TTT
cttgactcattttttactca

SEQ ID NO: 397741 - DNA, 20 bp, Artificial Sequence
  Description of Artificial Sequence: Synthetic oligonucleotide
  Target: LAMA2; (+) strand; PAM type: YTN; PAM sequence: TTC
ttgactcattttttactcat

SEQ ID NO: 397742 - DNA, 20 bp, Artificial Sequence
  Description of Artificial Sequence: Synthetic oligonucleotide
  Target: LAMA2; (+) strand; PAM type: YTN; PAM sequence: CTT
gactcattttttactcatta

SEQ ID NO: 397743 - DNA, 20 bp, Artificial Sequence
  Description of Artificial Sequence: Synthetic oligonucleotide
  Target: LAMA2; (+) strand; PAM type: YTN; PAM sequence: TTG
actcattttttactcattat

SEQ ID NO: 397744 - DNA, 20 bp, Artificial Sequence
  Description of Artificial Sequence: Synthetic oligonucleotide
  Target: LAMA2; (+) strand; PAM type: YTN; PAM sequence: CTC
attttttactcattatttaa

SEQ ID NO: 397745 - DNA, 20 bp, Artificial Sequence
  Description of Artificial Sequence: Synthetic oligonucleotide
  Target: LAMA2; (+) strand; PAM type: YTN; PAM sequence: TTT
tttactcattatttaatttt

SEQ ID NO: 397746 - DNA, 20 bp, Artificial Sequence
  Description of Artificial Sequence: Synthetic oligonucleotide
  Target: LAMA2; (+) strand; PAM type: YTN; PAM sequence: TTT
ttactcattatttaatttta

SEQ ID NO: 397747 - DNA, 20 bp, Artificial Sequence
  Description of Artificial Sequence: Synthetic oligonucleotide
  Target: LAMA2; (+) strand; PAM type: YTN; PAM sequence: TTT
tactcattatttaattttaa

SEQ ID NO: 397748 - DNA, 20 bp, Artificial Sequence
  Description of Artificial Sequence: Synthetic oligonucleotide
  Target: LAMA2; (+) strand; PAM type: YTN; PAM sequence: TTT
actcattatttaattttaat

SEQ ID NO: 397749 - DNA, 20 bp, Artificial Sequence
  Description of Artificial Sequence: Synthetic oligonucleotide
  Target: LAMA2; (+) strand; PAM type: YTN; PAM sequence: TTA
ctcattatttaattttaata

SEQ ID NO: 397750 - DNA, 20 bp, Artificial Sequence
  Description of Artificial Sequence: Synthetic oligonucleotide
  Target: LAMA2; (+) strand; PAM type: YTN; PAM sequence: CTC
attatttaattttaataacc

SEQ ID NO: 397751 - DNA, 20 bp, Artificial Sequence
  Description of Artificial Sequence: Synthetic oligonucleotide
  Target: LAMA2; (+) strand; PAM type: YTN; PAM sequence: TTA
tttaattttaataacctata

SEQ ID NO: 397752 - DNA, 20 bp, Artificial Sequence
  Description of Artificial Sequence: Synthetic oligonucleotide
  Target: LAMA2; (+) strand; PAM type: YTN; PAM sequence: TTT
aattttaataacctatagta

SEQ ID NO: 397753 - DNA, 20 bp, Artificial Sequence
  Description of Artificial Sequence: Synthetic oligonucleotide
  Target: LAMA2; (+) strand; PAM type: YTN; PAM sequence: TTA
attttaataacctatagtac

SEQ ID NO: 397754 - DNA, 20 bp, Artificial Sequence
  Description of Artificial Sequence: Synthetic oligonucleotide
  Target: LAMA2; (+) strand; PAM type: YTN; PAM sequence: TTT
taataacctatagtacttaa

SEQ ID NO: 397755 - DNA, 20 bp, Artificial Sequence
  Description of Artificial Sequence: Synthetic oligonucleotide
  Target: LAMA2; (+) strand; PAM type: YTN; PAM sequence: TTT
aataacctatagtacttaaa

SEQ ID NO: 397756 - DNA, 20 bp, Artificial Sequence
  Description of Artificial Sequence: Synthetic oligonucleotide
  Target: LAMA2; (+) strand; PAM type: YTN; PAM sequence: TTA
ataacctatagtacttaaaa

SEQ ID NO: 397757 - DNA, 20 bp, Artificial Sequence
  Description of Artificial Sequence: Synthetic oligonucleotide
  Target: LAMA2; (+) strand; PAM type: YTN; PAM sequence: CTA
tagtacttaaaaatgtacag

SEQ ID NO: 397758 - DNA, 20 bp, Artificial Sequence
  Description of Artificial Sequence: Synthetic oligonucleotide
  Target: LAMA2; (+) strand; PAM type: YTN; PAM sequence: CTT
aaaaatgtacagtactatat

SEQ ID NO: 397759 - DNA, 20 bp, Artificial Sequence
  Description of Artificial Sequence: Synthetic oligonucleotide
  Target: LAMA2; (+) strand; PAM type: YTN; PAM sequence: TTA
aaaatgtacagtactatata

SEQ ID NO: 397760 - DNA, 20 bp, Artificial Sequence
  Description of Artificial Sequence: Synthetic oligonucleotide
  Target: LAMA2; (+) strand; PAM type: YTN; PAM sequence: CTA
tataaagcaccttaaaaatt

SEQ ID NO: 397761 - DNA, 20 bp, Artificial Sequence
  Description of Artificial Sequence: Synthetic oligonucleotide
  Target: LAMA2; (+) strand; PAM type: YTN; PAM sequence: CTT
aaaaattgatgcatggtgat

SEQ ID NO: 397762 - DNA, 20 bp, Artificial Sequence
  Description of Artificial Sequence: Synthetic oligonucleotide
  Target: LAMA2; (+) strand; PAM type: YTN; PAM sequence: TTA
aaaattgatgcatggtgatt

SEQ ID NO: 397763 - DNA, 20 bp, Artificial Sequence
  Description of Artificial Sequence: Synthetic oligonucleotide
  Target: LAMA2; (+) strand; PAM type: YTN; PAM sequence: TTG
atgcatggtgattttcttat

SEQ ID NO: 397764 - DNA, 20 bp, Artificial Sequence
  Description of Artificial Sequence: Synthetic oligonucleotide
  Target: LAMA2; (+) strand; PAM type: YTN; PAM sequence: TTT
tcttattttaaaattgtgta

SEQ ID NO: 397765 - DNA, 20 bp, Artificial Sequence
  Description of Artificial Sequence: Synthetic oligonucleotide
  Target: LAMA2; (+) strand; PAM type: YTN; PAM sequence: TTT
cttattttaaaattgtgtat

SEQ ID NO: 397766 - DNA, 20 bp, Artificial Sequence
  Description of Artificial Sequence: Synthetic oligonucleotide
  Target: LAMA2; (+) strand; PAM type: YTN; PAM sequence: TTC
ttattttaaaattgtgtatg

SEQ ID NO: 397767 - DNA, 20 bp, Artificial Sequence
  Description of Artificial Sequence: Synthetic oligonucleotide
  Target: LAMA2; (+) strand; PAM type: YTN; PAM sequence: CTT
attttaaaattgtgtatgat

SEQ ID NO: 397768 - DNA, 20 bp, Artificial Sequence
  Description of Artificial Sequence: Synthetic oligonucleotide
  Target: LAMA2; (+) strand; PAM type: YTN; PAM sequence: TTA
ttttaaaattgtgtatgatt

SEQ ID NO: 397769 - DNA, 20 bp, Artificial Sequence
  Description of Artificial Sequence: Synthetic oligonucleotide
  Target: LAMA2; (+) strand; PAM type: YTN; PAM sequence: TTT
taaaattgtgtatgattttt

SEQ ID NO: 397770 - DNA, 20 bp, Artificial Sequence
  Description of Artificial Sequence: Synthetic oligonucleotide
  Target: LAMA2; (+) strand; PAM type: YTN; PAM sequence: TTT
aaaattgtgtatgatttttt

SEQ ID NO: 397771 - DNA, 20 bp, Artificial Sequence
  Description of Artificial Sequence: Synthetic oligonucleotide
  Target: LAMA2; (+) strand; PAM type: YTN; PAM sequence: TTA
aaattgtgtatgatttttta

SEQ ID NO: 397772 - DNA, 20 bp, Artificial Sequence
  Description of Artificial Sequence: Synthetic oligonucleotide
  Target: LAMA2; (+) strand; PAM type: YTN; PAM sequence: TTG
tgtatgattttttaaattat

SEQ ID NO: 397773 - DNA, 20 bp, Artificial Sequence
  Description of Artificial Sequence: Synthetic oligonucleotide
  Target: LAMA2; (+) strand; PAM type: YTN; PAM sequence: TTT
tttaaattattataaaagca

SEQ ID NO: 397774 - DNA, 20 bp, Artificial Sequence
  Description of Artificial Sequence: Synthetic oligonucleotide
  Target: LAMA2; (+) strand; PAM type: YTN; PAM sequence: TTT
ttaaattattataaaagcag

SEQ ID NO: 397775 - DNA, 20 bp, Artificial Sequence
  Description of Artificial Sequence: Synthetic oligonucleotide
  Target: LAMA2; (+) strand; PAM type: YTN; PAM sequence: TTT
taaattattataaaagcagc

SEQ ID NO: 397776 - DNA, 20 bp, Artificial Sequence
  Description of Artificial Sequence: Synthetic oligonucleotide
  Target: LAMA2; (+) strand; PAM type: YTN; PAM sequence: TTT
aaattattataaaagcagct

SEQ ID NO: 397777 - DNA, 20 bp, Artificial Sequence
  Description of Artificial Sequence: Synthetic oligonucleotide
  Target: LAMA2; (+) strand; PAM type: YTN; PAM sequence: TTA
aattattataaaagcagctt

SEQ ID NO: 397778 - DNA, 20 bp, Artificial Sequence
  Description of Artificial Sequence: Synthetic oligonucleotide
  Target: LAMA2; (+) strand; PAM type: YTN; PAM sequence: TTA
ttataaaagcagcttatgtc

SEQ ID NO: 397779 - DNA, 20 bp, Artificial Sequence
  Description of Artificial Sequence: Synthetic oligonucleotide
  Target: LAMA2; (+) strand; PAM type: YTN; PAM sequence: TTA
taaaagcagcttatgtctat

SEQ ID NO: 397780 - DNA, 20 bp, Artificial Sequence
  Description of Artificial Sequence: Synthetic oligonucleotide
  Target: LAMA2; (+) strand; PAM type: YTN; PAM sequence: CTT
atgtctattatagaaaatag

SEQ ID NO: 397781 - DNA, 20 bp, Artificial Sequence
  Description of Artificial Sequence: Synthetic oligonucleotide
  Target: LAMA2; (+) strand; PAM type: YTN; PAM sequence: TTA
tgtctattatagaaaatagg

SEQ ID NO: 397782 - DNA, 20 bp, Artificial Sequence
  Description of Artificial Sequence: Synthetic oligonucleotide
  Target: LAMA2; (+) strand; PAM type: YTN; PAM sequence: CTA
ttatagaaaataggaaatac

SEQ ID NO: 397783 - DNA, 20 bp, Artificial Sequence
  Description of Artificial Sequence: Synthetic oligonucleotide
  Target: LAMA2; (+) strand; PAM type: YTN; PAM sequence: TTA
tagaaaataggaaatacaga

SEQ ID NO: 397784 - DNA, 20 bp, Artificial Sequence
  Description of Artificial Sequence: Synthetic oligonucleotide
  Target: LAMA2; (+) strand; PAM type: YTN; PAM sequence: TTA
cttttgtaatatcattgtat

SEQ ID NO: 397785 - DNA, 20 bp, Artificial Sequence
  Description of Artificial Sequence: Synthetic oligonucleotide
  Target: LAMA2; (+) strand; PAM type: YTN; PAM sequence: CTT
ttgtaatatcattgtatatc

SEQ ID NO: 397786 - DNA, 20 bp, Artificial Sequence
  Description of Artificial Sequence: Synthetic oligonucleotide
  Target: LAMA2; (+) strand; PAM type: YTN; PAM sequence: TTT
tgtaatatcattgtatatct

SEQ ID NO: 397787 - DNA, 20 bp, Artificial Sequence
  Description of Artificial Sequence: Synthetic oligonucleotide
  Target: LAMA2; (+) strand; PAM type: YTN; PAM sequence: TTT
gtaatatcattgtatatcta

SEQ ID NO: 397788 - DNA, 20 bp, Artificial Sequence
  Description of Artificial Sequence: Synthetic oligonucleotide
  Target: LAMA2; (+) strand; PAM type: YTN; PAM sequence: TTG
taatatcattgtatatctac

SEQ ID NO: 397789 - DNA, 20 bp, Artificial Sequence
  Description of Artificial Sequence: Synthetic oligonucleotide
  Target: LAMA2; (+) strand; PAM type: YTN; PAM sequence: TTG
tatatctactcatatctttt

SEQ ID NO: 397790 - DNA, 20 bp, Artificial Sequence
  Description of Artificial Sequence: Synthetic oligonucleotide
  Target: LAMA2; (+) strand; PAM type: YTN; PAM sequence: CTA
ctcatatcttttcctatgca

SEQ ID NO: 397791 - DNA, 20 bp, Artificial Sequence
  Description of Artificial Sequence: Synthetic oligonucleotide
  Target: LAMA2; (+) strand; PAM type: YTN; PAM sequence: CTC
atatcttttcctatgcaaat

SEQ ID NO: 397792 - DNA, 20 bp, Artificial Sequence
  Description of Artificial Sequence: Synthetic oligonucleotide
  Target: LAMA2; (+) strand; PAM type: YTN; PAM sequence: CTT
ttcctatgcaaatagttttt

SEQ ID NO: 397793 - DNA, 20 bp, Artificial Sequence
  Description of Artificial Sequence: Synthetic oligonucleotide
  Target: LAMA2; (+) strand; PAM type: YTN; PAM sequence: TTT
tcctatgcaaatagtttttc

SEQ ID NO: 397794 - DNA, 20 bp, Artificial Sequence
  Description of Artificial Sequence: Synthetic oligonucleotide
  Target: LAMA2; (+) strand; PAM type: YTN; PAM sequence: TTT
cctatgcaaatagtttttct

SEQ ID NO: 397795 - DNA, 20 bp, Artificial Sequence
  Description of Artificial Sequence: Synthetic oligonucleotide
  Target: LAMA2; (+) strand; PAM type: YTN; PAM sequence: TTC
ctatgcaaatagtttttcta

SEQ ID NO: 397796 - DNA, 20 bp, Artificial Sequence
  Description of Artificial Sequence: Synthetic oligonucleotide
  Target: LAMA2; (+) strand; PAM type: YTN; PAM sequence: CTA
tgcaaatagtttttctacaa

SEQ ID NO: 397797 - DNA, 20 bp, Artificial Sequence
  Description of Artificial Sequence: Synthetic oligonucleotide
  Target: LAMA2; (+) strand; PAM type: YTN; PAM sequence: TTT
ttctacaaatgggtgatatt

SEQ ID NO: 397798 - DNA, 20 bp, Artificial Sequence
  Description of Artificial Sequence: Synthetic oligonucleotide
  Target: LAMA2; (+) strand; PAM type: YTN; PAM sequence: TTT
tctacaaatgggtgatattt

SEQ ID NO: 397799 - DNA, 20 bp, Artificial Sequence
  Description of Artificial Sequence: Synthetic oligonucleotide
  Target: LAMA2; (+) strand; PAM type: YTN; PAM sequence: TTT
ctacaaatgggtgatattta

SEQ ID NO: 397800 - DNA, 20 bp, Artificial Sequence
  Description of Artificial Sequence: Synthetic oligonucleotide
  Target: LAMA2; (+) strand; PAM type: YTN; PAM sequence: TTC
tacaaatgggtgatatttat

SEQ ID NO: 397801 - DNA, 20 bp, Artificial Sequence
  Description of Artificial Sequence: Synthetic oligonucleotide
  Target: LAMA2; (+) strand; PAM type: YTN; PAM sequence: CTA
caaatgggtgatatttatat

SEQ ID NO: 397802 - DNA, 20 bp, Artificial Sequence
  Description of Artificial Sequence: Synthetic oligonucleotide
  Target: LAMA2; (+) strand; PAM type: YTN; PAM sequence: TTT
atataactgtttcataactt

SEQ ID NO: 397803 - DNA, 20 bp, Artificial Sequence
  Description of Artificial Sequence: Synthetic oligonucleotide
  Target: LAMA2; (+) strand; PAM type: YTN; PAM sequence: TTA
tataactgtttcataactta

SEQ ID NO: 397804 - DNA, 20 bp, Artificial Sequence
  Description of Artificial Sequence: Synthetic oligonucleotide
  Target: LAMA2; (+) strand; PAM type: YTN; PAM sequence: CTG
tttcataacttactatggga

SEQ ID NO: 397805 - DNA, 20 bp, Artificial Sequence
  Description of Artificial Sequence: Synthetic oligonucleotide
  Target: LAMA2; (+) strand; PAM type: YTN; PAM sequence: TTT
cataacttactatgggaatg

SEQ ID NO: 397806 - DNA, 20 bp, Artificial Sequence
  Description of Artificial Sequence: Synthetic oligonucleotide
  Target: LAMA2; (+) strand; PAM type: YTN; PAM sequence: TTC
ataacttactatgggaatga

SEQ ID NO: 397807 - DNA, 20 bp, Artificial Sequence
  Description of Artificial Sequence: Synthetic oligonucleotide
  Target: LAMA2; (+) strand; PAM type: YTN; PAM sequence: CTT
actatgggaatgaacatcac

SEQ ID NO: 397808 - DNA, 20 bp, Artificial Sequence
  Description of Artificial Sequence: Synthetic oligonucleotide
  Target: LAMA2; (+) strand; PAM type: YTN; PAM sequence: TTA
ctatgggaatgaacatcaca

SEQ ID NO: 397809 - DNA, 20 bp, Artificial Sequence
  Description of Artificial Sequence: Synthetic oligonucleotide
  Target: LAMA2; (+) strand; PAM type: YTN; PAM sequence: CTA
tgggaatgaacatcacatac

SEQ ID NO: 397810 - DNA, 20 bp, Artificial Sequence
  Description of Artificial Sequence: Synthetic oligonucleotide
  Target: LAMA2; (+) strand; PAM type: YTN; PAM sequence: TTT
taaaaaatattctcaaaaat

SEQ ID NO: 397811 - DNA, 20 bp, Artificial Sequence
  Description of Artificial Sequence: Synthetic oligonucleotide
  Target: LAMA2; (+) strand; PAM type: YTN; PAM sequence: TTT
aaaaaatattctcaaaaata

SEQ ID NO: 397812 - DNA, 20 bp, Artificial Sequence
  Description of Artificial Sequence: Synthetic oligonucleotide
  Target: LAMA2; (+) strand; PAM type: YTN; PAM sequence: TTA
aaaaatattctcaaaaatat

SEQ ID NO: 397813 - DNA, 20 bp, Artificial Sequence
  Description of Artificial Sequence: Synthetic oligonucleotide
  Target: LAMA2; (+) strand; PAM type: YTN; PAM sequence: TTC
tcaaaaatatatttttaaaa

SEQ ID NO: 397814 - DNA, 20 bp, Artificial Sequence
  Description of Artificial Sequence: Synthetic oligonucleotide
  Target: LAMA2; (+) strand; PAM type: YTN; PAM sequence: CTC
aaaaatatatttttaaaatg

SEQ ID NO: 397815 - DNA, 20 bp, Artificial Sequence
  Description of Artificial Sequence: Synthetic oligonucleotide
  Target: LAMA2; (+) strand; PAM type: YTN; PAM sequence: TTT
ttaaaatgtatattgaacta

SEQ ID NO: 397816 - DNA, 20 bp, Artificial Sequence
  Description of Artificial Sequence: Synthetic oligonucleotide
  Target: LAMA2; (+) strand; PAM type: YTN; PAM sequence: TTT
taaaatgtatattgaactag

SEQ ID NO: 397817 - DNA, 20 bp, Artificial Sequence
  Description of Artificial Sequence: Synthetic oligonucleotide
  Target: LAMA2; (+) strand; PAM type: YTN; PAM sequence: TTT
aaaatgtatattgaactaga

SEQ ID NO: 397818 - DNA, 20 bp, Artificial Sequence
  Description of Artificial Sequence: Synthetic oligonucleotide
  Target: LAMA2; (+) strand; PAM type: YTN; PAM sequence: TTA
aaatgtatattgaactagat

SEQ ID NO: 397819 - DNA, 20 bp, Artificial Sequence
  Description of Artificial Sequence: Synthetic oligonucleotide
  Target: LAMA2; (+) strand; PAM type: YTN; PAM sequence: TTG
aactagattctgagaattta

SEQ ID NO: 397820 - DNA, 20 bp, Artificial Sequence
  Description of Artificial Sequence: Synthetic oligonucleotide
  Target: LAMA2; (+) strand; PAM type: YTN; PAM sequence: CTA
gattctgagaatttacatca

SEQ ID NO: 397821 - DNA, 20 bp, Artificial Sequence
  Description of Artificial Sequence: Synthetic oligonucleotide
  Target: LAMA2; (+) strand; PAM type: YTN; PAM sequence: TTC
tgagaatttacatcattatt

SEQ ID NO: 397822 - DNA, 20 bp, Artificial Sequence
  Description of Artificial Sequence: Synthetic oligonucleotide
  Target: LAMA2; (+) strand; PAM type: YTN; PAM sequence: CTG
agaatttacatcattattat

SEQ ID NO: 397823 - DNA, 20 bp, Artificial Sequence
  Description of Artificial Sequence: Synthetic oligonucleotide
  Target: LAMA2; (+) strand; PAM type: YTN; PAM sequence: TTT
acatcattattatagtaaga

SEQ ID NO: 397824 - DNA, 20 bp, Artificial Sequence
  Description of Artificial Sequence: Synthetic oligonucleotide
  Target: LAMA2; (+) strand; PAM type: YTN; PAM sequence: TTA
catcattattatagtaagaa

SEQ ID NO: 397825 - DNA, 20 bp, Artificial Sequence
  Description of Artificial Sequence: Synthetic oligonucleotide
  Target: LAMA2; (+) strand; PAM type: YTN; PAM sequence: TTA
ttatagtaagaacattatcc

SEQ ID NO: 397826 - DNA, 20 bp, Artificial Sequence
  Description of Artificial Sequence: Synthetic oligonucleotide
  Target: LAMA2; (+) strand; PAM type: YTN; PAM sequence: TTA
tagtaagaacattatccttg

SEQ ID NO: 397827 - DNA, 20 bp, Artificial Sequence
  Description of Artificial Sequence: Synthetic oligonucleotide
  Target: LAMA2; (+) strand; PAM type: YTN; PAM sequence: TTA
tccttgattttgattcatag

SEQ ID NO: 397828 - DNA, 20 bp, Artificial Sequence
  Description of Artificial Sequence: Synthetic oligonucleotide
  Target: LAMA2; (+) strand; PAM type: YTN; PAM sequence: CTT
gattttgattcatagtctaa

SEQ ID NO: 397829 - DNA, 20 bp, Artificial Sequence
  Description of Artificial Sequence: Synthetic oligonucleotide
  Target: LAMA2; (+) strand; PAM type: YTN; PAM sequence: TTG
attttgattcatagtctaac

SEQ ID NO: 397830 - DNA, 20 bp, Artificial Sequence
  Description of Artificial Sequence: Synthetic oligonucleotide
  Target: LAMA2; (+) strand; PAM type: YTN; PAM sequence: TTT
tgattcatagtctaacatac

SEQ ID NO: 397831 - DNA, 20 bp, Artificial Sequence
  Description of Artificial Sequence: Synthetic oligonucleotide
  Target: LAMA2; (+) strand; PAM type: YTN; PAM sequence: TTT
gattcatagtctaacatacc

SEQ ID NO: 397832 - DNA, 20 bp, Artificial Sequence
  Description of Artificial Sequence: Synthetic oligonucleotide
  Target: LAMA2; (+) strand; PAM type: YTN; PAM sequence: TTG
attcatagtctaacatacca

SEQ ID NO: 397833 - DNA, 20 bp, Artificial Sequence
  Description of Artificial Sequence: Synthetic oligonucleotide
  Target: LAMA2; (+) strand; PAM type: YTN; PAM sequence: TTC
atagtctaacataccaaact

SEQ ID NO: 397834 - DNA, 20 bp, Artificial Sequence
  Description of Artificial Sequence: Synthetic oligonucleotide
  Target: LAMA2; (+) strand; PAM type: YTN; PAM sequence: CTA
acataccaaactctaaattt

SEQ ID NO: 397835 - DNA, 20 bp, Artificial Sequence
  Description of Artificial Sequence: Synthetic oligonucleotide
  Target: LAMA2; (+) strand; PAM type: YTN; PAM sequence: CTC
taaatttcttctgttactca

SEQ ID NO: 397836 - DNA, 20 bp, Artificial Sequence
  Description of Artificial Sequence: Synthetic oligonucleotide
  Target: LAMA2; (+) strand; PAM type: YTN; PAM sequence: CTA
aatttcttctgttactcact

SEQ ID NO: 397837 - DNA, 20 bp, Artificial Sequence
  Description of Artificial Sequence: Synthetic oligonucleotide
  Target: LAMA2; (+) strand; PAM type: YTN; PAM sequence: TTT
cttctgttactcactttaca

SEQ ID NO: 397838 - DNA, 20 bp, Artificial Sequence
  Description of Artificial Sequence: Synthetic oligonucleotide
  Target: LAMA2; (+) strand; PAM type: YTN; PAM sequence: TTC
ttctgttactcactttacat

SEQ ID NO: 397839 - DNA, 20 bp, Artificial Sequence
  Description of Artificial Sequence: Synthetic oligonucleotide
  Target: LAMA2; (+) strand; PAM type: YTN; PAM sequence: CTT
ctgttactcactttacataa

SEQ ID NO: 397840 - DNA, 20 bp, Artificial Sequence
  Description of Artificial Sequence: Synthetic oligonucleotide
  Target: LAMA2; (+) strand; PAM type: YTN; PAM sequence: TTC
tgttactcactttacataaa

SEQ ID NO: 397841 - DNA, 20 bp, Artificial Sequence
  Description of Artificial Sequence: Synthetic oligonucleotide
  Target: LAMA2; (+) strand; PAM type: YTN; PAM sequence: CTG
ttactcactttacataaaca

SEQ ID NO: 397842 - DNA, 20 bp, Artificial Sequence
  Description of Artificial Sequence: Synthetic oligonucleotide
  Target: LAMA2; (+) strand; PAM type: YTN; PAM sequence: TTA
ctcactttacataaacacat

SEQ ID NO: 397843 - DNA, 20 bp, Artificial Sequence
  Description of Artificial Sequence: Synthetic oligonucleotide
  Target: LAMA2; (+) strand; PAM type: YTN; PAM sequence: CTC
actttacataaacacattgc

SEQ ID NO: 397844 - DNA, 20 bp, Artificial Sequence
  Description of Artificial Sequence: Synthetic oligonucleotide
  Target: LAMA2; (+) strand; PAM type: YTN; PAM sequence: CTT
tacataaacacattgcagcc

SEQ ID NO: 397845 - DNA, 20 bp, Artificial Sequence
  Description of Artificial Sequence: Synthetic oligonucleotide
  Target: LAMA2; (+) strand; PAM type: YTN; PAM sequence: TTT
acataaacacattgcagcca

SEQ ID NO: 397846 - DNA, 20 bp, Artificial Sequence
  Description of Artificial Sequence: Synthetic oligonucleotide
  Target: LAMA2; (+) strand; PAM type: YTN; PAM sequence: TTA
cataaacacattgcagccag

SEQ ID NO: 397847 - DNA, 20 bp, Artificial Sequence
  Description of Artificial Sequence: Synthetic oligonucleotide
  Target: LAMA2; (+) strand; PAM type: YTN; PAM sequence: TTG
cagccagtcaccaaccctta

SEQ ID NO: 397848 - DNA, 20 bp, Artificial Sequence
  Description of Artificial Sequence: Synthetic oligonucleotide
  Target: LAMA2; (+) strand; PAM type: YTN; PAM sequence: CTT
acatatatccctgcacagtt

SEQ ID NO: 397849 - DNA, 20 bp, Artificial Sequence
  Description of Artificial Sequence: Synthetic oligonucleotide
  Target: LAMA2; (+) strand; PAM type: YTN; PAM sequence: TTA
catatatccctgcacagttt

SEQ ID NO: 397850 - DNA, 20 bp, Artificial Sequence
  Description of Artificial Sequence: Synthetic oligonucleotide
  Target: LAMA2; (+) strand; PAM type: YTN; PAM sequence: CTG
cacagtttgagcagttttct

SEQ ID NO: 397851 - DNA, 20 bp, Artificial Sequence
  Description of Artificial Sequence: Synthetic oligonucleotide
  Target: LAMA2; (+) strand; PAM type: YTN; PAM sequence: TTT
gagcagttttctttattgaa

SEQ ID NO: 397852 - DNA, 20 bp, Artificial Sequence
  Description of Artificial Sequence: Synthetic oligonucleotide
  Target: LAMA2; (+) strand; PAM type: YTN; PAM sequence: TTG
agcagttttctttattgaaa

SEQ ID NO: 397853 - DNA, 20 bp, Artificial Sequence
  Description of Artificial Sequence: Synthetic oligonucleotide
  Target: LAMA2; (+) strand; PAM type: YTN; PAM sequence: TTT
tctttattgaaaatattttt

SEQ ID NO: 397854 - DNA, 20 bp, Artificial Sequence
  Description of Artificial Sequence: Synthetic oligonucleotide
  Target: LAMA2; (+) strand; PAM type: YTN; PAM sequence: TTT
ctttattgaaaatattttta

SEQ ID NO: 397855 - DNA, 20 bp, Artificial Sequence
  Description of Artificial Sequence: Synthetic oligonucleotide
  Target: LAMA2; (+) strand; PAM type: YTN; PAM sequence: TTC
tttattgaaaatatttttaa

SEQ ID NO: 397856 - DNA, 20 bp, Artificial Sequence
  Description of Artificial Sequence: Synthetic oligonucleotide
  Target: LAMA2; (+) strand; PAM type: YTN; PAM sequence: CTT
tattgaaaatatttttaatt

SEQ ID NO: 397857 - DNA, 20 bp, Artificial Sequence
  Description of Artificial Sequence: Synthetic oligonucleotide
  Target: LAMA2; (+) strand; PAM type: YTN; PAM sequence: TTT
attgaaaatatttttaattt

SEQ ID NO: 397858 - DNA, 20 bp, Artificial Sequence
  Description of Artificial Sequence: Synthetic oligonucleotide
  Target: LAMA2; (+) strand; PAM type: YTN; PAM sequence: TTA
ttgaaaatatttttaattta

SEQ ID NO: 397859 - DNA, 20 bp, Artificial Sequence
  Description of Artificial Sequence: Synthetic oligonucleotide
  Target: LAMA2; (+) strand; PAM type: YTN; PAM sequence: TTG
aaaatatttttaatttaaaa

SEQ ID NO: 397860 - DNA, 20 bp, Artificial Sequence
  Description of Artificial Sequence: Synthetic oligonucleotide
  Target: LAMA2; (+) strand; PAM type: YTN; PAM sequence: TTT
ttaatttaaaatcattttaa

SEQ ID NO: 397861 - DNA, 20 bp, Artificial Sequence
  Description of Artificial Sequence: Synthetic oligonucleotide
  Target: LAMA2; (+) strand; PAM type: YTN; PAM sequence: TTT
taatttaaaatcattttaag

SEQ ID NO: 397862 - DNA, 20 bp, Artificial Sequence
  Description of Artificial Sequence: Synthetic oligonucleotide
  Target: LAMA2; (+) strand; PAM type: YTN; PAM sequence: TTT
aatttaaaatcattttaagt

SEQ ID NO: 397863 - DNA, 20 bp, Artificial Sequence
  Description of Artificial Sequence: Synthetic oligonucleotide
  Target: LAMA2; (+) strand; PAM type: YTN; PAM sequence: TTA
atttaaaatcattttaagtt

SEQ ID NO: 397864 - DNA, 20 bp, Artificial Sequence
  Description of Artificial Sequence: Synthetic oligonucleotide
  Target: LAMA2; (+) strand; PAM type: YTN; PAM sequence: TTT
aaaatcattttaagttttat

SEQ ID NO: 397865 - DNA, 20 bp, Artificial Sequence
  Description of Artificial Sequence: Synthetic oligonucleotide
  Target: LAMA2; (+) strand; PAM type: YTN; PAM sequence: TTA
aaatcattttaagttttata

SEQ ID NO: 397866 - DNA, 20 bp, Artificial Sequence
  Description of Artificial Sequence: Synthetic oligonucleotide
  Target: LAMA2; (+) strand; PAM type: YTN; PAM sequence: TTT
taagttttatattatcttgg

SEQ ID NO: 397867 - DNA, 20 bp, Artificial Sequence
  Description of Artificial Sequence: Synthetic oligonucleotide
  Target: LAMA2; (+) strand; PAM type: YTN; PAM sequence: TTT
aagttttatattatcttggc

SEQ ID NO: 397868 - DNA, 20 bp, Artificial Sequence
  Description of Artificial Sequence: Synthetic oligonucleotide
  Target: LAMA2; (+) strand; PAM type: YTN; PAM sequence: TTA
agttttatattatcttggca

SEQ ID NO: 397869 - DNA, 20 bp, Artificial Sequence
  Description of Artificial Sequence: Synthetic oligonucleotide
  Target: LAMA2; (+) strand; PAM type: YTN; PAM sequence: TTT
tatattatcttggcacatta

SEQ ID NO: 397870 - DNA, 20 bp, Artificial Sequence
  Description of Artificial Sequence: Synthetic oligonucleotide
  Target: LAMA2; (+) strand; PAM type: YTN; PAM sequence: TTT
atattatcttggcacattaa

SEQ ID NO: 397871 - DNA, 20 bp, Artificial Sequence
  Description of Artificial Sequence: Synthetic oligonucleotide
  Target: LAMA2; (+) strand; PAM type: YTN; PAM sequence: TTA
tattatcttggcacattaac

SEQ ID NO: 397872 - DNA, 20 bp, Artificial Sequence
  Description of Artificial Sequence: Synthetic oligonucleotide
  Target: LAMA2; (+) strand; PAM type: YTN; PAM sequence: TTA
tcttggcacattaacccctg

SEQ ID NO: 397873 - DNA, 20 bp, Artificial Sequence
  Description of Artificial Sequence: Synthetic oligonucleotide
  Target: LAMA2; (+) strand; PAM type: YTN; PAM sequence: CTT
ggcacattaacccctgtgga

SEQ ID NO: 397874 - DNA, 20 bp, Artificial Sequence
  Description of Artificial Sequence: Synthetic oligonucleotide
  Target: LAMA2; (+) strand; PAM type: YTN; PAM sequence: TTG
gcacattaacccctgtggaa

SEQ ID NO: 397875 - DNA, 20 bp, Artificial Sequence
  Description of Artificial Sequence: Synthetic oligonucleotide
  Target: LAMA2; (+) strand; PAM type: YTN; PAM sequence: TTA
acccctgtggaaatgtgtaa

SEQ ID NO: 397876 - DNA, 20 bp, Artificial Sequence
  Description of Artificial Sequence: Synthetic oligonucleotide
  Target: LAMA2; (+) strand; PAM type: YTN; PAM sequence: CTG
tggaaatgtgtaagacttct

SEQ ID NO: 397877 - DNA, 20 bp, Artificial Sequence
  Description of Artificial Sequence: Synthetic oligonucleotide
  Target: LAMA2; (+) strand; PAM type: YTN; PAM sequence: CTT
ctcttctaaaataaattatt

SEQ ID NO: 397878 - DNA, 20 bp, Artificial Sequence
  Description of Artificial Sequence: Synthetic oligonucleotide
  Target: LAMA2; (+) strand; PAM type: YTN; PAM sequence: TTC
tcttctaaaataaattattt

SEQ ID NO: 397879 - DNA, 20 bp, Artificial Sequence
  Description of Artificial Sequence: Synthetic oligonucleotide
  Target: LAMA2; (+) strand; PAM type: YTN; PAM sequence: CTC
ttctaaaataaattatttca

SEQ ID NO: 397880 - DNA, 20 bp, Artificial Sequence
  Description of Artificial Sequence: Synthetic oligonucleotide
  Target: LAMA2; (+) strand; PAM type: YTN; PAM sequence: CTT
ctaaaataaattatttcata

SEQ ID NO: 397881 - DNA, 20 bp, Artificial Sequence
  Description of Artificial Sequence: Synthetic oligonucleotide
  Target: LAMA2; (+) strand; PAM type: YTN; PAM sequence: TTC
taaaataaattatttcataa

SEQ ID NO: 397882 - DNA, 20 bp, Artificial Sequence
  Description of Artificial Sequence: Synthetic oligonucleotide
  Target: LAMA2; (+) strand; PAM type: YTN; PAM sequence: CTA
aaataaattatttcataaag

SEQ ID NO: 397883 - DNA, 20 bp, Artificial Sequence
  Description of Artificial Sequence: Synthetic oligonucleotide
  Target: LAMA2; (+) strand; PAM type: YTN; PAM sequence: TTA
tttcataaagagagagagta

SEQ ID NO: 397884 - DNA, 20 bp, Artificial Sequence
  Description of Artificial Sequence: Synthetic oligonucleotide
  Target: LAMA2; (+) strand; PAM type: YTN; PAM sequence: TTT
cataaagagagagagtaata

SEQ ID NO: 397885 - DNA, 20 bp, Artificial Sequence
  Description of Artificial Sequence: Synthetic oligonucleotide
  Target: LAMA2; (+) strand; PAM type: YTN; PAM sequence: TTC
ataaagagagagagtaatag

SEQ ID NO: 397886 - DNA, 20 bp, Artificial Sequence
  Description of Artificial Sequence: Synthetic oligonucleotide
  Target: LAMA2; (+) strand; PAM type: YTN; PAM sequence: CTG
atgaatttttagttactact

SEQ ID NO: 397887 - DNA, 20 bp, Artificial Sequence
  Description of Artificial Sequence: Synthetic oligonucleotide
  Target: LAMA2; (+) strand; PAM type: YTN; PAM sequence: TTT
ttagttactactgtctttaa

SEQ ID NO: 397888 - DNA, 20 bp, Artificial Sequence
  Description of Artificial Sequence: Synthetic oligonucleotide
  Target: LAMA2; (+) strand; PAM type: YTN; PAM sequence: TTT
tagttactactgtctttaaa

SEQ ID NO: 397889 - DNA, 20 bp, Artificial Sequence
  Description of Artificial Sequence: Synthetic oligonucleotide
  Target: LAMA2; (+) strand; PAM type: YTN; PAM sequence: TTT
agttactactgtctttaaaa

SEQ ID NO: 397890 - DNA, 20 bp, Artificial Sequence
  Description of Artificial Sequence: Synthetic oligonucleotide
  Target: LAMA2; (+) strand; PAM type: YTN; PAM sequence: TTA
gttactactgtctttaaaaa

SEQ ID NO: 397891 - DNA, 20 bp, Artificial Sequence
  Description of Artificial Sequence: Synthetic oligonucleotide
  Target: LAMA2; (+) strand; PAM type: YTN; PAM sequence: TTA
ctactgtctttaaaaagtaa

SEQ ID NO: 397892 - DNA, 20 bp, Artificial Sequence
  Description of Artificial Sequence: Synthetic oligonucleotide
  Target: LAMA2; (+) strand; PAM type: YTN; PAM sequence: CTA
ctgtctttaaaaagtaaaca

SEQ ID NO: 397893 - DNA, 20 bp, Artificial Sequence
  Description of Artificial Sequence: Synthetic oligonucleotide
  Target: LAMA2; (+) strand; PAM type: YTN; PAM sequence: CTG
tctttaaaaagtaaacaaaa

SEQ ID NO: 397894 - DNA, 20 bp, Artificial Sequence
  Description of Artificial Sequence: Synthetic oligonucleotide
  Target: LAMA2; (+) strand; PAM type: YTN; PAM sequence: CTT
taaaaagtaaacaaaaaaac

SEQ ID NO: 397895 - DNA, 20 bp, Artificial Sequence
  Description of Artificial Sequence: Synthetic oligonucleotide
  Target: LAMA2; (+) strand; PAM type: YTN; PAM sequence: TTT
aaaaagtaaacaaaaaaaca

SEQ ID NO: 397896 - DNA, 20 bp, Artificial Sequence
  Description of Artificial Sequence: Synthetic oligonucleotide
  Target: LAMA2; (+) strand; PAM type: YTN; PAM sequence: TTA
aaaagtaaacaaaaaaacag

SEQ ID NO: 397897 - DNA, 20 bp, Artificial Sequence
  Description of Artificial Sequence: Synthetic oligonucleotide
  Target: LAMA2; (+) strand; PAM type: YTN; PAM sequence: TTT
tacatcttttacagccaact

SEQ ID NO: 397898 - DNA, 20 bp, Artificial Sequence
  Description of Artificial Sequence: Synthetic oligonucleotide
  Target: LAMA2; (+) strand; PAM type: YTN; PAM sequence: TTT
acatcttttacagccaactc

SEQ ID NO: 397899 - DNA, 20 bp, Artificial Sequence
  Description of Artificial Sequence: Synthetic oligonucleotide
  Target: LAMA2; (+) strand; PAM type: YTN; PAM sequence: TTA
catcttttacagccaactct

SEQ ID NO: 397900 - DNA, 20 bp, Artificial Sequence
  Description of Artificial Sequence: Synthetic oligonucleotide
  Target: LAMA2; (+) strand; PAM type: YTN; PAM sequence: CTT
ttacagccaactctttcaat

SEQ ID NO: 397901 - DNA, 20 bp, Artificial Sequence
  Description of Artificial Sequence: Synthetic oligonucleotide
  Target: LAMA2; (+) strand; PAM type: YTN; PAM sequence: TTT
tacagccaactctttcaatg

SEQ ID NO: 397902 - DNA, 20 bp, Artificial Sequence
  Description of Artificial Sequence: Synthetic oligonucleotide
  Target: LAMA2; (+) strand; PAM type: YTN; PAM sequence: TTT
acagccaactctttcaatga

SEQ ID NO: 397903 - DNA, 20 bp, Artificial Sequence
  Description of Artificial Sequence: Synthetic oligonucleotide
  Target: LAMA2; (+) strand; PAM type: YTN; PAM sequence: TTA
cagccaactctttcaatgag

SEQ ID NO: 397904 - DNA, 20 bp, Artificial Sequence
  Description of Artificial Sequence: Synthetic oligonucleotide
  Target: LAMA2; (+) strand; PAM type: YTN; PAM sequence: CTC
tttcaatgagttcaaaaatt

SEQ ID NO: 397905 - DNA, 20 bp, Artificial Sequence
  Description of Artificial Sequence: Synthetic oligonucleotide
  Target: LAMA2; (+) strand; PAM type: YTN; PAM sequence: CTT
tcaatgagttcaaaaatttc

SEQ ID NO: 397906 - DNA, 20 bp, Artificial Sequence
  Description of Artificial Sequence: Synthetic oligonucleotide
  Target: LAMA2; (+) strand; PAM type: YTN; PAM sequence: TTT
caatgagttcaaaaatttca

SEQ ID NO: 397907 - DNA, 20 bp, Artificial Sequence
  Description of Artificial Sequence: Synthetic oligonucleotide
  Target: LAMA2; (+) strand; PAM type: YTN; PAM sequence: TTC
aatgagttcaaaaatttcat

SEQ ID NO: 397908 - DNA, 20 bp, Artificial Sequence
  Description of Artificial Sequence: Synthetic oligonucleotide
  Target: LAMA2; (+) strand; PAM type: YTN; PAM sequence: TTC
aaaaatttcatctctaataa

SEQ ID NO: 397909 - DNA, 20 bp, Artificial Sequence
  Description of Artificial Sequence: Synthetic oligonucleotide
  Target: LAMA2; (+) strand; PAM type: YTN; PAM sequence: TTT
catctctaataaaaaagtaa

SEQ ID NO: 397910 - DNA, 20 bp, Artificial Sequence
  Description of Artificial Sequence: Synthetic oligonucleotide
  Target: LAMA2; (+) strand; PAM type: YTN; PAM sequence: TTC
atctctaataaaaaagtaat

SEQ ID NO: 397911 - DNA, 20 bp, Artificial Sequence
  Description of Artificial Sequence: Synthetic oligonucleotide
  Target: LAMA2; (+) strand; PAM type: YTN; PAM sequence: CTC
taataaaaaagtaatttggg

SEQ ID NO: 397912 - DNA, 20 bp, Artificial Sequence
  Description of Artificial Sequence: Synthetic oligonucleotide
  Target: LAMA2; (+) strand; PAM type: YTN; PAM sequence: CTA
ataaaaaagtaatttgggga

SEQ ID NO: 397913 - DNA, 20 bp, Artificial Sequence
  Description of Artificial Sequence: Synthetic oligonucleotide
  Target: LAMA2; (+) strand; PAM type: YTN; PAM sequence: TTT
ggggaacatttaggaaaaaa

SEQ ID NO: 397914 - DNA, 20 bp, Artificial Sequence
  Description of Artificial Sequence: Synthetic oligonucleotide
  Target: LAMA2; (+) strand; PAM type: YTN; PAM sequence: TTG
gggaacatttaggaaaaaag

SEQ ID NO: 397915 - DNA, 20 bp, Artificial Sequence
  Description of Artificial Sequence: Synthetic oligonucleotide
  Target: LAMA2; (+) strand; PAM type: YTN; PAM sequence: TTT
aggaaaaaagcaaaatatat

SEQ ID NO: 397916 - DNA, 20 bp, Artificial Sequence
  Description of Artificial Sequence: Synthetic oligonucleotide
  Target: LAMA2; (+) strand; PAM type: YTN; PAM sequence: TTA
ggaaaaaagcaaaatatata

SEQ ID NO: 397917 - DNA, 20 bp, Artificial Sequence
  Description of Artificial Sequence: Synthetic oligonucleotide
  Target: LAMA2; (+) strand; PAM type: YTN; PAM sequence: CTT
ttaaacttgcttgtttagaa

SEQ ID NO: 397918 - DNA, 20 bp, Artificial Sequence
  Description of Artificial Sequence: Synthetic oligonucleotide
  Target: LAMA2; (+) strand; PAM type: YTN; PAM sequence: TTT
taaacttgcttgtttagaaa

SEQ ID NO: 397919 - DNA, 20 bp, Artificial Sequence
  Description of Artificial Sequence: Synthetic oligonucleotide
  Target: LAMA2; (+) strand; PAM type: YTN; PAM sequence: TTT
aaacttgcttgtttagaaaa

SEQ ID NO: 397920 - DNA, 20 bp, Artificial Sequence
  Description of Artificial Sequence: Synthetic oligonucleotide
  Target: LAMA2; (+) strand; PAM type: YTN; PAM sequence: TTA
aacttgcttgtttagaaaat

SEQ ID NO: 397921 - DNA, 20 bp, Artificial Sequence
  Description of Artificial Sequence: Synthetic oligonucleotide
  Target: LAMA2; (+) strand; PAM type: YTN; PAM sequence: CTT
gcttgtttagaaaatcactg

SEQ ID NO: 397922 - DNA, 20 bp, Artificial Sequence
  Description of Artificial Sequence: Synthetic oligonucleotide
  Target: LAMA2; (+) strand; PAM type: YTN; PAM sequence: TTG
cttgtttagaaaatcactgg

SEQ ID NO: 397923 - DNA, 20 bp, Artificial Sequence
  Description of Artificial Sequence: Synthetic oligonucleotide
  Target: LAMA2; (+) strand; PAM type: YTN; PAM sequence: CTT
gtttagaaaatcactggggt

SEQ ID NO: 397924 - DNA, 20 bp, Artificial Sequence
  Description of Artificial Sequence: Synthetic oligonucleotide
  Target: LAMA2; (+) strand; PAM type: YTN; PAM sequence: TTG
tttagaaaatcactggggta

SEQ ID NO: 397925 - DNA, 20 bp, Artificial Sequence
  Description of Artificial Sequence: Synthetic oligonucleotide
  Target: LAMA2; (+) strand; PAM type: YTN; PAM sequence: TTT
agaaaatcactggggtacag

SEQ ID NO: 397926 - DNA, 20 bp, Artificial Sequence
  Description of Artificial Sequence: Synthetic oligonucleotide
  Target: LAMA2; (+) strand; PAM type: YTN; PAM sequence: TTA
gaaaatcactggggtacagg

SEQ ID NO: 397927 - DNA, 20 bp, Artificial Sequence
  Description of Artificial Sequence: Synthetic oligonucleotide
  Target: LAMA2; (+) strand; PAM type: YTN; PAM sequence: CTG
gggtacaggttagtcagcct

SEQ ID NO: 397928 - DNA, 20 bp, Artificial Sequence
  Description of Artificial Sequence: Synthetic oligonucleotide
  Target: LAMA2; (+) strand; PAM type: YTN; PAM sequence: TTA
gtcagcctgataaactctaa

SEQ ID NO: 397929 - DNA, 20 bp, Artificial Sequence
  Description of Artificial Sequence: Synthetic oligonucleotide
  Target: LAMA2; (+) strand; PAM type: YTN; PAM sequence: CTG
ataaactctaacttgccttc

SEQ ID NO: 397930 - DNA, 20 bp, Artificial Sequence
  Description of Artificial Sequence: Synthetic oligonucleotide
  Target: LAMA2; (+) strand; PAM type: YTN; PAM sequence: CTC
taacttgccttcacacctcc

SEQ ID NO: 397931 - DNA, 20 bp, Artificial Sequence
  Description of Artificial Sequence: Synthetic oligonucleotide
  Target: LAMA2; (+) strand; PAM type: YTN; PAM sequence: CTA
acttgccttcacacctccct

SEQ ID NO: 397932 - DNA, 20 bp, Artificial Sequence
  Description of Artificial Sequence: Synthetic oligonucleotide
  Target: LAMA2; (+) strand; PAM type: YTN; PAM sequence: CTT
gccttcacacctccctcctc

SEQ ID NO: 397933 - DNA, 20 bp, Artificial Sequence
  Description of Artificial Sequence: Synthetic oligonucleotide
  Target: LAMA2; (+) strand; PAM type: YTN; PAM sequence: TTG
ccttcacacctccctcctcc

SEQ ID NO: 397934 - DNA, 20 bp, Artificial Sequence
  Description of Artificial Sequence: Synthetic oligonucleotide
  Target: LAMA2; (+) strand; PAM type: YTN; PAM sequence: CTT
cacacctccctcctccagca

SEQ ID NO: 397935 - DNA, 20 bp, Artificial Sequence
  Description of Artificial Sequence: Synthetic oligonucleotide
  Target: LAMA2; (+) strand; PAM type: YTN; PAM sequence: TTC
acacctccctcctccagcag

SEQ ID NO: 397936 - DNA, 20 bp, Artificial Sequence
  Description of Artificial Sequence: Synthetic oligonucleotide
  Target: LAMA2; (+) strand; PAM type: YTN; PAM sequence: CTC
cctcctccagcagagcctcc

SEQ ID NO: 397937 - DNA, 20 bp, Artificial Sequence
  Description of Artificial Sequence: Synthetic oligonucleotide
  Target: LAMA2; (+) strand; PAM type: YTN; PAM sequence: CTC
ctccagcagagcctcctctg

SEQ ID NO: 397938 - DNA, 20 bp, Artificial Sequence
  Description of Artificial Sequence: Synthetic oligonucleotide
  Target: LAMA2; (+) strand; PAM type: YTN; PAM sequence: CTC
cagcagagcctcctctgaca

SEQ ID NO: 397939 - DNA, 20 bp, Artificial Sequence
  Description of Artificial Sequence: Synthetic oligonucleotide
  Target: LAMA2; (+) strand; PAM type: YTN; PAM sequence: CTC
ctctgacagccaaacatcta

SEQ ID NO: 397940 - DNA, 20 bp, Artificial Sequence
  Description of Artificial Sequence: Synthetic oligonucleotide
  Target: LAMA2; (+) strand; PAM type: YTN; PAM sequence: CTC
tgacagccaaacatctaggc

SEQ ID NO: 397941 - DNA, 20 bp, Artificial Sequence
  Description of Artificial Sequence: Synthetic oligonucleotide
  Target: LAMA2; (+) strand; PAM type: YTN; PAM sequence: CTG
acagccaaacatctaggcat

SEQ ID NO: 397942 - DNA, 20 bp, Artificial Sequence
  Description of Artificial Sequence: Synthetic oligonucleotide
  Target: LAMA2; (+) strand; PAM type: YTN; PAM sequence: CTA
ggcatttctgtgttccatta

SEQ ID NO: 397943 - DNA, 20 bp, Artificial Sequence
  Description of Artificial Sequence: Synthetic oligonucleotide
  Target: LAMA2; (+) strand; PAM type: YTN; PAM sequence: TTT
ctgtgttccattatggtaat

SEQ ID NO: 397944 - DNA, 20 bp, Artificial Sequence
  Description of Artificial Sequence: Synthetic oligonucleotide
  Target: LAMA2; (+) strand; PAM type: YTN; PAM sequence: TTC
tgtgttccattatggtaatg

SEQ ID NO: 397945 - DNA, 20 bp, Artificial Sequence
  Description of Artificial Sequence: Synthetic oligonucleotide
  Target: LAMA2; (+) strand; PAM type: YTN; PAM sequence: CTG
tgttccattatggtaatgat

SEQ ID NO: 397946 - DNA, 20 bp, Artificial Sequence
  Description of Artificial Sequence: Synthetic oligonucleotide
  Target: LAMA2; (+) strand; PAM type: YTN; PAM sequence: TTC
cattatggtaatgattgtct

SEQ ID NO: 397947 - DNA, 20 bp, Artificial Sequence
  Description of Artificial Sequence: Synthetic oligonucleotide
  Target: LAMA2; (+) strand; PAM type: YTN; PAM sequence: TTA
tggtaatgattgtctttttt

SEQ ID NO: 397948 - DNA, 20 bp, Artificial Sequence
  Description of Artificial Sequence: Synthetic oligonucleotide
  Target: LAMA2; (+) strand; PAM type: YTN; PAM sequence: TTG
tctttttttataagtgacta

SEQ ID NO: 397949 - DNA, 20 bp, Artificial Sequence
  Description of Artificial Sequence: Synthetic oligonucleotide
  Target: LAMA2; (+) strand; PAM type: YTN; PAM sequence: CTT
tttttataagtgactatatt

SEQ ID NO: 397950 - DNA, 20 bp, Artificial Sequence
  Description of Artificial Sequence: Synthetic oligonucleotide
  Target: LAMA2; (+) strand; PAM type: YTN; PAM sequence: TTT
ttttataagtgactatattt

SEQ ID NO: 397951 - DNA, 20 bp, Artificial Sequence
  Description of Artificial Sequence: Synthetic oligonucleotide
  Target: LAMA2; (+) strand; PAM type: YTN; PAM sequence: TTT
tttataagtgactatatttg

SEQ ID NO: 397952 - DNA, 20 bp, Artificial Sequence
  Description of Artificial Sequence: Synthetic oligonucleotide
  Target: LAMA2; (+) strand; PAM type: YTN; PAM sequence: TTT
ttataagtgactatatttgt

SEQ ID NO: 397953 - DNA, 20 bp, Artificial Sequence
  Description of Artificial Sequence: Synthetic oligonucleotide
  Target: LAMA2; (+) strand; PAM type: YTN; PAM sequence: TTT
tataagtgactatatttgtt

SEQ ID NO: 397954 - DNA, 20 bp, Artificial Sequence
  Description of Artificial Sequence: Synthetic oligonucleotide
  Target: LAMA2; (+) strand; PAM type: YTN; PAM sequence: TTT
ataagtgactatatttgttt

SEQ ID NO: 397955 - DNA, 20 bp, Artificial Sequence
  Description of Artificial Sequence: Synthetic oligonucleotide
  Target: LAMA2; (+) strand; PAM type: YTN; PAM sequence: TTA
taagtgactatatttgtttg

SEQ ID NO: 397956 - DNA, 20 bp, Artificial Sequence
  Description of Artificial Sequence: Synthetic oligonucleotide
  Target: LAMA2; (+) strand; PAM type: YTN; PAM sequence: CTA
tatttgtttgtctttcctct

SEQ ID NO: 397957 - DNA, 20 bp, Artificial Sequence
  Description of Artificial Sequence: Synthetic oligonucleotide
  Target: LAMA2; (+) strand; PAM type: YTN; PAM sequence: TTT
gtttgtctttcctcttccct

SEQ ID NO: 397958 - DNA, 20 bp, Artificial Sequence
  Description of Artificial Sequence: Synthetic oligonucleotide
  Target: LAMA2; (+) strand; PAM type: YTN; PAM sequence: TTG
tttgtctttcctcttccctc

SEQ ID NO: 397959 - DNA, 20 bp, Artificial Sequence
  Description of Artificial Sequence: Synthetic oligonucleotide
  Target: LAMA2; (+) strand; PAM type: YTN; PAM sequence: TTT
gtctttcctcttccctccac

SEQ ID NO: 397960 - DNA, 20 bp, Artificial Sequence
  Description of Artificial Sequence: Synthetic oligonucleotide
  Target: LAMA2; (+) strand; PAM type: YTN; PAM sequence: TTG
tctttcctcttccctccact

SEQ ID NO: 397961 - DNA, 20 bp, Artificial Sequence
  Description of Artificial Sequence: Synthetic oligonucleotide
  Target: LAMA2; (+) strand; PAM type: YTN; PAM sequence: CTT
tcctcttccctccactccag

SEQ ID NO: 397962 - DNA, 20 bp, Artificial Sequence
  Description of Artificial Sequence: Synthetic oligonucleotide
  Target: LAMA2; (+) strand; PAM type: YTN; PAM sequence: TTT
cctcttccctccactccagt

SEQ ID NO: 397963 - DNA, 20 bp, Artificial Sequence
  Description of Artificial Sequence: Synthetic oligonucleotide
  Target: LAMA2; (+) strand; PAM type: YTN; PAM sequence: TTC
ctcttccctccactccagtt

SEQ ID NO: 397964 - DNA, 20 bp, Artificial Sequence
  Description of Artificial Sequence: Synthetic oligonucleotide
  Target: LAMA2; (+) strand; PAM type: YTN; PAM sequence: CTC
ttccctccactccagttcca

SEQ ID NO: 397965 - DNA, 20 bp, Artificial Sequence
  Description of Artificial Sequence: Synthetic oligonucleotide
  Target: LAMA2; (+) strand; PAM type: YTN; PAM sequence: CTT
ccctccactccagttccatt

SEQ ID NO: 397966 - DNA, 20 bp, Artificial Sequence
  Description of Artificial Sequence: Synthetic oligonucleotide
  Target: LAMA2; (+) strand; PAM type: YTN; PAM sequence: TTC
cctccactccagttccatta

SEQ ID NO: 397967 - DNA, 20 bp, Artificial Sequence
  Description of Artificial Sequence: Synthetic oligonucleotide
  Target: LAMA2; (+) strand; PAM type: YTN; PAM sequence: CTC
cactccagttccattaggga

SEQ ID NO: 397968 - DNA, 20 bp, Artificial Sequence
  Description of Artificial Sequence: Synthetic oligonucleotide
  Target: LAMA2; (+) strand; PAM type: YTN; PAM sequence: CTC
cagttccattagggaaggca

SEQ ID NO: 397969 - DNA, 20 bp, Artificial Sequence
  Description of Artificial Sequence: Synthetic oligonucleotide
  Target: LAMA2; (+) strand; PAM type: YTN; PAM sequence: TTC
cattagggaaggcatagtct

SEQ ID NO: 397970 - DNA, 20 bp, Artificial Sequence
  Description of Artificial Sequence: Synthetic oligonucleotide
  Target: LAMA2; (+) strand; PAM type: YTN; PAM sequence: TTA
gggaaggcatagtctttcca

SEQ ID NO: 397971 - DNA, 20 bp, Artificial Sequence
  Description of Artificial Sequence: Synthetic oligonucleotide
  Target: LAMA2; (+) strand; PAM type: YTN; PAM sequence: CTT
tccattttgaatatttggtg

SEQ ID NO: 397972 - DNA, 20 bp, Artificial Sequence
  Description of Artificial Sequence: Synthetic oligonucleotide
  Target: LAMA2; (+) strand; PAM type: YTN; PAM sequence: TTT
ccattttgaatatttggtgc

SEQ ID NO: 397973 - DNA, 20 bp, Artificial Sequence
  Description of Artificial Sequence: Synthetic oligonucleotide
  Target: LAMA2; (+) strand; PAM type: YTN; PAM sequence: TTC
cattttgaatatttggtgct

SEQ ID NO: 397974 - DNA, 20 bp, Artificial Sequence
  Description of Artificial Sequence: Synthetic oligonucleotide
  Target: LAMA2; (+) strand; PAM type: YTN; PAM sequence: TTT
tgaatatttggtgcttgaga

SEQ ID NO: 397975 - DNA, 20 bp, Artificial Sequence
  Description of Artificial Sequence: Synthetic oligonucleotide
  Target: LAMA2; (+) strand; PAM type: YTN; PAM sequence: TTT
gaatatttggtgcttgagat

SEQ ID NO: 397976 - DNA, 20 bp, Artificial Sequence
  Description of Artificial Sequence: Synthetic oligonucleotide
  Target: LAMA2; (+) strand; PAM type: YTN; PAM sequence: TTG
aatatttggtgcttgagata

SEQ ID NO: 397977 - DNA, 20 bp, Artificial Sequence
  Description of Artificial Sequence: Synthetic oligonucleotide
  Target: LAMA2; (+) strand; PAM type: YTN; PAM sequence: TTT
ggtgcttgagataaataaaa

SEQ ID NO: 397978 - DNA, 20 bp, Artificial Sequence
  Description of Artificial Sequence: Synthetic oligonucleotide
  Target: LAMA2; (+) strand; PAM type: YTN; PAM sequence: TTG
gtgcttgagataaataaaaa

SEQ ID NO: 397979 - DNA, 20 bp, Artificial Sequence
  Description of Artificial Sequence: Synthetic oligonucleotide
  Target: LAMA2; (+) strand; PAM type: YTN; PAM sequence: CTT
gagataaataaaaagttttg

SEQ ID NO: 397980 - DNA, 20 bp, Artificial Sequence
  Description of Artificial Sequence: Synthetic oligonucleotide
  Target: LAMA2; (+) strand; PAM type: YTN; PAM sequence: TTG
agataaataaaaagttttgt

SEQ ID NO: 397981 - DNA, 20 bp, Artificial Sequence
  Description of Artificial Sequence: Synthetic oligonucleotide
  Target: LAMA2; (+) strand; PAM type: YTN; PAM sequence: TTT
tgttgggtaaataaatcaat

SEQ ID NO: 397982 - DNA, 20 bp, Artificial Sequence
  Description of Artificial Sequence: Synthetic oligonucleotide
  Target: LAMA2; (+) strand; PAM type: YTN; PAM sequence: TTT
gttgggtaaataaatcaatt

SEQ ID NO: 397983 - DNA, 20 bp, Artificial Sequence
  Description of Artificial Sequence: Synthetic oligonucleotide
  Target: LAMA2; (+) strand; PAM type: YTN; PAM sequence: TTG
ttgggtaaataaatcaattc

SEQ ID NO: 397984 - DNA, 20 bp, Artificial Sequence
  Description of Artificial Sequence: Synthetic oligonucleotide
  Target: LAMA2; (+) strand; PAM type: YTN; PAM sequence: TTG
ggtaaataaatcaattcact

SEQ ID NO: 397985 - DNA, 20 bp, Artificial Sequence
  Description of Artificial Sequence: Synthetic oligonucleotide
  Target: LAMA2; (+) strand; PAM type: YTN; PAM sequence: TTC
acttatctattaatcaatgg

SEQ ID NO: 397986 - DNA, 20 bp, Artificial Sequence
  Description of Artificial Sequence: Synthetic oligonucleotide
  Target: LAMA2; (+) strand; PAM type: YTN; PAM sequence: CTT
atctattaatcaatggcagt

SEQ ID NO: 397987 - DNA, 20 bp, Artificial Sequence
  Description of Artificial Sequence: Synthetic oligonucleotide
  Target: LAMA2; (+) strand; PAM type: YTN; PAM sequence: TTA
tctattaatcaatggcagta

SEQ ID NO: 397988 - DNA, 20 bp, Artificial Sequence
  Description of Artificial Sequence: Synthetic oligonucleotide
  Target: LAMA2; (+) strand; PAM type: YTN; PAM sequence: CTA
ttaatcaatggcagtatgct

SEQ ID NO: 397989 - DNA, 20 bp, Artificial Sequence
  Description of Artificial Sequence: Synthetic oligonucleotide
  Target: LAMA2; (+) strand; PAM type: YTN; PAM sequence: TTA
atcaatggcagtatgcttta

SEQ ID NO: 397990 - DNA, 20 bp, Artificial Sequence
  Description of Artificial Sequence: Synthetic oligonucleotide
  Target: LAMA2; (+) strand; PAM type: YTN; PAM sequence: CTT
tagcaagagtaattatgaat

SEQ ID NO: 397991 - DNA, 20 bp, Artificial Sequence
  Description of Artificial Sequence: Synthetic oligonucleotide
  Target: LAMA2; (+) strand; PAM type: YTN; PAM sequence: TTT
agcaagagtaattatgaata

SEQ ID NO: 397992 - DNA, 20 bp, Artificial Sequence
  Description of Artificial Sequence: Synthetic oligonucleotide
  Target: LAMA2; (+) strand; PAM type: YTN; PAM sequence: TTA
gcaagagtaattatgaatat

SEQ ID NO: 397993 - DNA, 20 bp, Artificial Sequence
  Description of Artificial Sequence: Synthetic oligonucleotide
  Target: LAMA2; (+) strand; PAM type: YTN; PAM sequence: TTA
tgaatatctaataagtagta

SEQ ID NO: 397994 - DNA, 20 bp, Artificial Sequence
  Description of Artificial Sequence: Synthetic oligonucleotide
  Target: LAMA2; (+) strand; PAM type: YTN; PAM sequence: CTA
ataagtagtaggaagaggaa

SEQ ID NO: 397995 - DNA, 20 bp, Artificial Sequence
  Description of Artificial Sequence: Synthetic oligonucleotide
  Target: LAMA2; (+) strand; PAM type: YTN; PAM sequence: CTA
acatgtattaaaatgcaatt

SEQ ID NO: 397996 - DNA, 20 bp, Artificial Sequence
  Description of Artificial Sequence: Synthetic oligonucleotide
  Target: LAMA2; (+) strand; PAM type: YTN; PAM sequence: TTA
aaatgcaattacatgccaag

SEQ ID NO: 397997 - DNA, 20 bp, Artificial Sequence
  Description of Artificial Sequence: Synthetic oligonucleotide
  Target: LAMA2; (+) strand; PAM type: YTN; PAM sequence: TTA
catgccaagtcatctgttga

SEQ ID NO: 397998 - DNA, 20 bp, Artificial Sequence
  Description of Artificial Sequence: Synthetic oligonucleotide
  Target: LAMA2; (+) strand; PAM type: YTN; PAM sequence: CTG
ttgaatcctaacagacttta

SEQ ID NO: 397999 - DNA, 20 bp, Artificial Sequence
  Description of Artificial Sequence: Synthetic oligonucleotide
  Target: LAMA2; (+) strand; PAM type: YTN; PAM sequence: TTG
aatcctaacagactttataa

SEQ ID NO: 398000 - DNA, 20 bp, Artificial Sequence
  Description of Artificial Sequence: Synthetic oligonucleotide
  Target: LAMA2; (+) strand; PAM type: YTN; PAM sequence: CTA
acagactttataatttcatt

SEQ ID NO: 398001 - DNA, 20 bp, Artificial Sequence
  Description of Artificial Sequence: Synthetic oligonucleotide
  Target: LAMA2; (+) strand; PAM type: YTN; PAM sequence: CTT
tataatttcattttttcctg

SEQ ID NO: 398002 - DNA, 20 bp, Artificial Sequence
  Description of Artificial Sequence: Synthetic oligonucleotide
  Target: LAMA2; (+) strand; PAM type: YTN; PAM sequence: TTT
ataatttcattttttcctgc

SEQ ID NO: 398003 - DNA, 20 bp, Artificial Sequence
  Description of Artificial Sequence: Synthetic oligonucleotide
  Target: LAMA2; (+) strand; PAM type: YTN; PAM sequence: TTA
taatttcattttttcctgct

SEQ ID NO: 398004 - DNA, 20 bp, Artificial Sequence
  Description of Artificial Sequence: Synthetic oligonucleotide
  Target: LAMA2; (+) strand; PAM type: YTN; PAM sequence: TTT
cattttttcctgctataatg

SEQ ID NO: 398005 - DNA, 20 bp, Artificial Sequence
  Description of Artificial Sequence: Synthetic oligonucleotide
  Target: LAMA2; (+) strand; PAM type: YTN; PAM sequence: TTC
attttttcctgctataatga

SEQ ID NO: 398006 - DNA, 20 bp, Artificial Sequence
  Description of Artificial Sequence: Synthetic oligonucleotide
  Target: LAMA2; (+) strand; PAM type: YTN; PAM sequence: TTT
tttcctgctataatgacgtt

SEQ ID NO: 398007 - DNA, 20 bp, Artificial Sequence
  Description of Artificial Sequence: Synthetic oligonucleotide
  Target: LAMA2; (+) strand; PAM type: YTN; PAM sequence: TTT
ttcctgctataatgacgttt

SEQ ID NO: 398008 - DNA, 20 bp, Artificial Sequence
  Description of Artificial Sequence: Synthetic oligonucleotide
  Target: LAMA2; (+) strand; PAM type: YTN; PAM sequence: TTT
tcctgctataatgacgtttt

SEQ ID NO: 398009 - DNA, 20 bp, Artificial Sequence
  Description of Artificial Sequence: Synthetic oligonucleotide
  Target: LAMA2; (+) strand; PAM type: YTN; PAM sequence: TTT
cctgctataatgacgtttta

SEQ ID NO: 398010 - DNA, 20 bp, Artificial Sequence
  Description of Artificial Sequence: Synthetic oligonucleotide
  Target: LAMA2; (+) strand; PAM type: YTN; PAM sequence: TTC
ctgctataatgacgttttaa

SEQ ID NO: 398011 - DNA, 20 bp, Artificial Sequence
  Description of Artificial Sequence: Synthetic oligonucleotide
  Target: LAMA2; (+) strand; PAM type: YTN; PAM sequence: CTG
ctataatgacgttttaaatt

SEQ ID NO: 398012 - DNA, 20 bp, Artificial Sequence
  Description of Artificial Sequence: Synthetic oligonucleotide
  Target: LAMA2; (+) strand; PAM type: YTN; PAM sequence: CTA
taatgacgttttaaattatc

SEQ ID NO: 398013 - DNA, 20 bp, Artificial Sequence
  Description of Artificial Sequence: Synthetic oligonucleotide
  Target: LAMA2; (+) strand; PAM type: YTN; PAM sequence: TTT
taaattatctcacattttct

SEQ ID NO: 398014 - DNA, 20 bp, Artificial Sequence
  Description of Artificial Sequence: Synthetic oligonucleotide
  Target: LAMA2; (+) strand; PAM type: YTN; PAM sequence: TTT
aaattatctcacattttctt

SEQ ID NO: 398015 - DNA, 20 bp, Artificial Sequence
  Description of Artificial Sequence: Synthetic oligonucleotide
  Target: LAMA2; (+) strand; PAM type: YTN; PAM sequence: TTA
aattatctcacattttctta

SEQ ID NO: 398016 - DNA, 20 bp, Artificial Sequence
  Description of Artificial Sequence: Synthetic oligonucleotide
  Target: LAMA2; (+) strand; PAM type: YTN; PAM sequence: TTA
tctcacattttcttaaacaa

SEQ ID NO: 398017 - DNA, 20 bp, Artificial Sequence
  Description of Artificial Sequence: Synthetic oligonucleotide
  Target: LAMA2; (+) strand; PAM type: YTN; PAM sequence: CTC
acattttcttaaacaattat

SEQ ID NO: 398018 - DNA, 20 bp, Artificial Sequence
  Description of Artificial Sequence: Synthetic oligonucleotide
  Target: LAMA2; (+) strand; PAM type: YTN; PAM sequence: TTT
tcttaaacaattattaacta

SEQ ID NO: 398019 - DNA, 20 bp, Artificial Sequence
  Description of Artificial Sequence: Synthetic oligonucleotide
  Target: LAMA2; (+) strand; PAM type: YTN; PAM sequence: TTT
cttaaacaattattaactaa

SEQ ID NO: 398020 - DNA, 20 bp, Artificial Sequence
  Description of Artificial Sequence: Synthetic oligonucleotide
  Target: LAMA2; (+) strand; PAM type: YTN; PAM sequence: TTC
ttaaacaattattaactaat

SEQ ID NO: 398021 - DNA, 20 bp, Artificial Sequence
  Description of Artificial Sequence: Synthetic oligonucleotide
  Target: LAMA2; (+) strand; PAM type: YTN; PAM sequence: CTT
aaacaattattaactaataa

SEQ ID NO: 398022 - DNA, 20 bp, Artificial Sequence
  Description of Artificial Sequence: Synthetic oligonucleotide
  Target: LAMA2; (+) strand; PAM type: YTN; PAM sequence: TTA
aacaattattaactaataaa

SEQ ID NO: 398023 - DNA, 20 bp, Artificial Sequence
  Description of Artificial Sequence: Synthetic oligonucleotide
  Target: LAMA2; (+) strand; PAM type: YTN; PAM sequence: TTA
ttaactaataaaaacataca

SEQ ID NO: 398024 - DNA, 20 bp, Artificial Sequence
  Description of Artificial Sequence: Synthetic oligonucleotide
  Target: LAMA2; (+) strand; PAM type: YTN; PAM sequence: TTA
actaataaaaacatacagca

SEQ ID NO: 398025 - DNA, 20 bp, Artificial Sequence
  Description of Artificial Sequence: Synthetic oligonucleotide
  Target: LAMA2; (+) strand; PAM type: YTN; PAM sequence: CTA
ataaaaacatacagcaactt

SEQ ID NO: 398026 - DNA, 20 bp, Artificial Sequence
  Description of Artificial Sequence: Synthetic oligonucleotide
  Target: LAMA2; (+) strand; PAM type: YTN; PAM sequence: CTT
acataaaaatagactctgtt

SEQ ID NO: 398027 - DNA, 20 bp, Artificial Sequence
  Description of Artificial Sequence: Synthetic oligonucleotide
  Target: LAMA2; (+) strand; PAM type: YTN; PAM sequence: TTA
cataaaaatagactctgttt

SEQ ID NO: 398028 - DNA, 20 bp, Artificial Sequence
  Description of Artificial Sequence: Synthetic oligonucleotide
  Target: LAMA2; (+) strand; PAM type: YTN; PAM sequence: CTC
tgttttgcatgatatagttg

SEQ ID NO: 398029 - DNA, 20 bp, Artificial Sequence
  Description of Artificial Sequence: Synthetic oligonucleotide
  Target: LAMA2; (+) strand; PAM type: YTN; PAM sequence: CTG
ttttgcatgatatagttgaa

SEQ ID NO: 398030 - DNA, 20 bp, Artificial Sequence
  Description of Artificial Sequence: Synthetic oligonucleotide
  Target: LAMA2; (+) strand; PAM type: YTN; PAM sequence: TTT
tgcatgatatagttgaaatt

SEQ ID NO: 398031 - DNA, 20 bp, Artificial Sequence
  Description of Artificial Sequence: Synthetic oligonucleotide
  Target: LAMA2; (+) strand; PAM type: YTN; PAM sequence: TTT
gcatgatatagttgaaattt

SEQ ID NO: 398032 - DNA, 20 bp, Artificial Sequence
  Description of Artificial Sequence: Synthetic oligonucleotide
  Target: LAMA2; (+) strand; PAM type: YTN; PAM sequence: TTG
catgatatagttgaaatttt

SEQ ID NO: 398033 - DNA, 20 bp, Artificial Sequence
  Description of Artificial Sequence: Synthetic oligonucleotide
  Target: LAMA2; (+) strand; PAM type: YTN; PAM sequence: TTG
aaatttttatataacttgta

SEQ ID NO: 398034 - DNA, 20 bp, Artificial Sequence
  Description of Artificial Sequence: Synthetic oligonucleotide
  Target: LAMA2; (+) strand; PAM type: YTN; PAM sequence: TTT
ttatataacttgtatatcca

SEQ ID NO: 398035 - DNA, 20 bp, Artificial Sequence
  Description of Artificial Sequence: Synthetic oligonucleotide
  Target: LAMA2; (+) strand; PAM type: YTN; PAM sequence: TTT
tatataacttgtatatccat

SEQ ID NO: 398036 - DNA, 20 bp, Artificial Sequence
  Description of Artificial Sequence: Synthetic oligonucleotide
  Target: LAMA2; (+) strand; PAM type: YTN; PAM sequence: TTT
atataacttgtatatccata

SEQ ID NO: 398037 - DNA, 20 bp, Artificial Sequence
  Description of Artificial Sequence: Synthetic oligonucleotide
  Target: LAMA2; (+) strand; PAM type: YTN; PAM sequence: TTA
tataacttgtatatccatat

SEQ ID NO: 398038 - DNA, 20 bp, Artificial Sequence
  Description of Artificial Sequence: Synthetic oligonucleotide
  Target: LAMA2; (+) strand; PAM type: YTN; PAM sequence: CTT
gtatatccatatgtatgaat

SEQ ID NO: 398039 - DNA, 20 bp, Artificial Sequence
  Description of Artificial Sequence: Synthetic oligonucleotide
  Target: LAMA2; (+) strand; PAM type: YTN; PAM sequence: TTG
tatatccatatgtatgaata

SEQ ID NO: 398040 - DNA, 20 bp, Artificial Sequence
  Description of Artificial Sequence: Synthetic oligonucleotide
  Target: LAMA2; (+) strand; PAM type: YTN; PAM sequence: CTC
agaaagagaataccaagaat

SEQ ID NO: 398041 - DNA, 20 bp, Artificial Sequence
  Description of Artificial Sequence: Synthetic oligonucleotide
  Target: LAMA2; (+) strand; PAM type: YTN; PAM sequence: TTT
attgtttaaaaaaaaaaacc

SEQ ID NO: 398042 - DNA, 20 bp, Artificial Sequence
  Description of Artificial Sequence: Synthetic oligonucleotide
  Target: LAMA2; (+) strand; PAM type: YTN; PAM sequence: TTA
ttgtttaaaaaaaaaaacct

SEQ ID NO: 398043 - DNA, 20 bp, Artificial Sequence
  Description of Artificial Sequence: Synthetic oligonucleotide
  Target: LAMA2; (+) strand; PAM type: YTN; PAM sequence: TTG
tttaaaaaaaaaaacctcta

SEQ ID NO: 398044 - DNA, 20 bp, Artificial Sequence
  Description of Artificial Sequence: Synthetic oligonucleotide
  Target: LAMA2; (+) strand; PAM type: YTN; PAM sequence: TTT
aaaaaaaaaaacctctaaaa

SEQ ID NO: 398045 - DNA, 20 bp, Artificial Sequence
  Description of Artificial Sequence: Synthetic oligonucleotide
  Target: LAMA2; (+) strand; PAM type: YTN; PAM sequence: TTA
aaaaaaaaaacctctaaaaa

SEQ ID NO: 398046 - DNA, 20 bp, Artificial Sequence
  Description of Artificial Sequence: Synthetic oligonucleotide
  Target: LAMA2; (+) strand; PAM type: YTN; PAM sequence: CTC
taaaaagcaagaaacaaaat

SEQ ID NO: 398047 - DNA, 20 bp, Artificial Sequence
  Description of Artificial Sequence: Synthetic oligonucleotide
  Target: LAMA2; (+) strand; PAM type: YTN; PAM sequence: CTA
aaaagcaagaaacaaaatat

SEQ ID NO: 398048 - DNA, 20 bp, Artificial Sequence
  Description of Artificial Sequence: Synthetic oligonucleotide
  Target: LAMA2; (+) strand; PAM type: YTN; PAM sequence: CTT
gcaactcaaagaatctcatt

SEQ ID NO: 398049 - DNA, 20 bp, Artificial Sequence
  Description of Artificial Sequence: Synthetic oligonucleotide
  Target: LAMA2; (+) strand; PAM type: YTN; PAM sequence: TTG
caactcaaagaatctcattt

SEQ ID NO: 398050 - DNA, 20 bp, Artificial Sequence
  Description of Artificial Sequence: Synthetic oligonucleotide
  Target: LAMA2; (+) strand; PAM type: YTN; PAM sequence: CTC
aaagaatctcatttatattt

SEQ ID NO: 398051 - DNA, 20 bp, Artificial Sequence
  Description of Artificial Sequence: Synthetic oligonucleotide
  Target: LAMA2; (+) strand; PAM type: YTN; PAM sequence: CTC
atttatatttcacatatgct

SEQ ID NO: 398052 - DNA, 20 bp, Artificial Sequence
  Description of Artificial Sequence: Synthetic oligonucleotide
  Target: LAMA2; (+) strand; PAM type: YTN; PAM sequence: TTT
atatttcacatatgctgtag

SEQ ID NO: 398053 - DNA, 20 bp, Artificial Sequence
  Description of Artificial Sequence: Synthetic oligonucleotide
  Target: LAMA2; (+) strand; PAM type: YTN; PAM sequence: TTA
tatttcacatatgctgtaga

SEQ ID NO: 398054 - DNA, 20 bp, Artificial Sequence
  Description of Artificial Sequence: Synthetic oligonucleotide
  Target: LAMA2; (+) strand; PAM type: YTN; PAM sequence: TTT
cacatatgctgtagacacag

SEQ ID NO: 398055 - DNA, 20 bp, Artificial Sequence
  Description of Artificial Sequence: Synthetic oligonucleotide
  Target: LAMA2; (+) strand; PAM type: YTN; PAM sequence: TTC
acatatgctgtagacacagc

SEQ ID NO: 398056 - DNA, 20 bp, Artificial Sequence
  Description of Artificial Sequence: Synthetic oligonucleotide
  Target: LAMA2; (+) strand; PAM type: YTN; PAM sequence: CTG
tagacacagctcaggaactc

SEQ ID NO: 398057 - DNA, 20 bp, Artificial Sequence
  Description of Artificial Sequence: Synthetic oligonucleotide
  Target: LAMA2; (+) strand; PAM type: YTN; PAM sequence: CTC
aggaactcagatgtgatgct

SEQ ID NO: 398058 - DNA, 20 bp, Artificial Sequence
  Description of Artificial Sequence: Synthetic oligonucleotide
  Target: LAMA2; (+) strand; PAM type: YTN; PAM sequence: CTC
agatgtgatgcttatgaata

SEQ ID NO: 398059 - DNA, 20 bp, Artificial Sequence
  Description of Artificial Sequence: Synthetic oligonucleotide
  Target: LAMA2; (+) strand; PAM type: YTN; PAM sequence: CTT
atgaatatgtataaagtata

SEQ ID NO: 398060 - DNA, 20 bp, Artificial Sequence
  Description of Artificial Sequence: Synthetic oligonucleotide
  Target: LAMA2; (+) strand; PAM type: YTN; PAM sequence: TTA
tgaatatgtataaagtataa

SEQ ID NO: 398061 - DNA, 20 bp, Artificial Sequence
  Description of Artificial Sequence: Synthetic oligonucleotide
  Target: LAMA2; (+) strand; PAM type: YTN; PAM sequence: TTA
gcttagaaaatgctgcttca

SEQ ID NO: 398062 - DNA, 20 bp, Artificial Sequence
  Description of Artificial Sequence: Synthetic oligonucleotide
  Target: LAMA2; (+) strand; PAM type: YTN; PAM sequence: CTT
agaaaatgctgcttcatcac

SEQ ID NO: 398063 - DNA, 20 bp, Artificial Sequence
  Description of Artificial Sequence: Synthetic oligonucleotide
  Target: LAMA2; (+) strand; PAM type: YTN; PAM sequence: TTA
gaaaatgctgcttcatcacc

SEQ ID NO: 398064 - DNA, 20 bp, Artificial Sequence
  Description of Artificial Sequence: Synthetic oligonucleotide
  Target: LAMA2; (+) strand; PAM type: YTN; PAM sequence: CTG
cttcatcacctgtcctgata

SEQ ID NO: 398065 - DNA, 20 bp, Artificial Sequence
  Description of Artificial Sequence: Synthetic oligonucleotide
  Target: LAMA2; (+) strand; PAM type: YTN; PAM sequence: CTT
catcacctgtcctgatattg

SEQ ID NO: 398066 - DNA, 20 bp, Artificial Sequence
  Description of Artificial Sequence: Synthetic oligonucleotide
  Target: LAMA2; (+) strand; PAM type: YTN; PAM sequence: TTC
atcacctgtcctgatattgt

SEQ ID NO: 398067 - DNA, 20 bp, Artificial Sequence
  Description of Artificial Sequence: Synthetic oligonucleotide
  Target: LAMA2; (+) strand; PAM type: YTN; PAM sequence: CTG
tcctgatattgttgatgtgc

SEQ ID NO: 398068 - DNA, 20 bp, Artificial Sequence
  Description of Artificial Sequence: Synthetic oligonucleotide
  Target: LAMA2; (+) strand; PAM type: YTN; PAM sequence: CTG
atattgttgatgtgcttcaa

SEQ ID NO: 398069 - DNA, 20 bp, Artificial Sequence
  Description of Artificial Sequence: Synthetic oligonucleotide
  Target: LAMA2; (+) strand; PAM type: YTN; PAM sequence: TTG
ttgatgtgcttcaataactt

SEQ ID NO: 398070 - DNA, 20 bp, Artificial Sequence
  Description of Artificial Sequence: Synthetic oligonucleotide
  Target: LAMA2; (+) strand; PAM type: YTN; PAM sequence: TTG
atgtgcttcaataacttacc

SEQ ID NO: 398071 - DNA, 20 bp, Artificial Sequence
  Description of Artificial Sequence: Synthetic oligonucleotide
  Target: LAMA2; (+) strand; PAM type: YTN; PAM sequence: CTT
caataacttaccaagcaatg

SEQ ID NO: 398072 - DNA, 20 bp, Artificial Sequence
  Description of Artificial Sequence: Synthetic oligonucleotide
  Target: LAMA2; (+) strand; PAM type: YTN; PAM sequence: TTC
aataacttaccaagcaatgc

SEQ ID NO: 398073 - DNA, 20 bp, Artificial Sequence
  Description of Artificial Sequence: Synthetic oligonucleotide
  Target: LAMA2; (+) strand; PAM type: YTN; PAM sequence: CTT
accaagcaatgctggaaaag

SEQ ID NO: 398074 - DNA, 20 bp, Artificial Sequence
  Description of Artificial Sequence: Synthetic oligonucleotide
  Target: LAMA2; (+) strand; PAM type: YTN; PAM sequence: TTA
ccaagcaatgctggaaaagg

SEQ ID NO: 398075 - DNA, 20 bp, Artificial Sequence
  Description of Artificial Sequence: Synthetic oligonucleotide
  Target: LAMA2; (+) strand; PAM type: YTN; PAM sequence: CTG
gaaaaggttctctccaaatt

SEQ ID NO: 398076 - DNA, 20 bp, Artificial Sequence
  Description of Artificial Sequence: Synthetic oligonucleotide
  Target: LAMA2; (+) strand; PAM type: YTN; PAM sequence: TTC
tctccaaattccagtgagtt

SEQ ID NO: 398077 - DNA, 20 bp, Artificial Sequence
  Description of Artificial Sequence: Synthetic oligonucleotide
  Target: LAMA2; (+) strand; PAM type: YTN; PAM sequence: CTC
tccaaattccagtgagttga

SEQ ID NO: 398078 - DNA, 20 bp, Artificial Sequence
  Description of Artificial Sequence: Synthetic oligonucleotide
  Target: LAMA2; (+) strand; PAM type: YTN; PAM sequence: CTC
caaattccagtgagttgaaa

SEQ ID NO: 398079 - DNA, 20 bp, Artificial Sequence
  Description of Artificial Sequence: Synthetic oligonucleotide
  Target: LAMA2; (+) strand; PAM type: YTN; PAM sequence: TTC
cagtgagttgaaacggtgct

SEQ ID NO: 398080 - DNA, 20 bp, Artificial Sequence
  Description of Artificial Sequence: Synthetic oligonucleotide
  Target: LAMA2; (+) strand; PAM type: YTN; PAM sequence: TTG
aaacggtgcttttcacccat

SEQ ID NO: 398081 - DNA, 20 bp, Artificial Sequence
  Description of Artificial Sequence: Synthetic oligonucleotide
  Target: LAMA2; (+) strand; PAM type: YTN; PAM sequence: CTT
ttcacccataacatgttagt

SEQ ID NO: 398082 - DNA, 20 bp, Artificial Sequence
  Description of Artificial Sequence: Synthetic oligonucleotide
  Target: LAMA2; (+) strand; PAM type: YTN; PAM sequence: TTT
tcacccataacatgttagtg

SEQ ID NO: 398083 - DNA, 20 bp, Artificial Sequence
  Description of Artificial Sequence: Synthetic oligonucleotide
  Target: LAMA2; (+) strand; PAM type: YTN; PAM sequence: TTT
cacccataacatgttagtgt

SEQ ID NO: 398084 - DNA, 20 bp, Artificial Sequence
  Description of Artificial Sequence: Synthetic oligonucleotide
  Target: LAMA2; (+) strand; PAM type: YTN; PAM sequence: TTC
acccataacatgttagtgtt

SEQ ID NO: 398085 - DNA, 20 bp, Artificial Sequence
  Description of Artificial Sequence: Synthetic oligonucleotide
  Target: LAMA2; (+) strand; PAM type: YTN; PAM sequence: TTA
gtgttttccattcccttatc

SEQ ID NO: 398086 - DNA, 20 bp, Artificial Sequence
  Description of Artificial Sequence: Synthetic oligonucleotide
  Target: LAMA2; (+) strand; PAM type: YTN; PAM sequence: TTT
tccattcccttatcatgtga

SEQ ID NO: 398087 - DNA, 20 bp, Artificial Sequence
  Description of Artificial Sequence: Synthetic oligonucleotide
  Target: LAMA2; (+) strand; PAM type: YTN; PAM sequence: TTT
ccattcccttatcatgtgaa

SEQ ID NO: 398088 - DNA, 20 bp, Artificial Sequence
  Description of Artificial Sequence: Synthetic oligonucleotide
  Target: LAMA2; (+) strand; PAM type: YTN; PAM sequence: TTC
cattcccttatcatgtgaaa

SEQ ID NO: 398089 - DNA, 20 bp, Artificial Sequence
  Description of Artificial Sequence: Synthetic oligonucleotide
  Target: LAMA2; (+) strand; PAM type: YTN; PAM sequence: TTC
ccttatcatgtgaaaagcct

SEQ ID NO: 398090 - DNA, 20 bp, Artificial Sequence
  Description of Artificial Sequence: Synthetic oligonucleotide
  Target: LAMA2; (+) strand; PAM type: YTN; PAM sequence: CTT
atcatgtgaaaagcctgtcc

SEQ ID NO: 398091 - DNA, 20 bp, Artificial Sequence
  Description of Artificial Sequence: Synthetic oligonucleotide
  Target: LAMA2; (+) strand; PAM type: YTN; PAM sequence: TTA
tcatgtgaaaagcctgtcct

SEQ ID NO: 398092 - DNA, 20 bp, Artificial Sequence
  Description of Artificial Sequence: Synthetic oligonucleotide
  Target: LAMA2; (+) strand; PAM type: YTN; PAM sequence: CTG
tcctttaaacccagattgct

SEQ ID NO: 398093 - DNA, 20 bp, Artificial Sequence
  Description of Artificial Sequence: Synthetic oligonucleotide
  Target: LAMA2; (+) strand; PAM type: YTN; PAM sequence: CTT
taaacccagattgctggcag

SEQ ID NO: 398094 - DNA, 20 bp, Artificial Sequence
  Description of Artificial Sequence: Synthetic oligonucleotide
  Target: LAMA2; (+) strand; PAM type: YTN; PAM sequence: TTT
aaacccagattgctggcaga

SEQ ID NO: 398095 - DNA, 20 bp, Artificial Sequence
  Description of Artificial Sequence: Synthetic oligonucleotide
  Target: LAMA2; (+) strand; PAM type: YTN; PAM sequence: TTA
aacccagattgctggcagac

SEQ ID NO: 398096 - DNA, 20 bp, Artificial Sequence
  Description of Artificial Sequence: Synthetic oligonucleotide
  Target: LAMA2; (+) strand; PAM type: YTN; PAM sequence: TTG
ctggcagactgcttgtaact

SEQ ID NO: 398097 - DNA, 20 bp, Artificial Sequence
  Description of Artificial Sequence: Synthetic oligonucleotide
  Target: LAMA2; (+) strand; PAM type: YTN; PAM sequence: CTG
gcagactgcttgtaactgac

SEQ ID NO: 398098 - DNA, 20 bp, Artificial Sequence
  Description of Artificial Sequence: Synthetic oligonucleotide
  Target: LAMA2; (+) strand; PAM type: YTN; PAM sequence: CTG
cttgtaactgacagttgtat

SEQ ID NO: 398099 - DNA, 20 bp, Artificial Sequence
  Description of Artificial Sequence: Synthetic oligonucleotide
  Target: LAMA2; (+) strand; PAM type: YTN; PAM sequence: CTT
gtaactgacagttgtatgcc

SEQ ID NO: 398100 - DNA, 20 bp, Artificial Sequence
  Description of Artificial Sequence: Synthetic oligonucleotide
  Target: LAMA2; (+) strand; PAM type: YTN; PAM sequence: TTG
taactgacagttgtatgcca

SEQ ID NO: 398101 - DNA, 20 bp, Artificial Sequence
  Description of Artificial Sequence: Synthetic oligonucleotide
  Target: LAMA2; (+) strand; PAM type: YTN; PAM sequence: CTG
acagttgtatgccataagct

SEQ ID NO: 398102 - DNA, 20 bp, Artificial Sequence
  Description of Artificial Sequence: Synthetic oligonucleotide
  Target: LAMA2; (+) strand; PAM type: YTN; PAM sequence: TTG
tatgccataagctctttact

SEQ ID NO: 398103 - DNA, 20 bp, Artificial Sequence
  Description of Artificial Sequence: Synthetic oligonucleotide
  Target: LAMA2; (+) strand; PAM type: YTN; PAM sequence: CTC
tttactttaatattttagag

SEQ ID NO: 398104 - DNA, 20 bp, Artificial Sequence
  Description of Artificial Sequence: Synthetic oligonucleotide
  Target: LAMA2; (+) strand; PAM type: YTN; PAM sequence: CTT
tactttaatattttagagag

SEQ ID NO: 398105 - DNA, 20 bp, Artificial Sequence
  Description of Artificial Sequence: Synthetic oligonucleotide
  Target: LAMA2; (+) strand; PAM type: YTN; PAM sequence: TTT
actttaatattttagagagc

SEQ ID NO: 398106 - DNA, 20 bp, Artificial Sequence
  Description of Artificial Sequence: Synthetic oligonucleotide
  Target: LAMA2; (+) strand; PAM type: YTN; PAM sequence: TTA
ctttaatattttagagagct

SEQ ID NO: 398107 - DNA, 20 bp, Artificial Sequence
  Description of Artificial Sequence: Synthetic oligonucleotide
  Target: LAMA2; (+) strand; PAM type: YTN; PAM sequence: CTT
taatattttagagagcttct

SEQ ID NO: 398108 - DNA, 20 bp, Artificial Sequence
  Description of Artificial Sequence: Synthetic oligonucleotide
  Target: LAMA2; (+) strand; PAM type: YTN; PAM sequence: TTT
aatattttagagagcttctt

SEQ ID NO: 398109 - DNA, 20 bp, Artificial Sequence
  Description of Artificial Sequence: Synthetic oligonucleotide
  Target: LAMA2; (+) strand; PAM type: YTN; PAM sequence: TTA
atattttagagagcttcttg

SEQ ID NO: 398110 - DNA, 20 bp, Artificial Sequence
  Description of Artificial Sequence: Synthetic oligonucleotide
  Target: LAMA2; (+) strand; PAM type: YTN; PAM sequence: TTT
tagagagcttcttgaaacat

SEQ ID NO: 398111 - DNA, 20 bp, Artificial Sequence
  Description of Artificial Sequence: Synthetic oligonucleotide
  Target: LAMA2; (+) strand; PAM type: YTN; PAM sequence: TTT
agagagcttcttgaaacatt

SEQ ID NO: 398112 - DNA, 20 bp, Artificial Sequence
  Description of Artificial Sequence: Synthetic oligonucleotide
  Target: LAMA2; (+) strand; PAM type: YTN; PAM sequence: TTA
gagagcttcttgaaacattg

SEQ ID NO: 398113 - DNA, 20 bp, Artificial Sequence
  Description of Artificial Sequence: Synthetic oligonucleotide
  Target: LAMA2; (+) strand; PAM type: YTN; PAM sequence: CTT
cttgaaacattgaggcatgt

SEQ ID NO: 398114 - DNA, 20 bp, Artificial Sequence
  Description of Artificial Sequence: Synthetic oligonucleotide
  Target: LAMA2; (+) strand; PAM type: YTN; PAM sequence: TTC
ttgaaacattgaggcatgtc

SEQ ID NO: 398115 - DNA, 20 bp, Artificial Sequence
  Description of Artificial Sequence: Synthetic oligonucleotide
  Target: LAMA2; (+) strand; PAM type: YTN; PAM sequence: CTT
gaaacattgaggcatgtctt

SEQ ID NO: 398116 - DNA, 20 bp, Artificial Sequence
  Description of Artificial Sequence: Synthetic oligonucleotide
  Target: LAMA2; (+) strand; PAM type: YTN; PAM sequence: TTG
aaacattgaggcatgtcttt

SEQ ID NO: 398117 - DNA, 20 bp, Artificial Sequence
  Description of Artificial Sequence: Synthetic oligonucleotide
  Target: LAMA2; (+) strand; PAM type: YTN; PAM sequence: TTG
aggcatgtcttttcctccaa

SEQ ID NO: 398118 - DNA, 20 bp, Artificial Sequence
  Description of Artificial Sequence: Synthetic oligonucleotide
  Target: LAMA2; (+) strand; PAM type: YTN; PAM sequence: CTT
ttcctccaaatctcttgatt

SEQ ID NO: 398119 - DNA, 20 bp, Artificial Sequence
  Description of Artificial Sequence: Synthetic oligonucleotide
  Target: LAMA2; (+) strand; PAM type: YTN; PAM sequence: TTT
tcctccaaatctcttgattt

SEQ ID NO: 398120 - DNA, 20 bp, Artificial Sequence
  Description of Artificial Sequence: Synthetic oligonucleotide
  Target: LAMA2; (+) strand; PAM type: YTN; PAM sequence: TTT
cctccaaatctcttgatttt

SEQ ID NO: 398121 - DNA, 20 bp, Artificial Sequence
  Description of Artificial Sequence: Synthetic oligonucleotide
  Target: LAMA2; (+) strand; PAM type: YTN; PAM sequence: TTC
ctccaaatctcttgattttt

SEQ ID NO: 398122 - DNA, 20 bp, Artificial Sequence
  Description of Artificial Sequence: Synthetic oligonucleotide
  Target: LAMA2; (+) strand; PAM type: YTN; PAM sequence: CTC
caaatctcttgatttttaac

SEQ ID NO: 398123 - DNA, 20 bp, Artificial Sequence
  Description of Artificial Sequence: Synthetic oligonucleotide
  Target: LAMA2; (+) strand; PAM type: YTN; PAM sequence: CTC
ttgatttttaacctctcaat

SEQ ID NO: 398124 - DNA, 20 bp, Artificial Sequence
  Description of Artificial Sequence: Synthetic oligonucleotide
  Target: LAMA2; (+) strand; PAM type: YTN; PAM sequence: CTT
gatttttaacctctcaattc

SEQ ID NO: 398125 - DNA, 20 bp, Artificial Sequence
  Description of Artificial Sequence: Synthetic oligonucleotide
  Target: LAMA2; (+) strand; PAM type: YTN; PAM sequence: TTG
atttttaacctctcaattcc

SEQ ID NO: 398126 - DNA, 20 bp, Artificial Sequence
  Description of Artificial Sequence: Synthetic oligonucleotide
  Target: LAMA2; (+) strand; PAM type: YTN; PAM sequence: TTT
ttaacctctcaattccacgg

SEQ ID NO: 398127 - DNA, 20 bp, Artificial Sequence
  Description of Artificial Sequence: Synthetic oligonucleotide
  Target: LAMA2; (+) strand; PAM type: YTN; PAM sequence: TTT
taacctctcaattccacggt

SEQ ID NO: 398128 - DNA, 20 bp, Artificial Sequence
  Description of Artificial Sequence: Synthetic oligonucleotide
  Target: LAMA2; (+) strand; PAM type: YTN; PAM sequence: TTT
aacctctcaattccacggtg

SEQ ID NO: 398129 - DNA, 20 bp, Artificial Sequence
  Description of Artificial Sequence: Synthetic oligonucleotide
  Target: LAMA2; (+) strand; PAM type: YTN; PAM sequence: TTA
acctctcaattccacggtgc

SEQ ID NO: 398130 - DNA, 20 bp, Artificial Sequence
  Description of Artificial Sequence: Synthetic oligonucleotide
  Target: LAMA2; (+) strand; PAM type: YTN; PAM sequence: CTC
tcaattccacggtgcttgca

SEQ ID NO: 398131 - DNA, 20 bp, Artificial Sequence
  Description of Artificial Sequence: Synthetic oligonucleotide
  Target: LAMA2; (+) strand; PAM type: YTN; PAM sequence: CTC
aattccacggtgcttgcatg

SEQ ID NO: 398132 - DNA, 20 bp, Artificial Sequence
  Description of Artificial Sequence: Synthetic oligonucleotide
  Target: LAMA2; (+) strand; PAM type: YTN; PAM sequence: TTC
cacggtgcttgcatgaggtg

SEQ ID NO: 398133 - DNA, 20 bp, Artificial Sequence
  Description of Artificial Sequence: Synthetic oligonucleotide
  Target: LAMA2; (+) strand; PAM type: YTN; PAM sequence: CTT
gcatgaggtgactattctct

SEQ ID NO: 398134 - DNA, 20 bp, Artificial Sequence
  Description of Artificial Sequence: Synthetic oligonucleotide
  Target: LAMA2; (+) strand; PAM type: YTN; PAM sequence: TTG
catgaggtgactattctctt

SEQ ID NO: 398135 - DNA, 20 bp, Artificial Sequence
  Description of Artificial Sequence: Synthetic oligonucleotide
  Target: LAMA2; (+) strand; PAM type: YTN; PAM sequence: CTA
ttctcttttctctggcctat

SEQ ID NO: 398136 - DNA, 20 bp, Artificial Sequence
  Description of Artificial Sequence: Synthetic oligonucleotide
  Target: LAMA2; (+) strand; PAM type: YTN; PAM sequence: TTC
tcttttctctggcctatact

SEQ ID NO: 398137 - DNA, 20 bp, Artificial Sequence
  Description of Artificial Sequence: Synthetic oligonucleotide
  Target: LAMA2; (+) strand; PAM type: YTN; PAM sequence: CTC
ttttctctggcctatactat

SEQ ID NO: 398138 - DNA, 20 bp, Artificial Sequence
  Description of Artificial Sequence: Synthetic oligonucleotide
  Target: LAMA2; (+) strand; PAM type: YTN; PAM sequence: CTT
ttctctggcctatactatta

SEQ ID NO: 398139 - DNA, 20 bp, Artificial Sequence
  Description of Artificial Sequence: Synthetic oligonucleotide
  Target: LAMA2; (+) strand; PAM type: YTN; PAM sequence: TTT
tctctggcctatactattac

SEQ ID NO: 398140 - DNA, 20 bp, Artificial Sequence
  Description of Artificial Sequence: Synthetic oligonucleotide
  Target: LAMA2; (+) strand; PAM type: YTN; PAM sequence: TTT
ctctggcctatactattaca

SEQ ID NO: 398141 - DNA, 20 bp, Artificial Sequence
  Description of Artificial Sequence: Synthetic oligonucleotide
  Target: LAMA2; (+) strand; PAM type: YTN; PAM sequence: TTC
tctggcctatactattacaa

SEQ ID NO: 398142 - DNA, 20 bp, Artificial Sequence
  Description of Artificial Sequence: Synthetic oligonucleotide
  Target: LAMA2; (+) strand; PAM type: YTN; PAM sequence: CTC
tggcctatactattacaata

SEQ ID NO: 398143 - DNA, 20 bp, Artificial Sequence
  Description of Artificial Sequence: Synthetic oligonucleotide
  Target: LAMA2; (+) strand; PAM type: YTN; PAM sequence: CTG
gcctatactattacaataac

SEQ ID NO: 398144 - DNA, 20 bp, Artificial Sequence
  Description of Artificial Sequence: Synthetic oligonucleotide
  Target: LAMA2; (+) strand; PAM type: YTN; PAM sequence: CTA
tactattacaataaccaatt

SEQ ID NO: 398145 - DNA, 20 bp, Artificial Sequence
  Description of Artificial Sequence: Synthetic oligonucleotide
  Target: LAMA2; (+) strand; PAM type: YTN; PAM sequence: CTA
ttacaataaccaattgatgg

SEQ ID NO: 398146 - DNA, 20 bp, Artificial Sequence
  Description of Artificial Sequence: Synthetic oligonucleotide
  Target: LAMA2; (+) strand; PAM type: YTN; PAM sequence: TTA
caataaccaattgatggctc

SEQ ID NO: 398147 - DNA, 20 bp, Artificial Sequence
  Description of Artificial Sequence: Synthetic oligonucleotide
  Target: LAMA2; (+) strand; PAM type: YTN; PAM sequence: TTG
atggctccttttttcccaca

SEQ ID NO: 398148 - DNA, 20 bp, Artificial Sequence
  Description of Artificial Sequence: Synthetic oligonucleotide
  Target: LAMA2; (+) strand; PAM type: YTN; PAM sequence: CTC
cttttttcccacacagctgc

SEQ ID NO: 398149 - DNA, 20 bp, Artificial Sequence
  Description of Artificial Sequence: Synthetic oligonucleotide
  Target: LAMA2; (+) strand; PAM type: YTN; PAM sequence: CTT
ttttcccacacagctgccca

SEQ ID NO: 398150 - DNA, 20 bp, Artificial Sequence
  Description of Artificial Sequence: Synthetic oligonucleotide
  Target: LAMA2; (+) strand; PAM type: YTN; PAM sequence: TTT
tttcccacacagctgcccaa

SEQ ID NO: 398151 - DNA, 20 bp, Artificial Sequence
  Description of Artificial Sequence: Synthetic oligonucleotide
  Target: LAMA2; (+) strand; PAM type: YTN; PAM sequence: TTT
ttcccacacagctgcccaat

SEQ ID NO: 398152 - DNA, 20 bp, Artificial Sequence
  Description of Artificial Sequence: Synthetic oligonucleotide
  Target: LAMA2; (+) strand; PAM type: YTN; PAM sequence: TTT
tcccacacagctgcccaatt

SEQ ID NO: 398153 - DNA, 20 bp, Artificial Sequence
  Description of Artificial Sequence: Synthetic oligonucleotide
  Target: LAMA2; (+) strand; PAM type: YTN; PAM sequence: TTT
cccacacagctgcccaattc

SEQ ID NO: 398154 - DNA, 20 bp, Artificial Sequence
  Description of Artificial Sequence: Synthetic oligonucleotide
  Target: LAMA2; (+) strand; PAM type: YTN; PAM sequence: TTC
ccacacagctgcccaattca

SEQ ID NO: 398155 - DNA, 20 bp, Artificial Sequence
  Description of Artificial Sequence: Synthetic oligonucleotide
  Target: LAMA2; (+) strand; PAM type: YTN; PAM sequence: CTG
cccaattcatcttcttggac

SEQ ID NO: 398156 - DNA, 20 bp, Artificial Sequence
  Description of Artificial Sequence: Synthetic oligonucleotide
  Target: LAMA2; (+) strand; PAM type: YTN; PAM sequence: TTC
atcttcttggactacagctc

SEQ ID NO: 398157 - DNA, 20 bp, Artificial Sequence
  Description of Artificial Sequence: Synthetic oligonucleotide
  Target: LAMA2; (+) strand; PAM type: YTN; PAM sequence: CTT
cttggactacagctctgatc

SEQ ID NO: 398158 - DNA, 20 bp, Artificial Sequence
  Description of Artificial Sequence: Synthetic oligonucleotide
  Target: LAMA2; (+) strand; PAM type: YTN; PAM sequence: TTC
ttggactacagctctgatca

SEQ ID NO: 398159 - DNA, 20 bp, Artificial Sequence
  Description of Artificial Sequence: Synthetic oligonucleotide
  Target: LAMA2; (+) strand; PAM type: YTN; PAM sequence: CTT
ggactacagctctgatcaca

SEQ ID NO: 398160 - DNA, 20 bp, Artificial Sequence
  Description of Artificial Sequence: Synthetic oligonucleotide
  Target: LAMA2; (+) strand; PAM type: YTN; PAM sequence: TTG
gactacagctctgatcacac

SEQ ID NO: 398161 - DNA, 20 bp, Artificial Sequence
  Description of Artificial Sequence: Synthetic oligonucleotide
  Target: LAMA2; (+) strand; PAM type: YTN; PAM sequence: CTA
cagctctgatcacactctcc

SEQ ID NO: 398162 - DNA, 20 bp, Artificial Sequence
  Description of Artificial Sequence: Synthetic oligonucleotide
  Target: LAMA2; (+) strand; PAM type: YTN; PAM sequence: CTC
tgatcacactctcctactca

SEQ ID NO: 398163 - DNA, 20 bp, Artificial Sequence
  Description of Artificial Sequence: Synthetic oligonucleotide
  Target: LAMA2; (+) strand; PAM type: YTN; PAM sequence: CTG
atcacactctcctactcaga

SEQ ID NO: 398164 - DNA, 20 bp, Artificial Sequence
  Description of Artificial Sequence: Synthetic oligonucleotide
  Target: LAMA2; (+) strand; PAM type: YTN; PAM sequence: CTC
tcctactcagaaactttcaa

SEQ ID NO: 398165 - DNA, 20 bp, Artificial Sequence
  Description of Artificial Sequence: Synthetic oligonucleotide
  Target: LAMA2; (+) strand; PAM type: YTN; PAM sequence: CTC
ctactcagaaactttcaagg

SEQ ID NO: 398166 - DNA, 20 bp, Artificial Sequence
  Description of Artificial Sequence: Synthetic oligonucleotide
  Target: LAMA2; (+) strand; PAM type: YTN; PAM sequence: CTA
ctcagaaactttcaaggcct

SEQ ID NO: 398167 - DNA, 20 bp, Artificial Sequence
  Description of Artificial Sequence: Synthetic oligonucleotide
  Target: LAMA2; (+) strand; PAM type: YTN; PAM sequence: CTC
agaaactttcaaggcctcca

SEQ ID NO: 398168 - DNA, 20 bp, Artificial Sequence
  Description of Artificial Sequence: Synthetic oligonucleotide
  Target: LAMA2; (+) strand; PAM type: YTN; PAM sequence: CTT
tcaaggcctccaaattgctc

SEQ ID NO: 398169 - DNA, 20 bp, Artificial Sequence
  Description of Artificial Sequence: Synthetic oligonucleotide
  Target: LAMA2; (+) strand; PAM type: YTN; PAM sequence: TTT
caaggcctccaaattgctca

SEQ ID NO: 398170 - DNA, 20 bp, Artificial Sequence
  Description of Artificial Sequence: Synthetic oligonucleotide
  Target: LAMA2; (+) strand; PAM type: YTN; PAM sequence: TTC
aaggcctccaaattgctcat

SEQ ID NO: 398171 - DNA, 20 bp, Artificial Sequence
  Description of Artificial Sequence: Synthetic oligonucleotide
  Target: LAMA2; (+) strand; PAM type: YTN; PAM sequence: CTC
caaattgctcattgcccagt

SEQ ID NO: 398172 - DNA, 20 bp, Artificial Sequence
  Description of Artificial Sequence: Synthetic oligonucleotide
  Target: LAMA2; (+) strand; PAM type: YTN; PAM sequence: TTG
ctcattgcccagtttcctta

SEQ ID NO: 398173 - DNA, 20 bp, Artificial Sequence
  Description of Artificial Sequence: Synthetic oligonucleotide
  Target: LAMA2; (+) strand; PAM type: YTN; PAM sequence: CTC
attgcccagtttccttactc

SEQ ID NO: 398174 - DNA, 20 bp, Artificial Sequence
  Description of Artificial Sequence: Synthetic oligonucleotide
  Target: LAMA2; (+) strand; PAM type: YTN; PAM sequence: TTG
cccagtttccttactcgcac

SEQ ID NO: 398175 - DNA, 20 bp, Artificial Sequence
  Description of Artificial Sequence: Synthetic oligonucleotide
  Target: LAMA2; (+) strand; PAM type: YTN; PAM sequence: TTT
ccttactcgcacattcaaac

SEQ ID NO: 398176 - DNA, 20 bp, Artificial Sequence
  Description of Artificial Sequence: Synthetic oligonucleotide
  Target: LAMA2; (+) strand; PAM type: YTN; PAM sequence: TTC
cttactcgcacattcaaacc

SEQ ID NO: 398177 - DNA, 20 bp, Artificial Sequence
  Description of Artificial Sequence: Synthetic oligonucleotide
  Target: LAMA2; (+) strand; PAM type: YTN; PAM sequence: CTT
actcgcacattcaaaccttc

SEQ ID NO: 398178 - DNA, 20 bp, Artificial Sequence
  Description of Artificial Sequence: Synthetic oligonucleotide
  Target: LAMA2; (+) strand; PAM type: YTN; PAM sequence: TTA
ctcgcacattcaaaccttcc

SEQ ID NO: 398179 - DNA, 20 bp, Artificial Sequence
  Description of Artificial Sequence: Synthetic oligonucleotide
  Target: LAMA2; (+) strand; PAM type: YTN; PAM sequence: CTC
gcacattcaaaccttccaga

SEQ ID NO: 398180 - DNA, 20 bp, Artificial Sequence
  Description of Artificial Sequence: Synthetic oligonucleotide
  Target: LAMA2; (+) strand; PAM type: YTN; PAM sequence: TTC
aaaccttccagaaattgact

SEQ ID NO: 398181 - DNA, 20 bp, Artificial Sequence
  Description of Artificial Sequence: Synthetic oligonucleotide
  Target: LAMA2; (+) strand; PAM type: YTN; PAM sequence: CTT
ccagaaattgactctgacct

SEQ ID NO: 398182 - DNA, 20 bp, Artificial Sequence
  Description of Artificial Sequence: Synthetic oligonucleotide
  Target: LAMA2; (+) strand; PAM type: YTN; PAM sequence: TTC
cagaaattgactctgacctg

SEQ ID NO: 398183 - DNA, 20 bp, Artificial Sequence
  Description of Artificial Sequence: Synthetic oligonucleotide
  Target: LAMA2; (+) strand; PAM type: YTN; PAM sequence: TTG
actctgacctgtctaatagc

SEQ ID NO: 398184 - DNA, 20 bp, Artificial Sequence
  Description of Artificial Sequence: Synthetic oligonucleotide
  Target: LAMA2; (+) strand; PAM type: YTN; PAM sequence: CTC
tgacctgtctaatagcctta

SEQ ID NO: 398185 - DNA, 20 bp, Artificial Sequence
  Description of Artificial Sequence: Synthetic oligonucleotide
  Target: LAMA2; (+) strand; PAM type: YTN; PAM sequence: CTG
acctgtctaatagccttact

SEQ ID NO: 398186 - DNA, 20 bp, Artificial Sequence
  Description of Artificial Sequence: Synthetic oligonucleotide
  Target: LAMA2; (+) strand; PAM type: YTN; PAM sequence: CTG
tctaatagccttacttctcc

SEQ ID NO: 398187 - DNA, 20 bp, Artificial Sequence
  Description of Artificial Sequence: Synthetic oligonucleotide
  Target: LAMA2; (+) strand; PAM type: YTN; PAM sequence: CTA
atagccttacttctccacat

SEQ ID NO: 398188 - DNA, 20 bp, Artificial Sequence
  Description of Artificial Sequence: Synthetic oligonucleotide
  Target: LAMA2; (+) strand; PAM type: YTN; PAM sequence: CTT
acttctccacattgcccttg

SEQ ID NO: 398189 - DNA, 20 bp, Artificial Sequence
  Description of Artificial Sequence: Synthetic oligonucleotide
  Target: LAMA2; (+) strand; PAM type: YTN; PAM sequence: TTA
cttctccacattgcccttga

SEQ ID NO: 398190 - DNA, 20 bp, Artificial Sequence
  Description of Artificial Sequence: Synthetic oligonucleotide
  Target: LAMA2; (+) strand; PAM type: YTN; PAM sequence: CTT
ctccacattgcccttgacga

SEQ ID NO: 398191 - DNA, 20 bp, Artificial Sequence
  Description of Artificial Sequence: Synthetic oligonucleotide
  Target: LAMA2; (+) strand; PAM type: YTN; PAM sequence: TTC
tccacattgcccttgacgaa

SEQ ID NO: 398192 - DNA, 20 bp, Artificial Sequence
  Description of Artificial Sequence: Synthetic oligonucleotide
  Target: LAMA2; (+) strand; PAM type: YTN; PAM sequence: CTC
cacattgcccttgacgaacc

SEQ ID NO: 398193 - DNA, 20 bp, Artificial Sequence
  Description of Artificial Sequence: Synthetic oligonucleotide
  Target: LAMA2; (+) strand; PAM type: YTN; PAM sequence: TTG
cccttgacgaaccctacaaa

SEQ ID NO: 398194 - DNA, 20 bp, Artificial Sequence
  Description of Artificial Sequence: Synthetic oligonucleotide
  Target: LAMA2; (+) strand; PAM type: YTN; PAM sequence: CTT
gacgaaccctacaaacttag

SEQ ID NO: 398195 - DNA, 20 bp, Artificial Sequence
  Description of Artificial Sequence: Synthetic oligonucleotide
  Target: LAMA2; (+) strand; PAM type: YTN; PAM sequence: TTG
acgaaccctacaaacttagg

SEQ ID NO: 398196 - DNA, 20 bp, Artificial Sequence
  Description of Artificial Sequence: Synthetic oligonucleotide
  Target: LAMA2; (+) strand; PAM type: YTN; PAM sequence: CTA
caaacttagggagctgaaat

SEQ ID NO: 398197 - DNA, 20 bp, Artificial Sequence
  Description of Artificial Sequence: Synthetic oligonucleotide
  Target: LAMA2; (+) strand; PAM type: YTN; PAM sequence: CTT
agggagctgaaatactcgct

SEQ ID NO: 398198 - DNA, 20 bp, Artificial Sequence
  Description of Artificial Sequence: Synthetic oligonucleotide
  Target: LAMA2; (+) strand; PAM type: YTN; PAM sequence: TTA
gggagctgaaatactcgctc

SEQ ID NO: 398199 - DNA, 20 bp, Artificial Sequence
  Description of Artificial Sequence: Synthetic oligonucleotide
  Target: LAMA2; (+) strand; PAM type: YTN; PAM sequence: CTG
aaatactcgctctcacatcc

SEQ ID NO: 398200 - DNA, 20 bp, Artificial Sequence
  Description of Artificial Sequence: Synthetic oligonucleotide
  Target: LAMA2; (+) strand; PAM type: YTN; PAM sequence: CTC
gctctcacatccacacatca

SEQ ID NO: 398201 - DNA, 20 bp, Artificial Sequence
  Description of Artificial Sequence: Synthetic oligonucleotide
  Target: LAMA2; (+) strand; PAM type: YTN; PAM sequence: CTC
tcacatccacacatcaaaag

SEQ ID NO: 398202 - DNA, 20 bp, Artificial Sequence
  Description of Artificial Sequence: Synthetic oligonucleotide
  Target: LAMA2; (+) strand; PAM type: YTN; PAM sequence: CTC
acatccacacatcaaaagtc

SEQ ID NO: 398203 - DNA, 20 bp, Artificial Sequence
  Description of Artificial Sequence: Synthetic oligonucleotide
  Target: LAMA2; (+) strand; PAM type: YTN; PAM sequence: CTG
cctgcctccctgcctttcct

SEQ ID NO: 398204 - DNA, 20 bp, Artificial Sequence
  Description of Artificial Sequence: Synthetic oligonucleotide
  Target: LAMA2; (+) strand; PAM type: YTN; PAM sequence: CTG
cctccctgcctttccttata

SEQ ID NO: 398205 - DNA, 20 bp, Artificial Sequence
  Description of Artificial Sequence: Synthetic oligonucleotide
  Target: LAMA2; (+) strand; PAM type: YTN; PAM sequence: CTC
cctgcctttccttatactat

SEQ ID NO: 398206 - DNA, 20 bp, Artificial Sequence
  Description of Artificial Sequence: Synthetic oligonucleotide
  Target: LAMA2; (+) strand; PAM type: YTN; PAM sequence: CTG
cctttccttatactatttct

SEQ ID NO: 398207 - DNA, 20 bp, Artificial Sequence
  Description of Artificial Sequence: Synthetic oligonucleotide
  Target: LAMA2; (+) strand; PAM type: YTN; PAM sequence: CTT
tccttatactatttctacta

SEQ ID NO: 398208 - DNA, 20 bp, Artificial Sequence
  Description of Artificial Sequence: Synthetic oligonucleotide
  Target: LAMA2; (+) strand; PAM type: YTN; PAM sequence: TTT
ccttatactatttctactat

SEQ ID NO: 398209 - DNA, 20 bp, Artificial Sequence
  Description of Artificial Sequence: Synthetic oligonucleotide
  Target: LAMA2; (+) strand; PAM type: YTN; PAM sequence: TTC
cttatactatttctactata

SEQ ID NO: 398210 - DNA, 20 bp, Artificial Sequence
  Description of Artificial Sequence: Synthetic oligonucleotide
  Target: LAMA2; (+) strand; PAM type: YTN; PAM sequence: CTT
atactatttctactatatct

SEQ ID NO: 398211 - DNA, 20 bp, Artificial Sequence
  Description of Artificial Sequence: Synthetic oligonucleotide
  Target: LAMA2; (+) strand; PAM type: YTN; PAM sequence: TTA
tactatttctactatatctt

SEQ ID NO: 398212 - DNA, 20 bp, Artificial Sequence
  Description of Artificial Sequence: Synthetic oligonucleotide
  Target: LAMA2; (+) strand; PAM type: YTN; PAM sequence: CTA
tttctactatatcttctaca

SEQ ID NO: 398213 - DNA, 20 bp, Artificial Sequence
  Description of Artificial Sequence: Synthetic oligonucleotide
  Target: LAMA2; (+) strand; PAM type: YTN; PAM sequence: TTT
ctactatatcttctacattc

SEQ ID NO: 398214 - DNA, 20 bp, Artificial Sequence
  Description of Artificial Sequence: Synthetic oligonucleotide
  Target: LAMA2; (+) strand; PAM type: YTN; PAM sequence: TTC
tactatatcttctacattcc

SEQ ID NO: 398215 - DNA, 20 bp, Artificial Sequence
  Description of Artificial Sequence: Synthetic oligonucleotide
  Target: LAMA2; (+) strand; PAM type: YTN; PAM sequence: CTA
ctatatcttctacattcctg

SEQ ID NO: 398216 - DNA, 20 bp, Artificial Sequence
  Description of Artificial Sequence: Synthetic oligonucleotide
  Target: LAMA2; (+) strand; PAM type: YTN; PAM sequence: CTA
tatcttctacattcctgtat

SEQ ID NO: 398217 - DNA, 20 bp, Artificial Sequence
  Description of Artificial Sequence: Synthetic oligonucleotide
  Target: LAMA2; (+) strand; PAM type: YTN; PAM sequence: CTT
ctacattcctgtatatacta

SEQ ID NO: 398218 - DNA, 20 bp, Artificial Sequence
  Description of Artificial Sequence: Synthetic oligonucleotide
  Target: LAMA2; (+) strand; PAM type: YTN; PAM sequence: TTC
tacattcctgtatatactac

SEQ ID NO: 398219 - DNA, 20 bp, Artificial Sequence
  Description of Artificial Sequence: Synthetic oligonucleotide
  Target: LAMA2; (+) strand; PAM type: YTN; PAM sequence: CTA
cattcctgtatatactacct

SEQ ID NO: 398220 - DNA, 20 bp, Artificial Sequence
  Description of Artificial Sequence: Synthetic oligonucleotide
  Target: LAMA2; (+) strand; PAM type: YTN; PAM sequence: TTC
ctgtatatactacctgtctc

SEQ ID NO: 398221 - DNA, 20 bp, Artificial Sequence
  Description of Artificial Sequence: Synthetic oligonucleotide
  Target: LAMA2; (+) strand; PAM type: YTN; PAM sequence: CTG
tatatactacctgtctcctt

SEQ ID NO: 398222 - DNA, 20 bp, Artificial Sequence
  Description of Artificial Sequence: Synthetic oligonucleotide
  Target: LAMA2; (+) strand; PAM type: YTN; PAM sequence: CTA
cctgtctcctttcatctgag

SEQ ID NO: 398223 - DNA, 20 bp, Artificial Sequence
  Description of Artificial Sequence: Synthetic oligonucleotide
  Target: LAMA2; (+) strand; PAM type: YTN; PAM sequence: CTG
tctcctttcatctgagcaag

SEQ ID NO: 398224 - DNA, 20 bp, Artificial Sequence
  Description of Artificial Sequence: Synthetic oligonucleotide
  Target: LAMA2; (+) strand; PAM type: YTN; PAM sequence: CTC
ctttcatctgagcaaggaat

SEQ ID NO: 398225 - DNA, 20 bp, Artificial Sequence
  Description of Artificial Sequence: Synthetic oligonucleotide
  Target: LAMA2; (+) strand; PAM type: YTN; PAM sequence: CTT
tcatctgagcaaggaatggt

SEQ ID NO: 398226 - DNA, 20 bp, Artificial Sequence
  Description of Artificial Sequence: Synthetic oligonucleotide
  Target: LAMA2; (+) strand; PAM type: YTN; PAM sequence: TTT
catctgagcaaggaatggtt

SEQ ID NO: 398227 - DNA, 20 bp, Artificial Sequence
  Description of Artificial Sequence: Synthetic oligonucleotide
  Target: LAMA2; (+) strand; PAM type: YTN; PAM sequence: TTC
atctgagcaaggaatggttg

SEQ ID NO: 398228 - DNA, 20 bp, Artificial Sequence
  Description of Artificial Sequence: Synthetic oligonucleotide
  Target: LAMA2; (+) strand; PAM type: YTN; PAM sequence: CTG
agcaaggaatggttgactaa

SEQ ID NO: 398229 - DNA, 20 bp, Artificial Sequence
  Description of Artificial Sequence: Synthetic oligonucleotide
  Target: LAMA2; (+) strand; PAM type: YTN; PAM sequence: TTG
actaaggatccaggaagaaa

SEQ ID NO: 398230 - DNA, 20 bp, Artificial Sequence
  Description of Artificial Sequence: Synthetic oligonucleotide
  Target: LAMA2; (+) strand; PAM type: YTN; PAM sequence: CTA
aggatccaggaagaaatcac

SEQ ID NO: 398231 - DNA, 20 bp, Artificial Sequence
  Description of Artificial Sequence: Synthetic oligonucleotide
  Target: LAMA2; (+) strand; PAM type: YTN; PAM sequence: CTG
acttcctaaaaagcagggaa

SEQ ID NO: 398232 - DNA, 20 bp, Artificial Sequence
  Description of Artificial Sequence: Synthetic oligonucleotide
  Target: LAMA2; (+) strand; PAM type: YTN; PAM sequence: CTT
cctaaaaagcagggaaaaaa

SEQ ID NO: 398233 - DNA, 20 bp, Artificial Sequence
  Description of Artificial Sequence: Synthetic oligonucleotide
  Target: LAMA2; (+) strand; PAM type: YTN; PAM sequence: TTC
ctaaaaagcagggaaaaaaa

SEQ ID NO: 398234 - DNA, 20 bp, Artificial Sequence
  Description of Artificial Sequence: Synthetic oligonucleotide
  Target: LAMA2; (+) strand; PAM type: YTN; PAM sequence: CTA
aaaagcagggaaaaaaaaat

SEQ ID NO: 398235 - DNA, 20 bp, Artificial Sequence
  Description of Artificial Sequence: Synthetic oligonucleotide
  Target: LAMA2; (+) strand; PAM type: YTN; PAM sequence: TTG
cctggaagcaaagagcaggt

SEQ ID NO: 398236 - DNA, 20 bp, Artificial Sequence
  Description of Artificial Sequence: Synthetic oligonucleotide
  Target: LAMA2; (+) strand; PAM type: YTN; PAM sequence: CTG
gaagcaaagagcaggtgata

SEQ ID NO: 398237 - DNA, 20 bp, Artificial Sequence
  Description of Artificial Sequence: Synthetic oligonucleotide
  Target: LAMA2; (+) strand; PAM type: YTN; PAM sequence: TTC
agaaatgcaagaagatagaa

SEQ ID NO: 398238 - DNA, 20 bp, Artificial Sequence
  Description of Artificial Sequence: Synthetic oligonucleotide
  Target: LAMA2; (+) strand; PAM type: YTN; PAM sequence: TTA
gcaacacggaggtctgtatc

SEQ ID NO: 398239 - DNA, 20 bp, Artificial Sequence
  Description of Artificial Sequence: Synthetic oligonucleotide
  Target: LAMA2; (+) strand; PAM type: YTN; PAM sequence: CTG
tatcagtacatagccttcag

SEQ ID NO: 398240 - DNA, 20 bp, Artificial Sequence
  Description of Artificial Sequence: Synthetic oligonucleotide
  Target: LAMA2; (+) strand; PAM type: YTN; PAM sequence: CTT
cagtcagggctgtcatgttt

SEQ ID NO: 398241 - DNA, 20 bp, Artificial Sequence
  Description of Artificial Sequence: Synthetic oligonucleotide
  Target: LAMA2; (+) strand; PAM type: YTN; PAM sequence: TTC
agtcagggctgtcatgtttc

SEQ ID NO: 398242 - DNA, 20 bp, Artificial Sequence
  Description of Artificial Sequence: Synthetic oligonucleotide
  Target: LAMA2; (+) strand; PAM type: YTN; PAM sequence: CTG
tcatgtttctggatgaaggt

SEQ ID NO: 398243 - DNA, 20 bp, Artificial Sequence
  Description of Artificial Sequence: Synthetic oligonucleotide
  Target: LAMA2; (+) strand; PAM type: YTN; PAM sequence: TTT
ctggatgaaggtgcaagagc

SEQ ID NO: 398244 - DNA, 20 bp, Artificial Sequence
  Description of Artificial Sequence: Synthetic oligonucleotide
  Target: LAMA2; (+) strand; PAM type: YTN; PAM sequence: TTC
tggatgaaggtgcaagagcc

SEQ ID NO: 398245 - DNA, 20 bp, Artificial Sequence
  Description of Artificial Sequence: Synthetic oligonucleotide
  Target: LAMA2; (+) strand; PAM type: YTN; PAM sequence: CTG
gatgaaggtgcaagagccag

SEQ ID NO: 398246 - DNA, 20 bp, Artificial Sequence
  Description of Artificial Sequence: Synthetic oligonucleotide
  Target: LAMA2; (+) strand; PAM type: YTN; PAM sequence: TTG
ataatcatccagccagacta

SEQ ID NO: 398247 - DNA, 20 bp, Artificial Sequence
  Description of Artificial Sequence: Synthetic oligonucleotide
  Target: LAMA2; (+) strand; PAM type: YTN; PAM sequence: CTA
atcagaaaaaaatcagaaaa

SEQ ID NO: 398248 - DNA, 20 bp, Artificial Sequence
  Description of Artificial Sequence: Synthetic oligonucleotide
  Target: LAMA2; (+) strand; PAM type: YTN; PAM sequence: CTA
ccaatatcaggaatacaaga

SEQ ID NO: 398249 - DNA, 20 bp, Artificial Sequence
  Description of Artificial Sequence: Synthetic oligonucleotide
  Target: LAMA2; (+) strand; PAM type: YTN; PAM sequence: CTA
caacttctgcagatagtaaa

SEQ ID NO: 398250 - DNA, 20 bp, Artificial Sequence
  Description of Artificial Sequence: Synthetic oligonucleotide
  Target: LAMA2; (+) strand; PAM type: YTN; PAM sequence: CTT
ctgcagatagtaaaggatgt

SEQ ID NO: 398251 - DNA, 20 bp, Artificial Sequence
  Description of Artificial Sequence: Synthetic oligonucleotide
  Target: LAMA2; (+) strand; PAM type: YTN; PAM sequence: TTC
tgcagatagtaaaggatgtt

SEQ ID NO: 398252 - DNA, 20 bp, Artificial Sequence
  Description of Artificial Sequence: Synthetic oligonucleotide
  Target: LAMA2; (+) strand; PAM type: YTN; PAM sequence: CTG
cagatagtaaaggatgttaa

SEQ ID NO: 398253 - DNA, 20 bp, Artificial Sequence
  Description of Artificial Sequence: Synthetic oligonucleotide
  Target: LAMA2; (+) strand; PAM type: YTN; PAM sequence: TTA
agaggatattatgaacaatt

SEQ ID NO: 398254 - DNA, 20 bp, Artificial Sequence
  Description of Artificial Sequence: Synthetic oligonucleotide
  Target: LAMA2; (+) strand; PAM type: YTN; PAM sequence: TTA
tgaacaattttatggcaata

SEQ ID NO: 398255 - DNA, 20 bp, Artificial Sequence
  Description of Artificial Sequence: Synthetic oligonucleotide
  Target: LAMA2; (+) strand; PAM type: YTN; PAM sequence: TTT
tatggcaataattcaacaat

SEQ ID NO: 398256 - DNA, 20 bp, Artificial Sequence
  Description of Artificial Sequence: Synthetic oligonucleotide
  Target: LAMA2; (+) strand; PAM type: YTN; PAM sequence: TTT
atggcaataattcaacaatt

SEQ ID NO: 398257 - DNA, 20 bp, Artificial Sequence
  Description of Artificial Sequence: Synthetic oligonucleotide
  Target: LAMA2; (+) strand; PAM type: YTN; PAM sequence: TTA
tggcaataattcaacaattt

SEQ ID NO: 398258 - DNA, 20 bp, Artificial Sequence
  Description of Artificial Sequence: Synthetic oligonucleotide
  Target: LAMA2; (+) strand; PAM type: YTN; PAM sequence: TTC
aacaatttggataaaaaggg

SEQ ID NO: 398259 - DNA, 20 bp, Artificial Sequence
  Description of Artificial Sequence: Synthetic oligonucleotide
  Target: LAMA2; (+) strand; PAM type: YTN; PAM sequence: TTT
ggataaaaagggcaaattct

SEQ ID NO: 398260 - DNA, 20 bp, Artificial Sequence
  Description of Artificial Sequence: Synthetic oligonucleotide
  Target: LAMA2; (+) strand; PAM type: YTN; PAM sequence: TTG
gataaaaagggcaaattctt

SEQ ID NO: 398261 - DNA, 20 bp, Artificial Sequence
  Description of Artificial Sequence: Synthetic oligonucleotide
  Target: LAMA2; (+) strand; PAM type: YTN; PAM sequence: TTC
tttgaaaatcacaaactacc

SEQ ID NO: 398262 - DNA, 20 bp, Artificial Sequence
  Description of Artificial Sequence: Synthetic oligonucleotide
  Target: LAMA2; (+) strand; PAM type: YTN; PAM sequence: CTT
tgaaaatcacaaactaccaa

SEQ ID NO: 398263 - DNA, 20 bp, Artificial Sequence
  Description of Artificial Sequence: Synthetic oligonucleotide
  Target: LAMA2; (+) strand; PAM type: YTN; PAM sequence: TTT
gaaaatcacaaactaccaaa

SEQ ID NO: 398264 - DNA, 20 bp, Artificial Sequence
  Description of Artificial Sequence: Synthetic oligonucleotide
  Target: LAMA2; (+) strand; PAM type: YTN; PAM sequence: TTG
aaaatcacaaactaccaaaa

SEQ ID NO: 398265 - DNA, 20 bp, Artificial Sequence
  Description of Artificial Sequence: Synthetic oligonucleotide
  Target: LAMA2; (+) strand; PAM type: YTN; PAM sequence: CTA
ccaaaactcacagataaata

SEQ ID NO: 398266 - DNA, 20 bp, Artificial Sequence
  Description of Artificial Sequence: Synthetic oligonucleotide
  Target: LAMA2; (+) strand; PAM type: YTN; PAM sequence: CTC
acagataaataatctgaata

SEQ ID NO: 398267 - DNA, 20 bp, Artificial Sequence
  Description of Artificial Sequence: Synthetic oligonucleotide
  Target: LAMA2; (+) strand; PAM type: YTN; PAM sequence: CTG
aatagttctatattcattag

SEQ ID NO: 398268 - DNA, 20 bp, Artificial Sequence
  Description of Artificial Sequence: Synthetic oligonucleotide
  Target: LAMA2; (+) strand; PAM type: YTN; PAM sequence: TTC
tatattcattagagaattta

SEQ ID NO: 398269 - DNA, 20 bp, Artificial Sequence
  Description of Artificial Sequence: Synthetic oligonucleotide
  Target: LAMA2; (+) strand; PAM type: YTN; PAM sequence: CTA
tattcattagagaatttaat

SEQ ID NO: 398270 - DNA, 20 bp, Artificial Sequence
  Description of Artificial Sequence: Synthetic oligonucleotide
  Target: LAMA2; (+) strand; PAM type: YTN; PAM sequence: TTC
attagagaatttaatttgta

SEQ ID NO: 398271 - DNA, 20 bp, Artificial Sequence
  Description of Artificial Sequence: Synthetic oligonucleotide
  Target: LAMA2; (+) strand; PAM type: YTN; PAM sequence: TTA
gagaatttaatttgtagttc

SEQ ID NO: 398272 - DNA, 20 bp, Artificial Sequence
  Description of Artificial Sequence: Synthetic oligonucleotide
  Target: LAMA2; (+) strand; PAM type: YTN; PAM sequence: TTT
aatttgtagttcaaaacctt

SEQ ID NO: 398273 - DNA, 20 bp, Artificial Sequence
  Description of Artificial Sequence: Synthetic oligonucleotide
  Target: LAMA2; (+) strand; PAM type: YTN; PAM sequence: TTA
atttgtagttcaaaaccttc

SEQ ID NO: 398274 - DNA, 20 bp, Artificial Sequence
  Description of Artificial Sequence: Synthetic oligonucleotide
  Target: LAMA2; (+) strand; PAM type: YTN; PAM sequence: TTT
gtagttcaaaaccttcacac

SEQ ID NO: 398275 - DNA, 20 bp, Artificial Sequence
  Description of Artificial Sequence: Synthetic oligonucleotide
  Target: LAMA2; (+) strand; PAM type: YTN; PAM sequence: TTG
tagttcaaaaccttcacaca

SEQ ID NO: 398276 - DNA, 20 bp, Artificial Sequence
  Description of Artificial Sequence: Synthetic oligonucleotide
  Target: LAMA2; (+) strand; PAM type: YTN; PAM sequence: TTC
aaaaccttcacacacacaaa

SEQ ID NO: 398277 - DNA, 20 bp, Artificial Sequence
  Description of Artificial Sequence: Synthetic oligonucleotide
  Target: LAMA2; (+) strand; PAM type: YTN; PAM sequence: CTT
cacacacacaaattcagttc

SEQ ID NO: 398278 - DNA, 20 bp, Artificial Sequence
  Description of Artificial Sequence: Synthetic oligonucleotide
  Target: LAMA2; (+) strand; PAM type: YTN; PAM sequence: TTC
acacacacaaattcagttcc

SEQ ID NO: 398279 - DNA, 20 bp, Artificial Sequence
  Description of Artificial Sequence: Synthetic oligonucleotide
  Target: LAMA2; (+) strand; PAM type: YTN; PAM sequence: TTC
agttccagatgactttactt

SEQ ID NO: 398280 - DNA, 20 bp, Artificial Sequence
  Description of Artificial Sequence: Synthetic oligonucleotide
  Target: LAMA2; (+) strand; PAM type: YTN; PAM sequence: TTC
cagatgactttacttgtgaa

SEQ ID NO: 398281 - DNA, 20 bp, Artificial Sequence
  Description of Artificial Sequence: Synthetic oligonucleotide
  Target: LAMA2; (+) strand; PAM type: YTN; PAM sequence: CTT
tacttgtgaattccaccaaa

SEQ ID NO: 398282 - DNA, 20 bp, Artificial Sequence
  Description of Artificial Sequence: Synthetic oligonucleotide
  Target: LAMA2; (+) strand; PAM type: YTN; PAM sequence: TTT
acttgtgaattccaccaaat

SEQ ID NO: 398283 - DNA, 20 bp, Artificial Sequence
  Description of Artificial Sequence: Synthetic oligonucleotide
  Target: LAMA2; (+) strand; PAM type: YTN; PAM sequence: TTA
cttgtgaattccaccaaata

SEQ ID NO: 398284 - DNA, 20 bp, Artificial Sequence
  Description of Artificial Sequence: Synthetic oligonucleotide
  Target: LAMA2; (+) strand; PAM type: YTN; PAM sequence: CTT
gtgaattccaccaaatattt

SEQ ID NO: 398285 - DNA, 20 bp, Artificial Sequence
  Description of Artificial Sequence: Synthetic oligonucleotide
  Target: LAMA2; (+) strand; PAM type: YTN; PAM sequence: TTG
tgaattccaccaaatattta

SEQ ID NO: 398286 - DNA, 20 bp, Artificial Sequence
  Description of Artificial Sequence: Synthetic oligonucleotide
  Target: LAMA2; (+) strand; PAM type: YTN; PAM sequence: TTC
caccaaatatttaatgaaga

SEQ ID NO: 398287 - DNA, 20 bp, Artificial Sequence
  Description of Artificial Sequence: Synthetic oligonucleotide
  Target: LAMA2; (+) strand; PAM type: YTN; PAM sequence: TTT
aatgaagaaataataaactc

SEQ ID NO: 398288 - DNA, 20 bp, Artificial Sequence
  Description of Artificial Sequence: Synthetic oligonucleotide
  Target: LAMA2; (+) strand; PAM type: YTN; PAM sequence: TTA
atgaagaaataataaactct

SEQ ID NO: 398289 - DNA, 20 bp, Artificial Sequence
  Description of Artificial Sequence: Synthetic oligonucleotide
  Target: LAMA2; (+) strand; PAM type: YTN; PAM sequence: CTC
tttcagaaaattgaagagga

SEQ ID NO: 398290 - DNA, 20 bp, Artificial Sequence
  Description of Artificial Sequence: Synthetic oligonucleotide
  Target: LAMA2; (+) strand; PAM type: YTN; PAM sequence: CTT
tcagaaaattgaagaggaga

SEQ ID NO: 398291 - DNA, 20 bp, Artificial Sequence
  Description of Artificial Sequence: Synthetic oligonucleotide
  Target: LAMA2; (+) strand; PAM type: YTN; PAM sequence: TTT
cagaaaattgaagaggagaa

SEQ ID NO: 398292 - DNA, 20 bp, Artificial Sequence
  Description of Artificial Sequence: Synthetic oligonucleotide
  Target: LAMA2; (+) strand; PAM type: YTN; PAM sequence: TTC
agaaaattgaagaggagaaa

SEQ ID NO: 398293 - DNA, 20 bp, Artificial Sequence
  Description of Artificial Sequence: Synthetic oligonucleotide
  Target: LAMA2; (+) strand; PAM type: YTN; PAM sequence: TTG
aagaggagaaaatacatcca

SEQ ID NO: 398294 - DNA, 20 bp, Artificial Sequence
  Description of Artificial Sequence: Synthetic oligonucleotide
  Target: LAMA2; (+) strand; PAM type: YTN; PAM sequence: CTC
attctacgaggccagtatta

SEQ ID NO: 398295 - DNA, 20 bp, Artificial Sequence
  Description of Artificial Sequence: Synthetic oligonucleotide
  Target: LAMA2; (+) strand; PAM type: YTN; PAM sequence: TTC
tacgaggccagtattactct

SEQ ID NO: 398296 - DNA, 20 bp, Artificial Sequence
  Description of Artificial Sequence: Synthetic oligonucleotide
  Target: LAMA2; (+) strand; PAM type: YTN; PAM sequence: CTA
cgaggccagtattactctga

SEQ ID NO: 398297 - DNA, 20 bp, Artificial Sequence
  Description of Artificial Sequence: Synthetic oligonucleotide
  Target: LAMA2; (+) strand; PAM type: YTN; PAM sequence: TTA
ctctgataccaatggcagac

SEQ ID NO: 398298 - DNA, 20 bp, Artificial Sequence
  Description of Artificial Sequence: Synthetic oligonucleotide
  Target: LAMA2; (+) strand; PAM type: YTN; PAM sequence: CTC
tgataccaatggcagacaaa

SEQ ID NO: 398299 - DNA, 20 bp, Artificial Sequence
  Description of Artificial Sequence: Synthetic oligonucleotide
  Target: LAMA2; (+) strand; PAM type: YTN; PAM sequence: CTG
ataccaatggcagacaaaga

SEQ ID NO: 398300 - DNA, 20 bp, Artificial Sequence
  Description of Artificial Sequence: Synthetic oligonucleotide
  Target: LAMA2; (+) strand; PAM type: YTN; PAM sequence: TTT
ttaaaaaagaaaattatatt

SEQ ID NO: 398301 - DNA, 20 bp, Artificial Sequence
  Description of Artificial Sequence: Synthetic oligonucleotide
  Target: LAMA2; (+) strand; PAM type: YTN; PAM sequence: TTT
taaaaaagaaaattatatta

SEQ ID NO: 398302 - DNA, 20 bp, Artificial Sequence
  Description of Artificial Sequence: Synthetic oligonucleotide
  Target: LAMA2; (+) strand; PAM type: YTN; PAM sequence: TTT
aaaaaagaaaattatattat

SEQ ID NO: 398303 - DNA, 20 bp, Artificial Sequence
  Description of Artificial Sequence: Synthetic oligonucleotide
  Target: LAMA2; (+) strand; PAM type: YTN; PAM sequence: TTA
aaaaagaaaattatattata

SEQ ID NO: 398304 - DNA, 20 bp, Artificial Sequence
  Description of Artificial Sequence: Synthetic oligonucleotide
  Target: LAMA2; (+) strand; PAM type: YTN; PAM sequence: TTA
tattatataacaatatccct

SEQ ID NO: 398305 - DNA, 20 bp, Artificial Sequence
  Description of Artificial Sequence: Synthetic oligonucleotide
  Target: LAMA2; (+) strand; PAM type: YTN; PAM sequence: TTA
tataacaatatccctccatg

SEQ ID NO: 398306 - DNA, 20 bp, Artificial Sequence
  Description of Artificial Sequence: Synthetic oligonucleotide
  Target: LAMA2; (+) strand; PAM type: YTN; PAM sequence: CTC
catgaacatagatgtaaaag

SEQ ID NO: 398307 - DNA, 20 bp, Artificial Sequence
  Description of Artificial Sequence: Synthetic oligonucleotide
  Target: LAMA2; (+) strand; PAM type: YTN; PAM sequence: TTC
atggcaaagttataacaaat

SEQ ID NO: 398308 - DNA, 20 bp, Artificial Sequence
  Description of Artificial Sequence: Synthetic oligonucleotide
  Target: LAMA2; (+) strand; PAM type: YTN; PAM sequence: TTA
taacaaatcaaatctaatga

SEQ ID NO: 398309 - DNA, 20 bp, Artificial Sequence
  Description of Artificial Sequence: Synthetic oligonucleotide
  Target: LAMA2; (+) strand; PAM type: YTN; PAM sequence: CTA
atgatttactcaaaggatta

SEQ ID NO: 398310 - DNA, 20 bp, Artificial Sequence
  Description of Artificial Sequence: Synthetic oligonucleotide
  Target: LAMA2; (+) strand; PAM type: YTN; PAM sequence: TTT
actcaaaggattatacatga

SEQ ID NO: 398311 - DNA, 20 bp, Artificial Sequence
  Description of Artificial Sequence: Synthetic oligonucleotide
  Target: LAMA2; (+) strand; PAM type: YTN; PAM sequence: TTA
ctcaaaggattatacatgat

SEQ ID NO: 398312 - DNA, 20 bp, Artificial Sequence
  Description of Artificial Sequence: Synthetic oligonucleotide
  Target: LAMA2; (+) strand; PAM type: YTN; PAM sequence: CTC
aaaggattatacatgatcac

SEQ ID NO: 398313 - DNA, 20 bp, Artificial Sequence
  Description of Artificial Sequence: Synthetic oligonucleotide
  Target: LAMA2; (+) strand; PAM type: YTN; PAM sequence: TTA
tacatgatcactaaatgata

SEQ ID NO: 398314 - DNA, 20 bp, Artificial Sequence
  Description of Artificial Sequence: Synthetic oligonucleotide
  Target: LAMA2; (+) strand; PAM type: YTN; PAM sequence: CTA
aatgatattaatgccaggat

SEQ ID NO: 398315 - DNA, 20 bp, Artificial Sequence
  Description of Artificial Sequence: Synthetic oligonucleotide
  Target: LAMA2; (+) strand; PAM type: YTN; PAM sequence: TTA
atgccaggatgtaagattgg

SEQ ID NO: 398316 - DNA, 20 bp, Artificial Sequence
  Description of Artificial Sequence: Synthetic oligonucleotide
  Target: LAMA2; (+) strand; PAM type: YTN; PAM sequence: TTG
gtttaatatttgaaattagt

SEQ ID NO: 398317 - DNA, 20 bp, Artificial Sequence
  Description of Artificial Sequence: Synthetic oligonucleotide
  Target: LAMA2; (+) strand; PAM type: YTN; PAM sequence: TTT
aatatttgaaattagtcagt

SEQ ID NO: 398318 - DNA, 20 bp, Artificial Sequence
  Description of Artificial Sequence: Synthetic oligonucleotide
  Target: LAMA2; (+) strand; PAM type: YTN; PAM sequence: TTA
atatttgaaattagtcagtg

SEQ ID NO: 398319 - DNA, 20 bp, Artificial Sequence
  Description of Artificial Sequence: Synthetic oligonucleotide
  Target: LAMA2; (+) strand; PAM type: YTN; PAM sequence: TTT
gaaattagtcagtgtaattt

SEQ ID NO: 398320 - DNA, 20 bp, Artificial Sequence
  Description of Artificial Sequence: Synthetic oligonucleotide
  Target: LAMA2; (+) strand; PAM type: YTN; PAM sequence: TTG
aaattagtcagtgtaattta

SEQ ID NO: 398321 - DNA, 20 bp, Artificial Sequence
  Description of Artificial Sequence: Synthetic oligonucleotide
  Target: LAMA2; (+) strand; PAM type: YTN; PAM sequence: TTA
gtcagtgtaatttaccatat

SEQ ID NO: 398322 - DNA, 20 bp, Artificial Sequence
  Description of Artificial Sequence: Synthetic oligonucleotide
  Target: LAMA2; (+) strand; PAM type: YTN; PAM sequence: TTT
accatatagcaaactaaaaa

SEQ ID NO: 398323 - DNA, 20 bp, Artificial Sequence
  Description of Artificial Sequence: Synthetic oligonucleotide
  Target: LAMA2; (+) strand; PAM type: YTN; PAM sequence: TTA
ccatatagcaaactaaaaag

SEQ ID NO: 398324 - DNA, 20 bp, Artificial Sequence
  Description of Artificial Sequence: Synthetic oligonucleotide
  Target: LAMA2; (+) strand; PAM type: YTN; PAM sequence: CTA
aaaagcaaactatataatca

SEQ ID NO: 398325 - DNA, 20 bp, Artificial Sequence
  Description of Artificial Sequence: Synthetic oligonucleotide
  Target: LAMA2; (+) strand; PAM type: YTN; PAM sequence: CTA
tataatcacctcaattgata

SEQ ID NO: 398326 - DNA, 20 bp, Artificial Sequence
  Description of Artificial Sequence: Synthetic oligonucleotide
  Target: LAMA2; (+) strand; PAM type: YTN; PAM sequence: CTC
aattgatacagcaaaggcat

SEQ ID NO: 398327 - DNA, 20 bp, Artificial Sequence
  Description of Artificial Sequence: Synthetic oligonucleotide
  Target: LAMA2; (+) strand; PAM type: YTN; PAM sequence: TTG
atacagcaaaggcatttgac

SEQ ID NO: 398328 - DNA, 20 bp, Artificial Sequence
  Description of Artificial Sequence: Synthetic oligonucleotide
  Target: LAMA2; (+) strand; PAM type: YTN; PAM sequence: TTT
gacaaaatgcgtctattttt

SEQ ID NO: 398329 - DNA, 20 bp, Artificial Sequence
  Description of Artificial Sequence: Synthetic oligonucleotide
  Target: LAMA2; (+) strand; PAM type: YTN; PAM sequence: TTG
acaaaatgcgtctatttttt

SEQ ID NO: 398330 - DNA, 20 bp, Artificial Sequence
  Description of Artificial Sequence: Synthetic oligonucleotide
  Target: LAMA2; (+) strand; PAM type: YTN; PAM sequence: CTA
tttttttttaaaaactgcct

SEQ ID NO: 398331 - DNA, 20 bp, Artificial Sequence
  Description of Artificial Sequence: Synthetic oligonucleotide
  Target: LAMA2; (+) strand; PAM type: YTN; PAM sequence: TTT
ttttttaaaaactgcctact

SEQ ID NO: 398332 - DNA, 20 bp, Artificial Sequence
  Description of Artificial Sequence: Synthetic oligonucleotide
  Target: LAMA2; (+) strand; PAM type: YTN; PAM sequence: TTT
tttttaaaaactgcctacta

SEQ ID NO: 398333 - DNA, 20 bp, Artificial Sequence
  Description of Artificial Sequence: Synthetic oligonucleotide
  Target: LAMA2; (+) strand; PAM type: YTN; PAM sequence: TTT
ttttaaaaactgcctactaa

SEQ ID NO: 398334 - DNA, 20 bp, Artificial Sequence
  Description of Artificial Sequence: Synthetic oligonucleotide
  Target: LAMA2; (+) strand; PAM type: YTN; PAM sequence: TTT
tttaaaaactgcctactaag

SEQ ID NO: 398335 - DNA, 20 bp, Artificial Sequence
  Description of Artificial Sequence: Synthetic oligonucleotide
  Target: LAMA2; (+) strand; PAM type: YTN; PAM sequence: TTT
ttaaaaactgcctactaaga

SEQ ID NO: 398336 - DNA, 20 bp, Artificial Sequence
  Description of Artificial Sequence: Synthetic oligonucleotide
  Target: LAMA2; (+) strand; PAM type: YTN; PAM sequence: TTT
taaaaactgcctactaagag

SEQ ID NO: 398337 - DNA, 20 bp, Artificial Sequence
  Description of Artificial Sequence: Synthetic oligonucleotide
  Target: LAMA2; (+) strand; PAM type: YTN; PAM sequence: TTT
aaaaactgcctactaagagt

SEQ ID NO: 398338 - DNA, 20 bp, Artificial Sequence
  Description of Artificial Sequence: Synthetic oligonucleotide
  Target: LAMA2; (+) strand; PAM type: YTN; PAM sequence: TTA
aaaactgcctactaagagta

SEQ ID NO: 398339 - DNA, 20 bp, Artificial Sequence
  Description of Artificial Sequence: Synthetic oligonucleotide
  Target: LAMA2; (+) strand; PAM type: YTN; PAM sequence: CTG
cctactaagagtaggggaac

SEQ ID NO: 398340 - DNA, 20 bp, Artificial Sequence
  Description of Artificial Sequence: Synthetic oligonucleotide
  Target: LAMA2; (+) strand; PAM type: YTN; PAM sequence: CTA
ctaagagtaggggaacttca

SEQ ID NO: 398341 - DNA, 20 bp, Artificial Sequence
  Description of Artificial Sequence: Synthetic oligonucleotide
  Target: LAMA2; (+) strand; PAM type: YTN; PAM sequence: CTA
agagtaggggaacttcacta

SEQ ID NO: 398342 - DNA, 20 bp, Artificial Sequence
  Description of Artificial Sequence: Synthetic oligonucleotide
  Target: LAMA2; (+) strand; PAM type: YTN; PAM sequence: CTT
cactacctgatcactataaa

SEQ ID NO: 398343 - DNA, 20 bp, Artificial Sequence
  Description of Artificial Sequence: Synthetic oligonucleotide
  Target: LAMA2; (+) strand; PAM type: YTN; PAM sequence: TTC
actacctgatcactataaaa

SEQ ID NO: 398344 - DNA, 20 bp, Artificial Sequence
  Description of Artificial Sequence: Synthetic oligonucleotide
  Target: LAMA2; (+) strand; PAM type: YTN; PAM sequence: CTA
cctgatcactataaaaacct

SEQ ID NO: 398345 - DNA, 20 bp, Artificial Sequence
  Description of Artificial Sequence: Synthetic oligonucleotide
  Target: LAMA2; (+) strand; PAM type: YTN; PAM sequence: CTG
atcactataaaaacctattt

SEQ ID NO: 398346 - DNA, 20 bp, Artificial Sequence
  Description of Artificial Sequence: Synthetic oligonucleotide
  Target: LAMA2; (+) strand; PAM type: YTN; PAM sequence: CTA
taaaaacctattttttaaaa

SEQ ID NO: 398347 - DNA, 20 bp, Artificial Sequence
  Description of Artificial Sequence: Synthetic oligonucleotide
  Target: LAMA2; (+) strand; PAM type: YTN; PAM sequence: CTA
ttttttaaaaaaacctaaca

SEQ ID NO: 398348 - DNA, 20 bp, Artificial Sequence
  Description of Artificial Sequence: Synthetic oligonucleotide
  Target: LAMA2; (+) strand; PAM type: YTN; PAM sequence: TTT
tttaaaaaaacctaacagct

SEQ ID NO: 398349 - DNA, 20 bp, Artificial Sequence
  Description of Artificial Sequence: Synthetic oligonucleotide
  Target: LAMA2; (+) strand; PAM type: YTN; PAM sequence: TTT
ttaaaaaaacctaacagcta

SEQ ID NO: 398350 - DNA, 20 bp, Artificial Sequence
  Description of Artificial Sequence: Synthetic oligonucleotide
  Target: LAMA2; (+) strand; PAM type: YTN; PAM sequence: TTT
taaaaaaacctaacagctaa

SEQ ID NO: 398351 - DNA, 20 bp, Artificial Sequence
  Description of Artificial Sequence: Synthetic oligonucleotide
  Target: LAMA2; (+) strand; PAM type: YTN; PAM sequence: TTT
aaaaaaacctaacagctaaa

SEQ ID NO: 398352 - DNA, 20 bp, Artificial Sequence
  Description of Artificial Sequence: Synthetic oligonucleotide
  Target: LAMA2; (+) strand; PAM type: YTN; PAM sequence: TTA
aaaaaacctaacagctaaaa

SEQ ID NO: 398353 - DNA, 20 bp, Artificial Sequence
  Description of Artificial Sequence: Synthetic oligonucleotide
  Target: LAMA2; (+) strand; PAM type: YTN; PAM sequence: CTA
acagctaaaatcatacttag

SEQ ID NO: 398354 - DNA, 20 bp, Artificial Sequence
  Description of Artificial Sequence: Synthetic oligonucleotide
  Target: LAMA2; (+) strand; PAM type: YTN; PAM sequence: CTA
aaatcatacttagcacaaga

SEQ ID NO: 398355 - DNA, 20 bp, Artificial Sequence
  Description of Artificial Sequence: Synthetic oligonucleotide
  Target: LAMA2; (+) strand; PAM type: YTN; PAM sequence: CTT
agcacaagactaagattagg

SEQ ID NO: 398356 - DNA, 20 bp, Artificial Sequence
  Description of Artificial Sequence: Synthetic oligonucleotide
  Target: LAMA2; (+) strand; PAM type: YTN; PAM sequence: TTA
gcacaagactaagattagga

SEQ ID NO: 398357 - DNA, 20 bp, Artificial Sequence
  Description of Artificial Sequence: Synthetic oligonucleotide
  Target: LAMA2; (+) strand; PAM type: YTN; PAM sequence: CTA
agattaggaagaaggcaagg

SEQ ID NO: 398358 - DNA, 20 bp, Artificial Sequence
  Description of Artificial Sequence: Synthetic oligonucleotide
  Target: LAMA2; (+) strand; PAM type: YTN; PAM sequence: TTA
ggaagaaggcaaggatatct

SEQ ID NO: 398359 - DNA, 20 bp, Artificial Sequence
  Description of Artificial Sequence: Synthetic oligonucleotide
  Target: LAMA2; (+) strand; PAM type: YTN; PAM sequence: CTG
cttccattacttccatttaa

SEQ ID NO: 398360 - DNA, 20 bp, Artificial Sequence
  Description of Artificial Sequence: Synthetic oligonucleotide
  Target: LAMA2; (+) strand; PAM type: YTN; PAM sequence: CTT
ccattacttccatttaacat

SEQ ID NO: 398361 - DNA, 20 bp, Artificial Sequence
  Description of Artificial Sequence: Synthetic oligonucleotide
  Target: LAMA2; (+) strand; PAM type: YTN; PAM sequence: TTC
cattacttccatttaacatt

SEQ ID NO: 398362 - DNA, 20 bp, Artificial Sequence
  Description of Artificial Sequence: Synthetic oligonucleotide
  Target: LAMA2; (+) strand; PAM type: YTN; PAM sequence: TTA
cttccatttaacattgtact

SEQ ID NO: 398363 - DNA, 20 bp, Artificial Sequence
  Description of Artificial Sequence: Synthetic oligonucleotide
  Target: LAMA2; (+) strand; PAM type: YTN; PAM sequence: CTT
ccatttaacattgtactaga

SEQ ID NO: 398364 - DNA, 20 bp, Artificial Sequence
  Description of Artificial Sequence: Synthetic oligonucleotide
  Target: LAMA2; (+) strand; PAM type: YTN; PAM sequence: TTC
catttaacattgtactagag

SEQ ID NO: 398365 - DNA, 20 bp, Artificial Sequence
  Description of Artificial Sequence: Synthetic oligonucleotide
  Target: LAMA2; (+) strand; PAM type: YTN; PAM sequence: TTT
aacattgtactagagagact

SEQ ID NO: 398366 - DNA, 20 bp, Artificial Sequence
  Description of Artificial Sequence: Synthetic oligonucleotide
  Target: LAMA2; (+) strand; PAM type: YTN; PAM sequence: TTA
acattgtactagagagacta

SEQ ID NO: 398367 - DNA, 20 bp, Artificial Sequence
  Description of Artificial Sequence: Synthetic oligonucleotide
  Target: LAMA2; (+) strand; PAM type: YTN; PAM sequence: TTG
tactagagagactaaccagt

SEQ ID NO: 398368 - DNA, 20 bp, Artificial Sequence
  Description of Artificial Sequence: Synthetic oligonucleotide
  Target: LAMA2; (+) strand; PAM type: YTN; PAM sequence: CTA
gagagactaaccagtacaag

SEQ ID NO: 398369 - DNA, 20 bp, Artificial Sequence
  Description of Artificial Sequence: Synthetic oligonucleotide
  Target: LAMA2; (+) strand; PAM type: YTN; PAM sequence: CTA
accagtacaaggggcaagaa

SEQ ID NO: 398370 - DNA, 20 bp, Artificial Sequence
  Description of Artificial Sequence: Synthetic oligonucleotide
  Target: LAMA2; (+) strand; PAM type: YTN; PAM sequence: TTG
aaaaataagtacaaatgttt

SEQ ID NO: 398371 - DNA, 20 bp, Artificial Sequence
  Description of Artificial Sequence: Synthetic oligonucleotide
  Target: LAMA2; (+) strand; PAM type: YTN; PAM sequence: TTT
ttattcacagatactataga

SEQ ID NO: 398372 - DNA, 20 bp, Artificial Sequence
  Description of Artificial Sequence: Synthetic oligonucleotide
  Target: LAMA2; (+) strand; PAM type: YTN; PAM sequence: TTT
tattcacagatactatagaa

SEQ ID NO: 398373 - DNA, 20 bp, Artificial Sequence
  Description of Artificial Sequence: Synthetic oligonucleotide
  Target: LAMA2; (+) strand; PAM type: YTN; PAM sequence: TTT
attcacagatactatagaag

SEQ ID NO: 398374 - DNA, 20 bp, Artificial Sequence
  Description of Artificial Sequence: Synthetic oligonucleotide
  Target: LAMA2; (+) strand; PAM type: YTN; PAM sequence: TTA
ttcacagatactatagaagt

SEQ ID NO: 398375 - DNA, 20 bp, Artificial Sequence
  Description of Artificial Sequence: Synthetic oligonucleotide
  Target: LAMA2; (+) strand; PAM type: YTN; PAM sequence: TTC
acagatactatagaagtcta

SEQ ID NO: 398376 - DNA, 20 bp, Artificial Sequence
  Description of Artificial Sequence: Synthetic oligonucleotide
  Target: LAMA2; (+) strand; PAM type: YTN; PAM sequence: CTA
tagaagtctaagcataaaat

SEQ ID NO: 398377 - DNA, 20 bp, Artificial Sequence
  Description of Artificial Sequence: Synthetic oligonucleotide
  Target: LAMA2; (+) strand; PAM type: YTN; PAM sequence: CTA
agcataaaatcctggtggtt

SEQ ID NO: 398378 - DNA, 20 bp, Artificial Sequence
  Description of Artificial Sequence: Synthetic oligonucleotide
  Target: LAMA2; (+) strand; PAM type: YTN; PAM sequence: CTG
gtggttcatgcctgtaaccc

SEQ ID NO: 398379 - DNA, 20 bp, Artificial Sequence
  Description of Artificial Sequence: Synthetic oligonucleotide
  Target: LAMA2; (+) strand; PAM type: YTN; PAM sequence: TTC
atgcctgtaaccctagtgct

SEQ ID NO: 398380 - DNA, 20 bp, Artificial Sequence
  Description of Artificial Sequence: Synthetic oligonucleotide
  Target: LAMA2; (+) strand; PAM type: YTN; PAM sequence: CTG
taaccctagtgctttaggag

SEQ ID NO: 398381 - DNA, 20 bp, Artificial Sequence
  Description of Artificial Sequence: Synthetic oligonucleotide
  Target: LAMA2; (+) strand; PAM type: YTN; PAM sequence: CTA
gtgctttaggaggctgaggc

SEQ ID NO: 398382 - DNA, 20 bp, Artificial Sequence
  Description of Artificial Sequence: Synthetic oligonucleotide
  Target: LAMA2; (+) strand; PAM type: YTN; PAM sequence: CTT
taggaggctgaggcaggtgg

SEQ ID NO: 398383 - DNA, 20 bp, Artificial Sequence
  Description of Artificial Sequence: Synthetic oligonucleotide
  Target: LAMA2; (+) strand; PAM type: YTN; PAM sequence: TTT
aggaggctgaggcaggtgga

SEQ ID NO: 398384 - DNA, 20 bp, Artificial Sequence
  Description of Artificial Sequence: Synthetic oligonucleotide
  Target: LAMA2; (+) strand; PAM type: YTN; PAM sequence: TTA
ggaggctgaggcaggtggat

SEQ ID NO: 398385 - DNA, 20 bp, Artificial Sequence
  Description of Artificial Sequence: Synthetic oligonucleotide
  Target: LAMA2; (+) strand; PAM type: YTN; PAM sequence: CTG
aggcaggtggattgcttgag

SEQ ID NO: 398386 - DNA, 20 bp, Artificial Sequence
  Description of Artificial Sequence: Synthetic oligonucleotide
  Target: LAMA2; (+) strand; PAM type: YTN; PAM sequence: TTG
cttgaggccaagagtttgag

SEQ ID NO: 398387 - DNA, 20 bp, Artificial Sequence
  Description of Artificial Sequence: Synthetic oligonucleotide
  Target: LAMA2; (+) strand; PAM type: YTN; PAM sequence: CTT
gaggccaagagtttgagact

SEQ ID NO: 398388 - DNA, 20 bp, Artificial Sequence
  Description of Artificial Sequence: Synthetic oligonucleotide
  Target: LAMA2; (+) strand; PAM type: YTN; PAM sequence: TTG
aggccaagagtttgagacta

SEQ ID NO: 398389 - DNA, 20 bp, Artificial Sequence
  Description of Artificial Sequence: Synthetic oligonucleotide
  Target: LAMA2; (+) strand; PAM type: YTN; PAM sequence: TTT
gagactagctgggcaacata

SEQ ID NO: 398390 - DNA, 20 bp, Artificial Sequence
  Description of Artificial Sequence: Synthetic oligonucleotide
  Target: LAMA2; (+) strand; PAM type: YTN; PAM sequence: TTG
agactagctgggcaacatag

SEQ ID NO: 398391 - DNA, 20 bp, Artificial Sequence
  Description of Artificial Sequence: Synthetic oligonucleotide
  Target: LAMA2; (+) strand; PAM type: YTN; PAM sequence: CTA
gctgggcaacatagcaagac

SEQ ID NO: 398392 - DNA, 20 bp, Artificial Sequence
  Description of Artificial Sequence: Synthetic oligonucleotide
  Target: LAMA2; (+) strand; PAM type: YTN; PAM sequence: CTG
ggcaacatagcaagacctca

SEQ ID NO: 398393 - DNA, 20 bp, Artificial Sequence
  Description of Artificial Sequence: Synthetic oligonucleotide
  Target: LAMA2; (+) strand; PAM type: YTN; PAM sequence: CTC
atctctacaaccaaaaaaaa

SEQ ID NO: 398394 - DNA, 20 bp, Artificial Sequence
  Description of Artificial Sequence: Synthetic oligonucleotide
  Target: LAMA2; (+) strand; PAM type: YTN; PAM sequence: CTC
tacaaccaaaaaaaaagttt

SEQ ID NO: 398395 - DNA, 20 bp, Artificial Sequence
  Description of Artificial Sequence: Synthetic oligonucleotide
  Target: LAMA2; (+) strand; PAM type: YTN; PAM sequence: CTA
caaccaaaaaaaaagtttaa

SEQ ID NO: 398396 - DNA, 20 bp, Artificial Sequence
  Description of Artificial Sequence: Synthetic oligonucleotide
  Target: LAMA2; (+) strand; PAM type: YTN; PAM sequence: TTT
aaaaagcataaaataaaatg

SEQ ID NO: 398397 - DNA, 20 bp, Artificial Sequence
  Description of Artificial Sequence: Synthetic oligonucleotide
  Target: LAMA2; (+) strand; PAM type: YTN; PAM sequence: TTA
aaaagcataaaataaaatgc

SEQ ID NO: 398398 - DNA, 20 bp, Artificial Sequence
  Description of Artificial Sequence: Synthetic oligonucleotide
  Target: LAMA2; (+) strand; PAM type: YTN; PAM sequence: CTA
tctattaaaaaaaagttact

SEQ ID NO: 398399 - DNA, 20 bp, Artificial Sequence
  Description of Artificial Sequence: Synthetic oligonucleotide
  Target: LAMA2; (+) strand; PAM type: YTN; PAM sequence: CTA
ttaaaaaaaagttactagaa

SEQ ID NO: 398400 - DNA, 20 bp, Artificial Sequence
  Description of Artificial Sequence: Synthetic oligonucleotide
  Target: LAMA2; (+) strand; PAM type: YTN; PAM sequence: TTA
aaaaaaagttactagaacta

SEQ ID NO: 398401 - DNA, 20 bp, Artificial Sequence
  Description of Artificial Sequence: Synthetic oligonucleotide
  Target: LAMA2; (+) strand; PAM type: YTN; PAM sequence: TTA
ctagaactaataagtgagct

SEQ ID NO: 398402 - DNA, 20 bp, Artificial Sequence
  Description of Artificial Sequence: Synthetic oligonucleotide
  Target: LAMA2; (+) strand; PAM type: YTN; PAM sequence: CTA
gaactaataagtgagcttac

SEQ ID NO: 398403 - DNA, 20 bp, Artificial Sequence
  Description of Artificial Sequence: Synthetic oligonucleotide
  Target: LAMA2; (+) strand; PAM type: YTN; PAM sequence: CTA
ataagtgagcttaccaatgt

SEQ ID NO: 398404 - DNA, 20 bp, Artificial Sequence
  Description of Artificial Sequence: Synthetic oligonucleotide
  Target: LAMA2; (+) strand; PAM type: YTN; PAM sequence: CTT
accaatgttataaggtacaa

SEQ ID NO: 398405 - DNA, 20 bp, Artificial Sequence
  Description of Artificial Sequence: Synthetic oligonucleotide
  Target: LAMA2; (+) strand; PAM type: YTN; PAM sequence: TTA
ccaatgttataaggtacaac

SEQ ID NO: 398406 - DNA, 20 bp, Artificial Sequence
  Description of Artificial Sequence: Synthetic oligonucleotide
  Target: LAMA2; (+) strand; PAM type: YTN; PAM sequence: TTA
taaggtacaacatctatatg

SEQ ID NO: 398407 - DNA, 20 bp, Artificial Sequence
  Description of Artificial Sequence: Synthetic oligonucleotide
  Target: LAMA2; (+) strand; PAM type: YTN; PAM sequence: CTA
tatgtgaaaatcagtcattt

SEQ ID NO: 398408 - DNA, 20 bp, Artificial Sequence
  Description of Artificial Sequence: Synthetic oligonucleotide
  Target: LAMA2; (+) strand; PAM type: YTN; PAM sequence: TTT
caaagactggcaaggatacg

SEQ ID NO: 398409 - DNA, 20 bp, Artificial Sequence
  Description of Artificial Sequence: Synthetic oligonucleotide
  Target: LAMA2; (+) strand; PAM type: YTN; PAM sequence: TTC
aaagactggcaaggatacgt

SEQ ID NO: 398410 - DNA, 20 bp, Artificial Sequence
  Description of Artificial Sequence: Synthetic oligonucleotide
  Target: LAMA2; (+) strand; PAM type: YTN; PAM sequence: CTG
gcaaggatacgttggaagtt

SEQ ID NO: 398411 - DNA, 20 bp, Artificial Sequence
  Description of Artificial Sequence: Synthetic oligonucleotide
  Target: LAMA2; (+) strand; PAM type: YTN; PAM sequence: TTG
gaagttgaaattaaaaggtt

SEQ ID NO: 398412 - DNA, 20 bp, Artificial Sequence
  Description of Artificial Sequence: Synthetic oligonucleotide
  Target: LAMA2; (+) strand; PAM type: YTN; PAM sequence: TTG
aaattaaaaggttacagttt

SEQ ID NO: 398413 - DNA, 20 bp, Artificial Sequence
  Description of Artificial Sequence: Synthetic oligonucleotide
  Target: LAMA2; (+) strand; PAM type: YTN; PAM sequence: TTA
aaaggttacagtttacaata

SEQ ID NO: 398414 - DNA, 20 bp, Artificial Sequence
  Description of Artificial Sequence: Synthetic oligonucleotide
  Target: LAMA2; (+) strand; PAM type: YTN; PAM sequence: TTA
cagtttacaatagcattaaa

SEQ ID NO: 398415 - DNA, 20 bp, Artificial Sequence
  Description of Artificial Sequence: Synthetic oligonucleotide
  Target: LAMA2; (+) strand; PAM type: YTN; PAM sequence: TTT
acaatagcattaaaaatgta

SEQ ID NO: 398416 - DNA, 20 bp, Artificial Sequence
  Description of Artificial Sequence: Synthetic oligonucleotide
  Target: LAMA2; (+) strand; PAM type: YTN; PAM sequence: TTA
caatagcattaaaaatgtaa

SEQ ID NO: 398417 - DNA, 20 bp, Artificial Sequence
  Description of Artificial Sequence: Synthetic oligonucleotide
  Target: LAMA2; (+) strand; PAM type: YTN; PAM sequence: TTA
aaaatgtaaaagacccccta

SEQ ID NO: 398418 - DNA, 20 bp, Artificial Sequence
  Description of Artificial Sequence: Synthetic oligonucleotide
  Target: LAMA2; (+) strand; PAM type: YTN; PAM sequence: CTA
cactgaatactctggagata

SEQ ID NO: 398419 - DNA, 20 bp, Artificial Sequence
  Description of Artificial Sequence: Synthetic oligonucleotide
  Target: LAMA2; (+) strand; PAM type: YTN; PAM sequence: CTG
aatactctggagataaataa

SEQ ID NO: 398420 - DNA, 20 bp, Artificial Sequence
  Description of Artificial Sequence: Synthetic oligonucleotide
  Target: LAMA2; (+) strand; PAM type: YTN; PAM sequence: CTC
tggagataaataaaagaaaa

SEQ ID NO: 398421 - DNA, 20 bp, Artificial Sequence
  Description of Artificial Sequence: Synthetic oligonucleotide
  Target: LAMA2; (+) strand; PAM type: YTN; PAM sequence: CTG
gagataaataaaagaaaatc

SEQ ID NO: 398422 - DNA, 20 bp, Artificial Sequence
  Description of Artificial Sequence: Synthetic oligonucleotide
  Target: LAMA2; (+) strand; PAM type: YTN; PAM sequence: CTA
aataaatcaagagatatacc

SEQ ID NO: 398423 - DNA, 20 bp, Artificial Sequence
  Description of Artificial Sequence: Synthetic oligonucleotide
  Target: LAMA2; (+) strand; PAM type: YTN; PAM sequence: TTC
atagatcagaagattcaata

SEQ ID NO: 398424 - DNA, 20 bp, Artificial Sequence
  Description of Artificial Sequence: Synthetic oligonucleotide
  Target: LAMA2; (+) strand; PAM type: YTN; PAM sequence: TTC
aatattcctataatcctagt

SEQ ID NO: 398425 - DNA, 20 bp, Artificial Sequence
  Description of Artificial Sequence: Synthetic oligonucleotide
  Target: LAMA2; (+) strand; PAM type: YTN; PAM sequence: TTC
ctataatcctagtttataca

SEQ ID NO: 398426 - DNA, 20 bp, Artificial Sequence
  Description of Artificial Sequence: Synthetic oligonucleotide
  Target: LAMA2; (+) strand; PAM type: YTN; PAM sequence: CTA
taatcctagtttatacatat

SEQ ID NO: 398427 - DNA, 20 bp, Artificial Sequence
  Description of Artificial Sequence: Synthetic oligonucleotide
  Target: LAMA2; (+) strand; PAM type: YTN; PAM sequence: CTA
gtttatacatattgacctac

SEQ ID NO: 398428 - DNA, 20 bp, Artificial Sequence
  Description of Artificial Sequence: Synthetic oligonucleotide
  Target: LAMA2; (+) strand; PAM type: YTN; PAM sequence: TTT
atacatattgacctacacat

SEQ ID NO: 398429 - DNA, 20 bp, Artificial Sequence
  Description of Artificial Sequence: Synthetic oligonucleotide
  Target: LAMA2; (+) strand; PAM type: YTN; PAM sequence: TTA
tacatattgacctacacatt

SEQ ID NO: 398430 - DNA, 20 bp, Artificial Sequence
  Description of Artificial Sequence: Synthetic oligonucleotide
  Target: LAMA2; (+) strand; PAM type: YTN; PAM sequence: TTG
acctacacattcaatgcaat

SEQ ID NO: 398431 - DNA, 20 bp, Artificial Sequence
  Description of Artificial Sequence: Synthetic oligonucleotide
  Target: LAMA2; (+) strand; PAM type: YTN; PAM sequence: CTA
cacattcaatgcaatcccag

SEQ ID NO: 398432 - DNA, 20 bp, Artificial Sequence
  Description of Artificial Sequence: Synthetic oligonucleotide
  Target: LAMA2; (+) strand; PAM type: YTN; PAM sequence: TTC
aatgcaatcccagtaaaaat

SEQ ID NO: 398433 - DNA, 20 bp, Artificial Sequence
  Description of Artificial Sequence: Synthetic oligonucleotide
  Target: LAMA2; (+) strand; PAM type: YTN; PAM sequence: CTA
gcaaggttttttcctaaaaa

SEQ ID NO: 398434 - DNA, 20 bp, Artificial Sequence
  Description of Artificial Sequence: Synthetic oligonucleotide
  Target: LAMA2; (+) strand; PAM type: YTN; PAM sequence: TTT
tttcctaaaaatttacagat

SEQ ID NO: 398435 - DNA, 20 bp, Artificial Sequence
  Description of Artificial Sequence: Synthetic oligonucleotide
  Target: LAMA2; (+) strand; PAM type: YTN; PAM sequence: TTT
ttcctaaaaatttacagata

SEQ ID NO: 398436 - DNA, 20 bp, Artificial Sequence
  Description of Artificial Sequence: Synthetic oligonucleotide
  Target: LAMA2; (+) strand; PAM type: YTN; PAM sequence: TTT
tcctaaaaatttacagatat

SEQ ID NO: 398437 - DNA, 20 bp, Artificial Sequence
  Description of Artificial Sequence: Synthetic oligonucleotide
  Target: LAMA2; (+) strand; PAM type: YTN; PAM sequence: TTT
cctaaaaatttacagatatg

SEQ ID NO: 398438 - DNA, 20 bp, Artificial Sequence
  Description of Artificial Sequence: Synthetic oligonucleotide
  Target: LAMA2; (+) strand; PAM type: YTN; PAM sequence: TTC
ctaaaaatttacagatatgt

SEQ ID NO: 398439 - DNA, 20 bp, Artificial Sequence
  Description of Artificial Sequence: Synthetic oligonucleotide
  Target: LAMA2; (+) strand; PAM type: YTN; PAM sequence: CTA
aaaatttacagatatgtttt

SEQ ID NO: 398440 - DNA, 20 bp, Artificial Sequence
  Description of Artificial Sequence: Synthetic oligonucleotide
  Target: LAMA2; (+) strand; PAM type: YTN; PAM sequence: TTT
acagatatgttttacaattc

SEQ ID NO: 398441 - DNA, 20 bp, Artificial Sequence
  Description of Artificial Sequence: Synthetic oligonucleotide
  Target: LAMA2; (+) strand; PAM type: YTN; PAM sequence: TTA
cagatatgttttacaattca

SEQ ID NO: 398442 - DNA, 20 bp, Artificial Sequence
  Description of Artificial Sequence: Synthetic oligonucleotide
  Target: LAMA2; (+) strand; PAM type: YTN; PAM sequence: TTT
tacaattcatatggaattgg

SEQ ID NO: 398443 - DNA, 20 bp, Artificial Sequence
  Description of Artificial Sequence: Synthetic oligonucleotide
  Target: LAMA2; (+) strand; PAM type: YTN; PAM sequence: TTT
acaattcatatggaattgga

SEQ ID NO: 398444 - DNA, 20 bp, Artificial Sequence
  Description of Artificial Sequence: Synthetic oligonucleotide
  Target: LAMA2; (+) strand; PAM type: YTN; PAM sequence: TTA
caattcatatggaattggaa

SEQ ID NO: 398445 - DNA, 20 bp, Artificial Sequence
  Description of Artificial Sequence: Synthetic oligonucleotide
  Target: LAMA2; (+) strand; PAM type: YTN; PAM sequence: TTC
atatggaattggaaaggaga

SEQ ID NO: 398446 - DNA, 20 bp, Artificial Sequence
  Description of Artificial Sequence: Synthetic oligonucleotide
  Target: LAMA2; (+) strand; PAM type: YTN; PAM sequence: TTG
gaaaggagaaaaatgttgga

SEQ ID NO: 398447 - DNA, 20 bp, Artificial Sequence
  Description of Artificial Sequence: Synthetic oligonucleotide
  Target: LAMA2; (+) strand; PAM type: YTN; PAM sequence: TTG
gaaaggttatactacctgac

SEQ ID NO: 398448 - DNA, 20 bp, Artificial Sequence
  Description of Artificial Sequence: Synthetic oligonucleotide
  Target: LAMA2; (+) strand; PAM type: YTN; PAM sequence: TTA
tactacctgacttcaatact

SEQ ID NO: 398449 - DNA, 20 bp, Artificial Sequence
  Description of Artificial Sequence: Synthetic oligonucleotide
  Target: LAMA2; (+) strand; PAM type: YTN; PAM sequence: CTA
cctgacttcaatacttacta

SEQ ID NO: 398450 - DNA, 20 bp, Artificial Sequence
  Description of Artificial Sequence: Synthetic oligonucleotide
  Target: LAMA2; (+) strand; PAM type: YTN; PAM sequence: CTG
acttcaatacttactaccaa

SEQ ID NO: 398451 - DNA, 20 bp, Artificial Sequence
  Description of Artificial Sequence: Synthetic oligonucleotide
  Target: LAMA2; (+) strand; PAM type: YTN; PAM sequence: CTT
caatacttactaccaagcta

SEQ ID NO: 398452 - DNA, 20 bp, Artificial Sequence
  Description of Artificial Sequence: Synthetic oligonucleotide
  Target: LAMA2; (+) strand; PAM type: YTN; PAM sequence: TTC
aatacttactaccaagctat

SEQ ID NO: 398453 - DNA, 20 bp, Artificial Sequence
  Description of Artificial Sequence: Synthetic oligonucleotide
  Target: LAMA2; (+) strand; PAM type: YTN; PAM sequence: CTT
actaccaagctatggtaatc

SEQ ID NO: 398454 - DNA, 20 bp, Artificial Sequence
  Description of Artificial Sequence: Synthetic oligonucleotide
  Target: LAMA2; (+) strand; PAM type: YTN; PAM sequence: TTA
ctaccaagctatggtaatca

SEQ ID NO: 398455 - DNA, 20 bp, Artificial Sequence
  Description of Artificial Sequence: Synthetic oligonucleotide
  Target: LAMA2; (+) strand; PAM type: YTN; PAM sequence: CTA
ccaagctatggtaatcagag

SEQ ID NO: 398456 - DNA, 20 bp, Artificial Sequence
  Description of Artificial Sequence: Synthetic oligonucleotide
  Target: LAMA2; (+) strand; PAM type: YTN; PAM sequence: CTA
tggtaatcagagaatgtggt

SEQ ID NO: 398457 - DNA, 20 bp, Artificial Sequence
  Description of Artificial Sequence: Synthetic oligonucleotide
  Target: LAMA2; (+) strand; PAM type: YTN; PAM sequence: TTG
gtatcaatattgacaaatag

SEQ ID NO: 398458 - DNA, 20 bp, Artificial Sequence
  Description of Artificial Sequence: Synthetic oligonucleotide
  Target: LAMA2; (+) strand; PAM type: YTN; PAM sequence: TTG
acaaatagattattagaata

SEQ ID NO: 398459 - DNA, 20 bp, Artificial Sequence
  Description of Artificial Sequence: Synthetic oligonucleotide
  Target: LAMA2; (+) strand; PAM type: YTN; PAM sequence: TTA
ttagaatagattaaagagtc

SEQ ID NO: 398460 - DNA, 20 bp, Artificial Sequence
  Description of Artificial Sequence: Synthetic oligonucleotide
  Target: LAMA2; (+) strand; PAM type: YTN; PAM sequence: TTA
gaatagattaaagagtccag

SEQ ID NO: 398461 - DNA, 20 bp, Artificial Sequence
  Description of Artificial Sequence: Synthetic oligonucleotide
  Target: LAMA2; (+) strand; PAM type: YTN; PAM sequence: TTA
aagagtccagatatagatcc

SEQ ID NO: 398462 - DNA, 20 bp, Artificial Sequence
  Description of Artificial Sequence: Synthetic oligonucleotide
  Target: LAMA2; (+) strand; PAM type: YTN; PAM sequence: TTT
atgacaaaaatacaaaagca

SEQ ID NO: 398463 - DNA, 20 bp, Artificial Sequence
  Description of Artificial Sequence: Synthetic oligonucleotide
  Target: LAMA2; (+) strand; PAM type: YTN; PAM sequence: TTA
tgacaaaaatacaaaagcaa

SEQ ID NO: 398464 - DNA, 20 bp, Artificial Sequence
  Description of Artificial Sequence: Synthetic oligonucleotide
  Target: LAMA2; (+) strand; PAM type: YTN; PAM sequence: TTT
aacaaattctactagaggaa

SEQ ID NO: 398465 - DNA, 20 bp, Artificial Sequence
  Description of Artificial Sequence: Synthetic oligonucleotide
  Target: LAMA2; (+) strand; PAM type: YTN; PAM sequence: TTA
acaaattctactagaggaat

SEQ ID NO: 398466 - DNA, 20 bp, Artificial Sequence
  Description of Artificial Sequence: Synthetic oligonucleotide
  Target: LAMA2; (+) strand; PAM type: YTN; PAM sequence: TTC
tactagaggaattgaatatc

SEQ ID NO: 398467 - DNA, 20 bp, Artificial Sequence
  Description of Artificial Sequence: Synthetic oligonucleotide
  Target: LAMA2; (+) strand; PAM type: YTN; PAM sequence: CTA
ctagaggaattgaatatcca

SEQ ID NO: 398468 - DNA, 20 bp, Artificial Sequence
  Description of Artificial Sequence: Synthetic oligonucleotide
  Target: LAMA2; (+) strand; PAM type: YTN; PAM sequence: CTA
gaggaattgaatatccatga

SEQ ID NO: 398469 - DNA, 20 bp, Artificial Sequence
  Description of Artificial Sequence: Synthetic oligonucleotide
  Target: LAMA2; (+) strand; PAM type: YTN; PAM sequence: TTG
aatatccatgaacaacaaca

SEQ ID NO: 398470 - DNA, 20 bp, Artificial Sequence
  Description of Artificial Sequence: Synthetic oligonucleotide
  Target: LAMA2; (+) strand; PAM type: YTN; PAM sequence: CTT
cagtctgtatcttgcaccat

SEQ ID NO: 398471 - DNA, 20 bp, Artificial Sequence
  Description of Artificial Sequence: Synthetic oligonucleotide
  Target: LAMA2; (+) strand; PAM type: YTN; PAM sequence: TTC
agtctgtatcttgcaccata

SEQ ID NO: 398472 - DNA, 20 bp, Artificial Sequence
  Description of Artificial Sequence: Synthetic oligonucleotide
  Target: LAMA2; (+) strand; PAM type: YTN; PAM sequence: CTG
tatcttgcaccatattccaa

SEQ ID NO: 398473 - DNA, 20 bp, Artificial Sequence
  Description of Artificial Sequence: Synthetic oligonucleotide
  Target: LAMA2; (+) strand; PAM type: YTN; PAM sequence: CTT
gcaccatattccaaaattaa

SEQ ID NO: 398474 - DNA, 20 bp, Artificial Sequence
  Description of Artificial Sequence: Synthetic oligonucleotide
  Target: LAMA2; (+) strand; PAM type: YTN; PAM sequence: TTG
caccatattccaaaattaac

SEQ ID NO: 398475 - DNA, 20 bp, Artificial Sequence
  Description of Artificial Sequence: Synthetic oligonucleotide
  Target: LAMA2; (+) strand; PAM type: YTN; PAM sequence: TTC
caaaattaactcaaaagaga

SEQ ID NO: 398476 - DNA, 20 bp, Artificial Sequence
  Description of Artificial Sequence: Synthetic oligonucleotide
  Target: LAMA2; (+) strand; PAM type: YTN; PAM sequence: TTA
actcaaaagagatgctagac

SEQ ID NO: 398477 - DNA, 20 bp, Artificial Sequence
  Description of Artificial Sequence: Synthetic oligonucleotide
  Target: LAMA2; (+) strand; PAM type: YTN; PAM sequence: CTC
aaaagagatgctagacctaa

SEQ ID NO: 398478 - DNA, 20 bp, Artificial Sequence
  Description of Artificial Sequence: Synthetic oligonucleotide
  Target: LAMA2; (+) strand; PAM type: YTN; PAM sequence: CTA
gacctaactgtaaaacataa

SEQ ID NO: 398479 - DNA, 20 bp, Artificial Sequence
  Description of Artificial Sequence: Synthetic oligonucleotide
  Target: LAMA2; (+) strand; PAM type: YTN; PAM sequence: CTA
actgtaaaacataaaaatat

SEQ ID NO: 398480 - DNA, 20 bp, Artificial Sequence
  Description of Artificial Sequence: Synthetic oligonucleotide
  Target: LAMA2; (+) strand; PAM type: YTN; PAM sequence: CTG
taaaacataaaaatataaaa

SEQ ID NO: 398481 - DNA, 20 bp, Artificial Sequence
  Description of Artificial Sequence: Synthetic oligonucleotide
  Target: LAMA2; (+) strand; PAM type: YTN; PAM sequence: CTA
aaaatatataagaaaaatct

SEQ ID NO: 398482 - DNA, 20 bp, Artificial Sequence
  Description of Artificial Sequence: Synthetic oligonucleotide
  Target: LAMA2; (+) strand; PAM type: YTN; PAM sequence: CTT
tgtgatcttgggtaaagcaa

SEQ ID NO: 398483 - DNA, 20 bp, Artificial Sequence
  Description of Artificial Sequence: Synthetic oligonucleotide
  Target: LAMA2; (+) strand; PAM type: YTN; PAM sequence: TTT
gtgatcttgggtaaagcaaa

SEQ ID NO: 398484 - DNA, 20 bp, Artificial Sequence
  Description of Artificial Sequence: Synthetic oligonucleotide
  Target: LAMA2; (+) strand; PAM type: YTN; PAM sequence: TTG
tgatcttgggtaaagcaaag

SEQ ID NO: 398485 - DNA, 20 bp, Artificial Sequence
  Description of Artificial Sequence: Synthetic oligonucleotide
  Target: LAMA2; (+) strand; PAM type: YTN; PAM sequence: CTT
gggtaaagcaaagattctta

SEQ ID NO: 398486 - DNA, 20 bp, Artificial Sequence
  Description of Artificial Sequence: Synthetic oligonucleotide
  Target: LAMA2; (+) strand; PAM type: YTN; PAM sequence: TTG
ggtaaagcaaagattcttag

SEQ ID NO: 398487 - DNA, 20 bp, Artificial Sequence
  Description of Artificial Sequence: Synthetic oligonucleotide
  Target: LAMA2; (+) strand; PAM type: YTN; PAM sequence: TTC
ttagatacaccaccaaaagc

SEQ ID NO: 398488 - DNA, 20 bp, Artificial Sequence
  Description of Artificial Sequence: Synthetic oligonucleotide
  Target: LAMA2; (+) strand; PAM type: YTN; PAM sequence: CTT
agatacaccaccaaaagcat

SEQ ID NO: 398489 - DNA, 20 bp, Artificial Sequence
  Description of Artificial Sequence: Synthetic oligonucleotide
  Target: LAMA2; (+) strand; PAM type: YTN; PAM sequence: TTA
gatacaccaccaaaagcata

SEQ ID NO: 398490 - DNA, 20 bp, Artificial Sequence
  Description of Artificial Sequence: Synthetic oligonucleotide
  Target: LAMA2; (+) strand; PAM type: YTN; PAM sequence: CTC
aaaaggaaaacaaaattaac

SEQ ID NO: 398491 - DNA, 20 bp, Artificial Sequence
  Description of Artificial Sequence: Synthetic oligonucleotide
  Target: LAMA2; (+) strand; PAM type: YTN; PAM sequence: TTA
acaacttaaatttcatcaaa

SEQ ID NO: 398492 - DNA, 20 bp, Artificial Sequence
  Description of Artificial Sequence: Synthetic oligonucleotide
  Target: LAMA2; (+) strand; PAM type: YTN; PAM sequence: CTT
aaatttcatcaaaattgaga

SEQ ID NO: 398493 - DNA, 20 bp, Artificial Sequence
  Description of Artificial Sequence: Synthetic oligonucleotide
  Target: LAMA2; (+) strand; PAM type: YTN; PAM sequence: TTA
aatttcatcaaaattgagaa

SEQ ID NO: 398494 - DNA, 20 bp, Artificial Sequence
  Description of Artificial Sequence: Synthetic oligonucleotide
  Target: LAMA2; (+) strand; PAM type: YTN; PAM sequence: TTT
catcaaaattgagaacttct

SEQ ID NO: 398495 - DNA, 20 bp, Artificial Sequence
  Description of Artificial Sequence: Synthetic oligonucleotide
  Target: LAMA2; (+) strand; PAM type: YTN; PAM sequence: TTC
atcaaaattgagaacttctt

SEQ ID NO: 398496 - DNA, 20 bp, Artificial Sequence
  Description of Artificial Sequence: Synthetic oligonucleotide
  Target: LAMA2; (+) strand; PAM type: YTN; PAM sequence: TTG
agaacttcttcccttcaaaa

SEQ ID NO: 398497 - DNA, 20 bp, Artificial Sequence
  Description of Artificial Sequence: Synthetic oligonucleotide
  Target: LAMA2; (+) strand; PAM type: YTN; PAM sequence: CTT
cttcccttcaaaaaaaaaaa

SEQ ID NO: 398498 - DNA, 20 bp, Artificial Sequence
  Description of Artificial Sequence: Synthetic oligonucleotide
  Target: LAMA2; (+) strand; PAM type: YTN; PAM sequence: TTC
ttcccttcaaaaaaaaaaaa

SEQ ID NO: 398499 - DNA, 20 bp, Artificial Sequence
  Description of Artificial Sequence: Synthetic oligonucleotide
  Target: LAMA2; (+) strand; PAM type: YTN; PAM sequence: CTT
cccttcaaaaaaaaaaaagc

SEQ ID NO: 398500 - DNA, 20 bp, Artificial Sequence
  Description of Artificial Sequence: Synthetic oligonucleotide
  Target: LAMA2; (+) strand; PAM type: YTN; PAM sequence: TTC
ccttcaaaaaaaaaaaagca

SEQ ID NO: 398501 - DNA, 20 bp, Artificial Sequence
  Description of Artificial Sequence: Synthetic oligonucleotide
  Target: LAMA2; (+) strand; PAM type: YTN; PAM sequence: CTT
caaaaaaaaaaaagcacttt

SEQ ID NO: 398502 - DNA, 20 bp, Artificial Sequence
  Description of Artificial Sequence: Synthetic oligonucleotide
  Target: LAMA2; (+) strand; PAM type: YTN; PAM sequence: TTC
aaaaaaaaaaaagcactttt

SEQ ID NO: 398503 - DNA, 20 bp, Artificial Sequence
  Description of Artificial Sequence: Synthetic oligonucleotide
  Target: LAMA2; (+) strand; PAM type: YTN; PAM sequence: CTT
ttaagaaaatgaaaagataa

SEQ ID NO: 398504 - DNA, 20 bp, Artificial Sequence
  Description of Artificial Sequence: Synthetic oligonucleotide
  Target: LAMA2; (+) strand; PAM type: YTN; PAM sequence: TTT
taagaaaatgaaaagataac

SEQ ID NO: 398505 - DNA, 20 bp, Artificial Sequence
  Description of Artificial Sequence: Synthetic oligonucleotide
  Target: LAMA2; (+) strand; PAM type: YTN; PAM sequence: TTT
aagaaaatgaaaagataact

SEQ ID NO: 398506 - DNA, 20 bp, Artificial Sequence
  Description of Artificial Sequence: Synthetic oligonucleotide
  Target: LAMA2; (+) strand; PAM type: YTN; PAM sequence: TTA
agaaaatgaaaagataacta

SEQ ID NO: 398507 - DNA, 20 bp, Artificial Sequence
  Description of Artificial Sequence: Synthetic oligonucleotide
  Target: LAMA2; (+) strand; PAM type: YTN; PAM sequence: CTA
caaactagtagaatatattt

SEQ ID NO: 398508 - DNA, 20 bp, Artificial Sequence
  Description of Artificial Sequence: Synthetic oligonucleotide
  Target: LAMA2; (+) strand; PAM type: YTN; PAM sequence: CTA
gtagaatatatttccaaatt

SEQ ID NO: 398509 - DNA, 20 bp, Artificial Sequence
  Description of Artificial Sequence: Synthetic oligonucleotide
  Target: LAMA2; (+) strand; PAM type: YTN; PAM sequence: TTT
ccaaattacatatctgataa

SEQ ID NO: 398510 - DNA, 20 bp, Artificial Sequence
  Description of Artificial Sequence: Synthetic oligonucleotide
  Target: LAMA2; (+) strand; PAM type: YTN; PAM sequence: TTC
caaattacatatctgataaa

SEQ ID NO: 398511 - DNA, 20 bp, Artificial Sequence
  Description of Artificial Sequence: Synthetic oligonucleotide
  Target: LAMA2; (+) strand; PAM type: YTN; PAM sequence: TTA
catatctgataaaggaccca

SEQ ID NO: 398512 - DNA, 20 bp, Artificial Sequence
  Description of Artificial Sequence: Synthetic oligonucleotide
  Target: LAMA2; (+) strand; PAM type: YTN; PAM sequence: CTG
ataaaggacccatatccaga

SEQ ID NO: 398513 - DNA, 20 bp, Artificial Sequence
  Description of Artificial Sequence: Synthetic oligonucleotide
  Target: LAMA2; (+) strand; PAM type: YTN; PAM sequence: TTA
ttcatatgtatcattcaaaa

SEQ ID NO: 398514 - DNA, 20 bp, Artificial Sequence
  Description of Artificial Sequence: Synthetic oligonucleotide
  Target: LAMA2; (+) strand; PAM type: YTN; PAM sequence: TTC
atatgtatcattcaaaactc

SEQ ID NO: 398515 - DNA, 20 bp, Artificial Sequence
  Description of Artificial Sequence: Synthetic oligonucleotide
  Target: LAMA2; (+) strand; PAM type: YTN; PAM sequence: TTC
aaaactcaaaaataagagca

SEQ ID NO: 398516 - DNA, 20 bp, Artificial Sequence
  Description of Artificial Sequence: Synthetic oligonucleotide
  Target: LAMA2; (+) strand; PAM type: YTN; PAM sequence: CTC
aaaaataagagcaaataacc

SEQ ID NO: 398517 - DNA, 20 bp, Artificial Sequence
  Description of Artificial Sequence: Synthetic oligonucleotide
  Target: LAMA2; (+) strand; PAM type: YTN; PAM sequence: TTT
gaacaaaagatttaaacagg

SEQ ID NO: 398518 - DNA, 20 bp, Artificial Sequence
  Description of Artificial Sequence: Synthetic oligonucleotide
  Target: LAMA2; (+) strand; PAM type: YTN; PAM sequence: TTG
aacaaaagatttaaacaggt

SEQ ID NO: 398519 - DNA, 20 bp, Artificial Sequence
  Description of Artificial Sequence: Synthetic oligonucleotide
  Target: LAMA2; (+) strand; PAM type: YTN; PAM sequence: TTT
aaacaggtcaccaaagaagg

SEQ ID NO: 398520 - DNA, 20 bp, Artificial Sequence
  Description of Artificial Sequence: Synthetic oligonucleotide
  Target: LAMA2; (+) strand; PAM type: YTN; PAM sequence: TTA
aacaggtcaccaaagaaggt

SEQ ID NO: 398521 - DNA, 20 bp, Artificial Sequence
  Description of Artificial Sequence: Synthetic oligonucleotide
  Target: LAMA2; (+) strand; PAM type: YTN; PAM sequence: CTC
aatgttattagtcataagga

SEQ ID NO: 398522 - DNA, 20 bp, Artificial Sequence
  Description of Artificial Sequence: Synthetic oligonucleotide
  Target: LAMA2; (+) strand; PAM type: YTN; PAM sequence: TTA
ttagtcataaggaaaacaca

SEQ ID NO: 398523 - DNA, 20 bp, Artificial Sequence
  Description of Artificial Sequence: Synthetic oligonucleotide
  Target: LAMA2; (+) strand; PAM type: YTN; PAM sequence: TTA
gtcataaggaaaacacaaag

SEQ ID NO: 398524 - DNA, 20 bp, Artificial Sequence
  Description of Artificial Sequence: Synthetic oligonucleotide
  Target: LAMA2; (+) strand; PAM type: YTN; PAM sequence: TTA
gaatgtctaaaattttaaaa

SEQ ID NO: 398525 - DNA, 20 bp, Artificial Sequence
  Description of Artificial Sequence: Synthetic oligonucleotide
  Target: LAMA2; (+) strand; PAM type: YTN; PAM sequence: CTA
aaattttaaaagacaggtta

SEQ ID NO: 398526 - DNA, 20 bp, Artificial Sequence
  Description of Artificial Sequence: Synthetic oligonucleotide
  Target: LAMA2; (+) strand; PAM type: YTN; PAM sequence: TTT
taaaagacaggttataccaa

SEQ ID NO: 398527 - DNA, 20 bp, Artificial Sequence
  Description of Artificial Sequence: Synthetic oligonucleotide
  Target: LAMA2; (+) strand; PAM type: YTN; PAM sequence: TTT
aaaagacaggttataccaag

SEQ ID NO: 398528 - DNA, 20 bp, Artificial Sequence
  Description of Artificial Sequence: Synthetic oligonucleotide
  Target: LAMA2; (+) strand; PAM type: YTN; PAM sequence: TTA
aaagacaggttataccaagt

SEQ ID NO: 398529 - DNA, 20 bp, Artificial Sequence
  Description of Artificial Sequence: Synthetic oligonucleotide
  Target: LAMA2; (+) strand; PAM type: YTN; PAM sequence: TTA
taccaagtatcaacaaagat

SEQ ID NO: 398530 - DNA, 20 bp, Artificial Sequence
  Description of Artificial Sequence: Synthetic oligonucleotide
  Target: LAMA2; (+) strand; PAM type: YTN; PAM sequence: CTC
tcatacactggtgatgggaa

SEQ ID NO: 398531 - DNA, 20 bp, Artificial Sequence
  Description of Artificial Sequence: Synthetic oligonucleotide
  Target: LAMA2; (+) strand; PAM type: YTN; PAM sequence: CTC
atacactggtgatgggaata

SEQ ID NO: 398532 - DNA, 20 bp, Artificial Sequence
  Description of Artificial Sequence: Synthetic oligonucleotide
  Target: LAMA2; (+) strand; PAM type: YTN; PAM sequence: CTG
gtgatgggaatataaatagt

SEQ ID NO: 398533 - DNA, 20 bp, Artificial Sequence
  Description of Artificial Sequence: Synthetic oligonucleotide
  Target: LAMA2; (+) strand; PAM type: YTN; PAM sequence: TTC
agatactttagaaaacaggt

SEQ ID NO: 398534 - DNA, 20 bp, Artificial Sequence
  Description of Artificial Sequence: Synthetic oligonucleotide
  Target: LAMA2; (+) strand; PAM type: YTN; PAM sequence: CTT
tagaaaacaggttgataatt

SEQ ID NO: 398535 - DNA, 20 bp, Artificial Sequence
  Description of Artificial Sequence: Synthetic oligonucleotide
  Target: LAMA2; (+) strand; PAM type: YTN; PAM sequence: TTT
agaaaacaggttgataattt

SEQ ID NO: 398536 - DNA, 20 bp, Artificial Sequence
  Description of Artificial Sequence: Synthetic oligonucleotide
  Target: LAMA2; (+) strand; PAM type: YTN; PAM sequence: TTA
gaaaacaggttgataatttc

SEQ ID NO: 398537 - DNA, 20 bp, Artificial Sequence
  Description of Artificial Sequence: Synthetic oligonucleotide
  Target: LAMA2; (+) strand; PAM type: YTN; PAM sequence: TTG
ataatttcttaaaaacgtaa

SEQ ID NO: 398538 - DNA, 20 bp, Artificial Sequence
  Description of Artificial Sequence: Synthetic oligonucleotide
  Target: LAMA2; (+) strand; PAM type: YTN; PAM sequence: TTT
cttaaaaacgtaaacataaa

SEQ ID NO: 398539 - DNA, 20 bp, Artificial Sequence
  Description of Artificial Sequence: Synthetic oligonucleotide
  Target: LAMA2; (+) strand; PAM type: YTN; PAM sequence: TTC
ttaaaaacgtaaacataaat

SEQ ID NO: 398540 - DNA, 20 bp, Artificial Sequence
  Description of Artificial Sequence: Synthetic oligonucleotide
  Target: LAMA2; (+) strand; PAM type: YTN; PAM sequence: CTT
aaaaacgtaaacataaatta

SEQ ID NO: 398541 - DNA, 20 bp, Artificial Sequence
  Description of Artificial Sequence: Synthetic oligonucleotide
  Target: LAMA2; (+) strand; PAM type: YTN; PAM sequence: TTA
aaaacgtaaacataaattac

SEQ ID NO: 398542 - DNA, 20 bp, Artificial Sequence
  Description of Artificial Sequence: Synthetic oligonucleotide
  Target: LAMA2; (+) strand; PAM type: YTN; PAM sequence: TTA
ccatatgatccagccattct

SEQ ID NO: 398543 - DNA, 20 bp, Artificial Sequence
  Description of Artificial Sequence: Synthetic oligonucleotide
  Target: LAMA2; (+) strand; PAM type: YTN; PAM sequence: TTC
tgcttctgtgtatttactcc

SEQ ID NO: 398544 - DNA, 20 bp, Artificial Sequence
  Description of Artificial Sequence: Synthetic oligonucleotide
  Target: LAMA2; (+) strand; PAM type: YTN; PAM sequence: CTG
cttctgtgtatttactccaa

SEQ ID NO: 398545 - DNA, 20 bp, Artificial Sequence
  Description of Artificial Sequence: Synthetic oligonucleotide
  Target: LAMA2; (+) strand; PAM type: YTN; PAM sequence: CTT
ctgtgtatttactccaagat

SEQ ID NO: 398546 - DNA, 20 bp, Artificial Sequence
  Description of Artificial Sequence: Synthetic oligonucleotide
  Target: LAMA2; (+) strand; PAM type: YTN; PAM sequence: TTC
tgtgtatttactccaagata

SEQ ID NO: 398547 - DNA, 20 bp, Artificial Sequence
  Description of Artificial Sequence: Synthetic oligonucleotide
  Target: LAMA2; (+) strand; PAM type: YTN; PAM sequence: CTG
tgtatttactccaagataaa

SEQ ID NO: 398548 - DNA, 20 bp, Artificial Sequence
  Description of Artificial Sequence: Synthetic oligonucleotide
  Target: LAMA2; (+) strand; PAM type: YTN; PAM sequence: TTT
actccaagataaatgatggc

SEQ ID NO: 398549 - DNA, 20 bp, Artificial Sequence
  Description of Artificial Sequence: Synthetic oligonucleotide
  Target: LAMA2; (+) strand; PAM type: YTN; PAM sequence: TTA
ctccaagataaatgatggca

SEQ ID NO: 398550 - DNA, 20 bp, Artificial Sequence
  Description of Artificial Sequence: Synthetic oligonucleotide
  Target: LAMA2; (+) strand; PAM type: YTN; PAM sequence: CTC
caagataaatgatggcatat

SEQ ID NO: 398551 - DNA, 20 bp, Artificial Sequence
  Description of Artificial Sequence: Synthetic oligonucleotide
  Target: LAMA2; (+) strand; PAM type: YTN; PAM sequence: TTC
acccaaaaatttgtacacag

SEQ ID NO: 398552 - DNA, 20 bp, Artificial Sequence
  Description of Artificial Sequence: Synthetic oligonucleotide
  Target: LAMA2; (+) strand; PAM type: YTN; PAM sequence: TTT
gtacacagatgtgtacatat

SEQ ID NO: 398553 - DNA, 20 bp, Artificial Sequence
  Description of Artificial Sequence: Synthetic oligonucleotide
  Target: LAMA2; (+) strand; PAM type: YTN; PAM sequence: TTG
tacacagatgtgtacatatc

SEQ ID NO: 398554 - DNA, 20 bp, Artificial Sequence
  Description of Artificial Sequence: Synthetic oligonucleotide
  Target: LAMA2; (+) strand; PAM type: YTN; PAM sequence: CTA
tgatgaaataattaccaata

SEQ ID NO: 398555 - DNA, 20 bp, Artificial Sequence
  Description of Artificial Sequence: Synthetic oligonucleotide
  Target: LAMA2; (+) strand; PAM type: YTN; PAM sequence: TTA
ccaataaaaaggatcaaata

SEQ ID NO: 398556 - DNA, 20 bp, Artificial Sequence
  Description of Artificial Sequence: Synthetic oligonucleotide
  Target: LAMA2; (+) strand; PAM type: YTN; PAM sequence: TTG
aaactatgttgagtgaaaga

SEQ ID NO: 398557 - DNA, 20 bp, Artificial Sequence
  Description of Artificial Sequence: Synthetic oligonucleotide
  Target: LAMA2; (+) strand; PAM type: YTN; PAM sequence: CTA
tgttgagtgaaagaagccag

SEQ ID NO: 398558 - DNA, 20 bp, Artificial Sequence
  Description of Artificial Sequence: Synthetic oligonucleotide
  Target: LAMA2; (+) strand; PAM type: YTN; PAM sequence: TTG
agtgaaagaagccagacaaa

SEQ ID NO: 398559 - DNA, 20 bp, Artificial Sequence
  Description of Artificial Sequence: Synthetic oligonucleotide
  Target: LAMA2; (+) strand; PAM type: YTN; PAM sequence: TTT
ccatttgtataaaattctat

SEQ ID NO: 398560 - DNA, 20 bp, Artificial Sequence
  Description of Artificial Sequence: Synthetic oligonucleotide
  Target: LAMA2; (+) strand; PAM type: YTN; PAM sequence: TTC
catttgtataaaattctatg

SEQ ID NO: 398561 - DNA, 20 bp, Artificial Sequence
  Description of Artificial Sequence: Synthetic oligonucleotide
  Target: LAMA2; (+) strand; PAM type: YTN; PAM sequence: TTT
gtataaaattctatgaaatg

SEQ ID NO: 398562 - DNA, 20 bp, Artificial Sequence
  Description of Artificial Sequence: Synthetic oligonucleotide
  Target: LAMA2; (+) strand; PAM type: YTN; PAM sequence: TTG
tataaaattctatgaaatgc

SEQ ID NO: 398563 - DNA, 20 bp, Artificial Sequence
  Description of Artificial Sequence: Synthetic oligonucleotide
  Target: LAMA2; (+) strand; PAM type: YTN; PAM sequence: TTC
tatgaaatgcaaacctacag

SEQ ID NO: 398564 - DNA, 20 bp, Artificial Sequence
  Description of Artificial Sequence: Synthetic oligonucleotide
  Target: LAMA2; (+) strand; PAM type: YTN; PAM sequence: CTA
tgaaatgcaaacctacagtg

SEQ ID NO: 398565 - DNA, 20 bp, Artificial Sequence
  Description of Artificial Sequence: Synthetic oligonucleotide
  Target: LAMA2; (+) strand; PAM type: YTN; PAM sequence: CTA
cagtgatggaaagcagatca

SEQ ID NO: 398566 - DNA, 20 bp, Artificial Sequence
  Description of Artificial Sequence: Synthetic oligonucleotide
  Target: LAMA2; (+) strand; PAM type: YTN; PAM sequence: TTT
gtctggggacagagggaaga

SEQ ID NO: 398567 - DNA, 20 bp, Artificial Sequence
  Description of Artificial Sequence: Synthetic oligonucleotide
  Target: LAMA2; (+) strand; PAM type: YTN; PAM sequence: TTG
tctggggacagagggaagag

SEQ ID NO: 398568 - DNA, 20 bp, Artificial Sequence
  Description of Artificial Sequence: Synthetic oligonucleotide
  Target: LAMA2; (+) strand; PAM type: YTN; PAM sequence: CTG
gggacagagggaagagaagg

SEQ ID NO: 398569 - DNA, 20 bp, Artificial Sequence
  Description of Artificial Sequence: Synthetic oligonucleotide
  Target: LAMA2; (+) strand; PAM type: YTN; PAM sequence: TTC
aaaagaaatgatggatatat

SEQ ID NO: 398570 - DNA, 20 bp, Artificial Sequence
  Description of Artificial Sequence: Synthetic oligonucleotide
  Target: LAMA2; (+) strand; PAM type: YTN; PAM sequence: TTC
tctaccatggttgtggtaat

SEQ ID NO: 398571 - DNA, 20 bp, Artificial Sequence
  Description of Artificial Sequence: Synthetic oligonucleotide
  Target: LAMA2; (+) strand; PAM type: YTN; PAM sequence: CTC
taccatggttgtggtaatgg

SEQ ID NO: 398572 - DNA, 20 bp, Artificial Sequence
  Description of Artificial Sequence: Synthetic oligonucleotide
  Target: LAMA2; (+) strand; PAM type: YTN; PAM sequence: CTA
ccatggttgtggtaatggtc

SEQ ID NO: 398573 - DNA, 20 bp, Artificial Sequence
  Description of Artificial Sequence: Synthetic oligonucleotide
  Target: LAMA2; (+) strand; PAM type: YTN; PAM sequence: TTG
tggtaatggtctcatgggtg

SEQ ID NO: 398574 - DNA, 20 bp, Artificial Sequence
  Description of Artificial Sequence: Synthetic oligonucleotide
  Target: LAMA2; (+) strand; PAM type: YTN; PAM sequence: CTC
atgggtgtacatattcaaaa

SEQ ID NO: 398575 - DNA, 20 bp, Artificial Sequence
  Description of Artificial Sequence: Synthetic oligonucleotide
  Target: LAMA2; (+) strand; PAM type: YTN; PAM sequence: TTC
aaaacttatccaattgtaaa

SEQ ID NO: 398576 - DNA, 20 bp, Artificial Sequence
  Description of Artificial Sequence: Synthetic oligonucleotide
  Target: LAMA2; (+) strand; PAM type: YTN; PAM sequence: CTT
atccaattgtaaattggttt

SEQ ID NO: 398577 - DNA, 20 bp, Artificial Sequence
  Description of Artificial Sequence: Synthetic oligonucleotide
  Target: LAMA2; (+) strand; PAM type: YTN; PAM sequence: TTA
tccaattgtaaattggtttg

SEQ ID NO: 398578 - DNA, 20 bp, Artificial Sequence
  Description of Artificial Sequence: Synthetic oligonucleotide
  Target: LAMA2; (+) strand; PAM type: YTN; PAM sequence: TTG
taaattggtttgcatggttt

SEQ ID NO: 398579 - DNA, 20 bp, Artificial Sequence
  Description of Artificial Sequence: Synthetic oligonucleotide
  Target: LAMA2; (+) strand; PAM type: YTN; PAM sequence: TTG
gtttgcatggtttatttatg

SEQ ID NO: 398580 - DNA, 20 bp, Artificial Sequence
  Description of Artificial Sequence: Synthetic oligonucleotide
  Target: LAMA2; (+) strand; PAM type: YTN; PAM sequence: TTT
gcatggtttatttatgccag

SEQ ID NO: 398581 - DNA, 20 bp, Artificial Sequence
  Description of Artificial Sequence: Synthetic oligonucleotide
  Target: LAMA2; (+) strand; PAM type: YTN; PAM sequence: TTG
catggtttatttatgccagt

SEQ ID NO: 398582 - DNA, 20 bp, Artificial Sequence
  Description of Artificial Sequence: Synthetic oligonucleotide
  Target: LAMA2; (+) strand; PAM type: YTN; PAM sequence: TTT
atttatgccagttttaactc

SEQ ID NO: 398583 - DNA, 20 bp, Artificial Sequence
  Description of Artificial Sequence: Synthetic oligonucleotide
  Target: LAMA2; (+) strand; PAM type: YTN; PAM sequence: TTA
tttatgccagttttaactca

SEQ ID NO: 398584 - DNA, 20 bp, Artificial Sequence
  Description of Artificial Sequence: Synthetic oligonucleotide
  Target: LAMA2; (+) strand; PAM type: YTN; PAM sequence: TTT
atgccagttttaactcaata

SEQ ID NO: 398585 - DNA, 20 bp, Artificial Sequence
  Description of Artificial Sequence: Synthetic oligonucleotide
  Target: LAMA2; (+) strand; PAM type: YTN; PAM sequence: TTA
tgccagttttaactcaataa

SEQ ID NO: 398586 - DNA, 20 bp, Artificial Sequence
  Description of Artificial Sequence: Synthetic oligonucleotide
  Target: LAMA2; (+) strand; PAM type: YTN; PAM sequence: TTT
taactcaataaaagtattaa

SEQ ID NO: 398587 - DNA, 20 bp, Artificial Sequence
  Description of Artificial Sequence: Synthetic oligonucleotide
  Target: LAMA2; (+) strand; PAM type: YTN; PAM sequence: TTT
aactcaataaaagtattaaa

SEQ ID NO: 398588 - DNA, 20 bp, Artificial Sequence
  Description of Artificial Sequence: Synthetic oligonucleotide
  Target: LAMA2; (+) strand; PAM type: YTN; PAM sequence: TTA
actcaataaaagtattaaac

SEQ ID NO: 398589 - DNA, 20 bp, Artificial Sequence
  Description of Artificial Sequence: Synthetic oligonucleotide
  Target: LAMA2; (+) strand; PAM type: YTN; PAM sequence: CTC
aataaaagtattaaacagta

SEQ ID NO: 398590 - DNA, 20 bp, Artificial Sequence
  Description of Artificial Sequence: Synthetic oligonucleotide
  Target: LAMA2; (+) strand; PAM type: YTN; PAM sequence: TTA
aacagtattagtcatctctg

SEQ ID NO: 398591 - DNA, 20 bp, Artificial Sequence
  Description of Artificial Sequence: Synthetic oligonucleotide
  Target: LAMA2; (+) strand; PAM type: YTN; PAM sequence: TTA
gtcatctctggtcatagtcc

SEQ ID NO: 398592 - DNA, 20 bp, Artificial Sequence
  Description of Artificial Sequence: Synthetic oligonucleotide
  Target: LAMA2; (+) strand; PAM type: YTN; PAM sequence: CTC
tggtcatagtccctccacaa

SEQ ID NO: 398593 - DNA, 20 bp, Artificial Sequence
  Description of Artificial Sequence: Synthetic oligonucleotide
  Target: LAMA2; (+) strand; PAM type: YTN; PAM sequence: CTG
gtcatagtccctccacaatt

SEQ ID NO: 398594 - DNA, 20 bp, Artificial Sequence
  Description of Artificial Sequence: Synthetic oligonucleotide
  Target: LAMA2; (+) strand; PAM type: YTN; PAM sequence: CTC
cacaatttccacaacttaga

SEQ ID NO: 398595 - DNA, 20 bp, Artificial Sequence
  Description of Artificial Sequence: Synthetic oligonucleotide
  Target: LAMA2; (+) strand; PAM type: YTN; PAM sequence: TTT
ccacaacttagattttagcc

SEQ ID NO: 398596 - DNA, 20 bp, Artificial Sequence
  Description of Artificial Sequence: Synthetic oligonucleotide
  Target: LAMA2; (+) strand; PAM type: YTN; PAM sequence: TTC
cacaacttagattttagcct

SEQ ID NO: 398597 - DNA, 20 bp, Artificial Sequence
  Description of Artificial Sequence: Synthetic oligonucleotide
  Target: LAMA2; (+) strand; PAM type: YTN; PAM sequence: CTT
agattttagcctctttcact

SEQ ID NO: 398598 - DNA, 20 bp, Artificial Sequence
  Description of Artificial Sequence: Synthetic oligonucleotide
  Target: LAMA2; (+) strand; PAM type: YTN; PAM sequence: TTA
gattttagcctctttcactg

SEQ ID NO: 398599 - DNA, 20 bp, Artificial Sequence
  Description of Artificial Sequence: Synthetic oligonucleotide
  Target: LAMA2; (+) strand; PAM type: YTN; PAM sequence: TTT
tagcctctttcactgttgtt

SEQ ID NO: 398600 - DNA, 20 bp, Artificial Sequence
  Description of Artificial Sequence: Synthetic oligonucleotide
  Target: LAMA2; (+) strand; PAM type: YTN; PAM sequence: TTT
agcctctttcactgttgttt

SEQ ID NO: 398601 - DNA, 20 bp, Artificial Sequence
  Description of Artificial Sequence: Synthetic oligonucleotide
  Target: LAMA2; (+) strand; PAM type: YTN; PAM sequence: TTA
gcctctttcactgttgtttg

SEQ ID NO: 398602 - DNA, 20 bp, Artificial Sequence
  Description of Artificial Sequence: Synthetic oligonucleotide
  Target: LAMA2; (+) strand; PAM type: YTN; PAM sequence: CTC
tttcactgttgtttgggcca

SEQ ID NO: 398603 - DNA, 20 bp, Artificial Sequence
  Description of Artificial Sequence: Synthetic oligonucleotide
  Target: LAMA2; (+) strand; PAM type: YTN; PAM sequence: CTT
tcactgttgtttgggccatc

SEQ ID NO: 398604 - DNA, 20 bp, Artificial Sequence
  Description of Artificial Sequence: Synthetic oligonucleotide
  Target: LAMA2; (+) strand; PAM type: YTN; PAM sequence: TTT
cactgttgtttgggccatct

SEQ ID NO: 398605 - DNA, 20 bp, Artificial Sequence
  Description of Artificial Sequence: Synthetic oligonucleotide
  Target: LAMA2; (+) strand; PAM type: YTN; PAM sequence: TTC
actgttgtttgggccatctt

SEQ ID NO: 398606 - DNA, 20 bp, Artificial Sequence
  Description of Artificial Sequence: Synthetic oligonucleotide
  Target: LAMA2; (+) strand; PAM type: YTN; PAM sequence: CTG
ttgtttgggccatcttcctc

SEQ ID NO: 398607 - DNA, 20 bp, Artificial Sequence
  Description of Artificial Sequence: Synthetic oligonucleotide
  Target: LAMA2; (+) strand; PAM type: YTN; PAM sequence: TTG
tttgggccatcttcctcttt

SEQ ID NO: 398608 - DNA, 20 bp, Artificial Sequence
  Description of Artificial Sequence: Synthetic oligonucleotide
  Target: LAMA2; (+) strand; PAM type: YTN; PAM sequence: TTT
gggccatcttcctcttttct

SEQ ID NO: 398609 - DNA, 20 bp, Artificial Sequence
  Description of Artificial Sequence: Synthetic oligonucleotide
  Target: LAMA2; (+) strand; PAM type: YTN; PAM sequence: TTG
ggccatcttcctcttttctc

SEQ ID NO: 398610 - DNA, 20 bp, Artificial Sequence
  Description of Artificial Sequence: Synthetic oligonucleotide
  Target: LAMA2; (+) strand; PAM type: YTN; PAM sequence: CTT
cctcttttctctcttaccaa

SEQ ID NO: 398611 - DNA, 20 bp, Artificial Sequence
  Description of Artificial Sequence: Synthetic oligonucleotide
  Target: LAMA2; (+) strand; PAM type: YTN; PAM sequence: TTC
ctcttttctctcttaccaat

SEQ ID NO: 398612 - DNA, 20 bp, Artificial Sequence
  Description of Artificial Sequence: Synthetic oligonucleotide
  Target: LAMA2; (+) strand; PAM type: YTN; PAM sequence: CTC
ttttctctcttaccaattcc

SEQ ID NO: 398613 - DNA, 20 bp, Artificial Sequence
  Description of Artificial Sequence: Synthetic oligonucleotide
  Target: LAMA2; (+) strand; PAM type: YTN; PAM sequence: CTT
ttctctcttaccaattccat

SEQ ID NO: 398614 - DNA, 20 bp, Artificial Sequence
  Description of Artificial Sequence: Synthetic oligonucleotide
  Target: LAMA2; (+) strand; PAM type: YTN; PAM sequence: TTT
tctctcttaccaattccatt

SEQ ID NO: 398615 - DNA, 20 bp, Artificial Sequence
  Description of Artificial Sequence: Synthetic oligonucleotide
  Target: LAMA2; (+) strand; PAM type: YTN; PAM sequence: TTT
ctctcttaccaattccattt

SEQ ID NO: 398616 - DNA, 20 bp, Artificial Sequence
  Description of Artificial Sequence: Synthetic oligonucleotide
  Target: LAMA2; (+) strand; PAM type: YTN; PAM sequence: TTC
tctcttaccaattccattta

SEQ ID NO: 398617 - DNA, 20 bp, Artificial Sequence
  Description of Artificial Sequence: Synthetic oligonucleotide
  Target: LAMA2; (+) strand; PAM type: YTN; PAM sequence: CTC
tcttaccaattccatttatt

SEQ ID NO: 398618 - DNA, 20 bp, Artificial Sequence
  Description of Artificial Sequence: Synthetic oligonucleotide
  Target: LAMA2; (+) strand; PAM type: YTN; PAM sequence: CTC
ttaccaattccatttatttt

SEQ ID NO: 398619 - DNA, 20 bp, Artificial Sequence
  Description of Artificial Sequence: Synthetic oligonucleotide
  Target: LAMA2; (+) strand; PAM type: YTN; PAM sequence: CTT
accaattccatttattttct

SEQ ID NO: 398620 - DNA, 20 bp, Artificial Sequence
  Description of Artificial Sequence: Synthetic oligonucleotide
  Target: LAMA2; (+) strand; PAM type: YTN; PAM sequence: TTA
ccaattccatttattttctt

SEQ ID NO: 398621 - DNA, 20 bp, Artificial Sequence
  Description of Artificial Sequence: Synthetic oligonucleotide
  Target: LAMA2; (+) strand; PAM type: YTN; PAM sequence: TTC
catttattttcttttttaaa

SEQ ID NO: 398622 - DNA, 20 bp, Artificial Sequence
  Description of Artificial Sequence: Synthetic oligonucleotide
  Target: LAMA2; (+) strand; PAM type: YTN; PAM sequence: TTT
attttcttttttaaattctt

SEQ ID NO: 398623 - DNA, 20 bp, Artificial Sequence
  Description of Artificial Sequence: Synthetic oligonucleotide
  Target: LAMA2; (+) strand; PAM type: YTN; PAM sequence: TTA
ttttcttttttaaattcttt

SEQ ID NO: 398624 - DNA, 20 bp, Artificial Sequence
  Description of Artificial Sequence: Synthetic oligonucleotide
  Target: LAMA2; (+) strand; PAM type: YTN; PAM sequence: TTT
tcttttttaaattcttttta

SEQ ID NO: 398625 - DNA, 20 bp, Artificial Sequence
  Description of Artificial Sequence: Synthetic oligonucleotide
  Target: LAMA2; (+) strand; PAM type: YTN; PAM sequence: TTT
cttttttaaattctttttac

SEQ ID NO: 398626 - DNA, 20 bp, Artificial Sequence
  Description of Artificial Sequence: Synthetic oligonucleotide
  Target: LAMA2; (+) strand; PAM type: YTN; PAM sequence: TTC
ttttttaaattctttttact

SEQ ID NO: 398627 - DNA, 20 bp, Artificial Sequence
  Description of Artificial Sequence: Synthetic oligonucleotide
  Target: LAMA2; (+) strand; PAM type: YTN; PAM sequence: CTT
ttttaaattctttttacttt

SEQ ID NO: 398628 - DNA, 20 bp, Artificial Sequence
  Description of Artificial Sequence: Synthetic oligonucleotide
  Target: LAMA2; (+) strand; PAM type: YTN; PAM sequence: TTT
tttaaattctttttactttt

SEQ ID NO: 398629 - DNA, 20 bp, Artificial Sequence
  Description of Artificial Sequence: Synthetic oligonucleotide
  Target: LAMA2; (+) strand; PAM type: YTN; PAM sequence: TTT
ttaaattctttttacttttt

SEQ ID NO: 398630 - DNA, 20 bp, Artificial Sequence
  Description of Artificial Sequence: Synthetic oligonucleotide
  Target: LAMA2; (+) strand; PAM type: YTN; PAM sequence: TTT
taaattctttttactttttt

SEQ ID NO: 398631 - DNA, 20 bp, Artificial Sequence
  Description of Artificial Sequence: Synthetic oligonucleotide
  Target: LAMA2; (+) strand; PAM type: YTN; PAM sequence: TTT
aaattctttttacttttttt

SEQ ID NO: 398632 - DNA, 20 bp, Artificial Sequence
  Description of Artificial Sequence: Synthetic oligonucleotide
  Target: LAMA2; (+) strand; PAM type: YTN; PAM sequence: TTA
aattctttttactttttttt

SEQ ID NO: 398633 - DNA, 20 bp, Artificial Sequence
  Description of Artificial Sequence: Synthetic oligonucleotide
  Target: LAMA2; (+) strand; PAM type: YTN; PAM sequence: TTC
tttttacttttttttaattt

SEQ ID NO: 398634 - DNA, 20 bp, Artificial Sequence
  Description of Artificial Sequence: Synthetic oligonucleotide
  Target: LAMA2; (+) strand; PAM type: YTN; PAM sequence: CTT
tttacttttttttaattttt

SEQ ID NO: 398635 - DNA, 20 bp, Artificial Sequence
  Description of Artificial Sequence: Synthetic oligonucleotide
  Target: LAMA2; (+) strand; PAM type: YTN; PAM sequence: TTT
ttacttttttttaatttttg

SEQ ID NO: 398636 - DNA, 20 bp, Artificial Sequence
  Description of Artificial Sequence: Synthetic oligonucleotide
  Target: LAMA2; (+) strand; PAM type: YTN; PAM sequence: TTT
tacttttttttaatttttga

SEQ ID NO: 398637 - DNA, 20 bp, Artificial Sequence
  Description of Artificial Sequence: Synthetic oligonucleotide
  Target: LAMA2; (+) strand; PAM type: YTN; PAM sequence: TTT
acttttttttaatttttgaa

SEQ ID NO: 398638 - DNA, 20 bp, Artificial Sequence
  Description of Artificial Sequence: Synthetic oligonucleotide
  Target: LAMA2; (+) strand; PAM type: YTN; PAM sequence: TTA
cttttttttaatttttgaaa

SEQ ID NO: 398639 - DNA, 20 bp, Artificial Sequence
  Description of Artificial Sequence: Synthetic oligonucleotide
  Target: LAMA2; (+) strand; PAM type: YTN; PAM sequence: CTT
ttttttaatttttgaaactt

SEQ ID NO: 398640 - DNA, 20 bp, Artificial Sequence
  Description of Artificial Sequence: Synthetic oligonucleotide
  Target: LAMA2; (+) strand; PAM type: YTN; PAM sequence: TTT
tttttaatttttgaaacttg

SEQ ID NO: 398641 - DNA, 20 bp, Artificial Sequence
  Description of Artificial Sequence: Synthetic oligonucleotide
  Target: LAMA2; (+) strand; PAM type: YTN; PAM sequence: TTT
ttttaatttttgaaacttgt

SEQ ID NO: 398642 - DNA, 20 bp, Artificial Sequence
  Description of Artificial Sequence: Synthetic oligonucleotide
  Target: LAMA2; (+) strand; PAM type: YTN; PAM sequence: TTT
tttaatttttgaaacttgta

SEQ ID NO: 398643 - DNA, 20 bp, Artificial Sequence
  Description of Artificial Sequence: Synthetic oligonucleotide
  Target: LAMA2; (+) strand; PAM type: YTN; PAM sequence: TTT
ttaatttttgaaacttgtat

SEQ ID NO: 398644 - DNA, 20 bp, Artificial Sequence
  Description of Artificial Sequence: Synthetic oligonucleotide
  Target: LAMA2; (+) strand; PAM type: YTN; PAM sequence: TTT
taatttttgaaacttgtatt

SEQ ID NO: 398645 - DNA, 20 bp, Artificial Sequence
  Description of Artificial Sequence: Synthetic oligonucleotide
  Target: LAMA2; (+) strand; PAM type: YTN; PAM sequence: TTT
aatttttgaaacttgtattt

SEQ ID NO: 398646 - DNA, 20 bp, Artificial Sequence
  Description of Artificial Sequence: Synthetic oligonucleotide
  Target: LAMA2; (+) strand; PAM type: YTN; PAM sequence: TTA
atttttgaaacttgtatttt

SEQ ID NO: 398647 - DNA, 20 bp, Artificial Sequence
  Description of Artificial Sequence: Synthetic oligonucleotide
  Target: LAMA2; (+) strand; PAM type: YTN; PAM sequence: TTT
ttgaaacttgtattttaggt

SEQ ID NO: 398648 - DNA, 20 bp, Artificial Sequence
  Description of Artificial Sequence: Synthetic oligonucleotide
  Target: LAMA2; (+) strand; PAM type: YTN; PAM sequence: TTT
tgaaacttgtattttaggtt

SEQ ID NO: 398649 - DNA, 20 bp, Artificial Sequence
  Description of Artificial Sequence: Synthetic oligonucleotide
  Target: LAMA2; (+) strand; PAM type: YTN; PAM sequence: TTT
gaaacttgtattttaggttc

SEQ ID NO: 398650 - DNA, 20 bp, Artificial Sequence
  Description of Artificial Sequence: Synthetic oligonucleotide
  Target: LAMA2; (+) strand; PAM type: YTN; PAM sequence: TTG
aaacttgtattttaggttca

SEQ ID NO: 398651 - DNA, 20 bp, Artificial Sequence
  Description of Artificial Sequence: Synthetic oligonucleotide
  Target: LAMA2; (+) strand; PAM type: YTN; PAM sequence: CTT
gtattttaggttcaaaggta

SEQ ID NO: 398652 - DNA, 20 bp, Artificial Sequence
  Description of Artificial Sequence: Synthetic oligonucleotide
  Target: LAMA2; (+) strand; PAM type: YTN; PAM sequence: TTG
tattttaggttcaaaggtac

SEQ ID NO: 398653 - DNA, 20 bp, Artificial Sequence
  Description of Artificial Sequence: Synthetic oligonucleotide
  Target: LAMA2; (+) strand; PAM type: YTN; PAM sequence: TTT
taggttcaaaggtacatgtg

SEQ ID NO: 398654 - DNA, 20 bp, Artificial Sequence
  Description of Artificial Sequence: Synthetic oligonucleotide
  Target: LAMA2; (+) strand; PAM type: YTN; PAM sequence: TTT
aggttcaaaggtacatgtgc

SEQ ID NO: 398655 - DNA, 20 bp, Artificial Sequence
  Description of Artificial Sequence: Synthetic oligonucleotide
  Target: LAMA2; (+) strand; PAM type: YTN; PAM sequence: TTA
ggttcaaaggtacatgtgca

SEQ ID NO: 398656 - DNA, 20 bp, Artificial Sequence
  Description of Artificial Sequence: Synthetic oligonucleotide
  Target: LAMA2; (+) strand; PAM type: YTN; PAM sequence: TTC
aaaggtacatgtgcaggttt

SEQ ID NO: 398657 - DNA, 20 bp, Artificial Sequence
  Description of Artificial Sequence: Synthetic oligonucleotide
  Target: LAMA2; (+) strand; PAM type: YTN; PAM sequence: TTT
tttatataggtaaactcttg

SEQ ID NO: 398658 - DNA, 20 bp, Artificial Sequence
  Description of Artificial Sequence: Synthetic oligonucleotide
  Target: LAMA2; (+) strand; PAM type: YTN; PAM sequence: TTT
ttatataggtaaactcttgt

SEQ ID NO: 398659 - DNA, 20 bp, Artificial Sequence
  Description of Artificial Sequence: Synthetic oligonucleotide
  Target: LAMA2; (+) strand; PAM type: YTN; PAM sequence: TTT
tatataggtaaactcttgtc

SEQ ID NO: 398660 - DNA, 20 bp, Artificial Sequence
  Description of Artificial Sequence: Synthetic oligonucleotide
  Target: LAMA2; (+) strand; PAM type: YTN; PAM sequence: TTT
atataggtaaactcttgtca

SEQ ID NO: 398661 - DNA, 20 bp, Artificial Sequence
  Description of Artificial Sequence: Synthetic oligonucleotide
  Target: LAMA2; (+) strand; PAM type: YTN; PAM sequence: TTA
tataggtaaactcttgtcat

SEQ ID NO: 398662 - DNA, 20 bp, Artificial Sequence
  Description of Artificial Sequence: Synthetic oligonucleotide
  Target: LAMA2; (+) strand; PAM type: YTN; PAM sequence: CTC
ttgtcatggaggtttgttgt

SEQ ID NO: 398663 - DNA, 20 bp, Artificial Sequence
  Description of Artificial Sequence: Synthetic oligonucleotide
  Target: LAMA2; (+) strand; PAM type: YTN; PAM sequence: CTT
gtcatggaggtttgttgtat

SEQ ID NO: 398664 - DNA, 20 bp, Artificial Sequence
  Description of Artificial Sequence: Synthetic oligonucleotide
  Target: LAMA2; (+) strand; PAM type: YTN; PAM sequence: TTG
tcatggaggtttgttgtata

SEQ ID NO: 398665 - DNA, 20 bp, Artificial Sequence
  Description of Artificial Sequence: Synthetic oligonucleotide
  Target: LAMA2; (+) strand; PAM type: YTN; PAM sequence: TTT
gttgtatagatttcatcacg

SEQ ID NO: 398666 - DNA, 20 bp, Artificial Sequence
  Description of Artificial Sequence: Synthetic oligonucleotide
  Target: LAMA2; (+) strand; PAM type: YTN; PAM sequence: TTG
ttgtatagatttcatcacgc

SEQ ID NO: 398667 - DNA, 20 bp, Artificial Sequence
  Description of Artificial Sequence: Synthetic oligonucleotide
  Target: LAMA2; (+) strand; PAM type: YTN; PAM sequence: TTG
tatagatttcatcacgcagg

SEQ ID NO: 398668 - DNA, 20 bp, Artificial Sequence
  Description of Artificial Sequence: Synthetic oligonucleotide
  Target: LAMA2; (+) strand; PAM type: YTN; PAM sequence: TTT
catcacgcaggaactaagtc

SEQ ID NO: 398669 - DNA, 20 bp, Artificial Sequence
  Description of Artificial Sequence: Synthetic oligonucleotide
  Target: LAMA2; (+) strand; PAM type: YTN; PAM sequence: TTC
atcacgcaggaactaagtct

SEQ ID NO: 398670 - DNA, 20 bp, Artificial Sequence
  Description of Artificial Sequence: Synthetic oligonucleotide
  Target: LAMA2; (+) strand; PAM type: YTN; PAM sequence: CTA
agtctactacccaatagtta

SEQ ID NO: 398671 - DNA, 20 bp, Artificial Sequence
  Description of Artificial Sequence: Synthetic oligonucleotide
  Target: LAMA2; (+) strand; PAM type: YTN; PAM sequence: CTA
ctacccaatagttatttttc

SEQ ID NO: 398672 - DNA, 20 bp, Artificial Sequence
  Description of Artificial Sequence: Synthetic oligonucleotide
  Target: LAMA2; (+) strand; PAM type: YTN; PAM sequence: CTA
cccaatagttatttttctct

SEQ ID NO: 398673 - DNA, 20 bp, Artificial Sequence
  Description of Artificial Sequence: Synthetic oligonucleotide
  Target: LAMA2; (+) strand; PAM type: YTN; PAM sequence: TTA
tttttctctgtttctctccc

SEQ ID NO: 398674 - DNA, 20 bp, Artificial Sequence
  Description of Artificial Sequence: Synthetic oligonucleotide
  Target: LAMA2; (+) strand; PAM type: YTN; PAM sequence: TTT
ttctctgtttctctccctcc

SEQ ID NO: 398675 - DNA, 20 bp, Artificial Sequence
  Description of Artificial Sequence: Synthetic oligonucleotide
  Target: LAMA2; (+) strand; PAM type: YTN; PAM sequence: TTT
tctctgtttctctccctcct

SEQ ID NO: 398676 - DNA, 20 bp, Artificial Sequence
  Description of Artificial Sequence: Synthetic oligonucleotide
  Target: LAMA2; (+) strand; PAM type: YTN; PAM sequence: TTT
ctctgtttctctccctcctc

SEQ ID NO: 398677 - DNA, 20 bp, Artificial Sequence
  Description of Artificial Sequence: Synthetic oligonucleotide
  Target: LAMA2; (+) strand; PAM type: YTN; PAM sequence: TTC
tctgtttctctccctcctcc

SEQ ID NO: 398678 - DNA, 20 bp, Artificial Sequence
  Description of Artificial Sequence: Synthetic oligonucleotide
  Target: LAMA2; (+) strand; PAM type: YTN; PAM sequence: CTC
tgtttctctccctcctccca

SEQ ID NO: 398679 - DNA, 20 bp, Artificial Sequence
  Description of Artificial Sequence: Synthetic oligonucleotide
  Target: LAMA2; (+) strand; PAM type: YTN; PAM sequence: CTG
tttctctccctcctcccact

SEQ ID NO: 398680 - DNA, 20 bp, Artificial Sequence
  Description of Artificial Sequence: Synthetic oligonucleotide
  Target: LAMA2; (+) strand; PAM type: YTN; PAM sequence: TTT
ctctccctcctcccactagc

SEQ ID NO: 398681 - DNA, 20 bp, Artificial Sequence
  Description of Artificial Sequence: Synthetic oligonucleotide
  Target: LAMA2; (+) strand; PAM type: YTN; PAM sequence: TTC
tctccctcctcccactagct

SEQ ID NO: 398682 - DNA, 20 bp, Artificial Sequence
  Description of Artificial Sequence: Synthetic oligonucleotide
  Target: LAMA2; (+) strand; PAM type: YTN; PAM sequence: CTC
tccctcctcccactagctac

SEQ ID NO: 398683 - DNA, 20 bp, Artificial Sequence
  Description of Artificial Sequence: Synthetic oligonucleotide
  Target: LAMA2; (+) strand; PAM type: YTN; PAM sequence: CTC
cctcctcccactagctaccc

SEQ ID NO: 398684 - DNA, 20 bp, Artificial Sequence
  Description of Artificial Sequence: Synthetic oligonucleotide
  Target: LAMA2; (+) strand; PAM type: YTN; PAM sequence: CTC
ctcccactagctaccctcaa

SEQ ID NO: 398685 - DNA, 20 bp, Artificial Sequence
  Description of Artificial Sequence: Synthetic oligonucleotide
  Target: LAMA2; (+) strand; PAM type: YTN; PAM sequence: CTC
ccactagctaccctcaagta

SEQ ID NO: 398686 - DNA, 20 bp, Artificial Sequence
  Description of Artificial Sequence: Synthetic oligonucleotide
  Target: LAMA2; (+) strand; PAM type: YTN; PAM sequence: CTA
gctaccctcaagtaggcctc

SEQ ID NO: 398687 - DNA, 20 bp, Artificial Sequence
  Description of Artificial Sequence: Synthetic oligonucleotide
  Target: LAMA2; (+) strand; PAM type: YTN; PAM sequence: CTA
ccctcaagtaggcctcggtg

SEQ ID NO: 398688 - DNA, 20 bp, Artificial Sequence
  Description of Artificial Sequence: Synthetic oligonucleotide
  Target: LAMA2; (+) strand; PAM type: YTN; PAM sequence: CTC
aagtaggcctcggtgtatgt

SEQ ID NO: 398689 - DNA, 20 bp, Artificial Sequence
  Description of Artificial Sequence: Synthetic oligonucleotide
  Target: LAMA2; (+) strand; PAM type: YTN; PAM sequence: CTC
ggtgtatgttgttctcccct

SEQ ID NO: 398690 - DNA, 20 bp, Artificial Sequence
  Description of Artificial Sequence: Synthetic oligonucleotide
  Target: LAMA2; (+) strand; PAM type: YTN; PAM sequence: TTG
ttctcccctttgtgtccata

SEQ ID NO: 398691 - DNA, 20 bp, Artificial Sequence
  Description of Artificial Sequence: Synthetic oligonucleotide
  Target: LAMA2; (+) strand; PAM type: YTN; PAM sequence: TTC
tcccctttgtgtccatatgt

SEQ ID NO: 398692 - DNA, 20 bp, Artificial Sequence
  Description of Artificial Sequence: Synthetic oligonucleotide
  Target: LAMA2; (+) strand; PAM type: YTN; PAM sequence: CTC
ccctttgtgtccatatgttc

SEQ ID NO: 398693 - DNA, 20 bp, Artificial Sequence
  Description of Artificial Sequence: Synthetic oligonucleotide
  Target: LAMA2; (+) strand; PAM type: YTN; PAM sequence: CTT
tgtgtccatatgttctcatc

SEQ ID NO: 398694 - DNA, 20 bp, Artificial Sequence
  Description of Artificial Sequence: Synthetic oligonucleotide
  Target: LAMA2; (+) strand; PAM type: YTN; PAM sequence: TTT
gtgtccatatgttctcatca

SEQ ID NO: 398695 - DNA, 20 bp, Artificial Sequence
  Description of Artificial Sequence: Synthetic oligonucleotide
  Target: LAMA2; (+) strand; PAM type: YTN; PAM sequence: TTG
tgtccatatgttctcatcat

SEQ ID NO: 398696 - DNA, 20 bp, Artificial Sequence
  Description of Artificial Sequence: Synthetic oligonucleotide
  Target: LAMA2; (+) strand; PAM type: YTN; PAM sequence: TTC
tcatcatttagctcccactt

SEQ ID NO: 398697 - DNA, 20 bp, Artificial Sequence
  Description of Artificial Sequence: Synthetic oligonucleotide
  Target: LAMA2; (+) strand; PAM type: YTN; PAM sequence: CTC
atcatttagctcccacttat

SEQ ID NO: 398698 - DNA, 20 bp, Artificial Sequence
  Description of Artificial Sequence: Synthetic oligonucleotide
  Target: LAMA2; (+) strand; PAM type: YTN; PAM sequence: TTT
agctcccacttataaatgag

SEQ ID NO: 398699 - DNA, 20 bp, Artificial Sequence
  Description of Artificial Sequence: Synthetic oligonucleotide
  Target: LAMA2; (+) strand; PAM type: YTN; PAM sequence: TTA
gctcccacttataaatgaga

SEQ ID NO: 398700 - DNA, 20 bp, Artificial Sequence
  Description of Artificial Sequence: Synthetic oligonucleotide
  Target: LAMA2; (+) strand; PAM type: YTN; PAM sequence: CTC
ccacttataaatgagaacat

SEQ ID NO: 398701 - DNA, 20 bp, Artificial Sequence
  Description of Artificial Sequence: Synthetic oligonucleotide
  Target: LAMA2; (+) strand; PAM type: YTN; PAM sequence: CTT
ataaatgagaacatgctgta

SEQ ID NO: 398702 - DNA, 20 bp, Artificial Sequence
  Description of Artificial Sequence: Synthetic oligonucleotide
  Target: LAMA2; (+) strand; PAM type: YTN; PAM sequence: TTA
taaatgagaacatgctgtat

SEQ ID NO: 398703 - DNA, 20 bp, Artificial Sequence
  Description of Artificial Sequence: Synthetic oligonucleotide
  Target: LAMA2; (+) strand; PAM type: YTN; PAM sequence: CTG
tatttgattttctgttcctg

SEQ ID NO: 398704 - DNA, 20 bp, Artificial Sequence
  Description of Artificial Sequence: Synthetic oligonucleotide
  Target: LAMA2; (+) strand; PAM type: YTN; PAM sequence: TTT
gattttctgttcctgcatta

SEQ ID NO: 398705 - DNA, 20 bp, Artificial Sequence
  Description of Artificial Sequence: Synthetic oligonucleotide
  Target: LAMA2; (+) strand; PAM type: YTN; PAM sequence: TTG
attttctgttcctgcattag

SEQ ID NO: 398706 - DNA, 20 bp, Artificial Sequence
  Description of Artificial Sequence: Synthetic oligonucleotide
  Target: LAMA2; (+) strand; PAM type: YTN; PAM sequence: TTT
tctgttcctgcattagtttg

SEQ ID NO: 398707 - DNA, 20 bp, Artificial Sequence
  Description of Artificial Sequence: Synthetic oligonucleotide
  Target: LAMA2; (+) strand; PAM type: YTN; PAM sequence: TTT
ctgttcctgcattagtttgc

SEQ ID NO: 398708 - DNA, 20 bp, Artificial Sequence
  Description of Artificial Sequence: Synthetic oligonucleotide
  Target: LAMA2; (+) strand; PAM type: YTN; PAM sequence: TTC
tgttcctgcattagtttgct

SEQ ID NO: 398709 - DNA, 20 bp, Artificial Sequence
  Description of Artificial Sequence: Synthetic oligonucleotide
  Target: LAMA2; (+) strand; PAM type: YTN; PAM sequence: CTG
ttcctgcattagtttgctaa

SEQ ID NO: 398710 - DNA, 20 bp, Artificial Sequence
  Description of Artificial Sequence: Synthetic oligonucleotide
  Target: LAMA2; (+) strand; PAM type: YTN; PAM sequence: TTC
ctgcattagtttgctaagaa

SEQ ID NO: 398711 - DNA, 20 bp, Artificial Sequence
  Description of Artificial Sequence: Synthetic oligonucleotide
  Target: LAMA2; (+) strand; PAM type: YTN; PAM sequence: CTG
cattagtttgctaagaataa

SEQ ID NO: 398712 - DNA, 20 bp, Artificial Sequence
  Description of Artificial Sequence: Synthetic oligonucleotide
  Target: LAMA2; (+) strand; PAM type: YTN; PAM sequence: TTA
gtttgctaagaataatggcc

SEQ ID NO: 398713 - DNA, 20 bp, Artificial Sequence
  Description of Artificial Sequence: Synthetic oligonucleotide
  Target: LAMA2; (+) strand; PAM type: YTN; PAM sequence: TTT
gctaagaataatggcctcca

SEQ ID NO: 398714 - DNA, 20 bp, Artificial Sequence
  Description of Artificial Sequence: Synthetic oligonucleotide
  Target: LAMA2; (+) strand; PAM type: YTN; PAM sequence: TTG
ctaagaataatggcctccaa

SEQ ID NO: 398715 - DNA, 20 bp, Artificial Sequence
  Description of Artificial Sequence: Synthetic oligonucleotide
  Target: LAMA2; (+) strand; PAM type: YTN; PAM sequence: CTA
agaataatggcctccaactc

SEQ ID NO: 398716 - DNA, 20 bp, Artificial Sequence
  Description of Artificial Sequence: Synthetic oligonucleotide
  Target: LAMA2; (+) strand; PAM type: YTN; PAM sequence: CTC
caactccatccatgttcctg

SEQ ID NO: 398717 - DNA, 20 bp, Artificial Sequence
  Description of Artificial Sequence: Synthetic oligonucleotide
  Target: LAMA2; (+) strand; PAM type: YTN; PAM sequence: CTC
catccatgttcctgcaaagg

SEQ ID NO: 398718 - DNA, 20 bp, Artificial Sequence
  Description of Artificial Sequence: Synthetic oligonucleotide
  Target: LAMA2; (+) strand; PAM type: YTN; PAM sequence: TTC
ctgcaaaggacatgattgca

SEQ ID NO: 398719 - DNA, 20 bp, Artificial Sequence
  Description of Artificial Sequence: Synthetic oligonucleotide
  Target: LAMA2; (+) strand; PAM type: YTN; PAM sequence: CTG
caaaggacatgattgcattc

SEQ ID NO: 398720 - DNA, 20 bp, Artificial Sequence
  Description of Artificial Sequence: Synthetic oligonucleotide
  Target: LAMA2; (+) strand; PAM type: YTN; PAM sequence: TTG
cattcgttttatgactgcat

SEQ ID NO: 398721 - DNA, 20 bp, Artificial Sequence
  Description of Artificial Sequence: Synthetic oligonucleotide
  Target: LAMA2; (+) strand; PAM type: YTN; PAM sequence: TTC
gttttatgactgcatagtat

SEQ ID NO: 398722 - DNA, 20 bp, Artificial Sequence
  Description of Artificial Sequence: Synthetic oligonucleotide
  Target: LAMA2; (+) strand; PAM type: YTN; PAM sequence: TTT
tatgactgcatagtattcca

SEQ ID NO: 398723 - DNA, 20 bp, Artificial Sequence
  Description of Artificial Sequence: Synthetic oligonucleotide
  Target: LAMA2; (+) strand; PAM type: YTN; PAM sequence: TTT
atgactgcatagtattccat

SEQ ID NO: 398724 - DNA, 20 bp, Artificial Sequence
  Description of Artificial Sequence: Synthetic oligonucleotide
  Target: LAMA2; (+) strand; PAM type: YTN; PAM sequence: TTA
tgactgcatagtattccatg

SEQ ID NO: 398725 - DNA, 20 bp, Artificial Sequence
  Description of Artificial Sequence: Synthetic oligonucleotide
  Target: LAMA2; (+) strand; PAM type: YTN; PAM sequence: CTG
catagtattccatggtgtat

SEQ ID NO: 398726 - DNA, 20 bp, Artificial Sequence
  Description of Artificial Sequence: Synthetic oligonucleotide
  Target: LAMA2; (+) strand; PAM type: YTN; PAM sequence: TTC
catggtgtatatgtaccaca

SEQ ID NO: 398727 - DNA, 20 bp, Artificial Sequence
  Description of Artificial Sequence: Synthetic oligonucleotide
  Target: LAMA2; (+) strand; PAM type: YTN; PAM sequence: TTT
tatttatccagtctgccgct

SEQ ID NO: 398728 - DNA, 20 bp, Artificial Sequence
  Description of Artificial Sequence: Synthetic oligonucleotide
  Target: LAMA2; (+) strand; PAM type: YTN; PAM sequence: TTT
atttatccagtctgccgctg

SEQ ID NO: 398729 - DNA, 20 bp, Artificial Sequence
  Description of Artificial Sequence: Synthetic oligonucleotide
  Target: LAMA2; (+) strand; PAM type: YTN; PAM sequence: TTA
tttatccagtctgccgctga

SEQ ID NO: 398730 - DNA, 20 bp, Artificial Sequence
  Description of Artificial Sequence: Synthetic oligonucleotide
  Target: LAMA2; (+) strand; PAM type: YTN; PAM sequence: TTT
atccagtctgccgctgatgc

SEQ ID NO: 398731 - DNA, 20 bp, Artificial Sequence
  Description of Artificial Sequence: Synthetic oligonucleotide
  Target: LAMA2; (+) strand; PAM type: YTN; PAM sequence: TTA
tccagtctgccgctgatgct

SEQ ID NO: 398732 - DNA, 20 bp, Artificial Sequence
  Description of Artificial Sequence: Synthetic oligonucleotide
  Target: LAMA2; (+) strand; PAM type: YTN; PAM sequence: CTG
ccgctgatgctattccttat

SEQ ID NO: 398733 - DNA, 20 bp, Artificial Sequence
  Description of Artificial Sequence: Synthetic oligonucleotide
  Target: LAMA2; (+) strand; PAM type: YTN; PAM sequence: CTG
atgctattccttattttctt

SEQ ID NO: 398734 - DNA, 20 bp, Artificial Sequence
  Description of Artificial Sequence: Synthetic oligonucleotide
  Target: LAMA2; (+) strand; PAM type: YTN; PAM sequence: CTA
ttccttattttcttatgctc

SEQ ID NO: 398735 - DNA, 20 bp, Artificial Sequence
  Description of Artificial Sequence: Synthetic oligonucleotide
  Target: LAMA2; (+) strand; PAM type: YTN; PAM sequence: TTC
cttattttcttatgctcagc

SEQ ID NO: 398736 - DNA, 20 bp, Artificial Sequence
  Description of Artificial Sequence: Synthetic oligonucleotide
  Target: LAMA2; (+) strand; PAM type: YTN; PAM sequence: CTT
attttcttatgctcagcaaa

SEQ ID NO: 398737 - DNA, 20 bp, Artificial Sequence
  Description of Artificial Sequence: Synthetic oligonucleotide
  Target: LAMA2; (+) strand; PAM type: YTN; PAM sequence: TTA
ttttcttatgctcagcaaat

SEQ ID NO: 398738 - DNA, 20 bp, Artificial Sequence
  Description of Artificial Sequence: Synthetic oligonucleotide
  Target: LAMA2; (+) strand; PAM type: YTN; PAM sequence: TTT
tcttatgctcagcaaatcaa

SEQ ID NO: 398739 - DNA, 20 bp, Artificial Sequence
  Description of Artificial Sequence: Synthetic oligonucleotide
  Target: LAMA2; (+) strand; PAM type: YTN; PAM sequence: TTT
cttatgctcagcaaatcaac

SEQ ID NO: 398740 - DNA, 20 bp, Artificial Sequence
  Description of Artificial Sequence: Synthetic oligonucleotide
  Target: LAMA2; (+) strand; PAM type: YTN; PAM sequence: TTC
ttatgctcagcaaatcaacc

SEQ ID NO: 398741 - DNA, 20 bp, Artificial Sequence
  Description of Artificial Sequence: Synthetic oligonucleotide
  Target: LAMA2; (+) strand; PAM type: YTN; PAM sequence: CTT
atgctcagcaaatcaacctt

SEQ ID NO: 398742 - DNA, 20 bp, Artificial Sequence
  Description of Artificial Sequence: Synthetic oligonucleotide
  Target: LAMA2; (+) strand; PAM type: YTN; PAM sequence: TTA
tgctcagcaaatcaaccttt

SEQ ID NO: 398743 - DNA, 20 bp, Artificial Sequence
  Description of Artificial Sequence: Synthetic oligonucleotide
  Target: LAMA2; (+) strand; PAM type: YTN; PAM sequence: CTC
agcaaatcaaccttttctct

SEQ ID NO: 398744 - DNA, 20 bp, Artificial Sequence
  Description of Artificial Sequence: Synthetic oligonucleotide
  Target: LAMA2; (+) strand; PAM type: YTN; PAM sequence: CTT
ttctctccactttaatcctg

SEQ ID NO: 398745 - DNA, 20 bp, Artificial Sequence
  Description of Artificial Sequence: Synthetic oligonucleotide
  Target: LAMA2; (+) strand; PAM type: YTN; PAM sequence: TTT
tctctccactttaatcctgt

SEQ ID NO: 398746 - DNA, 20 bp, Artificial Sequence
  Description of Artificial Sequence: Synthetic oligonucleotide
  Target: LAMA2; (+) strand; PAM type: YTN; PAM sequence: TTT
ctctccactttaatcctgtg

SEQ ID NO: 398747 - DNA, 20 bp, Artificial Sequence
  Description of Artificial Sequence: Synthetic oligonucleotide
  Target: LAMA2; (+) strand; PAM type: YTN; PAM sequence: TTC
tctccactttaatcctgtgc

SEQ ID NO: 398748 - DNA, 20 bp, Artificial Sequence
  Description of Artificial Sequence: Synthetic oligonucleotide
  Target: LAMA2; (+) strand; PAM type: YTN; PAM sequence: CTC
tccactttaatcctgtgcct

SEQ ID NO: 398749 - DNA, 20 bp, Artificial Sequence
  Description of Artificial Sequence: Synthetic oligonucleotide
  Target: LAMA2; (+) strand; PAM type: YTN; PAM sequence: CTC
cactttaatcctgtgcctca

SEQ ID NO: 398750 - DNA, 20 bp, Artificial Sequence
  Description of Artificial Sequence: Synthetic oligonucleotide
  Target: LAMA2; (+) strand; PAM type: YTN; PAM sequence: CTT
taatcctgtgcctcactttg

SEQ ID NO: 398751 - DNA, 20 bp, Artificial Sequence
  Description of Artificial Sequence: Synthetic oligonucleotide
  Target: LAMA2; (+) strand; PAM type: YTN; PAM sequence: TTT
aatcctgtgcctcactttgc

SEQ ID NO: 398752 - DNA, 20 bp, Artificial Sequence
  Description of Artificial Sequence: Synthetic oligonucleotide
  Target: LAMA2; (+) strand; PAM type: YTN; PAM sequence: TTA
atcctgtgcctcactttgca

SEQ ID NO: 398753 - DNA, 20 bp, Artificial Sequence
  Description of Artificial Sequence: Synthetic oligonucleotide
  Target: LAMA2; (+) strand; PAM type: YTN; PAM sequence: CTG
tgcctcactttgcacacctg

SEQ ID NO: 398754 - DNA, 20 bp, Artificial Sequence
  Description of Artificial Sequence: Synthetic oligonucleotide
  Target: LAMA2; (+) strand; PAM type: YTN; PAM sequence: CTC
actttgcacacctgaagtta

SEQ ID NO: 398755 - DNA, 20 bp, Artificial Sequence
  Description of Artificial Sequence: Synthetic oligonucleotide
  Target: LAMA2; (+) strand; PAM type: YTN; PAM sequence: CTT
tgcacacctgaagttagctt

SEQ ID NO: 398756 - DNA, 20 bp, Artificial Sequence
  Description of Artificial Sequence: Synthetic oligonucleotide
  Target: LAMA2; (+) strand; PAM type: YTN; PAM sequence: TTT
gcacacctgaagttagcttt

SEQ ID NO: 398757 - DNA, 20 bp, Artificial Sequence
  Description of Artificial Sequence: Synthetic oligonucleotide
  Target: LAMA2; (+) strand; PAM type: YTN; PAM sequence: TTG
cacacctgaagttagcttta

SEQ ID NO: 398758 - DNA, 20 bp, Artificial Sequence
  Description of Artificial Sequence: Synthetic oligonucleotide
  Target: LAMA2; (+) strand; PAM type: YTN; PAM sequence: CTG
aagttagctttaaaattatg

SEQ ID NO: 398759 - DNA, 20 bp, Artificial Sequence
  Description of Artificial Sequence: Synthetic oligonucleotide
  Target: LAMA2; (+) strand; PAM type: YTN; PAM sequence: TTA
gctttaaaattatgactttt

SEQ ID NO: 398760 - DNA, 20 bp, Artificial Sequence
  Description of Artificial Sequence: Synthetic oligonucleotide
  Target: LAMA2; (+) strand; PAM type: YTN; PAM sequence: CTT
taaaattatgacttttaaat

SEQ ID NO: 398761 - DNA, 20 bp, Artificial Sequence
  Description of Artificial Sequence: Synthetic oligonucleotide
  Target: LAMA2; (+) strand; PAM type: YTN; PAM sequence: TTT
aaaattatgacttttaaatg

SEQ ID NO: 398762 - DNA, 20 bp, Artificial Sequence
  Description of Artificial Sequence: Synthetic oligonucleotide
  Target: LAMA2; (+) strand; PAM type: YTN; PAM sequence: TTA
aaattatgacttttaaatgc

SEQ ID NO: 398763 - DNA, 20 bp, Artificial Sequence
  Description of Artificial Sequence: Synthetic oligonucleotide
  Target: LAMA2; (+) strand; PAM type: YTN; PAM sequence: TTA
tgacttttaaatgcttgtca

SEQ ID NO: 398764 - DNA, 20 bp, Artificial Sequence
  Description of Artificial Sequence: Synthetic oligonucleotide
  Target: LAMA2; (+) strand; PAM type: YTN; PAM sequence: CTT
ttaaatgcttgtcagattac

SEQ ID NO: 398765 - DNA, 20 bp, Artificial Sequence
  Description of Artificial Sequence: Synthetic oligonucleotide
  Target: LAMA2; (+) strand; PAM type: YTN; PAM sequence: TTT
taaatgcttgtcagattaca

SEQ ID NO: 398766 - DNA, 20 bp, Artificial Sequence
  Description of Artificial Sequence: Synthetic oligonucleotide
  Target: LAMA2; (+) strand; PAM type: YTN; PAM sequence: TTT
aaatgcttgtcagattacat

SEQ ID NO: 398767 - DNA, 20 bp, Artificial Sequence
  Description of Artificial Sequence: Synthetic oligonucleotide
  Target: LAMA2; (+) strand; PAM type: YTN; PAM sequence: TTA
aatgcttgtcagattacatt

SEQ ID NO: 398768 - DNA, 20 bp, Artificial Sequence
  Description of Artificial Sequence: Synthetic oligonucleotide
  Target: LAMA2; (+) strand; PAM type: YTN; PAM sequence: CTT
gtcagattacattcttacaa

SEQ ID NO: 398769 - DNA, 20 bp, Artificial Sequence
  Description of Artificial Sequence: Synthetic oligonucleotide
  Target: LAMA2; (+) strand; PAM type: YTN; PAM sequence: TTG
tcagattacattcttacaaa

SEQ ID NO: 398770 - DNA, 20 bp, Artificial Sequence
  Description of Artificial Sequence: Synthetic oligonucleotide
  Target: LAMA2; (+) strand; PAM type: YTN; PAM sequence: TTA
cattcttacaaaaaggtatt

SEQ ID NO: 398771 - DNA, 20 bp, Artificial Sequence
  Description of Artificial Sequence: Synthetic oligonucleotide
  Target: LAMA2; (+) strand; PAM type: YTN; PAM sequence: TTC
ttacaaaaaggtattcacac

SEQ ID NO: 398772 - DNA, 20 bp, Artificial Sequence
  Description of Artificial Sequence: Synthetic oligonucleotide
  Target: LAMA2; (+) strand; PAM type: YTN; PAM sequence: CTT
acaaaaaggtattcacactc

SEQ ID NO: 398773 - DNA, 20 bp, Artificial Sequence
  Description of Artificial Sequence: Synthetic oligonucleotide
  Target: LAMA2; (+) strand; PAM type: YTN; PAM sequence: TTA
caaaaaggtattcacactcc

SEQ ID NO: 398774 - DNA, 20 bp, Artificial Sequence
  Description of Artificial Sequence: Synthetic oligonucleotide
  Target: LAMA2; (+) strand; PAM type: YTN; PAM sequence: TTC
acactccaaggcactgggga

SEQ ID NO: 398775 - DNA, 20 bp, Artificial Sequence
  Description of Artificial Sequence: Synthetic oligonucleotide
  Target: LAMA2; (+) strand; PAM type: YTN; PAM sequence: CTC
caaggcactggggaaagctg

SEQ ID NO: 398776 - DNA, 20 bp, Artificial Sequence
  Description of Artificial Sequence: Synthetic oligonucleotide
  Target: LAMA2; (+) strand; PAM type: YTN; PAM sequence: CTG
gggaaagctgttttcttttt

SEQ ID NO: 398777 - DNA, 20 bp, Artificial Sequence
  Description of Artificial Sequence: Synthetic oligonucleotide
  Target: LAMA2; (+) strand; PAM type: YTN; PAM sequence: CTG
ttttctttttttgtctagtt

SEQ ID NO: 398778 - DNA, 20 bp, Artificial Sequence
  Description of Artificial Sequence: Synthetic oligonucleotide
  Target: LAMA2; (+) strand; PAM type: YTN; PAM sequence: TTT
tctttttttgtctagtttca

SEQ ID NO: 398779 - DNA, 20 bp, Artificial Sequence
  Description of Artificial Sequence: Synthetic oligonucleotide
  Target: LAMA2; (+) strand; PAM type: YTN; PAM sequence: TTT
ctttttttgtctagtttcat

SEQ ID NO: 398780 - DNA, 20 bp, Artificial Sequence
  Description of Artificial Sequence: Synthetic oligonucleotide
  Target: LAMA2; (+) strand; PAM type: YTN; PAM sequence: TTC
tttttttgtctagtttcatc

SEQ ID NO: 398781 - DNA, 20 bp, Artificial Sequence
  Description of Artificial Sequence: Synthetic oligonucleotide
  Target: LAMA2; (+) strand; PAM type: YTN; PAM sequence: CTT
tttttgtctagtttcatcta

SEQ ID NO: 398782 - DNA, 20 bp, Artificial Sequence
  Description of Artificial Sequence: Synthetic oligonucleotide
  Target: LAMA2; (+) strand; PAM type: YTN; PAM sequence: TTT
ttttgtctagtttcatctag

SEQ ID NO: 398783 - DNA, 20 bp, Artificial Sequence
  Description of Artificial Sequence: Synthetic oligonucleotide
  Target: LAMA2; (+) strand; PAM type: YTN; PAM sequence: TTT
tttgtctagtttcatctagt

SEQ ID NO: 398784 - DNA, 20 bp, Artificial Sequence
  Description of Artificial Sequence: Synthetic oligonucleotide
  Target: LAMA2; (+) strand; PAM type: YTN; PAM sequence: TTT
ttgtctagtttcatctagta

SEQ ID NO: 398785 - DNA, 20 bp, Artificial Sequence
  Description of Artificial Sequence: Synthetic oligonucleotide
  Target: LAMA2; (+) strand; PAM type: YTN; PAM sequence: TTT
tgtctagtttcatctagtac

SEQ ID NO: 398786 - DNA, 20 bp, Artificial Sequence
  Description of Artificial Sequence: Synthetic oligonucleotide
  Target: LAMA2; (+) strand; PAM type: YTN; PAM sequence: TTT
gtctagtttcatctagtact

SEQ ID NO: 398787 - DNA, 20 bp, Artificial Sequence
  Description of Artificial Sequence: Synthetic oligonucleotide
  Target: LAMA2; (+) strand; PAM type: YTN; PAM sequence: TTG
tctagtttcatctagtacta

SEQ ID NO: 398788 - DNA, 20 bp, Artificial Sequence
  Description of Artificial Sequence: Synthetic oligonucleotide
  Target: LAMA2; (+) strand; PAM type: YTN; PAM sequence: CTA
gtttcatctagtactataaa

SEQ ID NO: 398789 - DNA, 20 bp, Artificial Sequence
  Description of Artificial Sequence: Synthetic oligonucleotide
  Target: LAMA2; (+) strand; PAM type: YTN; PAM sequence: TTT
catctagtactataaatggc

SEQ ID NO: 398790 - DNA, 20 bp, Artificial Sequence
  Description of Artificial Sequence: Synthetic oligonucleotide
  Target: LAMA2; (+) strand; PAM type: YTN; PAM sequence: TTC
atctagtactataaatggcc

SEQ ID NO: 398791 - DNA, 20 bp, Artificial Sequence
  Description of Artificial Sequence: Synthetic oligonucleotide
  Target: LAMA2; (+) strand; PAM type: YTN; PAM sequence: CTA
gtactataaatggcctatat

SEQ ID NO: 398792 - DNA, 20 bp, Artificial Sequence
  Description of Artificial Sequence: Synthetic oligonucleotide
  Target: LAMA2; (+) strand; PAM type: YTN; PAM sequence: CTA
taaatggcctatattatctt

SEQ ID NO: 398793 - DNA, 20 bp, Artificial Sequence
  Description of Artificial Sequence: Synthetic oligonucleotide
  Target: LAMA2; (+) strand; PAM type: YTN; PAM sequence: CTA
tattatcttgacaattcagg

SEQ ID NO: 398794 - DNA, 20 bp, Artificial Sequence
  Description of Artificial Sequence: Synthetic oligonucleotide
  Target: LAMA2; (+) strand; PAM type: YTN; PAM sequence: TTA
tcttgacaattcaggattgt

SEQ ID NO: 398795 - DNA, 20 bp, Artificial Sequence
  Description of Artificial Sequence: Synthetic oligonucleotide
  Target: LAMA2; (+) strand; PAM type: YTN; PAM sequence: CTT
gacaattcaggattgtatta

SEQ ID NO: 398796 - DNA, 20 bp, Artificial Sequence
  Description of Artificial Sequence: Synthetic oligonucleotide
  Target: LAMA2; (+) strand; PAM type: YTN; PAM sequence: TTG
acaattcaggattgtattat

SEQ ID NO: 398797 - DNA, 20 bp, Artificial Sequence
  Description of Artificial Sequence: Synthetic oligonucleotide
  Target: LAMA2; (+) strand; PAM type: YTN; PAM sequence: TTC
aggattgtattatcatcctt

SEQ ID NO: 398798 - DNA, 20 bp, Artificial Sequence
  Description of Artificial Sequence: Synthetic oligonucleotide
  Target: LAMA2; (+) strand; PAM type: YTN; PAM sequence: TTG
tattatcatccttggttatt

SEQ ID NO: 398799 - DNA, 20 bp, Artificial Sequence
  Description of Artificial Sequence: Synthetic oligonucleotide
  Target: LAMA2; (+) strand; PAM type: YTN; PAM sequence: TTA
tcatccttggttattttacc

SEQ ID NO: 398800 - DNA, 20 bp, Artificial Sequence
  Description of Artificial Sequence: Synthetic oligonucleotide
  Target: LAMA2; (+) strand; PAM type: YTN; PAM sequence: CTT
ggttattttaccacaataag

SEQ ID NO: 398801 - DNA, 20 bp, Artificial Sequence
  Description of Artificial Sequence: Synthetic oligonucleotide
  Target: LAMA2; (+) strand; PAM type: YTN; PAM sequence: TTG
gttattttaccacaataagg

SEQ ID NO: 398802 - DNA, 20 bp, Artificial Sequence
  Description of Artificial Sequence: Synthetic oligonucleotide
  Target: LAMA2; (+) strand; PAM type: YTN; PAM sequence: TTA
ttttaccacaataaggttgg

SEQ ID NO: 398803 - DNA, 20 bp, Artificial Sequence
  Description of Artificial Sequence: Synthetic oligonucleotide
  Target: LAMA2; (+) strand; PAM type: YTN; PAM sequence: TTT
taccacaataaggttggcat

SEQ ID NO: 398804 - DNA, 20 bp, Artificial Sequence
  Description of Artificial Sequence: Synthetic oligonucleotide
  Target: LAMA2; (+) strand; PAM type: YTN; PAM sequence: TTT
accacaataaggttggcatc

SEQ ID NO: 398805 - DNA, 20 bp, Artificial Sequence
  Description of Artificial Sequence: Synthetic oligonucleotide
  Target: LAMA2; (+) strand; PAM type: YTN; PAM sequence: TTA
ccacaataaggttggcatct

SEQ ID NO: 398806 - DNA, 20 bp, Artificial Sequence
  Description of Artificial Sequence: Synthetic oligonucleotide
  Target: LAMA2; (+) strand; PAM type: YTN; PAM sequence: TTG
gcatctactgagacctactt

SEQ ID NO: 398807 - DNA, 20 bp, Artificial Sequence
  Description of Artificial Sequence: Synthetic oligonucleotide
  Target: LAMA2; (+) strand; PAM type: YTN; PAM sequence: CTA
ctgagacctactttacctct

SEQ ID NO: 398808 - DNA, 20 bp, Artificial Sequence
  Description of Artificial Sequence: Synthetic oligonucleotide
  Target: LAMA2; (+) strand; PAM type: YTN; PAM sequence: CTG
agacctactttacctctata

SEQ ID NO: 398809 - DNA, 20 bp, Artificial Sequence
  Description of Artificial Sequence: Synthetic oligonucleotide
  Target: LAMA2; (+) strand; PAM type: YTN; PAM sequence: CTA
ctttacctctatacatttta

SEQ ID NO: 398810 - DNA, 20 bp, Artificial Sequence
  Description of Artificial Sequence: Synthetic oligonucleotide
  Target: LAMA2; (+) strand; PAM type: YTN; PAM sequence: CTT
tacctctatacattttatcc

SEQ ID NO: 398811 - DNA, 20 bp, Artificial Sequence
  Description of Artificial Sequence: Synthetic oligonucleotide
  Target: LAMA2; (+) strand; PAM type: YTN; PAM sequence: TTT
acctctatacattttatccc

SEQ ID NO: 398812 - DNA, 20 bp, Artificial Sequence
  Description of Artificial Sequence: Synthetic oligonucleotide
  Target: LAMA2; (+) strand; PAM type: YTN; PAM sequence: TTA
cctctatacattttatccct

SEQ ID NO: 398813 - DNA, 20 bp, Artificial Sequence
  Description of Artificial Sequence: Synthetic oligonucleotide
  Target: LAMA2; (+) strand; PAM type: YTN; PAM sequence: CTC
tatacattttatccctttcc

SEQ ID NO: 398814 - DNA, 20 bp, Artificial Sequence
  Description of Artificial Sequence: Synthetic oligonucleotide
  Target: LAMA2; (+) strand; PAM type: YTN; PAM sequence: CTA
tacattttatccctttccaa

SEQ ID NO: 398815 - DNA, 20 bp, Artificial Sequence
  Description of Artificial Sequence: Synthetic oligonucleotide
  Target: LAMA2; (+) strand; PAM type: YTN; PAM sequence: TTT
tatccctttccaaattgact

SEQ ID NO: 398816 - DNA, 20 bp, Artificial Sequence
  Description of Artificial Sequence: Synthetic oligonucleotide
  Target: LAMA2; (+) strand; PAM type: YTN; PAM sequence: TTT
atccctttccaaattgactc

SEQ ID NO: 398817 - DNA, 20 bp, Artificial Sequence
  Description of Artificial Sequence: Synthetic oligonucleotide
  Target: LAMA2; (+) strand; PAM type: YTN; PAM sequence: TTA
tccctttccaaattgactca

SEQ ID NO: 398818 - DNA, 20 bp, Artificial Sequence
  Description of Artificial Sequence: Synthetic oligonucleotide
  Target: LAMA2; (+) strand; PAM type: YTN; PAM sequence: CTT
tccaaattgactcagactcc

SEQ ID NO: 398819 - DNA, 20 bp, Artificial Sequence
  Description of Artificial Sequence: Synthetic oligonucleotide
  Target: LAMA2; (+) strand; PAM type: YTN; PAM sequence: TTT
ccaaattgactcagactcct

SEQ ID NO: 398820 - DNA, 20 bp, Artificial Sequence
  Description of Artificial Sequence: Synthetic oligonucleotide
  Target: LAMA2; (+) strand; PAM type: YTN; PAM sequence: TTC
caaattgactcagactcctg

SEQ ID NO: 398821 - DNA, 20 bp, Artificial Sequence
  Description of Artificial Sequence: Synthetic oligonucleotide
  Target: LAMA2; (+) strand; PAM type: YTN; PAM sequence: TTG
actcagactcctgagcttca

SEQ ID NO: 398822 - DNA, 20 bp, Artificial Sequence
  Description of Artificial Sequence: Synthetic oligonucleotide
  Target: LAMA2; (+) strand; PAM type: YTN; PAM sequence: CTC
agactcctgagcttcaaaaa

SEQ ID NO: 398823 - DNA, 20 bp, Artificial Sequence
  Description of Artificial Sequence: Synthetic oligonucleotide
  Target: LAMA2; (+) strand; PAM type: YTN; PAM sequence: CTC
ctgagcttcaaaaattcctc

SEQ ID NO: 398824 - DNA, 20 bp, Artificial Sequence
  Description of Artificial Sequence: Synthetic oligonucleotide
  Target: LAMA2; (+) strand; PAM type: YTN; PAM sequence: CTG
agcttcaaaaattcctctct

SEQ ID NO: 398825 - DNA, 20 bp, Artificial Sequence
  Description of Artificial Sequence: Synthetic oligonucleotide
  Target: LAMA2; (+) strand; PAM type: YTN; PAM sequence: CTT
caaaaattcctctctccact

SEQ ID NO: 398826 - DNA, 20 bp, Artificial Sequence
  Description of Artificial Sequence: Synthetic oligonucleotide
  Target: LAMA2; (+) strand; PAM type: YTN; PAM sequence: TTC
aaaaattcctctctccactt

SEQ ID NO: 398827 - DNA, 20 bp, Artificial Sequence
  Description of Artificial Sequence: Synthetic oligonucleotide
  Target: LAMA2; (+) strand; PAM type: YTN; PAM sequence: TTC
ctctctccactttttagagt

SEQ ID NO: 398828 - DNA, 20 bp, Artificial Sequence
  Description of Artificial Sequence: Synthetic oligonucleotide
  Target: LAMA2; (+) strand; PAM type: YTN; PAM sequence: CTC
tctccactttttagagtttt

SEQ ID NO: 398829 - DNA, 20 bp, Artificial Sequence
  Description of Artificial Sequence: Synthetic oligonucleotide
  Target: LAMA2; (+) strand; PAM type: YTN; PAM sequence: CTC
tccactttttagagttttct

SEQ ID NO: 398830 - DNA, 20 bp, Artificial Sequence
  Description of Artificial Sequence: Synthetic oligonucleotide
  Target: LAMA2; (+) strand; PAM type: YTN; PAM sequence: CTC
cactttttagagttttctct

SEQ ID NO: 398831 - DNA, 20 bp, Artificial Sequence
  Description of Artificial Sequence: Synthetic oligonucleotide
  Target: LAMA2; (+) strand; PAM type: YTN; PAM sequence: CTT
tttagagttttctcttctct

SEQ ID NO: 398832 - DNA, 20 bp, Artificial Sequence
  Description of Artificial Sequence: Synthetic oligonucleotide
  Target: LAMA2; (+) strand; PAM type: YTN; PAM sequence: TTT
ttagagttttctcttctctt

SEQ ID NO: 398833 - DNA, 20 bp, Artificial Sequence
  Description of Artificial Sequence: Synthetic oligonucleotide
  Target: LAMA2; (+) strand; PAM type: YTN; PAM sequence: TTT
tagagttttctcttctcttt

SEQ ID NO: 398834 - DNA, 20 bp, Artificial Sequence
  Description of Artificial Sequence: Synthetic oligonucleotide
  Target: LAMA2; (+) strand; PAM type: YTN; PAM sequence: TTT
agagttttctcttctctttg

SEQ ID NO: 398835 - DNA, 20 bp, Artificial Sequence
  Description of Artificial Sequence: Synthetic oligonucleotide
  Target: LAMA2; (+) strand; PAM type: YTN; PAM sequence: TTA
gagttttctcttctctttgc

SEQ ID NO: 398836 - DNA, 20 bp, Artificial Sequence
  Description of Artificial Sequence: Synthetic oligonucleotide
  Target: LAMA2; (+) strand; PAM type: YTN; PAM sequence: TTT
tctcttctctttgctcattg

SEQ ID NO: 398837 - DNA, 20 bp, Artificial Sequence
  Description of Artificial Sequence: Synthetic oligonucleotide
  Target: LAMA2; (+) strand; PAM type: YTN; PAM sequence: TTT
ctcttctctttgctcattgt

SEQ ID NO: 398838 - DNA, 20 bp, Artificial Sequence
  Description of Artificial Sequence: Synthetic oligonucleotide
  Target: LAMA2; (+) strand; PAM type: YTN; PAM sequence: TTC
tcttctctttgctcattgtc

SEQ ID NO: 398839 - DNA, 20 bp, Artificial Sequence
  Description of Artificial Sequence: Synthetic oligonucleotide
  Target: LAMA2; (+) strand; PAM type: YTN; PAM sequence: CTC
ttctctttgctcattgtcgg

SEQ ID NO: 398840 - DNA, 20 bp, Artificial Sequence
  Description of Artificial Sequence: Synthetic oligonucleotide
  Target: LAMA2; (+) strand; PAM type: YTN; PAM sequence: CTT
ctctttgctcattgtcggac

SEQ ID NO: 398841 - DNA, 20 bp, Artificial Sequence
  Description of Artificial Sequence: Synthetic oligonucleotide
  Target: LAMA2; (+) strand; PAM type: YTN; PAM sequence: TTC
tctttgctcattgtcggaca

SEQ ID NO: 398842 - DNA, 20 bp, Artificial Sequence
  Description of Artificial Sequence: Synthetic oligonucleotide
  Target: LAMA2; (+) strand; PAM type: YTN; PAM sequence: CTC
tttgctcattgtcggacaga

SEQ ID NO: 398843 - DNA, 20 bp, Artificial Sequence
  Description of Artificial Sequence: Synthetic oligonucleotide
  Target: LAMA2; (+) strand; PAM type: YTN; PAM sequence: CTT
tgctcattgtcggacagatt

SEQ ID NO: 398844 - DNA, 20 bp, Artificial Sequence
  Description of Artificial Sequence: Synthetic oligonucleotide
  Target: LAMA2; (+) strand; PAM type: YTN; PAM sequence: TTT
gctcattgtcggacagattg

SEQ ID NO: 398845 - DNA, 20 bp, Artificial Sequence
  Description of Artificial Sequence: Synthetic oligonucleotide
  Target: LAMA2; (+) strand; PAM type: YTN; PAM sequence: TTG
ctcattgtcggacagattgt

SEQ ID NO: 398846 - DNA, 20 bp, Artificial Sequence
  Description of Artificial Sequence: Synthetic oligonucleotide
  Target: LAMA2; (+) strand; PAM type: YTN; PAM sequence: CTC
attgtcggacagattgtcag

SEQ ID NO: 398847 - DNA, 20 bp, Artificial Sequence
  Description of Artificial Sequence: Synthetic oligonucleotide
  Target: LAMA2; (+) strand; PAM type: YTN; PAM sequence: TTG
tcggacagattgtcagctgt

SEQ ID NO: 398848 - DNA, 20 bp, Artificial Sequence
  Description of Artificial Sequence: Synthetic oligonucleotide
  Target: LAMA2; (+) strand; PAM type: YTN; PAM sequence: TTG
tcagctgtcacttctgctgt

SEQ ID NO: 398849 - DNA, 20 bp, Artificial Sequence
  Description of Artificial Sequence: Synthetic oligonucleotide
  Target: LAMA2; (+) strand; PAM type: YTN; PAM sequence: CTG
tcacttctgctgttttcatg

SEQ ID NO: 398850 - DNA, 20 bp, Artificial Sequence
  Description of Artificial Sequence: Synthetic oligonucleotide
  Target: LAMA2; (+) strand; PAM type: YTN; PAM sequence: CTT
ctgctgttttcatgtgtttg

SEQ ID NO: 398851 - DNA, 20 bp, Artificial Sequence
  Description of Artificial Sequence: Synthetic oligonucleotide
  Target: LAMA2; (+) strand; PAM type: YTN; PAM sequence: TTC
tgctgttttcatgtgtttgt

SEQ ID NO: 398852 - DNA, 20 bp, Artificial Sequence
  Description of Artificial Sequence: Synthetic oligonucleotide
  Target: LAMA2; (+) strand; PAM type: YTN; PAM sequence: CTG
ctgttttcatgtgtttgttt

SEQ ID NO: 398853 - DNA, 20 bp, Artificial Sequence
  Description of Artificial Sequence: Synthetic oligonucleotide
  Target: LAMA2; (+) strand; PAM type: YTN; PAM sequence: CTG
ttttcatgtgtttgtttaga

SEQ ID NO: 398854 - DNA, 20 bp, Artificial Sequence
  Description of Artificial Sequence: Synthetic oligonucleotide
  Target: LAMA2; (+) strand; PAM type: YTN; PAM sequence: TTT
tcatgtgtttgtttagagaa

SEQ ID NO: 398855 - DNA, 20 bp, Artificial Sequence
  Description of Artificial Sequence: Synthetic oligonucleotide
  Target: LAMA2; (+) strand; PAM type: YTN; PAM sequence: TTT
catgtgtttgtttagagaat

SEQ ID NO: 398856 - DNA, 20 bp, Artificial Sequence
  Description of Artificial Sequence: Synthetic oligonucleotide
  Target: LAMA2; (+) strand; PAM type: YTN; PAM sequence: TTC
atgtgtttgtttagagaatc

SEQ ID NO: 398857 - DNA, 20 bp, Artificial Sequence
  Description of Artificial Sequence: Synthetic oligonucleotide
  Target: LAMA2; (+) strand; PAM type: YTN; PAM sequence: TTT
gtttagagaatcttcacaca

SEQ ID NO: 398858 - DNA, 20 bp, Artificial Sequence
  Description of Artificial Sequence: Synthetic oligonucleotide
  Target: LAMA2; (+) strand; PAM type: YTN; PAM sequence: TTG
tttagagaatcttcacacat

SEQ ID NO: 398859 - DNA, 20 bp, Artificial Sequence
  Description of Artificial Sequence: Synthetic oligonucleotide
  Target: LAMA2; (+) strand; PAM type: YTN; PAM sequence: TTT
agagaatcttcacacattct

SEQ ID NO: 398860 - DNA, 20 bp, Artificial Sequence
  Description of Artificial Sequence: Synthetic oligonucleotide
  Target: LAMA2; (+) strand; PAM type: YTN; PAM sequence: TTA
gagaatcttcacacattctt

SEQ ID NO: 398861 - DNA, 20 bp, Artificial Sequence
  Description of Artificial Sequence: Synthetic oligonucleotide
  Target: LAMA2; (+) strand; PAM type: YTN; PAM sequence: CTT
cacacattctttcattgtaa

SEQ ID NO: 398862 - DNA, 20 bp, Artificial Sequence
  Description of Artificial Sequence: Synthetic oligonucleotide
  Target: LAMA2; (+) strand; PAM type: YTN; PAM sequence: TTC
acacattctttcattgtaat

SEQ ID NO: 398863 - DNA, 20 bp, Artificial Sequence
  Description of Artificial Sequence: Synthetic oligonucleotide
  Target: LAMA2; (+) strand; PAM type: YTN; PAM sequence: TTC
tttcattgtaatttcctgtc

SEQ ID NO: 398864 - DNA, 20 bp, Artificial Sequence
  Description of Artificial Sequence: Synthetic oligonucleotide
  Target: LAMA2; (+) strand; PAM type: YTN; PAM sequence: CTT
tcattgtaatttcctgtctc

SEQ ID NO: 398865 - DNA, 20 bp, Artificial Sequence
  Description of Artificial Sequence: Synthetic oligonucleotide
  Target: LAMA2; (+) strand; PAM type: YTN; PAM sequence: TTT
cattgtaatttcctgtctct

SEQ ID NO: 398866 - DNA, 20 bp, Artificial Sequence
  Description of Artificial Sequence: Synthetic oligonucleotide
  Target: LAMA2; (+) strand; PAM type: YTN; PAM sequence: TTC
attgtaatttcctgtctcta

SEQ ID NO: 398867 - DNA, 20 bp, Artificial Sequence
  Description of Artificial Sequence: Synthetic oligonucleotide
  Target: LAMA2; (+) strand; PAM type: YTN; PAM sequence: TTG
taatttcctgtctctaaatt

SEQ ID NO: 398868 - DNA, 20 bp, Artificial Sequence
  Description of Artificial Sequence: Synthetic oligonucleotide
  Target: LAMA2; (+) strand; PAM type: YTN; PAM sequence: TTT
cctgtctctaaattgttttg

SEQ ID NO: 398869 - DNA, 20 bp, Artificial Sequence
  Description of Artificial Sequence: Synthetic oligonucleotide
  Target: LAMA2; (+) strand; PAM type: YTN; PAM sequence: TTC
ctgtctctaaattgttttga

SEQ ID NO: 398870 - DNA, 20 bp, Artificial Sequence
  Description of Artificial Sequence: Synthetic oligonucleotide
  Target: LAMA2; (+) strand; PAM type: YTN; PAM sequence: CTG
tctctaaattgttttgattc

SEQ ID NO: 398871 - DNA, 20 bp, Artificial Sequence
  Description of Artificial Sequence: Synthetic oligonucleotide
  Target: LAMA2; (+) strand; PAM type: YTN; PAM sequence: CTC
taaattgttttgattcagaa

SEQ ID NO: 398872 - DNA, 20 bp, Artificial Sequence
  Description of Artificial Sequence: Synthetic oligonucleotide
  Target: LAMA2; (+) strand; PAM type: YTN; PAM sequence: CTA
aattgttttgattcagaaaa

SEQ ID NO: 398873 - DNA, 20 bp, Artificial Sequence
  Description of Artificial Sequence: Synthetic oligonucleotide
  Target: LAMA2; (+) strand; PAM type: YTN; PAM sequence: TTG
ttttgattcagaaaacctat

SEQ ID NO: 398874 - DNA, 20 bp, Artificial Sequence
  Description of Artificial Sequence: Synthetic oligonucleotide
  Target: LAMA2; (+) strand; PAM type: YTN; PAM sequence: TTT
tgattcagaaaacctataac

SEQ ID NO: 398875 - DNA, 20 bp, Artificial Sequence
  Description of Artificial Sequence: Synthetic oligonucleotide
  Target: LAMA2; (+) strand; PAM type: YTN; PAM sequence: TTT
gattcagaaaacctataacc

SEQ ID NO: 398876 - DNA, 20 bp, Artificial Sequence
  Description of Artificial Sequence: Synthetic oligonucleotide
  Target: LAMA2; (+) strand; PAM type: YTN; PAM sequence: TTG
attcagaaaacctataacca

SEQ ID NO: 398877 - DNA, 20 bp, Artificial Sequence
  Description of Artificial Sequence: Synthetic oligonucleotide
  Target: LAMA2; (+) strand; PAM type: YTN; PAM sequence: TTC
agaaaacctataaccaaggg

SEQ ID NO: 398878 - DNA, 20 bp, Artificial Sequence
  Description of Artificial Sequence: Synthetic oligonucleotide
  Target: LAMA2; (+) strand; PAM type: YTN; PAM sequence: CTA
taaccaagggagtaaaaatg

SEQ ID NO: 398879 - DNA, 20 bp, Artificial Sequence
  Description of Artificial Sequence: Synthetic oligonucleotide
  Target: LAMA2; (+) strand; PAM type: YTN; PAM sequence: TTT
ggaacaaatatagaatctga

SEQ ID NO: 398880 - DNA, 20 bp, Artificial Sequence
  Description of Artificial Sequence: Synthetic oligonucleotide
  Target: LAMA2; (+) strand; PAM type: YTN; PAM sequence: TTG
gaacaaatatagaatctgag

SEQ ID NO: 398881 - DNA, 20 bp, Artificial Sequence
  Description of Artificial Sequence: Synthetic oligonucleotide
  Target: LAMA2; (+) strand; PAM type: YTN; PAM sequence: CTG
agtgggtaacctgaggctta

SEQ ID NO: 398882 - DNA, 20 bp, Artificial Sequence
  Description of Artificial Sequence: Synthetic oligonucleotide
  Target: LAMA2; (+) strand; PAM type: YTN; PAM sequence: CTG
aggcttacttcgtgagttaa

SEQ ID NO: 398883 - DNA, 20 bp, Artificial Sequence
  Description of Artificial Sequence: Synthetic oligonucleotide
  Target: LAMA2; (+) strand; PAM type: YTN; PAM sequence: CTT
acttcgtgagttaaagtaca

SEQ ID NO: 398884 - DNA, 20 bp, Artificial Sequence
  Description of Artificial Sequence: Synthetic oligonucleotide
  Target: LAMA2; (+) strand; PAM type: YTN; PAM sequence: TTA
cttcgtgagttaaagtacat

SEQ ID NO: 398885 - DNA, 20 bp, Artificial Sequence
  Description of Artificial Sequence: Synthetic oligonucleotide
  Target: LAMA2; (+) strand; PAM type: YTN; PAM sequence: CTT
cgtgagttaaagtacattgc

SEQ ID NO: 398886 - DNA, 20 bp, Artificial Sequence
  Description of Artificial Sequence: Synthetic oligonucleotide
  Target: LAMA2; (+) strand; PAM type: YTN; PAM sequence: TTC
gtgagttaaagtacattgca

SEQ ID NO: 398887 - DNA, 20 bp, Artificial Sequence
  Description of Artificial Sequence: Synthetic oligonucleotide
  Target: LAMA2; (+) strand; PAM type: YTN; PAM sequence: TTA
aagtacattgcatctgtgtc

SEQ ID NO: 398888 - DNA, 20 bp, Artificial Sequence
  Description of Artificial Sequence: Synthetic oligonucleotide
  Target: LAMA2; (+) strand; PAM type: YTN; PAM sequence: TTG
catctgtgtcattaattttg

SEQ ID NO: 398889 - DNA, 20 bp, Artificial Sequence
  Description of Artificial Sequence: Synthetic oligonucleotide
  Target: LAMA2; (+) strand; PAM type: YTN; PAM sequence: CTG
tgtcattaattttgacactc

SEQ ID NO: 398890 - DNA, 20 bp, Artificial Sequence
  Description of Artificial Sequence: Synthetic oligonucleotide
  Target: LAMA2; (+) strand; PAM type: YTN; PAM sequence: TTA
attttgacactctttttttt

SEQ ID NO: 398891 - DNA, 20 bp, Artificial Sequence
  Description of Artificial Sequence: Synthetic oligonucleotide
  Target: LAMA2; (+) strand; PAM type: YTN; PAM sequence: TTT
tgacactctttttttttttt

SEQ ID NO: 398892 - DNA, 20 bp, Artificial Sequence
  Description of Artificial Sequence: Synthetic oligonucleotide
  Target: LAMA2; (+) strand; PAM type: YTN; PAM sequence: TTT
gacactcttttttttttttc

SEQ ID NO: 398893 - DNA, 20 bp, Artificial Sequence
  Description of Artificial Sequence: Synthetic oligonucleotide
  Target: LAMA2; (+) strand; PAM type: YTN; PAM sequence: TTG
acactcttttttttttttcc

SEQ ID NO: 398894 - DNA, 20 bp, Artificial Sequence
  Description of Artificial Sequence: Synthetic oligonucleotide
  Target: LAMA2; (+) strand; PAM type: YTN; PAM sequence: CTC
ttttttttttttccaagatg

SEQ ID NO: 398895 - DNA, 20 bp, Artificial Sequence
  Description of Artificial Sequence: Synthetic oligonucleotide
  Target: LAMA2; (+) strand; PAM type: YTN; PAM sequence: CTT
ttttttttttccaagatgaa

SEQ ID NO: 398896 - DNA, 20 bp, Artificial Sequence
  Description of Artificial Sequence: Synthetic oligonucleotide
  Target: LAMA2; (+) strand; PAM type: YTN; PAM sequence: TTT
tttttttttccaagatgaat

SEQ ID NO: 398897 - DNA, 20 bp, Artificial Sequence
  Description of Artificial Sequence: Synthetic oligonucleotide
  Target: LAMA2; (+) strand; PAM type: YTN; PAM sequence: TTT
ttttttttccaagatgaatg

SEQ ID NO: 398898 - DNA, 20 bp, Artificial Sequence
  Description of Artificial Sequence: Synthetic oligonucleotide
  Target: LAMA2; (+) strand; PAM type: YTN; PAM sequence: TTT
tttttttccaagatgaatga

SEQ ID NO: 398899 - DNA, 20 bp, Artificial Sequence
  Description of Artificial Sequence: Synthetic oligonucleotide
  Target: LAMA2; (+) strand; PAM type: YTN; PAM sequence: TTT
ttttttccaagatgaatgac

SEQ ID NO: 398900 - DNA, 20 bp, Artificial Sequence
  Description of Artificial Sequence: Synthetic oligonucleotide
  Target: LAMA2; (+) strand; PAM type: YTN; PAM sequence: TTT
tttttccaagatgaatgaca

SEQ ID NO: 398901 - DNA, 20 bp, Artificial Sequence
  Description of Artificial Sequence: Synthetic oligonucleotide
  Target: LAMA2; (+) strand; PAM type: YTN; PAM sequence: TTT
ttttccaagatgaatgacac

SEQ ID NO: 398902 - DNA, 20 bp, Artificial Sequence
  Description of Artificial Sequence: Synthetic oligonucleotide
  Target: LAMA2; (+) strand; PAM type: YTN; PAM sequence: TTT
tttccaagatgaatgacact

SEQ ID NO: 398903 - DNA, 20 bp, Artificial Sequence
  Description of Artificial Sequence: Synthetic oligonucleotide
  Target: LAMA2; (+) strand; PAM type: YTN; PAM sequence: TTT
ttccaagatgaatgacactt

SEQ ID NO: 398904 - DNA, 20 bp, Artificial Sequence
  Description of Artificial Sequence: Synthetic oligonucleotide
  Target: LAMA2; (+) strand; PAM type: YTN; PAM sequence: TTT
tccaagatgaatgacactta

SEQ ID NO: 398905 - DNA, 20 bp, Artificial Sequence
  Description of Artificial Sequence: Synthetic oligonucleotide
  Target: LAMA2; (+) strand; PAM type: YTN; PAM sequence: TTT
ccaagatgaatgacacttat

SEQ ID NO: 398906 - DNA, 20 bp, Artificial Sequence
  Description of Artificial Sequence: Synthetic oligonucleotide
  Target: LAMA2; (+) strand; PAM type: YTN; PAM sequence: TTC
caagatgaatgacacttatg

SEQ ID NO: 398907 - DNA, 20 bp, Artificial Sequence
  Description of Artificial Sequence: Synthetic oligonucleotide
  Target: LAMA2; (+) strand; PAM type: YTN; PAM sequence: CTT
atgtgatgttactgtatcta

SEQ ID NO: 398908 - DNA, 20 bp, Artificial Sequence
  Description of Artificial Sequence: Synthetic oligonucleotide
  Target: LAMA2; (+) strand; PAM type: YTN; PAM sequence: TTA
tgtgatgttactgtatctaa

SEQ ID NO: 398909 - DNA, 20 bp, Artificial Sequence
  Description of Artificial Sequence: Synthetic oligonucleotide
  Target: LAMA2; (+) strand; PAM type: YTN; PAM sequence: TTA
ctgtatctaattcccaagag

SEQ ID NO: 398910 - DNA, 20 bp, Artificial Sequence
  Description of Artificial Sequence: Synthetic oligonucleotide
  Target: LAMA2; (+) strand; PAM type: YTN; PAM sequence: CTG
tatctaattcccaagagaac

SEQ ID NO: 398911 - DNA, 20 bp, Artificial Sequence
  Description of Artificial Sequence: Synthetic oligonucleotide
  Target: LAMA2; (+) strand; PAM type: YTN; PAM sequence: CTA
attcccaagagaactgtagc

SEQ ID NO: 398912 - DNA, 20 bp, Artificial Sequence
  Description of Artificial Sequence: Synthetic oligonucleotide
  Target: LAMA2; (+) strand; PAM type: YTN; PAM sequence: TTC
ccaagagaactgtagcaatg

SEQ ID NO: 398913 - DNA, 20 bp, Artificial Sequence
  Description of Artificial Sequence: Synthetic oligonucleotide
  Target: LAMA2; (+) strand; PAM type: YTN; PAM sequence: CTG
tagcaatgagaattcctgtt

SEQ ID NO: 398914 - DNA, 20 bp, Artificial Sequence
  Description of Artificial Sequence: Synthetic oligonucleotide
  Target: LAMA2; (+) strand; PAM type: YTN; PAM sequence: TTC
ctgtttttcccagcagaaaa

SEQ ID NO: 398915 - DNA, 20 bp, Artificial Sequence
  Description of Artificial Sequence: Synthetic oligonucleotide
  Target: LAMA2; (+) strand; PAM type: YTN; PAM sequence: CTG
tttttcccagcagaaaacat

SEQ ID NO: 398916 - DNA, 20 bp, Artificial Sequence
  Description of Artificial Sequence: Synthetic oligonucleotide
  Target: LAMA2; (+) strand; PAM type: YTN; PAM sequence: TTT
ttcccagcagaaaacatcat

SEQ ID NO: 398917 - DNA, 20 bp, Artificial Sequence
  Description of Artificial Sequence: Synthetic oligonucleotide
  Target: LAMA2; (+) strand; PAM type: YTN; PAM sequence: TTT
tcccagcagaaaacatcatc

SEQ ID NO: 398918 - DNA, 20 bp, Artificial Sequence
  Description of Artificial Sequence: Synthetic oligonucleotide
  Target: LAMA2; (+) strand; PAM type: YTN; PAM sequence: TTT
cccagcagaaaacatcatca

SEQ ID NO: 398919 - DNA, 20 bp, Artificial Sequence
  Description of Artificial Sequence: Synthetic oligonucleotide
  Target: LAMA2; (+) strand; PAM type: YTN; PAM sequence: TTC
ccagcagaaaacatcatcag

SEQ ID NO: 398920 - DNA, 20 bp, Artificial Sequence
  Description of Artificial Sequence: Synthetic oligonucleotide
  Target: LAMA2; (+) strand; PAM type: YTN; PAM sequence: TTT
tctggagaataatttgccaa

SEQ ID NO: 398921 - DNA, 20 bp, Artificial Sequence
  Description of Artificial Sequence: Synthetic oligonucleotide
  Target: LAMA2; (+) strand; PAM type: YTN; PAM sequence: TTT
ctggagaataatttgccaag

SEQ ID NO: 398922 - DNA, 20 bp, Artificial Sequence
  Description of Artificial Sequence: Synthetic oligonucleotide
  Target: LAMA2; (+) strand; PAM type: YTN; PAM sequence: TTC
tggagaataatttgccaagg

SEQ ID NO: 398923 - DNA, 20 bp, Artificial Sequence
  Description of Artificial Sequence: Synthetic oligonucleotide
  Target: LAMA2; (+) strand; PAM type: YTN; PAM sequence: CTG
gagaataatttgccaaggtt

SEQ ID NO: 398924 - DNA, 20 bp, Artificial Sequence
  Description of Artificial Sequence: Synthetic oligonucleotide
  Target: LAMA2; (+) strand; PAM type: YTN; PAM sequence: TTT
gccaaggttgtcttttgcaa

SEQ ID NO: 398925 - DNA, 20 bp, Artificial Sequence
  Description of Artificial Sequence: Synthetic oligonucleotide
  Target: LAMA2; (+) strand; PAM type: YTN; PAM sequence: TTG
ccaaggttgtcttttgcaag

SEQ ID NO: 398926 - DNA, 20 bp, Artificial Sequence
  Description of Artificial Sequence: Synthetic oligonucleotide
  Target: LAMA2; (+) strand; PAM type: YTN; PAM sequence: TTG
tcttttgcaagaactatgtt

SEQ ID NO: 398927 - DNA, 20 bp, Artificial Sequence
  Description of Artificial Sequence: Synthetic oligonucleotide
  Target: LAMA2; (+) strand; PAM type: YTN; PAM sequence: CTT
ttgcaagaactatgttcagt

SEQ ID NO: 398928 - DNA, 20 bp, Artificial Sequence
  Description of Artificial Sequence: Synthetic oligonucleotide
  Target: LAMA2; (+) strand; PAM type: YTN; PAM sequence: TTT
tgcaagaactatgttcagtg

SEQ ID NO: 398929 - DNA, 20 bp, Artificial Sequence
  Description of Artificial Sequence: Synthetic oligonucleotide
  Target: LAMA2; (+) strand; PAM type: YTN; PAM sequence: TTT
gcaagaactatgttcagtgt

SEQ ID NO: 398930 - DNA, 20 bp, Artificial Sequence
  Description of Artificial Sequence: Synthetic oligonucleotide
  Target: LAMA2; (+) strand; PAM type: YTN; PAM sequence: TTG
caagaactatgttcagtgtt

SEQ ID NO: 398931 - DNA, 20 bp, Artificial Sequence
  Description of Artificial Sequence: Synthetic oligonucleotide
  Target: LAMA2; (+) strand; PAM type: YTN; PAM sequence: CTA
tgttcagtgttcttttttat

SEQ ID NO: 398932 - DNA, 20 bp, Artificial Sequence
  Description of Artificial Sequence: Synthetic oligonucleotide
  Target: LAMA2; (+) strand; PAM type: YTN; PAM sequence: TTC
agtgttcttttttatttatg

SEQ ID NO: 398933 - DNA, 20 bp, Artificial Sequence
  Description of Artificial Sequence: Synthetic oligonucleotide
  Target: LAMA2; (+) strand; PAM type: YTN; PAM sequence: TTC
ttttttatttatgtagatgt

SEQ ID NO: 398934 - DNA, 20 bp, Artificial Sequence
  Description of Artificial Sequence: Synthetic oligonucleotide
  Target: LAMA2; (+) strand; PAM type: YTN; PAM sequence: CTT
ttttatttatgtagatgttt

SEQ ID NO: 398935 - DNA, 20 bp, Artificial Sequence
  Description of Artificial Sequence: Synthetic oligonucleotide
  Target: LAMA2; (+) strand; PAM type: YTN; PAM sequence: TTT
tttatttatgtagatgtttc

SEQ ID NO: 398936 - DNA, 20 bp, Artificial Sequence
  Description of Artificial Sequence: Synthetic oligonucleotide
  Target: LAMA2; (+) strand; PAM type: YTN; PAM sequence: TTT
ttatttatgtagatgtttcc

SEQ ID NO: 398937 - DNA, 20 bp, Artificial Sequence
  Description of Artificial Sequence: Synthetic oligonucleotide
  Target: LAMA2; (+) strand; PAM type: YTN; PAM sequence: TTT
tatttatgtagatgtttcca

SEQ ID NO: 398938 - DNA, 20 bp, Artificial Sequence
  Description of Artificial Sequence: Synthetic oligonucleotide
  Target: LAMA2; (+) strand; PAM type: YTN; PAM sequence: TTT
atttatgtagatgtttccaa

SEQ ID NO: 398939 - DNA, 20 bp, Artificial Sequence
  Description of Artificial Sequence: Synthetic oligonucleotide
  Target: LAMA2; (+) strand; PAM type: YTN; PAM sequence: TTA
tttatgtagatgtttccaat

SEQ ID NO: 398940 - DNA, 20 bp, Artificial Sequence
  Description of Artificial Sequence: Synthetic oligonucleotide
  Target: LAMA2; (+) strand; PAM type: YTN; PAM sequence: TTT
atgtagatgtttccaatata

SEQ ID NO: 398941 - DNA, 20 bp, Artificial Sequence
  Description of Artificial Sequence: Synthetic oligonucleotide
  Target: LAMA2; (+) strand; PAM type: YTN; PAM sequence: TTA
tgtagatgtttccaatatat

SEQ ID NO: 398942 - DNA, 20 bp, Artificial Sequence
  Description of Artificial Sequence: Synthetic oligonucleotide
  Target: LAMA2; (+) strand; PAM type: YTN; PAM sequence: TTT
ccaatatatctttttgtaga

SEQ ID NO: 398943 - DNA, 20 bp, Artificial Sequence
  Description of Artificial Sequence: Synthetic oligonucleotide
  Target: LAMA2; (+) strand; PAM type: YTN; PAM sequence: TTC
caatatatctttttgtagat

SEQ ID NO: 398944 - DNA, 20 bp, Artificial Sequence
  Description of Artificial Sequence: Synthetic oligonucleotide
  Target: LAMA2; (+) strand; PAM type: YTN; PAM sequence: CTT
tttgtagatatgatagcatt

SEQ ID NO: 398945 - DNA, 20 bp, Artificial Sequence
  Description of Artificial Sequence: Synthetic oligonucleotide
  Target: LAMA2; (+) strand; PAM type: YTN; PAM sequence: TTT
ttgtagatatgatagcattg

SEQ ID NO: 398946 - DNA, 20 bp, Artificial Sequence
  Description of Artificial Sequence: Synthetic oligonucleotide
  Target: LAMA2; (+) strand; PAM type: YTN; PAM sequence: TTT
tgtagatatgatagcattgt

SEQ ID NO: 398947 - DNA, 20 bp, Artificial Sequence
  Description of Artificial Sequence: Synthetic oligonucleotide
  Target: LAMA2; (+) strand; PAM type: YTN; PAM sequence: TTT
gtagatatgatagcattgta

SEQ ID NO: 398948 - DNA, 20 bp, Artificial Sequence
  Description of Artificial Sequence: Synthetic oligonucleotide
  Target: LAMA2; (+) strand; PAM type: YTN; PAM sequence: TTG
tagatatgatagcattgtac

SEQ ID NO: 398949 - DNA, 20 bp, Artificial Sequence
  Description of Artificial Sequence: Synthetic oligonucleotide
  Target: LAMA2; (+) strand; PAM type: YTN; PAM sequence: TTG
tacaatcaatctgttctatg

SEQ ID NO: 398950 - DNA, 20 bp, Artificial Sequence
  Description of Artificial Sequence: Synthetic oligonucleotide
  Target: LAMA2; (+) strand; PAM type: YTN; PAM sequence: CTG
ttctatgagcaatcaattat

SEQ ID NO: 398951 - DNA, 20 bp, Artificial Sequence
  Description of Artificial Sequence: Synthetic oligonucleotide
  Target: LAMA2; (+) strand; PAM type: YTN; PAM sequence: TTC
tatgagcaatcaattattta

SEQ ID NO: 398952 - DNA, 20 bp, Artificial Sequence
  Description of Artificial Sequence: Synthetic oligonucleotide
  Target: LAMA2; (+) strand; PAM type: YTN; PAM sequence: CTA
tgagcaatcaattatttacc

SEQ ID NO: 398953 - DNA, 20 bp, Artificial Sequence
  Description of Artificial Sequence: Synthetic oligonucleotide
  Target: LAMA2; (+) strand; PAM type: YTN; PAM sequence: TTA
tttacctgaaagctgttaga

SEQ ID NO: 398954 - DNA, 20 bp, Artificial Sequence
  Description of Artificial Sequence: Synthetic oligonucleotide
  Target: LAMA2; (+) strand; PAM type: YTN; PAM sequence: TTT
acctgaaagctgttagaata

SEQ ID NO: 398955 - DNA, 20 bp, Artificial Sequence
  Description of Artificial Sequence: Synthetic oligonucleotide
  Target: LAMA2; (+) strand; PAM type: YTN; PAM sequence: TTA
cctgaaagctgttagaataa

SEQ ID NO: 398956 - DNA, 20 bp, Artificial Sequence
  Description of Artificial Sequence: Synthetic oligonucleotide
  Target: LAMA2; (+) strand; PAM type: YTN; PAM sequence: CTG
aaagctgttagaataataca

SEQ ID NO: 398957 - DNA, 20 bp, Artificial Sequence
  Description of Artificial Sequence: Synthetic oligonucleotide
  Target: LAMA2; (+) strand; PAM type: YTN; PAM sequence: CTG
ttagaataatacattaaaat

SEQ ID NO: 398958 - DNA, 20 bp, Artificial Sequence
  Description of Artificial Sequence: Synthetic oligonucleotide
  Target: LAMA2; (+) strand; PAM type: YTN; PAM sequence: TTA
gaataatacattaaaataaa

SEQ ID NO: 398959 - DNA, 20 bp, Artificial Sequence
  Description of Artificial Sequence: Synthetic oligonucleotide
  Target: LAMA2; (+) strand; PAM type: YTN; PAM sequence: TTA
aaataaatttgaccacagcc

SEQ ID NO: 398960 - DNA, 20 bp, Artificial Sequence
  Description of Artificial Sequence: Synthetic oligonucleotide
  Target: LAMA2; (+) strand; PAM type: YTN; PAM sequence: TTT
gaccacagccataccaagtt

SEQ ID NO: 398961 - DNA, 20 bp, Artificial Sequence
  Description of Artificial Sequence: Synthetic oligonucleotide
  Target: LAMA2; (+) strand; PAM type: YTN; PAM sequence: TTG
accacagccataccaagttc

SEQ ID NO: 398962 - DNA, 20 bp, Artificial Sequence
  Description of Artificial Sequence: Synthetic oligonucleotide
  Target: LAMA2; (+) strand; PAM type: YTN; PAM sequence: TTC
tgtaatcttttctagtttaa

SEQ ID NO: 398963 - DNA, 20 bp, Artificial Sequence
  Description of Artificial Sequence: Synthetic oligonucleotide
  Target: LAMA2; (+) strand; PAM type: YTN; PAM sequence: CTG
taatcttttctagtttaatg

SEQ ID NO: 398964 - DNA, 20 bp, Artificial Sequence
  Description of Artificial Sequence: Synthetic oligonucleotide
  Target: LAMA2; (+) strand; PAM type: YTN; PAM sequence: CTT
ttctagtttaatgttcaaat

SEQ ID NO: 398965 - DNA, 20 bp, Artificial Sequence
  Description of Artificial Sequence: Synthetic oligonucleotide
  Target: LAMA2; (+) strand; PAM type: YTN; PAM sequence: TTT
tctagtttaatgttcaaata

SEQ ID NO: 398966 - DNA, 20 bp, Artificial Sequence
  Description of Artificial Sequence: Synthetic oligonucleotide
  Target: LAMA2; (+) strand; PAM type: YTN; PAM sequence: TTT
ctagtttaatgttcaaataa

SEQ ID NO: 398967 - DNA, 20 bp, Artificial Sequence
  Description of Artificial Sequence: Synthetic oligonucleotide
  Target: LAMA2; (+) strand; PAM type: YTN; PAM sequence: TTC
tagtttaatgttcaaataat

SEQ ID NO: 398968 - DNA, 20 bp, Artificial Sequence
  Description of Artificial Sequence: Synthetic oligonucleotide
  Target: LAMA2; (+) strand; PAM type: YTN; PAM sequence: CTA
gtttaatgttcaaataatgt

SEQ ID NO: 398969 - DNA, 20 bp, Artificial Sequence
  Description of Artificial Sequence: Synthetic oligonucleotide
  Target: LAMA2; (+) strand; PAM type: YTN; PAM sequence: TTT
aatgttcaaataatgtgact

SEQ ID NO: 398970 - DNA, 20 bp, Artificial Sequence
  Description of Artificial Sequence: Synthetic oligonucleotide
  Target: LAMA2; (+) strand; PAM type: YTN; PAM sequence: TTA
atgttcaaataatgtgactg

SEQ ID NO: 398971 - DNA, 20 bp, Artificial Sequence
  Description of Artificial Sequence: Synthetic oligonucleotide
  Target: LAMA2; (+) strand; PAM type: YTN; PAM sequence: TTC
aaataatgtgactgataaaa

SEQ ID NO: 398972 - DNA, 20 bp, Artificial Sequence
  Description of Artificial Sequence: Synthetic oligonucleotide
  Target: LAMA2; (+) strand; PAM type: YTN; PAM sequence: CTG
ataaaaataatgtaactaag

SEQ ID NO: 398973 - DNA, 20 bp, Artificial Sequence
  Description of Artificial Sequence: Synthetic oligonucleotide
  Target: LAMA2; (+) strand; PAM type: YTN; PAM sequence: CTA
aggcagtccagatgccttta

SEQ ID NO: 398974 - DNA, 20 bp, Artificial Sequence
  Description of Artificial Sequence: Synthetic oligonucleotide
  Target: LAMA2; (+) strand; PAM type: YTN; PAM sequence: CTT
taacgagtgttatgtctgtg

SEQ ID NO: 398975 - DNA, 20 bp, Artificial Sequence
  Description of Artificial Sequence: Synthetic oligonucleotide
  Target: LAMA2; (+) strand; PAM type: YTN; PAM sequence: TTT
aacgagtgttatgtctgtga

SEQ ID NO: 398976 - DNA, 20 bp, Artificial Sequence
  Description of Artificial Sequence: Synthetic oligonucleotide
  Target: LAMA2; (+) strand; PAM type: YTN; PAM sequence: TTA
acgagtgttatgtctgtgat

SEQ ID NO: 398977 - DNA, 20 bp, Artificial Sequence
  Description of Artificial Sequence: Synthetic oligonucleotide
  Target: LAMA2; (+) strand; PAM type: YTN; PAM sequence: TTA
tgtctgtgataatctgagtt

SEQ ID NO: 398978 - DNA, 20 bp, Artificial Sequence
  Description of Artificial Sequence: Synthetic oligonucleotide
  Target: LAMA2; (+) strand; PAM type: YTN; PAM sequence: CTG
tgataatctgagttcagatt

SEQ ID NO: 398979 - DNA, 20 bp, Artificial Sequence
  Description of Artificial Sequence: Synthetic oligonucleotide
  Target: LAMA2; (+) strand; PAM type: YTN; PAM sequence: CTG
agttcagatttatatcttca

SEQ ID NO: 398980 - DNA, 20 bp, Artificial Sequence
  Description of Artificial Sequence: Synthetic oligonucleotide
  Target: LAMA2; (+) strand; PAM type: YTN; PAM sequence: TTC
agatttatatcttcaacagt

SEQ ID NO: 398981 - DNA, 20 bp, Artificial Sequence
  Description of Artificial Sequence: Synthetic oligonucleotide
  Target: LAMA2; (+) strand; PAM type: YTN; PAM sequence: TTT
atatcttcaacagtaagtat

SEQ ID NO: 398982 - DNA, 20 bp, Artificial Sequence
  Description of Artificial Sequence: Synthetic oligonucleotide
  Target: LAMA2; (+) strand; PAM type: YTN; PAM sequence: TTA
tatcttcaacagtaagtatt

SEQ ID NO: 398983 - DNA, 20 bp, Artificial Sequence
  Description of Artificial Sequence: Synthetic oligonucleotide
  Target: LAMA2; (+) strand; PAM type: YTN; PAM sequence: CTT
caacagtaagtatttagcac

SEQ ID NO: 398984 - DNA, 20 bp, Artificial Sequence
  Description of Artificial Sequence: Synthetic oligonucleotide
  Target: LAMA2; (+) strand; PAM type: YTN; PAM sequence: TTC
aacagtaagtatttagcact

SEQ ID NO: 398985 - DNA, 20 bp, Artificial Sequence
  Description of Artificial Sequence: Synthetic oligonucleotide
  Target: LAMA2; (+) strand; PAM type: YTN; PAM sequence: TTT
agcactctccaacccttctt

SEQ ID NO: 398986 - DNA, 20 bp, Artificial Sequence
  Description of Artificial Sequence: Synthetic oligonucleotide
  Target: LAMA2; (+) strand; PAM type: YTN; PAM sequence: TTA
gcactctccaacccttcttg

SEQ ID NO: 398987 - DNA, 20 bp, Artificial Sequence
  Description of Artificial Sequence: Synthetic oligonucleotide
  Target: LAMA2; (+) strand; PAM type: YTN; PAM sequence: CTC
tccaacccttcttgcacttg

SEQ ID NO: 398988 - DNA, 20 bp, Artificial Sequence
  Description of Artificial Sequence: Synthetic oligonucleotide
  Target: LAMA2; (+) strand; PAM type: YTN; PAM sequence: CTC
caacccttcttgcacttgca

SEQ ID NO: 398989 - DNA, 20 bp, Artificial Sequence
  Description of Artificial Sequence: Synthetic oligonucleotide
  Target: LAMA2; (+) strand; PAM type: YTN; PAM sequence: CTT
cttgcacttgcaatactttt

SEQ ID NO: 398990 - DNA, 20 bp, Artificial Sequence
  Description of Artificial Sequence: Synthetic oligonucleotide
  Target: LAMA2; (+) strand; PAM type: YTN; PAM sequence: TTC
ttgcacttgcaatacttttc

SEQ ID NO: 398991 - DNA, 20 bp, Artificial Sequence
  Description of Artificial Sequence: Synthetic oligonucleotide
  Target: LAMA2; (+) strand; PAM type: YTN; PAM sequence: CTT
gcacttgcaatacttttcca

SEQ ID NO: 398992 - DNA, 20 bp, Artificial Sequence
  Description of Artificial Sequence: Synthetic oligonucleotide
  Target: LAMA2; (+) strand; PAM type: YTN; PAM sequence: TTG
cacttgcaatacttttccaa

SEQ ID NO: 398993 - DNA, 20 bp, Artificial Sequence
  Description of Artificial Sequence: Synthetic oligonucleotide
  Target: LAMA2; (+) strand; PAM type: YTN; PAM sequence: CTT
gcaatacttttccaatttaa

SEQ ID NO: 398994 - DNA, 20 bp, Artificial Sequence
  Description of Artificial Sequence: Synthetic oligonucleotide
  Target: LAMA2; (+) strand; PAM type: YTN; PAM sequence: TTG
caatacttttccaatttaaa

SEQ ID NO: 398995 - DNA, 20 bp, Artificial Sequence
  Description of Artificial Sequence: Synthetic oligonucleotide
  Target: LAMA2; (+) strand; PAM type: YTN; PAM sequence: CTT
ttccaatttaaaatttacac

SEQ ID NO: 398996 - DNA, 20 bp, Artificial Sequence
  Description of Artificial Sequence: Synthetic oligonucleotide
  Target: LAMA2; (+) strand; PAM type: YTN; PAM sequence: TTT
tccaatttaaaatttacaca

SEQ ID NO: 398997 - DNA, 20 bp, Artificial Sequence
  Description of Artificial Sequence: Synthetic oligonucleotide
  Target: LAMA2; (+) strand; PAM type: YTN; PAM sequence: TTT
ccaatttaaaatttacacat

SEQ ID NO: 398998 - DNA, 20 bp, Artificial Sequence
  Description of Artificial Sequence: Synthetic oligonucleotide
  Target: LAMA2; (+) strand; PAM type: YTN; PAM sequence: TTC
caatttaaaatttacacata

SEQ ID NO: 398999 - DNA, 20 bp, Artificial Sequence
  Description of Artificial Sequence: Synthetic oligonucleotide
  Target: LAMA2; (+) strand; PAM type: YTN; PAM sequence: TTT
aaaatttacacataagatcc

SEQ ID NO: 399000 - DNA, 20 bp, Artificial Sequence
  Description of Artificial Sequence: Synthetic oligonucleotide
  Target: LAMA2; (+) strand; PAM type: YTN; PAM sequence: TTA
aaatttacacataagatcct

SEQ ID NO: 399001 - DNA, 20 bp, Artificial Sequence
  Description of Artificial Sequence: Synthetic oligonucleotide
  Target: LAMA2; (+) strand; PAM type: YTN; PAM sequence: TTT
acacataagatcctgtttga

SEQ ID NO: 399002 - DNA, 20 bp, Artificial Sequence
  Description of Artificial Sequence: Synthetic oligonucleotide
  Target: LAMA2; (+) strand; PAM type: YTN; PAM sequence: TTA
cacataagatcctgtttgat

SEQ ID NO: 399003 - DNA, 20 bp, Artificial Sequence
  Description of Artificial Sequence: Synthetic oligonucleotide
  Target: LAMA2; (+) strand; PAM type: YTN; PAM sequence: CTG
tttgatttatctcttggtat

SEQ ID NO: 399004 - DNA, 20 bp, Artificial Sequence
  Description of Artificial Sequence: Synthetic oligonucleotide
  Target: LAMA2; (+) strand; PAM type: YTN; PAM sequence: TTT
gatttatctcttggtatata

SEQ ID NO: 399005 - DNA, 20 bp, Artificial Sequence
  Description of Artificial Sequence: Synthetic oligonucleotide
  Target: LAMA2; (+) strand; PAM type: YTN; PAM sequence: TTG
atttatctcttggtatatat

SEQ ID NO: 399006 - DNA, 20 bp, Artificial Sequence
  Description of Artificial Sequence: Synthetic oligonucleotide
  Target: LAMA2; (+) strand; PAM type: YTN; PAM sequence: TTT
atctcttggtatatatgaat

SEQ ID NO: 399007 - DNA, 20 bp, Artificial Sequence
  Description of Artificial Sequence: Synthetic oligonucleotide
  Target: LAMA2; (+) strand; PAM type: YTN; PAM sequence: TTA
tctcttggtatatatgaatt

SEQ ID NO: 399008 - DNA, 20 bp, Artificial Sequence
  Description of Artificial Sequence: Synthetic oligonucleotide
  Target: LAMA2; (+) strand; PAM type: YTN; PAM sequence: CTC
ttggtatatatgaattatgt

SEQ ID NO: 399009 - DNA, 20 bp, Artificial Sequence
  Description of Artificial Sequence: Synthetic oligonucleotide
  Target: LAMA2; (+) strand; PAM type: YTN; PAM sequence: CTT
ggtatatatgaattatgtaa

SEQ ID NO: 399010 - DNA, 20 bp, Artificial Sequence
  Description of Artificial Sequence: Synthetic oligonucleotide
  Target: LAMA2; (+) strand; PAM type: YTN; PAM sequence: TTG
gtatatatgaattatgtaat

SEQ ID NO: 399011 - DNA, 20 bp, Artificial Sequence
  Description of Artificial Sequence: Synthetic oligonucleotide
  Target: LAMA2; (+) strand; PAM type: YTN; PAM sequence: TTA
tgtaatgattgctgaggagc

SEQ ID NO: 399012 - DNA, 20 bp, Artificial Sequence
  Description of Artificial Sequence: Synthetic oligonucleotide
  Target: LAMA2; (+) strand; PAM type: YTN; PAM sequence: TTG
ctgaggagcaaacactatta

SEQ ID NO: 399013 - DNA, 20 bp, Artificial Sequence
  Description of Artificial Sequence: Synthetic oligonucleotide
  Target: LAMA2; (+) strand; PAM type: YTN; PAM sequence: CTG
aggagcaaacactattaaaa

SEQ ID NO: 399014 - DNA, 20 bp, Artificial Sequence
  Description of Artificial Sequence: Synthetic oligonucleotide
  Target: LAMA2; (+) strand; PAM type: YTN; PAM sequence: CTA
ttaaaatgggtaactagaca

SEQ ID NO: 399015 - DNA, 20 bp, Artificial Sequence
  Description of Artificial Sequence: Synthetic oligonucleotide
  Target: LAMA2; (+) strand; PAM type: YTN; PAM sequence: TTA
aaatgggtaactagacattc

SEQ ID NO: 399016 - DNA, 20 bp, Artificial Sequence
  Description of Artificial Sequence: Synthetic oligonucleotide
  Target: LAMA2; (+) strand; PAM type: YTN; PAM sequence: CTA
gacattcaagttaaacattc

SEQ ID NO: 399017 - DNA, 20 bp, Artificial Sequence
  Description of Artificial Sequence: Synthetic oligonucleotide
  Target: LAMA2; (+) strand; PAM type: YTN; PAM sequence: TTC
aagttaaacattccttttcc

SEQ ID NO: 399018 - DNA, 20 bp, Artificial Sequence
  Description of Artificial Sequence: Synthetic oligonucleotide
  Target: LAMA2; (+) strand; PAM type: YTN; PAM sequence: TTA
aacattccttttcccatatc

SEQ ID NO: 399019 - DNA, 20 bp, Artificial Sequence
  Description of Artificial Sequence: Synthetic oligonucleotide
  Target: LAMA2; (+) strand; PAM type: YTN; PAM sequence: TTC
cttttcccatatcattctat

SEQ ID NO: 399020 - DNA, 20 bp, Artificial Sequence
  Description of Artificial Sequence: Synthetic oligonucleotide
  Target: LAMA2; (+) strand; PAM type: YTN; PAM sequence: CTT
ttcccatatcattctattaa

SEQ ID NO: 399021 - DNA, 20 bp, Artificial Sequence
  Description of Artificial Sequence: Synthetic oligonucleotide
  Target: LAMA2; (+) strand; PAM type: YTN; PAM sequence: TTT
tcccatatcattctattaac

SEQ ID NO: 399022 - DNA, 20 bp, Artificial Sequence
  Description of Artificial Sequence: Synthetic oligonucleotide
  Target: LAMA2; (+) strand; PAM type: YTN; PAM sequence: TTT
cccatatcattctattaact

SEQ ID NO: 399023 - DNA, 20 bp, Artificial Sequence
  Description of Artificial Sequence: Synthetic oligonucleotide
  Target: LAMA2; (+) strand; PAM type: YTN; PAM sequence: TTC
ccatatcattctattaactt

SEQ ID NO: 399024 - DNA, 20 bp, Artificial Sequence
  Description of Artificial Sequence: Synthetic oligonucleotide
  Target: LAMA2; (+) strand; PAM type: YTN; PAM sequence: TTC
tattaactttgtgtcacctt

SEQ ID NO: 399025 - DNA, 20 bp, Artificial Sequence
  Description of Artificial Sequence: Synthetic oligonucleotide
  Target: LAMA2; (+) strand; PAM type: YTN; PAM sequence: CTA
ttaactttgtgtcacctttt

SEQ ID NO: 399026 - DNA, 20 bp, Artificial Sequence
  Description of Artificial Sequence: Synthetic oligonucleotide
  Target: LAMA2; (+) strand; PAM type: YTN; PAM sequence: TTA
actttgtgtcacctttttta

SEQ ID NO: 399027 - DNA, 20 bp, Artificial Sequence
  Description of Artificial Sequence: Synthetic oligonucleotide
  Target: LAMA2; (+) strand; PAM type: YTN; PAM sequence: CTT
tgtgtcaccttttttaatct

SEQ ID NO: 399028 - DNA, 20 bp, Artificial Sequence
  Description of Artificial Sequence: Synthetic oligonucleotide
  Target: LAMA2; (+) strand; PAM type: YTN; PAM sequence: TTT
gtgtcaccttttttaatctg

SEQ ID NO: 399029 - DNA, 20 bp, Artificial Sequence
  Description of Artificial Sequence: Synthetic oligonucleotide
  Target: LAMA2; (+) strand; PAM type: YTN; PAM sequence: TTG
tgtcaccttttttaatctga

SEQ ID NO: 399030 - DNA, 20 bp, Artificial Sequence
  Description of Artificial Sequence: Synthetic oligonucleotide
  Target: LAMA2; (+) strand; PAM type: YTN; PAM sequence: CTT
ttttaatctgagtctaaaca

SEQ ID NO: 399031 - DNA, 20 bp, Artificial Sequence
  Description of Artificial Sequence: Synthetic oligonucleotide
  Target: LAMA2; (+) strand; PAM type: YTN; PAM sequence: TTT
tttaatctgagtctaaacaa

SEQ ID NO: 399032 - DNA, 20 bp, Artificial Sequence
  Description of Artificial Sequence: Synthetic oligonucleotide
  Target: LAMA2; (+) strand; PAM type: YTN; PAM sequence: TTT
ttaatctgagtctaaacaaa

SEQ ID NO: 399033 - DNA, 20 bp, Artificial Sequence
  Description of Artificial Sequence: Synthetic oligonucleotide
  Target: LAMA2; (+) strand; PAM type: YTN; PAM sequence: TTT
taatctgagtctaaacaaat

SEQ ID NO: 399034 - DNA, 20 bp, Artificial Sequence
  Description of Artificial Sequence: Synthetic oligonucleotide
  Target: LAMA2; (+) strand; PAM type: YTN; PAM sequence: TTT
aatctgagtctaaacaaata

SEQ ID NO: 399035 - DNA, 20 bp, Artificial Sequence
  Description of Artificial Sequence: Synthetic oligonucleotide
  Target: LAMA2; (+) strand; PAM type: YTN; PAM sequence: TTA
atctgagtctaaacaaatat

SEQ ID NO: 399036 - DNA, 20 bp, Artificial Sequence
  Description of Artificial Sequence: Synthetic oligonucleotide
  Target: LAMA2; (+) strand; PAM type: YTN; PAM sequence: CTG
agtctaaacaaatatatctt

SEQ ID NO: 399037 - DNA, 20 bp, Artificial Sequence
  Description of Artificial Sequence: Synthetic oligonucleotide
  Target: LAMA2; (+) strand; PAM type: YTN; PAM sequence: CTA
aacaaatatatctttgcttg

SEQ ID NO: 399038 - DNA, 20 bp, Artificial Sequence
  Description of Artificial Sequence: Synthetic oligonucleotide
  Target: LAMA2; (+) strand; PAM type: YTN; PAM sequence: CTT
tgcttggagataattgtggc

SEQ ID NO: 399039 - DNA, 20 bp, Artificial Sequence
  Description of Artificial Sequence: Synthetic oligonucleotide
  Target: LAMA2; (+) strand; PAM type: YTN; PAM sequence: TTT
gcttggagataattgtggct

SEQ ID NO: 399040 - DNA, 20 bp, Artificial Sequence
  Description of Artificial Sequence: Synthetic oligonucleotide
  Target: LAMA2; (+) strand; PAM type: YTN; PAM sequence: TTG
cttggagataattgtggctc

SEQ ID NO: 399041 - DNA, 20 bp, Artificial Sequence
  Description of Artificial Sequence: Synthetic oligonucleotide
  Target: LAMA2; (+) strand; PAM type: YTN; PAM sequence: CTT
ggagataattgtggctcaga

SEQ ID NO: 399042 - DNA, 20 bp, Artificial Sequence
  Description of Artificial Sequence: Synthetic oligonucleotide
  Target: LAMA2; (+) strand; PAM type: YTN; PAM sequence: TTG
gagataattgtggctcagag

SEQ ID NO: 399043 - DNA, 20 bp, Artificial Sequence
  Description of Artificial Sequence: Synthetic oligonucleotide
  Target: LAMA2; (+) strand; PAM type: YTN; PAM sequence: TTG
tggctcagagattgtcattt

SEQ ID NO: 399044 - DNA, 20 bp, Artificial Sequence
  Description of Artificial Sequence: Synthetic oligonucleotide
  Target: LAMA2; (+) strand; PAM type: YTN; PAM sequence: CTC
agagattgtcatttagaaga

SEQ ID NO: 399045 - DNA, 20 bp, Artificial Sequence
  Description of Artificial Sequence: Synthetic oligonucleotide
  Target: LAMA2; (+) strand; PAM type: YTN; PAM sequence: TTG
tcatttagaagattgtgttt

SEQ ID NO: 399046 - DNA, 20 bp, Artificial Sequence
  Description of Artificial Sequence: Synthetic oligonucleotide
  Target: LAMA2; (+) strand; PAM type: YTN; PAM sequence: TTT
agaagattgtgttttgccat

SEQ ID NO: 399047 - DNA, 20 bp, Artificial Sequence
  Description of Artificial Sequence: Synthetic oligonucleotide
  Target: LAMA2; (+) strand; PAM type: YTN; PAM sequence: TTA
gaagattgtgttttgccata

SEQ ID NO: 399048 - DNA, 20 bp, Artificial Sequence
  Description of Artificial Sequence: Synthetic oligonucleotide
  Target: LAMA2; (+) strand; PAM type: YTN; PAM sequence: TTG
tgttttgccataccgcttta

SEQ ID NO: 399049 - DNA, 20 bp, Artificial Sequence
  Description of Artificial Sequence: Synthetic oligonucleotide
  Target: LAMA2; (+) strand; PAM type: YTN; PAM sequence: TTT
tgccataccgctttaagatg

SEQ ID NO: 399050 - DNA, 20 bp, Artificial Sequence
  Description of Artificial Sequence: Synthetic oligonucleotide
  Target: LAMA2; (+) strand; PAM type: YTN; PAM sequence: TTT
gccataccgctttaagatgc

SEQ ID NO: 399051 - DNA, 20 bp, Artificial Sequence
  Description of Artificial Sequence: Synthetic oligonucleotide
  Target: LAMA2; (+) strand; PAM type: YTN; PAM sequence: TTG
ccataccgctttaagatgca

SEQ ID NO: 399052 - DNA, 20 bp, Artificial Sequence
  Description of Artificial Sequence: Synthetic oligonucleotide
  Target: LAMA2; (+) strand; PAM type: YTN; PAM sequence: CTT
taagatgcattttttaaaag

SEQ ID NO: 399053 - DNA, 20 bp, Artificial Sequence
  Description of Artificial Sequence: Synthetic oligonucleotide
  Target: LAMA2; (+) strand; PAM type: YTN; PAM sequence: TTT
aagatgcattttttaaaaga

SEQ ID NO: 399054 - DNA, 20 bp, Artificial Sequence
  Description of Artificial Sequence: Synthetic oligonucleotide
  Target: LAMA2; (+) strand; PAM type: YTN; PAM sequence: TTA
agatgcattttttaaaagaa

SEQ ID NO: 399055 - DNA, 20 bp, Artificial Sequence
  Description of Artificial Sequence: Synthetic oligonucleotide
  Target: LAMA2; (+) strand; PAM type: YTN; PAM sequence: TTT
tttaaaagaagcagtgttct

SEQ ID NO: 399056 - DNA, 20 bp, Artificial Sequence
  Description of Artificial Sequence: Synthetic oligonucleotide
  Target: LAMA2; (+) strand; PAM type: YTN; PAM sequence: TTT
ttaaaagaagcagtgttctt

SEQ ID NO: 399057 - DNA, 20 bp, Artificial Sequence
  Description of Artificial Sequence: Synthetic oligonucleotide
  Target: LAMA2; (+) strand; PAM type: YTN; PAM sequence: TTT
taaaagaagcagtgttcttt

SEQ ID NO: 399058 - DNA, 20 bp, Artificial Sequence
  Description of Artificial Sequence: Synthetic oligonucleotide
  Target: LAMA2; (+) strand; PAM type: YTN; PAM sequence: TTT
aaaagaagcagtgttctttc

SEQ ID NO: 399059 - DNA, 20 bp, Artificial Sequence
  Description of Artificial Sequence: Synthetic oligonucleotide
  Target: LAMA2; (+) strand; PAM type: YTN; PAM sequence: TTA
aaagaagcagtgttctttct

SEQ ID NO: 399060 - DNA, 20 bp, Artificial Sequence
  Description of Artificial Sequence: Synthetic oligonucleotide
  Target: LAMA2; (+) strand; PAM type: YTN; PAM sequence: TTC
tttctcatttcagcacttgg

SEQ ID NO: 399061 - DNA, 20 bp, Artificial Sequence
  Description of Artificial Sequence: Synthetic oligonucleotide
  Target: LAMA2; (+) strand; PAM type: YTN; PAM sequence: CTT
tctcatttcagcacttggga

SEQ ID NO: 399062 - DNA, 20 bp, Artificial Sequence
  Description of Artificial Sequence: Synthetic oligonucleotide
  Target: LAMA2; (+) strand; PAM type: YTN; PAM sequence: TTT
ctcatttcagcacttgggag

SEQ ID NO: 399063 - DNA, 20 bp, Artificial Sequence
  Description of Artificial Sequence: Synthetic oligonucleotide
  Target: LAMA2; (+) strand; PAM type: YTN; PAM sequence: TTC
tcatttcagcacttgggaga

SEQ ID NO: 399064 - DNA, 20 bp, Artificial Sequence
  Description of Artificial Sequence: Synthetic oligonucleotide
  Target: LAMA2; (+) strand; PAM type: YTN; PAM sequence: CTC
atttcagcacttgggagata

SEQ ID NO: 399065 - DNA, 20 bp, Artificial Sequence
  Description of Artificial Sequence: Synthetic oligonucleotide
  Target: LAMA2; (+) strand; PAM type: YTN; PAM sequence: TTT
cagcacttgggagatacagg

SEQ ID NO: 399066 - DNA, 20 bp, Artificial Sequence
  Description of Artificial Sequence: Synthetic oligonucleotide
  Target: LAMA2; (+) strand; PAM type: YTN; PAM sequence: TTC
agcacttgggagatacagga

SEQ ID NO: 399067 - DNA, 20 bp, Artificial Sequence
  Description of Artificial Sequence: Synthetic oligonucleotide
  Target: LAMA2; (+) strand; PAM type: YTN; PAM sequence: CTT
gggagatacaggaaatgctc

SEQ ID NO: 399068 - DNA, 20 bp, Artificial Sequence
  Description of Artificial Sequence: Synthetic oligonucleotide
  Target: LAMA2; (+) strand; PAM type: YTN; PAM sequence: TTG
ggagatacaggaaatgctcc

SEQ ID NO: 399069 - DNA, 20 bp, Artificial Sequence
  Description of Artificial Sequence: Synthetic oligonucleotide
  Target: LAMA2; (+) strand; PAM type: YTN; PAM sequence: CTC
ccctctcagtccacaactag

SEQ ID NO: 399070 - DNA, 20 bp, Artificial Sequence
  Description of Artificial Sequence: Synthetic oligonucleotide
  Target: LAMA2; (+) strand; PAM type: YTN; PAM sequence: CTC
tcagtccacaactagagtga

SEQ ID NO: 399071 - DNA, 20 bp, Artificial Sequence
  Description of Artificial Sequence: Synthetic oligonucleotide
  Target: LAMA2; (+) strand; PAM type: YTN; PAM sequence: CTC
agtccacaactagagtgaaa

SEQ ID NO: 399072 - DNA, 20 bp, Artificial Sequence
  Description of Artificial Sequence: Synthetic oligonucleotide
  Target: LAMA2; (+) strand; PAM type: YTN; PAM sequence: CTA
gagtgaaatttgcttaagga

SEQ ID NO: 399073 - DNA, 20 bp, Artificial Sequence
  Description of Artificial Sequence: Synthetic oligonucleotide
  Target: LAMA2; (+) strand; PAM type: YTN; PAM sequence: TTT
gcttaaggataaagtcaggg

SEQ ID NO: 399074 - DNA, 20 bp, Artificial Sequence
  Description of Artificial Sequence: Synthetic oligonucleotide
  Target: LAMA2; (+) strand; PAM type: YTN; PAM sequence: TTG
cttaaggataaagtcagggg

SEQ ID NO: 399075 - DNA, 20 bp, Artificial Sequence
  Description of Artificial Sequence: Synthetic oligonucleotide
  Target: LAMA2; (+) strand; PAM type: YTN; PAM sequence: CTT
aaggataaagtcaggggatg

SEQ ID NO: 399076 - DNA, 20 bp, Artificial Sequence
  Description of Artificial Sequence: Synthetic oligonucleotide
  Target: LAMA2; (+) strand; PAM type: YTN; PAM sequence: TTA
aggataaagtcaggggatgt

SEQ ID NO: 399077 - DNA, 20 bp, Artificial Sequence
  Description of Artificial Sequence: Synthetic oligonucleotide
  Target: LAMA2; (+) strand; PAM type: YTN; PAM sequence: TTT
agttcttaatttgcttgact

SEQ ID NO: 399078 - DNA, 20 bp, Artificial Sequence
  Description of Artificial Sequence: Synthetic oligonucleotide
  Target: LAMA2; (+) strand; PAM type: YTN; PAM sequence: TTA
gttcttaatttgcttgactt

SEQ ID NO: 399079 - DNA, 20 bp, Artificial Sequence
  Description of Artificial Sequence: Synthetic oligonucleotide
  Target: LAMA2; (+) strand; PAM type: YTN; PAM sequence: TTC
ttaatttgcttgacttctgt

SEQ ID NO: 399080 - DNA, 20 bp, Artificial Sequence
  Description of Artificial Sequence: Synthetic oligonucleotide
  Target: LAMA2; (+) strand; PAM type: YTN; PAM sequence: CTT
aatttgcttgacttctgtag

SEQ ID NO: 399081 - DNA, 20 bp, Artificial Sequence
  Description of Artificial Sequence: Synthetic oligonucleotide
  Target: LAMA2; (+) strand; PAM type: YTN; PAM sequence: TTA
atttgcttgacttctgtagc

SEQ ID NO: 399082 - DNA, 20 bp, Artificial Sequence
  Description of Artificial Sequence: Synthetic oligonucleotide
  Target: LAMA2; (+) strand; PAM type: YTN; PAM sequence: TTT
gcttgacttctgtagcacgt

SEQ ID NO: 399083 - DNA, 20 bp, Artificial Sequence
  Description of Artificial Sequence: Synthetic oligonucleotide
  Target: LAMA2; (+) strand; PAM type: YTN; PAM sequence: TTG
cttgacttctgtagcacgtc

SEQ ID NO: 399084 - DNA, 20 bp, Artificial Sequence
  Description of Artificial Sequence: Synthetic oligonucleotide
  Target: LAMA2; (+) strand; PAM type: YTN; PAM sequence: CTT
gacttctgtagcacgtcata

SEQ ID NO: 399085 - DNA, 20 bp, Artificial Sequence
  Description of Artificial Sequence: Synthetic oligonucleotide
  Target: LAMA2; (+) strand; PAM type: YTN; PAM sequence: TTG
acttctgtagcacgtcataa

SEQ ID NO: 399086 - DNA, 20 bp, Artificial Sequence
  Description of Artificial Sequence: Synthetic oligonucleotide
  Target: LAMA2; (+) strand; PAM type: YTN; PAM sequence: CTT
ctgtagcacgtcataatgct

SEQ ID NO: 399087 - DNA, 20 bp, Artificial Sequence
  Description of Artificial Sequence: Synthetic oligonucleotide
  Target: LAMA2; (+) strand; PAM type: YTN; PAM sequence: TTC
tgtagcacgtcataatgctg

SEQ ID NO: 399088 - DNA, 20 bp, Artificial Sequence
  Description of Artificial Sequence: Synthetic oligonucleotide
  Target: LAMA2; (+) strand; PAM type: YTN; PAM sequence: CTG
tagcacgtcataatgctgct

SEQ ID NO: 399089 - DNA, 20 bp, Artificial Sequence
  Description of Artificial Sequence: Synthetic oligonucleotide
  Target: LAMA2; (+) strand; PAM type: YTN; PAM sequence: CTG
ctcagttatgtccttacaac

SEQ ID NO: 399090 - DNA, 20 bp, Artificial Sequence
  Description of Artificial Sequence: Synthetic oligonucleotide
  Target: LAMA2; (+) strand; PAM type: YTN; PAM sequence: CTC
agttatgtccttacaacacc

SEQ ID NO: 399091 - DNA, 20 bp, Artificial Sequence
  Description of Artificial Sequence: Synthetic oligonucleotide
  Target: LAMA2; (+) strand; PAM type: YTN; PAM sequence: TTA
tgtccttacaacaccgccag

SEQ ID NO: 399092 - DNA, 20 bp, Artificial Sequence
  Description of Artificial Sequence: Synthetic oligonucleotide
  Target: LAMA2; (+) strand; PAM type: YTN; PAM sequence: CTT
acaacaccgccagttatcat

SEQ ID NO: 399093 - DNA, 20 bp, Artificial Sequence
  Description of Artificial Sequence: Synthetic oligonucleotide
  Target: LAMA2; (+) strand; PAM type: YTN; PAM sequence: TTA
caacaccgccagttatcatg

SEQ ID NO: 399094 - DNA, 20 bp, Artificial Sequence
  Description of Artificial Sequence: Synthetic oligonucleotide
  Target: LAMA2; (+) strand; PAM type: YTN; PAM sequence: TTA
tcatgcatcgagtcacttct

SEQ ID NO: 399095 - DNA, 20 bp, Artificial Sequence
  Description of Artificial Sequence: Synthetic oligonucleotide
  Target: LAMA2; (+) strand; PAM type: YTN; PAM sequence: CTT
ctgcatctcttaatttccat

SEQ ID NO: 399096 - DNA, 20 bp, Artificial Sequence
  Description of Artificial Sequence: Synthetic oligonucleotide
  Target: LAMA2; (+) strand; PAM type: YTN; PAM sequence: TTC
tgcatctcttaatttccata

SEQ ID NO: 399097 - DNA, 20 bp, Artificial Sequence
  Description of Artificial Sequence: Synthetic oligonucleotide
  Target: LAMA2; (+) strand; PAM type: YTN; PAM sequence: CTG
catctcttaatttccatagt

SEQ ID NO: 399098 - DNA, 20 bp, Artificial Sequence
  Description of Artificial Sequence: Synthetic oligonucleotide
  Target: LAMA2; (+) strand; PAM type: YTN; PAM sequence: CTC
ttaatttccatagtgttatg

SEQ ID NO: 399099 - DNA, 20 bp, Artificial Sequence
  Description of Artificial Sequence: Synthetic oligonucleotide
  Target: LAMA2; (+) strand; PAM type: YTN; PAM sequence: CTT
aatttccatagtgttatgct

SEQ ID NO: 399100 - DNA, 20 bp, Artificial Sequence
  Description of Artificial Sequence: Synthetic oligonucleotide
  Target: LAMA2; (+) strand; PAM type: YTN; PAM sequence: TTA
atttccatagtgttatgctc

SEQ ID NO: 399101 - DNA, 20 bp, Artificial Sequence
  Description of Artificial Sequence: Synthetic oligonucleotide
  Target: LAMA2; (+) strand; PAM type: YTN; PAM sequence: TTT
ccatagtgttatgctctcct

SEQ ID NO: 399102 - DNA, 20 bp, Artificial Sequence
  Description of Artificial Sequence: Synthetic oligonucleotide
  Target: LAMA2; (+) strand; PAM type: YTN; PAM sequence: TTC
catagtgttatgctctccta

SEQ ID NO: 399103 - DNA, 20 bp, Artificial Sequence
  Description of Artificial Sequence: Synthetic oligonucleotide
  Target: LAMA2; (+) strand; PAM type: YTN; PAM sequence: TTA
tgctctcctaatttctcctt

SEQ ID NO: 399104 - DNA, 20 bp, Artificial Sequence
  Description of Artificial Sequence: Synthetic oligonucleotide
  Target: LAMA2; (+) strand; PAM type: YTN; PAM sequence: CTC
tcctaatttctccttttcct

SEQ ID NO: 399105 - DNA, 20 bp, Artificial Sequence
  Description of Artificial Sequence: Synthetic oligonucleotide
  Target: LAMA2; (+) strand; PAM type: YTN; PAM sequence: CTC
ctaatttctccttttcctct

SEQ ID NO: 399106 - DNA, 20 bp, Artificial Sequence
  Description of Artificial Sequence: Synthetic oligonucleotide
  Target: LAMA2; (+) strand; PAM type: YTN; PAM sequence: CTA
atttctccttttcctctgtg

SEQ ID NO: 399107 - DNA, 20 bp, Artificial Sequence
  Description of Artificial Sequence: Synthetic oligonucleotide
  Target: LAMA2; (+) strand; PAM type: YTN; PAM sequence: TTT
ctccttttcctctgtggaat

SEQ ID NO: 399108 - DNA, 20 bp, Artificial Sequence
  Description of Artificial Sequence: Synthetic oligonucleotide
  Target: LAMA2; (+) strand; PAM type: YTN; PAM sequence: TTC
tccttttcctctgtggaatg

SEQ ID NO: 399109 - DNA, 20 bp, Artificial Sequence
  Description of Artificial Sequence: Synthetic oligonucleotide
  Target: LAMA2; (+) strand; PAM type: YTN; PAM sequence: CTC
cttttcctctgtggaatgcc

SEQ ID NO: 399110 - DNA, 20 bp, Artificial Sequence
  Description of Artificial Sequence: Synthetic oligonucleotide
  Target: LAMA2; (+) strand; PAM type: YTN; PAM sequence: CTT
ttcctctgtggaatgccagt

SEQ ID NO: 399111 - DNA, 20 bp, Artificial Sequence
  Description of Artificial Sequence: Synthetic oligonucleotide
  Target: LAMA2; (+) strand; PAM type: YTN; PAM sequence: TTT
tcctctgtggaatgccagtc

SEQ ID NO: 399112 - DNA, 20 bp, Artificial Sequence
  Description of Artificial Sequence: Synthetic oligonucleotide
  Target: LAMA2; (+) strand; PAM type: YTN; PAM sequence: TTT
cctctgtggaatgccagtca

SEQ ID NO: 399113 - DNA, 20 bp, Artificial Sequence
  Description of Artificial Sequence: Synthetic oligonucleotide
  Target: LAMA2; (+) strand; PAM type: YTN; PAM sequence: TTC
ctctgtggaatgccagtcac

SEQ ID NO: 399114 - DNA, 20 bp, Artificial Sequence
  Description of Artificial Sequence: Synthetic oligonucleotide
  Target: LAMA2; (+) strand; PAM type: YTN; PAM sequence: CTC
tgtggaatgccagtcacctt

SEQ ID NO: 399115 - DNA, 20 bp, Artificial Sequence
  Description of Artificial Sequence: Synthetic oligonucleotide
  Target: LAMA2; (+) strand; PAM type: YTN; PAM sequence: CTG
tggaatgccagtcaccttgc

SEQ ID NO: 399116 - DNA, 20 bp, Artificial Sequence
  Description of Artificial Sequence: Synthetic oligonucleotide
  Target: LAMA2; (+) strand; PAM type: YTN; PAM sequence: CTT
gccagctccactttctctgc

SEQ ID NO: 399117 - DNA, 20 bp, Artificial Sequence
  Description of Artificial Sequence: Synthetic oligonucleotide
  Target: LAMA2; (+) strand; PAM type: YTN; PAM sequence: TTG
ccagctccactttctctgcc

SEQ ID NO: 399118 - DNA, 20 bp, Artificial Sequence
  Description of Artificial Sequence: Synthetic oligonucleotide
  Target: LAMA2; (+) strand; PAM type: YTN; PAM sequence: CTC
cactttctctgcctactccc

SEQ ID NO: 399119 - DNA, 20 bp, Artificial Sequence
  Description of Artificial Sequence: Synthetic oligonucleotide
  Target: LAMA2; (+) strand; PAM type: YTN; PAM sequence: CTT
tctctgcctactccctaaac

SEQ ID NO: 399120 - DNA, 20 bp, Artificial Sequence
  Description of Artificial Sequence: Synthetic oligonucleotide
  Target: LAMA2; (+) strand; PAM type: YTN; PAM sequence: TTT
ctctgcctactccctaaaca

SEQ ID NO: 399121 - DNA, 20 bp, Artificial Sequence
  Description of Artificial Sequence: Synthetic oligonucleotide
  Target: LAMA2; (+) strand; PAM type: YTN; PAM sequence: TTC
tctgcctactccctaaacat

SEQ ID NO: 399122 - DNA, 20 bp, Artificial Sequence
  Description of Artificial Sequence: Synthetic oligonucleotide
  Target: LAMA2; (+) strand; PAM type: YTN; PAM sequence: CTC
tgcctactccctaaacattg

SEQ ID NO: 399123 - DNA, 20 bp, Artificial Sequence
  Description of Artificial Sequence: Synthetic oligonucleotide
  Target: LAMA2; (+) strand; PAM type: YTN; PAM sequence: CTG
cctactccctaaacattgaa

SEQ ID NO: 399124 - DNA, 20 bp, Artificial Sequence
  Description of Artificial Sequence: Synthetic oligonucleotide
  Target: LAMA2; (+) strand; PAM type: YTN; PAM sequence: CTA
ctccctaaacattgaagttc

SEQ ID NO: 399125 - DNA, 20 bp, Artificial Sequence
  Description of Artificial Sequence: Synthetic oligonucleotide
  Target: LAMA2; (+) strand; PAM type: YTN; PAM sequence: CTC
cctaaacattgaagttccta

SEQ ID NO: 399126 - DNA, 20 bp, Artificial Sequence
  Description of Artificial Sequence: Synthetic oligonucleotide
  Target: LAMA2; (+) strand; PAM type: YTN; PAM sequence: CTA
aacattgaagttcctaagaa

SEQ ID NO: 399127 - DNA, 20 bp, Artificial Sequence
  Description of Artificial Sequence: Synthetic oligonucleotide
  Target: LAMA2; (+) strand; PAM type: YTN; PAM sequence: TTG
aagttcctaagaactctgtt

SEQ ID NO: 399128 - DNA, 20 bp, Artificial Sequence
  Description of Artificial Sequence: Synthetic oligonucleotide
  Target: LAMA2; (+) strand; PAM type: YTN; PAM sequence: TTC
ctaagaactctgttctagat

SEQ ID NO: 399129 - DNA, 20 bp, Artificial Sequence
  Description of Artificial Sequence: Synthetic oligonucleotide
  Target: LAMA2; (+) strand; PAM type: YTN; PAM sequence: CTA
agaactctgttctagatctt

SEQ ID NO: 399130 - DNA, 20 bp, Artificial Sequence
  Description of Artificial Sequence: Synthetic oligonucleotide
  Target: LAMA2; (+) strand; PAM type: YTN; PAM sequence: CTC
tgttctagatcttcttctca

SEQ ID NO: 399131 - DNA, 20 bp, Artificial Sequence
  Description of Artificial Sequence: Synthetic oligonucleotide
  Target: LAMA2; (+) strand; PAM type: YTN; PAM sequence: CTG
ttctagatcttcttctcata

SEQ ID NO: 399132 - DNA, 20 bp, Artificial Sequence
  Description of Artificial Sequence: Synthetic oligonucleotide
  Target: LAMA2; (+) strand; PAM type: YTN; PAM sequence: TTC
tagatcttcttctcataccg

SEQ ID NO: 399133 - DNA, 20 bp, Artificial Sequence
  Description of Artificial Sequence: Synthetic oligonucleotide
  Target: LAMA2; (+) strand; PAM type: YTN; PAM sequence: CTA
gatcttcttctcataccgta

SEQ ID NO: 399134 - DNA, 20 bp, Artificial Sequence
  Description of Artificial Sequence: Synthetic oligonucleotide
  Target: LAMA2; (+) strand; PAM type: YTN; PAM sequence: CTT
cttctcataccgtaataaac

SEQ ID NO: 399135 - DNA, 20 bp, Artificial Sequence
  Description of Artificial Sequence: Synthetic oligonucleotide
  Target: LAMA2; (+) strand; PAM type: YTN; PAM sequence: TTC
ttctcataccgtaataaaca

SEQ ID NO: 399136 - DNA, 20 bp, Artificial Sequence
  Description of Artificial Sequence: Synthetic oligonucleotide
  Target: LAMA2; (+) strand; PAM type: YTN; PAM sequence: CTT
ctcataccgtaataaacagt

SEQ ID NO: 399137 - DNA, 20 bp, Artificial Sequence
  Description of Artificial Sequence: Synthetic oligonucleotide
  Target: LAMA2; (+) strand; PAM type: YTN; PAM sequence: TTC
tcataccgtaataaacagtc

SEQ ID NO: 399138 - DNA, 20 bp, Artificial Sequence
  Description of Artificial Sequence: Synthetic oligonucleotide
  Target: LAMA2; (+) strand; PAM type: YTN; PAM sequence: CTC
ataccgtaataaacagtctc

SEQ ID NO: 399139 - DNA, 20 bp, Artificial Sequence
  Description of Artificial Sequence: Synthetic oligonucleotide
  Target: LAMA2; (+) strand; PAM type: YTN; PAM sequence: CTC
ctaactttaactaccgaata

SEQ ID NO: 399140 - DNA, 20 bp, Artificial Sequence
  Description of Artificial Sequence: Synthetic oligonucleotide
  Target: LAMA2; (+) strand; PAM type: YTN; PAM sequence: CTA
actttaactaccgaatatgt

SEQ ID NO: 399141 - DNA, 20 bp, Artificial Sequence
  Description of Artificial Sequence: Synthetic oligonucleotide
  Target: LAMA2; (+) strand; PAM type: YTN; PAM sequence: CTT
taactaccgaatatgtgcta

SEQ ID NO: 399142 - DNA, 20 bp, Artificial Sequence
  Description of Artificial Sequence: Synthetic oligonucleotide
  Target: LAMA2; (+) strand; PAM type: YTN; PAM sequence: TTT
aactaccgaatatgtgctaa

SEQ ID NO: 399143 - DNA, 20 bp, Artificial Sequence
  Description of Artificial Sequence: Synthetic oligonucleotide
  Target: LAMA2; (+) strand; PAM type: YTN; PAM sequence: TTA
actaccgaatatgtgctaat

SEQ ID NO: 399144 - DNA, 20 bp, Artificial Sequence
  Description of Artificial Sequence: Synthetic oligonucleotide
  Target: LAMA2; (+) strand; PAM type: YTN; PAM sequence: CTA
ccgaatatgtgctaataatt

SEQ ID NO: 399145 - DNA, 20 bp, Artificial Sequence
  Description of Artificial Sequence: Synthetic oligonucleotide
  Target: LAMA2; (+) strand; PAM type: YTN; PAM sequence: CTA
ataatttacaattctatatc

SEQ ID NO: 399146 - DNA, 20 bp, Artificial Sequence
  Description of Artificial Sequence: Synthetic oligonucleotide
  Target: LAMA2; (+) strand; PAM type: YTN; PAM sequence: TTT
acaattctatatctgcagcc

SEQ ID NO: 399147 - DNA, 20 bp, Artificial Sequence
  Description of Artificial Sequence: Synthetic oligonucleotide
  Target: LAMA2; (+) strand; PAM type: YTN; PAM sequence: TTA
caattctatatctgcagccc

SEQ ID NO: 399148 - DNA, 20 bp, Artificial Sequence
  Description of Artificial Sequence: Synthetic oligonucleotide
  Target: LAMA2; (+) strand; PAM type: YTN; PAM sequence: TTC
tatatctgcagcccagagct

SEQ ID NO: 399149 - DNA, 20 bp, Artificial Sequence
  Description of Artificial Sequence: Synthetic oligonucleotide
  Target: LAMA2; (+) strand; PAM type: YTN; PAM sequence: CTA
tatctgcagcccagagctct

SEQ ID NO: 399150 - DNA, 20 bp, Artificial Sequence
  Description of Artificial Sequence: Synthetic oligonucleotide
  Target: LAMA2; (+) strand; PAM type: YTN; PAM sequence: CTG
cagcccagagctctttccta

SEQ ID NO: 399151 - DNA, 20 bp, Artificial Sequence
  Description of Artificial Sequence: Synthetic oligonucleotide
  Target: LAMA2; (+) strand; PAM type: YTN; PAM sequence: CTC
tttcctaaaggcaaactctg

SEQ ID NO: 399152 - DNA, 20 bp, Artificial Sequence
  Description of Artificial Sequence: Synthetic oligonucleotide
  Target: LAMA2; (+) strand; PAM type: YTN; PAM sequence: CTT
tcctaaaggcaaactctgtg

SEQ ID NO: 399153 - DNA, 20 bp, Artificial Sequence
  Description of Artificial Sequence: Synthetic oligonucleotide
  Target: LAMA2; (+) strand; PAM type: YTN; PAM sequence: TTT
cctaaaggcaaactctgtgt

SEQ ID NO: 399154 - DNA, 20 bp, Artificial Sequence
  Description of Artificial Sequence: Synthetic oligonucleotide
  Target: LAMA2; (+) strand; PAM type: YTN; PAM sequence: TTC
ctaaaggcaaactctgtgta

SEQ ID NO: 399155 - DNA, 20 bp, Artificial Sequence
  Description of Artificial Sequence: Synthetic oligonucleotide
  Target: LAMA2; (+) strand; PAM type: YTN; PAM sequence: CTA
aaggcaaactctgtgtacca

SEQ ID NO: 399156 - DNA, 20 bp, Artificial Sequence
  Description of Artificial Sequence: Synthetic oligonucleotide
  Target: LAMA2; (+) strand; PAM type: YTN; PAM sequence: CTC
tgtgtaccaactgccttctg

SEQ ID NO: 399157 - DNA, 20 bp, Artificial Sequence
  Description of Artificial Sequence: Synthetic oligonucleotide
  Target: LAMA2; (+) strand; PAM type: YTN; PAM sequence: CTG
tgtaccaactgccttctgga

SEQ ID NO: 399158 - DNA, 20 bp, Artificial Sequence
  Description of Artificial Sequence: Synthetic oligonucleotide
  Target: LAMA2; (+) strand; PAM type: YTN; PAM sequence: CTG
ccttctggatccctccactc

SEQ ID NO: 399159 - DNA, 20 bp, Artificial Sequence
  Description of Artificial Sequence: Synthetic oligonucleotide
  Target: LAMA2; (+) strand; PAM type: YTN; PAM sequence: CTT
ctggatccctccactccatt

SEQ ID NO: 399160 - DNA, 20 bp, Artificial Sequence
  Description of Artificial Sequence: Synthetic oligonucleotide
  Target: LAMA2; (+) strand; PAM type: YTN; PAM sequence: TTC
tggatccctccactccatta

SEQ ID NO: 399161 - DNA, 20 bp, Artificial Sequence
  Description of Artificial Sequence: Synthetic oligonucleotide
  Target: LAMA2; (+) strand; PAM type: YTN; PAM sequence: CTG
gatccctccactccattatt

SEQ ID NO: 399162 - DNA, 20 bp, Artificial Sequence
  Description of Artificial Sequence: Synthetic oligonucleotide
  Target: LAMA2; (+) strand; PAM type: YTN; PAM sequence: CTC
cactccattattctatggtt

SEQ ID NO: 399163 - DNA, 20 bp, Artificial Sequence
  Description of Artificial Sequence: Synthetic oligonucleotide
  Target: LAMA2; (+) strand; PAM type: YTN; PAM sequence: CTC
cattattctatggttttaga

SEQ ID NO: 399164 - DNA, 20 bp, Artificial Sequence
  Description of Artificial Sequence: Synthetic oligonucleotide
  Target: LAMA2; (+) strand; PAM type: YTN; PAM sequence: TTA
ttctatggttttagatgtat

SEQ ID NO: 399165 - DNA, 20 bp, Artificial Sequence
  Description of Artificial Sequence: Synthetic oligonucleotide
  Target: LAMA2; (+) strand; PAM type: YTN; PAM sequence: TTC
tatggttttagatgtatgac

SEQ ID NO: 399166 - DNA, 20 bp, Artificial Sequence
  Description of Artificial Sequence: Synthetic oligonucleotide
  Target: LAMA2; (+) strand; PAM type: YTN; PAM sequence: CTA
tggttttagatgtatgacat

SEQ ID NO: 399167 - DNA, 20 bp, Artificial Sequence
  Description of Artificial Sequence: Synthetic oligonucleotide
  Target: LAMA2; (+) strand; PAM type: YTN; PAM sequence: TTT
tagatgtatgacatttgttt

SEQ ID NO: 399168 - DNA, 20 bp, Artificial Sequence
  Description of Artificial Sequence: Synthetic oligonucleotide
  Target: LAMA2; (+) strand; PAM type: YTN; PAM sequence: TTT
agatgtatgacatttgtttt

SEQ ID NO: 399169 - DNA, 20 bp, Artificial Sequence
  Description of Artificial Sequence: Synthetic oligonucleotide
  Target: LAMA2; (+) strand; PAM type: YTN; PAM sequence: TTA
gatgtatgacatttgttttt

SEQ ID NO: 399170 - DNA, 20 bp, Artificial Sequence
  Description of Artificial Sequence: Synthetic oligonucleotide
  Target: LAMA2; (+) strand; PAM type: YTN; PAM sequence: TTT
gtttttctgtccacaggcaa

SEQ ID NO: 399171 - DNA, 20 bp, Artificial Sequence
  Description of Artificial Sequence: Synthetic oligonucleotide
  Target: LAMA2; (+) strand; PAM type: YTN; PAM sequence: TTG
tttttctgtccacaggcaac

SEQ ID NO: 399172 - DNA, 20 bp, Artificial Sequence
  Description of Artificial Sequence: Synthetic oligonucleotide
  Target: LAMA2; (+) strand; PAM type: YTN; PAM sequence: TTT
ttctgtccacaggcaacagg

SEQ ID NO: 399173 - DNA, 20 bp, Artificial Sequence
  Description of Artificial Sequence: Synthetic oligonucleotide
  Target: LAMA2; (+) strand; PAM type: YTN; PAM sequence: TTT
tctgtccacaggcaacaggt

SEQ ID NO: 399174 - DNA, 20 bp, Artificial Sequence
  Description of Artificial Sequence: Synthetic oligonucleotide
  Target: LAMA2; (+) strand; PAM type: YTN; PAM sequence: TTT
ctgtccacaggcaacaggtc

SEQ ID NO: 399175 - DNA, 20 bp, Artificial Sequence
  Description of Artificial Sequence: Synthetic oligonucleotide
  Target: LAMA2; (+) strand; PAM type: YTN; PAM sequence: TTC
tgtccacaggcaacaggtcc

SEQ ID NO: 399176 - DNA, 20 bp, Artificial Sequence
  Description of Artificial Sequence: Synthetic oligonucleotide
  Target: LAMA2; (+) strand; PAM type: YTN; PAM sequence: CTG
tccacaggcaacaggtcctc

SEQ ID NO: 399177 - DNA, 20 bp, Artificial Sequence
  Description of Artificial Sequence: Synthetic oligonucleotide
  Target: LAMA2; (+) strand; PAM type: YTN; PAM sequence: CTC
ggggtttattaaaggaagat

SEQ ID NO: 399178 - DNA, 20 bp, Artificial Sequence
  Description of Artificial Sequence: Synthetic oligonucleotide
  Target: LAMA2; (+) strand; PAM type: YTN; PAM sequence: TTT
attaaaggaagatgccaaag

SEQ ID NO: 399179 - DNA, 20 bp, Artificial Sequence
  Description of Artificial Sequence: Synthetic oligonucleotide
  Target: LAMA2; (+) strand; PAM type: YTN; PAM sequence: TTA
ttaaaggaagatgccaaagg

SEQ ID NO: 399180 - DNA, 20 bp, Artificial Sequence
  Description of Artificial Sequence: Synthetic oligonucleotide
  Target: LAMA2; (+) strand; PAM type: YTN; PAM sequence: TTA
aaggaagatgccaaaggctg

SEQ ID NO: 399181 - DNA, 20 bp, Artificial Sequence
  Description of Artificial Sequence: Synthetic oligonucleotide
  Target: LAMA2; (+) strand; PAM type: YTN; PAM sequence: CTG
tcttcagaaaagcttcagga

SEQ ID NO: 399182 - DNA, 20 bp, Artificial Sequence
  Description of Artificial Sequence: Synthetic oligonucleotide
  Target: LAMA2; (+) strand; PAM type: YTN; PAM sequence: CTT
cagaaaagcttcaggattct

SEQ ID NO: 399183 - DNA, 20 bp, Artificial Sequence
  Description of Artificial Sequence: Synthetic oligonucleotide
  Target: LAMA2; (+) strand; PAM type: YTN; PAM sequence: TTC
agaaaagcttcaggattctt

SEQ ID NO: 399184 - DNA, 20 bp, Artificial Sequence
  Description of Artificial Sequence: Synthetic oligonucleotide
  Target: LAMA2; (+) strand; PAM type: YTN; PAM sequence: CTT
caggattcttaacgaagcca

SEQ ID NO: 399185 - DNA, 20 bp, Artificial Sequence
  Description of Artificial Sequence: Synthetic oligonucleotide
  Target: LAMA2; (+) strand; PAM type: YTN; PAM sequence: TTC
aggattcttaacgaagccaa

SEQ ID NO: 399186 - DNA, 20 bp, Artificial Sequence
  Description of Artificial Sequence: Synthetic oligonucleotide
  Target: LAMA2; (+) strand; PAM type: YTN; PAM sequence: TTC
ttaacgaagccaagaagtta

SEQ ID NO: 399187 - DNA, 20 bp, Artificial Sequence
  Description of Artificial Sequence: Synthetic oligonucleotide
  Target: LAMA2; (+) strand; PAM type: YTN; PAM sequence: CTT
aacgaagccaagaagttagc

SEQ ID NO: 399188 - DNA, 20 bp, Artificial Sequence
  Description of Artificial Sequence: Synthetic oligonucleotide
  Target: LAMA2; (+) strand; PAM type: YTN; PAM sequence: TTA
acgaagccaagaagttagca

SEQ ID NO: 399189 - DNA, 20 bp, Artificial Sequence
  Description of Artificial Sequence: Synthetic oligonucleotide
  Target: LAMA2; (+) strand; PAM type: YTN; PAM sequence: TTA
gcaaatgatgtaaaaggtca

SEQ ID NO: 399190 - DNA, 20 bp, Artificial Sequence
  Description of Artificial Sequence: Synthetic oligonucleotide
  Target: LAMA2; (+) strand; PAM type: YTN; PAM sequence: TTT
ttattatattccagttaatc

SEQ ID NO: 399191 - DNA, 20 bp, Artificial Sequence
  Description of Artificial Sequence: Synthetic oligonucleotide
  Target: LAMA2; (+) strand; PAM type: YTN; PAM sequence: TTT
tattatattccagttaatcg

SEQ ID NO: 399192 - DNA, 20 bp, Artificial Sequence
  Description of Artificial Sequence: Synthetic oligonucleotide
  Target: LAMA2; (+) strand; PAM type: YTN; PAM sequence: TTT
attatattccagttaatcgg

SEQ ID NO: 399193 - DNA, 20 bp, Artificial Sequence
  Description of Artificial Sequence: Synthetic oligonucleotide
  Target: LAMA2; (+) strand; PAM type: YTN; PAM sequence: TTA
ttatattccagttaatcggg

SEQ ID NO: 399194 - DNA, 20 bp, Artificial Sequence
  Description of Artificial Sequence: Synthetic oligonucleotide
  Target: LAMA2; (+) strand; PAM type: YTN; PAM sequence: TTA
tattccagttaatcgggttg

SEQ ID NO: 399195 - DNA, 20 bp, Artificial Sequence
  Description of Artificial Sequence: Synthetic oligonucleotide
  Target: LAMA2; (+) strand; PAM type: YTN; PAM sequence: TTC
cagttaatcgggttgttact

SEQ ID NO: 399196 - DNA, 20 bp, Artificial Sequence
  Description of Artificial Sequence: Synthetic oligonucleotide
  Target: LAMA2; (+) strand; PAM type: YTN; PAM sequence: TTA
atcgggttgttactgataag

SEQ ID NO: 399197 - DNA, 20 bp, Artificial Sequence
  Description of Artificial Sequence: Synthetic oligonucleotide
  Target: LAMA2; (+) strand; PAM type: YTN; PAM sequence: TTG
ttactgataagatattctat

SEQ ID NO: 399198 - DNA, 20 bp, Artificial Sequence
  Description of Artificial Sequence: Synthetic oligonucleotide
  Target: LAMA2; (+) strand; PAM type: YTN; PAM sequence: TTA
ctgataagatattctatcac

SEQ ID NO: 399199 - DNA, 20 bp, Artificial Sequence
  Description of Artificial Sequence: Synthetic oligonucleotide
  Target: LAMA2; (+) strand; PAM type: YTN; PAM sequence: CTG
ataagatattctatcacact

SEQ ID NO: 399200 - DNA, 20 bp, Artificial Sequence
  Description of Artificial Sequence: Synthetic oligonucleotide
  Target: LAMA2; (+) strand; PAM type: YTN; PAM sequence: TTC
tatcacactattggagaatg

SEQ ID NO: 399201 - DNA, 20 bp, Artificial Sequence
  Description of Artificial Sequence: Synthetic oligonucleotide
  Target: LAMA2; (+) strand; PAM type: YTN; PAM sequence: CTA
tcacactattggagaatgta

SEQ ID NO: 399202 - DNA, 20 bp, Artificial Sequence
  Description of Artificial Sequence: Synthetic oligonucleotide
  Target: LAMA2; (+) strand; PAM type: YTN; PAM sequence: CTA
ttggagaatgtaatttcttt

SEQ ID NO: 399203 - DNA, 20 bp, Artificial Sequence
  Description of Artificial Sequence: Synthetic oligonucleotide
  Target: LAMA2; (+) strand; PAM type: YTN; PAM sequence: TTG
gagaatgtaatttctttagc

SEQ ID NO: 399204 - DNA, 20 bp, Artificial Sequence
  Description of Artificial Sequence: Synthetic oligonucleotide
  Target: LAMA2; (+) strand; PAM type: YTN; PAM sequence: TTT
ctttagcatgatttttgtga

SEQ ID NO: 399205 - DNA, 20 bp, Artificial Sequence
  Description of Artificial Sequence: Synthetic oligonucleotide
  Target: LAMA2; (+) strand; PAM type: YTN; PAM sequence: TTC
tttagcatgatttttgtgat

SEQ ID NO: 399206 - DNA, 20 bp, Artificial Sequence
  Description of Artificial Sequence: Synthetic oligonucleotide
  Target: LAMA2; (+) strand; PAM type: YTN; PAM sequence: CTT
tagcatgatttttgtgatga

SEQ ID NO: 399207 - DNA, 20 bp, Artificial Sequence
  Description of Artificial Sequence: Synthetic oligonucleotide
  Target: LAMA2; (+) strand; PAM type: YTN; PAM sequence: TTT
agcatgatttttgtgatgat

SEQ ID NO: 399208 - DNA, 20 bp, Artificial Sequence
  Description of Artificial Sequence: Synthetic oligonucleotide
  Target: LAMA2; (+) strand; PAM type: YTN; PAM sequence: TTA
gcatgatttttgtgatgatt

SEQ ID NO: 399209 - DNA, 20 bp, Artificial Sequence
  Description of Artificial Sequence: Synthetic oligonucleotide
  Target: LAMA2; (+) strand; PAM type: YTN; PAM sequence: TTT
ttgtgatgattctataatct

SEQ ID NO: 399210 - DNA, 20 bp, Artificial Sequence
  Description of Artificial Sequence: Synthetic oligonucleotide
  Target: LAMA2; (+) strand; PAM type: YTN; PAM sequence: TTT
tgtgatgattctataatcta

SEQ ID NO: 399211 - DNA, 20 bp, Artificial Sequence
  Description of Artificial Sequence: Synthetic oligonucleotide
  Target: LAMA2; (+) strand; PAM type: YTN; PAM sequence: TTT
gtgatgattctataatctat

SEQ ID NO: 399212 - DNA, 20 bp, Artificial Sequence
  Description of Artificial Sequence: Synthetic oligonucleotide
  Target: LAMA2; (+) strand; PAM type: YTN; PAM sequence: TTG
tgatgattctataatctatt

SEQ ID NO: 399213 - DNA, 20 bp, Artificial Sequence
  Description of Artificial Sequence: Synthetic oligonucleotide
  Target: LAMA2; (+) strand; PAM type: YTN; PAM sequence: TTC
tataatctatttaatgcaag

SEQ ID NO: 399214 - DNA, 20 bp, Artificial Sequence
  Description of Artificial Sequence: Synthetic oligonucleotide
  Target: LAMA2; (+) strand; PAM type: YTN; PAM sequence: CTA
taatctatttaatgcaagta

SEQ ID NO: 399215 - DNA, 20 bp, Artificial Sequence
  Description of Artificial Sequence: Synthetic oligonucleotide
  Target: LAMA2; (+) strand; PAM type: YTN; PAM sequence: CTA
tttaatgcaagtaaactttc

SEQ ID NO: 399216 - DNA, 20 bp, Artificial Sequence
  Description of Artificial Sequence: Synthetic oligonucleotide
  Target: LAMA2; (+) strand; PAM type: YTN; PAM sequence: TTT
aatgcaagtaaactttctca

SEQ ID NO: 399217 - DNA, 20 bp, Artificial Sequence
  Description of Artificial Sequence: Synthetic oligonucleotide
  Target: LAMA2; (+) strand; PAM type: YTN; PAM sequence: TTA
atgcaagtaaactttctcac

SEQ ID NO: 399218 - DNA, 20 bp, Artificial Sequence
  Description of Artificial Sequence: Synthetic oligonucleotide
  Target: LAMA2; (+) strand; PAM type: YTN; PAM sequence: CTT
tctcactagttttacaaaat

SEQ ID NO: 399219 - DNA, 20 bp, Artificial Sequence
  Description of Artificial Sequence: Synthetic oligonucleotide
  Target: LAMA2; (+) strand; PAM type: YTN; PAM sequence: TTT
ctcactagttttacaaaatg

SEQ ID NO: 399220 - DNA, 20 bp, Artificial Sequence
  Description of Artificial Sequence: Synthetic oligonucleotide
  Target: LAMA2; (+) strand; PAM type: YTN; PAM sequence: TTC
tcactagttttacaaaatgt

SEQ ID NO: 399221 - DNA, 20 bp, Artificial Sequence
  Description of Artificial Sequence: Synthetic oligonucleotide
  Target: LAMA2; (+) strand; PAM type: YTN; PAM sequence: CTC
actagttttacaaaatgttg

SEQ ID NO: 399222 - DNA, 20 bp, Artificial Sequence
  Description of Artificial Sequence: Synthetic oligonucleotide
  Target: LAMA2; (+) strand; PAM type: YTN; PAM sequence: CTA
gttttacaaaatgttgtcta

SEQ ID NO: 399223 - DNA, 20 bp, Artificial Sequence
  Description of Artificial Sequence: Synthetic oligonucleotide
  Target: LAMA2; (+) strand; PAM type: YTN; PAM sequence: TTT
tacaaaatgttgtctaccta

SEQ ID NO: 399224 - DNA, 20 bp, Artificial Sequence
  Description of Artificial Sequence: Synthetic oligonucleotide
  Target: LAMA2; (+) strand; PAM type: YTN; PAM sequence: TTT
acaaaatgttgtctacctat

SEQ ID NO: 399225 - DNA, 20 bp, Artificial Sequence
  Description of Artificial Sequence: Synthetic oligonucleotide
  Target: LAMA2; (+) strand; PAM type: YTN; PAM sequence: TTA
caaaatgttgtctacctatc

SEQ ID NO: 399226 - DNA, 20 bp, Artificial Sequence
  Description of Artificial Sequence: Synthetic oligonucleotide
  Target: LAMA2; (+) strand; PAM type: YTN; PAM sequence: TTG
tctacctatctcacttcaag

SEQ ID NO: 399227 - DNA, 20 bp, Artificial Sequence
  Description of Artificial Sequence: Synthetic oligonucleotide
  Target: LAMA2; (+) strand; PAM type: YTN; PAM sequence: CTA
cctatctcacttcaagtagg

SEQ ID NO: 399228 - DNA, 20 bp, Artificial Sequence
  Description of Artificial Sequence: Synthetic oligonucleotide
  Target: LAMA2; (+) strand; PAM type: YTN; PAM sequence: CTA
tctcacttcaagtagggtaa

SEQ ID NO: 399229 - DNA, 20 bp, Artificial Sequence
  Description of Artificial Sequence: Synthetic oligonucleotide
  Target: LAMA2; (+) strand; PAM type: YTN; PAM sequence: CTC
acttcaagtagggtaatatc

SEQ ID NO: 399230 - DNA, 20 bp, Artificial Sequence
  Description of Artificial Sequence: Synthetic oligonucleotide
  Target: LAMA2; (+) strand; PAM type: YTN; PAM sequence: CTT
caagtagggtaatatctcat

SEQ ID NO: 399231 - DNA, 20 bp, Artificial Sequence
  Description of Artificial Sequence: Synthetic oligonucleotide
  Target: LAMA2; (+) strand; PAM type: YTN; PAM sequence: TTC
aagtagggtaatatctcata

SEQ ID NO: 399232 - DNA, 20 bp, Artificial Sequence
  Description of Artificial Sequence: Synthetic oligonucleotide
  Target: LAMA2; (+) strand; PAM type: YTN; PAM sequence: CTC
ataatttgtaagtcttattt

SEQ ID NO: 399233 - DNA, 20 bp, Artificial Sequence
  Description of Artificial Sequence: Synthetic oligonucleotide
  Target: LAMA2; (+) strand; PAM type: YTN; PAM sequence: TTT
gtaagtcttatttctatagc

SEQ ID NO: 399234 - DNA, 20 bp, Artificial Sequence
  Description of Artificial Sequence: Synthetic oligonucleotide
  Target: LAMA2; (+) strand; PAM type: YTN; PAM sequence: TTG
taagtcttatttctatagca

SEQ ID NO: 399235 - DNA, 20 bp, Artificial Sequence
  Description of Artificial Sequence: Synthetic oligonucleotide
  Target: LAMA2; (+) strand; PAM type: YTN; PAM sequence: CTT
atttctatagcatcacttca

SEQ ID NO: 399236 - DNA, 20 bp, Artificial Sequence
  Description of Artificial Sequence: Synthetic oligonucleotide
  Target: LAMA2; (+) strand; PAM type: YTN; PAM sequence: TTA
tttctatagcatcacttcac

SEQ ID NO: 399237 - DNA, 20 bp, Artificial Sequence
  Description of Artificial Sequence: Synthetic oligonucleotide
  Target: LAMA2; (+) strand; PAM type: YTN; PAM sequence: TTT
ctatagcatcacttcaccta

SEQ ID NO: 399238 - DNA, 20 bp, Artificial Sequence
  Description of Artificial Sequence: Synthetic oligonucleotide
  Target: LAMA2; (+) strand; PAM type: YTN; PAM sequence: TTC
tatagcatcacttcacctat

SEQ ID NO: 399239 - DNA, 20 bp, Artificial Sequence
  Description of Artificial Sequence: Synthetic oligonucleotide
  Target: LAMA2; (+) strand; PAM type: YTN; PAM sequence: CTA
tagcatcacttcacctatat

SEQ ID NO: 399240 - DNA, 20 bp, Artificial Sequence
  Description of Artificial Sequence: Synthetic oligonucleotide
  Target: LAMA2; (+) strand; PAM type: YTN; PAM sequence: CTT
cacctatatctaatgtatag

SEQ ID NO: 399241 - DNA, 20 bp, Artificial Sequence
  Description of Artificial Sequence: Synthetic oligonucleotide
  Target: LAMA2; (+) strand; PAM type: YTN; PAM sequence: TTC
acctatatctaatgtatagt

SEQ ID NO: 399242 - DNA, 20 bp, Artificial Sequence
  Description of Artificial Sequence: Synthetic oligonucleotide
  Target: LAMA2; (+) strand; PAM type: YTN; PAM sequence: CTA
tatctaatgtatagtaactt

SEQ ID NO: 399243 - DNA, 20 bp, Artificial Sequence
  Description of Artificial Sequence: Synthetic oligonucleotide
  Target: LAMA2; (+) strand; PAM type: YTN; PAM sequence: CTA
atgtatagtaacttttagtg

SEQ ID NO: 399244 - DNA, 20 bp, Artificial Sequence
  Description of Artificial Sequence: Synthetic oligonucleotide
  Target: LAMA2; (+) strand; PAM type: YTN; PAM sequence: CTT
ttagtgtaataagtttttaa

SEQ ID NO: 399245 - DNA, 20 bp, Artificial Sequence
  Description of Artificial Sequence: Synthetic oligonucleotide
  Target: LAMA2; (+) strand; PAM type: YTN; PAM sequence: TTT
tagtgtaataagtttttaag

SEQ ID NO: 399246 - DNA, 20 bp, Artificial Sequence
  Description of Artificial Sequence: Synthetic oligonucleotide
  Target: LAMA2; (+) strand; PAM type: YTN; PAM sequence: TTT
agtgtaataagtttttaaga

SEQ ID NO: 399247 - DNA, 20 bp, Artificial Sequence
  Description of Artificial Sequence: Synthetic oligonucleotide
  Target: LAMA2; (+) strand; PAM type: YTN; PAM sequence: TTA
gtgtaataagtttttaagag

SEQ ID NO: 399248 - DNA, 20 bp, Artificial Sequence
  Description of Artificial Sequence: Synthetic oligonucleotide
  Target: LAMA2; (+) strand; PAM type: YTN; PAM sequence: TTT
ttaagagtatcaaacccagg

SEQ ID NO: 399249 - DNA, 20 bp, Artificial Sequence
  Description of Artificial Sequence: Synthetic oligonucleotide
  Target: LAMA2; (+) strand; PAM type: YTN; PAM sequence: TTT
taagagtatcaaacccaggc

SEQ ID NO: 399250 - DNA, 20 bp, Artificial Sequence
  Description of Artificial Sequence: Synthetic oligonucleotide
  Target: LAMA2; (+) strand; PAM type: YTN; PAM sequence: TTT
aagagtatcaaacccaggcc

SEQ ID NO: 399251 - DNA, 20 bp, Artificial Sequence
  Description of Artificial Sequence: Synthetic oligonucleotide
  Target: LAMA2; (+) strand; PAM type: YTN; PAM sequence: TTA
agagtatcaaacccaggcca

SEQ ID NO: 399252 - DNA, 20 bp, Artificial Sequence
  Description of Artificial Sequence: Synthetic oligonucleotide
  Target: LAMA2; (+) strand; PAM type: YTN; PAM sequence: CTC
acacctgtgattctagtgct

SEQ ID NO: 399253 - DNA, 20 bp, Artificial Sequence
  Description of Artificial Sequence: Synthetic oligonucleotide
  Target: LAMA2; (+) strand; PAM type: YTN; PAM sequence: CTG
tgattctagtgcttagggag

SEQ ID NO: 399254 - DNA, 20 bp, Artificial Sequence
  Description of Artificial Sequence: Synthetic oligonucleotide
  Target: LAMA2; (+) strand; PAM type: YTN; PAM sequence: TTC
tagtgcttagggaggccgag

SEQ ID NO: 399255 - DNA, 20 bp, Artificial Sequence
  Description of Artificial Sequence: Synthetic oligonucleotide
  Target: LAMA2; (+) strand; PAM type: YTN; PAM sequence: CTA
gtgcttagggaggccgaggc

SEQ ID NO: 399256 - DNA, 20 bp, Artificial Sequence
  Description of Artificial Sequence: Synthetic oligonucleotide
  Target: LAMA2; (+) strand; PAM type: YTN; PAM sequence: CTT
agggaggccgaggcaggagg

SEQ ID NO: 399257 - DNA, 20 bp, Artificial Sequence
  Description of Artificial Sequence: Synthetic oligonucleotide
  Target: LAMA2; (+) strand; PAM type: YTN; PAM sequence: TTA
gggaggccgaggcaggagga

SEQ ID NO: 399258 - DNA, 20 bp, Artificial Sequence
  Description of Artificial Sequence: Synthetic oligonucleotide
  Target: LAMA2; (+) strand; PAM type: YTN; PAM sequence: CTT
ggtgccaagaatttgagacc

SEQ ID NO: 399259 - DNA, 20 bp, Artificial Sequence
  Description of Artificial Sequence: Synthetic oligonucleotide
  Target: LAMA2; (+) strand; PAM type: YTN; PAM sequence: TTG
gtgccaagaatttgagacca

SEQ ID NO: 399260 - DNA, 20 bp, Artificial Sequence
  Description of Artificial Sequence: Synthetic oligonucleotide
  Target: LAMA2; (+) strand; PAM type: YTN; PAM sequence: TTT
gagaccagccggggaaacat

SEQ ID NO: 399261 - DNA, 20 bp, Artificial Sequence
  Description of Artificial Sequence: Synthetic oligonucleotide
  Target: LAMA2; (+) strand; PAM type: YTN; PAM sequence: TTG
agaccagccggggaaacata

SEQ ID NO: 399262 - DNA, 20 bp, Artificial Sequence
  Description of Artificial Sequence: Synthetic oligonucleotide
  Target: LAMA2; (+) strand; PAM type: YTN; PAM sequence: CTG
tctctacaaaacatttttta

SEQ ID NO: 399263 - DNA, 20 bp, Artificial Sequence
  Description of Artificial Sequence: Synthetic oligonucleotide
  Target: LAMA2; (+) strand; PAM type: YTN; PAM sequence: CTC
tacaaaacattttttaaaaa

SEQ ID NO: 399264 - DNA, 20 bp, Artificial Sequence
  Description of Artificial Sequence: Synthetic oligonucleotide
  Target: LAMA2; (+) strand; PAM type: YTN; PAM sequence: CTA
caaaacattttttaaaaatt

SEQ ID NO: 399265 - DNA, 20 bp, Artificial Sequence
  Description of Artificial Sequence: Synthetic oligonucleotide
  Target: LAMA2; (+) strand; PAM type: YTN; PAM sequence: TTT
tttaaaaatttagtcaggtg

SEQ ID NO: 399266 - DNA, 20 bp, Artificial Sequence
  Description of Artificial Sequence: Synthetic oligonucleotide
  Target: LAMA2; (+) strand; PAM type: YTN; PAM sequence: TTT
ttaaaaatttagtcaggtgt

SEQ ID NO: 399267 - DNA, 20 bp, Artificial Sequence
  Description of Artificial Sequence: Synthetic oligonucleotide
  Target: LAMA2; (+) strand; PAM type: YTN; PAM sequence: TTT
taaaaatttagtcaggtgta

SEQ ID NO: 399268 - DNA, 20 bp, Artificial Sequence
  Description of Artificial Sequence: Synthetic oligonucleotide
  Target: LAMA2; (+) strand; PAM type: YTN; PAM sequence: TTT
aaaaatttagtcaggtgtag

SEQ ID NO: 399269 - DNA, 20 bp, Artificial Sequence
  Description of Artificial Sequence: Synthetic oligonucleotide
  Target: LAMA2; (+) strand; PAM type: YTN; PAM sequence: TTA
aaaatttagtcaggtgtagc

SEQ ID NO: 399270 - DNA, 20 bp, Artificial Sequence
  Description of Artificial Sequence: Synthetic oligonucleotide
  Target: LAMA2; (+) strand; PAM type: YTN; PAM sequence: TTT
agtcaggtgtagcagcgtga

SEQ ID NO: 399271 - DNA, 20 bp, Artificial Sequence
  Description of Artificial Sequence: Synthetic oligonucleotide
  Target: LAMA2; (+) strand; PAM type: YTN; PAM sequence: TTA
gtcaggtgtagcagcgtgag

SEQ ID NO: 399272 - DNA, 20 bp, Artificial Sequence
  Description of Artificial Sequence: Synthetic oligonucleotide
  Target: LAMA2; (+) strand; PAM type: YTN; PAM sequence: CTA
cttggaaggctgagccagga

SEQ ID NO: 399273 - DNA, 20 bp, Artificial Sequence
  Description of Artificial Sequence: Synthetic oligonucleotide
  Target: LAMA2; (+) strand; PAM type: YTN; PAM sequence: CTT
ggaaggctgagccaggagga

SEQ ID NO: 399274 - DNA, 20 bp, Artificial Sequence
  Description of Artificial Sequence: Synthetic oligonucleotide
  Target: LAMA2; (+) strand; PAM type: YTN; PAM sequence: TTG
gaaggctgagccaggaggat

SEQ ID NO: 399275 - DNA, 20 bp, Artificial Sequence
  Description of Artificial Sequence: Synthetic oligonucleotide
  Target: LAMA2; (+) strand; PAM type: YTN; PAM sequence: CTG
agccaggaggatcgctttag

SEQ ID NO: 399276 - DNA, 20 bp, Artificial Sequence
  Description of Artificial Sequence: Synthetic oligonucleotide
  Target: LAMA2; (+) strand; PAM type: YTN; PAM sequence: CTT
tagcccaggggcgtgaagtt

SEQ ID NO: 399277 - DNA, 20 bp, Artificial Sequence
  Description of Artificial Sequence: Synthetic oligonucleotide
  Target: LAMA2; (+) strand; PAM type: YTN; PAM sequence: TTT
agcccaggggcgtgaagtta

SEQ ID NO: 399278 - DNA, 20 bp, Artificial Sequence
  Description of Artificial Sequence: Synthetic oligonucleotide
  Target: LAMA2; (+) strand; PAM type: YTN; PAM sequence: TTA
gcccaggggcgtgaagttac

SEQ ID NO: 399279 - DNA, 20 bp, Artificial Sequence
  Description of Artificial Sequence: Synthetic oligonucleotide
  Target: LAMA2; (+) strand; PAM type: YTN; PAM sequence: TTA
ccgtgagttgtgatcacact

SEQ ID NO: 399280 - DNA, 20 bp, Artificial Sequence
  Description of Artificial Sequence: Synthetic oligonucleotide
  Target: LAMA2; (+) strand; PAM type: YTN; PAM sequence: TTG
tgatcacactactgtacacc

SEQ ID NO: 399281 - DNA, 20 bp, Artificial Sequence
  Description of Artificial Sequence: Synthetic oligonucleotide
  Target: LAMA2; (+) strand; PAM type: YTN; PAM sequence: CTA
ctgtacaccagcctgggtaa

SEQ ID NO: 399282 - DNA, 20 bp, Artificial Sequence
  Description of Artificial Sequence: Synthetic oligonucleotide
  Target: LAMA2; (+) strand; PAM type: YTN; PAM sequence: CTG
tacaccagcctgggtaacag

SEQ ID NO: 399283 - DNA, 20 bp, Artificial Sequence
  Description of Artificial Sequence: Synthetic oligonucleotide
  Target: LAMA2; (+) strand; PAM type: YTN; PAM sequence: CTG
ggtaacagagtaagatcctg

SEQ ID NO: 399284 - DNA, 20 bp, Artificial Sequence
  Description of Artificial Sequence: Synthetic oligonucleotide
  Target: LAMA2; (+) strand; PAM type: YTN; PAM sequence: CTG
tctctaaaaagaaaaacaaa

SEQ ID NO: 399285 - DNA, 20 bp, Artificial Sequence
  Description of Artificial Sequence: Synthetic oligonucleotide
  Target: LAMA2; (+) strand; PAM type: YTN; PAM sequence: CTC
taaaaagaaaaacaaaatta

SEQ ID NO: 399286 - DNA, 20 bp, Artificial Sequence
  Description of Artificial Sequence: Synthetic oligonucleotide
  Target: LAMA2; (+) strand; PAM type: YTN; PAM sequence: CTA
aaaagaaaaacaaaattaaa

SEQ ID NO: 399287 - DNA, 20 bp, Artificial Sequence
  Description of Artificial Sequence: Synthetic oligonucleotide
  Target: LAMA2; (+) strand; PAM type: YTN; PAM sequence: TTA
aatacatttttctttttctg

SEQ ID NO: 399288 - DNA, 20 bp, Artificial Sequence
  Description of Artificial Sequence: Synthetic oligonucleotide
  Target: LAMA2; (+) strand; PAM type: YTN; PAM sequence: TTT
ttctttttctgagatgaagt

SEQ ID NO: 399289 - DNA, 20 bp, Artificial Sequence
  Description of Artificial Sequence: Synthetic oligonucleotide
  Target: LAMA2; (+) strand; PAM type: YTN; PAM sequence: TTT
tctttttctgagatgaagtc

SEQ ID NO: 399290 - DNA, 20 bp, Artificial Sequence
  Description of Artificial Sequence: Synthetic oligonucleotide
  Target: LAMA2; (+) strand; PAM type: YTN; PAM sequence: TTT
ctttttctgagatgaagtct

SEQ ID NO: 399291 - DNA, 20 bp, Artificial Sequence
  Description of Artificial Sequence: Synthetic oligonucleotide
  Target: LAMA2; (+) strand; PAM type: YTN; PAM sequence: TTC
tttttctgagatgaagtctc

SEQ ID NO: 399292 - DNA, 20 bp, Artificial Sequence
  Description of Artificial Sequence: Synthetic oligonucleotide
  Target: LAMA2; (+) strand; PAM type: YTN; PAM sequence: CTT
tttctgagatgaagtctcgc

SEQ ID NO: 399293 - DNA, 20 bp, Artificial Sequence
  Description of Artificial Sequence: Synthetic oligonucleotide
  Target: LAMA2; (+) strand; PAM type: YTN; PAM sequence: TTT
ttctgagatgaagtctcgct

SEQ ID NO: 399294 - DNA, 20 bp, Artificial Sequence
  Description of Artificial Sequence: Synthetic oligonucleotide
  Target: LAMA2; (+) strand; PAM type: YTN; PAM sequence: TTT
tctgagatgaagtctcgctc

SEQ ID NO: 399295 - DNA, 20 bp, Artificial Sequence
  Description of Artificial Sequence: Synthetic oligonucleotide
  Target: LAMA2; (+) strand; PAM type: YTN; PAM sequence: TTT
ctgagatgaagtctcgctct

SEQ ID NO: 399296 - DNA, 20 bp, Artificial Sequence
  Description of Artificial Sequence: Synthetic oligonucleotide
  Target: LAMA2; (+) strand; PAM type: YTN; PAM sequence: TTC
tgagatgaagtctcgctctg

SEQ ID NO: 399297 - DNA, 20 bp, Artificial Sequence
  Description of Artificial Sequence: Synthetic oligonucleotide
  Target: LAMA2; (+) strand; PAM type: YTN; PAM sequence: CTG
agatgaagtctcgctctgtc

SEQ ID NO: 399298 - DNA, 20 bp, Artificial Sequence
  Description of Artificial Sequence: Synthetic oligonucleotide
  Target: LAMA2; (+) strand; PAM type: YTN; PAM sequence: CTC
gctctgtcaaccaggctgga

SEQ ID NO: 399299 - DNA, 20 bp, Artificial Sequence
  Description of Artificial Sequence: Synthetic oligonucleotide
  Target: LAMA2; (+) strand; PAM type: YTN; PAM sequence: CTC
tgtcaaccaggctggagtgc

SEQ ID NO: 399300 - DNA, 20 bp, Artificial Sequence
  Description of Artificial Sequence: Synthetic oligonucleotide
  Target: LAMA2; (+) strand; PAM type: YTN; PAM sequence: CTG
tcaaccaggctggagtgcag

SEQ ID NO: 399301 - DNA, 20 bp, Artificial Sequence
  Description of Artificial Sequence: Synthetic oligonucleotide
  Target: LAMA2; (+) strand; PAM type: YTN; PAM sequence: CTG
gagtgcagtggtgcgatctt

SEQ ID NO: 399302 - DNA, 20 bp, Artificial Sequence
  Description of Artificial Sequence: Synthetic oligonucleotide
  Target: LAMA2; (+) strand; PAM type: YTN; PAM sequence: CTT
ggctcactgcagcctctgtc

SEQ ID NO: 399303 - DNA, 20 bp, Artificial Sequence
  Description of Artificial Sequence: Synthetic oligonucleotide
  Target: LAMA2; (+) strand; PAM type: YTN; PAM sequence: TTG
gctcactgcagcctctgtct

SEQ ID NO: 399304 - DNA, 20 bp, Artificial Sequence
  Description of Artificial Sequence: Synthetic oligonucleotide
  Target: LAMA2; (+) strand; PAM type: YTN; PAM sequence: CTC
actgcagcctctgtctccca

SEQ ID NO: 399305 - DNA, 20 bp, Artificial Sequence
  Description of Artificial Sequence: Synthetic oligonucleotide
  Target: LAMA2; (+) strand; PAM type: YTN; PAM sequence: CTG
cagcctctgtctcccaggtt

SEQ ID NO: 399306 - DNA, 20 bp, Artificial Sequence
  Description of Artificial Sequence: Synthetic oligonucleotide
  Target: LAMA2; (+) strand; PAM type: YTN; PAM sequence: CTC
tgtctcccaggttcaagtga

SEQ ID NO: 399307 - DNA, 20 bp, Artificial Sequence
  Description of Artificial Sequence: Synthetic oligonucleotide
  Target: LAMA2; (+) strand; PAM type: YTN; PAM sequence: CTG
tctcccaggttcaagtgatt

SEQ ID NO: 399308 - DNA, 20 bp, Artificial Sequence
  Description of Artificial Sequence: Synthetic oligonucleotide
  Target: LAMA2; (+) strand; PAM type: YTN; PAM sequence: CTC
ccaggttcaagtgattgtcc

SEQ ID NO: 399309 - DNA, 20 bp, Artificial Sequence
  Description of Artificial Sequence: Synthetic oligonucleotide
  Target: LAMA2; (+) strand; PAM type: YTN; PAM sequence: TTC
aagtgattgtcctgcctcat

SEQ ID NO: 399310 - DNA, 20 bp, Artificial Sequence
  Description of Artificial Sequence: Synthetic oligonucleotide
  Target: LAMA2; (+) strand; PAM type: YTN; PAM sequence: TTG
tcctgcctcatatctgggat

SEQ ID NO: 399311 - DNA, 20 bp, Artificial Sequence
  Description of Artificial Sequence: Synthetic oligonucleotide
  Target: LAMA2; (+) strand; PAM type: YTN; PAM sequence: CTG
cctcatatctgggattacag

SEQ ID NO: 399312 - DNA, 20 bp, Artificial Sequence
  Description of Artificial Sequence: Synthetic oligonucleotide
  Target: LAMA2; (+) strand; PAM type: YTN; PAM sequence: CTC
atatctgggattacaggtgc

SEQ ID NO: 399313 - DNA, 20 bp, Artificial Sequence
  Description of Artificial Sequence: Synthetic oligonucleotide
  Target: LAMA2; (+) strand; PAM type: YTN; PAM sequence: CTG
ggattacaggtgcatgccac

SEQ ID NO: 399314 - DNA, 20 bp, Artificial Sequence
  Description of Artificial Sequence: Synthetic oligonucleotide
  Target: LAMA2; (+) strand; PAM type: YTN; PAM sequence: TTA
caggtgcatgccaccacacc

SEQ ID NO: 399315 - DNA, 20 bp, Artificial Sequence
  Description of Artificial Sequence: Synthetic oligonucleotide
  Target: LAMA2; (+) strand; PAM type: YTN; PAM sequence: CTG
gctaatctttgcattttgag

SEQ ID NO: 399316 - DNA, 20 bp, Artificial Sequence
  Description of Artificial Sequence: Synthetic oligonucleotide
  Target: LAMA2; (+) strand; PAM type: YTN; PAM sequence: CTA
atctttgcattttgagtaga

SEQ ID NO: 399317 - DNA, 20 bp, Artificial Sequence
  Description of Artificial Sequence: Synthetic oligonucleotide
  Target: LAMA2; (+) strand; PAM type: YTN; PAM sequence: CTT
tgcattttgagtagagacag

SEQ ID NO: 399318 - DNA, 20 bp, Artificial Sequence
  Description of Artificial Sequence: Synthetic oligonucleotide
  Target: LAMA2; (+) strand; PAM type: YTN; PAM sequence: TTT
gcattttgagtagagacagg

SEQ ID NO: 399319 - DNA, 20 bp, Artificial Sequence
  Description of Artificial Sequence: Synthetic oligonucleotide
  Target: LAMA2; (+) strand; PAM type: YTN; PAM sequence: TTG
cattttgagtagagacaggg

SEQ ID NO: 399320 - DNA, 20 bp, Artificial Sequence
  Description of Artificial Sequence: Synthetic oligonucleotide
  Target: LAMA2; (+) strand; PAM type: YTN; PAM sequence: TTT
tgagtagagacagggtttca

SEQ ID NO: 399321 - DNA, 20 bp, Artificial Sequence
  Description of Artificial Sequence: Synthetic oligonucleotide
  Target: LAMA2; (+) strand; PAM type: YTN; PAM sequence: TTT
gagtagagacagggtttcac

SEQ ID NO: 399322 - DNA, 20 bp, Artificial Sequence
  Description of Artificial Sequence: Synthetic oligonucleotide
  Target: LAMA2; (+) strand; PAM type: YTN; PAM sequence: TTG
agtagagacagggtttcacc

SEQ ID NO: 399323 - DNA, 20 bp, Artificial Sequence
  Description of Artificial Sequence: Synthetic oligonucleotide
  Target: LAMA2; (+) strand; PAM type: YTN; PAM sequence: TTT
caccatgttgaccaggctgg

SEQ ID NO: 399324 - DNA, 20 bp, Artificial Sequence
  Description of Artificial Sequence: Synthetic oligonucleotide
  Target: LAMA2; (+) strand; PAM type: YTN; PAM sequence: TTC
accatgttgaccaggctggt

SEQ ID NO: 399325 - DNA, 20 bp, Artificial Sequence
  Description of Artificial Sequence: Synthetic oligonucleotide
  Target: LAMA2; (+) strand; PAM type: YTN; PAM sequence: TTG
accaggctggtcttgaactc

SEQ ID NO: 399326 - DNA, 20 bp, Artificial Sequence
  Description of Artificial Sequence: Synthetic oligonucleotide
  Target: LAMA2; (+) strand; PAM type: YTN; PAM sequence: CTG
gtcttgaactcctgacctca

SEQ ID NO: 399327 - DNA, 20 bp, Artificial Sequence
  Description of Artificial Sequence: Synthetic oligonucleotide
  Target: LAMA2; (+) strand; PAM type: YTN; PAM sequence: CTT
gaactcctgacctcaagtga

SEQ ID NO: 399328 - DNA, 20 bp, Artificial Sequence
  Description of Artificial Sequence: Synthetic oligonucleotide
  Target: LAMA2; (+) strand; PAM type: YTN; PAM sequence: TTG
aactcctgacctcaagtgat

SEQ ID NO: 399329 - DNA, 20 bp, Artificial Sequence
  Description of Artificial Sequence: Synthetic oligonucleotide
  Target: LAMA2; (+) strand; PAM type: YTN; PAM sequence: CTC
ctgacctcaagtgatcctcc

SEQ ID NO: 399330 - DNA, 20 bp, Artificial Sequence
  Description of Artificial Sequence: Synthetic oligonucleotide
  Target: LAMA2; (+) strand; PAM type: YTN; PAM sequence: CTG
acctcaagtgatcctcccgc

SEQ ID NO: 399331 - DNA, 20 bp, Artificial Sequence
  Description of Artificial Sequence: Synthetic oligonucleotide
  Target: LAMA2; (+) strand; PAM type: YTN; PAM sequence: CTC
aagtgatcctcccgcctcgg

SEQ ID NO: 399332 - DNA, 20 bp, Artificial Sequence
  Description of Artificial Sequence: Synthetic oligonucleotide
  Target: LAMA2; (+) strand; PAM type: YTN; PAM sequence: CTC
ccgcctcggcctcccaaagt

SEQ ID NO: 399333 - DNA, 20 bp, Artificial Sequence
  Description of Artificial Sequence: Synthetic oligonucleotide
  Target: LAMA2; (+) strand; PAM type: YTN; PAM sequence: CTC
ggcctcccaaagtgctgaga

SEQ ID NO: 399334 - DNA, 20 bp, Artificial Sequence
  Description of Artificial Sequence: Synthetic oligonucleotide
  Target: LAMA2; (+) strand; PAM type: YTN; PAM sequence: CTC
ccaaagtgctgagattacag

SEQ ID NO: 399335 - DNA, 20 bp, Artificial Sequence
  Description of Artificial Sequence: Synthetic oligonucleotide
  Target: LAMA2; (+) strand; PAM type: YTN; PAM sequence: CTG
agattacagatgtgagccac

SEQ ID NO: 399336 - DNA, 20 bp, Artificial Sequence
  Description of Artificial Sequence: Synthetic oligonucleotide
  Target: LAMA2; (+) strand; PAM type: YTN; PAM sequence: TTA
cagatgtgagccaccgtgcc

SEQ ID NO: 399337 - DNA, 20 bp, Artificial Sequence
  Description of Artificial Sequence: Synthetic oligonucleotide
  Target: LAMA2; (+) strand; PAM type: YTN; PAM sequence: CTA
aatacatttttcttgtattt

SEQ ID NO: 399338 - DNA, 20 bp, Artificial Sequence
  Description of Artificial Sequence: Synthetic oligonucleotide
  Target: LAMA2; (+) strand; PAM type: YTN; PAM sequence: TTT
ttcttgtattttatttctga

SEQ ID NO: 399339 - DNA, 20 bp, Artificial Sequence
  Description of Artificial Sequence: Synthetic oligonucleotide
  Target: LAMA2; (+) strand; PAM type: YTN; PAM sequence: TTT
tcttgtattttatttctgat

SEQ ID NO: 399340 - DNA, 20 bp, Artificial Sequence
  Description of Artificial Sequence: Synthetic oligonucleotide
  Target: LAMA2; (+) strand; PAM type: YTN; PAM sequence: TTT
cttgtattttatttctgatt

SEQ ID NO: 399341 - DNA, 20 bp, Artificial Sequence
  Description of Artificial Sequence: Synthetic oligonucleotide
  Target: LAMA2; (+) strand; PAM type: YTN; PAM sequence: TTC
ttgtattttatttctgattc

SEQ ID NO: 399342 - DNA, 20 bp, Artificial Sequence
  Description of Artificial Sequence: Synthetic oligonucleotide
  Target: LAMA2; (+) strand; PAM type: YTN; PAM sequence: CTT
gtattttatttctgattcag

SEQ ID NO: 399343 - DNA, 20 bp, Artificial Sequence
  Description of Artificial Sequence: Synthetic oligonucleotide
  Target: LAMA2; (+) strand; PAM type: YTN; PAM sequence: TTG
tattttatttctgattcagg

SEQ ID NO: 399344 - DNA, 20 bp, Artificial Sequence
  Description of Artificial Sequence: Synthetic oligonucleotide
  Target: LAMA2; (+) strand; PAM type: YTN; PAM sequence: TTT
tatttctgattcaggaatca

SEQ ID NO: 399345 - DNA, 20 bp, Artificial Sequence
  Description of Artificial Sequence: Synthetic oligonucleotide
  Target: LAMA2; (+) strand; PAM type: YTN; PAM sequence: TTT
atttctgattcaggaatcaa

SEQ ID NO: 399346 - DNA, 20 bp, Artificial Sequence
  Description of Artificial Sequence: Synthetic oligonucleotide
  Target: LAMA2; (+) strand; PAM type: YTN; PAM sequence: TTA
tttctgattcaggaatcaaa

SEQ ID NO: 399347 - DNA, 20 bp, Artificial Sequence
  Description of Artificial Sequence: Synthetic oligonucleotide
  Target: LAMA2; (+) strand; PAM type: YTN; PAM sequence: TTT
ctgattcaggaatcaaaatg

SEQ ID NO: 399348 - DNA, 20 bp, Artificial Sequence
  Description of Artificial Sequence: Synthetic oligonucleotide
  Target: LAMA2; (+) strand; PAM type: YTN; PAM sequence: TTC
tgattcaggaatcaaaatgc

SEQ ID NO: 399349 - DNA, 20 bp, Artificial Sequence
  Description of Artificial Sequence: Synthetic oligonucleotide
  Target: LAMA2; (+) strand; PAM type: YTN; PAM sequence: CTG
attcaggaatcaaaatgcac

SEQ ID NO: 399350 - DNA, 20 bp, Artificial Sequence
  Description of Artificial Sequence: Synthetic oligonucleotide
  Target: LAMA2; (+) strand; PAM type: YTN; PAM sequence: TTC
aggaatcaaaatgcacaaaa

SEQ ID NO: 399351 - DNA, 20 bp, Artificial Sequence
  Description of Artificial Sequence: Synthetic oligonucleotide
  Target: LAMA2; (+) strand; PAM type: YTN; PAM sequence: CTA
ctgccatattatgggtttta

SEQ ID NO: 399352 - DNA, 20 bp, Artificial Sequence
  Description of Artificial Sequence: Synthetic oligonucleotide
  Target: LAMA2; (+) strand; PAM type: YTN; PAM sequence: CTG
ccatattatgggttttatgt

SEQ ID NO: 399353 - DNA, 20 bp, Artificial Sequence
  Description of Artificial Sequence: Synthetic oligonucleotide
  Target: LAMA2; (+) strand; PAM type: YTN; PAM sequence: TTA
tgggttttatgttaagaata

SEQ ID NO: 399354 - DNA, 20 bp, Artificial Sequence
  Description of Artificial Sequence: Synthetic oligonucleotide
  Target: LAMA2; (+) strand; PAM type: YTN; PAM sequence: TTT
tatgttaagaatatatcatt

SEQ ID NO: 399355 - DNA, 20 bp, Artificial Sequence
  Description of Artificial Sequence: Synthetic oligonucleotide
  Target: LAMA2; (+) strand; PAM type: YTN; PAM sequence: TTT
atgttaagaatatatcatta

SEQ ID NO: 399356 - DNA, 20 bp, Artificial Sequence
  Description of Artificial Sequence: Synthetic oligonucleotide
  Target: LAMA2; (+) strand; PAM type: YTN; PAM sequence: TTA
tgttaagaatatatcattaa

SEQ ID NO: 399357 - DNA, 20 bp, Artificial Sequence
  Description of Artificial Sequence: Synthetic oligonucleotide
  Target: LAMA2; (+) strand; PAM type: YTN; PAM sequence: TTA
agaatatatcattaaacatg

SEQ ID NO: 399358 - DNA, 20 bp, Artificial Sequence
  Description of Artificial Sequence: Synthetic oligonucleotide
  Target: LAMA2; (+) strand; PAM type: YTN; PAM sequence: TTA
aacatggctgctctctatat

SEQ ID NO: 399359 - DNA, 20 bp, Artificial Sequence
  Description of Artificial Sequence: Synthetic oligonucleotide
  Target: LAMA2; (+) strand; PAM type: YTN; PAM sequence: CTG
ctctctatatgagccattac

SEQ ID NO: 399360 - DNA, 20 bp, Artificial Sequence
  Description of Artificial Sequence: Synthetic oligonucleotide
  Target: LAMA2; (+) strand; PAM type: YTN; PAM sequence: CTC
tctatatgagccattacaat

SEQ ID NO: 399361 - DNA, 20 bp, Artificial Sequence
  Description of Artificial Sequence: Synthetic oligonucleotide
  Target: LAMA2; (+) strand; PAM type: YTN; PAM sequence: CTC
tatatgagccattacaatta

SEQ ID NO: 399362 - DNA, 20 bp, Artificial Sequence
  Description of Artificial Sequence: Synthetic oligonucleotide
  Target: LAMA2; (+) strand; PAM type: YTN; PAM sequence: CTA
tatgagccattacaattatt

SEQ ID NO: 399363 - DNA, 20 bp, Artificial Sequence
  Description of Artificial Sequence: Synthetic oligonucleotide
  Target: LAMA2; (+) strand; PAM type: YTN; PAM sequence: TTA
caattattattttatgcact

SEQ ID NO: 399364 - DNA, 20 bp, Artificial Sequence
  Description of Artificial Sequence: Synthetic oligonucleotide
  Target: LAMA2; (+) strand; PAM type: YTN; PAM sequence: TTA
ttattttatgcacttatctc

SEQ ID NO: 399365 - DNA, 20 bp, Artificial Sequence
  Description of Artificial Sequence: Synthetic oligonucleotide
  Target: LAMA2; (+) strand; PAM type: YTN; PAM sequence: TTA
ttttatgcacttatctcttg

SEQ ID NO: 399366 - DNA, 20 bp, Artificial Sequence
  Description of Artificial Sequence: Synthetic oligonucleotide
  Target: LAMA2; (+) strand; PAM type: YTN; PAM sequence: TTT
tatgcacttatctcttgtct

SEQ ID NO: 399367 - DNA, 20 bp, Artificial Sequence
  Description of Artificial Sequence: Synthetic oligonucleotide
  Target: LAMA2; (+) strand; PAM type: YTN; PAM sequence: TTT
atgcacttatctcttgtctc

SEQ ID NO: 399368 - DNA, 20 bp, Artificial Sequence
  Description of Artificial Sequence: Synthetic oligonucleotide
  Target: LAMA2; (+) strand; PAM type: YTN; PAM sequence: TTA
tgcacttatctcttgtctcc

SEQ ID NO: 399369 - DNA, 20 bp, Artificial Sequence
  Description of Artificial Sequence: Synthetic oligonucleotide
  Target: LAMA2; (+) strand; PAM type: YTN; PAM sequence: CTT
atctcttgtctcccatttga

SEQ ID NO: 399370 - DNA, 20 bp, Artificial Sequence
  Description of Artificial Sequence: Synthetic oligonucleotide
  Target: LAMA2; (+) strand; PAM type: YTN; PAM sequence: TTA
tctcttgtctcccatttgaa

SEQ ID NO: 399371 - DNA, 20 bp, Artificial Sequence
  Description of Artificial Sequence: Synthetic oligonucleotide
  Target: LAMA2; (+) strand; PAM type: YTN; PAM sequence: CTC
ttgtctcccatttgaattgc

SEQ ID NO: 399372 - DNA, 20 bp, Artificial Sequence
  Description of Artificial Sequence: Synthetic oligonucleotide
  Target: LAMA2; (+) strand; PAM type: YTN; PAM sequence: CTT
gtctcccatttgaattgcca

SEQ ID NO: 399373 - DNA, 20 bp, Artificial Sequence
  Description of Artificial Sequence: Synthetic oligonucleotide
  Target: LAMA2; (+) strand; PAM type: YTN; PAM sequence: TTG
tctcccatttgaattgccac

SEQ ID NO: 399374 - DNA, 20 bp, Artificial Sequence
  Description of Artificial Sequence: Synthetic oligonucleotide
  Target: LAMA2; (+) strand; PAM type: YTN; PAM sequence: CTC
ccatttgaattgccacctgt

SEQ ID NO: 399375 - DNA, 20 bp, Artificial Sequence
  Description of Artificial Sequence: Synthetic oligonucleotide
  Target: LAMA2; (+) strand; PAM type: YTN; PAM sequence: TTT
gaattgccacctgtttctct

SEQ ID NO: 399376 - DNA, 20 bp, Artificial Sequence
  Description of Artificial Sequence: Synthetic oligonucleotide
  Target: LAMA2; (+) strand; PAM type: YTN; PAM sequence: TTG
aattgccacctgtttctctc

SEQ ID NO: 399377 - DNA, 20 bp, Artificial Sequence
  Description of Artificial Sequence: Synthetic oligonucleotide
  Target: LAMA2; (+) strand; PAM type: YTN; PAM sequence: TTG
ccacctgtttctctcttcag

SEQ ID NO: 399378 - DNA, 20 bp, Artificial Sequence
  Description of Artificial Sequence: Synthetic oligonucleotide
  Target: LAMA2; (+) strand; PAM type: YTN; PAM sequence: CTG
tttctctcttcagtttcatt

SEQ ID NO: 399379 - DNA, 20 bp, Artificial Sequence
  Description of Artificial Sequence: Synthetic oligonucleotide
  Target: LAMA2; (+) strand; PAM type: YTN; PAM sequence: TTT
ctctcttcagtttcattccc

SEQ ID NO: 399380 - DNA, 20 bp, Artificial Sequence
  Description of Artificial Sequence: Synthetic oligonucleotide
  Target: LAMA2; (+) strand; PAM type: YTN; PAM sequence: TTC
tctcttcagtttcattccct

SEQ ID NO: 399381 - DNA, 20 bp, Artificial Sequence
  Description of Artificial Sequence: Synthetic oligonucleotide
  Target: LAMA2; (+) strand; PAM type: YTN; PAM sequence: CTC
tcttcagtttcattccctac

SEQ ID NO: 399382 - DNA, 20 bp, Artificial Sequence
  Description of Artificial Sequence: Synthetic oligonucleotide
  Target: LAMA2; (+) strand; PAM type: YTN; PAM sequence: CTC
ttcagtttcattccctacca

SEQ ID NO: 399383 - DNA, 20 bp, Artificial Sequence
  Description of Artificial Sequence: Synthetic oligonucleotide
  Target: LAMA2; (+) strand; PAM type: YTN; PAM sequence: CTT
cagtttcattccctaccatt

SEQ ID NO: 399384 - DNA, 20 bp, Artificial Sequence
  Description of Artificial Sequence: Synthetic oligonucleotide
  Target: LAMA2; (+) strand; PAM type: YTN; PAM sequence: TTC
agtttcattccctaccattt

SEQ ID NO: 399385 - DNA, 20 bp, Artificial Sequence
  Description of Artificial Sequence: Synthetic oligonucleotide
  Target: LAMA2; (+) strand; PAM type: YTN; PAM sequence: TTT
cattccctaccattttctgt

SEQ ID NO: 399386 - DNA, 20 bp, Artificial Sequence
  Description of Artificial Sequence: Synthetic oligonucleotide
  Target: LAMA2; (+) strand; PAM type: YTN; PAM sequence: TTC
attccctaccattttctgtc

SEQ ID NO: 399387 - DNA, 20 bp, Artificial Sequence
  Description of Artificial Sequence: Synthetic oligonucleotide
  Target: LAMA2; (+) strand; PAM type: YTN; PAM sequence: TTC
cctaccattttctgtctcat

SEQ ID NO: 399388 - DNA, 20 bp, Artificial Sequence
  Description of Artificial Sequence: Synthetic oligonucleotide
  Target: LAMA2; (+) strand; PAM type: YTN; PAM sequence: CTA
ccattttctgtctcatatct

SEQ ID NO: 399389 - DNA, 20 bp, Artificial Sequence
  Description of Artificial Sequence: Synthetic oligonucleotide
  Target: LAMA2; (+) strand; PAM type: YTN; PAM sequence: TTT
tctgtctcatatctgtctcc

SEQ ID NO: 399390 - DNA, 20 bp, Artificial Sequence
  Description of Artificial Sequence: Synthetic oligonucleotide
  Target: LAMA2; (+) strand; PAM type: YTN; PAM sequence: TTT
ctgtctcatatctgtctccc

SEQ ID NO: 399391 - DNA, 20 bp, Artificial Sequence
  Description of Artificial Sequence: Synthetic oligonucleotide
  Target: LAMA2; (+) strand; PAM type: YTN; PAM sequence: TTC
tgtctcatatctgtctccct

SEQ ID NO: 399392 - DNA, 20 bp, Artificial Sequence
  Description of Artificial Sequence: Synthetic oligonucleotide
  Target: LAMA2; (+) strand; PAM type: YTN; PAM sequence: CTG
tctcatatctgtctccctac

SEQ ID NO: 399393 - DNA, 20 bp, Artificial Sequence
  Description of Artificial Sequence: Synthetic oligonucleotide
  Target: LAMA2; (+) strand; PAM type: YTN; PAM sequence: CTC
atatctgtctccctaccctt

SEQ ID NO: 399394 - DNA, 20 bp, Artificial Sequence
  Description of Artificial Sequence: Synthetic oligonucleotide
  Target: LAMA2; (+) strand; PAM type: YTN; PAM sequence: CTG
tctccctacccttacctaag

SEQ ID NO: 399395 - DNA, 20 bp, Artificial Sequence
  Description of Artificial Sequence: Synthetic oligonucleotide
  Target: LAMA2; (+) strand; PAM type: YTN; PAM sequence: CTC
cctacccttacctaagtatt

SEQ ID NO: 399396 - DNA, 20 bp, Artificial Sequence
  Description of Artificial Sequence: Synthetic oligonucleotide
  Target: LAMA2; (+) strand; PAM type: YTN; PAM sequence: CTA
cccttacctaagtattcata

SEQ ID NO: 399397 - DNA, 20 bp, Artificial Sequence
  Description of Artificial Sequence: Synthetic oligonucleotide
  Target: LAMA2; (+) strand; PAM type: YTN; PAM sequence: CTT
acctaagtattcataattcc

SEQ ID NO: 399398 - DNA, 20 bp, Artificial Sequence
  Description of Artificial Sequence: Synthetic oligonucleotide
  Target: LAMA2; (+) strand; PAM type: YTN; PAM sequence: TTA
cctaagtattcataattcct

SEQ ID NO: 399399 - DNA, 20 bp, Artificial Sequence
  Description of Artificial Sequence: Synthetic oligonucleotide
  Target: LAMA2; (+) strand; PAM type: YTN; PAM sequence: CTA
agtattcataattcctccca

SEQ ID NO: 399400 - DNA, 20 bp, Artificial Sequence
  Description of Artificial Sequence: Synthetic oligonucleotide
  Target: LAMA2; (+) strand; PAM type: YTN; PAM sequence: TTC
ataattcctcccaaacatgc

SEQ ID NO: 399401 - DNA, 20 bp, Artificial Sequence
  Description of Artificial Sequence: Synthetic oligonucleotide
  Target: LAMA2; (+) strand; PAM type: YTN; PAM sequence: TTC
ctcccaaacatgctactatt

SEQ ID NO: 399402 - DNA, 20 bp, Artificial Sequence
  Description of Artificial Sequence: Synthetic oligonucleotide
  Target: LAMA2; (+) strand; PAM type: YTN; PAM sequence: CTC
ccaaacatgctactattcca

SEQ ID NO: 399403 - DNA, 20 bp, Artificial Sequence
  Description of Artificial Sequence: Synthetic oligonucleotide
  Target: LAMA2; (+) strand; PAM type: YTN; PAM sequence: CTA
ctattccaagccttcatgtt

SEQ ID NO: 399404 - DNA, 20 bp, Artificial Sequence
  Description of Artificial Sequence: Synthetic oligonucleotide
  Target: LAMA2; (+) strand; PAM type: YTN; PAM sequence: CTA
ttccaagccttcatgttttc

SEQ ID NO: 399405 - DNA, 20 bp, Artificial Sequence
  Description of Artificial Sequence: Synthetic oligonucleotide
  Target: LAMA2; (+) strand; PAM type: YTN; PAM sequence: TTC
caagccttcatgttttcagt

SEQ ID NO: 399406 - DNA, 20 bp, Artificial Sequence
  Description of Artificial Sequence: Synthetic oligonucleotide
  Target: LAMA2; (+) strand; PAM type: YTN; PAM sequence: CTT
catgttttcagtattatttc

SEQ ID NO: 399407 - DNA, 20 bp, Artificial Sequence
  Description of Artificial Sequence: Synthetic oligonucleotide
  Target: LAMA2; (+) strand; PAM type: YTN; PAM sequence: TTC
atgttttcagtattatttct

SEQ ID NO: 399408 - DNA, 20 bp, Artificial Sequence
  Description of Artificial Sequence: Synthetic oligonucleotide
  Target: LAMA2; (+) strand; PAM type: YTN; PAM sequence: TTT
tcagtattatttcttcccct

SEQ ID NO: 399409 - DNA, 20 bp, Artificial Sequence
  Description of Artificial Sequence: Synthetic oligonucleotide
  Target: LAMA2; (+) strand; PAM type: YTN; PAM sequence: TTT
cagtattatttcttcccctt

SEQ ID NO: 399410 - DNA, 20 bp, Artificial Sequence
  Description of Artificial Sequence: Synthetic oligonucleotide
  Target: LAMA2; (+) strand; PAM type: YTN; PAM sequence: TTC
agtattatttcttccccttg

SEQ ID NO: 399411 - DNA, 20 bp, Artificial Sequence
  Description of Artificial Sequence: Synthetic oligonucleotide
  Target: LAMA2; (+) strand; PAM type: YTN; PAM sequence: TTA
tttcttccccttggaatgcc

SEQ ID NO: 399412 - DNA, 20 bp, Artificial Sequence
  Description of Artificial Sequence: Synthetic oligonucleotide
  Target: LAMA2; (+) strand; PAM type: YTN; PAM sequence: TTT
cttccccttggaatgcccca

SEQ ID NO: 399413 - DNA, 20 bp, Artificial Sequence
  Description of Artificial Sequence: Synthetic oligonucleotide
  Target: LAMA2; (+) strand; PAM type: YTN; PAM sequence: TTC
ttccccttggaatgccccat

SEQ ID NO: 399414 - DNA, 20 bp, Artificial Sequence
  Description of Artificial Sequence: Synthetic oligonucleotide
  Target: LAMA2; (+) strand; PAM type: YTN; PAM sequence: CTT
ccccttggaatgccccatcc

SEQ ID NO: 399415 - DNA, 20 bp, Artificial Sequence
  Description of Artificial Sequence: Synthetic oligonucleotide
  Target: LAMA2; (+) strand; PAM type: YTN; PAM sequence: TTC
cccttggaatgccccatcct

SEQ ID NO: 399416 - DNA, 20 bp, Artificial Sequence
  Description of Artificial Sequence: Synthetic oligonucleotide
  Target: LAMA2; (+) strand; PAM type: YTN; PAM sequence: CTT
ggaatgccccatccttcacc

SEQ ID NO: 399417 - DNA, 20 bp, Artificial Sequence
  Description of Artificial Sequence: Synthetic oligonucleotide
  Target: LAMA2; (+) strand; PAM type: YTN; PAM sequence: TTG
gaatgccccatccttcacct

SEQ ID NO: 399418 - DNA, 20 bp, Artificial Sequence
  Description of Artificial Sequence: Synthetic oligonucleotide
  Target: LAMA2; (+) strand; PAM type: YTN; PAM sequence: CTT
cacctctcttctttgcctaa

SEQ ID NO: 399419 - DNA, 20 bp, Artificial Sequence
  Description of Artificial Sequence: Synthetic oligonucleotide
  Target: LAMA2; (+) strand; PAM type: YTN; PAM sequence: TTC
acctctcttctttgcctaac

SEQ ID NO: 399420 - DNA, 20 bp, Artificial Sequence
  Description of Artificial Sequence: Synthetic oligonucleotide
  Target: LAMA2; (+) strand; PAM type: YTN; PAM sequence: CTC
tcttctttgcctaactgctt

SEQ ID NO: 399421 - DNA, 20 bp, Artificial Sequence
  Description of Artificial Sequence: Synthetic oligonucleotide
  Target: LAMA2; (+) strand; PAM type: YTN; PAM sequence: CTC
ttctttgcctaactgctttc

SEQ ID NO: 399422 - DNA, 20 bp, Artificial Sequence
  Description of Artificial Sequence: Synthetic oligonucleotide
  Target: LAMA2; (+) strand; PAM type: YTN; PAM sequence: CTT
ctttgcctaactgctttctt

SEQ ID NO: 399423 - DNA, 20 bp, Artificial Sequence
  Description of Artificial Sequence: Synthetic oligonucleotide
  Target: LAMA2; (+) strand; PAM type: YTN; PAM sequence: TTC
tttgcctaactgctttcttc

SEQ ID NO: 399424 - DNA, 20 bp, Artificial Sequence
  Description of Artificial Sequence: Synthetic oligonucleotide
  Target: LAMA2; (+) strand; PAM type: YTN; PAM sequence: CTT
tgcctaactgctttcttcca

SEQ ID NO: 399425 - DNA, 20 bp, Artificial Sequence
  Description of Artificial Sequence: Synthetic oligonucleotide
  Target: LAMA2; (+) strand; PAM type: YTN; PAM sequence: TTT
gcctaactgctttcttccag

SEQ ID NO: 399426 - DNA, 20 bp, Artificial Sequence
  Description of Artificial Sequence: Synthetic oligonucleotide
  Target: LAMA2; (+) strand; PAM type: YTN; PAM sequence: TTG
cctaactgctttcttccaga

SEQ ID NO: 399427 - DNA, 20 bp, Artificial Sequence
  Description of Artificial Sequence: Synthetic oligonucleotide
  Target: LAMA2; (+) strand; PAM type: YTN; PAM sequence: CTA
actgctttcttccagacctt

SEQ ID NO: 399428 - DNA, 20 bp, Artificial Sequence
  Description of Artificial Sequence: Synthetic oligonucleotide
  Target: LAMA2; (+) strand; PAM type: YTN; PAM sequence: CTG
ctttcttccagaccttcagg

SEQ ID NO: 399429 - DNA, 20 bp, Artificial Sequence
  Description of Artificial Sequence: Synthetic oligonucleotide
  Target: LAMA2; (+) strand; PAM type: YTN; PAM sequence: CTT
tcttccagaccttcaggatt

SEQ ID NO: 399430 - DNA, 20 bp, Artificial Sequence
  Description of Artificial Sequence: Synthetic oligonucleotide
  Target: LAMA2; (+) strand; PAM type: YTN; PAM sequence: TTT
cttccagaccttcaggattt

SEQ ID NO: 399431 - DNA, 20 bp, Artificial Sequence
  Description of Artificial Sequence: Synthetic oligonucleotide
  Target: LAMA2; (+) strand; PAM type: YTN; PAM sequence: TTC
ttccagaccttcaggattta

SEQ ID NO: 399432 - DNA, 20 bp, Artificial Sequence
  Description of Artificial Sequence: Synthetic oligonucleotide
  Target: LAMA2; (+) strand; PAM type: YTN; PAM sequence: CTT
ccagaccttcaggatttagt

SEQ ID NO: 399433 - DNA, 20 bp, Artificial Sequence
  Description of Artificial Sequence: Synthetic oligonucleotide
  Target: LAMA2; (+) strand; PAM type: YTN; PAM sequence: TTC
cagaccttcaggatttagtt

SEQ ID NO: 399434 - DNA, 20 bp, Artificial Sequence
  Description of Artificial Sequence: Synthetic oligonucleotide
  Target: LAMA2; (+) strand; PAM type: YTN; PAM sequence: CTT
caggatttagttcaaatgcc

SEQ ID NO: 399435 - DNA, 20 bp, Artificial Sequence
  Description of Artificial Sequence: Synthetic oligonucleotide
  Target: LAMA2; (+) strand; PAM type: YTN; PAM sequence: TTC
aggatttagttcaaatgcca

SEQ ID NO: 399436 - DNA, 20 bp, Artificial Sequence
  Description of Artificial Sequence: Synthetic oligonucleotide
  Target: LAMA2; (+) strand; PAM type: YTN; PAM sequence: TTT
agttcaaatgccatcatttc

SEQ ID NO: 399437 - DNA, 20 bp, Artificial Sequence
  Description of Artificial Sequence: Synthetic oligonucleotide
  Target: LAMA2; (+) strand; PAM type: YTN; PAM sequence: TTA
gttcaaatgccatcatttcc

SEQ ID NO: 399438 - DNA, 20 bp, Artificial Sequence
  Description of Artificial Sequence: Synthetic oligonucleotide
  Target: LAMA2; (+) strand; PAM type: YTN; PAM sequence: TTC
aaatgccatcatttccagga

SEQ ID NO: 399439 - DNA, 20 bp, Artificial Sequence
  Description of Artificial Sequence: Synthetic oligonucleotide
  Target: LAMA2; (+) strand; PAM type: YTN; PAM sequence: TTT
ccaggaaacctaacacctca

SEQ ID NO: 399440 - DNA, 20 bp, Artificial Sequence
  Description of Artificial Sequence: Synthetic oligonucleotide
  Target: LAMA2; (+) strand; PAM type: YTN; PAM sequence: TTC
caggaaacctaacacctcat

SEQ ID NO: 399441 - DNA, 20 bp, Artificial Sequence
  Description of Artificial Sequence: Synthetic oligonucleotide
  Target: LAMA2; (+) strand; PAM type: YTN; PAM sequence: CTA
acacctcatctgatttacat

SEQ ID NO: 399442 - DNA, 20 bp, Artificial Sequence
  Description of Artificial Sequence: Synthetic oligonucleotide
  Target: LAMA2; (+) strand; PAM type: YTN; PAM sequence: CTC
atctgatttacatgccccct

SEQ ID NO: 399443 - DNA, 20 bp, Artificial Sequence
  Description of Artificial Sequence: Synthetic oligonucleotide
  Target: LAMA2; (+) strand; PAM type: YTN; PAM sequence: CTG
atttacatgccccctctctg

SEQ ID NO: 399444 - DNA, 20 bp, Artificial Sequence
  Description of Artificial Sequence: Synthetic oligonucleotide
  Target: LAMA2; (+) strand; PAM type: YTN; PAM sequence: TTT
acatgccccctctctggtat

SEQ ID NO: 399445 - DNA, 20 bp, Artificial Sequence
  Description of Artificial Sequence: Synthetic oligonucleotide
  Target: LAMA2; (+) strand; PAM type: YTN; PAM sequence: TTA
catgccccctctctggtata

SEQ ID NO: 399446 - DNA, 20 bp, Artificial Sequence
  Description of Artificial Sequence: Synthetic oligonucleotide
  Target: LAMA2; (+) strand; PAM type: YTN; PAM sequence: CTC
tctggtatagttttctcata

SEQ ID NO: 399447 - DNA, 20 bp, Artificial Sequence
  Description of Artificial Sequence: Synthetic oligonucleotide
  Target: LAMA2; (+) strand; PAM type: YTN; PAM sequence: CTC
tggtatagttttctcatagg

SEQ ID NO: 399448 - DNA, 20 bp, Artificial Sequence
  Description of Artificial Sequence: Synthetic oligonucleotide
  Target: LAMA2; (+) strand; PAM type: YTN; PAM sequence: CTG
gtatagttttctcataggct

SEQ ID NO: 399449 - DNA, 20 bp, Artificial Sequence
  Description of Artificial Sequence: Synthetic oligonucleotide
  Target: LAMA2; (+) strand; PAM type: YTN; PAM sequence: TTT
tctcataggcttgtcaaacc

SEQ ID NO: 399450 - DNA, 20 bp, Artificial Sequence
  Description of Artificial Sequence: Synthetic oligonucleotide
  Target: LAMA2; (+) strand; PAM type: YTN; PAM sequence: TTT
ctcataggcttgtcaaacca

SEQ ID NO: 399451 - DNA, 20 bp, Artificial Sequence
  Description of Artificial Sequence: Synthetic oligonucleotide
  Target: LAMA2; (+) strand; PAM type: YTN; PAM sequence: TTC
tcataggcttgtcaaaccac

SEQ ID NO: 399452 - DNA, 20 bp, Artificial Sequence
  Description of Artificial Sequence: Synthetic oligonucleotide
  Target: LAMA2; (+) strand; PAM type: YTN; PAM sequence: CTC
ataggcttgtcaaaccacca

SEQ ID NO: 399453 - DNA, 20 bp, Artificial Sequence
  Description of Artificial Sequence: Synthetic oligonucleotide
  Target: LAMA2; (+) strand; PAM type: YTN; PAM sequence: CTT
gtcaaaccaccacaatcatg

SEQ ID NO: 399454 - DNA, 20 bp, Artificial Sequence
  Description of Artificial Sequence: Synthetic oligonucleotide
  Target: LAMA2; (+) strand; PAM type: YTN; PAM sequence: TTG
tcaaaccaccacaatcatgg

SEQ ID NO: 399455 - DNA, 20 bp, Artificial Sequence
  Description of Artificial Sequence: Synthetic oligonucleotide
  Target: LAMA2; (+) strand; PAM type: YTN; PAM sequence: CTA
attaatattccatcttcttt

SEQ ID NO: 399456 - DNA, 20 bp, Artificial Sequence
  Description of Artificial Sequence: Synthetic oligonucleotide
  Target: LAMA2; (+) strand; PAM type: YTN; PAM sequence: TTA
atattccatcttcttttaca

SEQ ID NO: 399457 - DNA, 20 bp, Artificial Sequence
  Description of Artificial Sequence: Synthetic oligonucleotide
  Target: LAMA2; (+) strand; PAM type: YTN; PAM sequence: TTC
catcttcttttacaattttt

SEQ ID NO: 399458 - DNA, 20 bp, Artificial Sequence
  Description of Artificial Sequence: Synthetic oligonucleotide
  Target: LAMA2; (+) strand; PAM type: YTN; PAM sequence: CTT
cttttacaatttttaaaact

SEQ ID NO: 399459 - DNA, 20 bp, Artificial Sequence
  Description of Artificial Sequence: Synthetic oligonucleotide
  Target: LAMA2; (+) strand; PAM type: YTN; PAM sequence: TTC
ttttacaatttttaaaactt

SEQ ID NO: 399460 - DNA, 20 bp, Artificial Sequence
  Description of Artificial Sequence: Synthetic oligonucleotide
  Target: LAMA2; (+) strand; PAM type: YTN; PAM sequence: CTT
ttacaatttttaaaactttt

SEQ ID NO: 399461 - DNA, 20 bp, Artificial Sequence
  Description of Artificial Sequence: Synthetic oligonucleotide
  Target: LAMA2; (+) strand; PAM type: YTN; PAM sequence: TTT
tacaatttttaaaacttttt

SEQ ID NO: 399462 - DNA, 20 bp, Artificial Sequence
  Description of Artificial Sequence: Synthetic oligonucleotide
  Target: LAMA2; (+) strand; PAM type: YTN; PAM sequence: TTT
acaatttttaaaactttttt

SEQ ID NO: 399463 - DNA, 20 bp, Artificial Sequence
  Description of Artificial Sequence: Synthetic oligonucleotide
  Target: LAMA2; (+) strand; PAM type: YTN; PAM sequence: TTA
caatttttaaaactttttta

SEQ ID NO: 399464 - DNA, 20 bp, Artificial Sequence
  Description of Artificial Sequence: Synthetic oligonucleotide
  Target: LAMA2; (+) strand; PAM type: YTN; PAM sequence: TTT
ttaaaacttttttattgatg

SEQ ID NO: 399465 - DNA, 20 bp, Artificial Sequence
  Description of Artificial Sequence: Synthetic oligonucleotide
  Target: LAMA2; (+) strand; PAM type: YTN; PAM sequence: TTT
taaaacttttttattgatgc

SEQ ID NO: 399466 - DNA, 20 bp, Artificial Sequence
  Description of Artificial Sequence: Synthetic oligonucleotide
  Target: LAMA2; (+) strand; PAM type: YTN; PAM sequence: TTT
aaaacttttttattgatgca

SEQ ID NO: 399467 - DNA, 20 bp, Artificial Sequence
  Description of Artificial Sequence: Synthetic oligonucleotide
  Target: LAMA2; (+) strand; PAM type: YTN; PAM sequence: TTA
aaacttttttattgatgcat

SEQ ID NO: 399468 - DNA, 20 bp, Artificial Sequence
  Description of Artificial Sequence: Synthetic oligonucleotide
  Target: LAMA2; (+) strand; PAM type: YTN; PAM sequence: CTT
ttttattgatgcataacaga

SEQ ID NO: 399469 - DNA, 20 bp, Artificial Sequence
  Description of Artificial Sequence: Synthetic oligonucleotide
  Target: LAMA2; (+) strand; PAM type: YTN; PAM sequence: TTT
tttattgatgcataacagat

SEQ ID NO: 399470 - DNA, 20 bp, Artificial Sequence
  Description of Artificial Sequence: Synthetic oligonucleotide
  Target: LAMA2; (+) strand; PAM type: YTN; PAM sequence: TTT
ttattgatgcataacagatg

SEQ ID NO: 399471 - DNA, 20 bp, Artificial Sequence
  Description of Artificial Sequence: Synthetic oligonucleotide
  Target: LAMA2; (+) strand; PAM type: YTN; PAM sequence: TTT
tattgatgcataacagatgt

SEQ ID NO: 399472 - DNA, 20 bp, Artificial Sequence
  Description of Artificial Sequence: Synthetic oligonucleotide
  Target: LAMA2; (+) strand; PAM type: YTN; PAM sequence: TTT
attgatgcataacagatgta

SEQ ID NO: 399473 - DNA, 20 bp, Artificial Sequence
  Description of Artificial Sequence: Synthetic oligonucleotide
  Target: LAMA2; (+) strand; PAM type: YTN; PAM sequence: TTA
ttgatgcataacagatgtat

SEQ ID NO: 399474 - DNA, 20 bp, Artificial Sequence
  Description of Artificial Sequence: Synthetic oligonucleotide
  Target: LAMA2; (+) strand; PAM type: YTN; PAM sequence: TTG
atgcataacagatgtataaa

SEQ ID NO: 399475 - DNA, 20 bp, Artificial Sequence
  Description of Artificial Sequence: Synthetic oligonucleotide
  Target: LAMA2; (+) strand; PAM type: YTN; PAM sequence: TTT
ttggcattccatcttcttga

SEQ ID NO: 399476 - DNA, 20 bp, Artificial Sequence
  Description of Artificial Sequence: Synthetic oligonucleotide
  Target: LAMA2; (+) strand; PAM type: YTN; PAM sequence: TTT
tggcattccatcttcttgag

SEQ ID NO: 399477 - DNA, 20 bp, Artificial Sequence
  Description of Artificial Sequence: Synthetic oligonucleotide
  Target: LAMA2; (+) strand; PAM type: YTN; PAM sequence: TTT
ggcattccatcttcttgagg

SEQ ID NO: 399478 - DNA, 20 bp, Artificial Sequence
  Description of Artificial Sequence: Synthetic oligonucleotide
  Target: LAMA2; (+) strand; PAM type: YTN; PAM sequence: TTG
gcattccatcttcttgagga

SEQ ID NO: 399479 - DNA, 20 bp, Artificial Sequence
  Description of Artificial Sequence: Synthetic oligonucleotide
  Target: LAMA2; (+) strand; PAM type: YTN; PAM sequence: TTC
catcttcttgaggaaagaca

SEQ ID NO: 399480 - DNA, 20 bp, Artificial Sequence
  Description of Artificial Sequence: Synthetic oligonucleotide
  Target: LAMA2; (+) strand; PAM type: YTN; PAM sequence: CTT
cttgaggaaagacatggggt

SEQ ID NO: 399481 - DNA, 20 bp, Artificial Sequence
  Description of Artificial Sequence: Synthetic oligonucleotide
  Target: LAMA2; (+) strand; PAM type: YTN; PAM sequence: TTC
ttgaggaaagacatggggtt

SEQ ID NO: 399482 - DNA, 20 bp, Artificial Sequence
  Description of Artificial Sequence: Synthetic oligonucleotide
  Target: LAMA2; (+) strand; PAM type: YTN; PAM sequence: CTT
gaggaaagacatggggtttt

SEQ ID NO: 399483 - DNA, 20 bp, Artificial Sequence
  Description of Artificial Sequence: Synthetic oligonucleotide
  Target: LAMA2; (+) strand; PAM type: YTN; PAM sequence: TTG
aggaaagacatggggttttg

SEQ ID NO: 399484 - DNA, 20 bp, Artificial Sequence
  Description of Artificial Sequence: Synthetic oligonucleotide
  Target: LAMA2; (+) strand; PAM type: YTN; PAM sequence: TTT
tgctaactgtgtatttctag

SEQ ID NO: 399485 - DNA, 20 bp, Artificial Sequence
  Description of Artificial Sequence: Synthetic oligonucleotide
  Target: LAMA2; (+) strand; PAM type: YTN; PAM sequence: TTT
gctaactgtgtatttctagt

SEQ ID NO: 399486 - DNA, 20 bp, Artificial Sequence
  Description of Artificial Sequence: Synthetic oligonucleotide
  Target: LAMA2; (+) strand; PAM type: YTN; PAM sequence: TTG
ctaactgtgtatttctagta

SEQ ID NO: 399487 - DNA, 20 bp, Artificial Sequence
  Description of Artificial Sequence: Synthetic oligonucleotide
  Target: LAMA2; (+) strand; PAM type: YTN; PAM sequence: CTA
actgtgtatttctagtatgc

SEQ ID NO: 399488 - DNA, 20 bp, Artificial Sequence
  Description of Artificial Sequence: Synthetic oligonucleotide
  Target: LAMA2; (+) strand; PAM type: YTN; PAM sequence: CTG
tgtatttctagtatgcataa

SEQ ID NO: 399489 - DNA, 20 bp, Artificial Sequence
  Description of Artificial Sequence: Synthetic oligonucleotide
  Target: LAMA2; (+) strand; PAM type: YTN; PAM sequence: TTT
ctagtatgcataatagtgac

SEQ ID NO: 399490 - DNA, 20 bp, Artificial Sequence
  Description of Artificial Sequence: Synthetic oligonucleotide
  Target: LAMA2; (+) strand; PAM type: YTN; PAM sequence: TTC
tagtatgcataatagtgact

SEQ ID NO: 399491 - DNA, 20 bp, Artificial Sequence
  Description of Artificial Sequence: Synthetic oligonucleotide
  Target: LAMA2; (+) strand; PAM type: YTN; PAM sequence: CTA
gtatgcataatagtgactag

SEQ ID NO: 399492 - DNA, 20 bp, Artificial Sequence
  Description of Artificial Sequence: Synthetic oligonucleotide
  Target: LAMA2; (+) strand; PAM type: YTN; PAM sequence: CTA
gctcaaatgaggaaatactt

SEQ ID NO: 399493 - DNA, 20 bp, Artificial Sequence
  Description of Artificial Sequence: Synthetic oligonucleotide
  Target: LAMA2; (+) strand; PAM type: YTN; PAM sequence: CTC
aaatgaggaaatacttattt

SEQ ID NO: 399494 - DNA, 20 bp, Artificial Sequence
  Description of Artificial Sequence: Synthetic oligonucleotide
  Target: LAMA2; (+) strand; PAM type: YTN; PAM sequence: CTT
attttttacaataaatggtg

SEQ ID NO: 399495 - DNA, 20 bp, Artificial Sequence
  Description of Artificial Sequence: Synthetic oligonucleotide
  Target: LAMA2; (+) strand; PAM type: YTN; PAM sequence: TTA
ttttttacaataaatggtgt

SEQ ID NO: 399496 - DNA, 20 bp, Artificial Sequence
  Description of Artificial Sequence: Synthetic oligonucleotide
  Target: LAMA2; (+) strand; PAM type: YTN; PAM sequence: TTT
tttacaataaatggtgttgg

SEQ ID NO: 399497 - DNA, 20 bp, Artificial Sequence
  Description of Artificial Sequence: Synthetic oligonucleotide
  Target: LAMA2; (+) strand; PAM type: YTN; PAM sequence: TTT
ttacaataaatggtgttggc

SEQ ID NO: 399498 - DNA, 20 bp, Artificial Sequence
  Description of Artificial Sequence: Synthetic oligonucleotide
  Target: LAMA2; (+) strand; PAM type: YTN; PAM sequence: TTT
tacaataaatggtgttggct

SEQ ID NO: 399499 - DNA, 20 bp, Artificial Sequence
  Description of Artificial Sequence: Synthetic oligonucleotide
  Target: LAMA2; (+) strand; PAM type: YTN; PAM sequence: TTT
acaataaatggtgttggctt

SEQ ID NO: 399500 - DNA, 20 bp, Artificial Sequence
  Description of Artificial Sequence: Synthetic oligonucleotide
  Target: LAMA2; (+) strand; PAM type: YTN; PAM sequence: TTA
caataaatggtgttggctta

SEQ ID NO: 399501 - DNA, 20 bp, Artificial Sequence
  Description of Artificial Sequence: Synthetic oligonucleotide
  Target: LAMA2; (+) strand; PAM type: YTN; PAM sequence: TTG
gcttatcttacttatcttag

SEQ ID NO: 399502 - DNA, 20 bp, Artificial Sequence
  Description of Artificial Sequence: Synthetic oligonucleotide
  Target: LAMA2; (+) strand; PAM type: YTN; PAM sequence: CTT
atcttacttatcttagaaag

SEQ ID NO: 399503 - DNA, 20 bp, Artificial Sequence
  Description of Artificial Sequence: Synthetic oligonucleotide
  Target: LAMA2; (+) strand; PAM type: YTN; PAM sequence: TTA
tcttacttatcttagaaaga

SEQ ID NO: 399504 - DNA, 20 bp, Artificial Sequence
  Description of Artificial Sequence: Synthetic oligonucleotide
  Target: LAMA2; (+) strand; PAM type: YTN; PAM sequence: CTT
acttatcttagaaagagaag

SEQ ID NO: 399505 - DNA, 20 bp, Artificial Sequence
  Description of Artificial Sequence: Synthetic oligonucleotide
  Target: LAMA2; (+) strand; PAM type: YTN; PAM sequence: TTA
cttatcttagaaagagaaga

SEQ ID NO: 399506 - DNA, 20 bp, Artificial Sequence
  Description of Artificial Sequence: Synthetic oligonucleotide
  Target: LAMA2; (+) strand; PAM type: YTN; PAM sequence: CTT
atcttagaaagagaagaggt

SEQ ID NO: 399507 - DNA, 20 bp, Artificial Sequence
  Description of Artificial Sequence: Synthetic oligonucleotide
  Target: LAMA2; (+) strand; PAM type: YTN; PAM sequence: TTA
tcttagaaagagaagaggtt

SEQ ID NO: 399508 - DNA, 20 bp, Artificial Sequence
  Description of Artificial Sequence: Synthetic oligonucleotide
  Target: LAMA2; (+) strand; PAM type: YTN; PAM sequence: CTT
agaaagagaagaggttttaa

SEQ ID NO: 399509 - DNA, 20 bp, Artificial Sequence
  Description of Artificial Sequence: Synthetic oligonucleotide
  Target: LAMA2; (+) strand; PAM type: YTN; PAM sequence: TTA
gaaagagaagaggttttaaa

SEQ ID NO: 399510 - DNA, 20 bp, Artificial Sequence
  Description of Artificial Sequence: Synthetic oligonucleotide
  Target: LAMA2; (+) strand; PAM type: YTN; PAM sequence: TTT
taaaatcatttatatttggc

SEQ ID NO: 399511 - DNA, 20 bp, Artificial Sequence
  Description of Artificial Sequence: Synthetic oligonucleotide
  Target: LAMA2; (+) strand; PAM type: YTN; PAM sequence: TTT
aaaatcatttatatttggca

SEQ ID NO: 399512 - DNA, 20 bp, Artificial Sequence
  Description of Artificial Sequence: Synthetic oligonucleotide
  Target: LAMA2; (+) strand; PAM type: YTN; PAM sequence: TTA
aaatcatttatatttggcat

SEQ ID NO: 399513 - DNA, 20 bp, Artificial Sequence
  Description of Artificial Sequence: Synthetic oligonucleotide
  Target: LAMA2; (+) strand; PAM type: YTN; PAM sequence: TTT
atatttggcatgttttggtc

SEQ ID NO: 399514 - DNA, 20 bp, Artificial Sequence
  Description of Artificial Sequence: Synthetic oligonucleotide
  Target: LAMA2; (+) strand; PAM type: YTN; PAM sequence: TTA
tatttggcatgttttggtct

SEQ ID NO: 399515 - DNA, 20 bp, Artificial Sequence
  Description of Artificial Sequence: Synthetic oligonucleotide
  Target: LAMA2; (+) strand; PAM type: YTN; PAM sequence: TTT
ggcatgttttggtctcagta

SEQ ID NO: 399516 - DNA, 20 bp, Artificial Sequence
  Description of Artificial Sequence: Synthetic oligonucleotide
  Target: LAMA2; (+) strand; PAM type: YTN; PAM sequence: TTG
gcatgttttggtctcagtag

SEQ ID NO: 399517 - DNA, 20 bp, Artificial Sequence
  Description of Artificial Sequence: Synthetic oligonucleotide
  Target: LAMA2; (+) strand; PAM type: YTN; PAM sequence: TTT
tggtctcagtagaagctgat

SEQ ID NO: 399518 - DNA, 20 bp, Artificial Sequence
  Description of Artificial Sequence: Synthetic oligonucleotide
  Target: LAMA2; (+) strand; PAM type: YTN; PAM sequence: TTT
ggtctcagtagaagctgata

SEQ ID NO: 399519 - DNA, 20 bp, Artificial Sequence
  Description of Artificial Sequence: Synthetic oligonucleotide
  Target: LAMA2; (+) strand; PAM type: YTN; PAM sequence: TTG
gtctcagtagaagctgatat

SEQ ID NO: 399520 - DNA, 20 bp, Artificial Sequence
  Description of Artificial Sequence: Synthetic oligonucleotide
  Target: LAMA2; (+) strand; PAM type: YTN; PAM sequence: CTC
agtagaagctgatatgaaat

SEQ ID NO: 399521 - DNA, 20 bp, Artificial Sequence
  Description of Artificial Sequence: Synthetic oligonucleotide
  Target: LAMA2; (+) strand; PAM type: YTN; PAM sequence: CTG
atatgaaattacaagttcta

SEQ ID NO: 399522 - DNA, 20 bp, Artificial Sequence
  Description of Artificial Sequence: Synthetic oligonucleotide
  Target: LAMA2; (+) strand; PAM type: YTN; PAM sequence: TTA
caagttctatctcgattata

SEQ ID NO: 399523 - DNA, 20 bp, Artificial Sequence
  Description of Artificial Sequence: Synthetic oligonucleotide
  Target: LAMA2; (+) strand; PAM type: YTN; PAM sequence: TTC
tatctcgattataagtaaaa

SEQ ID NO: 399524 - DNA, 20 bp, Artificial Sequence
  Description of Artificial Sequence: Synthetic oligonucleotide
  Target: LAMA2; (+) strand; PAM type: YTN; PAM sequence: CTA
tctcgattataagtaaaatt

SEQ ID NO: 399525 - DNA, 20 bp, Artificial Sequence
  Description of Artificial Sequence: Synthetic oligonucleotide
  Target: LAMA2; (+) strand; PAM type: YTN; PAM sequence: CTC
gattataagtaaaattttaa

SEQ ID NO: 399526 - DNA, 20 bp, Artificial Sequence
  Description of Artificial Sequence: Synthetic oligonucleotide
  Target: LAMA2; (+) strand; PAM type: YTN; PAM sequence: TTA
taagtaaaattttaatagta

SEQ ID NO: 399527 - DNA, 20 bp, Artificial Sequence
  Description of Artificial Sequence: Synthetic oligonucleotide
  Target: LAMA2; (+) strand; PAM type: YTN; PAM sequence: TTT
taatagtacaattcttcagg

SEQ ID NO: 399528 - DNA, 20 bp, Artificial Sequence
  Description of Artificial Sequence: Synthetic oligonucleotide
  Target: LAMA2; (+) strand; PAM type: YTN; PAM sequence: TTT
aatagtacaattcttcaggc

SEQ ID NO: 399529 - DNA, 20 bp, Artificial Sequence
  Description of Artificial Sequence: Synthetic oligonucleotide
  Target: LAMA2; (+) strand; PAM type: YTN; PAM sequence: TTA
atagtacaattcttcaggct

SEQ ID NO: 399530 - DNA, 20 bp, Artificial Sequence
  Description of Artificial Sequence: Synthetic oligonucleotide
  Target: LAMA2; (+) strand; PAM type: YTN; PAM sequence: TTC
ttcaggctgtgtattacagg

SEQ ID NO: 399531 - DNA, 20 bp, Artificial Sequence
  Description of Artificial Sequence: Synthetic oligonucleotide
  Target: LAMA2; (+) strand; PAM type: YTN; PAM sequence: CTT
caggctgtgtattacaggtg

SEQ ID NO: 399532 - DNA, 20 bp, Artificial Sequence
  Description of Artificial Sequence: Synthetic oligonucleotide
  Target: LAMA2; (+) strand; PAM type: YTN; PAM sequence: TTC
aggctgtgtattacaggtga

SEQ ID NO: 399533 - DNA, 20 bp, Artificial Sequence
  Description of Artificial Sequence: Synthetic oligonucleotide
  Target: LAMA2; (+) strand; PAM type: YTN; PAM sequence: CTG
tgtattacaggtgaaataaa

SEQ ID NO: 399534 - DNA, 20 bp, Artificial Sequence
  Description of Artificial Sequence: Synthetic oligonucleotide
  Target: LAMA2; (+) strand; PAM type: YTN; PAM sequence: TTA
caggtgaaataaaactccct

SEQ ID NO: 399535 - DNA, 20 bp, Artificial Sequence
  Description of Artificial Sequence: Synthetic oligonucleotide
  Target: LAMA2; (+) strand; PAM type: YTN; PAM sequence: CTC
cctacacacataattctgct

SEQ ID NO: 399536 - DNA, 20 bp, Artificial Sequence
  Description of Artificial Sequence: Synthetic oligonucleotide
  Target: LAMA2; (+) strand; PAM type: YTN; PAM sequence: CTA
cacacataattctgctcagc

SEQ ID NO: 399537 - DNA, 20 bp, Artificial Sequence
  Description of Artificial Sequence: Synthetic oligonucleotide
  Target: LAMA2; (+) strand; PAM type: YTN; PAM sequence: TTC
tgctcagcaggtacctctta

SEQ ID NO: 399538 - DNA, 20 bp, Artificial Sequence
  Description of Artificial Sequence: Synthetic oligonucleotide
  Target: LAMA2; (+) strand; PAM type: YTN; PAM sequence: CTG
ctcagcaggtacctcttatt

SEQ ID NO: 399539 - DNA, 20 bp, Artificial Sequence
  Description of Artificial Sequence: Synthetic oligonucleotide
  Target: LAMA2; (+) strand; PAM type: YTN; PAM sequence: CTC
agcaggtacctcttattaca

SEQ ID NO: 399540 - DNA, 20 bp, Artificial Sequence
  Description of Artificial Sequence: Synthetic oligonucleotide
  Target: LAMA2; (+) strand; PAM type: YTN; PAM sequence: CTC
ttattacaatctgaagaatg

SEQ ID NO: 399541 - DNA, 20 bp, Artificial Sequence
  Description of Artificial Sequence: Synthetic oligonucleotide
  Target: LAMA2; (+) strand; PAM type: YTN; PAM sequence: CTT
attacaatctgaagaatgac

SEQ ID NO: 399542 - DNA, 20 bp, Artificial Sequence
  Description of Artificial Sequence: Synthetic oligonucleotide
  Target: LAMA2; (+) strand; PAM type: YTN; PAM sequence: TTA
ttacaatctgaagaatgact

SEQ ID NO: 399543 - DNA, 20 bp, Artificial Sequence
  Description of Artificial Sequence: Synthetic oligonucleotide
  Target: LAMA2; (+) strand; PAM type: YTN; PAM sequence: TTA
caatctgaagaatgactgta

SEQ ID NO: 399544 - DNA, 20 bp, Artificial Sequence
  Description of Artificial Sequence: Synthetic oligonucleotide
  Target: LAMA2; (+) strand; PAM type: YTN; PAM sequence: CTG
aagaatgactgtaagaagcc

SEQ ID NO: 399545 - DNA, 20 bp, Artificial Sequence
  Description of Artificial Sequence: Synthetic oligonucleotide
  Target: LAMA2; (+) strand; PAM type: YTN; PAM sequence: CTG
taagaagccaaaacctgtgt

SEQ ID NO: 399546 - DNA, 20 bp, Artificial Sequence
  Description of Artificial Sequence: Synthetic oligonucleotide
  Target: LAMA2; (+) strand; PAM type: YTN; PAM sequence: CTG
tgttcctattggacaaatgg

SEQ ID NO: 399547 - DNA, 20 bp, Artificial Sequence
  Description of Artificial Sequence: Synthetic oligonucleotide
  Target: LAMA2; (+) strand; PAM type: YTN; PAM sequence: TTC
ctattggacaaatggactca

SEQ ID NO: 399548 - DNA, 20 bp, Artificial Sequence
  Description of Artificial Sequence: Synthetic oligonucleotide
  Target: LAMA2; (+) strand; PAM type: YTN; PAM sequence: CTA
ttggacaaatggactcaatc

SEQ ID NO: 399549 - DNA, 20 bp, Artificial Sequence
  Description of Artificial Sequence: Synthetic oligonucleotide
  Target: LAMA2; (+) strand; PAM type: YTN; PAM sequence: TTG
gacaaatggactcaatcccg

SEQ ID NO: 399550 - DNA, 20 bp, Artificial Sequence
  Description of Artificial Sequence: Synthetic oligonucleotide
  Target: LAMA2; (+) strand; PAM type: YTN; PAM sequence: CTC
aatcccgtgactttgcggtc

SEQ ID NO: 399551 - DNA, 20 bp, Artificial Sequence
  Description of Artificial Sequence: Synthetic oligonucleotide
  Target: LAMA2; (+) strand; PAM type: YTN; PAM sequence: CTT
tgcggtcactccttcctatc

SEQ ID NO: 399552 - DNA, 20 bp, Artificial Sequence
  Description of Artificial Sequence: Synthetic oligonucleotide
  Target: LAMA2; (+) strand; PAM type: YTN; PAM sequence: TTT
gcggtcactccttcctatct

SEQ ID NO: 399553 - DNA, 20 bp, Artificial Sequence
  Description of Artificial Sequence: Synthetic oligonucleotide
  Target: LAMA2; (+) strand; PAM type: YTN; PAM sequence: TTG
cggtcactccttcctatctc

SEQ ID NO: 399554 - DNA, 20 bp, Artificial Sequence
  Description of Artificial Sequence: Synthetic oligonucleotide
  Target: LAMA2; (+) strand; PAM type: YTN; PAM sequence: CTC
cttcctatctcatacccttg

SEQ ID NO: 399555 - DNA, 20 bp, Artificial Sequence
  Description of Artificial Sequence: Synthetic oligonucleotide
  Target: LAMA2; (+) strand; PAM type: YTN; PAM sequence: CTT
cctatctcatacccttgccc

SEQ ID NO: 399556 - DNA, 20 bp, Artificial Sequence
  Description of Artificial Sequence: Synthetic oligonucleotide
  Target: LAMA2; (+) strand; PAM type: YTN; PAM sequence: TTC
ctatctcatacccttgccca

SEQ ID NO: 399557 - DNA, 20 bp, Artificial Sequence
  Description of Artificial Sequence: Synthetic oligonucleotide
  Target: LAMA2; (+) strand; PAM type: YTN; PAM sequence: CTA
tctcatacccttgcccaggg

SEQ ID NO: 399558 - DNA, 20 bp, Artificial Sequence
  Description of Artificial Sequence: Synthetic oligonucleotide
  Target: LAMA2; (+) strand; PAM type: YTN; PAM sequence: CTC
atacccttgcccagggctgg

SEQ ID NO: 399559 - DNA, 20 bp, Artificial Sequence
  Description of Artificial Sequence: Synthetic oligonucleotide
  Target: LAMA2; (+) strand; PAM type: YTN; PAM sequence: CTT
gcccagggctgggaataggg

SEQ ID NO: 399560 - DNA, 20 bp, Artificial Sequence
  Description of Artificial Sequence: Synthetic oligonucleotide
  Target: LAMA2; (+) strand; PAM type: YTN; PAM sequence: TTG
cccagggctgggaataggga

SEQ ID NO: 399561 - DNA, 20 bp, Artificial Sequence
  Description of Artificial Sequence: Synthetic oligonucleotide
  Target: LAMA2; (+) strand; PAM type: YTN; PAM sequence: CTG
ggaatagggaggaagggagc

SEQ ID NO: 399562 - DNA, 20 bp, Artificial Sequence
  Description of Artificial Sequence: Synthetic oligonucleotide
  Target: LAMA2; (+) strand; PAM type: YTN; PAM sequence: TTC
atgcaagtgcaagaaccaat

SEQ ID NO: 399563 - DNA, 20 bp, Artificial Sequence
  Description of Artificial Sequence: Synthetic oligonucleotide
  Target: LAMA2; (+) strand; PAM type: YTN; PAM sequence: CTG
tctttaagattttaataata

SEQ ID NO: 399564 - DNA, 20 bp, Artificial Sequence
  Description of Artificial Sequence: Synthetic oligonucleotide
  Target: LAMA2; (+) strand; PAM type: YTN; PAM sequence: CTT
taagattttaataataccag

SEQ ID NO: 399565 - DNA, 20 bp, Artificial Sequence
  Description of Artificial Sequence: Synthetic oligonucleotide
  Target: LAMA2; (+) strand; PAM type: YTN; PAM sequence: TTT
aagattttaataataccagg

SEQ ID NO: 399566 - DNA, 20 bp, Artificial Sequence
  Description of Artificial Sequence: Synthetic oligonucleotide
  Target: LAMA2; (+) strand; PAM type: YTN; PAM sequence: TTA
agattttaataataccaggg

SEQ ID NO: 399567 - DNA, 20 bp, Artificial Sequence
  Description of Artificial Sequence: Synthetic oligonucleotide
  Target: LAMA2; (+) strand; PAM type: YTN; PAM sequence: TTT
taataataccagggccgtgc

SEQ ID NO: 399568 - DNA, 20 bp, Artificial Sequence
  Description of Artificial Sequence: Synthetic oligonucleotide
  Target: LAMA2; (+) strand; PAM type: YTN; PAM sequence: TTT
aataataccagggccgtgcc

SEQ ID NO: 399569 - DNA, 20 bp, Artificial Sequence
  Description of Artificial Sequence: Synthetic oligonucleotide
  Target: LAMA2; (+) strand; PAM type: YTN; PAM sequence: TTA
ataataccagggccgtgccc

SEQ ID NO: 399570 - DNA, 20 bp, Artificial Sequence
  Description of Artificial Sequence: Synthetic oligonucleotide
  Target: LAMA2; (+) strand; PAM type: YTN; PAM sequence: CTC
gcctctatttccccacaaac

SEQ ID NO: 399571 - DNA, 20 bp, Artificial Sequence
  Description of Artificial Sequence: Synthetic oligonucleotide
  Target: LAMA2; (+) strand; PAM type: YTN; PAM sequence: CTC
tatttccccacaaacactgg

SEQ ID NO: 399572 - DNA, 20 bp, Artificial Sequence
  Description of Artificial Sequence: Synthetic oligonucleotide
  Target: LAMA2; (+) strand; PAM type: YTN; PAM sequence: CTA
tttccccacaaacactggta

SEQ ID NO: 399573 - DNA, 20 bp, Artificial Sequence
  Description of Artificial Sequence: Synthetic oligonucleotide
  Target: LAMA2; (+) strand; PAM type: YTN; PAM sequence: TTT
ccccacaaacactggtatta

SEQ ID NO: 399574 - DNA, 20 bp, Artificial Sequence
  Description of Artificial Sequence: Synthetic oligonucleotide
  Target: LAMA2; (+) strand; PAM type: YTN; PAM sequence: TTC
cccacaaacactggtattat

SEQ ID NO: 399575 - DNA, 20 bp, Artificial Sequence
  Description of Artificial Sequence: Synthetic oligonucleotide
  Target: LAMA2; (+) strand; PAM type: YTN; PAM sequence: CTG
gtattataaaaatgaagaaa

SEQ ID NO: 399576 - DNA, 20 bp, Artificial Sequence
  Description of Artificial Sequence: Synthetic oligonucleotide
  Target: LAMA2; (+) strand; PAM type: YTN; PAM sequence: TTA
taaaaatgaagaaagaattt

SEQ ID NO: 399577 - DNA, 20 bp, Artificial Sequence
  Description of Artificial Sequence: Synthetic oligonucleotide
  Target: LAMA2; (+) strand; PAM type: YTN; PAM sequence: TTT
tattttcagccatttttttt

SEQ ID NO: 399578 - DNA, 20 bp, Artificial Sequence
  Description of Artificial Sequence: Synthetic oligonucleotide
  Target: LAMA2; (+) strand; PAM type: YTN; PAM sequence: TTT
attttcagccattttttttc

SEQ ID NO: 399579 - DNA, 20 bp, Artificial Sequence
  Description of Artificial Sequence: Synthetic oligonucleotide
  Target: LAMA2; (+) strand; PAM type: YTN; PAM sequence: TTA
ttttcagccattttttttcc

SEQ ID NO: 399580 - DNA, 20 bp, Artificial Sequence
  Description of Artificial Sequence: Synthetic oligonucleotide
  Target: LAMA2; (+) strand; PAM type: YTN; PAM sequence: TTT
tcagccattttttttccaag

SEQ ID NO: 399581 - DNA, 20 bp, Artificial Sequence
  Description of Artificial Sequence: Synthetic oligonucleotide
  Target: LAMA2; (+) strand; PAM type: YTN; PAM sequence: TTT
cagccattttttttccaaga

SEQ ID NO: 399582 - DNA, 20 bp, Artificial Sequence
  Description of Artificial Sequence: Synthetic oligonucleotide
  Target: LAMA2; (+) strand; PAM type: YTN; PAM sequence: TTC
agccattttttttccaagag

SEQ ID NO: 399583 - DNA, 20 bp, Artificial Sequence
  Description of Artificial Sequence: Synthetic oligonucleotide
  Target: LAMA2; (+) strand; PAM type: YTN; PAM sequence: TTT
tttttccaagagaaaaagaa

SEQ ID NO: 399584 - DNA, 20 bp, Artificial Sequence
  Description of Artificial Sequence: Synthetic oligonucleotide
  Target: LAMA2; (+) strand; PAM type: YTN; PAM sequence: TTT
ttttccaagagaaaaagaaa

SEQ ID NO: 399585 - DNA, 20 bp, Artificial Sequence
  Description of Artificial Sequence: Synthetic oligonucleotide
  Target: LAMA2; (+) strand; PAM type: YTN; PAM sequence: TTT
tttccaagagaaaaagaaat

SEQ ID NO: 399586 - DNA, 20 bp, Artificial Sequence
  Description of Artificial Sequence: Synthetic oligonucleotide
  Target: LAMA2; (+) strand; PAM type: YTN; PAM sequence: TTT
ttccaagagaaaaagaaatc

SEQ ID NO: 399587 - DNA, 20 bp, Artificial Sequence
  Description of Artificial Sequence: Synthetic oligonucleotide
  Target: LAMA2; (+) strand; PAM type: YTN; PAM sequence: TTT
tccaagagaaaaagaaatct

SEQ ID NO: 399588 - DNA, 20 bp, Artificial Sequence
  Description of Artificial Sequence: Synthetic oligonucleotide
  Target: LAMA2; (+) strand; PAM type: YTN; PAM sequence: TTT
ccaagagaaaaagaaatcta

SEQ ID NO: 399589 - DNA, 20 bp, Artificial Sequence
  Description of Artificial Sequence: Synthetic oligonucleotide
  Target: LAMA2; (+) strand; PAM type: YTN; PAM sequence: TTC
caagagaaaaagaaatctaa

SEQ ID NO: 399590 - DNA, 20 bp, Artificial Sequence
  Description of Artificial Sequence: Synthetic oligonucleotide
  Target: LAMA2; (+) strand; PAM type: YTN; PAM sequence: CTA
aagacaagcattgtaggaag

SEQ ID NO: 399591 - DNA, 20 bp, Artificial Sequence
  Description of Artificial Sequence: Synthetic oligonucleotide
  Target: LAMA2; (+) strand; PAM type: YTN; PAM sequence: TTG
taggaagggttaggagacag

SEQ ID NO: 399592 - DNA, 20 bp, Artificial Sequence
  Description of Artificial Sequence: Synthetic oligonucleotide
  Target: LAMA2; (+) strand; PAM type: YTN; PAM sequence: TTA
ggagacagaaatgttcatta

SEQ ID NO: 399593 - DNA, 20 bp, Artificial Sequence
  Description of Artificial Sequence: Synthetic oligonucleotide
  Target: LAMA2; (+) strand; PAM type: YTN; PAM sequence: TTC
attagtttaaatttattttt

SEQ ID NO: 399594 - DNA, 20 bp, Artificial Sequence
  Description of Artificial Sequence: Synthetic oligonucleotide
  Target: LAMA2; (+) strand; PAM type: YTN; PAM sequence: TTA
gtttaaatttattttttttg

SEQ ID NO: 399595 - DNA, 20 bp, Artificial Sequence
  Description of Artificial Sequence: Synthetic oligonucleotide
  Target: LAMA2; (+) strand; PAM type: YTN; PAM sequence: TTT
aaatttattttttttgtagt

SEQ ID NO: 399596 - DNA, 20 bp, Artificial Sequence
  Description of Artificial Sequence: Synthetic oligonucleotide
  Target: LAMA2; (+) strand; PAM type: YTN; PAM sequence: TTA
aatttattttttttgtagtt

SEQ ID NO: 399597 - DNA, 20 bp, Artificial Sequence
  Description of Artificial Sequence: Synthetic oligonucleotide
  Target: LAMA2; (+) strand; PAM type: YTN; PAM sequence: TTT
attttttttgtagttcaggt

SEQ ID NO: 399598 - DNA, 20 bp, Artificial Sequence
  Description of Artificial Sequence: Synthetic oligonucleotide
  Target: LAMA2; (+) strand; PAM type: YTN; PAM sequence: TTA
ttttttttgtagttcaggta

SEQ ID NO: 399599 - DNA, 20 bp, Artificial Sequence
  Description of Artificial Sequence: Synthetic oligonucleotide
  Target: LAMA2; (+) strand; PAM type: YTN; PAM sequence: TTT
tttttgtagttcaggtagta

SEQ ID NO: 399600 - DNA, 20 bp, Artificial Sequence
  Description of Artificial Sequence: Synthetic oligonucleotide
  Target: LAMA2; (+) strand; PAM type: YTN; PAM sequence: TTT
ttttgtagttcaggtagtac

SEQ ID NO: 399601 - DNA, 20 bp, Artificial Sequence
  Description of Artificial Sequence: Synthetic oligonucleotide
  Target: LAMA2; (+) strand; PAM type: YTN; PAM sequence: TTT
tttgtagttcaggtagtaca

SEQ ID NO: 399602 - DNA, 20 bp, Artificial Sequence
  Description of Artificial Sequence: Synthetic oligonucleotide
  Target: LAMA2; (+) strand; PAM type: YTN; PAM sequence: TTT
ttgtagttcaggtagtacat

SEQ ID NO: 399603 - DNA, 20 bp, Artificial Sequence
  Description of Artificial Sequence: Synthetic oligonucleotide
  Target: LAMA2; (+) strand; PAM type: YTN; PAM sequence: TTT
tgtagttcaggtagtacatt

SEQ ID NO: 399604 - DNA, 20 bp, Artificial Sequence
  Description of Artificial Sequence: Synthetic oligonucleotide
  Target: LAMA2; (+) strand; PAM type: YTN; PAM sequence: TTT
gtagttcaggtagtacatta

SEQ ID NO: 399605 - DNA, 20 bp, Artificial Sequence
  Description of Artificial Sequence: Synthetic oligonucleotide
  Target: LAMA2; (+) strand; PAM type: YTN; PAM sequence: TTG
tagttcaggtagtacattat

SEQ ID NO: 399606 - DNA, 20 bp, Artificial Sequence
  Description of Artificial Sequence: Synthetic oligonucleotide
  Target: LAMA2; (+) strand; PAM type: YTN; PAM sequence: TTC
aggtagtacattatttaaag

SEQ ID NO: 399607 - DNA, 20 bp, Artificial Sequence
  Description of Artificial Sequence: Synthetic oligonucleotide
  Target: LAMA2; (+) strand; PAM type: YTN; PAM sequence: TTA
tttaaagtaatgaaaaccca

SEQ ID NO: 399608 - DNA, 20 bp, Artificial Sequence
  Description of Artificial Sequence: Synthetic oligonucleotide
  Target: LAMA2; (+) strand; PAM type: YTN; PAM sequence: TTT
aaagtaatgaaaacccacaa

SEQ ID NO: 399609 - DNA, 20 bp, Artificial Sequence
  Description of Artificial Sequence: Synthetic oligonucleotide
  Target: LAMA2; (+) strand; PAM type: YTN; PAM sequence: TTA
aagtaatgaaaacccacaaa

SEQ ID NO: 399610 - DNA, 20 bp, Artificial Sequence
  Description of Artificial Sequence: Synthetic oligonucleotide
  Target: LAMA2; (+) strand; PAM type: YTN; PAM sequence: CTA
ctcaagtaataattcctcta

SEQ ID NO: 399611 - DNA, 20 bp, Artificial Sequence
  Description of Artificial Sequence: Synthetic oligonucleotide
  Target: LAMA2; (+) strand; PAM type: YTN; PAM sequence: CTC
aagtaataattcctctagaa

SEQ ID NO: 399612 - DNA, 20 bp, Artificial Sequence
  Description of Artificial Sequence: Synthetic oligonucleotide
  Target: LAMA2; (+) strand; PAM type: YTN; PAM sequence: TTC
ctctagaaaaccaagccaag

SEQ ID NO: 399613 - DNA, 20 bp, Artificial Sequence
  Description of Artificial Sequence: Synthetic oligonucleotide
  Target: LAMA2; (+) strand; PAM type: YTN; PAM sequence: CTC
tagaaaaccaagccaaggct

SEQ ID NO: 399614 - DNA, 20 bp, Artificial Sequence
  Description of Artificial Sequence: Synthetic oligonucleotide
  Target: LAMA2; (+) strand; PAM type: YTN; PAM sequence: CTA
gaaaaccaagccaaggctat

SEQ ID NO: 399615 - DNA, 20 bp, Artificial Sequence
  Description of Artificial Sequence: Synthetic oligonucleotide
  Target: LAMA2; (+) strand; PAM type: YTN; PAM sequence: CTA
tgacggagatgggaatgttt

SEQ ID NO: 399616 - DNA, 20 bp, Artificial Sequence
  Description of Artificial Sequence: Synthetic oligonucleotide
  Target: LAMA2; (+) strand; PAM type: YTN; PAM sequence: TTT
tcttgctacattatgacatt

SEQ ID NO: 399617 - DNA, 20 bp, Artificial Sequence
  Description of Artificial Sequence: Synthetic oligonucleotide
  Target: LAMA2; (+) strand; PAM type: YTN; PAM sequence: TTT
cttgctacattatgacattt

SEQ ID NO: 399618 - DNA, 20 bp, Artificial Sequence
  Description of Artificial Sequence: Synthetic oligonucleotide
  Target: LAMA2; (+) strand; PAM type: YTN; PAM sequence: TTC
ttgctacattatgacatttc

SEQ ID NO: 399619 - DNA, 20 bp, Artificial Sequence
  Description of Artificial Sequence: Synthetic oligonucleotide
  Target: LAMA2; (+) strand; PAM type: YTN; PAM sequence: CTT
gctacattatgacatttctc

SEQ ID NO: 399620 - DNA, 20 bp, Artificial Sequence
  Description of Artificial Sequence: Synthetic oligonucleotide
  Target: LAMA2; (+) strand; PAM type: YTN; PAM sequence: TTG
ctacattatgacatttctct

SEQ ID NO: 399621 - DNA, 20 bp, Artificial Sequence
  Description of Artificial Sequence: Synthetic oligonucleotide
  Target: LAMA2; (+) strand; PAM type: YTN; PAM sequence: CTA
cattatgacatttctctgat

SEQ ID NO: 399622 - DNA, 20 bp, Artificial Sequence
  Description of Artificial Sequence: Synthetic oligonucleotide
  Target: LAMA2; (+) strand; PAM type: YTN; PAM sequence: TTA
tgacatttctctgatttgtg

SEQ ID NO: 399623 - DNA, 20 bp, Artificial Sequence
  Description of Artificial Sequence: Synthetic oligonucleotide
  Target: LAMA2; (+) strand; PAM type: YTN; PAM sequence: TTT
ctctgatttgtggccaatta

SEQ ID NO: 399624 - DNA, 20 bp, Artificial Sequence
  Description of Artificial Sequence: Synthetic oligonucleotide
  Target: LAMA2; (+) strand; PAM type: YTN; PAM sequence: TTC
tctgatttgtggccaattac

SEQ ID NO: 399625 - DNA, 20 bp, Artificial Sequence
  Description of Artificial Sequence: Synthetic oligonucleotide
  Target: LAMA2; (+) strand; PAM type: YTN; PAM sequence: CTC
tgatttgtggccaattacgg

SEQ ID NO: 399626 - DNA, 20 bp, Artificial Sequence
  Description of Artificial Sequence: Synthetic oligonucleotide
  Target: LAMA2; (+) strand; PAM type: YTN; PAM sequence: CTG
atttgtggccaattacggag

SEQ ID NO: 399627 - DNA, 20 bp, Artificial Sequence
  Description of Artificial Sequence: Synthetic oligonucleotide
  Target: LAMA2; (+) strand; PAM type: YTN; PAM sequence: TTT
gtggccaattacggaggtta

SEQ ID NO: 399628 - DNA, 20 bp, Artificial Sequence
  Description of Artificial Sequence: Synthetic oligonucleotide
  Target: LAMA2; (+) strand; PAM type: YTN; PAM sequence: TTG
tggccaattacggaggttat

SEQ ID NO: 399629 - DNA, 20 bp, Artificial Sequence
  Description of Artificial Sequence: Synthetic oligonucleotide
  Target: LAMA2; (+) strand; PAM type: YTN; PAM sequence: TTA
cggaggttataaaatggctg

SEQ ID NO: 399630 - DNA, 20 bp, Artificial Sequence
  Description of Artificial Sequence: Synthetic oligonucleotide
  Target: LAMA2; (+) strand; PAM type: YTN; PAM sequence: TTA
taaaatggctgttaatcagg

SEQ ID NO: 399631 - DNA, 20 bp, Artificial Sequence
  Description of Artificial Sequence: Synthetic oligonucleotide
  Target: LAMA2; (+) strand; PAM type: YTN; PAM sequence: CTG
ttaatcagggaaatgccata

SEQ ID NO: 399632 - DNA, 20 bp, Artificial Sequence
  Description of Artificial Sequence: Synthetic oligonucleotide
  Target: LAMA2; (+) strand; PAM type: YTN; PAM sequence: TTA
atcagggaaatgccatatat

SEQ ID NO: 399633 - DNA, 20 bp, Artificial Sequence
  Description of Artificial Sequence: Synthetic oligonucleotide
  Target: LAMA2; (+) strand; PAM type: YTN; PAM sequence: TTA
ctaccaggaactgctgaaat

SEQ ID NO: 399634 - DNA, 20 bp, Artificial Sequence
  Description of Artificial Sequence: Synthetic oligonucleotide
  Target: LAMA2; (+) strand; PAM type: YTN; PAM sequence: CTA
ccaggaactgctgaaatagg

SEQ ID NO: 399635 - DNA, 20 bp, Artificial Sequence
  Description of Artificial Sequence: Synthetic oligonucleotide
  Target: LAMA2; (+) strand; PAM type: YTN; PAM sequence: CTG
ctgaaataggccctacagag

SEQ ID NO: 399636 - DNA, 20 bp, Artificial Sequence
  Description of Artificial Sequence: Synthetic oligonucleotide
  Target: LAMA2; (+) strand; PAM type: YTN; PAM sequence: CTG
aaataggccctacagagcaa

SEQ ID NO: 399637 - DNA, 20 bp, Artificial Sequence
  Description of Artificial Sequence: Synthetic oligonucleotide
  Target: LAMA2; (+) strand; PAM type: YTN; PAM sequence: CTA
cagagcaaaactcttgacag

SEQ ID NO: 399638 - DNA, 20 bp, Artificial Sequence
  Description of Artificial Sequence: Synthetic oligonucleotide
  Target: LAMA2; (+) strand; PAM type: YTN; PAM sequence: CTC
ttgacagcagctattaaaat

SEQ ID NO: 399639 - DNA, 20 bp, Artificial Sequence
  Description of Artificial Sequence: Synthetic oligonucleotide
  Target: LAMA2; (+) strand; PAM type: YTN; PAM sequence: CTT
gacagcagctattaaaatag

SEQ ID NO: 399640 - DNA, 20 bp, Artificial Sequence
  Description of Artificial Sequence: Synthetic oligonucleotide
  Target: LAMA2; (+) strand; PAM type: YTN; PAM sequence: TTG
acagcagctattaaaataga

SEQ ID NO: 399641 - DNA, 20 bp, Artificial Sequence
  Description of Artificial Sequence: Synthetic oligonucleotide
  Target: LAMA2; (+) strand; PAM type: YTN; PAM sequence: CTA
ttaaaatagagatttagtca

SEQ ID NO: 399642 - DNA, 20 bp, Artificial Sequence
  Description of Artificial Sequence: Synthetic oligonucleotide
  Target: LAMA2; (+) strand; PAM type: YTN; PAM sequence: TTA
aaatagagatttagtcattt

SEQ ID NO: 399643 - DNA, 20 bp, Artificial Sequence
  Description of Artificial Sequence: Synthetic oligonucleotide
  Target: LAMA2; (+) strand; PAM type: YTN; PAM sequence: TTT
agtcatttctctctctatgg

SEQ ID NO: 399644 - DNA, 20 bp, Artificial Sequence
  Description of Artificial Sequence: Synthetic oligonucleotide
  Target: LAMA2; (+) strand; PAM type: YTN; PAM sequence: TTA
gtcatttctctctctatggt

SEQ ID NO: 399645 - DNA, 20 bp, Artificial Sequence
  Description of Artificial Sequence: Synthetic oligonucleotide
  Target: LAMA2; (+) strand; PAM type: YTN; PAM sequence: TTT
ctctctctatggtgcctgga

SEQ ID NO: 399646 - DNA, 20 bp, Artificial Sequence
  Description of Artificial Sequence: Synthetic oligonucleotide
  Target: LAMA2; (+) strand; PAM type: YTN; PAM sequence: TTC
tctctctatggtgcctggag

SEQ ID NO: 399647 - DNA, 20 bp, Artificial Sequence
  Description of Artificial Sequence: Synthetic oligonucleotide
  Target: LAMA2; (+) strand; PAM type: YTN; PAM sequence: CTC
tctctatggtgcctggagtt

SEQ ID NO: 399648 - DNA, 20 bp, Artificial Sequence
  Description of Artificial Sequence: Synthetic oligonucleotide
  Target: LAMA2; (+) strand; PAM type: YTN; PAM sequence: CTC
tctatggtgcctggagttag

SEQ ID NO: 399649 - DNA, 20 bp, Artificial Sequence
  Description of Artificial Sequence: Synthetic oligonucleotide
  Target: LAMA2; (+) strand; PAM type: YTN; PAM sequence: CTC
tatggtgcctggagttagaa

SEQ ID NO: 399650 - DNA, 20 bp, Artificial Sequence
  Description of Artificial Sequence: Synthetic oligonucleotide
  Target: LAMA2; (+) strand; PAM type: YTN; PAM sequence: CTA
tggtgcctggagttagaagg

SEQ ID NO: 399651 - DNA, 20 bp, Artificial Sequence
  Description of Artificial Sequence: Synthetic oligonucleotide
  Target: LAMA2; (+) strand; PAM type: YTN; PAM sequence: CTG
gagttagaaggaataaaaat

SEQ ID NO: 399652 - DNA, 20 bp, Artificial Sequence
  Description of Artificial Sequence: Synthetic oligonucleotide
  Target: LAMA2; (+) strand; PAM type: YTN; PAM sequence: TTA
gaaggaataaaaatggtgag

SEQ ID NO: 399653 - DNA, 20 bp, Artificial Sequence
  Description of Artificial Sequence: Synthetic oligonucleotide
  Target: LAMA2; (+) strand; PAM type: YTN; PAM sequence: CTC
catatttctaatttgttgct

SEQ ID NO: 399654 - DNA, 20 bp, Artificial Sequence
  Description of Artificial Sequence: Synthetic oligonucleotide
  Target: LAMA2; (+) strand; PAM type: YTN; PAM sequence: TTT
ctaatttgttgcttggttca

SEQ ID NO: 399655 - DNA, 20 bp, Artificial Sequence
  Description of Artificial Sequence: Synthetic oligonucleotide
  Target: LAMA2; (+) strand; PAM type: YTN; PAM sequence: TTC
taatttgttgcttggttcaa

SEQ ID NO: 399656 - DNA, 20 bp, Artificial Sequence
  Description of Artificial Sequence: Synthetic oligonucleotide
  Target: LAMA2; (+) strand; PAM type: YTN; PAM sequence: CTA
atttgttgcttggttcaatt

SEQ ID NO: 399657 - DNA, 20 bp, Artificial Sequence
  Description of Artificial Sequence: Synthetic oligonucleotide
  Target: LAMA2; (+) strand; PAM type: YTN; PAM sequence: TTT
gttgcttggttcaattcagt

SEQ ID NO: 399658 - DNA, 20 bp, Artificial Sequence
  Description of Artificial Sequence: Synthetic oligonucleotide
  Target: LAMA2; (+) strand; PAM type: YTN; PAM sequence: TTG
ttgcttggttcaattcagta

SEQ ID NO: 399659 - DNA, 20 bp, Artificial Sequence
  Description of Artificial Sequence: Synthetic oligonucleotide
  Target: LAMA2; (+) strand; PAM type: YTN; PAM sequence: TTG
cttggttcaattcagtacag

SEQ ID NO: 399660 - DNA, 20 bp, Artificial Sequence
  Description of Artificial Sequence: Synthetic oligonucleotide
  Target: LAMA2; (+) strand; PAM type: YTN; PAM sequence: CTT
ggttcaattcagtacagttc

SEQ ID NO: 399661 - DNA, 20 bp, Artificial Sequence
  Description of Artificial Sequence: Synthetic oligonucleotide
  Target: LAMA2; (+) strand; PAM type: YTN; PAM sequence: TTG
gttcaattcagtacagttca

SEQ ID NO: 399662 - DNA, 20 bp, Artificial Sequence
  Description of Artificial Sequence: Synthetic oligonucleotide
  Target: LAMA2; (+) strand; PAM type: YTN; PAM sequence: TTC
aattcagtacagttcagtta

SEQ ID NO: 399663 - DNA, 20 bp, Artificial Sequence
  Description of Artificial Sequence: Synthetic oligonucleotide
  Target: LAMA2; (+) strand; PAM type: YTN; PAM sequence: TTC
agtacagttcagttagtttg

SEQ ID NO: 399664 - DNA, 20 bp, Artificial Sequence
  Description of Artificial Sequence: Synthetic oligonucleotide
  Target: LAMA2; (+) strand; PAM type: YTN; PAM sequence: TTC
agttagtttgtgagcttcag

SEQ ID NO: 399665 - DNA, 20 bp, Artificial Sequence
  Description of Artificial Sequence: Synthetic oligonucleotide
  Target: LAMA2; (+) strand; PAM type: YTN; PAM sequence: TTA
gtttgtgagcttcagtcatg

SEQ ID NO: 399666 - DNA, 20 bp, Artificial Sequence
  Description of Artificial Sequence: Synthetic oligonucleotide
  Target: LAMA2; (+) strand; PAM type: YTN; PAM sequence: TTT
gtgagcttcagtcatgaatg

SEQ ID NO: 399667 - DNA, 20 bp, Artificial Sequence
  Description of Artificial Sequence: Synthetic oligonucleotide
  Target: LAMA2; (+) strand; PAM type: YTN; PAM sequence: TTG
tgagcttcagtcatgaatga

SEQ ID NO: 399668 - DNA, 20 bp, Artificial Sequence
  Description of Artificial Sequence: Synthetic oligonucleotide
  Target: LAMA2; (+) strand; PAM type: YTN; PAM sequence: CTT
cagtcatgaatgacttagta

SEQ ID NO: 399669 - DNA, 20 bp, Artificial Sequence
  Description of Artificial Sequence: Synthetic oligonucleotide
  Target: LAMA2; (+) strand; PAM type: YTN; PAM sequence: TTC
agtcatgaatgacttagtac

SEQ ID NO: 399670 - DNA, 20 bp, Artificial Sequence
  Description of Artificial Sequence: Synthetic oligonucleotide
  Target: LAMA2; (+) strand; PAM type: YTN; PAM sequence: CTT
agtactgctccctgccattt

SEQ ID NO: 399671 - DNA, 20 bp, Artificial Sequence
  Description of Artificial Sequence: Synthetic oligonucleotide
  Target: LAMA2; (+) strand; PAM type: YTN; PAM sequence: TTA
gtactgctccctgccatttt

SEQ ID NO: 399672 - DNA, 20 bp, Artificial Sequence
  Description of Artificial Sequence: Synthetic oligonucleotide
  Target: LAMA2; (+) strand; PAM type: YTN; PAM sequence: CTG
ctccctgccatttttatgct

SEQ ID NO: 399673 - DNA, 20 bp, Artificial Sequence
  Description of Artificial Sequence: Synthetic oligonucleotide
  Target: LAMA2; (+) strand; PAM type: YTN; PAM sequence: CTC
cctgccatttttatgctgtc

SEQ ID NO: 399674 - DNA, 20 bp, Artificial Sequence
  Description of Artificial Sequence: Synthetic oligonucleotide
  Target: LAMA2; (+) strand; PAM type: YTN; PAM sequence: CTG
ccatttttatgctgtccttg

SEQ ID NO: 399675 - DNA, 20 bp, Artificial Sequence
  Description of Artificial Sequence: Synthetic oligonucleotide
  Target: LAMA2; (+) strand; PAM type: YTN; PAM sequence: TTT
ttatgctgtccttgccttga

SEQ ID NO: 399676 - DNA, 20 bp, Artificial Sequence
  Description of Artificial Sequence: Synthetic oligonucleotide
  Target: LAMA2; (+) strand; PAM type: YTN; PAM sequence: TTT
tatgctgtccttgccttgag

SEQ ID NO: 399677 - DNA, 20 bp, Artificial Sequence
  Description of Artificial Sequence: Synthetic oligonucleotide
  Target: LAMA2; (+) strand; PAM type: YTN; PAM sequence: TTT
atgctgtccttgccttgagg

SEQ ID NO: 399678 - DNA, 20 bp, Artificial Sequence
  Description of Artificial Sequence: Synthetic oligonucleotide
  Target: LAMA2; (+) strand; PAM type: YTN; PAM sequence: TTA
tgctgtccttgccttgaggg

SEQ ID NO: 399679 - DNA, 20 bp, Artificial Sequence
  Description of Artificial Sequence: Synthetic oligonucleotide
  Target: LAMA2; (+) strand; PAM type: YTN; PAM sequence: CTG
tccttgccttgagggaatct

SEQ ID NO: 399680 - DNA, 20 bp, Artificial Sequence
  Description of Artificial Sequence: Synthetic oligonucleotide
  Target: LAMA2; (+) strand; PAM type: YTN; PAM sequence: CTT
gccttgagggaatctgaact

SEQ ID NO: 399681 - DNA, 20 bp, Artificial Sequence
  Description of Artificial Sequence: Synthetic oligonucleotide
  Target: LAMA2; (+) strand; PAM type: YTN; PAM sequence: TTG
ccttgagggaatctgaactt

SEQ ID NO: 399682 - DNA, 20 bp, Artificial Sequence
  Description of Artificial Sequence: Synthetic oligonucleotide
  Target: LAMA2; (+) strand; PAM type: YTN; PAM sequence: CTT
gagggaatctgaacttgccg

SEQ ID NO: 399683 - DNA, 20 bp, Artificial Sequence
  Description of Artificial Sequence: Synthetic oligonucleotide
  Target: LAMA2; (+) strand; PAM type: YTN; PAM sequence: TTG
agggaatctgaacttgccgg

SEQ ID NO: 399684 - DNA, 20 bp, Artificial Sequence
  Description of Artificial Sequence: Synthetic oligonucleotide
  Target: LAMA2; (+) strand; PAM type: YTN; PAM sequence: CTG
aacttgccgggagcaatttg

SEQ ID NO: 399685 - DNA, 20 bp, Artificial Sequence
  Description of Artificial Sequence: Synthetic oligonucleotide
  Target: LAMA2; (+) strand; PAM type: YTN; PAM sequence: CTT
gccgggagcaatttgttttg

SEQ ID NO: 399686 - DNA, 20 bp, Artificial Sequence
  Description of Artificial Sequence: Synthetic oligonucleotide
  Target: LAMA2; (+) strand; PAM type: YTN; PAM sequence: TTG
ccgggagcaatttgttttgc

SEQ ID NO: 399687 - DNA, 20 bp, Artificial Sequence
  Description of Artificial Sequence: Synthetic oligonucleotide
  Target: LAMA2; (+) strand; PAM type: YTN; PAM sequence: TTT
gttttgctttttaatttttg

SEQ ID NO: 399688 - DNA, 20 bp, Artificial Sequence
  Description of Artificial Sequence: Synthetic oligonucleotide
  Target: LAMA2; (+) strand; PAM type: YTN; PAM sequence: TTG
ttttgctttttaatttttga

SEQ ID NO: 399689 - DNA, 20 bp, Artificial Sequence
  Description of Artificial Sequence: Synthetic oligonucleotide
  Target: LAMA2; (+) strand; PAM type: YTN; PAM sequence: TTT
tgctttttaatttttgaata

SEQ ID NO: 399690 - DNA, 20 bp, Artificial Sequence
  Description of Artificial Sequence: Synthetic oligonucleotide
  Target: LAMA2; (+) strand; PAM type: YTN; PAM sequence: TTT
gctttttaatttttgaatat

SEQ ID NO: 399691 - DNA, 20 bp, Artificial Sequence
  Description of Artificial Sequence: Synthetic oligonucleotide
  Target: LAMA2; (+) strand; PAM type: YTN; PAM sequence: TTG
ctttttaatttttgaatata

SEQ ID NO: 399692 - DNA, 20 bp, Artificial Sequence
  Description of Artificial Sequence: Synthetic oligonucleotide
  Target: LAMA2; (+) strand; PAM type: YTN; PAM sequence: CTT
tttaatttttgaatatacat

SEQ ID NO: 399693 - DNA, 20 bp, Artificial Sequence
  Description of Artificial Sequence: Synthetic oligonucleotide
  Target: LAMA2; (+) strand; PAM type: YTN; PAM sequence: TTT
ttaatttttgaatatacatc

SEQ ID NO: 399694 - DNA, 20 bp, Artificial Sequence
  Description of Artificial Sequence: Synthetic oligonucleotide
  Target: LAMA2; (+) strand; PAM type: YTN; PAM sequence: TTT
taatttttgaatatacatct

SEQ ID NO: 399695 - DNA, 20 bp, Artificial Sequence
  Description of Artificial Sequence: Synthetic oligonucleotide
  Target: LAMA2; (+) strand; PAM type: YTN; PAM sequence: TTT
aatttttgaatatacatctg

SEQ ID NO: 399696 - DNA, 20 bp, Artificial Sequence
  Description of Artificial Sequence: Synthetic oligonucleotide
  Target: LAMA2; (+) strand; PAM type: YTN; PAM sequence: TTA
atttttgaatatacatctgt

SEQ ID NO: 399697 - DNA, 20 bp, Artificial Sequence
  Description of Artificial Sequence: Synthetic oligonucleotide
  Target: LAMA2; (+) strand; PAM type: YTN; PAM sequence: TTT
ttgaatatacatctgttaaa

SEQ ID NO: 399698 - DNA, 20 bp, Artificial Sequence
  Description of Artificial Sequence: Synthetic oligonucleotide
  Target: LAMA2; (+) strand; PAM type: YTN; PAM sequence: TTT
tgaatatacatctgttaaaa

SEQ ID NO: 399699 - DNA, 20 bp, Artificial Sequence
  Description of Artificial Sequence: Synthetic oligonucleotide
  Target: LAMA2; (+) strand; PAM type: YTN; PAM sequence: TTT
gaatatacatctgttaaaag

SEQ ID NO: 399700 - DNA, 20 bp, Artificial Sequence
  Description of Artificial Sequence: Synthetic oligonucleotide
  Target: LAMA2; (+) strand; PAM type: YTN; PAM sequence: TTG
aatatacatctgttaaaagt

SEQ ID NO: 399701 - DNA, 20 bp, Artificial Sequence
  Description of Artificial Sequence: Synthetic oligonucleotide
  Target: LAMA2; (+) strand; PAM type: YTN; PAM sequence: CTG
ttaaaagtaaatttgccctt

SEQ ID NO: 399702 - DNA, 20 bp, Artificial Sequence
  Description of Artificial Sequence: Synthetic oligonucleotide
  Target: LAMA2; (+) strand; PAM type: YTN; PAM sequence: TTA
aaagtaaatttgcccttgtg

SEQ ID NO: 399703 - DNA, 20 bp, Artificial Sequence
  Description of Artificial Sequence: Synthetic oligonucleotide
  Target: LAMA2; (+) strand; PAM type: YTN; PAM sequence: TTT
gcccttgtgtgagtttgaga

SEQ ID NO: 399704 - DNA, 20 bp, Artificial Sequence
  Description of Artificial Sequence: Synthetic oligonucleotide
  Target: LAMA2; (+) strand; PAM type: YTN; PAM sequence: TTG
cccttgtgtgagtttgagat

SEQ ID NO: 399705 - DNA, 20 bp, Artificial Sequence
  Description of Artificial Sequence: Synthetic oligonucleotide
  Target: LAMA2; (+) strand; PAM type: YTN; PAM sequence: CTT
gtgtgagtttgagatttgaa

SEQ ID NO: 399706 - DNA, 20 bp, Artificial Sequence
  Description of Artificial Sequence: Synthetic oligonucleotide
  Target: LAMA2; (+) strand; PAM type: YTN; PAM sequence: TTG
tgtgagtttgagatttgaag

SEQ ID NO: 399707 - DNA, 20 bp, Artificial Sequence
  Description of Artificial Sequence: Synthetic oligonucleotide
  Target: LAMA2; (+) strand; PAM type: YTN; PAM sequence: TTT
gagatttgaagcctgtctac

SEQ ID NO: 399708 - DNA, 20 bp, Artificial Sequence
  Description of Artificial Sequence: Synthetic oligonucleotide
  Target: LAMA2; (+) strand; PAM type: YTN; PAM sequence: TTG
agatttgaagcctgtctaca

SEQ ID NO: 399709 - DNA, 20 bp, Artificial Sequence
  Description of Artificial Sequence: Synthetic oligonucleotide
  Target: LAMA2; (+) strand; PAM type: YTN; PAM sequence: TTT
gaagcctgtctacattgcac

SEQ ID NO: 399710 - DNA, 20 bp, Artificial Sequence
  Description of Artificial Sequence: Synthetic oligonucleotide
  Target: LAMA2; (+) strand; PAM type: YTN; PAM sequence: TTG
aagcctgtctacattgcact

SEQ ID NO: 399711 - DNA, 20 bp, Artificial Sequence
  Description of Artificial Sequence: Synthetic oligonucleotide
  Target: LAMA2; (+) strand; PAM type: YTN; PAM sequence: CTG
tctacattgcactgatcgaa

SEQ ID NO: 399712 - DNA, 20 bp, Artificial Sequence
  Description of Artificial Sequence: Synthetic oligonucleotide
  Target: LAMA2; (+) strand; PAM type: YTN; PAM sequence: CTA
cattgcactgatcgaatgtt

SEQ ID NO: 399713 - DNA, 20 bp, Artificial Sequence
  Description of Artificial Sequence: Synthetic oligonucleotide
  Target: LAMA2; (+) strand; PAM type: YTN; PAM sequence: TTG
cactgatcgaatgtttgtgg

SEQ ID NO: 399714 - DNA, 20 bp, Artificial Sequence
  Description of Artificial Sequence: Synthetic oligonucleotide
  Target: LAMA2; (+) strand; PAM type: YTN; PAM sequence: CTG
atcgaatgtttgtggagata

SEQ ID NO: 399715 - DNA, 20 bp, Artificial Sequence
  Description of Artificial Sequence: Synthetic oligonucleotide
  Target: LAMA2; (+) strand; PAM type: YTN; PAM sequence: TTT
gtggagataaaaagtatttt

SEQ ID NO: 399716 - DNA, 20 bp, Artificial Sequence
  Description of Artificial Sequence: Synthetic oligonucleotide
  Target: LAMA2; (+) strand; PAM type: YTN; PAM sequence: TTG
tggagataaaaagtattttg

SEQ ID NO: 399717 - DNA, 20 bp, Artificial Sequence
  Description of Artificial Sequence: Synthetic oligonucleotide
  Target: LAMA2; (+) strand; PAM type: YTN; PAM sequence: TTT
tgttgatggatatgaggctt

SEQ ID NO: 399718 - DNA, 20 bp, Artificial Sequence
  Description of Artificial Sequence: Synthetic oligonucleotide
  Target: LAMA2; (+) strand; PAM type: YTN; PAM sequence: TTT
gttgatggatatgaggcttg

SEQ ID NO: 399719 - DNA, 20 bp, Artificial Sequence
  Description of Artificial Sequence: Synthetic oligonucleotide
  Target: LAMA2; (+) strand; PAM type: YTN; PAM sequence: TTG
ttgatggatatgaggcttgg

SEQ ID NO: 399720 - DNA, 20 bp, Artificial Sequence
  Description of Artificial Sequence: Synthetic oligonucleotide
  Target: LAMA2; (+) strand; PAM type: YTN; PAM sequence: TTG
atggatatgaggcttggtac

SEQ ID NO: 399721 - DNA, 20 bp, Artificial Sequence
  Description of Artificial Sequence: Synthetic oligonucleotide
  Target: LAMA2; (+) strand; PAM type: YTN; PAM sequence: CTT
ggtacaaattgatgactgaa

SEQ ID NO: 399722 - DNA, 20 bp, Artificial Sequence
  Description of Artificial Sequence: Synthetic oligonucleotide
  Target: LAMA2; (+) strand; PAM type: YTN; PAM sequence: TTG
gtacaaattgatgactgaaa

SEQ ID NO: 399723 - DNA, 20 bp, Artificial Sequence
  Description of Artificial Sequence: Synthetic oligonucleotide
  Target: LAMA2; (+) strand; PAM type: YTN; PAM sequence: TTG
atgactgaaagagtgaaaag

SEQ ID NO: 399724 - DNA, 20 bp, Artificial Sequence
  Description of Artificial Sequence: Synthetic oligonucleotide
  Target: LAMA2; (+) strand; PAM type: YTN; PAM sequence: CTG
aaagagtgaaaagatgaatt

SEQ ID NO: 399725 - DNA, 20 bp, Artificial Sequence
  Description of Artificial Sequence: Synthetic oligonucleotide
  Target: LAMA2; (+) strand; PAM type: YTN; PAM sequence: TTA
gtaccaccaggtgaatgaac

SEQ ID NO: 399726 - DNA, 20 bp, Artificial Sequence
  Description of Artificial Sequence: Synthetic oligonucleotide
  Target: LAMA2; (+) strand; PAM type: YTN; PAM sequence: CTG
ctttgcagatagacaagaaa

SEQ ID NO: 399727 - DNA, 20 bp, Artificial Sequence
  Description of Artificial Sequence: Synthetic oligonucleotide
  Target: LAMA2; (+) strand; PAM type: YTN; PAM sequence: CTT
tgcagatagacaagaaattt

SEQ ID NO: 399728 - DNA, 20 bp, Artificial Sequence
  Description of Artificial Sequence: Synthetic oligonucleotide
  Target: LAMA2; (+) strand; PAM type: YTN; PAM sequence: TTT
gcagatagacaagaaatttt

SEQ ID NO: 399729 - DNA, 20 bp, Artificial Sequence
  Description of Artificial Sequence: Synthetic oligonucleotide
  Target: LAMA2; (+) strand; PAM type: YTN; PAM sequence: TTG
cagatagacaagaaattttt

SEQ ID NO: 399730 - DNA, 20 bp, Artificial Sequence
  Description of Artificial Sequence: Synthetic oligonucleotide
  Target: LAMA2; (+) strand; PAM type: YTN; PAM sequence: TTT
tttaaggccgggcgcagtgg

SEQ ID NO: 399731 - DNA, 20 bp, Artificial Sequence
  Description of Artificial Sequence: Synthetic oligonucleotide
  Target: LAMA2; (+) strand; PAM type: YTN; PAM sequence: TTT
ttaaggccgggcgcagtggc

SEQ ID NO: 399732 - DNA, 20 bp, Artificial Sequence
  Description of Artificial Sequence: Synthetic oligonucleotide
  Target: LAMA2; (+) strand; PAM type: YTN; PAM sequence: TTT
taaggccgggcgcagtggct

SEQ ID NO: 399733 - DNA, 20 bp, Artificial Sequence
  Description of Artificial Sequence: Synthetic oligonucleotide
  Target: LAMA2; (+) strand; PAM type: YTN; PAM sequence: TTT
aaggccgggcgcagtggctc

SEQ ID NO: 399734 - DNA, 20 bp, Artificial Sequence
  Description of Artificial Sequence: Synthetic oligonucleotide
  Target: LAMA2; (+) strand; PAM type: YTN; PAM sequence: TTA
aggccgggcgcagtggctca

SEQ ID NO: 399735 - DNA, 20 bp, Artificial Sequence
  Description of Artificial Sequence: Synthetic oligonucleotide
  Target: LAMA2; (+) strand; PAM type: YTN; PAM sequence: CTC
atgccctgtaattccagcat

SEQ ID NO: 399736 - DNA, 20 bp, Artificial Sequence
  Description of Artificial Sequence: Synthetic oligonucleotide
  Target: LAMA2; (+) strand; PAM type: YTN; PAM sequence: CTG
taattccagcattttgggag

SEQ ID NO: 399737 - DNA, 20 bp, Artificial Sequence
  Description of Artificial Sequence: Synthetic oligonucleotide
  Target: LAMA2; (+) strand; PAM type: YTN; PAM sequence: TTC
cagcattttgggaggccgag

SEQ ID NO: 399738 - DNA, 20 bp, Artificial Sequence
  Description of Artificial Sequence: Synthetic oligonucleotide
  Target: LAMA2; (+) strand; PAM type: YTN; PAM sequence: TTT
tgggaggccgaggcaggcag

SEQ ID NO: 399739 - DNA, 20 bp, Artificial Sequence
  Description of Artificial Sequence: Synthetic oligonucleotide
  Target: LAMA2; (+) strand; PAM type: YTN; PAM sequence: TTT
gggaggccgaggcaggcaga

SEQ ID NO: 399740 - DNA, 20 bp, Artificial Sequence
  Description of Artificial Sequence: Synthetic oligonucleotide
  Target: LAMA2; (+) strand; PAM type: YTN; PAM sequence: TTG
ggaggccgaggcaggcagag

SEQ ID NO: 399741 - DNA, 20 bp, Artificial Sequence
  Description of Artificial Sequence: Synthetic oligonucleotide
  Target: LAMA2; (+) strand; PAM type: YTN; PAM sequence: CTT
gagcccaggaggcagaggtt

SEQ ID NO: 399742 - DNA, 20 bp, Artificial Sequence
  Description of Artificial Sequence: Synthetic oligonucleotide
  Target: LAMA2; (+) strand; PAM type: YTN; PAM sequence: TTG
agcccaggaggcagaggttg

SEQ ID NO: 399743 - DNA, 20 bp, Artificial Sequence
  Description of Artificial Sequence: Synthetic oligonucleotide
  Target: LAMA2; (+) strand; PAM type: YTN; PAM sequence: TTG
cagtgagccaagatcgctcc

SEQ ID NO: 399744 - DNA, 20 bp, Artificial Sequence
  Description of Artificial Sequence: Synthetic oligonucleotide
  Target: LAMA2; (+) strand; PAM type: YTN; PAM sequence: CTC
cattgcactctagcctgggt

SEQ ID NO: 399745 - DNA, 20 bp, Artificial Sequence
  Description of Artificial Sequence: Synthetic oligonucleotide
  Target: LAMA2; (+) strand; PAM type: YTN; PAM sequence: TTG
cactctagcctgggtgacag

SEQ ID NO: 399746 - DNA, 20 bp, Artificial Sequence
  Description of Artificial Sequence: Synthetic oligonucleotide
  Target: LAMA2; (+) strand; PAM type: YTN; PAM sequence: CTC
tagcctgggtgacagagtga

SEQ ID NO: 399747 - DNA, 20 bp, Artificial Sequence
  Description of Artificial Sequence: Synthetic oligonucleotide
  Target: LAMA2; (+) strand; PAM type: YTN; PAM sequence: CTA
gcctgggtgacagagtgaga

SEQ ID NO: 399748 - DNA, 20 bp, Artificial Sequence
  Description of Artificial Sequence: Synthetic oligonucleotide
  Target: LAMA2; (+) strand; PAM type: YTN; PAM sequence: CTG
ggtgacagagtgagagcctg

SEQ ID NO: 399749 - DNA, 20 bp, Artificial Sequence
  Description of Artificial Sequence: Synthetic oligonucleotide
  Target: LAMA2; (+) strand; PAM type: YTN; PAM sequence: CTG
tctcaaataataattaatta

SEQ ID NO: 399750 - DNA, 20 bp, Artificial Sequence
  Description of Artificial Sequence: Synthetic oligonucleotide
  Target: LAMA2; (+) strand; PAM type: YTN; PAM sequence: CTC
aaataataattaattaatta

SEQ ID NO: 399751 - DNA, 20 bp, Artificial Sequence
  Description of Artificial Sequence: Synthetic oligonucleotide
  Target: LAMA2; (+) strand; PAM type: YTN; PAM sequence: TTA
attaattaataataaaaatt

SEQ ID NO: 399752 - DNA, 20 bp, Artificial Sequence
  Description of Artificial Sequence: Synthetic oligonucleotide
  Target: LAMA2; (+) strand; PAM type: YTN; PAM sequence: TTA
attaataataaaaatttaaa

SEQ ID NO: 399753 - DNA, 20 bp, Artificial Sequence
  Description of Artificial Sequence: Synthetic oligonucleotide
  Target: LAMA2; (+) strand; PAM type: YTN; PAM sequence: TTA
ataataaaaatttaaaataa

SEQ ID NO: 399754 - DNA, 20 bp, Artificial Sequence
  Description of Artificial Sequence: Synthetic oligonucleotide
  Target: LAMA2; (+) strand; PAM type: YTN; PAM sequence: TTT
aaaataatttttttcagtaa

SEQ ID NO: 399755 - DNA, 20 bp, Artificial Sequence
  Description of Artificial Sequence: Synthetic oligonucleotide
  Target: LAMA2; (+) strand; PAM type: YTN; PAM sequence: TTA
aaataatttttttcagtaaa

SEQ ID NO: 399756 - DNA, 20 bp, Artificial Sequence
  Description of Artificial Sequence: Synthetic oligonucleotide
  Target: LAMA2; (+) strand; PAM type: YTN; PAM sequence: TTT
ttttcagtaaaatgccaact

SEQ ID NO: 399757 - DNA, 20 bp, Artificial Sequence
  Description of Artificial Sequence: Synthetic oligonucleotide
  Target: LAMA2; (+) strand; PAM type: YTN; PAM sequence: TTT
tttcagtaaaatgccaactt

SEQ ID NO: 399758 - DNA, 20 bp, Artificial Sequence
  Description of Artificial Sequence: Synthetic oligonucleotide
  Target: LAMA2; (+) strand; PAM type: YTN; PAM sequence: TTT
ttcagtaaaatgccaacttc

SEQ ID NO: 399759 - DNA, 20 bp, Artificial Sequence
  Description of Artificial Sequence: Synthetic oligonucleotide
  Target: LAMA2; (+) strand; PAM type: YTN; PAM sequence: TTT
tcagtaaaatgccaacttca

SEQ ID NO: 399760 - DNA, 20 bp, Artificial Sequence
  Description of Artificial Sequence: Synthetic oligonucleotide
  Target: LAMA2; (+) strand; PAM type: YTN; PAM sequence: TTT
cagtaaaatgccaacttcat

SEQ ID NO: 399761 - DNA, 20 bp, Artificial Sequence
  Description of Artificial Sequence: Synthetic oligonucleotide
  Target: LAMA2; (+) strand; PAM type: YTN; PAM sequence: TTC
agtaaaatgccaacttcatt

SEQ ID NO: 399762 - DNA, 20 bp, Artificial Sequence
  Description of Artificial Sequence: Synthetic oligonucleotide
  Target: LAMA2; (+) strand; PAM type: YTN; PAM sequence: CTT
cattttctcatggaatgtgt

SEQ ID NO: 399763 - DNA, 20 bp, Artificial Sequence
  Description of Artificial Sequence: Synthetic oligonucleotide
  Target: LAMA2; (+) strand; PAM type: YTN; PAM sequence: TTC
attttctcatggaatgtgta

SEQ ID NO: 399764 - DNA, 20 bp, Artificial Sequence
  Description of Artificial Sequence: Synthetic oligonucleotide
  Target: LAMA2; (+) strand; PAM type: YTN; PAM sequence: TTT
tctcatggaatgtgtacgag

SEQ ID NO: 399765 - DNA, 20 bp, Artificial Sequence
  Description of Artificial Sequence: Synthetic oligonucleotide
  Target: LAMA2; (+) strand; PAM type: YTN; PAM sequence: TTT
ctcatggaatgtgtacgagg

SEQ ID NO: 399766 - DNA, 20 bp, Artificial Sequence
  Description of Artificial Sequence: Synthetic oligonucleotide
  Target: LAMA2; (+) strand; PAM type: YTN; PAM sequence: TTC
tcatggaatgtgtacgaggc

SEQ ID NO: 399767 - DNA, 20 bp, Artificial Sequence
  Description of Artificial Sequence: Synthetic oligonucleotide
  Target: LAMA2; (+) strand; PAM type: YTN; PAM sequence: CTC
atggaatgtgtacgaggcaa

SEQ ID NO: 399768 - DNA, 20 bp, Artificial Sequence
  Description of Artificial Sequence: Synthetic oligonucleotide
  Target: LAMA2; (+) strand; PAM type: YTN; PAM sequence: CTT
ggtttattaaaagtttgaga

SEQ ID NO: 399769 - DNA, 20 bp, Artificial Sequence
  Description of Artificial Sequence: Synthetic oligonucleotide
  Target: LAMA2; (+) strand; PAM type: YTN; PAM sequence: TTG
gtttattaaaagtttgagaa

SEQ ID NO: 399770 - DNA, 20 bp, Artificial Sequence
  Description of Artificial Sequence: Synthetic oligonucleotide
  Target: LAMA2; (+) strand; PAM type: YTN; PAM sequence: TTT
attaaaagtttgagaatatt

SEQ ID NO: 399771 - DNA, 20 bp, Artificial Sequence
  Description of Artificial Sequence: Synthetic oligonucleotide
  Target: LAMA2; (+) strand; PAM type: YTN; PAM sequence: TTA
ttaaaagtttgagaatatta

SEQ ID NO: 399772 - DNA, 20 bp, Artificial Sequence
  Description of Artificial Sequence: Synthetic oligonucleotide
  Target: LAMA2; (+) strand; PAM type: YTN; PAM sequence: TTA
aaagtttgagaatattaaga

SEQ ID NO: 399773 - DNA, 20 bp, Artificial Sequence
  Description of Artificial Sequence: Synthetic oligonucleotide
  Target: LAMA2; (+) strand; PAM type: YTN; PAM sequence: TTT
gagaatattaagattttaaa

SEQ ID NO: 399774 - DNA, 20 bp, Artificial Sequence
  Description of Artificial Sequence: Synthetic oligonucleotide
  Target: LAMA2; (+) strand; PAM type: YTN; PAM sequence: TTG
agaatattaagattttaaaa

SEQ ID NO: 399775 - DNA, 20 bp, Artificial Sequence
  Description of Artificial Sequence: Synthetic oligonucleotide
  Target: LAMA2; (+) strand; PAM type: YTN; PAM sequence: TTA
agattttaaaattatacatc

SEQ ID NO: 399776 - DNA, 20 bp, Artificial Sequence
  Description of Artificial Sequence: Synthetic oligonucleotide
  Target: LAMA2; (+) strand; PAM type: YTN; PAM sequence: TTT
taaaattatacatcttacct

SEQ ID NO: 399777 - DNA, 20 bp, Artificial Sequence
  Description of Artificial Sequence: Synthetic oligonucleotide
  Target: LAMA2; (+) strand; PAM type: YTN; PAM sequence: TTT
aaaattatacatcttacctt

SEQ ID NO: 399778 - DNA, 20 bp, Artificial Sequence
  Description of Artificial Sequence: Synthetic oligonucleotide
  Target: LAMA2; (+) strand; PAM type: YTN; PAM sequence: TTA
aaattatacatcttacctta

SEQ ID NO: 399779 - DNA, 20 bp, Artificial Sequence
  Description of Artificial Sequence: Synthetic oligonucleotide
  Target: LAMA2; (+) strand; PAM type: YTN; PAM sequence: TTA
tacatcttaccttatattga

SEQ ID NO: 399780 - DNA, 20 bp, Artificial Sequence
  Description of Artificial Sequence: Synthetic oligonucleotide
  Target: LAMA2; (+) strand; PAM type: YTN; PAM sequence: CTT
accttatattgactaacttt

SEQ ID NO: 399781 - DNA, 20 bp, Artificial Sequence
  Description of Artificial Sequence: Synthetic oligonucleotide
  Target: LAMA2; (+) strand; PAM type: YTN; PAM sequence: TTA
ccttatattgactaactttt

SEQ ID NO: 399782 - DNA, 20 bp, Artificial Sequence
  Description of Artificial Sequence: Synthetic oligonucleotide
  Target: LAMA2; (+) strand; PAM type: YTN; PAM sequence: CTT
atattgactaacttttcagt

SEQ ID NO: 399783 - DNA, 20 bp, Artificial Sequence
  Description of Artificial Sequence: Synthetic oligonucleotide
  Target: LAMA2; (+) strand; PAM type: YTN; PAM sequence: TTA
tattgactaacttttcagtt

SEQ ID NO: 399784 - DNA, 20 bp, Artificial Sequence
  Description of Artificial Sequence: Synthetic oligonucleotide
  Target: LAMA2; (+) strand; PAM type: YTN; PAM sequence: TTG
actaacttttcagttttatt

SEQ ID NO: 399785 - DNA, 20 bp, Artificial Sequence
  Description of Artificial Sequence: Synthetic oligonucleotide
  Target: LAMA2; (+) strand; PAM type: YTN; PAM sequence: CTA
acttttcagttttatttcct

SEQ ID NO: 399786 - DNA, 20 bp, Artificial Sequence
  Description of Artificial Sequence: Synthetic oligonucleotide
  Target: LAMA2; (+) strand; PAM type: YTN; PAM sequence: CTT
ttcagttttatttccttctt

SEQ ID NO: 399787 - DNA, 20 bp, Artificial Sequence
  Description of Artificial Sequence: Synthetic oligonucleotide
  Target: LAMA2; (+) strand; PAM type: YTN; PAM sequence: TTT
tcagttttatttccttctta

SEQ ID NO: 399788 - DNA, 20 bp, Artificial Sequence
  Description of Artificial Sequence: Synthetic oligonucleotide
  Target: LAMA2; (+) strand; PAM type: YTN; PAM sequence: TTT
cagttttatttccttcttaa

SEQ ID NO: 399789 - DNA, 20 bp, Artificial Sequence
  Description of Artificial Sequence: Synthetic oligonucleotide
  Target: LAMA2; (+) strand; PAM type: YTN; PAM sequence: TTC
agttttatttccttcttaat

SEQ ID NO: 399790 - DNA, 20 bp, Artificial Sequence
  Description of Artificial Sequence: Synthetic oligonucleotide
  Target: LAMA2; (+) strand; PAM type: YTN; PAM sequence: TTT
tatttccttcttaatttatc

SEQ ID NO: 399791 - DNA, 20 bp, Artificial Sequence
  Description of Artificial Sequence: Synthetic oligonucleotide
  Target: LAMA2; (+) strand; PAM type: YTN; PAM sequence: TTT
atttccttcttaatttatcc

SEQ ID NO: 399792 - DNA, 20 bp, Artificial Sequence
  Description of Artificial Sequence: Synthetic oligonucleotide
  Target: LAMA2; (+) strand; PAM type: YTN; PAM sequence: TTA
tttccttcttaatttatccc

SEQ ID NO: 399793 - DNA, 20 bp, Artificial Sequence
  Description of Artificial Sequence: Synthetic oligonucleotide
  Target: LAMA2; (+) strand; PAM type: YTN; PAM sequence: TTT
ccttcttaatttatccccaa

SEQ ID NO: 399794 - DNA, 20 bp, Artificial Sequence
  Description of Artificial Sequence: Synthetic oligonucleotide
  Target: LAMA2; (+) strand; PAM type: YTN; PAM sequence: TTC
cttcttaatttatccccaat

SEQ ID NO: 399795 - DNA, 20 bp, Artificial Sequence
  Description of Artificial Sequence: Synthetic oligonucleotide
  Target: LAMA2; (+) strand; PAM type: YTN; PAM sequence: CTT
cttaatttatccccaatttt

SEQ ID NO: 399796 - DNA, 20 bp, Artificial Sequence
  Description of Artificial Sequence: Synthetic oligonucleotide
  Target: LAMA2; (+) strand; PAM type: YTN; PAM sequence: TTC
ttaatttatccccaattttt

SEQ ID NO: 399797 - DNA, 20 bp, Artificial Sequence
  Description of Artificial Sequence: Synthetic oligonucleotide
  Target: LAMA2; (+) strand; PAM type: YTN; PAM sequence: CTT
aatttatccccaatttttgt

SEQ ID NO: 399798 - DNA, 20 bp, Artificial Sequence
  Description of Artificial Sequence: Synthetic oligonucleotide
  Target: LAMA2; (+) strand; PAM type: YTN; PAM sequence: TTA
atttatccccaatttttgtc

SEQ ID NO: 399799 - DNA, 20 bp, Artificial Sequence
  Description of Artificial Sequence: Synthetic oligonucleotide
  Target: LAMA2; (+) strand; PAM type: YTN; PAM sequence: TTT
atccccaatttttgtctttg

SEQ ID NO: 399800 - DNA, 20 bp, Artificial Sequence
  Description of Artificial Sequence: Synthetic oligonucleotide
  Target: LAMA2; (+) strand; PAM type: YTN; PAM sequence: TTA
tccccaatttttgtctttgc

SEQ ID NO: 399801 - DNA, 20 bp, Artificial Sequence
  Description of Artificial Sequence: Synthetic oligonucleotide
  Target: LAMA2; (+) strand; PAM type: YTN; PAM sequence: TTT
ttgtctttgcccaagataaa

SEQ ID NO: 399802 - DNA, 20 bp, Artificial Sequence
  Description of Artificial Sequence: Synthetic oligonucleotide
  Target: LAMA2; (+) strand; PAM type: YTN; PAM sequence: TTT
tgtctttgcccaagataaat

SEQ ID NO: 399803 - DNA, 20 bp, Artificial Sequence
  Description of Artificial Sequence: Synthetic oligonucleotide
  Target: LAMA2; (+) strand; PAM type: YTN; PAM sequence: TTT
gtctttgcccaagataaatg

SEQ ID NO: 399804 - DNA, 20 bp, Artificial Sequence
  Description of Artificial Sequence: Synthetic oligonucleotide
  Target: LAMA2; (+) strand; PAM type: YTN; PAM sequence: TTG
tctttgcccaagataaatga

SEQ ID NO: 399805 - DNA, 20 bp, Artificial Sequence
  Description of Artificial Sequence: Synthetic oligonucleotide
  Target: LAMA2; (+) strand; PAM type: YTN; PAM sequence: CTT
tgcccaagataaatgaaatt

SEQ ID NO: 399806 - DNA, 20 bp, Artificial Sequence
  Description of Artificial Sequence: Synthetic oligonucleotide
  Target: LAMA2; (+) strand; PAM type: YTN; PAM sequence: TTT
gcccaagataaatgaaatta

SEQ ID NO: 399807 - DNA, 20 bp, Artificial Sequence
  Description of Artificial Sequence: Synthetic oligonucleotide
  Target: LAMA2; (+) strand; PAM type: YTN; PAM sequence: TTG
cccaagataaatgaaattat

SEQ ID NO: 399808 - DNA, 20 bp, Artificial Sequence
  Description of Artificial Sequence: Synthetic oligonucleotide
  Target: LAMA2; (+) strand; PAM type: YTN; PAM sequence: TTA
tttaattacttagaaaaata

SEQ ID NO: 399809 - DNA, 20 bp, Artificial Sequence
  Description of Artificial Sequence: Synthetic oligonucleotide
  Target: LAMA2; (+) strand; PAM type: YTN; PAM sequence: TTT
aattacttagaaaaataata

SEQ ID NO: 399810 - DNA, 20 bp, Artificial Sequence
  Description of Artificial Sequence: Synthetic oligonucleotide
  Target: LAMA2; (+) strand; PAM type: YTN; PAM sequence: TTA
attacttagaaaaataatag

SEQ ID NO: 399811 - DNA, 20 bp, Artificial Sequence
  Description of Artificial Sequence: Synthetic oligonucleotide
  Target: LAMA2; (+) strand; PAM type: YTN; PAM sequence: TTA
cttagaaaaataataggtaa

SEQ ID NO: 399812 - DNA, 20 bp, Artificial Sequence
  Description of Artificial Sequence: Synthetic oligonucleotide
  Target: LAMA2; (+) strand; PAM type: YTN; PAM sequence: CTT
agaaaaataataggtaacat

SEQ ID NO: 399813 - DNA, 20 bp, Artificial Sequence
  Description of Artificial Sequence: Synthetic oligonucleotide
  Target: LAMA2; (+) strand; PAM type: YTN; PAM sequence: TTA
gaaaaataataggtaacatg

SEQ ID NO: 399814 - DNA, 20 bp, Artificial Sequence
  Description of Artificial Sequence: Synthetic oligonucleotide
  Target: LAMA2; (+) strand; PAM type: YTN; PAM sequence: TTG
gccaggtgcggtggctcgca

SEQ ID NO: 399815 - DNA, 20 bp, Artificial Sequence
  Description of Artificial Sequence: Synthetic oligonucleotide
  Target: LAMA2; (+) strand; PAM type: YTN; PAM sequence: CTC
gcacctgtaatcctaacact

SEQ ID NO: 399816 - DNA, 20 bp, Artificial Sequence
  Description of Artificial Sequence: Synthetic oligonucleotide
  Target: LAMA2; (+) strand; PAM type: YTN; PAM sequence: CTG
taatcctaacacttcgggag

SEQ ID NO: 399817 - DNA, 20 bp, Artificial Sequence
  Description of Artificial Sequence: Synthetic oligonucleotide
  Target: LAMA2; (+) strand; PAM type: YTN; PAM sequence: CTA
acacttcgggagaccgaggt

SEQ ID NO: 399818 - DNA, 20 bp, Artificial Sequence
  Description of Artificial Sequence: Synthetic oligonucleotide
  Target: LAMA2; (+) strand; PAM type: YTN; PAM sequence: CTT
cgggagaccgaggtgggcag

SEQ ID NO: 399819 - DNA, 20 bp, Artificial Sequence
  Description of Artificial Sequence: Synthetic oligonucleotide
  Target: LAMA2; (+) strand; PAM type: YTN; PAM sequence: TTC
gggagaccgaggtgggcaga

SEQ ID NO: 399820 - DNA, 20 bp, Artificial Sequence
  Description of Artificial Sequence: Synthetic oligonucleotide
  Target: LAMA2; (+) strand; PAM type: YTN; PAM sequence: CTG
aggtaaggagtttgagacca

SEQ ID NO: 399821 - DNA, 20 bp, Artificial Sequence
  Description of Artificial Sequence: Synthetic oligonucleotide
  Target: LAMA2; (+) strand; PAM type: YTN; PAM sequence: TTT
gagaccagcatggccagcgt

SEQ ID NO: 399822 - DNA, 20 bp, Artificial Sequence
  Description of Artificial Sequence: Synthetic oligonucleotide
  Target: LAMA2; (+) strand; PAM type: YTN; PAM sequence: TTG
agaccagcatggccagcgtg

SEQ ID NO: 399823 - DNA, 20 bp, Artificial Sequence
  Description of Artificial Sequence: Synthetic oligonucleotide
  Target: LAMA2; (+) strand; PAM type: YTN; PAM sequence: CTG
tctctactaaaaacgcaaaa

SEQ ID NO: 399824 - DNA, 20 bp, Artificial Sequence
  Description of Artificial Sequence: Synthetic oligonucleotide
  Target: LAMA2; (+) strand; PAM type: YTN; PAM sequence: CTC
tactaaaaacgcaaaaatta

SEQ ID NO: 399825 - DNA, 20 bp, Artificial Sequence
  Description of Artificial Sequence: Synthetic oligonucleotide
  Target: LAMA2; (+) strand; PAM type: YTN; PAM sequence: CTA
ctaaaaacgcaaaaattagc

SEQ ID NO: 399826 - DNA, 20 bp, Artificial Sequence
  Description of Artificial Sequence: Synthetic oligonucleotide
  Target: LAMA2; (+) strand; PAM type: YTN; PAM sequence: CTA
aaaacgcaaaaattagctgg

SEQ ID NO: 399827 - DNA, 20 bp, Artificial Sequence
  Description of Artificial Sequence: Synthetic oligonucleotide
  Target: LAMA2; (+) strand; PAM type: YTN; PAM sequence: TTA
gctgggcatggtggtgggtg

SEQ ID NO: 399828 - DNA, 20 bp, Artificial Sequence
  Description of Artificial Sequence: Synthetic oligonucleotide
  Target: LAMA2; (+) strand; PAM type: YTN; PAM sequence: CTG
ggcatggtggtgggtgcctg

SEQ ID NO: 399829 - DNA, 20 bp, Artificial Sequence
  Description of Artificial Sequence: Synthetic oligonucleotide
  Target: LAMA2; (+) strand; PAM type: YTN; PAM sequence: CTG
taatcccagctactcaggag

SEQ ID NO: 399830 - DNA, 20 bp, Artificial Sequence
  Description of Artificial Sequence: Synthetic oligonucleotide
  Target: LAMA2; (+) strand; PAM type: YTN; PAM sequence: CTA
ctcaggaggctgaggtagga

SEQ ID NO: 399831 - DNA, 20 bp, Artificial Sequence
  Description of Artificial Sequence: Synthetic oligonucleotide
  Target: LAMA2; (+) strand; PAM type: YTN; PAM sequence: CTC
aggaggctgaggtaggagaa

SEQ ID NO: 399832 - DNA, 20 bp, Artificial Sequence
  Description of Artificial Sequence: Synthetic oligonucleotide
  Target: LAMA2; (+) strand; PAM type: YTN; PAM sequence: CTG
aggtaggagaattgctggaa

SEQ ID NO: 399833 - DNA, 20 bp, Artificial Sequence
  Description of Artificial Sequence: Synthetic oligonucleotide
  Target: LAMA2; (+) strand; PAM type: YTN; PAM sequence: TTG
ctggaacccaggatacggag

SEQ ID NO: 399834 - DNA, 20 bp, Artificial Sequence
  Description of Artificial Sequence: Synthetic oligonucleotide
  Target: LAMA2; (+) strand; PAM type: YTN; PAM sequence: CTG
gaacccaggatacggaggtt

SEQ ID NO: 399835 - DNA, 20 bp, Artificial Sequence
  Description of Artificial Sequence: Synthetic oligonucleotide
  Target: LAMA2; (+) strand; PAM type: YTN; PAM sequence: TTA
cagtgagctgagattgcgcc

SEQ ID NO: 399836 - DNA, 20 bp, Artificial Sequence
  Description of Artificial Sequence: Synthetic oligonucleotide
  Target: LAMA2; (+) strand; PAM type: YTN; PAM sequence: CTG
agattgcgccactgcacttc

SEQ ID NO: 399837 - DNA, 20 bp, Artificial Sequence
  Description of Artificial Sequence: Synthetic oligonucleotide
  Target: LAMA2; (+) strand; PAM type: YTN; PAM sequence: TTG
cgccactgcacttcagcctg

SEQ ID NO: 399838 - DNA, 20 bp, Artificial Sequence
  Description of Artificial Sequence: Synthetic oligonucleotide
  Target: LAMA2; (+) strand; PAM type: YTN; PAM sequence: CTG
cacttcagcctgggcaacag

SEQ ID NO: 399839 - DNA, 20 bp, Artificial Sequence
  Description of Artificial Sequence: Synthetic oligonucleotide
  Target: LAMA2; (+) strand; PAM type: YTN; PAM sequence: CTT
cagcctgggcaacagagtga

SEQ ID NO: 399840 - DNA, 20 bp, Artificial Sequence
  Description of Artificial Sequence: Synthetic oligonucleotide
  Target: LAMA2; (+) strand; PAM type: YTN; PAM sequence: TTC
agcctgggcaacagagtgag

SEQ ID NO: 399841 - DNA, 20 bp, Artificial Sequence
  Description of Artificial Sequence: Synthetic oligonucleotide
  Target: LAMA2; (+) strand; PAM type: YTN; PAM sequence: CTG
ggcaacagagtgagactcta

SEQ ID NO: 399842 - DNA, 20 bp, Artificial Sequence
  Description of Artificial Sequence: Synthetic oligonucleotide
  Target: LAMA2; (+) strand; PAM type: YTN; PAM sequence: CTC
tatctaaaaaaaaaaaaaaa

SEQ ID NO: 399843 - DNA, 20 bp, Artificial Sequence
  Description of Artificial Sequence: Synthetic oligonucleotide
  Target: LAMA2; (+) strand; PAM type: YTN; PAM sequence: CTA
tctaaaaaaaaaaaaaaaaa

SEQ ID NO: 399844 - DNA, 20 bp, Artificial Sequence
  Description of Artificial Sequence: Synthetic oligonucleotide
  Target: LAMA2; (+) strand; PAM type: YTN; PAM sequence: CTA
aaaaaaaaaaaaaaaaacta

SEQ ID NO: 399845 - DNA, 20 bp, Artificial Sequence
  Description of Artificial Sequence: Synthetic oligonucleotide
  Target: LAMA2; (+) strand; PAM type: YTN; PAM sequence: CTA
ggtaacatacctataaaata

SEQ ID NO: 399846 - DNA, 20 bp, Artificial Sequence
  Description of Artificial Sequence: Synthetic oligonucleotide
  Target: LAMA2; (+) strand; PAM type: YTN; PAM sequence: CTA
taaaatagataacacaggaa

SEQ ID NO: 399847 - DNA, 20 bp, Artificial Sequence
  Description of Artificial Sequence: Synthetic oligonucleotide
  Target: LAMA2; (+) strand; PAM type: YTN; PAM sequence: CTA
ttccctggagatctatgaca

SEQ ID NO: 399848 - DNA, 20 bp, Artificial Sequence
  Description of Artificial Sequence: Synthetic oligonucleotide
  Target: LAMA2; (+) strand; PAM type: YTN; PAM sequence: TTC
cctggagatctatgacagct

SEQ ID NO: 399849 - DNA, 20 bp, Artificial Sequence
  Description of Artificial Sequence: Synthetic oligonucleotide
  Target: LAMA2; (+) strand; PAM type: YTN; PAM sequence: CTG
gagatctatgacagctcatt

SEQ ID NO: 399850 - DNA, 20 bp, Artificial Sequence
  Description of Artificial Sequence: Synthetic oligonucleotide
  Target: LAMA2; (+) strand; PAM type: YTN; PAM sequence: CTA
tgacagctcattttaaagga

SEQ ID NO: 399851 - DNA, 20 bp, Artificial Sequence
  Description of Artificial Sequence: Synthetic oligonucleotide
  Target: LAMA2; (+) strand; PAM type: YTN; PAM sequence: CTC
attttaaaggaggcggtttg

SEQ ID NO: 399852 - DNA, 20 bp, Artificial Sequence
  Description of Artificial Sequence: Synthetic oligonucleotide
  Target: LAMA2; (+) strand; PAM type: YTN; PAM sequence: TTT
taaaggaggcggtttgtctc

SEQ ID NO: 399853 - DNA, 20 bp, Artificial Sequence
  Description of Artificial Sequence: Synthetic oligonucleotide
  Target: LAMA2; (+) strand; PAM type: YTN; PAM sequence: TTT
aaaggaggcggtttgtctca

SEQ ID NO: 399854 - DNA, 20 bp, Artificial Sequence
  Description of Artificial Sequence: Synthetic oligonucleotide
  Target: LAMA2; (+) strand; PAM type: YTN; PAM sequence: TTA
aaggaggcggtttgtctcat

SEQ ID NO: 399855 - DNA, 20 bp, Artificial Sequence
  Description of Artificial Sequence: Synthetic oligonucleotide
  Target: LAMA2; (+) strand; PAM type: YTN; PAM sequence: TTT
gtctcatagcactgtagcct

SEQ ID NO: 399856 - DNA, 20 bp, Artificial Sequence
  Description of Artificial Sequence: Synthetic oligonucleotide
  Target: LAMA2; (+) strand; PAM type: YTN; PAM sequence: TTG
tctcatagcactgtagcctg

SEQ ID NO: 399857 - DNA, 20 bp, Artificial Sequence
  Description of Artificial Sequence: Synthetic oligonucleotide
  Target: LAMA2; (+) strand; PAM type: YTN; PAM sequence: CTC
atagcactgtagcctgtggt

SEQ ID NO: 399858 - DNA, 20 bp, Artificial Sequence
  Description of Artificial Sequence: Synthetic oligonucleotide
  Target: LAMA2; (+) strand; PAM type: YTN; PAM sequence: CTG
tagcctgtggtatataatta

SEQ ID NO: 399859 - DNA, 20 bp, Artificial Sequence
  Description of Artificial Sequence: Synthetic oligonucleotide
  Target: LAMA2; (+) strand; PAM type: YTN; PAM sequence: CTG
tggtatataattacagttaa

SEQ ID NO: 399860 - DNA, 20 bp, Artificial Sequence
  Description of Artificial Sequence: Synthetic oligonucleotide
  Target: LAMA2; (+) strand; PAM type: YTN; PAM sequence: TTA
cagttaacccttgaccaatg

SEQ ID NO: 399861 - DNA, 20 bp, Artificial Sequence
  Description of Artificial Sequence: Synthetic oligonucleotide
  Target: LAMA2; (+) strand; PAM type: YTN; PAM sequence: TTA
acccttgaccaatgcagggg

SEQ ID NO: 399862 - DNA, 20 bp, Artificial Sequence
  Description of Artificial Sequence: Synthetic oligonucleotide
  Target: LAMA2; (+) strand; PAM type: YTN; PAM sequence: CTT
gaccaatgcaggggttggag

SEQ ID NO: 399863 - DNA, 20 bp, Artificial Sequence
  Description of Artificial Sequence: Synthetic oligonucleotide
  Target: LAMA2; (+) strand; PAM type: YTN; PAM sequence: TTG
accaatgcaggggttggaga

SEQ ID NO: 399864 - DNA, 20 bp, Artificial Sequence
  Description of Artificial Sequence: Synthetic oligonucleotide
  Target: LAMA2; (+) strand; PAM type: YTN; PAM sequence: TTG
gagagcatggacccctgcac

SEQ ID NO: 399865 - DNA, 20 bp, Artificial Sequence
  Description of Artificial Sequence: Synthetic oligonucleotide
  Target: LAMA2; (+) strand; PAM type: YTN; PAM sequence: CTG
cacagttgaaaatccatgta

SEQ ID NO: 399866 - DNA, 20 bp, Artificial Sequence
  Description of Artificial Sequence: Synthetic oligonucleotide
  Target: LAMA2; (+) strand; PAM type: YTN; PAM sequence: TTG
aaaatccatgtataacatta

SEQ ID NO: 399867 - DNA, 20 bp, Artificial Sequence
  Description of Artificial Sequence: Synthetic oligonucleotide
  Target: LAMA2; (+) strand; PAM type: YTN; PAM sequence: TTA
gactcttcataaacttcata

SEQ ID NO: 399868 - DNA, 20 bp, Artificial Sequence
  Description of Artificial Sequence: Synthetic oligonucleotide
  Target: LAMA2; (+) strand; PAM type: YTN; PAM sequence: CTC
ttcataaacttcataactaa

SEQ ID NO: 399869 - DNA, 20 bp, Artificial Sequence
  Description of Artificial Sequence: Synthetic oligonucleotide
  Target: LAMA2; (+) strand; PAM type: YTN; PAM sequence: CTT
cataaacttcataactaaac

SEQ ID NO: 399870 - DNA, 20 bp, Artificial Sequence
  Description of Artificial Sequence: Synthetic oligonucleotide
  Target: LAMA2; (+) strand; PAM type: YTN; PAM sequence: TTC
ataaacttcataactaaact

SEQ ID NO: 399871 - DNA, 20 bp, Artificial Sequence
  Description of Artificial Sequence: Synthetic oligonucleotide
  Target: LAMA2; (+) strand; PAM type: YTN; PAM sequence: CTT
cataactaaacttcataaca

SEQ ID NO: 399872 - DNA, 20 bp, Artificial Sequence
  Description of Artificial Sequence: Synthetic oligonucleotide
  Target: LAMA2; (+) strand; PAM type: YTN; PAM sequence: TTC
ataactaaacttcataacat

SEQ ID NO: 399873 - DNA, 20 bp, Artificial Sequence
  Description of Artificial Sequence: Synthetic oligonucleotide
  Target: LAMA2; (+) strand; PAM type: YTN; PAM sequence: CTA
aacttcataacataaacttt

SEQ ID NO: 399874 - DNA, 20 bp, Artificial Sequence
  Description of Artificial Sequence: Synthetic oligonucleotide
  Target: LAMA2; (+) strand; PAM type: YTN; PAM sequence: CTT
cataacataaactttataaa

SEQ ID NO: 399875 - DNA, 20 bp, Artificial Sequence
  Description of Artificial Sequence: Synthetic oligonucleotide
  Target: LAMA2; (+) strand; PAM type: YTN; PAM sequence: TTC
ataacataaactttataaac

SEQ ID NO: 399876 - DNA, 20 bp, Artificial Sequence
  Description of Artificial Sequence: Synthetic oligonucleotide
  Target: LAMA2; (+) strand; PAM type: YTN; PAM sequence: CTT
tataaactaaaaaaagaatc

SEQ ID NO: 399877 - DNA, 20 bp, Artificial Sequence
  Description of Artificial Sequence: Synthetic oligonucleotide
  Target: LAMA2; (+) strand; PAM type: YTN; PAM sequence: TTT
ataaactaaaaaaagaatct

SEQ ID NO: 399878 - DNA, 20 bp, Artificial Sequence
  Description of Artificial Sequence: Synthetic oligonucleotide
  Target: LAMA2; (+) strand; PAM type: YTN; PAM sequence: TTA
taaactaaaaaaagaatcta

SEQ ID NO: 399879 - DNA, 20 bp, Artificial Sequence
  Description of Artificial Sequence: Synthetic oligonucleotide
  Target: LAMA2; (+) strand; PAM type: YTN; PAM sequence: CTA
aaaaaagaatctattcccaa

SEQ ID NO: 399880 - DNA, 20 bp, Artificial Sequence
  Description of Artificial Sequence: Synthetic oligonucleotide
  Target: LAMA2; (+) strand; PAM type: YTN; PAM sequence: CTA
ttcccaagcccaaataatga

SEQ ID NO: 399881 - DNA, 20 bp, Artificial Sequence
  Description of Artificial Sequence: Synthetic oligonucleotide
  Target: LAMA2; (+) strand; PAM type: YTN; PAM sequence: TTC
ccaagcccaaataatgaatc

SEQ ID NO: 399882 - DNA, 20 bp, Artificial Sequence
  Description of Artificial Sequence: Synthetic oligonucleotide
  Target: LAMA2; (+) strand; PAM type: YTN; PAM sequence: TTG
cttgacatatggtgctgtcc

SEQ ID NO: 399883 - DNA, 20 bp, Artificial Sequence
  Description of Artificial Sequence: Synthetic oligonucleotide
  Target: LAMA2; (+) strand; PAM type: YTN; PAM sequence: CTT
gacatatggtgctgtcccac

SEQ ID NO: 399884 - DNA, 20 bp, Artificial Sequence
  Description of Artificial Sequence: Synthetic oligonucleotide
  Target: LAMA2; (+) strand; PAM type: YTN; PAM sequence: TTG
acatatggtgctgtcccaca

SEQ ID NO: 399885 - DNA, 20 bp, Artificial Sequence
  Description of Artificial Sequence: Synthetic oligonucleotide
  Target: LAMA2; (+) strand; PAM type: YTN; PAM sequence: CTG
tcccacacagagaacagtat

SEQ ID NO: 399886 - DNA, 20 bp, Artificial Sequence
  Description of Artificial Sequence: Synthetic oligonucleotide
  Target: LAMA2; (+) strand; PAM type: YTN; PAM sequence: TTA
ttccaatcattaagttttat

SEQ ID NO: 399887 - DNA, 20 bp, Artificial Sequence
  Description of Artificial Sequence: Synthetic oligonucleotide
  Target: LAMA2; (+) strand; PAM type: YTN; PAM sequence: TTC
caatcattaagttttatcaa

SEQ ID NO: 399888 - DNA, 20 bp, Artificial Sequence
  Description of Artificial Sequence: Synthetic oligonucleotide
  Target: LAMA2; (+) strand; PAM type: YTN; PAM sequence: TTA
agttttatcaaaccagttga

SEQ ID NO: 399889 - DNA, 20 bp, Artificial Sequence
  Description of Artificial Sequence: Synthetic oligonucleotide
  Target: LAMA2; (+) strand; PAM type: YTN; PAM sequence: TTT
tatcaaaccagttgaagcct

SEQ ID NO: 399890 - DNA, 20 bp, Artificial Sequence
  Description of Artificial Sequence: Synthetic oligonucleotide
  Target: LAMA2; (+) strand; PAM type: YTN; PAM sequence: TTT
atcaaaccagttgaagcctt

SEQ ID NO: 399891 - DNA, 20 bp, Artificial Sequence
  Description of Artificial Sequence: Synthetic oligonucleotide
  Target: LAMA2; (+) strand; PAM type: YTN; PAM sequence: TTA
tcaaaccagttgaagccttc

SEQ ID NO: 399892 - DNA, 20 bp, Artificial Sequence
  Description of Artificial Sequence: Synthetic oligonucleotide
  Target: LAMA2; (+) strand; PAM type: YTN; PAM sequence: TTG
aagccttccttctatacagt

SEQ ID NO: 399893 - DNA, 20 bp, Artificial Sequence
  Description of Artificial Sequence: Synthetic oligonucleotide
  Target: LAMA2; (+) strand; PAM type: YTN; PAM sequence: CTT
ccttctatacagtggtcctc

SEQ ID NO: 399894 - DNA, 20 bp, Artificial Sequence
  Description of Artificial Sequence: Synthetic oligonucleotide
  Target: LAMA2; (+) strand; PAM type: YTN; PAM sequence: TTC
cttctatacagtggtcctcc

SEQ ID NO: 399895 - DNA, 20 bp, Artificial Sequence
  Description of Artificial Sequence: Synthetic oligonucleotide
  Target: LAMA2; (+) strand; PAM type: YTN; PAM sequence: CTT
ctatacagtggtcctccaaa

SEQ ID NO: 399896 - DNA, 20 bp, Artificial Sequence
  Description of Artificial Sequence: Synthetic oligonucleotide
  Target: LAMA2; (+) strand; PAM type: YTN; PAM sequence: TTC
tatacagtggtcctccaaac

SEQ ID NO: 399897 - DNA, 20 bp, Artificial Sequence
  Description of Artificial Sequence: Synthetic oligonucleotide
  Target: LAMA2; (+) strand; PAM type: YTN; PAM sequence: CTA
tacagtggtcctccaaacac

SEQ ID NO: 399898 - DNA, 20 bp, Artificial Sequence
  Description of Artificial Sequence: Synthetic oligonucleotide
  Target: LAMA2; (+) strand; PAM type: YTN; PAM sequence: CTC
caaacactcagtcattccgt

SEQ ID NO: 399899 - DNA, 20 bp, Artificial Sequence
  Description of Artificial Sequence: Synthetic oligonucleotide
  Target: LAMA2; (+) strand; PAM type: YTN; PAM sequence: CTC
agtcattccgttcagacaag

SEQ ID NO: 399900 - DNA, 20 bp, Artificial Sequence
  Description of Artificial Sequence: Synthetic oligonucleotide
  Target: LAMA2; (+) strand; PAM type: YTN; PAM sequence: TTC
cgttcagacaagtgggtctt

SEQ ID NO: 399901 - DNA, 20 bp, Artificial Sequence
  Description of Artificial Sequence: Synthetic oligonucleotide
  Target: LAMA2; (+) strand; PAM type: YTN; PAM sequence: TTC
agacaagtgggtcttgaaga

SEQ ID NO: 399902 - DNA, 20 bp, Artificial Sequence
  Description of Artificial Sequence: Synthetic oligonucleotide
  Target: LAMA2; (+) strand; PAM type: YTN; PAM sequence: CTT
gaagattctgagatcatgga

SEQ ID NO: 399903 - DNA, 20 bp, Artificial Sequence
  Description of Artificial Sequence: Synthetic oligonucleotide
  Target: LAMA2; (+) strand; PAM type: YTN; PAM sequence: TTG
aagattctgagatcatggat

SEQ ID NO: 399904 - DNA, 20 bp, Artificial Sequence
  Description of Artificial Sequence: Synthetic oligonucleotide
  Target: LAMA2; (+) strand; PAM type: YTN; PAM sequence: TTC
tgagatcatggatgtaatac

SEQ ID NO: 399905 - DNA, 20 bp, Artificial Sequence
  Description of Artificial Sequence: Synthetic oligonucleotide
  Target: LAMA2; (+) strand; PAM type: YTN; PAM sequence: CTG
agatcatggatgtaatacac

SEQ ID NO: 399906 - DNA, 20 bp, Artificial Sequence
  Description of Artificial Sequence: Synthetic oligonucleotide
  Target: LAMA2; (+) strand; PAM type: YTN; PAM sequence: CTT
gcaaacgctaacctgttgag

SEQ ID NO: 399907 - DNA, 20 bp, Artificial Sequence
  Description of Artificial Sequence: Synthetic oligonucleotide
  Target: LAMA2; (+) strand; PAM type: YTN; PAM sequence: TTG
caaacgctaacctgttgaga

SEQ ID NO: 399908 - DNA, 20 bp, Artificial Sequence
  Description of Artificial Sequence: Synthetic oligonucleotide
  Target: LAMA2; (+) strand; PAM type: YTN; PAM sequence: CTA
acctgttgagattctgtgtt

SEQ ID NO: 399909 - DNA, 20 bp, Artificial Sequence
  Description of Artificial Sequence: Synthetic oligonucleotide
  Target: LAMA2; (+) strand; PAM type: YTN; PAM sequence: CTG
ttgagattctgtgttattat

SEQ ID NO: 399910 - DNA, 20 bp, Artificial Sequence
  Description of Artificial Sequence: Synthetic oligonucleotide
  Target: LAMA2; (+) strand; PAM type: YTN; PAM sequence: TTG
agattctgtgttattatttt

SEQ ID NO: 399911 - DNA, 20 bp, Artificial Sequence
  Description of Artificial Sequence: Synthetic oligonucleotide
  Target: LAMA2; (+) strand; PAM type: YTN; PAM sequence: TTC
tgtgttattattttatattt

SEQ ID NO: 399912 - DNA, 20 bp, Artificial Sequence
  Description of Artificial Sequence: Synthetic oligonucleotide
  Target: LAMA2; (+) strand; PAM type: YTN; PAM sequence: CTG
tgttattattttatatttta

SEQ ID NO: 399913 - DNA, 20 bp, Artificial Sequence
  Description of Artificial Sequence: Synthetic oligonucleotide
  Target: LAMA2; (+) strand; PAM type: YTN; PAM sequence: TTA
ttattttatattttaaaaat

SEQ ID NO: 399914 - DNA, 20 bp, Artificial Sequence
  Description of Artificial Sequence: Synthetic oligonucleotide
  Target: LAMA2; (+) strand; PAM type: YTN; PAM sequence: TTA
ttttatattttaaaaataag

SEQ ID NO: 399915 - DNA, 20 bp, Artificial Sequence
  Description of Artificial Sequence: Synthetic oligonucleotide
  Target: LAMA2; (+) strand; PAM type: YTN; PAM sequence: TTT
tatattttaaaaataagaga

SEQ ID NO: 399916 - DNA, 20 bp, Artificial Sequence
  Description of Artificial Sequence: Synthetic oligonucleotide
  Target: LAMA2; (+) strand; PAM type: YTN; PAM sequence: TTT
atattttaaaaataagagaa

SEQ ID NO: 399917 - DNA, 20 bp, Artificial Sequence
  Description of Artificial Sequence: Synthetic oligonucleotide
  Target: LAMA2; (+) strand; PAM type: YTN; PAM sequence: TTA
tattttaaaaataagagaat

SEQ ID NO: 399918 - DNA, 20 bp, Artificial Sequence
  Description of Artificial Sequence: Synthetic oligonucleotide
  Target: LAMA2; (+) strand; PAM type: YTN; PAM sequence: TTT
taaaaataagagaataaact

SEQ ID NO: 399919 - DNA, 20 bp, Artificial Sequence
  Description of Artificial Sequence: Synthetic oligonucleotide
  Target: LAMA2; (+) strand; PAM type: YTN; PAM sequence: TTT
aaaaataagagaataaactg

SEQ ID NO: 399920 - DNA, 20 bp, Artificial Sequence
  Description of Artificial Sequence: Synthetic oligonucleotide
  Target: LAMA2; (+) strand; PAM type: YTN; PAM sequence: TTA
aaaataagagaataaactgg

SEQ ID NO: 399921 - DNA, 20 bp, Artificial Sequence
  Description of Artificial Sequence: Synthetic oligonucleotide
  Target: LAMA2; (+) strand; PAM type: YTN; PAM sequence: CTG
gaatactgcagtgctgctaa

SEQ ID NO: 399922 - DNA, 20 bp, Artificial Sequence
  Description of Artificial Sequence: Synthetic oligonucleotide
  Target: LAMA2; (+) strand; PAM type: YTN; PAM sequence: CTG
cagtgctgctaaaccaaagt

SEQ ID NO: 399923 - DNA, 20 bp, Artificial Sequence
  Description of Artificial Sequence: Synthetic oligonucleotide
  Target: LAMA2; (+) strand; PAM type: YTN; PAM sequence: CTG
ctaaaccaaagtatgatata

SEQ ID NO: 399924 - DNA, 20 bp, Artificial Sequence
  Description of Artificial Sequence: Synthetic oligonucleotide
  Target: LAMA2; (+) strand; PAM type: YTN; PAM sequence: CTA
aaccaaagtatgatatagga

SEQ ID NO: 399925 - DNA, 20 bp, Artificial Sequence
  Description of Artificial Sequence: Synthetic oligonucleotide
  Target: LAMA2; (+) strand; PAM type: YTN; PAM sequence: TTG
tgactaagggatccttttat

SEQ ID NO: 399926 - DNA, 20 bp, Artificial Sequence
  Description of Artificial Sequence: Synthetic oligonucleotide
  Target: LAMA2; (+) strand; PAM type: YTN; PAM sequence: CTA
agggatccttttattattaa

SEQ ID NO: 399927 - DNA, 20 bp, Artificial Sequence
  Description of Artificial Sequence: Synthetic oligonucleotide
  Target: LAMA2; (+) strand; PAM type: YTN; PAM sequence: CTT
ttattattaaagatatactc

SEQ ID NO: 399928 - DNA, 20 bp, Artificial Sequence
  Description of Artificial Sequence: Synthetic oligonucleotide
  Target: LAMA2; (+) strand; PAM type: YTN; PAM sequence: TTT
tattattaaagatatactcc

SEQ ID NO: 399929 - DNA, 20 bp, Artificial Sequence
  Description of Artificial Sequence: Synthetic oligonucleotide
  Target: LAMA2; (+) strand; PAM type: YTN; PAM sequence: TTT
attattaaagatatactcct

SEQ ID NO: 399930 - DNA, 20 bp, Artificial Sequence
  Description of Artificial Sequence: Synthetic oligonucleotide
  Target: LAMA2; (+) strand; PAM type: YTN; PAM sequence: TTA
ttattaaagatatactcctt

SEQ ID NO: 399931 - DNA, 20 bp, Artificial Sequence
  Description of Artificial Sequence: Synthetic oligonucleotide
  Target: LAMA2; (+) strand; PAM type: YTN; PAM sequence: TTA
ttaaagatatactccttttg

SEQ ID NO: 399932 - DNA, 20 bp, Artificial Sequence
  Description of Artificial Sequence: Synthetic oligonucleotide
  Target: LAMA2; (+) strand; PAM type: YTN; PAM sequence: TTA
aagatatactccttttgaat

SEQ ID NO: 399933 - DNA, 20 bp, Artificial Sequence
  Description of Artificial Sequence: Synthetic oligonucleotide
  Target: LAMA2; (+) strand; PAM type: YTN; PAM sequence: CTC
cttttgaatttgcatattac

SEQ ID NO: 399934 - DNA, 20 bp, Artificial Sequence
  Description of Artificial Sequence: Synthetic oligonucleotide
  Target: LAMA2; (+) strand; PAM type: YTN; PAM sequence: CTT
ttgaatttgcatattaccct

SEQ ID NO: 399935 - DNA, 20 bp, Artificial Sequence
  Description of Artificial Sequence: Synthetic oligonucleotide
  Target: LAMA2; (+) strand; PAM type: YTN; PAM sequence: TTT
tgaatttgcatattaccctt

SEQ ID NO: 399936 - DNA, 20 bp, Artificial Sequence
  Description of Artificial Sequence: Synthetic oligonucleotide
  Target: LAMA2; (+) strand; PAM type: YTN; PAM sequence: TTT
gaatttgcatattacccttt

SEQ ID NO: 399937 - DNA, 20 bp, Artificial Sequence
  Description of Artificial Sequence: Synthetic oligonucleotide
  Target: LAMA2; (+) strand; PAM type: YTN; PAM sequence: TTG
aatttgcatattaccctttg

SEQ ID NO: 399938 - DNA, 20 bp, Artificial Sequence
  Description of Artificial Sequence: Synthetic oligonucleotide
  Target: LAMA2; (+) strand; PAM type: YTN; PAM sequence: TTT
gcatattaccctttgcctga

SEQ ID NO: 399939 - DNA, 20 bp, Artificial Sequence
  Description of Artificial Sequence: Synthetic oligonucleotide
  Target: LAMA2; (+) strand; PAM type: YTN; PAM sequence: TTG
catattaccctttgcctgaa

SEQ ID NO: 399940 - DNA, 20 bp, Artificial Sequence
  Description of Artificial Sequence: Synthetic oligonucleotide
  Target: LAMA2; (+) strand; PAM type: YTN; PAM sequence: TTA
ccctttgcctgaatcagcct

SEQ ID NO: 399941 - DNA, 20 bp, Artificial Sequence
  Description of Artificial Sequence: Synthetic oligonucleotide
  Target: LAMA2; (+) strand; PAM type: YTN; PAM sequence: CTT
tgcctgaatcagcctttcca

SEQ ID NO: 399942 - DNA, 20 bp, Artificial Sequence
  Description of Artificial Sequence: Synthetic oligonucleotide
  Target: LAMA2; (+) strand; PAM type: YTN; PAM sequence: TTT
gcctgaatcagcctttccat

SEQ ID NO: 399943 - DNA, 20 bp, Artificial Sequence
  Description of Artificial Sequence: Synthetic oligonucleotide
  Target: LAMA2; (+) strand; PAM type: YTN; PAM sequence: TTG
cctgaatcagcctttccata

SEQ ID NO: 399944 - DNA, 20 bp, Artificial Sequence
  Description of Artificial Sequence: Synthetic oligonucleotide
  Target: LAMA2; (+) strand; PAM type: YTN; PAM sequence: CTG
aatcagcctttccatagcag

SEQ ID NO: 399945 - DNA, 20 bp, Artificial Sequence
  Description of Artificial Sequence: Synthetic oligonucleotide
  Target: LAMA2; (+) strand; PAM type: YTN; PAM sequence: CTT
tccatagcaggcatgcaaaa

SEQ ID NO: 399946 - DNA, 20 bp, Artificial Sequence
  Description of Artificial Sequence: Synthetic oligonucleotide
  Target: LAMA2; (+) strand; PAM type: YTN; PAM sequence: TTT
ccatagcaggcatgcaaaag

SEQ ID NO: 399947 - DNA, 20 bp, Artificial Sequence
  Description of Artificial Sequence: Synthetic oligonucleotide
  Target: LAMA2; (+) strand; PAM type: YTN; PAM sequence: TTC
catagcaggcatgcaaaaga

SEQ ID NO: 399948 - DNA, 20 bp, Artificial Sequence
  Description of Artificial Sequence: Synthetic oligonucleotide
  Target: LAMA2; (+) strand; PAM type: YTN; PAM sequence: CTG
ctctattgaccacaatttta

SEQ ID NO: 399949 - DNA, 20 bp, Artificial Sequence
  Description of Artificial Sequence: Synthetic oligonucleotide
  Target: LAMA2; (+) strand; PAM type: YTN; PAM sequence: CTC
tattgaccacaattttagac

SEQ ID NO: 399950 - DNA, 20 bp, Artificial Sequence
  Description of Artificial Sequence: Synthetic oligonucleotide
  Target: LAMA2; (+) strand; PAM type: YTN; PAM sequence: CTA
ttgaccacaattttagacta

SEQ ID NO: 399951 - DNA, 20 bp, Artificial Sequence
  Description of Artificial Sequence: Synthetic oligonucleotide
  Target: LAMA2; (+) strand; PAM type: YTN; PAM sequence: TTG
accacaattttagactaaaa

SEQ ID NO: 399952 - DNA, 20 bp, Artificial Sequence
  Description of Artificial Sequence: Synthetic oligonucleotide
  Target: LAMA2; (+) strand; PAM type: YTN; PAM sequence: TTT
tagactaaaaggatgaaatt

SEQ ID NO: 399953 - DNA, 20 bp, Artificial Sequence
  Description of Artificial Sequence: Synthetic oligonucleotide
  Target: LAMA2; (+) strand; PAM type: YTN; PAM sequence: TTT
agactaaaaggatgaaatta

SEQ ID NO: 399954 - DNA, 20 bp, Artificial Sequence
  Description of Artificial Sequence: Synthetic oligonucleotide
  Target: LAMA2; (+) strand; PAM type: YTN; PAM sequence: TTA
gactaaaaggatgaaattaa

SEQ ID NO: 399955 - DNA, 20 bp, Artificial Sequence
  Description of Artificial Sequence: Synthetic oligonucleotide
  Target: LAMA2; (+) strand; PAM type: YTN; PAM sequence: CTA
aaaggatgaaattaagcctg

SEQ ID NO: 399956 - DNA, 20 bp, Artificial Sequence
  Description of Artificial Sequence: Synthetic oligonucleotide
  Target: LAMA2; (+) strand; PAM type: YTN; PAM sequence: TTA
agcctgggtcccctggccta

SEQ ID NO: 399957 - DNA, 20 bp, Artificial Sequence
  Description of Artificial Sequence: Synthetic oligonucleotide
  Target: LAMA2; (+) strand; PAM type: YTN; PAM sequence: CTG
ggtcccctggcctactgtgg

SEQ ID NO: 399958 - DNA, 20 bp, Artificial Sequence
  Description of Artificial Sequence: Synthetic oligonucleotide
  Target: LAMA2; (+) strand; PAM type: YTN; PAM sequence: CTG
gcctactgtggtctggagaa

SEQ ID NO: 399959 - DNA, 20 bp, Artificial Sequence
  Description of Artificial Sequence: Synthetic oligonucleotide
  Target: LAMA2; (+) strand; PAM type: YTN; PAM sequence: CTA
ctgtggtctggagaacaaag

SEQ ID NO: 399960 - DNA, 20 bp, Artificial Sequence
  Description of Artificial Sequence: Synthetic oligonucleotide
  Target: LAMA2; (+) strand; PAM type: YTN; PAM sequence: CTG
tggtctggagaacaaagcag

SEQ ID NO: 399961 - DNA, 20 bp, Artificial Sequence
  Description of Artificial Sequence: Synthetic oligonucleotide
  Target: LAMA2; (+) strand; PAM type: YTN; PAM sequence: CTG
gagaacaaagcagtcttttc

SEQ ID NO: 399962 - DNA, 20 bp, Artificial Sequence
  Description of Artificial Sequence: Synthetic oligonucleotide
  Target: LAMA2; (+) strand; PAM type: YTN; PAM sequence: CTT
ttccaggtgaaattgctgat

SEQ ID NO: 399963 - DNA, 20 bp, Artificial Sequence
  Description of Artificial Sequence: Synthetic oligonucleotide
  Target: LAMA2; (+) strand; PAM type: YTN; PAM sequence: TTT
tccaggtgaaattgctgatc

SEQ ID NO: 399964 - DNA, 20 bp, Artificial Sequence
  Description of Artificial Sequence: Synthetic oligonucleotide
  Target: LAMA2; (+) strand; PAM type: YTN; PAM sequence: TTT
ccaggtgaaattgctgatcc

SEQ ID NO: 399965 - DNA, 20 bp, Artificial Sequence
  Description of Artificial Sequence: Synthetic oligonucleotide
  Target: LAMA2; (+) strand; PAM type: YTN; PAM sequence: TTC
caggtgaaattgctgatccc

SEQ ID NO: 399966 - DNA, 20 bp, Artificial Sequence
  Description of Artificial Sequence: Synthetic oligonucleotide
  Target: LAMA2; (+) strand; PAM type: YTN; PAM sequence: TTG
ctgatccctcatacaaagtt

SEQ ID NO: 399967 - DNA, 20 bp, Artificial Sequence
  Description of Artificial Sequence: Synthetic oligonucleotide
  Target: LAMA2; (+) strand; PAM type: YTN; PAM sequence: CTG
atccctcatacaaagttttg

SEQ ID NO: 399968 - DNA, 20 bp, Artificial Sequence
  Description of Artificial Sequence: Synthetic oligonucleotide
  Target: LAMA2; (+) strand; PAM type: YTN; PAM sequence: CTC
atacaaagttttgattcctc

SEQ ID NO: 399969 - DNA, 20 bp, Artificial Sequence
  Description of Artificial Sequence: Synthetic oligonucleotide
  Target: LAMA2; (+) strand; PAM type: YTN; PAM sequence: TTT
tgattcctcctttagagtgt

SEQ ID NO: 399970 - DNA, 20 bp, Artificial Sequence
  Description of Artificial Sequence: Synthetic oligonucleotide
  Target: LAMA2; (+) strand; PAM type: YTN; PAM sequence: TTT
gattcctcctttagagtgtg

SEQ ID NO: 399971 - DNA, 20 bp, Artificial Sequence
  Description of Artificial Sequence: Synthetic oligonucleotide
  Target: LAMA2; (+) strand; PAM type: YTN; PAM sequence: TTG
attcctcctttagagtgtga

SEQ ID NO: 399972 - DNA, 20 bp, Artificial Sequence
  Description of Artificial Sequence: Synthetic oligonucleotide
  Target: LAMA2; (+) strand; PAM type: YTN; PAM sequence: TTC
ctcctttagagtgtgaatgg

SEQ ID NO: 399973 - DNA, 20 bp, Artificial Sequence
  Description of Artificial Sequence: Synthetic oligonucleotide
  Target: LAMA2; (+) strand; PAM type: YTN; PAM sequence: CTC
ctttagagtgtgaatggtgg

SEQ ID NO: 399974 - DNA, 20 bp, Artificial Sequence
  Description of Artificial Sequence: Synthetic oligonucleotide
  Target: LAMA2; (+) strand; PAM type: YTN; PAM sequence: CTT
tagagtgtgaatggtggaaa

SEQ ID NO: 399975 - DNA, 20 bp, Artificial Sequence
  Description of Artificial Sequence: Synthetic oligonucleotide
  Target: LAMA2; (+) strand; PAM type: YTN; PAM sequence: TTT
agagtgtgaatggtggaaat

SEQ ID NO: 399976 - DNA, 20 bp, Artificial Sequence
  Description of Artificial Sequence: Synthetic oligonucleotide
  Target: LAMA2; (+) strand; PAM type: YTN; PAM sequence: TTA
gagtgtgaatggtggaaata

SEQ ID NO: 399977 - DNA, 20 bp, Artificial Sequence
  Description of Artificial Sequence: Synthetic oligonucleotide
  Target: LAMA2; (+) strand; PAM type: YTN; PAM sequence: CTT
ccattagagaaaaaacaata

SEQ ID NO: 399978 - DNA, 20 bp, Artificial Sequence
  Description of Artificial Sequence: Synthetic oligonucleotide
  Target: LAMA2; (+) strand; PAM type: YTN; PAM sequence: TTC
cattagagaaaaaacaataa

SEQ ID NO: 399979 - DNA, 20 bp, Artificial Sequence
  Description of Artificial Sequence: Synthetic oligonucleotide
  Target: LAMA2; (+) strand; PAM type: YTN; PAM sequence: TTA
gagaaaaaacaataagtggc

SEQ ID NO: 399980 - DNA, 20 bp, Artificial Sequence
  Description of Artificial Sequence: Synthetic oligonucleotide
  Target: LAMA2; (+) strand; PAM type: YTN; PAM sequence: TTC
tattggaaagattatcccta

SEQ ID NO: 399981 - DNA, 20 bp, Artificial Sequence
  Description of Artificial Sequence: Synthetic oligonucleotide
  Target: LAMA2; (+) strand; PAM type: YTN; PAM sequence: CTA
ttggaaagattatccctaag

SEQ ID NO: 399982 - DNA, 20 bp, Artificial Sequence
  Description of Artificial Sequence: Synthetic oligonucleotide
  Target: LAMA2; (+) strand; PAM type: YTN; PAM sequence: TTG
gaaagattatccctaagagc

SEQ ID NO: 399983 - DNA, 20 bp, Artificial Sequence
  Description of Artificial Sequence: Synthetic oligonucleotide
  Target: LAMA2; (+) strand; PAM type: YTN; PAM sequence: TTA
tccctaagagcgagacgtag

SEQ ID NO: 399984 - DNA, 20 bp, Artificial Sequence
  Description of Artificial Sequence: Synthetic oligonucleotide
  Target: LAMA2; (+) strand; PAM type: YTN; PAM sequence: CTA
agagcgagacgtagcttgtc

SEQ ID NO: 399985 - DNA, 20 bp, Artificial Sequence
  Description of Artificial Sequence: Synthetic oligonucleotide
  Target: LAMA2; (+) strand; PAM type: YTN; PAM sequence: CTT
gtcatatccaaccccaccat

SEQ ID NO: 399986 - DNA, 20 bp, Artificial Sequence
  Description of Artificial Sequence: Synthetic oligonucleotide
  Target: LAMA2; (+) strand; PAM type: YTN; PAM sequence: TTG
tcatatccaaccccaccatg

SEQ ID NO: 399987 - DNA, 20 bp, Artificial Sequence
  Description of Artificial Sequence: Synthetic oligonucleotide
  Target: LAMA2; (+) strand; PAM type: YTN; PAM sequence: TTC
agaacactcctgtatatcat

SEQ ID NO: 399988 - DNA, 20 bp, Artificial Sequence
  Description of Artificial Sequence: Synthetic oligonucleotide
  Target: LAMA2; (+) strand; PAM type: YTN; PAM sequence: CTC
ctgtatatcatctcagcaag

SEQ ID NO: 399989 - DNA, 20 bp, Artificial Sequence
  Description of Artificial Sequence: Synthetic oligonucleotide
  Target: LAMA2; (+) strand; PAM type: YTN; PAM sequence: CTG
tatatcatctcagcaagaga

SEQ ID NO: 399990 - DNA, 20 bp, Artificial Sequence
  Description of Artificial Sequence: Synthetic oligonucleotide
  Target: LAMA2; (+) strand; PAM type: YTN; PAM sequence: CTC
agcaagagacaaaggcctgt

SEQ ID NO: 399991 - DNA, 20 bp, Artificial Sequence
  Description of Artificial Sequence: Synthetic oligonucleotide
  Target: LAMA2; (+) strand; PAM type: YTN; PAM sequence: CTG
tgcaataaaaatggggctta

SEQ ID NO: 399992 - DNA, 20 bp, Artificial Sequence
  Description of Artificial Sequence: Synthetic oligonucleotide
  Target: LAMA2; (+) strand; PAM type: YTN; PAM sequence: CTT
agagctaaaaacttatctgg

SEQ ID NO: 399993 - DNA, 20 bp, Artificial Sequence
  Description of Artificial Sequence: Synthetic oligonucleotide
  Target: LAMA2; (+) strand; PAM type: YTN; PAM sequence: TTA
gagctaaaaacttatctggg

SEQ ID NO: 399994 - DNA, 20 bp, Artificial Sequence
  Description of Artificial Sequence: Synthetic oligonucleotide
  Target: LAMA2; (+) strand; PAM type: YTN; PAM sequence: CTA
aaaacttatctgggctttgt

SEQ ID NO: 399995 - DNA, 20 bp, Artificial Sequence
  Description of Artificial Sequence: Synthetic oligonucleotide
  Target: LAMA2; (+) strand; PAM type: YTN; PAM sequence: CTT
atctgggctttgttgtgtgt

SEQ ID NO: 399996 - DNA, 20 bp, Artificial Sequence
  Description of Artificial Sequence: Synthetic oligonucleotide
  Target: LAMA2; (+) strand; PAM type: YTN; PAM sequence: TTA
tctgggctttgttgtgtgtt

SEQ ID NO: 399997 - DNA, 20 bp, Artificial Sequence
  Description of Artificial Sequence: Synthetic oligonucleotide
  Target: LAMA2; (+) strand; PAM type: YTN; PAM sequence: CTG
ggctttgttgtgtgttcaga

SEQ ID NO: 399998 - DNA, 20 bp, Artificial Sequence
  Description of Artificial Sequence: Synthetic oligonucleotide
  Target: LAMA2; (+) strand; PAM type: YTN; PAM sequence: CTT
tgttgtgtgttcagaatcag

SEQ ID NO: 399999 - DNA, 20 bp, Artificial Sequence
  Description of Artificial Sequence: Synthetic oligonucleotide
  Target: LAMA2; (+) strand; PAM type: YTN; PAM sequence: TTT
gttgtgtgttcagaatcaga

SEQ ID NO: 400000 - DNA, 20 bp, Artificial Sequence
  Description of Artificial Sequence: Synthetic oligonucleotide
  Target: LAMA2; (+) strand; PAM type: YTN; PAM sequence: TTG
ttgtgtgttcagaatcagag

SEQ ID NO: 400001 - DNA, 20 bp, Artificial Sequence
  Description of Artificial Sequence: Synthetic oligonucleotide
  Target: LAMA2; (+) strand; PAM type: YTN; PAM sequence: TTG
tgtgttcagaatcagagtct

SEQ ID NO: 400002 - DNA, 20 bp, Artificial Sequence
  Description of Artificial Sequence: Synthetic oligonucleotide
  Target: LAMA2; (+) strand; PAM type: YTN; PAM sequence: TTC
agaatcagagtctgagattc

SEQ ID NO: 400003 - DNA, 20 bp, Artificial Sequence
  Description of Artificial Sequence: Synthetic oligonucleotide
  Target: LAMA2; (+) strand; PAM type: YTN; PAM sequence: CTG
agattctatggcgttttttg

SEQ ID NO: 400004 - DNA, 20 bp, Artificial Sequence
  Description of Artificial Sequence: Synthetic oligonucleotide
  Target: LAMA2; (+) strand; PAM type: YTN; PAM sequence: TTC
tatggcgttttttgcaagta

SEQ ID NO: 400005 - DNA, 20 bp, Artificial Sequence
  Description of Artificial Sequence: Synthetic oligonucleotide
  Target: LAMA2; (+) strand; PAM type: YTN; PAM sequence: CTA
tggcgttttttgcaagtaag

SEQ ID NO: 400006 - DNA, 20 bp, Artificial Sequence
  Description of Artificial Sequence: Synthetic oligonucleotide
  Target: LAMA2; (+) strand; PAM type: YTN; PAM sequence: TTT
tttgcaagtaagttaattta

SEQ ID NO: 400007 - DNA, 20 bp, Artificial Sequence
  Description of Artificial Sequence: Synthetic oligonucleotide
  Target: LAMA2; (+) strand; PAM type: YTN; PAM sequence: TTT
ttgcaagtaagttaatttag

SEQ ID NO: 400008 - DNA, 20 bp, Artificial Sequence
  Description of Artificial Sequence: Synthetic oligonucleotide
  Target: LAMA2; (+) strand; PAM type: YTN; PAM sequence: TTT
tgcaagtaagttaatttaga

SEQ ID NO: 400009 - DNA, 20 bp, Artificial Sequence
  Description of Artificial Sequence: Synthetic oligonucleotide
  Target: LAMA2; (+) strand; PAM type: YTN; PAM sequence: TTT
gcaagtaagttaatttagac

SEQ ID NO: 400010 - DNA, 20 bp, Artificial Sequence
  Description of Artificial Sequence: Synthetic oligonucleotide
  Target: LAMA2; (+) strand; PAM type: YTN; PAM sequence: TTG
caagtaagttaatttagacc

SEQ ID NO: 400011 - DNA, 20 bp, Artificial Sequence
  Description of Artificial Sequence: Synthetic oligonucleotide
  Target: LAMA2; (+) strand; PAM type: YTN; PAM sequence: TTA
atttagaccagaaataaaca

SEQ ID NO: 400012 - DNA, 20 bp, Artificial Sequence
  Description of Artificial Sequence: Synthetic oligonucleotide
  Target: LAMA2; (+) strand; PAM type: YTN; PAM sequence: TTT
agaccagaaataaacagaaa

SEQ ID NO: 400013 - DNA, 20 bp, Artificial Sequence
  Description of Artificial Sequence: Synthetic oligonucleotide
  Target: LAMA2; (+) strand; PAM type: YTN; PAM sequence: TTA
gaccagaaataaacagaaat

SEQ ID NO: 400014 - DNA, 20 bp, Artificial Sequence
  Description of Artificial Sequence: Synthetic oligonucleotide
  Target: LAMA2; (+) strand; PAM type: YTN; PAM sequence: CTT
caagagacttacagataaca

SEQ ID NO: 400015 - DNA, 20 bp, Artificial Sequence
  Description of Artificial Sequence: Synthetic oligonucleotide
  Target: LAMA2; (+) strand; PAM type: YTN; PAM sequence: TTC
aagagacttacagataacat

SEQ ID NO: 400016 - DNA, 20 bp, Artificial Sequence
  Description of Artificial Sequence: Synthetic oligonucleotide
  Target: LAMA2; (+) strand; PAM type: YTN; PAM sequence: CTT
acagataacataaagggatg

SEQ ID NO: 400017 - DNA, 20 bp, Artificial Sequence
  Description of Artificial Sequence: Synthetic oligonucleotide
  Target: LAMA2; (+) strand; PAM type: YTN; PAM sequence: TTA
cagataacataaagggatgg

SEQ ID NO: 400018 - DNA, 20 bp, Artificial Sequence
  Description of Artificial Sequence: Synthetic oligonucleotide
  Target: LAMA2; (+) strand; PAM type: YTN; PAM sequence: CTG
tgttaaaccaaagactattt

SEQ ID NO: 400019 - DNA, 20 bp, Artificial Sequence
  Description of Artificial Sequence: Synthetic oligonucleotide
  Target: LAMA2; (+) strand; PAM type: YTN; PAM sequence: TTA
aaccaaagactatttgtctt

SEQ ID NO: 400020 - DNA, 20 bp, Artificial Sequence
  Description of Artificial Sequence: Synthetic oligonucleotide
  Target: LAMA2; (+) strand; PAM type: YTN; PAM sequence: CTA
tttgtcttatttaaaggtat

SEQ ID NO: 400021 - DNA, 20 bp, Artificial Sequence
  Description of Artificial Sequence: Synthetic oligonucleotide
  Target: LAMA2; (+) strand; PAM type: YTN; PAM sequence: TTT
gtcttatttaaaggtattca

SEQ ID NO: 400022 - DNA, 20 bp, Artificial Sequence
  Description of Artificial Sequence: Synthetic oligonucleotide
  Target: LAMA2; (+) strand; PAM type: YTN; PAM sequence: TTG
tcttatttaaaggtattcaa

SEQ ID NO: 400023 - DNA, 20 bp, Artificial Sequence
  Description of Artificial Sequence: Synthetic oligonucleotide
  Target: LAMA2; (+) strand; PAM type: YTN; PAM sequence: CTT
atttaaaggtattcaaactc

SEQ ID NO: 400024 - DNA, 20 bp, Artificial Sequence
  Description of Artificial Sequence: Synthetic oligonucleotide
  Target: LAMA2; (+) strand; PAM type: YTN; PAM sequence: TTA
tttaaaggtattcaaactca

SEQ ID NO: 400025 - DNA, 20 bp, Artificial Sequence
  Description of Artificial Sequence: Synthetic oligonucleotide
  Target: LAMA2; (+) strand; PAM type: YTN; PAM sequence: TTT
aaaggtattcaaactcaatt

SEQ ID NO: 400026 - DNA, 20 bp, Artificial Sequence
  Description of Artificial Sequence: Synthetic oligonucleotide
  Target: LAMA2; (+) strand; PAM type: YTN; PAM sequence: TTA
aaggtattcaaactcaattt

SEQ ID NO: 400027 - DNA, 20 bp, Artificial Sequence
  Description of Artificial Sequence: Synthetic oligonucleotide
  Target: LAMA2; (+) strand; PAM type: YTN; PAM sequence: TTC
aaactcaattttcttgctgg

SEQ ID NO: 400028 - DNA, 20 bp, Artificial Sequence
  Description of Artificial Sequence: Synthetic oligonucleotide
  Target: LAMA2; (+) strand; PAM type: YTN; PAM sequence: CTC
aattttcttgctgggcaaaa

SEQ ID NO: 400029 - DNA, 20 bp, Artificial Sequence
  Description of Artificial Sequence: Synthetic oligonucleotide
  Target: LAMA2; (+) strand; PAM type: YTN; PAM sequence: TTT
tcttgctgggcaaaagaaaa

SEQ ID NO: 400030 - DNA, 20 bp, Artificial Sequence
  Description of Artificial Sequence: Synthetic oligonucleotide
  Target: LAMA2; (+) strand; PAM type: YTN; PAM sequence: TTT
cttgctgggcaaaagaaaac

SEQ ID NO: 400031 - DNA, 20 bp, Artificial Sequence
  Description of Artificial Sequence: Synthetic oligonucleotide
  Target: LAMA2; (+) strand; PAM type: YTN; PAM sequence: TTC
ttgctgggcaaaagaaaaca

SEQ ID NO: 400032 - DNA, 20 bp, Artificial Sequence
  Description of Artificial Sequence: Synthetic oligonucleotide
  Target: LAMA2; (+) strand; PAM type: YTN; PAM sequence: CTT
gctgggcaaaagaaaacaag

SEQ ID NO: 400033 - DNA, 20 bp, Artificial Sequence
  Description of Artificial Sequence: Synthetic oligonucleotide
  Target: LAMA2; (+) strand; PAM type: YTN; PAM sequence: TTG
ctgggcaaaagaaaacaagc

SEQ ID NO: 400034 - DNA, 20 bp, Artificial Sequence
  Description of Artificial Sequence: Synthetic oligonucleotide
  Target: LAMA2; (+) strand; PAM type: YTN; PAM sequence: CTG
ggcaaaagaaaacaagcctg

SEQ ID NO: 400035 - DNA, 20 bp, Artificial Sequence
  Description of Artificial Sequence: Synthetic oligonucleotide
  Target: LAMA2; (+) strand; PAM type: YTN; PAM sequence: CTG
caagcccacagtcaccatgt

SEQ ID NO: 400036 - DNA, 20 bp, Artificial Sequence
  Description of Artificial Sequence: Synthetic oligonucleotide
  Target: LAMA2; (+) strand; PAM type: YTN; PAM sequence: CTA
gaggagccaaatgcaggtgt

SEQ ID NO: 400037 - DNA, 20 bp, Artificial Sequence
  Description of Artificial Sequence: Synthetic oligonucleotide
  Target: LAMA2; (+) strand; PAM type: YTN; PAM sequence: TTG
atgtctggtggttttagttt

SEQ ID NO: 400038 - DNA, 20 bp, Artificial Sequence
  Description of Artificial Sequence: Synthetic oligonucleotide
  Target: LAMA2; (+) strand; PAM type: YTN; PAM sequence: CTG
gtggttttagtttttcattc

SEQ ID NO: 400039 - DNA, 20 bp, Artificial Sequence
  Description of Artificial Sequence: Synthetic oligonucleotide
  Target: LAMA2; (+) strand; PAM type: YTN; PAM sequence: TTT
tagtttttcattccactggc

SEQ ID NO: 400040 - DNA, 20 bp, Artificial Sequence
  Description of Artificial Sequence: Synthetic oligonucleotide
  Target: LAMA2; (+) strand; PAM type: YTN; PAM sequence: TTT
agtttttcattccactggct

SEQ ID NO: 400041 - DNA, 20 bp, Artificial Sequence
  Description of Artificial Sequence: Synthetic oligonucleotide
  Target: LAMA2; (+) strand; PAM type: YTN; PAM sequence: TTA
gtttttcattccactggctg

SEQ ID NO: 400042 - DNA, 20 bp, Artificial Sequence
  Description of Artificial Sequence: Synthetic oligonucleotide
  Target: LAMA2; (+) strand; PAM type: YTN; PAM sequence: TTT
ttcattccactggctgcaga

SEQ ID NO: 400043 - DNA, 20 bp, Artificial Sequence
  Description of Artificial Sequence: Synthetic oligonucleotide
  Target: LAMA2; (+) strand; PAM type: YTN; PAM sequence: TTT
tcattccactggctgcagag

SEQ ID NO: 400044 - DNA, 20 bp, Artificial Sequence
  Description of Artificial Sequence: Synthetic oligonucleotide
  Target: LAMA2; (+) strand; PAM type: YTN; PAM sequence: TTT
cattccactggctgcagagg

SEQ ID NO: 400045 - DNA, 20 bp, Artificial Sequence
  Description of Artificial Sequence: Synthetic oligonucleotide
  Target: LAMA2; (+) strand; PAM type: YTN; PAM sequence: TTC
attccactggctgcagaggg

SEQ ID NO: 400046 - DNA, 20 bp, Artificial Sequence
  Description of Artificial Sequence: Synthetic oligonucleotide
  Target: LAMA2; (+) strand; PAM type: YTN; PAM sequence: TTC
cactggctgcagaggggact

SEQ ID NO: 400047 - DNA, 20 bp, Artificial Sequence
  Description of Artificial Sequence: Synthetic oligonucleotide
  Target: LAMA2; (+) strand; PAM type: YTN; PAM sequence: CTG
gctgcagaggggactccctt

SEQ ID NO: 400048 - DNA, 20 bp, Artificial Sequence
  Description of Artificial Sequence: Synthetic oligonucleotide
  Target: LAMA2; (+) strand; PAM type: YTN; PAM sequence: CTG
cagaggggactcccttttat

SEQ ID NO: 400049 - DNA, 20 bp, Artificial Sequence
  Description of Artificial Sequence: Synthetic oligonucleotide
  Target: LAMA2; (+) strand; PAM type: YTN; PAM sequence: CTC
ccttttatcccaatatcctg

SEQ ID NO: 400050 - DNA, 20 bp, Artificial Sequence
  Description of Artificial Sequence: Synthetic oligonucleotide
  Target: LAMA2; (+) strand; PAM type: YTN; PAM sequence: CTT
ttatcccaatatcctgaatc

SEQ ID NO: 400051 - DNA, 20 bp, Artificial Sequence
  Description of Artificial Sequence: Synthetic oligonucleotide
  Target: LAMA2; (+) strand; PAM type: YTN; PAM sequence: TTT
tatcccaatatcctgaatct

SEQ ID NO: 400052 - DNA, 20 bp, Artificial Sequence
  Description of Artificial Sequence: Synthetic oligonucleotide
  Target: LAMA2; (+) strand; PAM type: YTN; PAM sequence: TTT
atcccaatatcctgaatctt

SEQ ID NO: 400053 - DNA, 20 bp, Artificial Sequence
  Description of Artificial Sequence: Synthetic oligonucleotide
  Target: LAMA2; (+) strand; PAM type: YTN; PAM sequence: TTA
tcccaatatcctgaatcttt

SEQ ID NO: 400054 - DNA, 20 bp, Artificial Sequence
  Description of Artificial Sequence: Synthetic oligonucleotide
  Target: LAMA2; (+) strand; PAM type: YTN; PAM sequence: CTG
aatctttgcagaacctgcta

SEQ ID NO: 400055 - DNA, 20 bp, Artificial Sequence
  Description of Artificial Sequence: Synthetic oligonucleotide
  Target: LAMA2; (+) strand; PAM type: YTN; PAM sequence: CTT
tgcagaacctgctaccagac

SEQ ID NO: 400056 - DNA, 20 bp, Artificial Sequence
  Description of Artificial Sequence: Synthetic oligonucleotide
  Target: LAMA2; (+) strand; PAM type: YTN; PAM sequence: TTT
gcagaacctgctaccagaca

SEQ ID NO: 400057 - DNA, 20 bp, Artificial Sequence
  Description of Artificial Sequence: Synthetic oligonucleotide
  Target: LAMA2; (+) strand; PAM type: YTN; PAM sequence: TTG
cagaacctgctaccagacaa

SEQ ID NO: 400058 - DNA, 20 bp, Artificial Sequence
  Description of Artificial Sequence: Synthetic oligonucleotide
  Target: LAMA2; (+) strand; PAM type: YTN; PAM sequence: CTG
ctaccagacaagtacacctt

SEQ ID NO: 400059 - DNA, 20 bp, Artificial Sequence
  Description of Artificial Sequence: Synthetic oligonucleotide
  Target: LAMA2; (+) strand; PAM type: YTN; PAM sequence: CTA
ccagacaagtacaccttccc

SEQ ID NO: 400060 - DNA, 20 bp, Artificial Sequence
  Description of Artificial Sequence: Synthetic oligonucleotide
  Target: LAMA2; (+) strand; PAM type: YTN; PAM sequence: CTT
ccctcctttcctgaagctcc

SEQ ID NO: 400061 - DNA, 20 bp, Artificial Sequence
  Description of Artificial Sequence: Synthetic oligonucleotide
  Target: LAMA2; (+) strand; PAM type: YTN; PAM sequence: TTC
cctcctttcctgaagctcct

SEQ ID NO: 400062 - DNA, 20 bp, Artificial Sequence
  Description of Artificial Sequence: Synthetic oligonucleotide
  Target: LAMA2; (+) strand; PAM type: YTN; PAM sequence: CTC
ctttcctgaagctcctacta

SEQ ID NO: 400063 - DNA, 20 bp, Artificial Sequence
  Description of Artificial Sequence: Synthetic oligonucleotide
  Target: LAMA2; (+) strand; PAM type: YTN; PAM sequence: CTT
tcctgaagctcctactatga

SEQ ID NO: 400064 - DNA, 20 bp, Artificial Sequence
  Description of Artificial Sequence: Synthetic oligonucleotide
  Target: LAMA2; (+) strand; PAM type: YTN; PAM sequence: TTT
cctgaagctcctactatgac

SEQ ID NO: 400065 - DNA, 20 bp, Artificial Sequence
  Description of Artificial Sequence: Synthetic oligonucleotide
  Target: LAMA2; (+) strand; PAM type: YTN; PAM sequence: TTC
ctgaagctcctactatgacc

SEQ ID NO: 400066 - DNA, 20 bp, Artificial Sequence
  Description of Artificial Sequence: Synthetic oligonucleotide
  Target: LAMA2; (+) strand; PAM type: YTN; PAM sequence: CTG
aagctcctactatgaccccc

SEQ ID NO: 400067 - DNA, 20 bp, Artificial Sequence
  Description of Artificial Sequence: Synthetic oligonucleotide
  Target: LAMA2; (+) strand; PAM type: YTN; PAM sequence: CTC
ctactatgaccccctagtgg

SEQ ID NO: 400068 - DNA, 20 bp, Artificial Sequence
  Description of Artificial Sequence: Synthetic oligonucleotide
  Target: LAMA2; (+) strand; PAM type: YTN; PAM sequence: CTA
ctatgaccccctagtgggag

SEQ ID NO: 400069 - DNA, 20 bp, Artificial Sequence
  Description of Artificial Sequence: Synthetic oligonucleotide
  Target: LAMA2; (+) strand; PAM type: YTN; PAM sequence: CTA
tgaccccctagtgggaggaa

SEQ ID NO: 400070 - DNA, 20 bp, Artificial Sequence
  Description of Artificial Sequence: Synthetic oligonucleotide
  Target: LAMA2; (+) strand; PAM type: YTN; PAM sequence: CTA
gtgggaggaagagcatatgc

SEQ ID NO: 400071 - DNA, 20 bp, Artificial Sequence
  Description of Artificial Sequence: Synthetic oligonucleotide
  Target: LAMA2; (+) strand; PAM type: YTN; PAM sequence: CTT
attgcgaacaagatctaatt

SEQ ID NO: 400072 - DNA, 20 bp, Artificial Sequence
  Description of Artificial Sequence: Synthetic oligonucleotide
  Target: LAMA2; (+) strand; PAM type: YTN; PAM sequence: TTA
ttgcgaacaagatctaattt

SEQ ID NO: 400073 - DNA, 20 bp, Artificial Sequence
  Description of Artificial Sequence: Synthetic oligonucleotide
  Target: LAMA2; (+) strand; PAM type: YTN; PAM sequence: TTG
cgaacaagatctaatttctt

SEQ ID NO: 400074 - DNA, 20 bp, Artificial Sequence
  Description of Artificial Sequence: Synthetic oligonucleotide
  Target: LAMA2; (+) strand; PAM type: YTN; PAM sequence: CTA
atttcttactttcagatcag

SEQ ID NO: 400075 - DNA, 20 bp, Artificial Sequence
  Description of Artificial Sequence: Synthetic oligonucleotide
  Target: LAMA2; (+) strand; PAM type: YTN; PAM sequence: TTT
cttactttcagatcagaaga

SEQ ID NO: 400076 - DNA, 20 bp, Artificial Sequence
  Description of Artificial Sequence: Synthetic oligonucleotide
  Target: LAMA2; (+) strand; PAM type: YTN; PAM sequence: TTC
ttactttcagatcagaagag

SEQ ID NO: 400077 - DNA, 20 bp, Artificial Sequence
  Description of Artificial Sequence: Synthetic oligonucleotide
  Target: LAMA2; (+) strand; PAM type: YTN; PAM sequence: CTT
actttcagatcagaagaggg

SEQ ID NO: 400078 - DNA, 20 bp, Artificial Sequence
  Description of Artificial Sequence: Synthetic oligonucleotide
  Target: LAMA2; (+) strand; PAM type: YTN; PAM sequence: TTA
ctttcagatcagaagagggt

SEQ ID NO: 400079 - DNA, 20 bp, Artificial Sequence
  Description of Artificial Sequence: Synthetic oligonucleotide
  Target: LAMA2; (+) strand; PAM type: YTN; PAM sequence: CTT
tcagatcagaagagggtttc

SEQ ID NO: 400080 - DNA, 20 bp, Artificial Sequence
  Description of Artificial Sequence: Synthetic oligonucleotide
  Target: LAMA2; (+) strand; PAM type: YTN; PAM sequence: TTT
cagatcagaagagggtttct

SEQ ID NO: 400081 - DNA, 20 bp, Artificial Sequence
  Description of Artificial Sequence: Synthetic oligonucleotide
  Target: LAMA2; (+) strand; PAM type: YTN; PAM sequence: TTC
agatcagaagagggtttctc

SEQ ID NO: 400082 - DNA, 20 bp, Artificial Sequence
  Description of Artificial Sequence: Synthetic oligonucleotide
  Target: LAMA2; (+) strand; PAM type: YTN; PAM sequence: TTT
ctccataacctgactccctg

SEQ ID NO: 400083 - DNA, 20 bp, Artificial Sequence
  Description of Artificial Sequence: Synthetic oligonucleotide
  Target: LAMA2; (+) strand; PAM type: YTN; PAM sequence: TTC
tccataacctgactccctgt

SEQ ID NO: 400084 - DNA, 20 bp, Artificial Sequence
  Description of Artificial Sequence: Synthetic oligonucleotide
  Target: LAMA2; (+) strand; PAM type: YTN; PAM sequence: CTC
cataacctgactccctgtga

SEQ ID NO: 400085 - DNA, 20 bp, Artificial Sequence
  Description of Artificial Sequence: Synthetic oligonucleotide
  Target: LAMA2; (+) strand; PAM type: YTN; PAM sequence: CTG
actccctgtgaaacagtcat

SEQ ID NO: 400086 - DNA, 20 bp, Artificial Sequence
  Description of Artificial Sequence: Synthetic oligonucleotide
  Target: LAMA2; (+) strand; PAM type: YTN; PAM sequence: CTC
cctgtgaaacagtcatctct

SEQ ID NO: 400087 - DNA, 20 bp, Artificial Sequence
  Description of Artificial Sequence: Synthetic oligonucleotide
  Target: LAMA2; (+) strand; PAM type: YTN; PAM sequence: CTG
tgaaacagtcatctctgagg

SEQ ID NO: 400088 - DNA, 20 bp, Artificial Sequence
  Description of Artificial Sequence: Synthetic oligonucleotide
  Target: LAMA2; (+) strand; PAM type: YTN; PAM sequence: CTC
tgaggttcccatatgtggtc

SEQ ID NO: 400089 - DNA, 20 bp, Artificial Sequence
  Description of Artificial Sequence: Synthetic oligonucleotide
  Target: LAMA2; (+) strand; PAM type: YTN; PAM sequence: CTG
aggttcccatatgtggtcac

SEQ ID NO: 400090 - DNA, 20 bp, Artificial Sequence
  Description of Artificial Sequence: Synthetic oligonucleotide
  Target: LAMA2; (+) strand; PAM type: YTN; PAM sequence: TTC
ccatatgtggtcactctagt

SEQ ID NO: 400091 - DNA, 20 bp, Artificial Sequence
  Description of Artificial Sequence: Synthetic oligonucleotide
  Target: LAMA2; (+) strand; PAM type: YTN; PAM sequence: CTC
tagtatgtatgtctgtctgt

SEQ ID NO: 400092 - DNA, 20 bp, Artificial Sequence
  Description of Artificial Sequence: Synthetic oligonucleotide
  Target: LAMA2; (+) strand; PAM type: YTN; PAM sequence: CTA
gtatgtatgtctgtctgtgc

SEQ ID NO: 400093 - DNA, 20 bp, Artificial Sequence
  Description of Artificial Sequence: Synthetic oligonucleotide
  Target: LAMA2; (+) strand; PAM type: YTN; PAM sequence: CTG
tctgtgcagaataagtaatc

SEQ ID NO: 400094 - DNA, 20 bp, Artificial Sequence
  Description of Artificial Sequence: Synthetic oligonucleotide
  Target: LAMA2; (+) strand; PAM type: YTN; PAM sequence: CTG
tgcagaataagtaatcagat

SEQ ID NO: 400095 - DNA, 20 bp, Artificial Sequence
  Description of Artificial Sequence: Synthetic oligonucleotide
  Target: LAMA2; (+) strand; PAM type: YTN; PAM sequence: CTT
gtgacagctactagggaaag

SEQ ID NO: 400096 - DNA, 20 bp, Artificial Sequence
  Description of Artificial Sequence: Synthetic oligonucleotide
  Target: LAMA2; (+) strand; PAM type: YTN; PAM sequence: TTG
tgacagctactagggaaagg

SEQ ID NO: 400097 - DNA, 20 bp, Artificial Sequence
  Description of Artificial Sequence: Synthetic oligonucleotide
  Target: LAMA2; (+) strand; PAM type: YTN; PAM sequence: CTA
ctagggaaagggaagcacag

SEQ ID NO: 400098 - DNA, 20 bp, Artificial Sequence
  Description of Artificial Sequence: Synthetic oligonucleotide
  Target: LAMA2; (+) strand; PAM type: YTN; PAM sequence: CTA
gggaaagggaagcacaggag

SEQ ID NO: 400099 - DNA, 20 bp, Artificial Sequence
  Description of Artificial Sequence: Synthetic oligonucleotide
  Target: LAMA2; (+) strand; PAM type: YTN; PAM sequence: CTA
gaaatataaaggttcaggaa

SEQ ID NO: 400100 - DNA, 20 bp, Artificial Sequence
  Description of Artificial Sequence: Synthetic oligonucleotide
  Target: LAMA2; (+) strand; PAM type: YTN; PAM sequence: TTC
aggaaatgataccgttccga

SEQ ID NO: 400101 - DNA, 20 bp, Artificial Sequence
  Description of Artificial Sequence: Synthetic oligonucleotide
  Target: LAMA2; (+) strand; PAM type: YTN; PAM sequence: TTC
cgaatcattgtcaccaaatt

SEQ ID NO: 400102 - DNA, 20 bp, Artificial Sequence
  Description of Artificial Sequence: Synthetic oligonucleotide
  Target: LAMA2; (+) strand; PAM type: YTN; PAM sequence: TTG
tcaccaaattcaatgattgc

SEQ ID NO: 400103 - DNA, 20 bp, Artificial Sequence
  Description of Artificial Sequence: Synthetic oligonucleotide
  Target: LAMA2; (+) strand; PAM type: YTN; PAM sequence: TTC
aatgattgcctgcataatgc

SEQ ID NO: 400104 - DNA, 20 bp, Artificial Sequence
  Description of Artificial Sequence: Synthetic oligonucleotide
  Target: LAMA2; (+) strand; PAM type: YTN; PAM sequence: TTG
cctgcataatgcagaaaatt

SEQ ID NO: 400105 - DNA, 20 bp, Artificial Sequence
  Description of Artificial Sequence: Synthetic oligonucleotide
  Target: LAMA2; (+) strand; PAM type: YTN; PAM sequence: CTG
cataatgcagaaaattggag

SEQ ID NO: 400106 - DNA, 20 bp, Artificial Sequence
  Description of Artificial Sequence: Synthetic oligonucleotide
  Target: LAMA2; (+) strand; PAM type: YTN; PAM sequence: TTG
gagggattttttctaagaag

SEQ ID NO: 400107 - DNA, 20 bp, Artificial Sequence
  Description of Artificial Sequence: Synthetic oligonucleotide
  Target: LAMA2; (+) strand; PAM type: YTN; PAM sequence: TTT
tttctaagaagtacaaagat

SEQ ID NO: 400108 - DNA, 20 bp, Artificial Sequence
  Description of Artificial Sequence: Synthetic oligonucleotide
  Target: LAMA2; (+) strand; PAM type: YTN; PAM sequence: TTT
ttctaagaagtacaaagatt

SEQ ID NO: 400109 - DNA, 20 bp, Artificial Sequence
  Description of Artificial Sequence: Synthetic oligonucleotide
  Target: LAMA2; (+) strand; PAM type: YTN; PAM sequence: TTT
tctaagaagtacaaagattg

SEQ ID NO: 400110 - DNA, 20 bp, Artificial Sequence
  Description of Artificial Sequence: Synthetic oligonucleotide
  Target: LAMA2; (+) strand; PAM type: YTN; PAM sequence: TTT
ctaagaagtacaaagattgg

SEQ ID NO: 400111 - DNA, 20 bp, Artificial Sequence
  Description of Artificial Sequence: Synthetic oligonucleotide
  Target: LAMA2; (+) strand; PAM type: YTN; PAM sequence: TTC
taagaagtacaaagattggg

SEQ ID NO: 400112 - DNA, 20 bp, Artificial Sequence
  Description of Artificial Sequence: Synthetic oligonucleotide
  Target: LAMA2; (+) strand; PAM type: YTN; PAM sequence: CTA
agaagtacaaagattgggtg

SEQ ID NO: 400113 - DNA, 20 bp, Artificial Sequence
  Description of Artificial Sequence: Synthetic oligonucleotide
  Target: LAMA2; (+) strand; PAM type: YTN; PAM sequence: TTG
ggtgtagcaaccttatcaaa

SEQ ID NO: 400114 - DNA, 20 bp, Artificial Sequence
  Description of Artificial Sequence: Synthetic oligonucleotide
  Target: LAMA2; (+) strand; PAM type: YTN; PAM sequence: CTT
atcaaatcaatttgctggag

SEQ ID NO: 400115 - DNA, 20 bp, Artificial Sequence
  Description of Artificial Sequence: Synthetic oligonucleotide
  Target: LAMA2; (+) strand; PAM type: YTN; PAM sequence: TTA
tcaaatcaatttgctggaga

SEQ ID NO: 400116 - DNA, 20 bp, Artificial Sequence
  Description of Artificial Sequence: Synthetic oligonucleotide
  Target: LAMA2; (+) strand; PAM type: YTN; PAM sequence: TTT
gctggagacctaggagagaa

SEQ ID NO: 400117 - DNA, 20 bp, Artificial Sequence
  Description of Artificial Sequence: Synthetic oligonucleotide
  Target: LAMA2; (+) strand; PAM type: YTN; PAM sequence: TTG
ctggagacctaggagagaaa

SEQ ID NO: 400118 - DNA, 20 bp, Artificial Sequence
  Description of Artificial Sequence: Synthetic oligonucleotide
  Target: LAMA2; (+) strand; PAM type: YTN; PAM sequence: CTG
gagacctaggagagaaatac

SEQ ID NO: 400119 - DNA, 20 bp, Artificial Sequence
  Description of Artificial Sequence: Synthetic oligonucleotide
  Target: LAMA2; (+) strand; PAM type: YTN; PAM sequence: CTA
ggagagaaatacagttgtag

SEQ ID NO: 400120 - DNA, 20 bp, Artificial Sequence
  Description of Artificial Sequence: Synthetic oligonucleotide
  Target: LAMA2; (+) strand; PAM type: YTN; PAM sequence: TTG
tagatttcaacttctattct

SEQ ID NO: 400121 - DNA, 20 bp, Artificial Sequence
  Description of Artificial Sequence: Synthetic oligonucleotide
  Target: LAMA2; (+) strand; PAM type: YTN; PAM sequence: TTT
caacttctattcttcctcac

SEQ ID NO: 400122 - DNA, 20 bp, Artificial Sequence
  Description of Artificial Sequence: Synthetic oligonucleotide
  Target: LAMA2; (+) strand; PAM type: YTN; PAM sequence: TTC
aacttctattcttcctcact

SEQ ID NO: 400123 - DNA, 20 bp, Artificial Sequence
  Description of Artificial Sequence: Synthetic oligonucleotide
  Target: LAMA2; (+) strand; PAM type: YTN; PAM sequence: CTT
ctattcttcctcactcgggt

SEQ ID NO: 400124 - DNA, 20 bp, Artificial Sequence
  Description of Artificial Sequence: Synthetic oligonucleotide
  Target: LAMA2; (+) strand; PAM type: YTN; PAM sequence: TTC
tattcttcctcactcgggtg

SEQ ID NO: 400125 - DNA, 20 bp, Artificial Sequence
  Description of Artificial Sequence: Synthetic oligonucleotide
  Target: LAMA2; (+) strand; PAM type: YTN; PAM sequence: CTA
ttcttcctcactcgggtgct

SEQ ID NO: 400126 - DNA, 20 bp, Artificial Sequence
  Description of Artificial Sequence: Synthetic oligonucleotide
  Target: LAMA2; (+) strand; PAM type: YTN; PAM sequence: TTC
ttcctcactcgggtgctctt

SEQ ID NO: 400127 - DNA, 20 bp, Artificial Sequence
  Description of Artificial Sequence: Synthetic oligonucleotide
  Target: LAMA2; (+) strand; PAM type: YTN; PAM sequence: CTT
cctcactcgggtgctcttct

SEQ ID NO: 400128 - DNA, 20 bp, Artificial Sequence
  Description of Artificial Sequence: Synthetic oligonucleotide
  Target: LAMA2; (+) strand; PAM type: YTN; PAM sequence: TTC
ctcactcgggtgctcttctt

SEQ ID NO: 400129 - DNA, 20 bp, Artificial Sequence
  Description of Artificial Sequence: Synthetic oligonucleotide
  Target: LAMA2; (+) strand; PAM type: YTN; PAM sequence: CTC
actcgggtgctcttctttcc

SEQ ID NO: 400130 - DNA, 20 bp, Artificial Sequence
  Description of Artificial Sequence: Synthetic oligonucleotide
  Target: LAMA2; (+) strand; PAM type: YTN; PAM sequence: CTC
gggtgctcttctttcctacc

SEQ ID NO: 400131 - DNA, 20 bp, Artificial Sequence
  Description of Artificial Sequence: Synthetic oligonucleotide
  Target: LAMA2; (+) strand; PAM type: YTN; PAM sequence: CTC
ttctttcctacccaggtctc

SEQ ID NO: 400132 - DNA, 20 bp, Artificial Sequence
  Description of Artificial Sequence: Synthetic oligonucleotide
  Target: LAMA2; (+) strand; PAM type: YTN; PAM sequence: CTT
ctttcctacccaggtctcaa

SEQ ID NO: 400133 - DNA, 20 bp, Artificial Sequence
  Description of Artificial Sequence: Synthetic oligonucleotide
  Target: LAMA2; (+) strand; PAM type: YTN; PAM sequence: TTC
tttcctacccaggtctcaag

SEQ ID NO: 400134 - DNA, 20 bp, Artificial Sequence
  Description of Artificial Sequence: Synthetic oligonucleotide
  Target: LAMA2; (+) strand; PAM type: YTN; PAM sequence: CTT
tcctacccaggtctcaagat

SEQ ID NO: 400135 - DNA, 20 bp, Artificial Sequence
  Description of Artificial Sequence: Synthetic oligonucleotide
  Target: LAMA2; (+) strand; PAM type: YTN; PAM sequence: TTT
cctacccaggtctcaagatc

SEQ ID NO: 400136 - DNA, 20 bp, Artificial Sequence
  Description of Artificial Sequence: Synthetic oligonucleotide
  Target: LAMA2; (+) strand; PAM type: YTN; PAM sequence: TTC
ctacccaggtctcaagatcc

SEQ ID NO: 400137 - DNA, 20 bp, Artificial Sequence
  Description of Artificial Sequence: Synthetic oligonucleotide
  Target: LAMA2; (+) strand; PAM type: YTN; PAM sequence: CTA
cccaggtctcaagatcctgc

SEQ ID NO: 400138 - DNA, 20 bp, Artificial Sequence
  Description of Artificial Sequence: Synthetic oligonucleotide
  Target: LAMA2; (+) strand; PAM type: YTN; PAM sequence: CTC
aagatcctgcactgggtatt

SEQ ID NO: 400139 - DNA, 20 bp, Artificial Sequence
  Description of Artificial Sequence: Synthetic oligonucleotide
  Target: LAMA2; (+) strand; PAM type: YTN; PAM sequence: CTG
cactgggtatttaggttgac

SEQ ID NO: 400140 - DNA, 20 bp, Artificial Sequence
  Description of Artificial Sequence: Synthetic oligonucleotide
  Target: LAMA2; (+) strand; PAM type: YTN; PAM sequence: CTG
ggtatttaggttgacttagg

SEQ ID NO: 400141 - DNA, 20 bp, Artificial Sequence
  Description of Artificial Sequence: Synthetic oligonucleotide
  Target: LAMA2; (+) strand; PAM type: YTN; PAM sequence: TTT
aggttgacttaggggacagg

SEQ ID NO: 400142 - DNA, 20 bp, Artificial Sequence
  Description of Artificial Sequence: Synthetic oligonucleotide
  Target: LAMA2; (+) strand; PAM type: YTN; PAM sequence: TTA
ggttgacttaggggacaggg

SEQ ID NO: 400143 - DNA, 20 bp, Artificial Sequence
  Description of Artificial Sequence: Synthetic oligonucleotide
  Target: LAMA2; (+) strand; PAM type: YTN; PAM sequence: TTG
acttaggggacagggtcttt

SEQ ID NO: 400144 - DNA, 20 bp, Artificial Sequence
  Description of Artificial Sequence: Synthetic oligonucleotide
  Target: LAMA2; (+) strand; PAM type: YTN; PAM sequence: CTT
aggggacagggtctttagaa

SEQ ID NO: 400145 - DNA, 20 bp, Artificial Sequence
  Description of Artificial Sequence: Synthetic oligonucleotide
  Target: LAMA2; (+) strand; PAM type: YTN; PAM sequence: TTA
ggggacagggtctttagaaa

SEQ ID NO: 400146 - DNA, 20 bp, Artificial Sequence
  Description of Artificial Sequence: Synthetic oligonucleotide
  Target: LAMA2; (+) strand; PAM type: YTN; PAM sequence: CTT
tagaaatctcaagaagccaa

SEQ ID NO: 400147 - DNA, 20 bp, Artificial Sequence
  Description of Artificial Sequence: Synthetic oligonucleotide
  Target: LAMA2; (+) strand; PAM type: YTN; PAM sequence: TTT
agaaatctcaagaagccaaa

SEQ ID NO: 400148 - DNA, 20 bp, Artificial Sequence
  Description of Artificial Sequence: Synthetic oligonucleotide
  Target: LAMA2; (+) strand; PAM type: YTN; PAM sequence: TTA
gaaatctcaagaagccaaaa

SEQ ID NO: 400149 - DNA, 20 bp, Artificial Sequence
  Description of Artificial Sequence: Synthetic oligonucleotide
  Target: LAMA2; (+) strand; PAM type: YTN; PAM sequence: CTC
aagaagccaaaatctgaaca

SEQ ID NO: 400150 - DNA, 20 bp, Artificial Sequence
  Description of Artificial Sequence: Synthetic oligonucleotide
  Target: LAMA2; (+) strand; PAM type: YTN; PAM sequence: CTG
aacacagtcacttatgcctg

SEQ ID NO: 400151 - DNA, 20 bp, Artificial Sequence
  Description of Artificial Sequence: Synthetic oligonucleotide
  Target: LAMA2; (+) strand; PAM type: YTN; PAM sequence: CTT
atgcctgtaatcccaggtcc

SEQ ID NO: 400152 - DNA, 20 bp, Artificial Sequence
  Description of Artificial Sequence: Synthetic oligonucleotide
  Target: LAMA2; (+) strand; PAM type: YTN; PAM sequence: TTA
tgcctgtaatcccaggtcct

SEQ ID NO: 400153 - DNA, 20 bp, Artificial Sequence
  Description of Artificial Sequence: Synthetic oligonucleotide
  Target: LAMA2; (+) strand; PAM type: YTN; PAM sequence: CTG
taatcccaggtcctttcaaa

SEQ ID NO: 400154 - DNA, 20 bp, Artificial Sequence
  Description of Artificial Sequence: Synthetic oligonucleotide
  Target: LAMA2; (+) strand; PAM type: YTN; PAM sequence: CTT
tcaaaagtaatcacatttcc

SEQ ID NO: 400155 - DNA, 20 bp, Artificial Sequence
  Description of Artificial Sequence: Synthetic oligonucleotide
  Target: LAMA2; (+) strand; PAM type: YTN; PAM sequence: TTT
caaaagtaatcacatttcca

SEQ ID NO: 400156 - DNA, 20 bp, Artificial Sequence
  Description of Artificial Sequence: Synthetic oligonucleotide
  Target: LAMA2; (+) strand; PAM type: YTN; PAM sequence: TTC
aaaagtaatcacatttccat

SEQ ID NO: 400157 - DNA, 20 bp, Artificial Sequence
  Description of Artificial Sequence: Synthetic oligonucleotide
  Target: LAMA2; (+) strand; PAM type: YTN; PAM sequence: TTT
ccatgaatttcacccttgtg

SEQ ID NO: 400158 - DNA, 20 bp, Artificial Sequence
  Description of Artificial Sequence: Synthetic oligonucleotide
  Target: LAMA2; (+) strand; PAM type: YTN; PAM sequence: TTC
catgaatttcacccttgtga

SEQ ID NO: 400159 - DNA, 20 bp, Artificial Sequence
  Description of Artificial Sequence: Synthetic oligonucleotide
  Target: LAMA2; (+) strand; PAM type: YTN; PAM sequence: TTT
cacccttgtgaatggggcat

SEQ ID NO: 400160 - DNA, 20 bp, Artificial Sequence
  Description of Artificial Sequence: Synthetic oligonucleotide
  Target: LAMA2; (+) strand; PAM type: YTN; PAM sequence: TTC
acccttgtgaatggggcatt

SEQ ID NO: 400161 - DNA, 20 bp, Artificial Sequence
  Description of Artificial Sequence: Synthetic oligonucleotide
  Target: LAMA2; (+) strand; PAM type: YTN; PAM sequence: CTT
gtgaatggggcattctttca

SEQ ID NO: 400162 - DNA, 20 bp, Artificial Sequence
  Description of Artificial Sequence: Synthetic oligonucleotide
  Target: LAMA2; (+) strand; PAM type: YTN; PAM sequence: TTG
tgaatggggcattctttcag

SEQ ID NO: 400163 - DNA, 20 bp, Artificial Sequence
  Description of Artificial Sequence: Synthetic oligonucleotide
  Target: LAMA2; (+) strand; PAM type: YTN; PAM sequence: TTC
tttcagggcatttatttgtg

SEQ ID NO: 400164 - DNA, 20 bp, Artificial Sequence
  Description of Artificial Sequence: Synthetic oligonucleotide
  Target: LAMA2; (+) strand; PAM type: YTN; PAM sequence: CTT
tcagggcatttatttgtgcc

SEQ ID NO: 400165 - DNA, 20 bp, Artificial Sequence
  Description of Artificial Sequence: Synthetic oligonucleotide
  Target: LAMA2; (+) strand; PAM type: YTN; PAM sequence: TTT
cagggcatttatttgtgccc

SEQ ID NO: 400166 - DNA, 20 bp, Artificial Sequence
  Description of Artificial Sequence: Synthetic oligonucleotide
  Target: LAMA2; (+) strand; PAM type: YTN; PAM sequence: TTC
agggcatttatttgtgccct

SEQ ID NO: 400167 - DNA, 20 bp, Artificial Sequence
  Description of Artificial Sequence: Synthetic oligonucleotide
  Target: LAMA2; (+) strand; PAM type: YTN; PAM sequence: TTT
atttgtgccctattcatatt

SEQ ID NO: 400168 - DNA, 20 bp, Artificial Sequence
  Description of Artificial Sequence: Synthetic oligonucleotide
  Target: LAMA2; (+) strand; PAM type: YTN; PAM sequence: TTA
tttgtgccctattcatatta

SEQ ID NO: 400169 - DNA, 20 bp, Artificial Sequence
  Description of Artificial Sequence: Synthetic oligonucleotide
  Target: LAMA2; (+) strand; PAM type: YTN; PAM sequence: TTT
gtgccctattcatattaata

SEQ ID NO: 400170 - DNA, 20 bp, Artificial Sequence
  Description of Artificial Sequence: Synthetic oligonucleotide
  Target: LAMA2; (+) strand; PAM type: YTN; PAM sequence: TTG
tgccctattcatattaataa

SEQ ID NO: 400171 - DNA, 20 bp, Artificial Sequence
  Description of Artificial Sequence: Synthetic oligonucleotide
  Target: LAMA2; (+) strand; PAM type: YTN; PAM sequence: CTA
ttcatattaataaaaaataa

SEQ ID NO: 400172 - DNA, 20 bp, Artificial Sequence
  Description of Artificial Sequence: Synthetic oligonucleotide
  Target: LAMA2; (+) strand; PAM type: YTN; PAM sequence: TTC
atattaataaaaaataaaaa

SEQ ID NO: 400173 - DNA, 20 bp, Artificial Sequence
  Description of Artificial Sequence: Synthetic oligonucleotide
  Target: LAMA2; (+) strand; PAM type: YTN; PAM sequence: TTA
ataaaaaataaaaattccat

SEQ ID NO: 400174 - DNA, 20 bp, Artificial Sequence
  Description of Artificial Sequence: Synthetic oligonucleotide
  Target: LAMA2; (+) strand; PAM type: YTN; PAM sequence: TTC
catttgagaaactcaactgg

SEQ ID NO: 400175 - DNA, 20 bp, Artificial Sequence
  Description of Artificial Sequence: Synthetic oligonucleotide
  Target: LAMA2; (+) strand; PAM type: YTN; PAM sequence: TTT
gagaaactcaactggatgga

SEQ ID NO: 400176 - DNA, 20 bp, Artificial Sequence
  Description of Artificial Sequence: Synthetic oligonucleotide
  Target: LAMA2; (+) strand; PAM type: YTN; PAM sequence: TTG
agaaactcaactggatggaa

SEQ ID NO: 400177 - DNA, 20 bp, Artificial Sequence
  Description of Artificial Sequence: Synthetic oligonucleotide
  Target: LAMA2; (+) strand; PAM type: YTN; PAM sequence: CTC
aactggatggaatttgaata

SEQ ID NO: 400178 - DNA, 20 bp, Artificial Sequence
  Description of Artificial Sequence: Synthetic oligonucleotide
  Target: LAMA2; (+) strand; PAM type: YTN; PAM sequence: CTG
gatggaatttgaatagtcaa

SEQ ID NO: 400179 - DNA, 20 bp, Artificial Sequence
  Description of Artificial Sequence: Synthetic oligonucleotide
  Target: LAMA2; (+) strand; PAM type: YTN; PAM sequence: TTT
gaatagtcaaattaaacatt

SEQ ID NO: 400180 - DNA, 20 bp, Artificial Sequence
  Description of Artificial Sequence: Synthetic oligonucleotide
  Target: LAMA2; (+) strand; PAM type: YTN; PAM sequence: TTG
aatagtcaaattaaacattt

SEQ ID NO: 400181 - DNA, 20 bp, Artificial Sequence
  Description of Artificial Sequence: Synthetic oligonucleotide
  Target: LAMA2; (+) strand; PAM type: YTN; PAM sequence: TTA
aacatttccattaaaattta

SEQ ID NO: 400182 - DNA, 20 bp, Artificial Sequence
  Description of Artificial Sequence: Synthetic oligonucleotide
  Target: LAMA2; (+) strand; PAM type: YTN; PAM sequence: TTT
ccattaaaatttataaaaat

SEQ ID NO: 400183 - DNA, 20 bp, Artificial Sequence
  Description of Artificial Sequence: Synthetic oligonucleotide
  Target: LAMA2; (+) strand; PAM type: YTN; PAM sequence: TTC
cattaaaatttataaaaatc

SEQ ID NO: 400184 - DNA, 20 bp, Artificial Sequence
  Description of Artificial Sequence: Synthetic oligonucleotide
  Target: LAMA2; (+) strand; PAM type: YTN; PAM sequence: TTA
aaatttataaaaatcgtccc

SEQ ID NO: 400185 - DNA, 20 bp, Artificial Sequence
  Description of Artificial Sequence: Synthetic oligonucleotide
  Target: LAMA2; (+) strand; PAM type: YTN; PAM sequence: TTT
ataaaaatcgtcccgatatt

SEQ ID NO: 400186 - DNA, 20 bp, Artificial Sequence
  Description of Artificial Sequence: Synthetic oligonucleotide
  Target: LAMA2; (+) strand; PAM type: YTN; PAM sequence: TTA
taaaaatcgtcccgatattt

SEQ ID NO: 400187 - DNA, 20 bp, Artificial Sequence
  Description of Artificial Sequence: Synthetic oligonucleotide
  Target: LAMA2; (+) strand; PAM type: YTN; PAM sequence: TTT
agttgaaaagtgaggaatat

SEQ ID NO: 400188 - DNA, 20 bp, Artificial Sequence
  Description of Artificial Sequence: Synthetic oligonucleotide
  Target: LAMA2; (+) strand; PAM type: YTN; PAM sequence: TTA
gttgaaaagtgaggaatata

SEQ ID NO: 400189 - DNA, 20 bp, Artificial Sequence
  Description of Artificial Sequence: Synthetic oligonucleotide
  Target: LAMA2; (+) strand; PAM type: YTN; PAM sequence: TTG
aaaagtgaggaatatataca

SEQ ID NO: 400190 - DNA, 20 bp, Artificial Sequence
  Description of Artificial Sequence: Synthetic oligonucleotide
  Target: LAMA2; (+) strand; PAM type: YTN; PAM sequence: TTT
aggaaatataaaaacgaaat

SEQ ID NO: 400191 - DNA, 20 bp, Artificial Sequence
  Description of Artificial Sequence: Synthetic oligonucleotide
  Target: LAMA2; (+) strand; PAM type: YTN; PAM sequence: TTA
ggaaatataaaaacgaaata

SEQ ID NO: 400192 - DNA, 20 bp, Artificial Sequence
  Description of Artificial Sequence: Synthetic oligonucleotide
  Target: LAMA2; (+) strand; PAM type: YTN; PAM sequence: CTT
aggttctggaccaagtaatt

SEQ ID NO: 400193 - DNA, 20 bp, Artificial Sequence
  Description of Artificial Sequence: Synthetic oligonucleotide
  Target: LAMA2; (+) strand; PAM type: YTN; PAM sequence: TTA
ggttctggaccaagtaattt

SEQ ID NO: 400194 - DNA, 20 bp, Artificial Sequence
  Description of Artificial Sequence: Synthetic oligonucleotide
  Target: LAMA2; (+) strand; PAM type: YTN; PAM sequence: TTC
tggaccaagtaatttaaata

SEQ ID NO: 400195 - DNA, 20 bp, Artificial Sequence
  Description of Artificial Sequence: Synthetic oligonucleotide
  Target: LAMA2; (+) strand; PAM type: YTN; PAM sequence: CTG
gaccaagtaatttaaataaa

SEQ ID NO: 400196 - DNA, 20 bp, Artificial Sequence
  Description of Artificial Sequence: Synthetic oligonucleotide
  Target: LAMA2; (+) strand; PAM type: YTN; PAM sequence: TTT
aaataaaaaaggaataaagt

SEQ ID NO: 400197 - DNA, 20 bp, Artificial Sequence
  Description of Artificial Sequence: Synthetic oligonucleotide
  Target: LAMA2; (+) strand; PAM type: YTN; PAM sequence: TTA
aataaaaaaggaataaagtc

SEQ ID NO: 400198 - DNA, 20 bp, Artificial Sequence
  Description of Artificial Sequence: Synthetic oligonucleotide
  Target: LAMA2; (+) strand; PAM type: YTN; PAM sequence: TTA
ttataataaaaactggtaaa

SEQ ID NO: 400199 - DNA, 20 bp, Artificial Sequence
  Description of Artificial Sequence: Synthetic oligonucleotide
  Target: LAMA2; (+) strand; PAM type: YTN; PAM sequence: TTA
taataaaaactggtaaaaca

SEQ ID NO: 400200 - DNA, 20 bp, Artificial Sequence
  Description of Artificial Sequence: Synthetic oligonucleotide
  Target: LAMA2; (+) strand; PAM type: YTN; PAM sequence: CTG
gtaaaacacaccaggacaat

SEQ ID NO: 400201 - DNA, 20 bp, Artificial Sequence
  Description of Artificial Sequence: Synthetic oligonucleotide
  Target: LAMA2; (+) strand; PAM type: YTN; PAM sequence: TTT
tcaaaccaatgtcagtgtgt

SEQ ID NO: 400202 - DNA, 20 bp, Artificial Sequence
  Description of Artificial Sequence: Synthetic oligonucleotide
  Target: LAMA2; (+) strand; PAM type: YTN; PAM sequence: TTT
caaaccaatgtcagtgtgtt

SEQ ID NO: 400203 - DNA, 20 bp, Artificial Sequence
  Description of Artificial Sequence: Synthetic oligonucleotide
  Target: LAMA2; (+) strand; PAM type: YTN; PAM sequence: TTC
aaaccaatgtcagtgtgtta

SEQ ID NO: 400204 - DNA, 20 bp, Artificial Sequence
  Description of Artificial Sequence: Synthetic oligonucleotide
  Target: LAMA2; (+) strand; PAM type: YTN; PAM sequence: TTA
ccttttacttactgcctatg

SEQ ID NO: 400205 - DNA, 20 bp, Artificial Sequence
  Description of Artificial Sequence: Synthetic oligonucleotide
  Target: LAMA2; (+) strand; PAM type: YTN; PAM sequence: CTT
ttacttactgcctatggtaa

SEQ ID NO: 400206 - DNA, 20 bp, Artificial Sequence
  Description of Artificial Sequence: Synthetic oligonucleotide
  Target: LAMA2; (+) strand; PAM type: YTN; PAM sequence: TTT
tacttactgcctatggtaaa

SEQ ID NO: 400207 - DNA, 20 bp, Artificial Sequence
  Description of Artificial Sequence: Synthetic oligonucleotide
  Target: LAMA2; (+) strand; PAM type: YTN; PAM sequence: TTT
acttactgcctatggtaaat

SEQ ID NO: 400208 - DNA, 20 bp, Artificial Sequence
  Description of Artificial Sequence: Synthetic oligonucleotide
  Target: LAMA2; (+) strand; PAM type: YTN; PAM sequence: TTA
cttactgcctatggtaaatc

SEQ ID NO: 400209 - DNA, 20 bp, Artificial Sequence
  Description of Artificial Sequence: Synthetic oligonucleotide
  Target: LAMA2; (+) strand; PAM type: YTN; PAM sequence: CTT
actgcctatggtaaatccag

SEQ ID NO: 400210 - DNA, 20 bp, Artificial Sequence
  Description of Artificial Sequence: Synthetic oligonucleotide
  Target: LAMA2; (+) strand; PAM type: YTN; PAM sequence: TTA
ctgcctatggtaaatccagc

SEQ ID NO: 400211 - DNA, 20 bp, Artificial Sequence
  Description of Artificial Sequence: Synthetic oligonucleotide
  Target: LAMA2; (+) strand; PAM type: YTN; PAM sequence: CTG
cctatggtaaatccagcact

SEQ ID NO: 400212 - DNA, 20 bp, Artificial Sequence
  Description of Artificial Sequence: Synthetic oligonucleotide
  Target: LAMA2; (+) strand; PAM type: YTN; PAM sequence: CTA
tggtaaatccagcactttct

SEQ ID NO: 400213 - DNA, 20 bp, Artificial Sequence
  Description of Artificial Sequence: Synthetic oligonucleotide
  Target: LAMA2; (+) strand; PAM type: YTN; PAM sequence: CTT
tctcatacatctcccagttt

SEQ ID NO: 400214 - DNA, 20 bp, Artificial Sequence
  Description of Artificial Sequence: Synthetic oligonucleotide
  Target: LAMA2; (+) strand; PAM type: YTN; PAM sequence: TTT
ctcatacatctcccagttta

SEQ ID NO: 400215 - DNA, 20 bp, Artificial Sequence
  Description of Artificial Sequence: Synthetic oligonucleotide
  Target: LAMA2; (+) strand; PAM type: YTN; PAM sequence: TTC
tcatacatctcccagtttat

SEQ ID NO: 400216 - DNA, 20 bp, Artificial Sequence
  Description of Artificial Sequence: Synthetic oligonucleotide
  Target: LAMA2; (+) strand; PAM type: YTN; PAM sequence: CTC
atacatctcccagtttattt

SEQ ID NO: 400217 - DNA, 20 bp, Artificial Sequence
  Description of Artificial Sequence: Synthetic oligonucleotide
  Target: LAMA2; (+) strand; PAM type: YTN; PAM sequence: CTC
ccagtttatttctcatatca

SEQ ID NO: 400218 - DNA, 20 bp, Artificial Sequence
  Description of Artificial Sequence: Synthetic oligonucleotide
  Target: LAMA2; (+) strand; PAM type: YTN; PAM sequence: TTT
atttctcatatcagtcacat

SEQ ID NO: 400219 - DNA, 20 bp, Artificial Sequence
  Description of Artificial Sequence: Synthetic oligonucleotide
  Target: LAMA2; (+) strand; PAM type: YTN; PAM sequence: TTA
tttctcatatcagtcacatg

SEQ ID NO: 400220 - DNA, 20 bp, Artificial Sequence
  Description of Artificial Sequence: Synthetic oligonucleotide
  Target: LAMA2; (+) strand; PAM type: YTN; PAM sequence: TTT
ctcatatcagtcacatgaag

SEQ ID NO: 400221 - DNA, 20 bp, Artificial Sequence
  Description of Artificial Sequence: Synthetic oligonucleotide
  Target: LAMA2; (+) strand; PAM type: YTN; PAM sequence: TTC
tcatatcagtcacatgaagg

SEQ ID NO: 400222 - DNA, 20 bp, Artificial Sequence
  Description of Artificial Sequence: Synthetic oligonucleotide
  Target: LAMA2; (+) strand; PAM type: YTN; PAM sequence: CTC
atatcagtcacatgaaggaa

SEQ ID NO: 400223 - DNA, 20 bp, Artificial Sequence
  Description of Artificial Sequence: Synthetic oligonucleotide
  Target: LAMA2; (+) strand; PAM type: YTN; PAM sequence: TTT
tctttatttgccatatgtaa

SEQ ID NO: 400224 - DNA, 20 bp, Artificial Sequence
  Description of Artificial Sequence: Synthetic oligonucleotide
  Target: LAMA2; (+) strand; PAM type: YTN; PAM sequence: TTT
ctttatttgccatatgtaaa

SEQ ID NO: 400225 - DNA, 20 bp, Artificial Sequence
  Description of Artificial Sequence: Synthetic oligonucleotide
  Target: LAMA2; (+) strand; PAM type: YTN; PAM sequence: TTC
tttatttgccatatgtaaaa

SEQ ID NO: 400226 - DNA, 20 bp, Artificial Sequence
  Description of Artificial Sequence: Synthetic oligonucleotide
  Target: LAMA2; (+) strand; PAM type: YTN; PAM sequence: CTT
tatttgccatatgtaaaaag

SEQ ID NO: 400227 - DNA, 20 bp, Artificial Sequence
  Description of Artificial Sequence: Synthetic oligonucleotide
  Target: LAMA2; (+) strand; PAM type: YTN; PAM sequence: TTT
atttgccatatgtaaaaagg

SEQ ID NO: 400228 - DNA, 20 bp, Artificial Sequence
  Description of Artificial Sequence: Synthetic oligonucleotide
  Target: LAMA2; (+) strand; PAM type: YTN; PAM sequence: TTA
tttgccatatgtaaaaaggg

SEQ ID NO: 400229 - DNA, 20 bp, Artificial Sequence
  Description of Artificial Sequence: Synthetic oligonucleotide
  Target: LAMA2; (+) strand; PAM type: YTN; PAM sequence: TTT
gccatatgtaaaaagggaca

SEQ ID NO: 400230 - DNA, 20 bp, Artificial Sequence
  Description of Artificial Sequence: Synthetic oligonucleotide
  Target: LAMA2; (+) strand; PAM type: YTN; PAM sequence: TTG
ccatatgtaaaaagggacag

SEQ ID NO: 400231 - DNA, 20 bp, Artificial Sequence
  Description of Artificial Sequence: Synthetic oligonucleotide
  Target: LAMA2; (+) strand; PAM type: YTN; PAM sequence: TTT
gaacccacatcttccaactc

SEQ ID NO: 400232 - DNA, 20 bp, Artificial Sequence
  Description of Artificial Sequence: Synthetic oligonucleotide
  Target: LAMA2; (+) strand; PAM type: YTN; PAM sequence: TTG
aacccacatcttccaactct

SEQ ID NO: 400233 - DNA, 20 bp, Artificial Sequence
  Description of Artificial Sequence: Synthetic oligonucleotide
  Target: LAMA2; (+) strand; PAM type: YTN; PAM sequence: CTT
ccaactctgtgtcctatagt

SEQ ID NO: 400234 - DNA, 20 bp, Artificial Sequence
  Description of Artificial Sequence: Synthetic oligonucleotide
  Target: LAMA2; (+) strand; PAM type: YTN; PAM sequence: TTC
caactctgtgtcctatagtg

SEQ ID NO: 400235 - DNA, 20 bp, Artificial Sequence
  Description of Artificial Sequence: Synthetic oligonucleotide
  Target: LAMA2; (+) strand; PAM type: YTN; PAM sequence: CTC
tgtgtcctatagtgatttca

SEQ ID NO: 400236 - DNA, 20 bp, Artificial Sequence
  Description of Artificial Sequence: Synthetic oligonucleotide
  Target: LAMA2; (+) strand; PAM type: YTN; PAM sequence: CTG
tgtcctatagtgatttcatt

SEQ ID NO: 400237 - DNA, 20 bp, Artificial Sequence
  Description of Artificial Sequence: Synthetic oligonucleotide
  Target: LAMA2; (+) strand; PAM type: YTN; PAM sequence: CTA
tagtgatttcattgtaccag

SEQ ID NO: 400238 - DNA, 20 bp, Artificial Sequence
  Description of Artificial Sequence: Synthetic oligonucleotide
  Target: LAMA2; (+) strand; PAM type: YTN; PAM sequence: TTT
cattgtaccagactagattt

SEQ ID NO: 400239 - DNA, 20 bp, Artificial Sequence
  Description of Artificial Sequence: Synthetic oligonucleotide
  Target: LAMA2; (+) strand; PAM type: YTN; PAM sequence: TTC
attgtaccagactagatttc

SEQ ID NO: 400240 - DNA, 20 bp, Artificial Sequence
  Description of Artificial Sequence: Synthetic oligonucleotide
  Target: LAMA2; (+) strand; PAM type: YTN; PAM sequence: TTG
taccagactagatttcagag

SEQ ID NO: 400241 - DNA, 20 bp, Artificial Sequence
  Description of Artificial Sequence: Synthetic oligonucleotide
  Target: LAMA2; (+) strand; PAM type: YTN; PAM sequence: CTA
gatttcagagaaatactgtg

SEQ ID NO: 400242 - DNA, 20 bp, Artificial Sequence
  Description of Artificial Sequence: Synthetic oligonucleotide
  Target: LAMA2; (+) strand; PAM type: YTN; PAM sequence: TTT
cagagaaatactgtgtagca

SEQ ID NO: 400243 - DNA, 20 bp, Artificial Sequence
  Description of Artificial Sequence: Synthetic oligonucleotide
  Target: LAMA2; (+) strand; PAM type: YTN; PAM sequence: TTC
agagaaatactgtgtagcag

SEQ ID NO: 400244 - DNA, 20 bp, Artificial Sequence
  Description of Artificial Sequence: Synthetic oligonucleotide
  Target: LAMA2; (+) strand; PAM type: YTN; PAM sequence: CTG
tgtagcagttttattttgag

SEQ ID NO: 400245 - DNA, 20 bp, Artificial Sequence
  Description of Artificial Sequence: Synthetic oligonucleotide
  Target: LAMA2; (+) strand; PAM type: YTN; PAM sequence: TTT
tattttgagatcgtacatag

SEQ ID NO: 400246 - DNA, 20 bp, Artificial Sequence
  Description of Artificial Sequence: Synthetic oligonucleotide
  Target: LAMA2; (+) strand; PAM type: YTN; PAM sequence: TTT
attttgagatcgtacatagt

SEQ ID NO: 400247 - DNA, 20 bp, Artificial Sequence
  Description of Artificial Sequence: Synthetic oligonucleotide
  Target: LAMA2; (+) strand; PAM type: YTN; PAM sequence: TTA
ttttgagatcgtacatagtt

SEQ ID NO: 400248 - DNA, 20 bp, Artificial Sequence
  Description of Artificial Sequence: Synthetic oligonucleotide
  Target: LAMA2; (+) strand; PAM type: YTN; PAM sequence: TTT
tgagatcgtacatagttagt

SEQ ID NO: 400249 - DNA, 20 bp, Artificial Sequence
  Description of Artificial Sequence: Synthetic oligonucleotide
  Target: LAMA2; (+) strand; PAM type: YTN; PAM sequence: TTT
gagatcgtacatagttagtt

SEQ ID NO: 400250 - DNA, 20 bp, Artificial Sequence
  Description of Artificial Sequence: Synthetic oligonucleotide
  Target: LAMA2; (+) strand; PAM type: YTN; PAM sequence: TTG
agatcgtacatagttagttc

SEQ ID NO: 400251 - DNA, 20 bp, Artificial Sequence
  Description of Artificial Sequence: Synthetic oligonucleotide
  Target: LAMA2; (+) strand; PAM type: YTN; PAM sequence: TTA
gttctaatataactaagccc

SEQ ID NO: 400252 - DNA, 20 bp, Artificial Sequence
  Description of Artificial Sequence: Synthetic oligonucleotide
  Target: LAMA2; (+) strand; PAM type: YTN; PAM sequence: TTC
taatataactaagccctaat

SEQ ID NO: 400253 - DNA, 20 bp, Artificial Sequence
  Description of Artificial Sequence: Synthetic oligonucleotide
  Target: LAMA2; (+) strand; PAM type: YTN; PAM sequence: CTA
atataactaagccctaattt

SEQ ID NO: 400254 - DNA, 20 bp, Artificial Sequence
  Description of Artificial Sequence: Synthetic oligonucleotide
  Target: LAMA2; (+) strand; PAM type: YTN; PAM sequence: CTA
agccctaatttatatttagc

SEQ ID NO: 400255 - DNA, 20 bp, Artificial Sequence
  Description of Artificial Sequence: Synthetic oligonucleotide
  Target: LAMA2; (+) strand; PAM type: YTN; PAM sequence: CTA
atttatatttagcatcatgt

SEQ ID NO: 400256 - DNA, 20 bp, Artificial Sequence
  Description of Artificial Sequence: Synthetic oligonucleotide
  Target: LAMA2; (+) strand; PAM type: YTN; PAM sequence: TTT
atatttagcatcatgtcaga

SEQ ID NO: 400257 - DNA, 20 bp, Artificial Sequence
  Description of Artificial Sequence: Synthetic oligonucleotide
  Target: LAMA2; (+) strand; PAM type: YTN; PAM sequence: TTA
tatttagcatcatgtcagaa

SEQ ID NO: 400258 - DNA, 20 bp, Artificial Sequence
  Description of Artificial Sequence: Synthetic oligonucleotide
  Target: LAMA2; (+) strand; PAM type: YTN; PAM sequence: TTT
agcatcatgtcagaaacatg

SEQ ID NO: 400259 - DNA, 20 bp, Artificial Sequence
  Description of Artificial Sequence: Synthetic oligonucleotide
  Target: LAMA2; (+) strand; PAM type: YTN; PAM sequence: TTA
gcatcatgtcagaaacatga

SEQ ID NO: 400260 - DNA, 20 bp, Artificial Sequence
  Description of Artificial Sequence: Synthetic oligonucleotide
  Target: LAMA2; (+) strand; PAM type: YTN; PAM sequence: CTG
ctcattattaatgcaagtga

SEQ ID NO: 400261 - DNA, 20 bp, Artificial Sequence
  Description of Artificial Sequence: Synthetic oligonucleotide
  Target: LAMA2; (+) strand; PAM type: YTN; PAM sequence: CTC
attattaatgcaagtgactt

SEQ ID NO: 400262 - DNA, 20 bp, Artificial Sequence
  Description of Artificial Sequence: Synthetic oligonucleotide
  Target: LAMA2; (+) strand; PAM type: YTN; PAM sequence: TTA
ttaatgcaagtgacttgcaa

SEQ ID NO: 400263 - DNA, 20 bp, Artificial Sequence
  Description of Artificial Sequence: Synthetic oligonucleotide
  Target: LAMA2; (+) strand; PAM type: YTN; PAM sequence: TTA
atgcaagtgacttgcaactc

SEQ ID NO: 400264 - DNA, 20 bp, Artificial Sequence
  Description of Artificial Sequence: Synthetic oligonucleotide
  Target: LAMA2; (+) strand; PAM type: YTN; PAM sequence: CTT
gcaactctgccctgcgattt

SEQ ID NO: 400265 - DNA, 20 bp, Artificial Sequence
  Description of Artificial Sequence: Synthetic oligonucleotide
  Target: LAMA2; (+) strand; PAM type: YTN; PAM sequence: TTG
caactctgccctgcgatttt

SEQ ID NO: 400266 - DNA, 20 bp, Artificial Sequence
  Description of Artificial Sequence: Synthetic oligonucleotide
  Target: LAMA2; (+) strand; PAM type: YTN; PAM sequence: CTC
tgccctgcgatttttattct

SEQ ID NO: 400267 - DNA, 20 bp, Artificial Sequence
  Description of Artificial Sequence: Synthetic oligonucleotide
  Target: LAMA2; (+) strand; PAM type: YTN; PAM sequence: CTG
ccctgcgatttttattctgg

SEQ ID NO: 400268 - DNA, 20 bp, Artificial Sequence
  Description of Artificial Sequence: Synthetic oligonucleotide
  Target: LAMA2; (+) strand; PAM type: YTN; PAM sequence: CTG
cgatttttattctggatata

SEQ ID NO: 400269 - DNA, 20 bp, Artificial Sequence
  Description of Artificial Sequence: Synthetic oligonucleotide
  Target: LAMA2; (+) strand; PAM type: YTN; PAM sequence: TTT
ttattctggatatatctatc

SEQ ID NO: 400270 - DNA, 20 bp, Artificial Sequence
  Description of Artificial Sequence: Synthetic oligonucleotide
  Target: LAMA2; (+) strand; PAM type: YTN; PAM sequence: TTT
tattctggatatatctatct

SEQ ID NO: 400271 - DNA, 20 bp, Artificial Sequence
  Description of Artificial Sequence: Synthetic oligonucleotide
  Target: LAMA2; (+) strand; PAM type: YTN; PAM sequence: TTT
attctggatatatctatctt

SEQ ID NO: 400272 - DNA, 20 bp, Artificial Sequence
  Description of Artificial Sequence: Synthetic oligonucleotide
  Target: LAMA2; (+) strand; PAM type: YTN; PAM sequence: TTA
ttctggatatatctatcttg

SEQ ID NO: 400273 - DNA, 20 bp, Artificial Sequence
  Description of Artificial Sequence: Synthetic oligonucleotide
  Target: LAMA2; (+) strand; PAM type: YTN; PAM sequence: TTC
tggatatatctatcttgtgc

SEQ ID NO: 400274 - DNA, 20 bp, Artificial Sequence
  Description of Artificial Sequence: Synthetic oligonucleotide
  Target: LAMA2; (+) strand; PAM type: YTN; PAM sequence: CTG
gatatatctatcttgtgcca

SEQ ID NO: 400275 - DNA, 20 bp, Artificial Sequence
  Description of Artificial Sequence: Synthetic oligonucleotide
  Target: LAMA2; (+) strand; PAM type: YTN; PAM sequence: CTA
tcttgtgccatttcaatggg

SEQ ID NO: 400276 - DNA, 20 bp, Artificial Sequence
  Description of Artificial Sequence: Synthetic oligonucleotide
  Target: LAMA2; (+) strand; PAM type: YTN; PAM sequence: CTT
gtgccatttcaatgggcatg

SEQ ID NO: 400277 - DNA, 20 bp, Artificial Sequence
  Description of Artificial Sequence: Synthetic oligonucleotide
  Target: LAMA2; (+) strand; PAM type: YTN; PAM sequence: TTG
tgccatttcaatgggcatgt

SEQ ID NO: 400278 - DNA, 20 bp, Artificial Sequence
  Description of Artificial Sequence: Synthetic oligonucleotide
  Target: LAMA2; (+) strand; PAM type: YTN; PAM sequence: TTT
caatgggcatgtgacaaagg

SEQ ID NO: 400279 - DNA, 20 bp, Artificial Sequence
  Description of Artificial Sequence: Synthetic oligonucleotide
  Target: LAMA2; (+) strand; PAM type: YTN; PAM sequence: TTC
aatgggcatgtgacaaagga

SEQ ID NO: 400280 - DNA, 20 bp, Artificial Sequence
  Description of Artificial Sequence: Synthetic oligonucleotide
  Target: LAMA2; (+) strand; PAM type: YTN; PAM sequence: TTA
cactgtcattgtgttcccag

SEQ ID NO: 400281 - DNA, 20 bp, Artificial Sequence
  Description of Artificial Sequence: Synthetic oligonucleotide
  Target: LAMA2; (+) strand; PAM type: YTN; PAM sequence: CTG
tcattgtgttcccagtcgac

SEQ ID NO: 400282 - DNA, 20 bp, Artificial Sequence
  Description of Artificial Sequence: Synthetic oligonucleotide
  Target: LAMA2; (+) strand; PAM type: YTN; PAM sequence: TTG
tgttcccagtcgacccttgc

SEQ ID NO: 400283 - DNA, 20 bp, Artificial Sequence
  Description of Artificial Sequence: Synthetic oligonucleotide
  Target: LAMA2; (+) strand; PAM type: YTN; PAM sequence: TTC
ccagtcgacccttgctactc

SEQ ID NO: 400284 - DNA, 20 bp, Artificial Sequence
  Description of Artificial Sequence: Synthetic oligonucleotide
  Target: LAMA2; (+) strand; PAM type: YTN; PAM sequence: CTT
gctactctgctgcttccatt

SEQ ID NO: 400285 - DNA, 20 bp, Artificial Sequence
  Description of Artificial Sequence: Synthetic oligonucleotide
  Target: LAMA2; (+) strand; PAM type: YTN; PAM sequence: TTG
ctactctgctgcttccattc

SEQ ID NO: 400286 - DNA, 20 bp, Artificial Sequence
  Description of Artificial Sequence: Synthetic oligonucleotide
  Target: LAMA2; (+) strand; PAM type: YTN; PAM sequence: CTA
ctctgctgcttccattccct

SEQ ID NO: 400287 - DNA, 20 bp, Artificial Sequence
  Description of Artificial Sequence: Synthetic oligonucleotide
  Target: LAMA2; (+) strand; PAM type: YTN; PAM sequence: CTC
tgctgcttccattccctcat

SEQ ID NO: 400288 - DNA, 20 bp, Artificial Sequence
  Description of Artificial Sequence: Synthetic oligonucleotide
  Target: LAMA2; (+) strand; PAM type: YTN; PAM sequence: CTG
ctgcttccattccctcattg

SEQ ID NO: 400289 - DNA, 20 bp, Artificial Sequence
  Description of Artificial Sequence: Synthetic oligonucleotide
  Target: LAMA2; (+) strand; PAM type: YTN; PAM sequence: CTG
cttccattccctcattgtga

SEQ ID NO: 400290 - DNA, 20 bp, Artificial Sequence
  Description of Artificial Sequence: Synthetic oligonucleotide
  Target: LAMA2; (+) strand; PAM type: YTN; PAM sequence: CTT
ccattccctcattgtgagtc

SEQ ID NO: 400291 - DNA, 20 bp, Artificial Sequence
  Description of Artificial Sequence: Synthetic oligonucleotide
  Target: LAMA2; (+) strand; PAM type: YTN; PAM sequence: TTC
cattccctcattgtgagtcc

SEQ ID NO: 400292 - DNA, 20 bp, Artificial Sequence
  Description of Artificial Sequence: Synthetic oligonucleotide
  Target: LAMA2; (+) strand; PAM type: YTN; PAM sequence: TTC
cctcattgtgagtcctgctt

SEQ ID NO: 400293 - DNA, 20 bp, Artificial Sequence
  Description of Artificial Sequence: Synthetic oligonucleotide
  Target: LAMA2; (+) strand; PAM type: YTN; PAM sequence: CTC
attgtgagtcctgcttttgc

SEQ ID NO: 400294 - DNA, 20 bp, Artificial Sequence
  Description of Artificial Sequence: Synthetic oligonucleotide
  Target: LAMA2; (+) strand; PAM type: YTN; PAM sequence: TTG
tgagtcctgcttttgccaaa

SEQ ID NO: 400295 - DNA, 20 bp, Artificial Sequence
  Description of Artificial Sequence: Synthetic oligonucleotide
  Target: LAMA2; (+) strand; PAM type: YTN; PAM sequence: CTG
cttttgccaaactaattcta

SEQ ID NO: 400296 - DNA, 20 bp, Artificial Sequence
  Description of Artificial Sequence: Synthetic oligonucleotide
  Target: LAMA2; (+) strand; PAM type: YTN; PAM sequence: CTT
ttgccaaactaattctagca

SEQ ID NO: 400297 - DNA, 20 bp, Artificial Sequence
  Description of Artificial Sequence: Synthetic oligonucleotide
  Target: LAMA2; (+) strand; PAM type: YTN; PAM sequence: TTT
tgccaaactaattctagcac

SEQ ID NO: 400298 - DNA, 20 bp, Artificial Sequence
  Description of Artificial Sequence: Synthetic oligonucleotide
  Target: LAMA2; (+) strand; PAM type: YTN; PAM sequence: TTT
gccaaactaattctagcaca

SEQ ID NO: 400299 - DNA, 20 bp, Artificial Sequence
  Description of Artificial Sequence: Synthetic oligonucleotide
  Target: LAMA2; (+) strand; PAM type: YTN; PAM sequence: TTG
ccaaactaattctagcacat

SEQ ID NO: 400300 - DNA, 20 bp, Artificial Sequence
  Description of Artificial Sequence: Synthetic oligonucleotide
  Target: LAMA2; (+) strand; PAM type: YTN; PAM sequence: CTA
attctagcacatttttcttc

SEQ ID NO: 400301 - DNA, 20 bp, Artificial Sequence
  Description of Artificial Sequence: Synthetic oligonucleotide
  Target: LAMA2; (+) strand; PAM type: YTN; PAM sequence: TTC
tagcacatttttcttctact

SEQ ID NO: 400302 - DNA, 20 bp, Artificial Sequence
  Description of Artificial Sequence: Synthetic oligonucleotide
  Target: LAMA2; (+) strand; PAM type: YTN; PAM sequence: CTA
gcacatttttcttctactct

SEQ ID NO: 400303 - DNA, 20 bp, Artificial Sequence
  Description of Artificial Sequence: Synthetic oligonucleotide
  Target: LAMA2; (+) strand; PAM type: YTN; PAM sequence: TTT
ttcttctactctatgaggag

SEQ ID NO: 400304 - DNA, 20 bp, Artificial Sequence
  Description of Artificial Sequence: Synthetic oligonucleotide
  Target: LAMA2; (+) strand; PAM type: YTN; PAM sequence: TTT
tcttctactctatgaggagg

SEQ ID NO: 400305 - DNA, 20 bp, Artificial Sequence
  Description of Artificial Sequence: Synthetic oligonucleotide
  Target: LAMA2; (+) strand; PAM type: YTN; PAM sequence: TTT
cttctactctatgaggagga

SEQ ID NO: 400306 - DNA, 20 bp, Artificial Sequence
  Description of Artificial Sequence: Synthetic oligonucleotide
  Target: LAMA2; (+) strand; PAM type: YTN; PAM sequence: TTC
ttctactctatgaggaggag

SEQ ID NO: 400307 - DNA, 20 bp, Artificial Sequence
  Description of Artificial Sequence: Synthetic oligonucleotide
  Target: LAMA2; (+) strand; PAM type: YTN; PAM sequence: CTT
ctactctatgaggaggagat

SEQ ID NO: 400308 - DNA, 20 bp, Artificial Sequence
  Description of Artificial Sequence: Synthetic oligonucleotide
  Target: LAMA2; (+) strand; PAM type: YTN; PAM sequence: TTC
tactctatgaggaggagatg

SEQ ID NO: 400309 - DNA, 20 bp, Artificial Sequence
  Description of Artificial Sequence: Synthetic oligonucleotide
  Target: LAMA2; (+) strand; PAM type: YTN; PAM sequence: CTA
ctctatgaggaggagatgag

SEQ ID NO: 400310 - DNA, 20 bp, Artificial Sequence
  Description of Artificial Sequence: Synthetic oligonucleotide
  Target: LAMA2; (+) strand; PAM type: YTN; PAM sequence: CTC
tatgaggaggagatgagaaa

SEQ ID NO: 400311 - DNA, 20 bp, Artificial Sequence
  Description of Artificial Sequence: Synthetic oligonucleotide
  Target: LAMA2; (+) strand; PAM type: YTN; PAM sequence: CTA
tgaggaggagatgagaaagg

SEQ ID NO: 400312 - DNA, 20 bp, Artificial Sequence
  Description of Artificial Sequence: Synthetic oligonucleotide
  Target: LAMA2; (+) strand; PAM type: YTN; PAM sequence: CTT
aaagacgtatgtgtgtgtag

SEQ ID NO: 400313 - DNA, 20 bp, Artificial Sequence
  Description of Artificial Sequence: Synthetic oligonucleotide
  Target: LAMA2; (+) strand; PAM type: YTN; PAM sequence: TTA
aagacgtatgtgtgtgtagc

SEQ ID NO: 400314 - DNA, 20 bp, Artificial Sequence
  Description of Artificial Sequence: Synthetic oligonucleotide
  Target: LAMA2; (+) strand; PAM type: YTN; PAM sequence: CTT
tgagttttggtggatgtgat

SEQ ID NO: 400315 - DNA, 20 bp, Artificial Sequence
  Description of Artificial Sequence: Synthetic oligonucleotide
  Target: LAMA2; (+) strand; PAM type: YTN; PAM sequence: TTT
gagttttggtggatgtgatc

SEQ ID NO: 400316 - DNA, 20 bp, Artificial Sequence
  Description of Artificial Sequence: Synthetic oligonucleotide
  Target: LAMA2; (+) strand; PAM type: YTN; PAM sequence: TTG
agttttggtggatgtgatct

SEQ ID NO: 400317 - DNA, 20 bp, Artificial Sequence
  Description of Artificial Sequence: Synthetic oligonucleotide
  Target: LAMA2; (+) strand; PAM type: YTN; PAM sequence: TTT
tggtggatgtgatctttaga

SEQ ID NO: 400318 - DNA, 20 bp, Artificial Sequence
  Description of Artificial Sequence: Synthetic oligonucleotide
  Target: LAMA2; (+) strand; PAM type: YTN; PAM sequence: TTT
ggtggatgtgatctttagag

SEQ ID NO: 400319 - DNA, 20 bp, Artificial Sequence
  Description of Artificial Sequence: Synthetic oligonucleotide
  Target: LAMA2; (+) strand; PAM type: YTN; PAM sequence: TTG
gtggatgtgatctttagaga

SEQ ID NO: 400320 - DNA, 20 bp, Artificial Sequence
  Description of Artificial Sequence: Synthetic oligonucleotide
  Target: LAMA2; (+) strand; PAM type: YTN; PAM sequence: CTT
tagagagaaagtagaatgac

SEQ ID NO: 400321 - DNA, 20 bp, Artificial Sequence
  Description of Artificial Sequence: Synthetic oligonucleotide
  Target: LAMA2; (+) strand; PAM type: YTN; PAM sequence: TTT
agagagaaagtagaatgact

SEQ ID NO: 400322 - DNA, 20 bp, Artificial Sequence
  Description of Artificial Sequence: Synthetic oligonucleotide
  Target: LAMA2; (+) strand; PAM type: YTN; PAM sequence: TTA
gagagaaagtagaatgacta

SEQ ID NO: 400323 - DNA, 20 bp, Artificial Sequence
  Description of Artificial Sequence: Synthetic oligonucleotide
  Target: LAMA2; (+) strand; PAM type: YTN; PAM sequence: CTA
ggcttctgttattgggtttg

SEQ ID NO: 400324 - DNA, 20 bp, Artificial Sequence
  Description of Artificial Sequence: Synthetic oligonucleotide
  Target: LAMA2; (+) strand; PAM type: YTN; PAM sequence: CTT
ctgttattgggtttgagagc

SEQ ID NO: 400325 - DNA, 20 bp, Artificial Sequence
  Description of Artificial Sequence: Synthetic oligonucleotide
  Target: LAMA2; (+) strand; PAM type: YTN; PAM sequence: TTC
tgttattgggtttgagagct

SEQ ID NO: 400326 - DNA, 20 bp, Artificial Sequence
  Description of Artificial Sequence: Synthetic oligonucleotide
  Target: LAMA2; (+) strand; PAM type: YTN; PAM sequence: CTG
ttattgggtttgagagctga

SEQ ID NO: 400327 - DNA, 20 bp, Artificial Sequence
  Description of Artificial Sequence: Synthetic oligonucleotide
  Target: LAMA2; (+) strand; PAM type: YTN; PAM sequence: TTA
ttgggtttgagagctgaagg

SEQ ID NO: 400328 - DNA, 20 bp, Artificial Sequence
  Description of Artificial Sequence: Synthetic oligonucleotide
  Target: LAMA2; (+) strand; PAM type: YTN; PAM sequence: TTG
ggtttgagagctgaaggaat

SEQ ID NO: 400329 - DNA, 20 bp, Artificial Sequence
  Description of Artificial Sequence: Synthetic oligonucleotide
  Target: LAMA2; (+) strand; PAM type: YTN; PAM sequence: TTT
gagagctgaaggaataagga

SEQ ID NO: 400330 - DNA, 20 bp, Artificial Sequence
  Description of Artificial Sequence: Synthetic oligonucleotide
  Target: LAMA2; (+) strand; PAM type: YTN; PAM sequence: TTG
agagctgaaggaataaggag

SEQ ID NO: 400331 - DNA, 20 bp, Artificial Sequence
  Description of Artificial Sequence: Synthetic oligonucleotide
  Target: LAMA2; (+) strand; PAM type: YTN; PAM sequence: CTG
aaggaataaggagagggaat

SEQ ID NO: 400332 - DNA, 20 bp, Artificial Sequence
  Description of Artificial Sequence: Synthetic oligonucleotide
  Target: LAMA2; (+) strand; PAM type: YTN; PAM sequence: CTA
gaaaataaaactatggatta

SEQ ID NO: 400333 - DNA, 20 bp, Artificial Sequence
  Description of Artificial Sequence: Synthetic oligonucleotide
  Target: LAMA2; (+) strand; PAM type: YTN; PAM sequence: CTA
tggattataaattaaatctt

SEQ ID NO: 400334 - DNA, 20 bp, Artificial Sequence
  Description of Artificial Sequence: Synthetic oligonucleotide
  Target: LAMA2; (+) strand; PAM type: YTN; PAM sequence: TTA
taaattaaatcttcttctta

SEQ ID NO: 400335 - DNA, 20 bp, Artificial Sequence
  Description of Artificial Sequence: Synthetic oligonucleotide
  Target: LAMA2; (+) strand; PAM type: YTN; PAM sequence: TTA
aatcttcttcttattctcca

SEQ ID NO: 400336 - DNA, 20 bp, Artificial Sequence
  Description of Artificial Sequence: Synthetic oligonucleotide
  Target: LAMA2; (+) strand; PAM type: YTN; PAM sequence: CTT
cttcttattctccagaaatc

SEQ ID NO: 400337 - DNA, 20 bp, Artificial Sequence
  Description of Artificial Sequence: Synthetic oligonucleotide
  Target: LAMA2; (+) strand; PAM type: YTN; PAM sequence: TTC
ttcttattctccagaaatca

SEQ ID NO: 400338 - DNA, 20 bp, Artificial Sequence
  Description of Artificial Sequence: Synthetic oligonucleotide
  Target: LAMA2; (+) strand; PAM type: YTN; PAM sequence: CTT
cttattctccagaaatcaca

SEQ ID NO: 400339 - DNA, 20 bp, Artificial Sequence
  Description of Artificial Sequence: Synthetic oligonucleotide
  Target: LAMA2; (+) strand; PAM type: YTN; PAM sequence: TTC
ttattctccagaaatcacaa

SEQ ID NO: 400340 - DNA, 20 bp, Artificial Sequence
  Description of Artificial Sequence: Synthetic oligonucleotide
  Target: LAMA2; (+) strand; PAM type: YTN; PAM sequence: CTT
attctccagaaatcacaagt

SEQ ID NO: 400341 - DNA, 20 bp, Artificial Sequence
  Description of Artificial Sequence: Synthetic oligonucleotide
  Target: LAMA2; (+) strand; PAM type: YTN; PAM sequence: TTA
ttctccagaaatcacaagta

SEQ ID NO: 400342 - DNA, 20 bp, Artificial Sequence
  Description of Artificial Sequence: Synthetic oligonucleotide
  Target: LAMA2; (+) strand; PAM type: YTN; PAM sequence: TTC
tccagaaatcacaagtaaaa

SEQ ID NO: 400343 - DNA, 20 bp, Artificial Sequence
  Description of Artificial Sequence: Synthetic oligonucleotide
  Target: LAMA2; (+) strand; PAM type: YTN; PAM sequence: CTC
cagaaatcacaagtaaaaaa

SEQ ID NO: 400344 - DNA, 20 bp, Artificial Sequence
  Description of Artificial Sequence: Synthetic oligonucleotide
  Target: LAMA2; (+) strand; PAM type: YTN; PAM sequence: TTC
agttggattttcttttaact

SEQ ID NO: 400345 - DNA, 20 bp, Artificial Sequence
  Description of Artificial Sequence: Synthetic oligonucleotide
  Target: LAMA2; (+) strand; PAM type: YTN; PAM sequence: TTG
gattttcttttaactatcga

SEQ ID NO: 400346 - DNA, 20 bp, Artificial Sequence
  Description of Artificial Sequence: Synthetic oligonucleotide
  Target: LAMA2; (+) strand; PAM type: YTN; PAM sequence: TTT
tcttttaactatcgataatt

SEQ ID NO: 400347 - DNA, 20 bp, Artificial Sequence
  Description of Artificial Sequence: Synthetic oligonucleotide
  Target: LAMA2; (+) strand; PAM type: YTN; PAM sequence: TTT
cttttaactatcgataattc

SEQ ID NO: 400348 - DNA, 20 bp, Artificial Sequence
  Description of Artificial Sequence: Synthetic oligonucleotide
  Target: LAMA2; (+) strand; PAM type: YTN; PAM sequence: TTC
ttttaactatcgataattct

SEQ ID NO: 400349 - DNA, 20 bp, Artificial Sequence
  Description of Artificial Sequence: Synthetic oligonucleotide
  Target: LAMA2; (+) strand; PAM type: YTN; PAM sequence: CTT
ttaactatcgataattctat

SEQ ID NO: 400350 - DNA, 20 bp, Artificial Sequence
  Description of Artificial Sequence: Synthetic oligonucleotide
  Target: LAMA2; (+) strand; PAM type: YTN; PAM sequence: TTT
taactatcgataattctatg

SEQ ID NO: 400351 - DNA, 20 bp, Artificial Sequence
  Description of Artificial Sequence: Synthetic oligonucleotide
  Target: LAMA2; (+) strand; PAM type: YTN; PAM sequence: TTT
aactatcgataattctatgt

SEQ ID NO: 400352 - DNA, 20 bp, Artificial Sequence
  Description of Artificial Sequence: Synthetic oligonucleotide
  Target: LAMA2; (+) strand; PAM type: YTN; PAM sequence: TTA
actatcgataattctatgtc

SEQ ID NO: 400353 - DNA, 20 bp, Artificial Sequence
  Description of Artificial Sequence: Synthetic oligonucleotide
  Target: LAMA2; (+) strand; PAM type: YTN; PAM sequence: CTA
tcgataattctatgtcttca

SEQ ID NO: 400354 - DNA, 20 bp, Artificial Sequence
  Description of Artificial Sequence: Synthetic oligonucleotide
  Target: LAMA2; (+) strand; PAM type: YTN; PAM sequence: TTC
tatgtcttcacccttgttac

SEQ ID NO: 400355 - DNA, 20 bp, Artificial Sequence
  Description of Artificial Sequence: Synthetic oligonucleotide
  Target: LAMA2; (+) strand; PAM type: YTN; PAM sequence: CTA
tgtcttcacccttgttacaa

SEQ ID NO: 400356 - DNA, 20 bp, Artificial Sequence
  Description of Artificial Sequence: Synthetic oligonucleotide
  Target: LAMA2; (+) strand; PAM type: YTN; PAM sequence: CTT
cacccttgttacaattcaaa

SEQ ID NO: 400357 - DNA, 20 bp, Artificial Sequence
  Description of Artificial Sequence: Synthetic oligonucleotide
  Target: LAMA2; (+) strand; PAM type: YTN; PAM sequence: TTC
acccttgttacaattcaaac

SEQ ID NO: 400358 - DNA, 20 bp, Artificial Sequence
  Description of Artificial Sequence: Synthetic oligonucleotide
  Target: LAMA2; (+) strand; PAM type: YTN; PAM sequence: CTT
gttacaattcaaactgaatc

SEQ ID NO: 400359 - DNA, 20 bp, Artificial Sequence
  Description of Artificial Sequence: Synthetic oligonucleotide
  Target: LAMA2; (+) strand; PAM type: YTN; PAM sequence: TTG
ttacaattcaaactgaatca

SEQ ID NO: 400360 - DNA, 20 bp, Artificial Sequence
  Description of Artificial Sequence: Synthetic oligonucleotide
  Target: LAMA2; (+) strand; PAM type: YTN; PAM sequence: TTA
caattcaaactgaatcacaa

SEQ ID NO: 400361 - DNA, 20 bp, Artificial Sequence
  Description of Artificial Sequence: Synthetic oligonucleotide
  Target: LAMA2; (+) strand; PAM type: YTN; PAM sequence: TTC
aaactgaatcacaagagttc

SEQ ID NO: 400362 - DNA, 20 bp, Artificial Sequence
  Description of Artificial Sequence: Synthetic oligonucleotide
  Target: LAMA2; (+) strand; PAM type: YTN; PAM sequence: CTG
aatcacaagagttctttctt

SEQ ID NO: 400363 - DNA, 20 bp, Artificial Sequence
  Description of Artificial Sequence: Synthetic oligonucleotide
  Target: LAMA2; (+) strand; PAM type: YTN; PAM sequence: TTC
tttcttacttttagttatgg

SEQ ID NO: 400364 - DNA, 20 bp, Artificial Sequence
  Description of Artificial Sequence: Synthetic oligonucleotide
  Target: LAMA2; (+) strand; PAM type: YTN; PAM sequence: CTT
tcttacttttagttatggat

SEQ ID NO: 400365 - DNA, 20 bp, Artificial Sequence
  Description of Artificial Sequence: Synthetic oligonucleotide
  Target: LAMA2; (+) strand; PAM type: YTN; PAM sequence: TTT
cttacttttagttatggata

SEQ ID NO: 400366 - DNA, 20 bp, Artificial Sequence
  Description of Artificial Sequence: Synthetic oligonucleotide
  Target: LAMA2; (+) strand; PAM type: YTN; PAM sequence: TTC
ttacttttagttatggatac

SEQ ID NO: 400367 - DNA, 20 bp, Artificial Sequence
  Description of Artificial Sequence: Synthetic oligonucleotide
  Target: LAMA2; (+) strand; PAM type: YTN; PAM sequence: CTT
acttttagttatggatacac

SEQ ID NO: 400368 - DNA, 20 bp, Artificial Sequence
  Description of Artificial Sequence: Synthetic oligonucleotide
  Target: LAMA2; (+) strand; PAM type: YTN; PAM sequence: TTA
cttttagttatggatacact

SEQ ID NO: 400369 - DNA, 20 bp, Artificial Sequence
  Description of Artificial Sequence: Synthetic oligonucleotide
  Target: LAMA2; (+) strand; PAM type: YTN; PAM sequence: CTT
ttagttatggatacactatg

SEQ ID NO: 400370 - DNA, 20 bp, Artificial Sequence
  Description of Artificial Sequence: Synthetic oligonucleotide
  Target: LAMA2; (+) strand; PAM type: YTN; PAM sequence: TTT
tagttatggatacactatgc

SEQ ID NO: 400371 - DNA, 20 bp, Artificial Sequence
  Description of Artificial Sequence: Synthetic oligonucleotide
  Target: LAMA2; (+) strand; PAM type: YTN; PAM sequence: TTT
agttatggatacactatgcc

SEQ ID NO: 400372 - DNA, 20 bp, Artificial Sequence
  Description of Artificial Sequence: Synthetic oligonucleotide
  Target: LAMA2; (+) strand; PAM type: YTN; PAM sequence: TTA
gttatggatacactatgcct

SEQ ID NO: 400373 - DNA, 20 bp, Artificial Sequence
  Description of Artificial Sequence: Synthetic oligonucleotide
  Target: LAMA2; (+) strand; PAM type: YTN; PAM sequence: TTA
tggatacactatgcctcctc

SEQ ID NO: 400374 - DNA, 20 bp, Artificial Sequence
  Description of Artificial Sequence: Synthetic oligonucleotide
  Target: LAMA2; (+) strand; PAM type: YTN; PAM sequence: CTA
tgcctcctctgtcttttatt

SEQ ID NO: 400375 - DNA, 20 bp, Artificial Sequence
  Description of Artificial Sequence: Synthetic oligonucleotide
  Target: LAMA2; (+) strand; PAM type: YTN; PAM sequence: CTC
ctctgtcttttatttaaaat

SEQ ID NO: 400376 - DNA, 20 bp, Artificial Sequence
  Description of Artificial Sequence: Synthetic oligonucleotide
  Target: LAMA2; (+) strand; PAM type: YTN; PAM sequence: CTC
tgtcttttatttaaaatcag

SEQ ID NO: 400377 - DNA, 20 bp, Artificial Sequence
  Description of Artificial Sequence: Synthetic oligonucleotide
  Target: LAMA2; (+) strand; PAM type: YTN; PAM sequence: CTG
tcttttatttaaaatcagcc

SEQ ID NO: 400378 - DNA, 20 bp, Artificial Sequence
  Description of Artificial Sequence: Synthetic oligonucleotide
  Target: LAMA2; (+) strand; PAM type: YTN; PAM sequence: CTT
ttatttaaaatcagcccagg

SEQ ID NO: 400379 - DNA, 20 bp, Artificial Sequence
  Description of Artificial Sequence: Synthetic oligonucleotide
  Target: LAMA2; (+) strand; PAM type: YTN; PAM sequence: TTT
tatttaaaatcagcccagga

SEQ ID NO: 400380 - DNA, 20 bp, Artificial Sequence
  Description of Artificial Sequence: Synthetic oligonucleotide
  Target: LAMA2; (+) strand; PAM type: YTN; PAM sequence: TTT
atttaaaatcagcccaggag

SEQ ID NO: 400381 - DNA, 20 bp, Artificial Sequence
  Description of Artificial Sequence: Synthetic oligonucleotide
  Target: LAMA2; (+) strand; PAM type: YTN; PAM sequence: TTA
tttaaaatcagcccaggagt

SEQ ID NO: 400382 - DNA, 20 bp, Artificial Sequence
  Description of Artificial Sequence: Synthetic oligonucleotide
  Target: LAMA2; (+) strand; PAM type: YTN; PAM sequence: TTT
aaaatcagcccaggagtgct

SEQ ID NO: 400383 - DNA, 20 bp, Artificial Sequence
  Description of Artificial Sequence: Synthetic oligonucleotide
  Target: LAMA2; (+) strand; PAM type: YTN; PAM sequence: TTA
aaatcagcccaggagtgctt

SEQ ID NO: 400384 - DNA, 20 bp, Artificial Sequence
  Description of Artificial Sequence: Synthetic oligonucleotide
  Target: LAMA2; (+) strand; PAM type: YTN; PAM sequence: CTT
atttttctaggttttcctcg

SEQ ID NO: 400385 - DNA, 20 bp, Artificial Sequence
  Description of Artificial Sequence: Synthetic oligonucleotide
  Target: LAMA2; (+) strand; PAM type: YTN; PAM sequence: TTA
tttttctaggttttcctcgc

SEQ ID NO: 400386 - DNA, 20 bp, Artificial Sequence
  Description of Artificial Sequence: Synthetic oligonucleotide
  Target: LAMA2; (+) strand; PAM type: YTN; PAM sequence: TTT
ttctaggttttcctcgctat

SEQ ID NO: 400387 - DNA, 20 bp, Artificial Sequence
  Description of Artificial Sequence: Synthetic oligonucleotide
  Target: LAMA2; (+) strand; PAM type: YTN; PAM sequence: TTT
tctaggttttcctcgctatt

SEQ ID NO: 400388 - DNA, 20 bp, Artificial Sequence
  Description of Artificial Sequence: Synthetic oligonucleotide
  Target: LAMA2; (+) strand; PAM type: YTN; PAM sequence: TTT
ctaggttttcctcgctatta

SEQ ID NO: 400389 - DNA, 20 bp, Artificial Sequence
  Description of Artificial Sequence: Synthetic oligonucleotide
  Target: LAMA2; (+) strand; PAM type: YTN; PAM sequence: TTC
taggttttcctcgctattat

SEQ ID NO: 400390 - DNA, 20 bp, Artificial Sequence
  Description of Artificial Sequence: Synthetic oligonucleotide
  Target: LAMA2; (+) strand; PAM type: YTN; PAM sequence: CTA
ggttttcctcgctattattt

SEQ ID NO: 400391 - DNA, 20 bp, Artificial Sequence
  Description of Artificial Sequence: Synthetic oligonucleotide
  Target: LAMA2; (+) strand; PAM type: YTN; PAM sequence: TTT
tcctcgctattattttgtaa

SEQ ID NO: 400392 - DNA, 20 bp, Artificial Sequence
  Description of Artificial Sequence: Synthetic oligonucleotide
  Target: LAMA2; (+) strand; PAM type: YTN; PAM sequence: TTT
cctcgctattattttgtaag

SEQ ID NO: 400393 - DNA, 20 bp, Artificial Sequence
  Description of Artificial Sequence: Synthetic oligonucleotide
  Target: LAMA2; (+) strand; PAM type: YTN; PAM sequence: TTC
ctcgctattattttgtaagt

SEQ ID NO: 400394 - DNA, 20 bp, Artificial Sequence
  Description of Artificial Sequence: Synthetic oligonucleotide
  Target: LAMA2; (+) strand; PAM type: YTN; PAM sequence: CTC
gctattattttgtaagttcc

SEQ ID NO: 400395 - DNA, 20 bp, Artificial Sequence
  Description of Artificial Sequence: Synthetic oligonucleotide
  Target: LAMA2; (+) strand; PAM type: YTN; PAM sequence: CTA
ttattttgtaagttccattt

SEQ ID NO: 400396 - DNA, 20 bp, Artificial Sequence
  Description of Artificial Sequence: Synthetic oligonucleotide
  Target: LAMA2; (+) strand; PAM type: YTN; PAM sequence: TTA
ttttgtaagttccattttga

SEQ ID NO: 400397 - DNA, 20 bp, Artificial Sequence
  Description of Artificial Sequence: Synthetic oligonucleotide
  Target: LAMA2; (+) strand; PAM type: YTN; PAM sequence: TTT
tgtaagttccattttgaaat

SEQ ID NO: 400398 - DNA, 20 bp, Artificial Sequence
  Description of Artificial Sequence: Synthetic oligonucleotide
  Target: LAMA2; (+) strand; PAM type: YTN; PAM sequence: TTT
gtaagttccattttgaaatc

SEQ ID NO: 400399 - DNA, 20 bp, Artificial Sequence
  Description of Artificial Sequence: Synthetic oligonucleotide
  Target: LAMA2; (+) strand; PAM type: YTN; PAM sequence: TTG
taagttccattttgaaatct

SEQ ID NO: 400400 - DNA, 20 bp, Artificial Sequence
  Description of Artificial Sequence: Synthetic oligonucleotide
  Target: LAMA2; (+) strand; PAM type: YTN; PAM sequence: TTC
cattttgaaatctgcaattc

SEQ ID NO: 400401 - DNA, 20 bp, Artificial Sequence
  Description of Artificial Sequence: Synthetic oligonucleotide
  Target: LAMA2; (+) strand; PAM type: YTN; PAM sequence: TTT
tgaaatctgcaattcttctc

SEQ ID NO: 400402 - DNA, 20 bp, Artificial Sequence
  Description of Artificial Sequence: Synthetic oligonucleotide
  Target: LAMA2; (+) strand; PAM type: YTN; PAM sequence: TTT
gaaatctgcaattcttctct

SEQ ID NO: 400403 - DNA, 20 bp, Artificial Sequence
  Description of Artificial Sequence: Synthetic oligonucleotide
  Target: LAMA2; (+) strand; PAM type: YTN; PAM sequence: TTG
aaatctgcaattcttctctg

SEQ ID NO: 400404 - DNA, 20 bp, Artificial Sequence
  Description of Artificial Sequence: Synthetic oligonucleotide
  Target: LAMA2; (+) strand; PAM type: YTN; PAM sequence: CTG
caattcttctctgaatagct

SEQ ID NO: 400405 - DNA, 20 bp, Artificial Sequence
  Description of Artificial Sequence: Synthetic oligonucleotide
  Target: LAMA2; (+) strand; PAM type: YTN; PAM sequence: TTC
ttctctgaatagcttctact

SEQ ID NO: 400406 - DNA, 20 bp, Artificial Sequence
  Description of Artificial Sequence: Synthetic oligonucleotide
  Target: LAMA2; (+) strand; PAM type: YTN; PAM sequence: CTT
ctctgaatagcttctactca

SEQ ID NO: 400407 - DNA, 20 bp, Artificial Sequence
  Description of Artificial Sequence: Synthetic oligonucleotide
  Target: LAMA2; (+) strand; PAM type: YTN; PAM sequence: TTC
tctgaatagcttctactcat

SEQ ID NO: 400408 - DNA, 20 bp, Artificial Sequence
  Description of Artificial Sequence: Synthetic oligonucleotide
  Target: LAMA2; (+) strand; PAM type: YTN; PAM sequence: CTC
tgaatagcttctactcatct

SEQ ID NO: 400409 - DNA, 20 bp, Artificial Sequence
  Description of Artificial Sequence: Synthetic oligonucleotide
  Target: LAMA2; (+) strand; PAM type: YTN; PAM sequence: CTG
aatagcttctactcatctaa

SEQ ID NO: 400410 - DNA, 20 bp, Artificial Sequence
  Description of Artificial Sequence: Synthetic oligonucleotide
  Target: LAMA2; (+) strand; PAM type: YTN; PAM sequence: CTT
ctactcatctaattctatca

SEQ ID NO: 400411 - DNA, 20 bp, Artificial Sequence
  Description of Artificial Sequence: Synthetic oligonucleotide
  Target: LAMA2; (+) strand; PAM type: YTN; PAM sequence: TTC
tactcatctaattctatcac

SEQ ID NO: 400412 - DNA, 20 bp, Artificial Sequence
  Description of Artificial Sequence: Synthetic oligonucleotide
  Target: LAMA2; (+) strand; PAM type: YTN; PAM sequence: CTA
ctcatctaattctatcacca

SEQ ID NO: 400413 - DNA, 20 bp, Artificial Sequence
  Description of Artificial Sequence: Synthetic oligonucleotide
  Target: LAMA2; (+) strand; PAM type: YTN; PAM sequence: CTC
atctaattctatcaccaaag

SEQ ID NO: 400414 - DNA, 20 bp, Artificial Sequence
  Description of Artificial Sequence: Synthetic oligonucleotide
  Target: LAMA2; (+) strand; PAM type: YTN; PAM sequence: CTA
attctatcaccaaagctaca

SEQ ID NO: 400415 - DNA, 20 bp, Artificial Sequence
  Description of Artificial Sequence: Synthetic oligonucleotide
  Target: LAMA2; (+) strand; PAM type: YTN; PAM sequence: TTC
tatcaccaaagctacaaaat

SEQ ID NO: 400416 - DNA, 20 bp, Artificial Sequence
  Description of Artificial Sequence: Synthetic oligonucleotide
  Target: LAMA2; (+) strand; PAM type: YTN; PAM sequence: CTA
tcaccaaagctacaaaatgt

SEQ ID NO: 400417 - DNA, 20 bp, Artificial Sequence
  Description of Artificial Sequence: Synthetic oligonucleotide
  Target: LAMA2; (+) strand; PAM type: YTN; PAM sequence: CTA
caaaatgtttagatgtagtt

SEQ ID NO: 400418 - DNA, 20 bp, Artificial Sequence
  Description of Artificial Sequence: Synthetic oligonucleotide
  Target: LAMA2; (+) strand; PAM type: YTN; PAM sequence: TTT
agatgtagttcaagaaattc

SEQ ID NO: 400419 - DNA, 20 bp, Artificial Sequence
  Description of Artificial Sequence: Synthetic oligonucleotide
  Target: LAMA2; (+) strand; PAM type: YTN; PAM sequence: TTA
gatgtagttcaagaaattcc

SEQ ID NO: 400420 - DNA, 20 bp, Artificial Sequence
  Description of Artificial Sequence: Synthetic oligonucleotide
  Target: LAMA2; (+) strand; PAM type: YTN; PAM sequence: TTC
aagaaattccagaaactact

SEQ ID NO: 400421 - DNA, 20 bp, Artificial Sequence
  Description of Artificial Sequence: Synthetic oligonucleotide
  Target: LAMA2; (+) strand; PAM type: YTN; PAM sequence: TTC
cagaaactactttagaaaaa

SEQ ID NO: 400422 - DNA, 20 bp, Artificial Sequence
  Description of Artificial Sequence: Synthetic oligonucleotide
  Target: LAMA2; (+) strand; PAM type: YTN; PAM sequence: CTA
ctttagaaaaaggtgatcag

SEQ ID NO: 400423 - DNA, 20 bp, Artificial Sequence
  Description of Artificial Sequence: Synthetic oligonucleotide
  Target: LAMA2; (+) strand; PAM type: YTN; PAM sequence: CTT
tagaaaaaggtgatcagcgt

SEQ ID NO: 400424 - DNA, 20 bp, Artificial Sequence
  Description of Artificial Sequence: Synthetic oligonucleotide
  Target: LAMA2; (+) strand; PAM type: YTN; PAM sequence: TTT
agaaaaaggtgatcagcgta

SEQ ID NO: 400425 - DNA, 20 bp, Artificial Sequence
  Description of Artificial Sequence: Synthetic oligonucleotide
  Target: LAMA2; (+) strand; PAM type: YTN; PAM sequence: TTA
gaaaaaggtgatcagcgtaa

SEQ ID NO: 400426 - DNA, 20 bp, Artificial Sequence
  Description of Artificial Sequence: Synthetic oligonucleotide
  Target: LAMA2; (+) strand; PAM type: YTN; PAM sequence: TTA
ataaggatcagagtcaagca

SEQ ID NO: 400427 - DNA, 20 bp, Artificial Sequence
  Description of Artificial Sequence: Synthetic oligonucleotide
  Target: LAMA2; (+) strand; PAM type: YTN; PAM sequence: CTG
aaacattaaaaaaaaatcag

SEQ ID NO: 400428 - DNA, 20 bp, Artificial Sequence
  Description of Artificial Sequence: Synthetic oligonucleotide
  Target: LAMA2; (+) strand; PAM type: YTN; PAM sequence: TTA
aaaaaaaatcagaacagggt

SEQ ID NO: 400429 - DNA, 20 bp, Artificial Sequence
  Description of Artificial Sequence: Synthetic oligonucleotide
  Target: LAMA2; (+) strand; PAM type: YTN; PAM sequence: TTG
gaatatacacattgtaactt

SEQ ID NO: 400430 - DNA, 20 bp, Artificial Sequence
  Description of Artificial Sequence: Synthetic oligonucleotide
  Target: LAMA2; (+) strand; PAM type: YTN; PAM sequence: TTG
taacttgctagtacaaaaaa

SEQ ID NO: 400431 - DNA, 20 bp, Artificial Sequence
  Description of Artificial Sequence: Synthetic oligonucleotide
  Target: LAMA2; (+) strand; PAM type: YTN; PAM sequence: CTT
gctagtacaaaaaaaaaatg

SEQ ID NO: 400432 - DNA, 20 bp, Artificial Sequence
  Description of Artificial Sequence: Synthetic oligonucleotide
  Target: LAMA2; (+) strand; PAM type: YTN; PAM sequence: TTG
ctagtacaaaaaaaaaatgc

SEQ ID NO: 400433 - DNA, 20 bp, Artificial Sequence
  Description of Artificial Sequence: Synthetic oligonucleotide
  Target: LAMA2; (+) strand; PAM type: YTN; PAM sequence: CTA
gtacaaaaaaaaaatgcaga

SEQ ID NO: 400434 - DNA, 20 bp, Artificial Sequence
  Description of Artificial Sequence: Synthetic oligonucleotide
  Target: LAMA2; (+) strand; PAM type: YTN; PAM sequence: TTA
gcgctttggaacttgagagg

SEQ ID NO: 400435 - DNA, 20 bp, Artificial Sequence
  Description of Artificial Sequence: Synthetic oligonucleotide
  Target: LAMA2; (+) strand; PAM type: YTN; PAM sequence: CTT
tggaacttgagaggcagcag

SEQ ID NO: 400436 - DNA, 20 bp, Artificial Sequence
  Description of Artificial Sequence: Synthetic oligonucleotide
  Target: LAMA2; (+) strand; PAM type: YTN; PAM sequence: TTT
ggaacttgagaggcagcagt

SEQ ID NO: 400437 - DNA, 20 bp, Artificial Sequence
  Description of Artificial Sequence: Synthetic oligonucleotide
  Target: LAMA2; (+) strand; PAM type: YTN; PAM sequence: TTG
gaacttgagaggcagcagta

SEQ ID NO: 400438 - DNA, 20 bp, Artificial Sequence
  Description of Artificial Sequence: Synthetic oligonucleotide
  Target: LAMA2; (+) strand; PAM type: YTN; PAM sequence: CTT
gagaggcagcagtaaaaata

SEQ ID NO: 400439 - DNA, 20 bp, Artificial Sequence
  Description of Artificial Sequence: Synthetic oligonucleotide
  Target: LAMA2; (+) strand; PAM type: YTN; PAM sequence: TTG
agaggcagcagtaaaaatat

SEQ ID NO: 400440 - DNA, 20 bp, Artificial Sequence
  Description of Artificial Sequence: Synthetic oligonucleotide
  Target: LAMA2; (+) strand; PAM type: YTN; PAM sequence: TTC
ttcaggtcagtcttctgaat

SEQ ID NO: 400441 - DNA, 20 bp, Artificial Sequence
  Description of Artificial Sequence: Synthetic oligonucleotide
  Target: LAMA2; (+) strand; PAM type: YTN; PAM sequence: CTT
caggtcagtcttctgaataa

SEQ ID NO: 400442 - DNA, 20 bp, Artificial Sequence
  Description of Artificial Sequence: Synthetic oligonucleotide
  Target: LAMA2; (+) strand; PAM type: YTN; PAM sequence: TTC
aggtcagtcttctgaataat

SEQ ID NO: 400443 - DNA, 20 bp, Artificial Sequence
  Description of Artificial Sequence: Synthetic oligonucleotide
  Target: LAMA2; (+) strand; PAM type: YTN; PAM sequence: CTT
ctgaataattggcccagttg

SEQ ID NO: 400444 - DNA, 20 bp, Artificial Sequence
  Description of Artificial Sequence: Synthetic oligonucleotide
  Target: LAMA2; (+) strand; PAM type: YTN; PAM sequence: TTC
tgaataattggcccagttgt

SEQ ID NO: 400445 - DNA, 20 bp, Artificial Sequence
  Description of Artificial Sequence: Synthetic oligonucleotide
  Target: LAMA2; (+) strand; PAM type: YTN; PAM sequence: CTG
aataattggcccagttgttc

SEQ ID NO: 400446 - DNA, 20 bp, Artificial Sequence
  Description of Artificial Sequence: Synthetic oligonucleotide
  Target: LAMA2; (+) strand; PAM type: YTN; PAM sequence: TTG
gcccagttgttcagccagca

SEQ ID NO: 400447 - DNA, 20 bp, Artificial Sequence
  Description of Artificial Sequence: Synthetic oligonucleotide
  Target: LAMA2; (+) strand; PAM type: YTN; PAM sequence: TTG
ttcagccagcattttgctat

SEQ ID NO: 400448 - DNA, 20 bp, Artificial Sequence
  Description of Artificial Sequence: Synthetic oligonucleotide
  Target: LAMA2; (+) strand; PAM type: YTN; PAM sequence: TTC
agccagcattttgctatcag

SEQ ID NO: 400449 - DNA, 20 bp, Artificial Sequence
  Description of Artificial Sequence: Synthetic oligonucleotide
  Target: LAMA2; (+) strand; PAM type: YTN; PAM sequence: TTT
tgctatcagaatgcagaaag

SEQ ID NO: 400450 - DNA, 20 bp, Artificial Sequence
  Description of Artificial Sequence: Synthetic oligonucleotide
  Target: LAMA2; (+) strand; PAM type: YTN; PAM sequence: TTT
gctatcagaatgcagaaagt

SEQ ID NO: 400451 - DNA, 20 bp, Artificial Sequence
  Description of Artificial Sequence: Synthetic oligonucleotide
  Target: LAMA2; (+) strand; PAM type: YTN; PAM sequence: TTG
ctatcagaatgcagaaagtg

SEQ ID NO: 400452 - DNA, 20 bp, Artificial Sequence
  Description of Artificial Sequence: Synthetic oligonucleotide
  Target: LAMA2; (+) strand; PAM type: YTN; PAM sequence: CTA
tcagaatgcagaaagtggta

SEQ ID NO: 400453 - DNA, 20 bp, Artificial Sequence
  Description of Artificial Sequence: Synthetic oligonucleotide
  Target: LAMA2; (+) strand; PAM type: YTN; PAM sequence: CTT
caaattaatgatctttctca

SEQ ID NO: 400454 - DNA, 20 bp, Artificial Sequence
  Description of Artificial Sequence: Synthetic oligonucleotide
  Target: LAMA2; (+) strand; PAM type: YTN; PAM sequence: TTC
aaattaatgatctttctcac

SEQ ID NO: 400455 - DNA, 20 bp, Artificial Sequence
  Description of Artificial Sequence: Synthetic oligonucleotide
  Target: LAMA2; (+) strand; PAM type: YTN; PAM sequence: TTA
atgatctttctcaccataca

SEQ ID NO: 400456 - DNA, 20 bp, Artificial Sequence
  Description of Artificial Sequence: Synthetic oligonucleotide
  Target: LAMA2; (+) strand; PAM type: YTN; PAM sequence: CTT
tctcaccatacatgaatatc

SEQ ID NO: 400457 - DNA, 20 bp, Artificial Sequence
  Description of Artificial Sequence: Synthetic oligonucleotide
  Target: LAMA2; (+) strand; PAM type: YTN; PAM sequence: TTT
ctcaccatacatgaatatct

SEQ ID NO: 400458 - DNA, 20 bp, Artificial Sequence
  Description of Artificial Sequence: Synthetic oligonucleotide
  Target: LAMA2; (+) strand; PAM type: YTN; PAM sequence: TTC
tcaccatacatgaatatctt

SEQ ID NO: 400459 - DNA, 20 bp, Artificial Sequence
  Description of Artificial Sequence: Synthetic oligonucleotide
  Target: LAMA2; (+) strand; PAM type: YTN; PAM sequence: CTC
accatacatgaatatcttgc

SEQ ID NO: 400460 - DNA, 20 bp, Artificial Sequence
  Description of Artificial Sequence: Synthetic oligonucleotide
  Target: LAMA2; (+) strand; PAM type: YTN; PAM sequence: CTT
gcttgccagaacatttgaat

SEQ ID NO: 400461 - DNA, 20 bp, Artificial Sequence
  Description of Artificial Sequence: Synthetic oligonucleotide
  Target: LAMA2; (+) strand; PAM type: YTN; PAM sequence: TTG
cttgccagaacatttgaatg

SEQ ID NO: 400462 - DNA, 20 bp, Artificial Sequence
  Description of Artificial Sequence: Synthetic oligonucleotide
  Target: LAMA2; (+) strand; PAM type: YTN; PAM sequence: CTT
gccagaacatttgaatgctc

SEQ ID NO: 400463 - DNA, 20 bp, Artificial Sequence
  Description of Artificial Sequence: Synthetic oligonucleotide
  Target: LAMA2; (+) strand; PAM type: YTN; PAM sequence: TTG
ccagaacatttgaatgctcc

SEQ ID NO: 400464 - DNA, 20 bp, Artificial Sequence
  Description of Artificial Sequence: Synthetic oligonucleotide
  Target: LAMA2; (+) strand; PAM type: YTN; PAM sequence: TTT
gaatgctccattattttaaa

SEQ ID NO: 400465 - DNA, 20 bp, Artificial Sequence
  Description of Artificial Sequence: Synthetic oligonucleotide
  Target: LAMA2; (+) strand; PAM type: YTN; PAM sequence: TTG
aatgctccattattttaaaa

SEQ ID NO: 400466 - DNA, 20 bp, Artificial Sequence
  Description of Artificial Sequence: Synthetic oligonucleotide
  Target: LAMA2; (+) strand; PAM type: YTN; PAM sequence: CTC
cattattttaaaaactaaat

SEQ ID NO: 400467 - DNA, 20 bp, Artificial Sequence
  Description of Artificial Sequence: Synthetic oligonucleotide
  Target: LAMA2; (+) strand; PAM type: YTN; PAM sequence: TTA
ttttaaaaactaaatccaat

SEQ ID NO: 400468 - DNA, 20 bp, Artificial Sequence
  Description of Artificial Sequence: Synthetic oligonucleotide
  Target: LAMA2; (+) strand; PAM type: YTN; PAM sequence: TTT
taaaaactaaatccaatcaa

SEQ ID NO: 400469 - DNA, 20 bp, Artificial Sequence
  Description of Artificial Sequence: Synthetic oligonucleotide
  Target: LAMA2; (+) strand; PAM type: YTN; PAM sequence: TTT
aaaaactaaatccaatcaag

SEQ ID NO: 400470 - DNA, 20 bp, Artificial Sequence
  Description of Artificial Sequence: Synthetic oligonucleotide
  Target: LAMA2; (+) strand; PAM type: YTN; PAM sequence: TTA
aaaactaaatccaatcaaga

SEQ ID NO: 400471 - DNA, 20 bp, Artificial Sequence
  Description of Artificial Sequence: Synthetic oligonucleotide
  Target: LAMA2; (+) strand; PAM type: YTN; PAM sequence: CTA
aatccaatcaagaagctaag

SEQ ID NO: 400472 - DNA, 20 bp, Artificial Sequence
  Description of Artificial Sequence: Synthetic oligonucleotide
  Target: LAMA2; (+) strand; PAM type: YTN; PAM sequence: CTA
agaaatgaaatttctacagt

SEQ ID NO: 400473 - DNA, 20 bp, Artificial Sequence
  Description of Artificial Sequence: Synthetic oligonucleotide
  Target: LAMA2; (+) strand; PAM type: YTN; PAM sequence: TTT
ctacagttccattttcttaa

SEQ ID NO: 400474 - DNA, 20 bp, Artificial Sequence
  Description of Artificial Sequence: Synthetic oligonucleotide
  Target: LAMA2; (+) strand; PAM type: YTN; PAM sequence: TTC
tacagttccattttcttaag

SEQ ID NO: 400475 - DNA, 20 bp, Artificial Sequence
  Description of Artificial Sequence: Synthetic oligonucleotide
  Target: LAMA2; (+) strand; PAM type: YTN; PAM sequence: CTA
cagttccattttcttaagtg

SEQ ID NO: 400476 - DNA, 20 bp, Artificial Sequence
  Description of Artificial Sequence: Synthetic oligonucleotide
  Target: LAMA2; (+) strand; PAM type: YTN; PAM sequence: TTC
cattttcttaagtgttgaag

SEQ ID NO: 400477 - DNA, 20 bp, Artificial Sequence
  Description of Artificial Sequence: Synthetic oligonucleotide
  Target: LAMA2; (+) strand; PAM type: YTN; PAM sequence: TTT
tcttaagtgttgaagacttt

SEQ ID NO: 400478 - DNA, 20 bp, Artificial Sequence
  Description of Artificial Sequence: Synthetic oligonucleotide
  Target: LAMA2; (+) strand; PAM type: YTN; PAM sequence: TTT
cttaagtgttgaagactttc

SEQ ID NO: 400479 - DNA, 20 bp, Artificial Sequence
  Description of Artificial Sequence: Synthetic oligonucleotide
  Target: LAMA2; (+) strand; PAM type: YTN; PAM sequence: TTC
ttaagtgttgaagactttca

SEQ ID NO: 400480 - DNA, 20 bp, Artificial Sequence
  Description of Artificial Sequence: Synthetic oligonucleotide
  Target: LAMA2; (+) strand; PAM type: YTN; PAM sequence: CTT
aagtgttgaagactttcaag

SEQ ID NO: 400481 - DNA, 20 bp, Artificial Sequence
  Description of Artificial Sequence: Synthetic oligonucleotide
  Target: LAMA2; (+) strand; PAM type: YTN; PAM sequence: TTA
agtgttgaagactttcaagc

SEQ ID NO: 400482 - DNA, 20 bp, Artificial Sequence
  Description of Artificial Sequence: Synthetic oligonucleotide
  Target: LAMA2; (+) strand; PAM type: YTN; PAM sequence: TTG
aagactttcaagctaatatc

SEQ ID NO: 400483 - DNA, 20 bp, Artificial Sequence
  Description of Artificial Sequence: Synthetic oligonucleotide
  Target: LAMA2; (+) strand; PAM type: YTN; PAM sequence: CTT
tcaagctaatatcaaaagag

SEQ ID NO: 400484 - DNA, 20 bp, Artificial Sequence
  Description of Artificial Sequence: Synthetic oligonucleotide
  Target: LAMA2; (+) strand; PAM type: YTN; PAM sequence: TTT
caagctaatatcaaaagagc

SEQ ID NO: 400485 - DNA, 20 bp, Artificial Sequence
  Description of Artificial Sequence: Synthetic oligonucleotide
  Target: LAMA2; (+) strand; PAM type: YTN; PAM sequence: TTC
aagctaatatcaaaagagca

SEQ ID NO: 400486 - DNA, 20 bp, Artificial Sequence
  Description of Artificial Sequence: Synthetic oligonucleotide
  Target: LAMA2; (+) strand; PAM type: YTN; PAM sequence: CTA
atatcaaaagagcagccctt

SEQ ID NO: 400487 - DNA, 20 bp, Artificial Sequence
  Description of Artificial Sequence: Synthetic oligonucleotide
  Target: LAMA2; (+) strand; PAM type: YTN; PAM sequence: CTT
tattctcaaagaatttgtat

SEQ ID NO: 400488 - DNA, 20 bp, Artificial Sequence
  Description of Artificial Sequence: Synthetic oligonucleotide
  Target: LAMA2; (+) strand; PAM type: YTN; PAM sequence: TTT
attctcaaagaatttgtata

SEQ ID NO: 400489 - DNA, 20 bp, Artificial Sequence
  Description of Artificial Sequence: Synthetic oligonucleotide
  Target: LAMA2; (+) strand; PAM type: YTN; PAM sequence: TTA
ttctcaaagaatttgtatag

SEQ ID NO: 400490 - DNA, 20 bp, Artificial Sequence
  Description of Artificial Sequence: Synthetic oligonucleotide
  Target: LAMA2; (+) strand; PAM type: YTN; PAM sequence: TTC
tcaaagaatttgtatagata

SEQ ID NO: 400491 - DNA, 20 bp, Artificial Sequence
  Description of Artificial Sequence: Synthetic oligonucleotide
  Target: LAMA2; (+) strand; PAM type: YTN; PAM sequence: CTC
aaagaatttgtatagatatc

SEQ ID NO: 400492 - DNA, 20 bp, Artificial Sequence
  Description of Artificial Sequence: Synthetic oligonucleotide
  Target: LAMA2; (+) strand; PAM type: YTN; PAM sequence: TTT
gtatagatatcacagtcata

SEQ ID NO: 400493 - DNA, 20 bp, Artificial Sequence
  Description of Artificial Sequence: Synthetic oligonucleotide
  Target: LAMA2; (+) strand; PAM type: YTN; PAM sequence: TTG
tatagatatcacagtcataa

SEQ ID NO: 400494 - DNA, 20 bp, Artificial Sequence
  Description of Artificial Sequence: Synthetic oligonucleotide
  Target: LAMA2; (+) strand; PAM type: YTN; PAM sequence: CTG
gctttatttcagagagtatg

SEQ ID NO: 400495 - DNA, 20 bp, Artificial Sequence
  Description of Artificial Sequence: Synthetic oligonucleotide
  Target: LAMA2; (+) strand; PAM type: YTN; PAM sequence: CTT
tatttcagagagtatgcttt

SEQ ID NO: 400496 - DNA, 20 bp, Artificial Sequence
  Description of Artificial Sequence: Synthetic oligonucleotide
  Target: LAMA2; (+) strand; PAM type: YTN; PAM sequence: TTT
atttcagagagtatgctttt

SEQ ID NO: 400497 - DNA, 20 bp, Artificial Sequence
  Description of Artificial Sequence: Synthetic oligonucleotide
  Target: LAMA2; (+) strand; PAM type: YTN; PAM sequence: TTA
tttcagagagtatgcttttg

SEQ ID NO: 400498 - DNA, 20 bp, Artificial Sequence
  Description of Artificial Sequence: Synthetic oligonucleotide
  Target: LAMA2; (+) strand; PAM type: YTN; PAM sequence: TTT
cagagagtatgcttttggta

SEQ ID NO: 400499 - DNA, 20 bp, Artificial Sequence
  Description of Artificial Sequence: Synthetic oligonucleotide
  Target: LAMA2; (+) strand; PAM type: YTN; PAM sequence: TTC
agagagtatgcttttggtag

SEQ ID NO: 400500 - DNA, 20 bp, Artificial Sequence
  Description of Artificial Sequence: Synthetic oligonucleotide
  Target: LAMA2; (+) strand; PAM type: YTN; PAM sequence: CTT
ttggtagcctatccaaagat

SEQ ID NO: 400501 - DNA, 20 bp, Artificial Sequence
  Description of Artificial Sequence: Synthetic oligonucleotide
  Target: LAMA2; (+) strand; PAM type: YTN; PAM sequence: TTT
tggtagcctatccaaagatt

SEQ ID NO: 400502 - DNA, 20 bp, Artificial Sequence
  Description of Artificial Sequence: Synthetic oligonucleotide
  Target: LAMA2; (+) strand; PAM type: YTN; PAM sequence: TTT
ggtagcctatccaaagattt

SEQ ID NO: 400503 - DNA, 20 bp, Artificial Sequence
  Description of Artificial Sequence: Synthetic oligonucleotide
  Target: LAMA2; (+) strand; PAM type: YTN; PAM sequence: TTG
gtagcctatccaaagatttt

SEQ ID NO: 400504 - DNA, 20 bp, Artificial Sequence
  Description of Artificial Sequence: Synthetic oligonucleotide
  Target: LAMA2; (+) strand; PAM type: YTN; PAM sequence: CTA
tccaaagattttattttagt

SEQ ID NO: 400505 - DNA, 20 bp, Artificial Sequence
  Description of Artificial Sequence: Synthetic oligonucleotide
  Target: LAMA2; (+) strand; PAM type: YTN; PAM sequence: TTT
tattttagtataaacagtaa

SEQ ID NO: 400506 - DNA, 20 bp, Artificial Sequence
  Description of Artificial Sequence: Synthetic oligonucleotide
  Target: LAMA2; (+) strand; PAM type: YTN; PAM sequence: TTT
attttagtataaacagtaaa

SEQ ID NO: 400507 - DNA, 20 bp, Artificial Sequence
  Description of Artificial Sequence: Synthetic oligonucleotide
  Target: LAMA2; (+) strand; PAM type: YTN; PAM sequence: TTA
ttttagtataaacagtaaaa

SEQ ID NO: 400508 - DNA, 20 bp, Artificial Sequence
  Description of Artificial Sequence: Synthetic oligonucleotide
  Target: LAMA2; (+) strand; PAM type: YTN; PAM sequence: TTT
tagtataaacagtaaaaata

SEQ ID NO: 400509 - DNA, 20 bp, Artificial Sequence
  Description of Artificial Sequence: Synthetic oligonucleotide
  Target: LAMA2; (+) strand; PAM type: YTN; PAM sequence: TTT
agtataaacagtaaaaataa

SEQ ID NO: 400510 - DNA, 20 bp, Artificial Sequence
  Description of Artificial Sequence: Synthetic oligonucleotide
  Target: LAMA2; (+) strand; PAM type: YTN; PAM sequence: TTA
gtataaacagtaaaaataac

SEQ ID NO: 400511 - DNA, 20 bp, Artificial Sequence
  Description of Artificial Sequence: Synthetic oligonucleotide
  Target: LAMA2; (+) strand; PAM type: YTN; PAM sequence: TTA
taagaaagatgaattgtgat

SEQ ID NO: 400512 - DNA, 20 bp, Artificial Sequence
  Description of Artificial Sequence: Synthetic oligonucleotide
  Target: LAMA2; (+) strand; PAM type: YTN; PAM sequence: TTG
tgattgacagaggagaaaat

SEQ ID NO: 400513 - DNA, 20 bp, Artificial Sequence
  Description of Artificial Sequence: Synthetic oligonucleotide
  Target: LAMA2; (+) strand; PAM type: YTN; PAM sequence: TTG
acagaggagaaaatccaatt

SEQ ID NO: 400514 - DNA, 20 bp, Artificial Sequence
  Description of Artificial Sequence: Synthetic oligonucleotide
  Target: LAMA2; (+) strand; PAM type: YTN; PAM sequence: TTA
cttggaaagtatattttgtg

SEQ ID NO: 400515 - DNA, 20 bp, Artificial Sequence
  Description of Artificial Sequence: Synthetic oligonucleotide
  Target: LAMA2; (+) strand; PAM type: YTN; PAM sequence: CTT
ggaaagtatattttgtgggc

SEQ ID NO: 400516 - DNA, 20 bp, Artificial Sequence
  Description of Artificial Sequence: Synthetic oligonucleotide
  Target: LAMA2; (+) strand; PAM type: YTN; PAM sequence: TTG
gaaagtatattttgtgggct

SEQ ID NO: 400517 - DNA, 20 bp, Artificial Sequence
  Description of Artificial Sequence: Synthetic oligonucleotide
  Target: LAMA2; (+) strand; PAM type: YTN; PAM sequence: TTT
tgtgggcttagaattgaaaa

SEQ ID NO: 400518 - DNA, 20 bp, Artificial Sequence
  Description of Artificial Sequence: Synthetic oligonucleotide
  Target: LAMA2; (+) strand; PAM type: YTN; PAM sequence: TTT
gtgggcttagaattgaaaat

SEQ ID NO: 400519 - DNA, 20 bp, Artificial Sequence
  Description of Artificial Sequence: Synthetic oligonucleotide
  Target: LAMA2; (+) strand; PAM type: YTN; PAM sequence: TTG
tgggcttagaattgaaaata

SEQ ID NO: 400520 - DNA, 20 bp, Artificial Sequence
  Description of Artificial Sequence: Synthetic oligonucleotide
  Target: LAMA2; (+) strand; PAM type: YTN; PAM sequence: CTT
agaattgaaaataataatat

SEQ ID NO: 400521 - DNA, 20 bp, Artificial Sequence
  Description of Artificial Sequence: Synthetic oligonucleotide
  Target: LAMA2; (+) strand; PAM type: YTN; PAM sequence: TTA
gaattgaaaataataatata

SEQ ID NO: 400522 - DNA, 20 bp, Artificial Sequence
  Description of Artificial Sequence: Synthetic oligonucleotide
  Target: LAMA2; (+) strand; PAM type: YTN; PAM sequence: TTG
aaaataataatatattagtg

SEQ ID NO: 400523 - DNA, 20 bp, Artificial Sequence
  Description of Artificial Sequence: Synthetic oligonucleotide
  Target: LAMA2; (+) strand; PAM type: YTN; PAM sequence: TTA
gtgactgaactagacatatt

SEQ ID NO: 400524 - DNA, 20 bp, Artificial Sequence
  Description of Artificial Sequence: Synthetic oligonucleotide
  Target: LAMA2; (+) strand; PAM type: YTN; PAM sequence: CTG
aactagacatattgatgttt

SEQ ID NO: 400525 - DNA, 20 bp, Artificial Sequence
  Description of Artificial Sequence: Synthetic oligonucleotide
  Target: LAMA2; (+) strand; PAM type: YTN; PAM sequence: CTA
gacatattgatgttttagag

SEQ ID NO: 400526 - DNA, 20 bp, Artificial Sequence
  Description of Artificial Sequence: Synthetic oligonucleotide
  Target: LAMA2; (+) strand; PAM type: YTN; PAM sequence: TTG
atgttttagagccgtgcttt

SEQ ID NO: 400527 - DNA, 20 bp, Artificial Sequence
  Description of Artificial Sequence: Synthetic oligonucleotide
  Target: LAMA2; (+) strand; PAM type: YTN; PAM sequence: TTT
tagagccgtgctttgctgga

SEQ ID NO: 400528 - DNA, 20 bp, Artificial Sequence
  Description of Artificial Sequence: Synthetic oligonucleotide
  Target: LAMA2; (+) strand; PAM type: YTN; PAM sequence: TTT
agagccgtgctttgctggaa

SEQ ID NO: 400529 - DNA, 20 bp, Artificial Sequence
  Description of Artificial Sequence: Synthetic oligonucleotide
  Target: LAMA2; (+) strand; PAM type: YTN; PAM sequence: TTA
gagccgtgctttgctggaat

SEQ ID NO: 400530 - DNA, 20 bp, Artificial Sequence
  Description of Artificial Sequence: Synthetic oligonucleotide
  Target: LAMA2; (+) strand; PAM type: YTN; PAM sequence: CTT
tgctggaatattttatgctt

SEQ ID NO: 400531 - DNA, 20 bp, Artificial Sequence
  Description of Artificial Sequence: Synthetic oligonucleotide
  Target: LAMA2; (+) strand; PAM type: YTN; PAM sequence: TTT
gctggaatattttatgcttt

SEQ ID NO: 400532 - DNA, 20 bp, Artificial Sequence
  Description of Artificial Sequence: Synthetic oligonucleotide
  Target: LAMA2; (+) strand; PAM type: YTN; PAM sequence: TTG
ctggaatattttatgctttg

SEQ ID NO: 400533 - DNA, 20 bp, Artificial Sequence
  Description of Artificial Sequence: Synthetic oligonucleotide
  Target: LAMA2; (+) strand; PAM type: YTN; PAM sequence: CTG
gaatattttatgctttgttt

SEQ ID NO: 400534 - DNA, 20 bp, Artificial Sequence
  Description of Artificial Sequence: Synthetic oligonucleotide
  Target: LAMA2; (+) strand; PAM type: YTN; PAM sequence: TTT
tatgctttgtttttcagtga

SEQ ID NO: 400535 - DNA, 20 bp, Artificial Sequence
  Description of Artificial Sequence: Synthetic oligonucleotide
  Target: LAMA2; (+) strand; PAM type: YTN; PAM sequence: TTT
atgctttgtttttcagtgat

SEQ ID NO: 400536 - DNA, 20 bp, Artificial Sequence
  Description of Artificial Sequence: Synthetic oligonucleotide
  Target: LAMA2; (+) strand; PAM type: YTN; PAM sequence: TTA
tgctttgtttttcagtgatg

SEQ ID NO: 400537 - DNA, 20 bp, Artificial Sequence
  Description of Artificial Sequence: Synthetic oligonucleotide
  Target: LAMA2; (+) strand; PAM type: YTN; PAM sequence: CTT
tgtttttcagtgatgtcagg

SEQ ID NO: 400538 - DNA, 20 bp, Artificial Sequence
  Description of Artificial Sequence: Synthetic oligonucleotide
  Target: LAMA2; (+) strand; PAM type: YTN; PAM sequence: TTT
gtttttcagtgatgtcaggt

SEQ ID NO: 400539 - DNA, 20 bp, Artificial Sequence
  Description of Artificial Sequence: Synthetic oligonucleotide
  Target: LAMA2; (+) strand; PAM type: YTN; PAM sequence: TTG
tttttcagtgatgtcaggtc

SEQ ID NO: 400540 - DNA, 20 bp, Artificial Sequence
  Description of Artificial Sequence: Synthetic oligonucleotide
  Target: LAMA2; (+) strand; PAM type: YTN; PAM sequence: TTT
ttcagtgatgtcaggtcttt

SEQ ID NO: 400541 - DNA, 20 bp, Artificial Sequence
  Description of Artificial Sequence: Synthetic oligonucleotide
  Target: LAMA2; (+) strand; PAM type: YTN; PAM sequence: TTT
tcagtgatgtcaggtctttg

SEQ ID NO: 400542 - DNA, 20 bp, Artificial Sequence
  Description of Artificial Sequence: Synthetic oligonucleotide
  Target: LAMA2; (+) strand; PAM type: YTN; PAM sequence: TTT
cagtgatgtcaggtctttgg

SEQ ID NO: 400543 - DNA, 20 bp, Artificial Sequence
  Description of Artificial Sequence: Synthetic oligonucleotide
  Target: LAMA2; (+) strand; PAM type: YTN; PAM sequence: TTC
agtgatgtcaggtctttggc

SEQ ID NO: 400544 - DNA, 20 bp, Artificial Sequence
  Description of Artificial Sequence: Synthetic oligonucleotide
  Target: LAMA2; (+) strand; PAM type: YTN; PAM sequence: CTT
tggcttggaatttaacaaca

SEQ ID NO: 400545 - DNA, 20 bp, Artificial Sequence
  Description of Artificial Sequence: Synthetic oligonucleotide
  Target: LAMA2; (+) strand; PAM type: YTN; PAM sequence: TTT
ggcttggaatttaacaacag

SEQ ID NO: 400546 - DNA, 20 bp, Artificial Sequence
  Description of Artificial Sequence: Synthetic oligonucleotide
  Target: LAMA2; (+) strand; PAM type: YTN; PAM sequence: TTG
gcttggaatttaacaacaga

SEQ ID NO: 400547 - DNA, 20 bp, Artificial Sequence
  Description of Artificial Sequence: Synthetic oligonucleotide
  Target: LAMA2; (+) strand; PAM type: YTN; PAM sequence: CTT
ggaatttaacaacagacact

SEQ ID NO: 400548 - DNA, 20 bp, Artificial Sequence
  Description of Artificial Sequence: Synthetic oligonucleotide
  Target: LAMA2; (+) strand; PAM type: YTN; PAM sequence: TTG
gaatttaacaacagacactt

SEQ ID NO: 400549 - DNA, 20 bp, Artificial Sequence
  Description of Artificial Sequence: Synthetic oligonucleotide
  Target: LAMA2; (+) strand; PAM type: YTN; PAM sequence: TTT
aacaacagacactttaaaca

SEQ ID NO: 400550 - DNA, 20 bp, Artificial Sequence
  Description of Artificial Sequence: Synthetic oligonucleotide
  Target: LAMA2; (+) strand; PAM type: YTN; PAM sequence: TTA
acaacagacactttaaacaa

SEQ ID NO: 400551 - DNA, 20 bp, Artificial Sequence
  Description of Artificial Sequence: Synthetic oligonucleotide
  Target: LAMA2; (+) strand; PAM type: YTN; PAM sequence: CTT
taaacaatgttatgtgctta

SEQ ID NO: 400552 - DNA, 20 bp, Artificial Sequence
  Description of Artificial Sequence: Synthetic oligonucleotide
  Target: LAMA2; (+) strand; PAM type: YTN; PAM sequence: TTT
aaacaatgttatgtgcttat

SEQ ID NO: 400553 - DNA, 20 bp, Artificial Sequence
  Description of Artificial Sequence: Synthetic oligonucleotide
  Target: LAMA2; (+) strand; PAM type: YTN; PAM sequence: TTA
aacaatgttatgtgcttata

SEQ ID NO: 400554 - DNA, 20 bp, Artificial Sequence
  Description of Artificial Sequence: Synthetic oligonucleotide
  Target: LAMA2; (+) strand; PAM type: YTN; PAM sequence: TTA
tgtgcttatattagtataat

SEQ ID NO: 400555 - DNA, 20 bp, Artificial Sequence
  Description of Artificial Sequence: Synthetic oligonucleotide
  Target: LAMA2; (+) strand; PAM type: YTN; PAM sequence: CTT
atattagtataatctgtagt

SEQ ID NO: 400556 - DNA, 20 bp, Artificial Sequence
  Description of Artificial Sequence: Synthetic oligonucleotide
  Target: LAMA2; (+) strand; PAM type: YTN; PAM sequence: TTA
tattagtataatctgtagta

SEQ ID NO: 400557 - DNA, 20 bp, Artificial Sequence
  Description of Artificial Sequence: Synthetic oligonucleotide
  Target: LAMA2; (+) strand; PAM type: YTN; PAM sequence: TTA
gtataatctgtagtataaca

SEQ ID NO: 400558 - DNA, 20 bp, Artificial Sequence
  Description of Artificial Sequence: Synthetic oligonucleotide
  Target: LAMA2; (+) strand; PAM type: YTN; PAM sequence: CTG
tagtataacagaagtttaag

SEQ ID NO: 400559 - DNA, 20 bp, Artificial Sequence
  Description of Artificial Sequence: Synthetic oligonucleotide
  Target: LAMA2; (+) strand; PAM type: YTN; PAM sequence: TTT
aaggtgtctgcctataaaac

SEQ ID NO: 400560 - DNA, 20 bp, Artificial Sequence
  Description of Artificial Sequence: Synthetic oligonucleotide
  Target: LAMA2; (+) strand; PAM type: YTN; PAM sequence: TTA
aggtgtctgcctataaaacc

SEQ ID NO: 400561 - DNA, 20 bp, Artificial Sequence
  Description of Artificial Sequence: Synthetic oligonucleotide
  Target: LAMA2; (+) strand; PAM type: YTN; PAM sequence: CTG
cctataaaaccctttatatg

SEQ ID NO: 400562 - DNA, 20 bp, Artificial Sequence
  Description of Artificial Sequence: Synthetic oligonucleotide
  Target: LAMA2; (+) strand; PAM type: YTN; PAM sequence: CTA
taaaaccctttatatgaagt

SEQ ID NO: 400563 - DNA, 20 bp, Artificial Sequence
  Description of Artificial Sequence: Synthetic oligonucleotide
  Target: LAMA2; (+) strand; PAM type: YTN; PAM sequence: CTT
tatatgaagtggagtgaatc

SEQ ID NO: 400564 - DNA, 20 bp, Artificial Sequence
  Description of Artificial Sequence: Synthetic oligonucleotide
  Target: LAMA2; (+) strand; PAM type: YTN; PAM sequence: TTT
atatgaagtggagtgaatca

SEQ ID NO: 400565 - DNA, 20 bp, Artificial Sequence
  Description of Artificial Sequence: Synthetic oligonucleotide
  Target: LAMA2; (+) strand; PAM type: YTN; PAM sequence: TTA
tatgaagtggagtgaatcat

SEQ ID NO: 400566 - DNA, 20 bp, Artificial Sequence
  Description of Artificial Sequence: Synthetic oligonucleotide
  Target: LAMA2; (+) strand; PAM type: YTN; PAM sequence: TTA
attaatatgtcccgtactct

SEQ ID NO: 400567 - DNA, 20 bp, Artificial Sequence
  Description of Artificial Sequence: Synthetic oligonucleotide
  Target: LAMA2; (+) strand; PAM type: YTN; PAM sequence: TTA
atatgtcccgtactcttctt

SEQ ID NO: 400568 - DNA, 20 bp, Artificial Sequence
  Description of Artificial Sequence: Synthetic oligonucleotide
  Target: LAMA2; (+) strand; PAM type: YTN; PAM sequence: CTC
ttcttcacatccagacaccg

SEQ ID NO: 400569 - DNA, 20 bp, Artificial Sequence
  Description of Artificial Sequence: Synthetic oligonucleotide
  Target: LAMA2; (+) strand; PAM type: YTN; PAM sequence: CTT
cttcacatccagacaccgat

SEQ ID NO: 400570 - DNA, 20 bp, Artificial Sequence
  Description of Artificial Sequence: Synthetic oligonucleotide
  Target: LAMA2; (+) strand; PAM type: YTN; PAM sequence: TTC
ttcacatccagacaccgata

SEQ ID NO: 400571 - DNA, 20 bp, Artificial Sequence
  Description of Artificial Sequence: Synthetic oligonucleotide
  Target: LAMA2; (+) strand; PAM type: YTN; PAM sequence: CTT
cacatccagacaccgatagt

SEQ ID NO: 400572 - DNA, 20 bp, Artificial Sequence
  Description of Artificial Sequence: Synthetic oligonucleotide
  Target: LAMA2; (+) strand; PAM type: YTN; PAM sequence: TTC
acatccagacaccgatagtt

SEQ ID NO: 400573 - DNA, 20 bp, Artificial Sequence
  Description of Artificial Sequence: Synthetic oligonucleotide
  Target: LAMA2; (+) strand; PAM type: YTN; PAM sequence: TTC
agaatcctccatctatccac

SEQ ID NO: 400574 - DNA, 20 bp, Artificial Sequence
  Description of Artificial Sequence: Synthetic oligonucleotide
  Target: LAMA2; (+) strand; PAM type: YTN; PAM sequence: CTC
catctatccacctttccctt

SEQ ID NO: 400575 - DNA, 20 bp, Artificial Sequence
  Description of Artificial Sequence: Synthetic oligonucleotide
  Target: LAMA2; (+) strand; PAM type: YTN; PAM sequence: CTA
tccacctttccctttgctat

SEQ ID NO: 400576 - DNA, 20 bp, Artificial Sequence
  Description of Artificial Sequence: Synthetic oligonucleotide
  Target: LAMA2; (+) strand; PAM type: YTN; PAM sequence: CTT
tccctttgctattcttcaca

SEQ ID NO: 400577 - DNA, 20 bp, Artificial Sequence
  Description of Artificial Sequence: Synthetic oligonucleotide
  Target: LAMA2; (+) strand; PAM type: YTN; PAM sequence: TTT
ccctttgctattcttcacag

SEQ ID NO: 400578 - DNA, 20 bp, Artificial Sequence
  Description of Artificial Sequence: Synthetic oligonucleotide
  Target: LAMA2; (+) strand; PAM type: YTN; PAM sequence: TTC
cctttgctattcttcacaga

SEQ ID NO: 400579 - DNA, 20 bp, Artificial Sequence
  Description of Artificial Sequence: Synthetic oligonucleotide
  Target: LAMA2; (+) strand; PAM type: YTN; PAM sequence: CTT
tgctattcttcacagatgca

SEQ ID NO: 400580 - DNA, 20 bp, Artificial Sequence
  Description of Artificial Sequence: Synthetic oligonucleotide
  Target: LAMA2; (+) strand; PAM type: YTN; PAM sequence: TTT
gctattcttcacagatgcag

SEQ ID NO: 400581 - DNA, 20 bp, Artificial Sequence
  Description of Artificial Sequence: Synthetic oligonucleotide
  Target: LAMA2; (+) strand; PAM type: YTN; PAM sequence: TTG
ctattcttcacagatgcagg

SEQ ID NO: 400582 - DNA, 20 bp, Artificial Sequence
  Description of Artificial Sequence: Synthetic oligonucleotide
  Target: LAMA2; (+) strand; PAM type: YTN; PAM sequence: CTA
ttcttcacagatgcaggcca

SEQ ID NO: 400583 - DNA, 20 bp, Artificial Sequence
  Description of Artificial Sequence: Synthetic oligonucleotide
  Target: LAMA2; (+) strand; PAM type: YTN; PAM sequence: TTC
ttcacagatgcaggccaaca

SEQ ID NO: 400584 - DNA, 20 bp, Artificial Sequence
  Description of Artificial Sequence: Synthetic oligonucleotide
  Target: LAMA2; (+) strand; PAM type: YTN; PAM sequence: CTT
cacagatgcaggccaacaaa

SEQ ID NO: 400585 - DNA, 20 bp, Artificial Sequence
  Description of Artificial Sequence: Synthetic oligonucleotide
  Target: LAMA2; (+) strand; PAM type: YTN; PAM sequence: TTC
acagatgcaggccaacaaag

SEQ ID NO: 400586 - DNA, 20 bp, Artificial Sequence
  Description of Artificial Sequence: Synthetic oligonucleotide
  Target: LAMA2; (+) strand; PAM type: YTN; PAM sequence: TTC
tccagctgcccatggcctgc

SEQ ID NO: 400587 - DNA, 20 bp, Artificial Sequence
  Description of Artificial Sequence: Synthetic oligonucleotide
  Target: LAMA2; (+) strand; PAM type: YTN; PAM sequence: CTC
cagctgcccatggcctgcac

SEQ ID NO: 400588 - DNA, 20 bp, Artificial Sequence
  Description of Artificial Sequence: Synthetic oligonucleotide
  Target: LAMA2; (+) strand; PAM type: YTN; PAM sequence: CTG
cccatggcctgcacagttcc

SEQ ID NO: 400589 - DNA, 20 bp, Artificial Sequence
  Description of Artificial Sequence: Synthetic oligonucleotide
  Target: LAMA2; (+) strand; PAM type: YTN; PAM sequence: CTG
cacagttcctctaatgagcc

SEQ ID NO: 400590 - DNA, 20 bp, Artificial Sequence
  Description of Artificial Sequence: Synthetic oligonucleotide
  Target: LAMA2; (+) strand; PAM type: YTN; PAM sequence: TTC
ctctaatgagccacatgcac

SEQ ID NO: 400591 - DNA, 20 bp, Artificial Sequence
  Description of Artificial Sequence: Synthetic oligonucleotide
  Target: LAMA2; (+) strand; PAM type: YTN; PAM sequence: CTC
taatgagccacatgcacaac

SEQ ID NO: 400592 - DNA, 20 bp, Artificial Sequence
  Description of Artificial Sequence: Synthetic oligonucleotide
  Target: LAMA2; (+) strand; PAM type: YTN; PAM sequence: CTA
atgagccacatgcacaacct

SEQ ID NO: 400593 - DNA, 20 bp, Artificial Sequence
  Description of Artificial Sequence: Synthetic oligonucleotide
  Target: LAMA2; (+) strand; PAM type: YTN; PAM sequence: CTC
tgagaggggtgtgcacacag

SEQ ID NO: 400594 - DNA, 20 bp, Artificial Sequence
  Description of Artificial Sequence: Synthetic oligonucleotide
  Target: LAMA2; (+) strand; PAM type: YTN; PAM sequence: CTG
agaggggtgtgcacacagtc

SEQ ID NO: 400595 - DNA, 20 bp, Artificial Sequence
  Description of Artificial Sequence: Synthetic oligonucleotide
  Target: LAMA2; (+) strand; PAM type: YTN; PAM sequence: CTG
ctgtagctctattctttggg

SEQ ID NO: 400596 - DNA, 20 bp, Artificial Sequence
  Description of Artificial Sequence: Synthetic oligonucleotide
  Target: LAMA2; (+) strand; PAM type: YTN; PAM sequence: CTG
tagctctattctttggggcg

SEQ ID NO: 400597 - DNA, 20 bp, Artificial Sequence
  Description of Artificial Sequence: Synthetic oligonucleotide
  Target: LAMA2; (+) strand; PAM type: YTN; PAM sequence: CTC
tattctttggggcgtattct

SEQ ID NO: 400598 - DNA, 20 bp, Artificial Sequence
  Description of Artificial Sequence: Synthetic oligonucleotide
  Target: LAMA2; (+) strand; PAM type: YTN; PAM sequence: CTA
ttctttggggcgtattctct

SEQ ID NO: 400599 - DNA, 20 bp, Artificial Sequence
  Description of Artificial Sequence: Synthetic oligonucleotide
  Target: LAMA2; (+) strand; PAM type: YTN; PAM sequence: TTC
tttggggcgtattctctccc

SEQ ID NO: 400600 - DNA, 20 bp, Artificial Sequence
  Description of Artificial Sequence: Synthetic oligonucleotide
  Target: LAMA2; (+) strand; PAM type: YTN; PAM sequence: CTT
tggggcgtattctctcccac

SEQ ID NO: 400601 - DNA, 20 bp, Artificial Sequence
  Description of Artificial Sequence: Synthetic oligonucleotide
  Target: LAMA2; (+) strand; PAM type: YTN; PAM sequence: TTT
ggggcgtattctctcccacc

SEQ ID NO: 400602 - DNA, 20 bp, Artificial Sequence
  Description of Artificial Sequence: Synthetic oligonucleotide
  Target: LAMA2; (+) strand; PAM type: YTN; PAM sequence: TTG
gggcgtattctctcccacct

SEQ ID NO: 400603 - DNA, 20 bp, Artificial Sequence
  Description of Artificial Sequence: Synthetic oligonucleotide
  Target: LAMA2; (+) strand; PAM type: YTN; PAM sequence: TTC
tctcccacctgccttctctg

SEQ ID NO: 400604 - DNA, 20 bp, Artificial Sequence
  Description of Artificial Sequence: Synthetic oligonucleotide
  Target: LAMA2; (+) strand; PAM type: YTN; PAM sequence: CTC
tcccacctgccttctctggg

SEQ ID NO: 400605 - DNA, 20 bp, Artificial Sequence
  Description of Artificial Sequence: Synthetic oligonucleotide
  Target: LAMA2; (+) strand; PAM type: YTN; PAM sequence: CTC
ccacctgccttctctgggta

SEQ ID NO: 400606 - DNA, 20 bp, Artificial Sequence
  Description of Artificial Sequence: Synthetic oligonucleotide
  Target: LAMA2; (+) strand; PAM type: YTN; PAM sequence: CTG
ccttctctgggtaccaggaa

SEQ ID NO: 400607 - DNA, 20 bp, Artificial Sequence
  Description of Artificial Sequence: Synthetic oligonucleotide
  Target: LAMA2; (+) strand; PAM type: YTN; PAM sequence: CTT
ctctgggtaccaggaaagtg

SEQ ID NO: 400608 - DNA, 20 bp, Artificial Sequence
  Description of Artificial Sequence: Synthetic oligonucleotide
  Target: LAMA2; (+) strand; PAM type: YTN; PAM sequence: TTC
tctgggtaccaggaaagtga

SEQ ID NO: 400609 - DNA, 20 bp, Artificial Sequence
  Description of Artificial Sequence: Synthetic oligonucleotide
  Target: LAMA2; (+) strand; PAM type: YTN; PAM sequence: CTC
tgggtaccaggaaagtgatg

SEQ ID NO: 400610 - DNA, 20 bp, Artificial Sequence
  Description of Artificial Sequence: Synthetic oligonucleotide
  Target: LAMA2; (+) strand; PAM type: YTN; PAM sequence: CTG
ggtaccaggaaagtgatgaa

SEQ ID NO: 400611 - DNA, 20 bp, Artificial Sequence
  Description of Artificial Sequence: Synthetic oligonucleotide
  Target: LAMA2; (+) strand; PAM type: YTN; PAM sequence: CTT
ggtgttgacaaataacatga

SEQ ID NO: 400612 - DNA, 20 bp, Artificial Sequence
  Description of Artificial Sequence: Synthetic oligonucleotide
  Target: LAMA2; (+) strand; PAM type: YTN; PAM sequence: TTG
gtgttgacaaataacatgaa

SEQ ID NO: 400613 - DNA, 20 bp, Artificial Sequence
  Description of Artificial Sequence: Synthetic oligonucleotide
  Target: LAMA2; (+) strand; PAM type: YTN; PAM sequence: TTG
acaaataacatgaagatagc

SEQ ID NO: 400614 - DNA, 20 bp, Artificial Sequence
  Description of Artificial Sequence: Synthetic oligonucleotide
  Target: LAMA2; (+) strand; PAM type: YTN; PAM sequence: TTC
ttccccagttaggtggttta

SEQ ID NO: 400615 - DNA, 20 bp, Artificial Sequence
  Description of Artificial Sequence: Synthetic oligonucleotide
  Target: LAMA2; (+) strand; PAM type: YTN; PAM sequence: CTT
ccccagttaggtggtttaag

SEQ ID NO: 400616 - DNA, 20 bp, Artificial Sequence
  Description of Artificial Sequence: Synthetic oligonucleotide
  Target: LAMA2; (+) strand; PAM type: YTN; PAM sequence: TTC
cccagttaggtggtttaagt

SEQ ID NO: 400617 - DNA, 20 bp, Artificial Sequence
  Description of Artificial Sequence: Synthetic oligonucleotide
  Target: LAMA2; (+) strand; PAM type: YTN; PAM sequence: TTA
ggtggtttaagttttttaaa

SEQ ID NO: 400618 - DNA, 20 bp, Artificial Sequence
  Description of Artificial Sequence: Synthetic oligonucleotide
  Target: LAMA2; (+) strand; PAM type: YTN; PAM sequence: TTT
aagttttttaaaacattgaa

SEQ ID NO: 400619 - DNA, 20 bp, Artificial Sequence
  Description of Artificial Sequence: Synthetic oligonucleotide
  Target: LAMA2; (+) strand; PAM type: YTN; PAM sequence: TTA
agttttttaaaacattgaaa

SEQ ID NO: 400620 - DNA, 20 bp, Artificial Sequence
  Description of Artificial Sequence: Synthetic oligonucleotide
  Target: LAMA2; (+) strand; PAM type: YTN; PAM sequence: TTT
tttaaaacattgaaaaacag

SEQ ID NO: 400621 - DNA, 20 bp, Artificial Sequence
  Description of Artificial Sequence: Synthetic oligonucleotide
  Target: LAMA2; (+) strand; PAM type: YTN; PAM sequence: TTT
ttaaaacattgaaaaacaga

SEQ ID NO: 400622 - DNA, 20 bp, Artificial Sequence
  Description of Artificial Sequence: Synthetic oligonucleotide
  Target: LAMA2; (+) strand; PAM type: YTN; PAM sequence: TTT
taaaacattgaaaaacagaa

SEQ ID NO: 400623 - DNA, 20 bp, Artificial Sequence
  Description of Artificial Sequence: Synthetic oligonucleotide
  Target: LAMA2; (+) strand; PAM type: YTN; PAM sequence: TTT
aaaacattgaaaaacagaaa

SEQ ID NO: 400624 - DNA, 20 bp, Artificial Sequence
  Description of Artificial Sequence: Synthetic oligonucleotide
  Target: LAMA2; (+) strand; PAM type: YTN; PAM sequence: TTA
aaacattgaaaaacagaaat

SEQ ID NO: 400625 - DNA, 20 bp, Artificial Sequence
  Description of Artificial Sequence: Synthetic oligonucleotide
  Target: LAMA2; (+) strand; PAM type: YTN; PAM sequence: TTG
aaaaacagaaatatatgcac

SEQ ID NO: 400626 - DNA, 20 bp, Artificial Sequence
  Description of Artificial Sequence: Synthetic oligonucleotide
  Target: LAMA2; (+) strand; PAM type: YTN; PAM sequence: TTT
agccagcacaaccgggtata

SEQ ID NO: 400627 - DNA, 20 bp, Artificial Sequence
  Description of Artificial Sequence: Synthetic oligonucleotide
  Target: LAMA2; (+) strand; PAM type: YTN; PAM sequence: TTA
gccagcacaaccgggtataa

SEQ ID NO: 400628 - DNA, 20 bp, Artificial Sequence
  Description of Artificial Sequence: Synthetic oligonucleotide
  Target: LAMA2; (+) strand; PAM type: YTN; PAM sequence: TTT
tagtacattgtccctcacgg

SEQ ID NO: 400629 - DNA, 20 bp, Artificial Sequence
  Description of Artificial Sequence: Synthetic oligonucleotide
  Target: LAMA2; (+) strand; PAM type: YTN; PAM sequence: TTT
agtacattgtccctcacggc

SEQ ID NO: 400630 - DNA, 20 bp, Artificial Sequence
  Description of Artificial Sequence: Synthetic oligonucleotide
  Target: LAMA2; (+) strand; PAM type: YTN; PAM sequence: TTA
gtacattgtccctcacggca

SEQ ID NO: 400631 - DNA, 20 bp, Artificial Sequence
  Description of Artificial Sequence: Synthetic oligonucleotide
  Target: LAMA2; (+) strand; PAM type: YTN; PAM sequence: TTG
tccctcacggcactattaac

SEQ ID NO: 400632 - DNA, 20 bp, Artificial Sequence
  Description of Artificial Sequence: Synthetic oligonucleotide
  Target: LAMA2; (+) strand; PAM type: YTN; PAM sequence: CTC
acggcactattaactgcctc

SEQ ID NO: 400633 - DNA, 20 bp, Artificial Sequence
  Description of Artificial Sequence: Synthetic oligonucleotide
  Target: LAMA2; (+) strand; PAM type: YTN; PAM sequence: CTA
ttaactgcctcattcattcc

SEQ ID NO: 400634 - DNA, 20 bp, Artificial Sequence
  Description of Artificial Sequence: Synthetic oligonucleotide
  Target: LAMA2; (+) strand; PAM type: YTN; PAM sequence: TTA
actgcctcattcattcccag

SEQ ID NO: 400635 - DNA, 20 bp, Artificial Sequence
  Description of Artificial Sequence: Synthetic oligonucleotide
  Target: LAMA2; (+) strand; PAM type: YTN; PAM sequence: CTG
cctcattcattcccagtttc

SEQ ID NO: 400636 - DNA, 20 bp, Artificial Sequence
  Description of Artificial Sequence: Synthetic oligonucleotide
  Target: LAMA2; (+) strand; PAM type: YTN; PAM sequence: CTC
attcattcccagtttctacc

SEQ ID NO: 400637 - DNA, 20 bp, Artificial Sequence
  Description of Artificial Sequence: Synthetic oligonucleotide
  Target: LAMA2; (+) strand; PAM type: YTN; PAM sequence: TTC
attcccagtttctacccact

SEQ ID NO: 400638 - DNA, 20 bp, Artificial Sequence
  Description of Artificial Sequence: Synthetic oligonucleotide
  Target: LAMA2; (+) strand; PAM type: YTN; PAM sequence: TTC
ccagtttctacccactatta

SEQ ID NO: 400639 - DNA, 20 bp, Artificial Sequence
  Description of Artificial Sequence: Synthetic oligonucleotide
  Target: LAMA2; (+) strand; PAM type: YTN; PAM sequence: TTT
ctacccactattaattactg

SEQ ID NO: 400640 - DNA, 20 bp, Artificial Sequence
  Description of Artificial Sequence: Synthetic oligonucleotide
  Target: LAMA2; (+) strand; PAM type: YTN; PAM sequence: TTC
tacccactattaattactgt

SEQ ID NO: 400641 - DNA, 20 bp, Artificial Sequence
  Description of Artificial Sequence: Synthetic oligonucleotide
  Target: LAMA2; (+) strand; PAM type: YTN; PAM sequence: CTA
cccactattaattactgtaa

SEQ ID NO: 400642 - DNA, 20 bp, Artificial Sequence
  Description of Artificial Sequence: Synthetic oligonucleotide
  Target: LAMA2; (+) strand; PAM type: YTN; PAM sequence: CTA
ttaattactgtaaaggtttt

SEQ ID NO: 400643 - DNA, 20 bp, Artificial Sequence
  Description of Artificial Sequence: Synthetic oligonucleotide
  Target: LAMA2; (+) strand; PAM type: YTN; PAM sequence: TTA
attactgtaaaggtttttgg

SEQ ID NO: 400644 - DNA, 20 bp, Artificial Sequence
  Description of Artificial Sequence: Synthetic oligonucleotide
  Target: LAMA2; (+) strand; PAM type: YTN; PAM sequence: TTA
ctgtaaaggtttttggcatg

SEQ ID NO: 400645 - DNA, 20 bp, Artificial Sequence
  Description of Artificial Sequence: Synthetic oligonucleotide
  Target: LAMA2; (+) strand; PAM type: YTN; PAM sequence: CTG
taaaggtttttggcatgttc

SEQ ID NO: 400646 - DNA, 20 bp, Artificial Sequence
  Description of Artificial Sequence: Synthetic oligonucleotide
  Target: LAMA2; (+) strand; PAM type: YTN; PAM sequence: TTT
ttggcatgttcttctctacc

SEQ ID NO: 400647 - DNA, 20 bp, Artificial Sequence
  Description of Artificial Sequence: Synthetic oligonucleotide
  Target: LAMA2; (+) strand; PAM type: YTN; PAM sequence: TTT
tggcatgttcttctctaccc

SEQ ID NO: 400648 - DNA, 20 bp, Artificial Sequence
  Description of Artificial Sequence: Synthetic oligonucleotide
  Target: LAMA2; (+) strand; PAM type: YTN; PAM sequence: TTT
ggcatgttcttctctaccca

SEQ ID NO: 400649 - DNA, 20 bp, Artificial Sequence
  Description of Artificial Sequence: Synthetic oligonucleotide
  Target: LAMA2; (+) strand; PAM type: YTN; PAM sequence: TTG
gcatgttcttctctacccag

SEQ ID NO: 400650 - DNA, 20 bp, Artificial Sequence
  Description of Artificial Sequence: Synthetic oligonucleotide
  Target: LAMA2; (+) strand; PAM type: YTN; PAM sequence: TTC
ttctctacccagctcccacc

SEQ ID NO: 400651 - DNA, 20 bp, Artificial Sequence
  Description of Artificial Sequence: Synthetic oligonucleotide
  Target: LAMA2; (+) strand; PAM type: YTN; PAM sequence: CTT
ctctacccagctcccaccag

SEQ ID NO: 400652 - DNA, 20 bp, Artificial Sequence
  Description of Artificial Sequence: Synthetic oligonucleotide
  Target: LAMA2; (+) strand; PAM type: YTN; PAM sequence: TTC
tctacccagctcccaccagc

SEQ ID NO: 400653 - DNA, 20 bp, Artificial Sequence
  Description of Artificial Sequence: Synthetic oligonucleotide
  Target: LAMA2; (+) strand; PAM type: YTN; PAM sequence: CTC
tacccagctcccaccagccc

SEQ ID NO: 400654 - DNA, 20 bp, Artificial Sequence
  Description of Artificial Sequence: Synthetic oligonucleotide
  Target: LAMA2; (+) strand; PAM type: YTN; PAM sequence: CTA
cccagctcccaccagcccct

SEQ ID NO: 400655 - DNA, 20 bp, Artificial Sequence
  Description of Artificial Sequence: Synthetic oligonucleotide
  Target: LAMA2; (+) strand; PAM type: YTN; PAM sequence: CTC
ccaccagcccctaccatgcc

SEQ ID NO: 400656 - DNA, 20 bp, Artificial Sequence
  Description of Artificial Sequence: Synthetic oligonucleotide
  Target: LAMA2; (+) strand; PAM type: YTN; PAM sequence: CTA
ccatgccaaatgcttgtata

SEQ ID NO: 400657 - DNA, 20 bp, Artificial Sequence
  Description of Artificial Sequence: Synthetic oligonucleotide
  Target: LAMA2; (+) strand; PAM type: YTN; PAM sequence: CTT
gtatatgtgtcagcatatat

SEQ ID NO: 400658 - DNA, 20 bp, Artificial Sequence
  Description of Artificial Sequence: Synthetic oligonucleotide
  Target: LAMA2; (+) strand; PAM type: YTN; PAM sequence: TTG
tatatgtgtcagcatatata

SEQ ID NO: 400659 - DNA, 20 bp, Artificial Sequence
  Description of Artificial Sequence: Synthetic oligonucleotide
  Target: LAMA2; (+) strand; PAM type: YTN; PAM sequence: CTT
gcttattttcatggaaaggt

SEQ ID NO: 400660 - DNA, 20 bp, Artificial Sequence
  Description of Artificial Sequence: Synthetic oligonucleotide
  Target: LAMA2; (+) strand; PAM type: YTN; PAM sequence: TTG
cttattttcatggaaaggtc

SEQ ID NO: 400661 - DNA, 20 bp, Artificial Sequence
  Description of Artificial Sequence: Synthetic oligonucleotide
  Target: LAMA2; (+) strand; PAM type: YTN; PAM sequence: CTT
attttcatggaaaggtctta

SEQ ID NO: 400662 - DNA, 20 bp, Artificial Sequence
  Description of Artificial Sequence: Synthetic oligonucleotide
  Target: LAMA2; (+) strand; PAM type: YTN; PAM sequence: TTA
ttttcatggaaaggtcttaa

SEQ ID NO: 400663 - DNA, 20 bp, Artificial Sequence
  Description of Artificial Sequence: Synthetic oligonucleotide
  Target: LAMA2; (+) strand; PAM type: YTN; PAM sequence: TTT
tcatggaaaggtcttaaggt

SEQ ID NO: 400664 - DNA, 20 bp, Artificial Sequence
  Description of Artificial Sequence: Synthetic oligonucleotide
  Target: LAMA2; (+) strand; PAM type: YTN; PAM sequence: TTT
catggaaaggtcttaaggtt

SEQ ID NO: 400665 - DNA, 20 bp, Artificial Sequence
  Description of Artificial Sequence: Synthetic oligonucleotide
  Target: LAMA2; (+) strand; PAM type: YTN; PAM sequence: TTC
atggaaaggtcttaaggttt

SEQ ID NO: 400666 - DNA, 20 bp, Artificial Sequence
  Description of Artificial Sequence: Synthetic oligonucleotide
  Target: LAMA2; (+) strand; PAM type: YTN; PAM sequence: CTT
aaggtttatttcacatccat

SEQ ID NO: 400667 - DNA, 20 bp, Artificial Sequence
  Description of Artificial Sequence: Synthetic oligonucleotide
  Target: LAMA2; (+) strand; PAM type: YTN; PAM sequence: TTA
aggtttatttcacatccata

SEQ ID NO: 400668 - DNA, 20 bp, Artificial Sequence
  Description of Artificial Sequence: Synthetic oligonucleotide
  Target: LAMA2; (+) strand; PAM type: YTN; PAM sequence: TTT
atttcacatccatatccgct

SEQ ID NO: 400669 - DNA, 20 bp, Artificial Sequence
  Description of Artificial Sequence: Synthetic oligonucleotide
  Target: LAMA2; (+) strand; PAM type: YTN; PAM sequence: TTA
tttcacatccatatccgctc

SEQ ID NO: 400670 - DNA, 20 bp, Artificial Sequence
  Description of Artificial Sequence: Synthetic oligonucleotide
  Target: LAMA2; (+) strand; PAM type: YTN; PAM sequence: TTT
cacatccatatccgctcatc

SEQ ID NO: 400671 - DNA, 20 bp, Artificial Sequence
  Description of Artificial Sequence: Synthetic oligonucleotide
  Target: LAMA2; (+) strand; PAM type: YTN; PAM sequence: TTC
acatccatatccgctcatct

SEQ ID NO: 400672 - DNA, 20 bp, Artificial Sequence
  Description of Artificial Sequence: Synthetic oligonucleotide
  Target: LAMA2; (+) strand; PAM type: YTN; PAM sequence: CTC
atctacttctttttatagat

SEQ ID NO: 400673 - DNA, 20 bp, Artificial Sequence
  Description of Artificial Sequence: Synthetic oligonucleotide
  Target: LAMA2; (+) strand; PAM type: YTN; PAM sequence: CTA
cttctttttatagattgcac

SEQ ID NO: 400674 - DNA, 20 bp, Artificial Sequence
  Description of Artificial Sequence: Synthetic oligonucleotide
  Target: LAMA2; (+) strand; PAM type: YTN; PAM sequence: CTT
ctttttatagattgcacctg

SEQ ID NO: 400675 - DNA, 20 bp, Artificial Sequence
  Description of Artificial Sequence: Synthetic oligonucleotide
  Target: LAMA2; (+) strand; PAM type: YTN; PAM sequence: TTC
tttttatagattgcacctgt

SEQ ID NO: 400676 - DNA, 20 bp, Artificial Sequence
  Description of Artificial Sequence: Synthetic oligonucleotide
  Target: LAMA2; (+) strand; PAM type: YTN; PAM sequence: CTT
tttatagattgcacctgtac

SEQ ID NO: 400677 - DNA, 20 bp, Artificial Sequence
  Description of Artificial Sequence: Synthetic oligonucleotide
  Target: LAMA2; (+) strand; PAM type: YTN; PAM sequence: TTT
ttatagattgcacctgtacc

SEQ ID NO: 400678 - DNA, 20 bp, Artificial Sequence
  Description of Artificial Sequence: Synthetic oligonucleotide
  Target: LAMA2; (+) strand; PAM type: YTN; PAM sequence: TTT
tatagattgcacctgtacca

SEQ ID NO: 400679 - DNA, 20 bp, Artificial Sequence
  Description of Artificial Sequence: Synthetic oligonucleotide
  Target: LAMA2; (+) strand; PAM type: YTN; PAM sequence: TTT
atagattgcacctgtaccat

SEQ ID NO: 400680 - DNA, 20 bp, Artificial Sequence
  Description of Artificial Sequence: Synthetic oligonucleotide
  Target: LAMA2; (+) strand; PAM type: YTN; PAM sequence: TTA
tagattgcacctgtaccatt

SEQ ID NO: 400681 - DNA, 20 bp, Artificial Sequence
  Description of Artificial Sequence: Synthetic oligonucleotide
  Target: LAMA2; (+) strand; PAM type: YTN; PAM sequence: TTG
cacctgtaccattgtatgaa

SEQ ID NO: 400682 - DNA, 20 bp, Artificial Sequence
  Description of Artificial Sequence: Synthetic oligonucleotide
  Target: LAMA2; (+) strand; PAM type: YTN; PAM sequence: CTG
taccattgtatgaacatgct

SEQ ID NO: 400683 - DNA, 20 bp, Artificial Sequence
  Description of Artificial Sequence: Synthetic oligonucleotide
  Target: LAMA2; (+) strand; PAM type: YTN; PAM sequence: TTG
tatgaacatgctgtgtggat

SEQ ID NO: 400684 - DNA, 20 bp, Artificial Sequence
  Description of Artificial Sequence: Synthetic oligonucleotide
  Target: LAMA2; (+) strand; PAM type: YTN; PAM sequence: CTG
tgtggatataaacagcactt

SEQ ID NO: 400685 - DNA, 20 bp, Artificial Sequence
  Description of Artificial Sequence: Synthetic oligonucleotide
  Target: LAMA2; (+) strand; PAM type: YTN; PAM sequence: CTT
taatcttattagggtatttt

SEQ ID NO: 400686 - DNA, 20 bp, Artificial Sequence
  Description of Artificial Sequence: Synthetic oligonucleotide
  Target: LAMA2; (+) strand; PAM type: YTN; PAM sequence: TTT
aatcttattagggtattttt

SEQ ID NO: 400687 - DNA, 20 bp, Artificial Sequence
  Description of Artificial Sequence: Synthetic oligonucleotide
  Target: LAMA2; (+) strand; PAM type: YTN; PAM sequence: TTA
atcttattagggtattttta

SEQ ID NO: 400688 - DNA, 20 bp, Artificial Sequence
  Description of Artificial Sequence: Synthetic oligonucleotide
  Target: LAMA2; (+) strand; PAM type: YTN; PAM sequence: CTT
attagggtatttttattccc

SEQ ID NO: 400689 - DNA, 20 bp, Artificial Sequence
  Description of Artificial Sequence: Synthetic oligonucleotide
  Target: LAMA2; (+) strand; PAM type: YTN; PAM sequence: TTA
ttagggtatttttattcccc

SEQ ID NO: 400690 - DNA, 20 bp, Artificial Sequence
  Description of Artificial Sequence: Synthetic oligonucleotide
  Target: LAMA2; (+) strand; PAM type: YTN; PAM sequence: TTA
gggtatttttattcccccct

SEQ ID NO: 400691 - DNA, 20 bp, Artificial Sequence
  Description of Artificial Sequence: Synthetic oligonucleotide
  Target: LAMA2; (+) strand; PAM type: YTN; PAM sequence: TTT
ttattcccccctcctttttt

SEQ ID NO: 400692 - DNA, 20 bp, Artificial Sequence
  Description of Artificial Sequence: Synthetic oligonucleotide
  Target: LAMA2; (+) strand; PAM type: YTN; PAM sequence: TTT
tattcccccctccttttttt

SEQ ID NO: 400693 - DNA, 20 bp, Artificial Sequence
  Description of Artificial Sequence: Synthetic oligonucleotide
  Target: LAMA2; (+) strand; PAM type: YTN; PAM sequence: TTT
attcccccctcctttttttt

SEQ ID NO: 400694 - DNA, 20 bp, Artificial Sequence
  Description of Artificial Sequence: Synthetic oligonucleotide
  Target: LAMA2; (+) strand; PAM type: YTN; PAM sequence: TTA
ttcccccctcctttttttta

SEQ ID NO: 400695 - DNA, 20 bp, Artificial Sequence
  Description of Artificial Sequence: Synthetic oligonucleotide
  Target: LAMA2; (+) strand; PAM type: YTN; PAM sequence: TTC
ccccctccttttttttatta

SEQ ID NO: 400696 - DNA, 20 bp, Artificial Sequence
  Description of Artificial Sequence: Synthetic oligonucleotide
  Target: LAMA2; (+) strand; PAM type: YTN; PAM sequence: CTC
cttttttttattacaaatga

SEQ ID NO: 400697 - DNA, 20 bp, Artificial Sequence
  Description of Artificial Sequence: Synthetic oligonucleotide
  Target: LAMA2; (+) strand; PAM type: YTN; PAM sequence: CTT
ttttttattacaaatgaaga

SEQ ID NO: 400698 - DNA, 20 bp, Artificial Sequence
  Description of Artificial Sequence: Synthetic oligonucleotide
  Target: LAMA2; (+) strand; PAM type: YTN; PAM sequence: TTT
tttttattacaaatgaagag

SEQ ID NO: 400699 - DNA, 20 bp, Artificial Sequence
  Description of Artificial Sequence: Synthetic oligonucleotide
  Target: LAMA2; (+) strand; PAM type: YTN; PAM sequence: TTT
ttttattacaaatgaagagc

SEQ ID NO: 400700 - DNA, 20 bp, Artificial Sequence
  Description of Artificial Sequence: Synthetic oligonucleotide
  Target: LAMA2; (+) strand; PAM type: YTN; PAM sequence: TTT
tttattacaaatgaagagct

SEQ ID NO: 400701 - DNA, 20 bp, Artificial Sequence
  Description of Artificial Sequence: Synthetic oligonucleotide
  Target: LAMA2; (+) strand; PAM type: YTN; PAM sequence: TTT
ttattacaaatgaagagcta

SEQ ID NO: 400702 - DNA, 20 bp, Artificial Sequence
  Description of Artificial Sequence: Synthetic oligonucleotide
  Target: LAMA2; (+) strand; PAM type: YTN; PAM sequence: TTT
tattacaaatgaagagctaa

SEQ ID NO: 400703 - DNA, 20 bp, Artificial Sequence
  Description of Artificial Sequence: Synthetic oligonucleotide
  Target: LAMA2; (+) strand; PAM type: YTN; PAM sequence: TTT
attacaaatgaagagctaat

SEQ ID NO: 400704 - DNA, 20 bp, Artificial Sequence
  Description of Artificial Sequence: Synthetic oligonucleotide
  Target: LAMA2; (+) strand; PAM type: YTN; PAM sequence: TTA
ttacaaatgaagagctaatg

SEQ ID NO: 400705 - DNA, 20 bp, Artificial Sequence
  Description of Artificial Sequence: Synthetic oligonucleotide
  Target: LAMA2; (+) strand; PAM type: YTN; PAM sequence: TTA
caaatgaagagctaatgagt

SEQ ID NO: 400706 - DNA, 20 bp, Artificial Sequence
  Description of Artificial Sequence: Synthetic oligonucleotide
  Target: LAMA2; (+) strand; PAM type: YTN; PAM sequence: CTA
atgagtatccccaaagataa

SEQ ID NO: 400707 - DNA, 20 bp, Artificial Sequence
  Description of Artificial Sequence: Synthetic oligonucleotide
  Target: LAMA2; (+) strand; PAM type: YTN; PAM sequence: CTT
ttacaggtatattgaagggt

SEQ ID NO: 400708 - DNA, 20 bp, Artificial Sequence
  Description of Artificial Sequence: Synthetic oligonucleotide
  Target: LAMA2; (+) strand; PAM type: YTN; PAM sequence: TTT
tacaggtatattgaagggta

SEQ ID NO: 400709 - DNA, 20 bp, Artificial Sequence
  Description of Artificial Sequence: Synthetic oligonucleotide
  Target: LAMA2; (+) strand; PAM type: YTN; PAM sequence: TTT
acaggtatattgaagggtaa

SEQ ID NO: 400710 - DNA, 20 bp, Artificial Sequence
  Description of Artificial Sequence: Synthetic oligonucleotide
  Target: LAMA2; (+) strand; PAM type: YTN; PAM sequence: TTA
caggtatattgaagggtaaa

SEQ ID NO: 400711 - DNA, 20 bp, Artificial Sequence
  Description of Artificial Sequence: Synthetic oligonucleotide
  Target: LAMA2; (+) strand; PAM type: YTN; PAM sequence: TTG
aagggtaaatttctatcagt

SEQ ID NO: 400712 - DNA, 20 bp, Artificial Sequence
  Description of Artificial Sequence: Synthetic oligonucleotide
  Target: LAMA2; (+) strand; PAM type: YTN; PAM sequence: TTT
ctatcagtagaattgccaaa

SEQ ID NO: 400713 - DNA, 20 bp, Artificial Sequence
  Description of Artificial Sequence: Synthetic oligonucleotide
  Target: LAMA2; (+) strand; PAM type: YTN; PAM sequence: TTC
tatcagtagaattgccaaac

SEQ ID NO: 400714 - DNA, 20 bp, Artificial Sequence
  Description of Artificial Sequence: Synthetic oligonucleotide
  Target: LAMA2; (+) strand; PAM type: YTN; PAM sequence: CTA
tcagtagaattgccaaacca

SEQ ID NO: 400715 - DNA, 20 bp, Artificial Sequence
  Description of Artificial Sequence: Synthetic oligonucleotide
  Target: LAMA2; (+) strand; PAM type: YTN; PAM sequence: TTG
ccaaaccaaatacatgtcta

SEQ ID NO: 400716 - DNA, 20 bp, Artificial Sequence
  Description of Artificial Sequence: Synthetic oligonucleotide
  Target: LAMA2; (+) strand; PAM type: YTN; PAM sequence: CTA
tttaaaattctaataaactt

SEQ ID NO: 400717 - DNA, 20 bp, Artificial Sequence
  Description of Artificial Sequence: Synthetic oligonucleotide
  Target: LAMA2; (+) strand; PAM type: YTN; PAM sequence: TTT
aaaattctaataaacttatt

SEQ ID NO: 400718 - DNA, 20 bp, Artificial Sequence
  Description of Artificial Sequence: Synthetic oligonucleotide
  Target: LAMA2; (+) strand; PAM type: YTN; PAM sequence: TTA
aaattctaataaacttatta

SEQ ID NO: 400719 - DNA, 20 bp, Artificial Sequence
  Description of Artificial Sequence: Synthetic oligonucleotide
  Target: LAMA2; (+) strand; PAM type: YTN; PAM sequence: TTC
taataaacttattaacttgc

SEQ ID NO: 400720 - DNA, 20 bp, Artificial Sequence
  Description of Artificial Sequence: Synthetic oligonucleotide
  Target: LAMA2; (+) strand; PAM type: YTN; PAM sequence: CTA
ataaacttattaacttgctc

SEQ ID NO: 400721 - DNA, 20 bp, Artificial Sequence
  Description of Artificial Sequence: Synthetic oligonucleotide
  Target: LAMA2; (+) strand; PAM type: YTN; PAM sequence: CTT
attaacttgctcttcaaaca

SEQ ID NO: 400722 - DNA, 20 bp, Artificial Sequence
  Description of Artificial Sequence: Synthetic oligonucleotide
  Target: LAMA2; (+) strand; PAM type: YTN; PAM sequence: TTA
ttaacttgctcttcaaacaa

SEQ ID NO: 400723 - DNA, 20 bp, Artificial Sequence
  Description of Artificial Sequence: Synthetic oligonucleotide
  Target: LAMA2; (+) strand; PAM type: YTN; PAM sequence: TTA
acttgctcttcaaacaatgg

SEQ ID NO: 400724 - DNA, 20 bp, Artificial Sequence
  Description of Artificial Sequence: Synthetic oligonucleotide
  Target: LAMA2; (+) strand; PAM type: YTN; PAM sequence: CTT
gctcttcaaacaatggaatc

SEQ ID NO: 400725 - DNA, 20 bp, Artificial Sequence
  Description of Artificial Sequence: Synthetic oligonucleotide
  Target: LAMA2; (+) strand; PAM type: YTN; PAM sequence: TTG
ctcttcaaacaatggaatca

SEQ ID NO: 400726 - DNA, 20 bp, Artificial Sequence
  Description of Artificial Sequence: Synthetic oligonucleotide
  Target: LAMA2; (+) strand; PAM type: YTN; PAM sequence: CTC
ttcaaacaatggaatcaatc

SEQ ID NO: 400727 - DNA, 20 bp, Artificial Sequence
  Description of Artificial Sequence: Synthetic oligonucleotide
  Target: LAMA2; (+) strand; PAM type: YTN; PAM sequence: CTT
caaacaatggaatcaatctg

SEQ ID NO: 400728 - DNA, 20 bp, Artificial Sequence
  Description of Artificial Sequence: Synthetic oligonucleotide
  Target: LAMA2; (+) strand; PAM type: YTN; PAM sequence: TTC
aaacaatggaatcaatctgc

SEQ ID NO: 400729 - DNA, 20 bp, Artificial Sequence
  Description of Artificial Sequence: Synthetic oligonucleotide
  Target: LAMA2; (+) strand; PAM type: YTN; PAM sequence: CTG
cacgtccactagcactcttg

SEQ ID NO: 400730 - DNA, 20 bp, Artificial Sequence
  Description of Artificial Sequence: Synthetic oligonucleotide
  Target: LAMA2; (+) strand; PAM type: YTN; PAM sequence: CTA
gcactcttgtgaacacttgg

SEQ ID NO: 400731 - DNA, 20 bp, Artificial Sequence
  Description of Artificial Sequence: Synthetic oligonucleotide
  Target: LAMA2; (+) strand; PAM type: YTN; PAM sequence: CTC
ttgtgaacacttggcattat

SEQ ID NO: 400732 - DNA, 20 bp, Artificial Sequence
  Description of Artificial Sequence: Synthetic oligonucleotide
  Target: LAMA2; (+) strand; PAM type: YTN; PAM sequence: CTT
gtgaacacttggcattatca

SEQ ID NO: 400733 - DNA, 20 bp, Artificial Sequence
  Description of Artificial Sequence: Synthetic oligonucleotide
  Target: LAMA2; (+) strand; PAM type: YTN; PAM sequence: TTG
tgaacacttggcattatcat

SEQ ID NO: 400734 - DNA, 20 bp, Artificial Sequence
  Description of Artificial Sequence: Synthetic oligonucleotide
  Target: LAMA2; (+) strand; PAM type: YTN; PAM sequence: CTT
ggcattatcatacatttaat

SEQ ID NO: 400735 - DNA, 20 bp, Artificial Sequence
  Description of Artificial Sequence: Synthetic oligonucleotide
  Target: LAMA2; (+) strand; PAM type: YTN; PAM sequence: TTG
gcattatcatacatttaatt

SEQ ID NO: 400736 - DNA, 20 bp, Artificial Sequence
  Description of Artificial Sequence: Synthetic oligonucleotide
  Target: LAMA2; (+) strand; PAM type: YTN; PAM sequence: TTA
tcatacatttaattttcccc

SEQ ID NO: 400737 - DNA, 20 bp, Artificial Sequence
  Description of Artificial Sequence: Synthetic oligonucleotide
  Target: LAMA2; (+) strand; PAM type: YTN; PAM sequence: TTT
aattttccccaatctcaaaa

SEQ ID NO: 400738 - DNA, 20 bp, Artificial Sequence
  Description of Artificial Sequence: Synthetic oligonucleotide
  Target: LAMA2; (+) strand; PAM type: YTN; PAM sequence: TTA
attttccccaatctcaaaaa

SEQ ID NO: 400739 - DNA, 20 bp, Artificial Sequence
  Description of Artificial Sequence: Synthetic oligonucleotide
  Target: LAMA2; (+) strand; PAM type: YTN; PAM sequence: TTT
tccccaatctcaaaaataag

SEQ ID NO: 400740 - DNA, 20 bp, Artificial Sequence
  Description of Artificial Sequence: Synthetic oligonucleotide
  Target: LAMA2; (+) strand; PAM type: YTN; PAM sequence: TTT
ccccaatctcaaaaataaga

SEQ ID NO: 400741 - DNA, 20 bp, Artificial Sequence
  Description of Artificial Sequence: Synthetic oligonucleotide
  Target: LAMA2; (+) strand; PAM type: YTN; PAM sequence: TTC
cccaatctcaaaaataagaa

SEQ ID NO: 400742 - DNA, 20 bp, Artificial Sequence
  Description of Artificial Sequence: Synthetic oligonucleotide
  Target: LAMA2; (+) strand; PAM type: YTN; PAM sequence: CTC
aaaaataagaaatgacatct

SEQ ID NO: 400743 - DNA, 20 bp, Artificial Sequence
  Description of Artificial Sequence: Synthetic oligonucleotide
  Target: LAMA2; (+) strand; PAM type: YTN; PAM sequence: CTT
actgttgcttagttttacag

SEQ ID NO: 400744 - DNA, 20 bp, Artificial Sequence
  Description of Artificial Sequence: Synthetic oligonucleotide
  Target: LAMA2; (+) strand; PAM type: YTN; PAM sequence: TTA
ctgttgcttagttttacagt

SEQ ID NO: 400745 - DNA, 20 bp, Artificial Sequence
  Description of Artificial Sequence: Synthetic oligonucleotide
  Target: LAMA2; (+) strand; PAM type: YTN; PAM sequence: CTG
ttgcttagttttacagttct

SEQ ID NO: 400746 - DNA, 20 bp, Artificial Sequence
  Description of Artificial Sequence: Synthetic oligonucleotide
  Target: LAMA2; (+) strand; PAM type: YTN; PAM sequence: TTG
cttagttttacagttcttta

SEQ ID NO: 400747 - DNA, 20 bp, Artificial Sequence
  Description of Artificial Sequence: Synthetic oligonucleotide
  Target: LAMA2; (+) strand; PAM type: YTN; PAM sequence: CTT
agttttacagttctttatga

SEQ ID NO: 400748 - DNA, 20 bp, Artificial Sequence
  Description of Artificial Sequence: Synthetic oligonucleotide
  Target: LAMA2; (+) strand; PAM type: YTN; PAM sequence: TTA
gttttacagttctttatgat

SEQ ID NO: 400749 - DNA, 20 bp, Artificial Sequence
  Description of Artificial Sequence: Synthetic oligonucleotide
  Target: LAMA2; (+) strand; PAM type: YTN; PAM sequence: TTT
tacagttctttatgataatc

SEQ ID NO: 400750 - DNA, 20 bp, Artificial Sequence
  Description of Artificial Sequence: Synthetic oligonucleotide
  Target: LAMA2; (+) strand; PAM type: YTN; PAM sequence: TTT
acagttctttatgataatct

SEQ ID NO: 400751 - DNA, 20 bp, Artificial Sequence
  Description of Artificial Sequence: Synthetic oligonucleotide
  Target: LAMA2; (+) strand; PAM type: YTN; PAM sequence: TTA
cagttctttatgataatctt

SEQ ID NO: 400752 - DNA, 20 bp, Artificial Sequence
  Description of Artificial Sequence: Synthetic oligonucleotide
  Target: LAMA2; (+) strand; PAM type: YTN; PAM sequence: TTC
tttatgataatcttgagtgc

SEQ ID NO: 400753 - DNA, 20 bp, Artificial Sequence
  Description of Artificial Sequence: Synthetic oligonucleotide
  Target: LAMA2; (+) strand; PAM type: YTN; PAM sequence: CTT
tatgataatcttgagtgctt

SEQ ID NO: 400754 - DNA, 20 bp, Artificial Sequence
  Description of Artificial Sequence: Synthetic oligonucleotide
  Target: LAMA2; (+) strand; PAM type: YTN; PAM sequence: TTT
atgataatcttgagtgcttt

SEQ ID NO: 400755 - DNA, 20 bp, Artificial Sequence
  Description of Artificial Sequence: Synthetic oligonucleotide
  Target: LAMA2; (+) strand; PAM type: YTN; PAM sequence: TTA
tgataatcttgagtgctttt

SEQ ID NO: 400756 - DNA, 20 bp, Artificial Sequence
  Description of Artificial Sequence: Synthetic oligonucleotide
  Target: LAMA2; (+) strand; PAM type: YTN; PAM sequence: CTT
gagtgctttttacgaatttc

SEQ ID NO: 400757 - DNA, 20 bp, Artificial Sequence
  Description of Artificial Sequence: Synthetic oligonucleotide
  Target: LAMA2; (+) strand; PAM type: YTN; PAM sequence: TTG
agtgctttttacgaatttca

SEQ ID NO: 400758 - DNA, 20 bp, Artificial Sequence
  Description of Artificial Sequence: Synthetic oligonucleotide
  Target: LAMA2; (+) strand; PAM type: YTN; PAM sequence: CTT
tttacgaatttcataaatga

SEQ ID NO: 400759 - DNA, 20 bp, Artificial Sequence
  Description of Artificial Sequence: Synthetic oligonucleotide
  Target: LAMA2; (+) strand; PAM type: YTN; PAM sequence: TTT
ttacgaatttcataaatgat

SEQ ID NO: 400760 - DNA, 20 bp, Artificial Sequence
  Description of Artificial Sequence: Synthetic oligonucleotide
  Target: LAMA2; (+) strand; PAM type: YTN; PAM sequence: TTT
tacgaatttcataaatgatt

SEQ ID NO: 400761 - DNA, 20 bp, Artificial Sequence
  Description of Artificial Sequence: Synthetic oligonucleotide
  Target: LAMA2; (+) strand; PAM type: YTN; PAM sequence: TTT
acgaatttcataaatgatta

SEQ ID NO: 400762 - DNA, 20 bp, Artificial Sequence
  Description of Artificial Sequence: Synthetic oligonucleotide
  Target: LAMA2; (+) strand; PAM type: YTN; PAM sequence: TTA
cgaatttcataaatgattat

SEQ ID NO: 400763 - DNA, 20 bp, Artificial Sequence
  Description of Artificial Sequence: Synthetic oligonucleotide
  Target: LAMA2; (+) strand; PAM type: YTN; PAM sequence: TTT
cataaatgattatgtatgtt

SEQ ID NO: 400764 - DNA, 20 bp, Artificial Sequence
  Description of Artificial Sequence: Synthetic oligonucleotide
  Target: LAMA2; (+) strand; PAM type: YTN; PAM sequence: TTC
ataaatgattatgtatgttt

SEQ ID NO: 400765 - DNA, 20 bp, Artificial Sequence
  Description of Artificial Sequence: Synthetic oligonucleotide
  Target: LAMA2; (+) strand; PAM type: YTN; PAM sequence: TTA
tgtatgtttattttattgtg

SEQ ID NO: 400766 - DNA, 20 bp, Artificial Sequence
  Description of Artificial Sequence: Synthetic oligonucleotide
  Target: LAMA2; (+) strand; PAM type: YTN; PAM sequence: TTT
attttattgtgaactacgta

SEQ ID NO: 400767 - DNA, 20 bp, Artificial Sequence
  Description of Artificial Sequence: Synthetic oligonucleotide
  Target: LAMA2; (+) strand; PAM type: YTN; PAM sequence: TTA
ttttattgtgaactacgtat

SEQ ID NO: 400768 - DNA, 20 bp, Artificial Sequence
  Description of Artificial Sequence: Synthetic oligonucleotide
  Target: LAMA2; (+) strand; PAM type: YTN; PAM sequence: TTT
tattgtgaactacgtattct

SEQ ID NO: 400769 - DNA, 20 bp, Artificial Sequence
  Description of Artificial Sequence: Synthetic oligonucleotide
  Target: LAMA2; (+) strand; PAM type: YTN; PAM sequence: TTT
attgtgaactacgtattctt

SEQ ID NO: 400770 - DNA, 20 bp, Artificial Sequence
  Description of Artificial Sequence: Synthetic oligonucleotide
  Target: LAMA2; (+) strand; PAM type: YTN; PAM sequence: TTA
ttgtgaactacgtattctta

SEQ ID NO: 400771 - DNA, 20 bp, Artificial Sequence
  Description of Artificial Sequence: Synthetic oligonucleotide
  Target: LAMA2; (+) strand; PAM type: YTN; PAM sequence: TTG
tgaactacgtattcttatat

SEQ ID NO: 400772 - DNA, 20 bp, Artificial Sequence
  Description of Artificial Sequence: Synthetic oligonucleotide
  Target: LAMA2; (+) strand; PAM type: YTN; PAM sequence: CTA
cgtattcttatattttcctc

SEQ ID NO: 400773 - DNA, 20 bp, Artificial Sequence
  Description of Artificial Sequence: Synthetic oligonucleotide
  Target: LAMA2; (+) strand; PAM type: YTN; PAM sequence: TTC
ttatattttcctcattatcc

SEQ ID NO: 400774 - DNA, 20 bp, Artificial Sequence
  Description of Artificial Sequence: Synthetic oligonucleotide
  Target: LAMA2; (+) strand; PAM type: YTN; PAM sequence: CTT
atattttcctcattatcctt

SEQ ID NO: 400775 - DNA, 20 bp, Artificial Sequence
  Description of Artificial Sequence: Synthetic oligonucleotide
  Target: LAMA2; (+) strand; PAM type: YTN; PAM sequence: TTA
tattttcctcattatcctta

SEQ ID NO: 400776 - DNA, 20 bp, Artificial Sequence
  Description of Artificial Sequence: Synthetic oligonucleotide
  Target: LAMA2; (+) strand; PAM type: YTN; PAM sequence: TTT
tcctcattatccttaaaaat

SEQ ID NO: 400777 - DNA, 20 bp, Artificial Sequence
  Description of Artificial Sequence: Synthetic oligonucleotide
  Target: LAMA2; (+) strand; PAM type: YTN; PAM sequence: TTT
cctcattatccttaaaaata

SEQ ID NO: 400778 - DNA, 20 bp, Artificial Sequence
  Description of Artificial Sequence: Synthetic oligonucleotide
  Target: LAMA2; (+) strand; PAM type: YTN; PAM sequence: TTC
ctcattatccttaaaaatat

SEQ ID NO: 400779 - DNA, 20 bp, Artificial Sequence
  Description of Artificial Sequence: Synthetic oligonucleotide
  Target: LAMA2; (+) strand; PAM type: YTN; PAM sequence: CTC
attatccttaaaaatatgga

SEQ ID NO: 400780 - DNA, 20 bp, Artificial Sequence
  Description of Artificial Sequence: Synthetic oligonucleotide
  Target: LAMA2; (+) strand; PAM type: YTN; PAM sequence: TTA
tccttaaaaatatggaacac

SEQ ID NO: 400781 - DNA, 20 bp, Artificial Sequence
  Description of Artificial Sequence: Synthetic oligonucleotide
  Target: LAMA2; (+) strand; PAM type: YTN; PAM sequence: CTT
aaaaatatggaacactttgc

SEQ ID NO: 400782 - DNA, 20 bp, Artificial Sequence
  Description of Artificial Sequence: Synthetic oligonucleotide
  Target: LAMA2; (+) strand; PAM type: YTN; PAM sequence: TTA
aaaatatggaacactttgca

SEQ ID NO: 400783 - DNA, 20 bp, Artificial Sequence
  Description of Artificial Sequence: Synthetic oligonucleotide
  Target: LAMA2; (+) strand; PAM type: YTN; PAM sequence: CTT
tgcatatttgcctgccagtt

SEQ ID NO: 400784 - DNA, 20 bp, Artificial Sequence
  Description of Artificial Sequence: Synthetic oligonucleotide
  Target: LAMA2; (+) strand; PAM type: YTN; PAM sequence: TTT
gcatatttgcctgccagttt

SEQ ID NO: 400785 - DNA, 20 bp, Artificial Sequence
  Description of Artificial Sequence: Synthetic oligonucleotide
  Target: LAMA2; (+) strand; PAM type: YTN; PAM sequence: TTG
catatttgcctgccagtttt

SEQ ID NO: 400786 - DNA, 20 bp, Artificial Sequence
  Description of Artificial Sequence: Synthetic oligonucleotide
  Target: LAMA2; (+) strand; PAM type: YTN; PAM sequence: TTT
gcctgccagttttgcacata

SEQ ID NO: 400787 - DNA, 20 bp, Artificial Sequence
  Description of Artificial Sequence: Synthetic oligonucleotide
  Target: LAMA2; (+) strand; PAM type: YTN; PAM sequence: TTG
cctgccagttttgcacatag

SEQ ID NO: 400788 - DNA, 20 bp, Artificial Sequence
  Description of Artificial Sequence: Synthetic oligonucleotide
  Target: LAMA2; (+) strand; PAM type: YTN; PAM sequence: CTG
ccagttttgcacatagacaa

SEQ ID NO: 400789 - DNA, 20 bp, Artificial Sequence
  Description of Artificial Sequence: Synthetic oligonucleotide
  Target: LAMA2; (+) strand; PAM type: YTN; PAM sequence: TTT
tgcacatagacaatgctatt

SEQ ID NO: 400790 - DNA, 20 bp, Artificial Sequence
  Description of Artificial Sequence: Synthetic oligonucleotide
  Target: LAMA2; (+) strand; PAM type: YTN; PAM sequence: TTT
gcacatagacaatgctattc

SEQ ID NO: 400791 - DNA, 20 bp, Artificial Sequence
  Description of Artificial Sequence: Synthetic oligonucleotide
  Target: LAMA2; (+) strand; PAM type: YTN; PAM sequence: TTG
cacatagacaatgctattct

SEQ ID NO: 400792 - DNA, 20 bp, Artificial Sequence
  Description of Artificial Sequence: Synthetic oligonucleotide
  Target: LAMA2; (+) strand; PAM type: YTN; PAM sequence: CTA
ttctactctgaataattaca

SEQ ID NO: 400793 - DNA, 20 bp, Artificial Sequence
  Description of Artificial Sequence: Synthetic oligonucleotide
  Target: LAMA2; (+) strand; PAM type: YTN; PAM sequence: TTC
tactctgaataattacaact

SEQ ID NO: 400794 - DNA, 20 bp, Artificial Sequence
  Description of Artificial Sequence: Synthetic oligonucleotide
  Target: LAMA2; (+) strand; PAM type: YTN; PAM sequence: CTA
ctctgaataattacaacttg

SEQ ID NO: 400795 - DNA, 20 bp, Artificial Sequence
  Description of Artificial Sequence: Synthetic oligonucleotide
  Target: LAMA2; (+) strand; PAM type: YTN; PAM sequence: CTC
tgaataattacaacttggtt

SEQ ID NO: 400796 - DNA, 20 bp, Artificial Sequence
  Description of Artificial Sequence: Synthetic oligonucleotide
  Target: LAMA2; (+) strand; PAM type: YTN; PAM sequence: CTG
aataattacaacttggttat

SEQ ID NO: 400797 - DNA, 20 bp, Artificial Sequence
  Description of Artificial Sequence: Synthetic oligonucleotide
  Target: LAMA2; (+) strand; PAM type: YTN; PAM sequence: TTA
caacttggttatatatgttg

SEQ ID NO: 400798 - DNA, 20 bp, Artificial Sequence
  Description of Artificial Sequence: Synthetic oligonucleotide
  Target: LAMA2; (+) strand; PAM type: YTN; PAM sequence: CTT
ggttatatatgttgcttagg

SEQ ID NO: 400799 - DNA, 20 bp, Artificial Sequence
  Description of Artificial Sequence: Synthetic oligonucleotide
  Target: LAMA2; (+) strand; PAM type: YTN; PAM sequence: TTG
gttatatatgttgcttaggt

SEQ ID NO: 400800 - DNA, 20 bp, Artificial Sequence
  Description of Artificial Sequence: Synthetic oligonucleotide
  Target: LAMA2; (+) strand; PAM type: YTN; PAM sequence: TTA
tatatgttgcttaggtgagg

SEQ ID NO: 400801 - DNA, 20 bp, Artificial Sequence
  Description of Artificial Sequence: Synthetic oligonucleotide
  Target: LAMA2; (+) strand; PAM type: YTN; PAM sequence: TTG
cttaggtgaggcttctctga

SEQ ID NO: 400802 - DNA, 20 bp, Artificial Sequence
  Description of Artificial Sequence: Synthetic oligonucleotide
  Target: LAMA2; (+) strand; PAM type: YTN; PAM sequence: CTT
aggtgaggcttctctgattt

SEQ ID NO: 400803 - DNA, 20 bp, Artificial Sequence
  Description of Artificial Sequence: Synthetic oligonucleotide
  Target: LAMA2; (+) strand; PAM type: YTN; PAM sequence: TTA
ggtgaggcttctctgatttc

SEQ ID NO: 400804 - DNA, 20 bp, Artificial Sequence
  Description of Artificial Sequence: Synthetic oligonucleotide
  Target: LAMA2; (+) strand; PAM type: YTN; PAM sequence: CTT
ctctgatttctgtaactgtg

SEQ ID NO: 400805 - DNA, 20 bp, Artificial Sequence
  Description of Artificial Sequence: Synthetic oligonucleotide
  Target: LAMA2; (+) strand; PAM type: YTN; PAM sequence: TTC
tctgatttctgtaactgtga

SEQ ID NO: 400806 - DNA, 20 bp, Artificial Sequence
  Description of Artificial Sequence: Synthetic oligonucleotide
  Target: LAMA2; (+) strand; PAM type: YTN; PAM sequence: CTC
tgatttctgtaactgtgacc

SEQ ID NO: 400807 - DNA, 20 bp, Artificial Sequence
  Description of Artificial Sequence: Synthetic oligonucleotide
  Target: LAMA2; (+) strand; PAM type: YTN; PAM sequence: CTG
atttctgtaactgtgaccaa

SEQ ID NO: 400808 - DNA, 20 bp, Artificial Sequence
  Description of Artificial Sequence: Synthetic oligonucleotide
  Target: LAMA2; (+) strand; PAM type: YTN; PAM sequence: TTT
ctgtaactgtgaccaatttc

SEQ ID NO: 400809 - DNA, 20 bp, Artificial Sequence
  Description of Artificial Sequence: Synthetic oligonucleotide
  Target: LAMA2; (+) strand; PAM type: YTN; PAM sequence: TTC
tgtaactgtgaccaatttct

SEQ ID NO: 400810 - DNA, 20 bp, Artificial Sequence
  Description of Artificial Sequence: Synthetic oligonucleotide
  Target: LAMA2; (+) strand; PAM type: YTN; PAM sequence: CTG
taactgtgaccaatttcttt

SEQ ID NO: 400811 - DNA, 20 bp, Artificial Sequence
  Description of Artificial Sequence: Synthetic oligonucleotide
  Target: LAMA2; (+) strand; PAM type: YTN; PAM sequence: CTG
tgaccaatttctttaagaca

SEQ ID NO: 400812 - DNA, 20 bp, Artificial Sequence
  Description of Artificial Sequence: Synthetic oligonucleotide
  Target: LAMA2; (+) strand; PAM type: YTN; PAM sequence: TTT
ctttaagacaacaaaggaga

SEQ ID NO: 400813 - DNA, 20 bp, Artificial Sequence
  Description of Artificial Sequence: Synthetic oligonucleotide
  Target: LAMA2; (+) strand; PAM type: YTN; PAM sequence: TTC
tttaagacaacaaaggagaa

SEQ ID NO: 400814 - DNA, 20 bp, Artificial Sequence
  Description of Artificial Sequence: Synthetic oligonucleotide
  Target: LAMA2; (+) strand; PAM type: YTN; PAM sequence: CTT
taagacaacaaaggagaaaa

SEQ ID NO: 400815 - DNA, 20 bp, Artificial Sequence
  Description of Artificial Sequence: Synthetic oligonucleotide
  Target: LAMA2; (+) strand; PAM type: YTN; PAM sequence: TTT
aagacaacaaaggagaaaat

SEQ ID NO: 400816 - DNA, 20 bp, Artificial Sequence
  Description of Artificial Sequence: Synthetic oligonucleotide
  Target: LAMA2; (+) strand; PAM type: YTN; PAM sequence: TTA
agacaacaaaggagaaaatg

SEQ ID NO: 400817 - DNA, 20 bp, Artificial Sequence
  Description of Artificial Sequence: Synthetic oligonucleotide
  Target: LAMA2; (+) strand; PAM type: YTN; PAM sequence: TTG
agggtgatggtgggaggagc

SEQ ID NO: 400818 - DNA, 20 bp, Artificial Sequence
  Description of Artificial Sequence: Synthetic oligonucleotide
  Target: LAMA2; (+) strand; PAM type: YTN; PAM sequence: TTG
ctacccaaaatgctctacta

SEQ ID NO: 400819 - DNA, 20 bp, Artificial Sequence
  Description of Artificial Sequence: Synthetic oligonucleotide
  Target: LAMA2; (+) strand; PAM type: YTN; PAM sequence: CTA
cccaaaatgctctactaatc

SEQ ID NO: 400820 - DNA, 20 bp, Artificial Sequence
  Description of Artificial Sequence: Synthetic oligonucleotide
  Target: LAMA2; (+) strand; PAM type: YTN; PAM sequence: CTC
tactaatccctagttttgac

SEQ ID NO: 400821 - DNA, 20 bp, Artificial Sequence
  Description of Artificial Sequence: Synthetic oligonucleotide
  Target: LAMA2; (+) strand; PAM type: YTN; PAM sequence: CTA
ctaatccctagttttgacta

SEQ ID NO: 400822 - DNA, 20 bp, Artificial Sequence
  Description of Artificial Sequence: Synthetic oligonucleotide
  Target: LAMA2; (+) strand; PAM type: YTN; PAM sequence: CTA
atccctagttttgactatca

SEQ ID NO: 400823 - DNA, 20 bp, Artificial Sequence
  Description of Artificial Sequence: Synthetic oligonucleotide
  Target: LAMA2; (+) strand; PAM type: YTN; PAM sequence: CTA
gttttgactatcaatccttg

SEQ ID NO: 400824 - DNA, 20 bp, Artificial Sequence
  Description of Artificial Sequence: Synthetic oligonucleotide
  Target: LAMA2; (+) strand; PAM type: YTN; PAM sequence: TTT
tgactatcaatccttggtag

SEQ ID NO: 400825 - DNA, 20 bp, Artificial Sequence
  Description of Artificial Sequence: Synthetic oligonucleotide
  Target: LAMA2; (+) strand; PAM type: YTN; PAM sequence: TTT
gactatcaatccttggtaga

SEQ ID NO: 400826 - DNA, 20 bp, Artificial Sequence
  Description of Artificial Sequence: Synthetic oligonucleotide
  Target: LAMA2; (+) strand; PAM type: YTN; PAM sequence: TTG
actatcaatccttggtagaa

SEQ ID NO: 400827 - DNA, 20 bp, Artificial Sequence
  Description of Artificial Sequence: Synthetic oligonucleotide
  Target: LAMA2; (+) strand; PAM type: YTN; PAM sequence: CTA
tcaatccttggtagaatgca

SEQ ID NO: 400828 - DNA, 20 bp, Artificial Sequence
  Description of Artificial Sequence: Synthetic oligonucleotide
  Target: LAMA2; (+) strand; PAM type: YTN; PAM sequence: CTT
ggtagaatgcagtagttagc

SEQ ID NO: 400829 - DNA, 20 bp, Artificial Sequence
  Description of Artificial Sequence: Synthetic oligonucleotide
  Target: LAMA2; (+) strand; PAM type: YTN; PAM sequence: TTG
gtagaatgcagtagttagca

SEQ ID NO: 400830 - DNA, 20 bp, Artificial Sequence
  Description of Artificial Sequence: Synthetic oligonucleotide
  Target: LAMA2; (+) strand; PAM type: YTN; PAM sequence: TTA
gcattgtttatggaatggga

SEQ ID NO: 400831 - DNA, 20 bp, Artificial Sequence
  Description of Artificial Sequence: Synthetic oligonucleotide
  Target: LAMA2; (+) strand; PAM type: YTN; PAM sequence: TTG
tttatggaatgggactatgt

SEQ ID NO: 400832 - DNA, 20 bp, Artificial Sequence
  Description of Artificial Sequence: Synthetic oligonucleotide
  Target: LAMA2; (+) strand; PAM type: YTN; PAM sequence: TTT
atggaatgggactatgtgga

SEQ ID NO: 400833 - DNA, 20 bp, Artificial Sequence
  Description of Artificial Sequence: Synthetic oligonucleotide
  Target: LAMA2; (+) strand; PAM type: YTN; PAM sequence: TTA
tggaatgggactatgtggat

SEQ ID NO: 400834 - DNA, 20 bp, Artificial Sequence
  Description of Artificial Sequence: Synthetic oligonucleotide
  Target: LAMA2; (+) strand; PAM type: YTN; PAM sequence: CTA
tgtggatttgaataccacca

SEQ ID NO: 400835 - DNA, 20 bp, Artificial Sequence
  Description of Artificial Sequence: Synthetic oligonucleotide
  Target: LAMA2; (+) strand; PAM type: YTN; PAM sequence: TTT
gaataccaccactgccattt

SEQ ID NO: 400836 - DNA, 20 bp, Artificial Sequence
  Description of Artificial Sequence: Synthetic oligonucleotide
  Target: LAMA2; (+) strand; PAM type: YTN; PAM sequence: TTG
aataccaccactgccattta

SEQ ID NO: 400837 - DNA, 20 bp, Artificial Sequence
  Description of Artificial Sequence: Synthetic oligonucleotide
  Target: LAMA2; (+) strand; PAM type: YTN; PAM sequence: CTG
ccatttattaaccatgcaag

SEQ ID NO: 400838 - DNA, 20 bp, Artificial Sequence
  Description of Artificial Sequence: Synthetic oligonucleotide
  Target: LAMA2; (+) strand; PAM type: YTN; PAM sequence: TTT
attaaccatgcaagcttagg

SEQ ID NO: 400839 - DNA, 20 bp, Artificial Sequence
  Description of Artificial Sequence: Synthetic oligonucleotide
  Target: LAMA2; (+) strand; PAM type: YTN; PAM sequence: TTA
ttaaccatgcaagcttagga

SEQ ID NO: 400840 - DNA, 20 bp, Artificial Sequence
  Description of Artificial Sequence: Synthetic oligonucleotide
  Target: LAMA2; (+) strand; PAM type: YTN; PAM sequence: TTA
accatgcaagcttaggaaat

SEQ ID NO: 400841 - DNA, 20 bp, Artificial Sequence
  Description of Artificial Sequence: Synthetic oligonucleotide
  Target: LAMA2; (+) strand; PAM type: YTN; PAM sequence: CTT
aggaaatttactcaacttct

SEQ ID NO: 400842 - DNA, 20 bp, Artificial Sequence
  Description of Artificial Sequence: Synthetic oligonucleotide
  Target: LAMA2; (+) strand; PAM type: YTN; PAM sequence: TTA
ggaaatttactcaacttctc

SEQ ID NO: 400843 - DNA, 20 bp, Artificial Sequence
  Description of Artificial Sequence: Synthetic oligonucleotide
  Target: LAMA2; (+) strand; PAM type: YTN; PAM sequence: TTT
actcaacttctctaagtctc

SEQ ID NO: 400844 - DNA, 20 bp, Artificial Sequence
  Description of Artificial Sequence: Synthetic oligonucleotide
  Target: LAMA2; (+) strand; PAM type: YTN; PAM sequence: TTA
ctcaacttctctaagtctca

SEQ ID NO: 400845 - DNA, 20 bp, Artificial Sequence
  Description of Artificial Sequence: Synthetic oligonucleotide
  Target: LAMA2; (+) strand; PAM type: YTN; PAM sequence: CTC
aacttctctaagtctcaatt

SEQ ID NO: 400846 - DNA, 20 bp, Artificial Sequence
  Description of Artificial Sequence: Synthetic oligonucleotide
  Target: LAMA2; (+) strand; PAM type: YTN; PAM sequence: CTT
ctctaagtctcaatttcctc

SEQ ID NO: 400847 - DNA, 20 bp, Artificial Sequence
  Description of Artificial Sequence: Synthetic oligonucleotide
  Target: LAMA2; (+) strand; PAM type: YTN; PAM sequence: TTC
tctaagtctcaatttcctca

SEQ ID NO: 400848 - DNA, 20 bp, Artificial Sequence
  Description of Artificial Sequence: Synthetic oligonucleotide
  Target: LAMA2; (+) strand; PAM type: YTN; PAM sequence: CTC
taagtctcaatttcctcatt

SEQ ID NO: 400849 - DNA, 20 bp, Artificial Sequence
  Description of Artificial Sequence: Synthetic oligonucleotide
  Target: LAMA2; (+) strand; PAM type: YTN; PAM sequence: CTA
agtctcaatttcctcatttg

SEQ ID NO: 400850 - DNA, 20 bp, Artificial Sequence
  Description of Artificial Sequence: Synthetic oligonucleotide
  Target: LAMA2; (+) strand; PAM type: YTN; PAM sequence: CTC
aatttcctcatttgtaaatt

SEQ ID NO: 400851 - DNA, 20 bp, Artificial Sequence
  Description of Artificial Sequence: Synthetic oligonucleotide
  Target: LAMA2; (+) strand; PAM type: YTN; PAM sequence: TTT
cctcatttgtaaattggaga

SEQ ID NO: 400852 - DNA, 20 bp, Artificial Sequence
  Description of Artificial Sequence: Synthetic oligonucleotide
  Target: LAMA2; (+) strand; PAM type: YTN; PAM sequence: TTC
ctcatttgtaaattggagat

SEQ ID NO: 400853 - DNA, 20 bp, Artificial Sequence
  Description of Artificial Sequence: Synthetic oligonucleotide
  Target: LAMA2; (+) strand; PAM type: YTN; PAM sequence: CTC
atttgtaaattggagataat

SEQ ID NO: 400854 - DNA, 20 bp, Artificial Sequence
  Description of Artificial Sequence: Synthetic oligonucleotide
  Target: LAMA2; (+) strand; PAM type: YTN; PAM sequence: TTT
gtaaattggagataatagta

SEQ ID NO: 400855 - DNA, 20 bp, Artificial Sequence
  Description of Artificial Sequence: Synthetic oligonucleotide
  Target: LAMA2; (+) strand; PAM type: YTN; PAM sequence: TTG
taaattggagataatagtag

SEQ ID NO: 400856 - DNA, 20 bp, Artificial Sequence
  Description of Artificial Sequence: Synthetic oligonucleotide
  Target: LAMA2; (+) strand; PAM type: YTN; PAM sequence: TTG
gagataatagtagtatatac

SEQ ID NO: 400857 - DNA, 20 bp, Artificial Sequence
  Description of Artificial Sequence: Synthetic oligonucleotide
  Target: LAMA2; (+) strand; PAM type: YTN; PAM sequence: TTA
ttgtaaggattaagtaaaac

SEQ ID NO: 400858 - DNA, 20 bp, Artificial Sequence
  Description of Artificial Sequence: Synthetic oligonucleotide
  Target: LAMA2; (+) strand; PAM type: YTN; PAM sequence: TTG
taaggattaagtaaaacaac

SEQ ID NO: 400859 - DNA, 20 bp, Artificial Sequence
  Description of Artificial Sequence: Synthetic oligonucleotide
  Target: LAMA2; (+) strand; PAM type: YTN; PAM sequence: TTA
agtaaaacaacccactgaaa

SEQ ID NO: 400860 - DNA, 20 bp, Artificial Sequence
  Description of Artificial Sequence: Synthetic oligonucleotide
  Target: LAMA2; (+) strand; PAM type: YTN; PAM sequence: CTG
aaactgaagaacactaaatg

SEQ ID NO: 400861 - DNA, 20 bp, Artificial Sequence
  Description of Artificial Sequence: Synthetic oligonucleotide
  Target: LAMA2; (+) strand; PAM type: YTN; PAM sequence: CTG
aagaacactaaatgcgtgta

SEQ ID NO: 400862 - DNA, 20 bp, Artificial Sequence
  Description of Artificial Sequence: Synthetic oligonucleotide
  Target: LAMA2; (+) strand; PAM type: YTN; PAM sequence: CTA
aatgcgtgtaacatacacat

SEQ ID NO: 400863 - DNA, 20 bp, Artificial Sequence
  Description of Artificial Sequence: Synthetic oligonucleotide
  Target: LAMA2; (+) strand; PAM type: YTN; PAM sequence: TTC
aatgcttgtcaggcattact

SEQ ID NO: 400864 - DNA, 20 bp, Artificial Sequence
  Description of Artificial Sequence: Synthetic oligonucleotide
  Target: LAMA2; (+) strand; PAM type: YTN; PAM sequence: CTT
gtcaggcattactcttacta

SEQ ID NO: 400865 - DNA, 20 bp, Artificial Sequence
  Description of Artificial Sequence: Synthetic oligonucleotide
  Target: LAMA2; (+) strand; PAM type: YTN; PAM sequence: TTG
tcaggcattactcttactaa

SEQ ID NO: 400866 - DNA, 20 bp, Artificial Sequence
  Description of Artificial Sequence: Synthetic oligonucleotide
  Target: LAMA2; (+) strand; PAM type: YTN; PAM sequence: TTA
ctcttactaaatacttgtcc

SEQ ID NO: 400867 - DNA, 20 bp, Artificial Sequence
  Description of Artificial Sequence: Synthetic oligonucleotide
  Target: LAMA2; (+) strand; PAM type: YTN; PAM sequence: CTC
ttactaaatacttgtccatc

SEQ ID NO: 400868 - DNA, 20 bp, Artificial Sequence
  Description of Artificial Sequence: Synthetic oligonucleotide
  Target: LAMA2; (+) strand; PAM type: YTN; PAM sequence: CTT
actaaatacttgtccatcct

SEQ ID NO: 400869 - DNA, 20 bp, Artificial Sequence
  Description of Artificial Sequence: Synthetic oligonucleotide
  Target: LAMA2; (+) strand; PAM type: YTN; PAM sequence: TTA
ctaaatacttgtccatccta

SEQ ID NO: 400870 - DNA, 20 bp, Artificial Sequence
  Description of Artificial Sequence: Synthetic oligonucleotide
  Target: LAMA2; (+) strand; PAM type: YTN; PAM sequence: CTA
aatacttgtccatcctatcc

SEQ ID NO: 400871 - DNA, 20 bp, Artificial Sequence
  Description of Artificial Sequence: Synthetic oligonucleotide
  Target: LAMA2; (+) strand; PAM type: YTN; PAM sequence: CTT
gtccatcctatccaggaggg

SEQ ID NO: 400872 - DNA, 20 bp, Artificial Sequence
  Description of Artificial Sequence: Synthetic oligonucleotide
  Target: LAMA2; (+) strand; PAM type: YTN; PAM sequence: TTG
tccatcctatccaggaggga

SEQ ID NO: 400873 - DNA, 20 bp, Artificial Sequence
  Description of Artificial Sequence: Synthetic oligonucleotide
  Target: LAMA2; (+) strand; PAM type: YTN; PAM sequence: CTA
tccaggagggactagaacaa

SEQ ID NO: 400874 - DNA, 20 bp, Artificial Sequence
  Description of Artificial Sequence: Synthetic oligonucleotide
  Target: LAMA2; (+) strand; PAM type: YTN; PAM sequence: CTA
gaacaacttctctttcttgg

SEQ ID NO: 400875 - DNA, 20 bp, Artificial Sequence
  Description of Artificial Sequence: Synthetic oligonucleotide
  Target: LAMA2; (+) strand; PAM type: YTN; PAM sequence: CTT
ctctttcttggtcctttctc

SEQ ID NO: 400876 - DNA, 20 bp, Artificial Sequence
  Description of Artificial Sequence: Synthetic oligonucleotide
  Target: LAMA2; (+) strand; PAM type: YTN; PAM sequence: TTC
tctttcttggtcctttctca

SEQ ID NO: 400877 - DNA, 20 bp, Artificial Sequence
  Description of Artificial Sequence: Synthetic oligonucleotide
  Target: LAMA2; (+) strand; PAM type: YTN; PAM sequence: CTC
tttcttggtcctttctcagt

SEQ ID NO: 400878 - DNA, 20 bp, Artificial Sequence
  Description of Artificial Sequence: Synthetic oligonucleotide
  Target: LAMA2; (+) strand; PAM type: YTN; PAM sequence: CTT
tcttggtcctttctcagtgg

SEQ ID NO: 400879 - DNA, 20 bp, Artificial Sequence
  Description of Artificial Sequence: Synthetic oligonucleotide
  Target: LAMA2; (+) strand; PAM type: YTN; PAM sequence: TTT
cttggtcctttctcagtggt

SEQ ID NO: 400880 - DNA, 20 bp, Artificial Sequence
  Description of Artificial Sequence: Synthetic oligonucleotide
  Target: LAMA2; (+) strand; PAM type: YTN; PAM sequence: TTC
ttggtcctttctcagtggtc

SEQ ID NO: 400881 - DNA, 20 bp, Artificial Sequence
  Description of Artificial Sequence: Synthetic oligonucleotide
  Target: LAMA2; (+) strand; PAM type: YTN; PAM sequence: CTT
ggtcctttctcagtggtcct

SEQ ID NO: 400882 - DNA, 20 bp, Artificial Sequence
  Description of Artificial Sequence: Synthetic oligonucleotide
  Target: LAMA2; (+) strand; PAM type: YTN; PAM sequence: TTG
gtcctttctcagtggtcctc

SEQ ID NO: 400883 - DNA, 20 bp, Artificial Sequence
  Description of Artificial Sequence: Synthetic oligonucleotide
  Target: LAMA2; (+) strand; PAM type: YTN; PAM sequence: CTT
tctcagtggtcctcctcact

SEQ ID NO: 400884 - DNA, 20 bp, Artificial Sequence
  Description of Artificial Sequence: Synthetic oligonucleotide
  Target: LAMA2; (+) strand; PAM type: YTN; PAM sequence: TTT
ctcagtggtcctcctcactt

SEQ ID NO: 400885 - DNA, 20 bp, Artificial Sequence
  Description of Artificial Sequence: Synthetic oligonucleotide
  Target: LAMA2; (+) strand; PAM type: YTN; PAM sequence: TTC
tcagtggtcctcctcacttg

SEQ ID NO: 400886 - DNA, 20 bp, Artificial Sequence
  Description of Artificial Sequence: Synthetic oligonucleotide
  Target: LAMA2; (+) strand; PAM type: YTN; PAM sequence: CTC
agtggtcctcctcacttggg

SEQ ID NO: 400887 - DNA, 20 bp, Artificial Sequence
  Description of Artificial Sequence: Synthetic oligonucleotide
  Target: LAMA2; (+) strand; PAM type: YTN; PAM sequence: CTC
ctcacttggggactctgtct

SEQ ID NO: 400888 - DNA, 20 bp, Artificial Sequence
  Description of Artificial Sequence: Synthetic oligonucleotide
  Target: LAMA2; (+) strand; PAM type: YTN; PAM sequence: CTC
acttggggactctgtcttgt

SEQ ID NO: 400889 - DNA, 20 bp, Artificial Sequence
  Description of Artificial Sequence: Synthetic oligonucleotide
  Target: LAMA2; (+) strand; PAM type: YTN; PAM sequence: CTT
ggggactctgtcttgtattt

SEQ ID NO: 400890 - DNA, 20 bp, Artificial Sequence
  Description of Artificial Sequence: Synthetic oligonucleotide
  Target: LAMA2; (+) strand; PAM type: YTN; PAM sequence: TTG
gggactctgtcttgtattta

SEQ ID NO: 400891 - DNA, 20 bp, Artificial Sequence
  Description of Artificial Sequence: Synthetic oligonucleotide
  Target: LAMA2; (+) strand; PAM type: YTN; PAM sequence: CTC
tgtcttgtatttacatgttg

SEQ ID NO: 400892 - DNA, 20 bp, Artificial Sequence
  Description of Artificial Sequence: Synthetic oligonucleotide
  Target: LAMA2; (+) strand; PAM type: YTN; PAM sequence: CTG
tcttgtatttacatgttgca

SEQ ID NO: 400893 - DNA, 20 bp, Artificial Sequence
  Description of Artificial Sequence: Synthetic oligonucleotide
  Target: LAMA2; (+) strand; PAM type: YTN; PAM sequence: CTT
gtatttacatgttgcatttc

SEQ ID NO: 400894 - DNA, 20 bp, Artificial Sequence
  Description of Artificial Sequence: Synthetic oligonucleotide
  Target: LAMA2; (+) strand; PAM type: YTN; PAM sequence: TTG
tatttacatgttgcatttct

SEQ ID NO: 400895 - DNA, 20 bp, Artificial Sequence
  Description of Artificial Sequence: Synthetic oligonucleotide
  Target: LAMA2; (+) strand; PAM type: YTN; PAM sequence: TTT
acatgttgcatttctgtgga

SEQ ID NO: 400896 - DNA, 20 bp, Artificial Sequence
  Description of Artificial Sequence: Synthetic oligonucleotide
  Target: LAMA2; (+) strand; PAM type: YTN; PAM sequence: TTA
catgttgcatttctgtggag

SEQ ID NO: 400897 - DNA, 20 bp, Artificial Sequence
  Description of Artificial Sequence: Synthetic oligonucleotide
  Target: LAMA2; (+) strand; PAM type: YTN; PAM sequence: TTG
catttctgtggagctaattt

SEQ ID NO: 400898 - DNA, 20 bp, Artificial Sequence
  Description of Artificial Sequence: Synthetic oligonucleotide
  Target: LAMA2; (+) strand; PAM type: YTN; PAM sequence: TTT
ctgtggagctaatttaaaca

SEQ ID NO: 400899 - DNA, 20 bp, Artificial Sequence
  Description of Artificial Sequence: Synthetic oligonucleotide
  Target: LAMA2; (+) strand; PAM type: YTN; PAM sequence: TTC
tgtggagctaatttaaacaa

SEQ ID NO: 400900 - DNA, 20 bp, Artificial Sequence
  Description of Artificial Sequence: Synthetic oligonucleotide
  Target: LAMA2; (+) strand; PAM type: YTN; PAM sequence: CTG
tggagctaatttaaacaatt

SEQ ID NO: 400901 - DNA, 20 bp, Artificial Sequence
  Description of Artificial Sequence: Synthetic oligonucleotide
  Target: LAMA2; (+) strand; PAM type: YTN; PAM sequence: CTA
atttaaacaattagtacgca

SEQ ID NO: 400902 - DNA, 20 bp, Artificial Sequence
  Description of Artificial Sequence: Synthetic oligonucleotide
  Target: LAMA2; (+) strand; PAM type: YTN; PAM sequence: TTT
aaacaattagtacgcatgtc

SEQ ID NO: 400903 - DNA, 20 bp, Artificial Sequence
  Description of Artificial Sequence: Synthetic oligonucleotide
  Target: LAMA2; (+) strand; PAM type: YTN; PAM sequence: TTA
aacaattagtacgcatgtcc

SEQ ID NO: 400904 - DNA, 20 bp, Artificial Sequence
  Description of Artificial Sequence: Synthetic oligonucleotide
  Target: LAMA2; (+) strand; PAM type: YTN; PAM sequence: TTA
gtacgcatgtcccaaaacaa

SEQ ID NO: 400905 - DNA, 20 bp, Artificial Sequence
  Description of Artificial Sequence: Synthetic oligonucleotide
  Target: LAMA2; (+) strand; PAM type: YTN; PAM sequence: TTT
ttatggcataagaaactatt

SEQ ID NO: 400906 - DNA, 20 bp, Artificial Sequence
  Description of Artificial Sequence: Synthetic oligonucleotide
  Target: LAMA2; (+) strand; PAM type: YTN; PAM sequence: TTT
tatggcataagaaactatta

SEQ ID NO: 400907 - DNA, 20 bp, Artificial Sequence
  Description of Artificial Sequence: Synthetic oligonucleotide
  Target: LAMA2; (+) strand; PAM type: YTN; PAM sequence: TTT
atggcataagaaactattaa

SEQ ID NO: 400908 - DNA, 20 bp, Artificial Sequence
  Description of Artificial Sequence: Synthetic oligonucleotide
  Target: LAMA2; (+) strand; PAM type: YTN; PAM sequence: TTA
tggcataagaaactattaaa

SEQ ID NO: 400909 - DNA, 20 bp, Artificial Sequence
  Description of Artificial Sequence: Synthetic oligonucleotide
  Target: LAMA2; (+) strand; PAM type: YTN; PAM sequence: CTA
ttaaaaatttacctaaaaaa

SEQ ID NO: 400910 - DNA, 20 bp, Artificial Sequence
  Description of Artificial Sequence: Synthetic oligonucleotide
  Target: LAMA2; (+) strand; PAM type: YTN; PAM sequence: TTA
aaaatttacctaaaaaatga

SEQ ID NO: 400911 - DNA, 20 bp, Artificial Sequence
  Description of Artificial Sequence: Synthetic oligonucleotide
  Target: LAMA2; (+) strand; PAM type: YTN; PAM sequence: TTT
acctaaaaaatgagctgttg

SEQ ID NO: 400912 - DNA, 20 bp, Artificial Sequence
  Description of Artificial Sequence: Synthetic oligonucleotide
  Target: LAMA2; (+) strand; PAM type: YTN; PAM sequence: TTA
cctaaaaaatgagctgttgt

SEQ ID NO: 400913 - DNA, 20 bp, Artificial Sequence
  Description of Artificial Sequence: Synthetic oligonucleotide
  Target: LAMA2; (+) strand; PAM type: YTN; PAM sequence: CTA
aaaaatgagctgttgtatcc

SEQ ID NO: 400914 - DNA, 20 bp, Artificial Sequence
  Description of Artificial Sequence: Synthetic oligonucleotide
  Target: LAMA2; (+) strand; PAM type: YTN; PAM sequence: CTG
ttgtatccagtcaagagagg

SEQ ID NO: 400915 - DNA, 20 bp, Artificial Sequence
  Description of Artificial Sequence: Synthetic oligonucleotide
  Target: LAMA2; (+) strand; PAM type: YTN; PAM sequence: TTG
tatccagtcaagagaggtaa

SEQ ID NO: 400916 - DNA, 20 bp, Artificial Sequence
  Description of Artificial Sequence: Synthetic oligonucleotide
  Target: LAMA2; (+) strand; PAM type: YTN; PAM sequence: TTG
tgggaagtataggatttttc

SEQ ID NO: 400917 - DNA, 20 bp, Artificial Sequence
  Description of Artificial Sequence: Synthetic oligonucleotide
  Target: LAMA2; (+) strand; PAM type: YTN; PAM sequence: TTT
ttcatattttgttttttcaa

SEQ ID NO: 400918 - DNA, 20 bp, Artificial Sequence
  Description of Artificial Sequence: Synthetic oligonucleotide
  Target: LAMA2; (+) strand; PAM type: YTN; PAM sequence: TTT
tcatattttgttttttcaat

SEQ ID NO: 400919 - DNA, 20 bp, Artificial Sequence
  Description of Artificial Sequence: Synthetic oligonucleotide
  Target: LAMA2; (+) strand; PAM type: YTN; PAM sequence: TTT
catattttgttttttcaatt

SEQ ID NO: 400920 - DNA, 20 bp, Artificial Sequence
  Description of Artificial Sequence: Synthetic oligonucleotide
  Target: LAMA2; (+) strand; PAM type: YTN; PAM sequence: TTC
atattttgttttttcaattt

SEQ ID NO: 400921 - DNA, 20 bp, Artificial Sequence
  Description of Artificial Sequence: Synthetic oligonucleotide
  Target: LAMA2; (+) strand; PAM type: YTN; PAM sequence: TTT
tgttttttcaatttgaattt

SEQ ID NO: 400922 - DNA, 20 bp, Artificial Sequence
  Description of Artificial Sequence: Synthetic oligonucleotide
  Target: LAMA2; (+) strand; PAM type: YTN; PAM sequence: TTT
gttttttcaatttgaatttt

SEQ ID NO: 400923 - DNA, 20 bp, Artificial Sequence
  Description of Artificial Sequence: Synthetic oligonucleotide
  Target: LAMA2; (+) strand; PAM type: YTN; PAM sequence: TTG
ttttttcaatttgaattttc

SEQ ID NO: 400924 - DNA, 20 bp, Artificial Sequence
  Description of Artificial Sequence: Synthetic oligonucleotide
  Target: LAMA2; (+) strand; PAM type: YTN; PAM sequence: TTT
tttcaatttgaattttcact

SEQ ID NO: 400925 - DNA, 20 bp, Artificial Sequence
  Description of Artificial Sequence: Synthetic oligonucleotide
  Target: LAMA2; (+) strand; PAM type: YTN; PAM sequence: TTT
ttcaatttgaattttcacta

SEQ ID NO: 400926 - DNA, 20 bp, Artificial Sequence
  Description of Artificial Sequence: Synthetic oligonucleotide
  Target: LAMA2; (+) strand; PAM type: YTN; PAM sequence: TTT
tcaatttgaattttcactaa

SEQ ID NO: 400927 - DNA, 20 bp, Artificial Sequence
  Description of Artificial Sequence: Synthetic oligonucleotide
  Target: LAMA2; (+) strand; PAM type: YTN; PAM sequence: TTT
caatttgaattttcactaat

SEQ ID NO: 400928 - DNA, 20 bp, Artificial Sequence
  Description of Artificial Sequence: Synthetic oligonucleotide
  Target: LAMA2; (+) strand; PAM type: YTN; PAM sequence: TTC
aatttgaattttcactaata

SEQ ID NO: 400929 - DNA, 20 bp, Artificial Sequence
  Description of Artificial Sequence: Synthetic oligonucleotide
  Target: LAMA2; (+) strand; PAM type: YTN; PAM sequence: TTT
gaattttcactaataaatga

SEQ ID NO: 400930 - DNA, 20 bp, Artificial Sequence
  Description of Artificial Sequence: Synthetic oligonucleotide
  Target: LAMA2; (+) strand; PAM type: YTN; PAM sequence: TTG
aattttcactaataaatgat

SEQ ID NO: 400931 - DNA, 20 bp, Artificial Sequence
  Description of Artificial Sequence: Synthetic oligonucleotide
  Target: LAMA2; (+) strand; PAM type: YTN; PAM sequence: TTT
tcactaataaatgatgtaag

SEQ ID NO: 400932 - DNA, 20 bp, Artificial Sequence
  Description of Artificial Sequence: Synthetic oligonucleotide
  Target: LAMA2; (+) strand; PAM type: YTN; PAM sequence: TTT
cactaataaatgatgtaaga

SEQ ID NO: 400933 - DNA, 20 bp, Artificial Sequence
  Description of Artificial Sequence: Synthetic oligonucleotide
  Target: LAMA2; (+) strand; PAM type: YTN; PAM sequence: TTC
actaataaatgatgtaagaa

SEQ ID NO: 400934 - DNA, 20 bp, Artificial Sequence
  Description of Artificial Sequence: Synthetic oligonucleotide
  Target: LAMA2; (+) strand; PAM type: YTN; PAM sequence: CTA
ataaatgatgtaagaaaaag

SEQ ID NO: 400935 - DNA, 20 bp, Artificial Sequence
  Description of Artificial Sequence: Synthetic oligonucleotide
  Target: LAMA2; (+) strand; PAM type: YTN; PAM sequence: CTC
catttcagtcttaagatata

SEQ ID NO: 400936 - DNA, 20 bp, Artificial Sequence
  Description of Artificial Sequence: Synthetic oligonucleotide
  Target: LAMA2; (+) strand; PAM type: YTN; PAM sequence: TTT
cagtcttaagatatatttgc

SEQ ID NO: 400937 - DNA, 20 bp, Artificial Sequence
  Description of Artificial Sequence: Synthetic oligonucleotide
  Target: LAMA2; (+) strand; PAM type: YTN; PAM sequence: TTC
agtcttaagatatatttgca

SEQ ID NO: 400938 - DNA, 20 bp, Artificial Sequence
  Description of Artificial Sequence: Synthetic oligonucleotide
  Target: LAMA2; (+) strand; PAM type: YTN; PAM sequence: CTT
aagatatatttgcagtttaa

SEQ ID NO: 400939 - DNA, 20 bp, Artificial Sequence
  Description of Artificial Sequence: Synthetic oligonucleotide
  Target: LAMA2; (+) strand; PAM type: YTN; PAM sequence: TTA
agatatatttgcagtttaat

SEQ ID NO: 400940 - DNA, 20 bp, Artificial Sequence
  Description of Artificial Sequence: Synthetic oligonucleotide
  Target: LAMA2; (+) strand; PAM type: YTN; PAM sequence: TTT
gcagtttaatgcatacctga

SEQ ID NO: 400941 - DNA, 20 bp, Artificial Sequence
  Description of Artificial Sequence: Synthetic oligonucleotide
  Target: LAMA2; (+) strand; PAM type: YTN; PAM sequence: TTG
cagtttaatgcatacctgag

SEQ ID NO: 400942 - DNA, 20 bp, Artificial Sequence
  Description of Artificial Sequence: Synthetic oligonucleotide
  Target: LAMA2; (+) strand; PAM type: YTN; PAM sequence: TTT
aatgcatacctgagtaagat

SEQ ID NO: 400943 - DNA, 20 bp, Artificial Sequence
  Description of Artificial Sequence: Synthetic oligonucleotide
  Target: LAMA2; (+) strand; PAM type: YTN; PAM sequence: TTA
atgcatacctgagtaagatt

SEQ ID NO: 400944 - DNA, 20 bp, Artificial Sequence
  Description of Artificial Sequence: Synthetic oligonucleotide
  Target: LAMA2; (+) strand; PAM type: YTN; PAM sequence: CTG
agtaagatttctaaacttat

SEQ ID NO: 400945 - DNA, 20 bp, Artificial Sequence
  Description of Artificial Sequence: Synthetic oligonucleotide
  Target: LAMA2; (+) strand; PAM type: YTN; PAM sequence: TTT
ctaaacttatatcaacagat

SEQ ID NO: 400946 - DNA, 20 bp, Artificial Sequence
  Description of Artificial Sequence: Synthetic oligonucleotide
  Target: LAMA2; (+) strand; PAM type: YTN; PAM sequence: TTC
taaacttatatcaacagatt

SEQ ID NO: 400947 - DNA, 20 bp, Artificial Sequence
  Description of Artificial Sequence: Synthetic oligonucleotide
  Target: LAMA2; (+) strand; PAM type: YTN; PAM sequence: CTA
aacttatatcaacagattgg

SEQ ID NO: 400948 - DNA, 20 bp, Artificial Sequence
  Description of Artificial Sequence: Synthetic oligonucleotide
  Target: LAMA2; (+) strand; PAM type: YTN; PAM sequence: CTT
atatcaacagattggatctt

SEQ ID NO: 400949 - DNA, 20 bp, Artificial Sequence
  Description of Artificial Sequence: Synthetic oligonucleotide
  Target: LAMA2; (+) strand; PAM type: YTN; PAM sequence: TTA
tatcaacagattggatcttt

SEQ ID NO: 400950 - DNA, 20 bp, Artificial Sequence
  Description of Artificial Sequence: Synthetic oligonucleotide
  Target: LAMA2; (+) strand; PAM type: YTN; PAM sequence: TTG
gatctttattttctttcccc

SEQ ID NO: 400951 - DNA, 20 bp, Artificial Sequence
  Description of Artificial Sequence: Synthetic oligonucleotide
  Target: LAMA2; (+) strand; PAM type: YTN; PAM sequence: CTT
tattttctttccccttaatg

SEQ ID NO: 400952 - DNA, 20 bp, Artificial Sequence
  Description of Artificial Sequence: Synthetic oligonucleotide
  Target: LAMA2; (+) strand; PAM type: YTN; PAM sequence: TTT
attttctttccccttaatga

SEQ ID NO: 400953 - DNA, 20 bp, Artificial Sequence
  Description of Artificial Sequence: Synthetic oligonucleotide
  Target: LAMA2; (+) strand; PAM type: YTN; PAM sequence: TTA
ttttctttccccttaatgat

SEQ ID NO: 400954 - DNA, 20 bp, Artificial Sequence
  Description of Artificial Sequence: Synthetic oligonucleotide
  Target: LAMA2; (+) strand; PAM type: YTN; PAM sequence: TTT
tctttccccttaatgatttc

SEQ ID NO: 400955 - DNA, 20 bp, Artificial Sequence
  Description of Artificial Sequence: Synthetic oligonucleotide
  Target: LAMA2; (+) strand; PAM type: YTN; PAM sequence: TTT
ctttccccttaatgatttca

SEQ ID NO: 400956 - DNA, 20 bp, Artificial Sequence
  Description of Artificial Sequence: Synthetic oligonucleotide
  Target: LAMA2; (+) strand; PAM type: YTN; PAM sequence: TTC
tttccccttaatgatttcaa

SEQ ID NO: 400957 - DNA, 20 bp, Artificial Sequence
  Description of Artificial Sequence: Synthetic oligonucleotide
  Target: LAMA2; (+) strand; PAM type: YTN; PAM sequence: CTT
tccccttaatgatttcaaat

SEQ ID NO: 400958 - DNA, 20 bp, Artificial Sequence
  Description of Artificial Sequence: Synthetic oligonucleotide
  Target: LAMA2; (+) strand; PAM type: YTN; PAM sequence: TTT
ccccttaatgatttcaaatt

SEQ ID NO: 400959 - DNA, 20 bp, Artificial Sequence
  Description of Artificial Sequence: Synthetic oligonucleotide
  Target: LAMA2; (+) strand; PAM type: YTN; PAM sequence: TTC
cccttaatgatttcaaattt

SEQ ID NO: 400960 - DNA, 20 bp, Artificial Sequence
  Description of Artificial Sequence: Synthetic oligonucleotide
  Target: LAMA2; (+) strand; PAM type: YTN; PAM sequence: CTT
aatgatttcaaattttactc

SEQ ID NO: 400961 - DNA, 20 bp, Artificial Sequence
  Description of Artificial Sequence: Synthetic oligonucleotide
  Target: LAMA2; (+) strand; PAM type: YTN; PAM sequence: TTA
atgatttcaaattttactct

SEQ ID NO: 400962 - DNA, 20 bp, Artificial Sequence
  Description of Artificial Sequence: Synthetic oligonucleotide
  Target: LAMA2; (+) strand; PAM type: YTN; PAM sequence: TTT
caaattttactctttatatt

SEQ ID NO: 400963 - DNA, 20 bp, Artificial Sequence
  Description of Artificial Sequence: Synthetic oligonucleotide
  Target: LAMA2; (+) strand; PAM type: YTN; PAM sequence: TTC
aaattttactctttatattg

SEQ ID NO: 400964 - DNA, 20 bp, Artificial Sequence
  Description of Artificial Sequence: Synthetic oligonucleotide
  Target: LAMA2; (+) strand; PAM type: YTN; PAM sequence: TTT
tactctttatattgttgtac

SEQ ID NO: 400965 - DNA, 20 bp, Artificial Sequence
  Description of Artificial Sequence: Synthetic oligonucleotide
  Target: LAMA2; (+) strand; PAM type: YTN; PAM sequence: TTT
actctttatattgttgtact

SEQ ID NO: 400966 - DNA, 20 bp, Artificial Sequence
  Description of Artificial Sequence: Synthetic oligonucleotide
  Target: LAMA2; (+) strand; PAM type: YTN; PAM sequence: TTA
ctctttatattgttgtactc

SEQ ID NO: 400967 - DNA, 20 bp, Artificial Sequence
  Description of Artificial Sequence: Synthetic oligonucleotide
  Target: LAMA2; (+) strand; PAM type: YTN; PAM sequence: CTC
tttatattgttgtactcgaa

SEQ ID NO: 400968 - DNA, 20 bp, Artificial Sequence
  Description of Artificial Sequence: Synthetic oligonucleotide
  Target: LAMA2; (+) strand; PAM type: YTN; PAM sequence: CTT
tatattgttgtactcgaatt

SEQ ID NO: 400969 - DNA, 20 bp, Artificial Sequence
  Description of Artificial Sequence: Synthetic oligonucleotide
  Target: LAMA2; (+) strand; PAM type: YTN; PAM sequence: TTT
atattgttgtactcgaattt

SEQ ID NO: 400970 - DNA, 20 bp, Artificial Sequence
  Description of Artificial Sequence: Synthetic oligonucleotide
  Target: LAMA2; (+) strand; PAM type: YTN; PAM sequence: TTA
tattgttgtactcgaattta

SEQ ID NO: 400971 - DNA, 20 bp, Artificial Sequence
  Description of Artificial Sequence: Synthetic oligonucleotide
  Target: LAMA2; (+) strand; PAM type: YTN; PAM sequence: TTG
ttgtactcgaatttaaactg

SEQ ID NO: 400972 - DNA, 20 bp, Artificial Sequence
  Description of Artificial Sequence: Synthetic oligonucleotide
  Target: LAMA2; (+) strand; PAM type: YTN; PAM sequence: TTG
tactcgaatttaaactgctt

SEQ ID NO: 400973 - DNA, 20 bp, Artificial Sequence
  Description of Artificial Sequence: Synthetic oligonucleotide
  Target: LAMA2; (+) strand; PAM type: YTN; PAM sequence: CTC
gaatttaaactgcttagtta

SEQ ID NO: 400974 - DNA, 20 bp, Artificial Sequence
  Description of Artificial Sequence: Synthetic oligonucleotide
  Target: LAMA2; (+) strand; PAM type: YTN; PAM sequence: TTT
aaactgcttagttactatta

SEQ ID NO: 400975 - DNA, 20 bp, Artificial Sequence
  Description of Artificial Sequence: Synthetic oligonucleotide
  Target: LAMA2; (+) strand; PAM type: YTN; PAM sequence: TTA
aactgcttagttactattac

SEQ ID NO: 400976 - DNA, 20 bp, Artificial Sequence
  Description of Artificial Sequence: Synthetic oligonucleotide
  Target: LAMA2; (+) strand; PAM type: YTN; PAM sequence: CTG
cttagttactattacaatat

SEQ ID NO: 400977 - DNA, 20 bp, Artificial Sequence
  Description of Artificial Sequence: Synthetic oligonucleotide
  Target: LAMA2; (+) strand; PAM type: YTN; PAM sequence: CTT
agttactattacaatataaa

SEQ ID NO: 400978 - DNA, 20 bp, Artificial Sequence
  Description of Artificial Sequence: Synthetic oligonucleotide
  Target: LAMA2; (+) strand; PAM type: YTN; PAM sequence: TTA
gttactattacaatataaat

SEQ ID NO: 400979 - DNA, 20 bp, Artificial Sequence
  Description of Artificial Sequence: Synthetic oligonucleotide
  Target: LAMA2; (+) strand; PAM type: YTN; PAM sequence: TTA
ctattacaatataaattaat

SEQ ID NO: 400980 - DNA, 20 bp, Artificial Sequence
  Description of Artificial Sequence: Synthetic oligonucleotide
  Target: LAMA2; (+) strand; PAM type: YTN; PAM sequence: CTA
ttacaatataaattaatcta

SEQ ID NO: 400981 - DNA, 20 bp, Artificial Sequence
  Description of Artificial Sequence: Synthetic oligonucleotide
  Target: LAMA2; (+) strand; PAM type: YTN; PAM sequence: TTA
caatataaattaatctaaag

SEQ ID NO: 400982 - DNA, 20 bp, Artificial Sequence
  Description of Artificial Sequence: Synthetic oligonucleotide
  Target: LAMA2; (+) strand; PAM type: YTN; PAM sequence: TTA
atctaaagtttagagaatat

SEQ ID NO: 400983 - DNA, 20 bp, Artificial Sequence
  Description of Artificial Sequence: Synthetic oligonucleotide
  Target: LAMA2; (+) strand; PAM type: YTN; PAM sequence: CTA
aagtttagagaatattaaaa

SEQ ID NO: 400984 - DNA, 20 bp, Artificial Sequence
  Description of Artificial Sequence: Synthetic oligonucleotide
  Target: LAMA2; (+) strand; PAM type: YTN; PAM sequence: TTT
agagaatattaaaaactagt

SEQ ID NO: 400985 - DNA, 20 bp, Artificial Sequence
  Description of Artificial Sequence: Synthetic oligonucleotide
  Target: LAMA2; (+) strand; PAM type: YTN; PAM sequence: TTA
gagaatattaaaaactagtg

SEQ ID NO: 400986 - DNA, 20 bp, Artificial Sequence
  Description of Artificial Sequence: Synthetic oligonucleotide
  Target: LAMA2; (+) strand; PAM type: YTN; PAM sequence: TTA
aaaactagtggaaagcagct

SEQ ID NO: 400987 - DNA, 20 bp, Artificial Sequence
  Description of Artificial Sequence: Synthetic oligonucleotide
  Target: LAMA2; (+) strand; PAM type: YTN; PAM sequence: CTA
gtggaaagcagctagaaaac

SEQ ID NO: 400988 - DNA, 20 bp, Artificial Sequence
  Description of Artificial Sequence: Synthetic oligonucleotide
  Target: LAMA2; (+) strand; PAM type: YTN; PAM sequence: CTA
gaaaacttatatatgtaata

SEQ ID NO: 400989 - DNA, 20 bp, Artificial Sequence
  Description of Artificial Sequence: Synthetic oligonucleotide
  Target: LAMA2; (+) strand; PAM type: YTN; PAM sequence: CTT
atatatgtaatattaaatta

SEQ ID NO: 400990 - DNA, 20 bp, Artificial Sequence
  Description of Artificial Sequence: Synthetic oligonucleotide
  Target: LAMA2; (+) strand; PAM type: YTN; PAM sequence: TTA
tatatgtaatattaaattat

SEQ ID NO: 400991 - DNA, 20 bp, Artificial Sequence
  Description of Artificial Sequence: Synthetic oligonucleotide
  Target: LAMA2; (+) strand; PAM type: YTN; PAM sequence: TTA
aattatctctagcaaatggc

SEQ ID NO: 400992 - DNA, 20 bp, Artificial Sequence
  Description of Artificial Sequence: Synthetic oligonucleotide
  Target: LAMA2; (+) strand; PAM type: YTN; PAM sequence: TTA
tctctagcaaatggcatttt

SEQ ID NO: 400993 - DNA, 20 bp, Artificial Sequence
  Description of Artificial Sequence: Synthetic oligonucleotide
  Target: LAMA2; (+) strand; PAM type: YTN; PAM sequence: CTC
tagcaaatggcatttttgaa

SEQ ID NO: 400994 - DNA, 20 bp, Artificial Sequence
  Description of Artificial Sequence: Synthetic oligonucleotide
  Target: LAMA2; (+) strand; PAM type: YTN; PAM sequence: CTA
gcaaatggcatttttgaata

SEQ ID NO: 400995 - DNA, 20 bp, Artificial Sequence
  Description of Artificial Sequence: Synthetic oligonucleotide
  Target: LAMA2; (+) strand; PAM type: YTN; PAM sequence: TTT
ttgaatattaaagataacat

SEQ ID NO: 400996 - DNA, 20 bp, Artificial Sequence
  Description of Artificial Sequence: Synthetic oligonucleotide
  Target: LAMA2; (+) strand; PAM type: YTN; PAM sequence: TTT
tgaatattaaagataacatt

SEQ ID NO: 400997 - DNA, 20 bp, Artificial Sequence
  Description of Artificial Sequence: Synthetic oligonucleotide
  Target: LAMA2; (+) strand; PAM type: YTN; PAM sequence: TTT
gaatattaaagataacattg

SEQ ID NO: 400998 - DNA, 20 bp, Artificial Sequence
  Description of Artificial Sequence: Synthetic oligonucleotide
  Target: LAMA2; (+) strand; PAM type: YTN; PAM sequence: TTG
aatattaaagataacattgc

SEQ ID NO: 400999 - DNA, 20 bp, Artificial Sequence
  Description of Artificial Sequence: Synthetic oligonucleotide
  Target: LAMA2; (+) strand; PAM type: YTN; PAM sequence: TTA
aagataacattgctaaagta

SEQ ID NO: 401000 - DNA, 20 bp, Artificial Sequence
  Description of Artificial Sequence: Synthetic oligonucleotide
  Target: LAMA2; (+) strand; PAM type: YTN; PAM sequence: TTG
ctaaagtatcaagagaaaaa

SEQ ID NO: 401001 - DNA, 20 bp, Artificial Sequence
  Description of Artificial Sequence: Synthetic oligonucleotide
  Target: LAMA2; (+) strand; PAM type: YTN; PAM sequence: CTA
aagtatcaagagaaaaaaac

SEQ ID NO: 401002 - DNA, 20 bp, Artificial Sequence
  Description of Artificial Sequence: Synthetic oligonucleotide
  Target: LAMA2; (+) strand; PAM type: YTN; PAM sequence: CTA
tataaaatttattggaccca

SEQ ID NO: 401003 - DNA, 20 bp, Artificial Sequence
  Description of Artificial Sequence: Synthetic oligonucleotide
  Target: LAMA2; (+) strand; PAM type: YTN; PAM sequence: TTT
attggacccaatttgtaaaa

SEQ ID NO: 401004 - DNA, 20 bp, Artificial Sequence
  Description of Artificial Sequence: Synthetic oligonucleotide
  Target: LAMA2; (+) strand; PAM type: YTN; PAM sequence: TTA
ttggacccaatttgtaaaaa

SEQ ID NO: 401005 - DNA, 20 bp, Artificial Sequence
  Description of Artificial Sequence: Synthetic oligonucleotide
  Target: LAMA2; (+) strand; PAM type: YTN; PAM sequence: TTG
gacccaatttgtaaaaatat

SEQ ID NO: 401006 - DNA, 20 bp, Artificial Sequence
  Description of Artificial Sequence: Synthetic oligonucleotide
  Target: LAMA2; (+) strand; PAM type: YTN; PAM sequence: TTT
gtaaaaatattgttttcttt

SEQ ID NO: 401007 - DNA, 20 bp, Artificial Sequence
  Description of Artificial Sequence: Synthetic oligonucleotide
  Target: LAMA2; (+) strand; PAM type: YTN; PAM sequence: TTG
taaaaatattgttttcttta

SEQ ID NO: 401008 - DNA, 20 bp, Artificial Sequence
  Description of Artificial Sequence: Synthetic oligonucleotide
  Target: LAMA2; (+) strand; PAM type: YTN; PAM sequence: TTG
ttttctttatgagaaaaatg

SEQ ID NO: 401009 - DNA, 20 bp, Artificial Sequence
  Description of Artificial Sequence: Synthetic oligonucleotide
  Target: LAMA2; (+) strand; PAM type: YTN; PAM sequence: TTT
tctttatgagaaaaatgact

SEQ ID NO: 401010 - DNA, 20 bp, Artificial Sequence
  Description of Artificial Sequence: Synthetic oligonucleotide
  Target: LAMA2; (+) strand; PAM type: YTN; PAM sequence: TTT
ctttatgagaaaaatgacta

SEQ ID NO: 401011 - DNA, 20 bp, Artificial Sequence
  Description of Artificial Sequence: Synthetic oligonucleotide
  Target: LAMA2; (+) strand; PAM type: YTN; PAM sequence: TTC
tttatgagaaaaatgactat

SEQ ID NO: 401012 - DNA, 20 bp, Artificial Sequence
  Description of Artificial Sequence: Synthetic oligonucleotide
  Target: LAMA2; (+) strand; PAM type: YTN; PAM sequence: CTT
tatgagaaaaatgactatta

SEQ ID NO: 401013 - DNA, 20 bp, Artificial Sequence
  Description of Artificial Sequence: Synthetic oligonucleotide
  Target: LAMA2; (+) strand; PAM type: YTN; PAM sequence: TTT
atgagaaaaatgactattat

SEQ ID NO: 401014 - DNA, 20 bp, Artificial Sequence
  Description of Artificial Sequence: Synthetic oligonucleotide
  Target: LAMA2; (+) strand; PAM type: YTN; PAM sequence: TTA
tgagaaaaatgactattatc

SEQ ID NO: 401015 - DNA, 20 bp, Artificial Sequence
  Description of Artificial Sequence: Synthetic oligonucleotide
  Target: LAMA2; (+) strand; PAM type: YTN; PAM sequence: CTA
ttatcagatatgtgctaaat

SEQ ID NO: 401016 - DNA, 20 bp, Artificial Sequence
  Description of Artificial Sequence: Synthetic oligonucleotide
  Target: LAMA2; (+) strand; PAM type: YTN; PAM sequence: TTA
tcagatatgtgctaaatgtt

SEQ ID NO: 401017 - DNA, 20 bp, Artificial Sequence
  Description of Artificial Sequence: Synthetic oligonucleotide
  Target: LAMA2; (+) strand; PAM type: YTN; PAM sequence: CTA
aatgttgtttttccatttct

SEQ ID NO: 401018 - DNA, 20 bp, Artificial Sequence
  Description of Artificial Sequence: Synthetic oligonucleotide
  Target: LAMA2; (+) strand; PAM type: YTN; PAM sequence: TTG
tttttccatttctttaatgt

SEQ ID NO: 401019 - DNA, 20 bp, Artificial Sequence
  Description of Artificial Sequence: Synthetic oligonucleotide
  Target: LAMA2; (+) strand; PAM type: YTN; PAM sequence: TTT
ttccatttctttaatgtgta

SEQ ID NO: 401020 - DNA, 20 bp, Artificial Sequence
  Description of Artificial Sequence: Synthetic oligonucleotide
  Target: LAMA2; (+) strand; PAM type: YTN; PAM sequence: TTT
tccatttctttaatgtgtat

SEQ ID NO: 401021 - DNA, 20 bp, Artificial Sequence
  Description of Artificial Sequence: Synthetic oligonucleotide
  Target: LAMA2; (+) strand; PAM type: YTN; PAM sequence: TTT
ccatttctttaatgtgtatt

SEQ ID NO: 401022 - DNA, 20 bp, Artificial Sequence
  Description of Artificial Sequence: Synthetic oligonucleotide
  Target: LAMA2; (+) strand; PAM type: YTN; PAM sequence: TTC
catttctttaatgtgtattt

SEQ ID NO: 401023 - DNA, 20 bp, Artificial Sequence
  Description of Artificial Sequence: Synthetic oligonucleotide
  Target: LAMA2; (+) strand; PAM type: YTN; PAM sequence: TTT
ctttaatgtgtatttttgtc

SEQ ID NO: 401024 - DNA, 20 bp, Artificial Sequence
  Description of Artificial Sequence: Synthetic oligonucleotide
  Target: LAMA2; (+) strand; PAM type: YTN; PAM sequence: TTC
tttaatgtgtatttttgtcc

SEQ ID NO: 401025 - DNA, 20 bp, Artificial Sequence
  Description of Artificial Sequence: Synthetic oligonucleotide
  Target: LAMA2; (+) strand; PAM type: YTN; PAM sequence: CTT
taatgtgtatttttgtccaa

SEQ ID NO: 401026 - DNA, 20 bp, Artificial Sequence
  Description of Artificial Sequence: Synthetic oligonucleotide
  Target: LAMA2; (+) strand; PAM type: YTN; PAM sequence: TTT
aatgtgtatttttgtccaaa

SEQ ID NO: 401027 - DNA, 20 bp, Artificial Sequence
  Description of Artificial Sequence: Synthetic oligonucleotide
  Target: LAMA2; (+) strand; PAM type: YTN; PAM sequence: TTA
atgtgtatttttgtccaaat

SEQ ID NO: 401028 - DNA, 20 bp, Artificial Sequence
  Description of Artificial Sequence: Synthetic oligonucleotide
  Target: LAMA2; (+) strand; PAM type: YTN; PAM sequence: TTT
ttgtccaaataaatattaac

SEQ ID NO: 401029 - DNA, 20 bp, Artificial Sequence
  Description of Artificial Sequence: Synthetic oligonucleotide
  Target: LAMA2; (+) strand; PAM type: YTN; PAM sequence: TTT
tgtccaaataaatattaaca

SEQ ID NO: 401030 - DNA, 20 bp, Artificial Sequence
  Description of Artificial Sequence: Synthetic oligonucleotide
  Target: LAMA2; (+) strand; PAM type: YTN; PAM sequence: TTT
gtccaaataaatattaacaa

SEQ ID NO: 401031 - DNA, 20 bp, Artificial Sequence
  Description of Artificial Sequence: Synthetic oligonucleotide
  Target: LAMA2; (+) strand; PAM type: YTN; PAM sequence: TTG
tccaaataaatattaacaaa

SEQ ID NO: 401032 - DNA, 20 bp, Artificial Sequence
  Description of Artificial Sequence: Synthetic oligonucleotide
  Target: LAMA2; (+) strand; PAM type: YTN; PAM sequence: TTA
acaaatattattatactgaa

SEQ ID NO: 401033 - DNA, 20 bp, Artificial Sequence
  Description of Artificial Sequence: Synthetic oligonucleotide
  Target: LAMA2; (+) strand; PAM type: YTN; PAM sequence: TTA
ttatactgaagttggaggat

SEQ ID NO: 401034 - DNA, 20 bp, Artificial Sequence
  Description of Artificial Sequence: Synthetic oligonucleotide
  Target: LAMA2; (+) strand; PAM type: YTN; PAM sequence: TTA
tactgaagttggaggattct

SEQ ID NO: 401035 - DNA, 20 bp, Artificial Sequence
  Description of Artificial Sequence: Synthetic oligonucleotide
  Target: LAMA2; (+) strand; PAM type: YTN; PAM sequence: CTG
aagttggaggattctgctaa

SEQ ID NO: 401036 - DNA, 20 bp, Artificial Sequence
  Description of Artificial Sequence: Synthetic oligonucleotide
  Target: LAMA2; (+) strand; PAM type: YTN; PAM sequence: TTG
gaggattctgctaaacaatc

SEQ ID NO: 401037 - DNA, 20 bp, Artificial Sequence
  Description of Artificial Sequence: Synthetic oligonucleotide
  Target: LAMA2; (+) strand; PAM type: YTN; PAM sequence: TTC
tgctaaacaatcatatctga

SEQ ID NO: 401038 - DNA, 20 bp, Artificial Sequence
  Description of Artificial Sequence: Synthetic oligonucleotide
  Target: LAMA2; (+) strand; PAM type: YTN; PAM sequence: CTG
ctaaacaatcatatctgaga

SEQ ID NO: 401039 - DNA, 20 bp, Artificial Sequence
  Description of Artificial Sequence: Synthetic oligonucleotide
  Target: LAMA2; (+) strand; PAM type: YTN; PAM sequence: CTA
aacaatcatatctgagattt

SEQ ID NO: 401040 - DNA, 20 bp, Artificial Sequence
  Description of Artificial Sequence: Synthetic oligonucleotide
  Target: LAMA2; (+) strand; PAM type: YTN; PAM sequence: CTG
agattttgaaaatctaatcc

SEQ ID NO: 401041 - DNA, 20 bp, Artificial Sequence
  Description of Artificial Sequence: Synthetic oligonucleotide
  Target: LAMA2; (+) strand; PAM type: YTN; PAM sequence: TTT
tgaaaatctaatccaatgat

SEQ ID NO: 401042 - DNA, 20 bp, Artificial Sequence
  Description of Artificial Sequence: Synthetic oligonucleotide
  Target: LAMA2; (+) strand; PAM type: YTN; PAM sequence: TTT
gaaaatctaatccaatgatt

SEQ ID NO: 401043 - DNA, 20 bp, Artificial Sequence
  Description of Artificial Sequence: Synthetic oligonucleotide
  Target: LAMA2; (+) strand; PAM type: YTN; PAM sequence: TTG
aaaatctaatccaatgattc

SEQ ID NO: 401044 - DNA, 20 bp, Artificial Sequence
  Description of Artificial Sequence: Synthetic oligonucleotide
  Target: LAMA2; (+) strand; PAM type: YTN; PAM sequence: CTA
atccaatgattcattttggt

SEQ ID NO: 401045 - DNA, 20 bp, Artificial Sequence
  Description of Artificial Sequence: Synthetic oligonucleotide
  Target: LAMA2; (+) strand; PAM type: YTN; PAM sequence: TTC
attttggtaataaaagtttt

SEQ ID NO: 401046 - DNA, 20 bp, Artificial Sequence
  Description of Artificial Sequence: Synthetic oligonucleotide
  Target: LAMA2; (+) strand; PAM type: YTN; PAM sequence: TTT
tggtaataaaagtttttaaa

SEQ ID NO: 401047 - DNA, 20 bp, Artificial Sequence
  Description of Artificial Sequence: Synthetic oligonucleotide
  Target: LAMA2; (+) strand; PAM type: YTN; PAM sequence: TTT
ggtaataaaagtttttaaat

SEQ ID NO: 401048 - DNA, 20 bp, Artificial Sequence
  Description of Artificial Sequence: Synthetic oligonucleotide
  Target: LAMA2; (+) strand; PAM type: YTN; PAM sequence: TTG
gtaataaaagtttttaaata

SEQ ID NO: 401049 - DNA, 20 bp, Artificial Sequence
  Description of Artificial Sequence: Synthetic oligonucleotide
  Target: LAMA2; (+) strand; PAM type: YTN; PAM sequence: TTT
ttaaataagtggaatcaatg

SEQ ID NO: 401050 - DNA, 20 bp, Artificial Sequence
  Description of Artificial Sequence: Synthetic oligonucleotide
  Target: LAMA2; (+) strand; PAM type: YTN; PAM sequence: TTT
taaataagtggaatcaatgg

SEQ ID NO: 401051 - DNA, 20 bp, Artificial Sequence
  Description of Artificial Sequence: Synthetic oligonucleotide
  Target: LAMA2; (+) strand; PAM type: YTN; PAM sequence: TTT
aaataagtggaatcaatggg

SEQ ID NO: 401052 - DNA, 20 bp, Artificial Sequence
  Description of Artificial Sequence: Synthetic oligonucleotide
  Target: LAMA2; (+) strand; PAM type: YTN; PAM sequence: TTA
aataagtggaatcaatggga

SEQ ID NO: 401053 - DNA, 20 bp, Artificial Sequence
  Description of Artificial Sequence: Synthetic oligonucleotide
  Target: LAMA2; (+) strand; PAM type: YTN; PAM sequence: TTA
caaatggaataaaagactaa

SEQ ID NO: 401054 - DNA, 20 bp, Artificial Sequence
  Description of Artificial Sequence: Synthetic oligonucleotide
  Target: LAMA2; (+) strand; PAM type: YTN; PAM sequence: CTA
attctttggaggtttcttct

SEQ ID NO: 401055 - DNA, 20 bp, Artificial Sequence
  Description of Artificial Sequence: Synthetic oligonucleotide
  Target: LAMA2; (+) strand; PAM type: YTN; PAM sequence: TTC
tttggaggtttcttctctat

SEQ ID NO: 401056 - DNA, 20 bp, Artificial Sequence
  Description of Artificial Sequence: Synthetic oligonucleotide
  Target: LAMA2; (+) strand; PAM type: YTN; PAM sequence: CTT
tggaggtttcttctctatag

SEQ ID NO: 401057 - DNA, 20 bp, Artificial Sequence
  Description of Artificial Sequence: Synthetic oligonucleotide
  Target: LAMA2; (+) strand; PAM type: YTN; PAM sequence: TTT
ggaggtttcttctctatagg

SEQ ID NO: 401058 - DNA, 20 bp, Artificial Sequence
  Description of Artificial Sequence: Synthetic oligonucleotide
  Target: LAMA2; (+) strand; PAM type: YTN; PAM sequence: TTG
gaggtttcttctctatagga

SEQ ID NO: 401059 - DNA, 20 bp, Artificial Sequence
  Description of Artificial Sequence: Synthetic oligonucleotide
  Target: LAMA2; (+) strand; PAM type: YTN; PAM sequence: TTT
cttctctataggaagatatc

SEQ ID NO: 401060 - DNA, 20 bp, Artificial Sequence
  Description of Artificial Sequence: Synthetic oligonucleotide
  Target: LAMA2; (+) strand; PAM type: YTN; PAM sequence: TTC
ttctctataggaagatatca

SEQ ID NO: 401061 - DNA, 20 bp, Artificial Sequence
  Description of Artificial Sequence: Synthetic oligonucleotide
  Target: LAMA2; (+) strand; PAM type: YTN; PAM sequence: CTT
ctctataggaagatatcaaa

SEQ ID NO: 401062 - DNA, 20 bp, Artificial Sequence
  Description of Artificial Sequence: Synthetic oligonucleotide
  Target: LAMA2; (+) strand; PAM type: YTN; PAM sequence: TTC
tctataggaagatatcaaat

SEQ ID NO: 401063 - DNA, 20 bp, Artificial Sequence
  Description of Artificial Sequence: Synthetic oligonucleotide
  Target: LAMA2; (+) strand; PAM type: YTN; PAM sequence: CTC
tataggaagatatcaaatta

SEQ ID NO: 401064 - DNA, 20 bp, Artificial Sequence
  Description of Artificial Sequence: Synthetic oligonucleotide
  Target: LAMA2; (+) strand; PAM type: YTN; PAM sequence: CTA
taggaagatatcaaattaag

SEQ ID NO: 401065 - DNA, 20 bp, Artificial Sequence
  Description of Artificial Sequence: Synthetic oligonucleotide
  Target: LAMA2; (+) strand; PAM type: YTN; PAM sequence: TTA
agtcagataaagatcagata

SEQ ID NO: 401066 - DNA, 20 bp, Artificial Sequence
  Description of Artificial Sequence: Synthetic oligonucleotide
  Target: LAMA2; (+) strand; PAM type: YTN; PAM sequence: TTG
ttcaacatgtagaagcatcc

SEQ ID NO: 401067 - DNA, 20 bp, Artificial Sequence
  Description of Artificial Sequence: Synthetic oligonucleotide
  Target: LAMA2; (+) strand; PAM type: YTN; PAM sequence: TTC
aacatgtagaagcatccaat

SEQ ID NO: 401068 - DNA, 20 bp, Artificial Sequence
  Description of Artificial Sequence: Synthetic oligonucleotide
  Target: LAMA2; (+) strand; PAM type: YTN; PAM sequence: TTC
aatgataataaaaacacata

SEQ ID NO: 401069 - DNA, 20 bp, Artificial Sequence
  Description of Artificial Sequence: Synthetic oligonucleotide
  Target: LAMA2; (+) strand; PAM type: YTN; PAM sequence: TTT
ttaaaatatgattggaaata

SEQ ID NO: 401070 - DNA, 20 bp, Artificial Sequence
  Description of Artificial Sequence: Synthetic oligonucleotide
  Target: LAMA2; (+) strand; PAM type: YTN; PAM sequence: TTT
taaaatatgattggaaatat

SEQ ID NO: 401071 - DNA, 20 bp, Artificial Sequence
  Description of Artificial Sequence: Synthetic oligonucleotide
  Target: LAMA2; (+) strand; PAM type: YTN; PAM sequence: TTT
aaaatatgattggaaatata

SEQ ID NO: 401072 - DNA, 20 bp, Artificial Sequence
  Description of Artificial Sequence: Synthetic oligonucleotide
  Target: LAMA2; (+) strand; PAM type: YTN; PAM sequence: TTA
aaatatgattggaaatatat

SEQ ID NO: 401073 - DNA, 20 bp, Artificial Sequence
  Description of Artificial Sequence: Synthetic oligonucleotide
  Target: LAMA2; (+) strand; PAM type: YTN; PAM sequence: TTG
gaaatatatttatgtataga

SEQ ID NO: 401074 - DNA, 20 bp, Artificial Sequence
  Description of Artificial Sequence: Synthetic oligonucleotide
  Target: LAMA2; (+) strand; PAM type: YTN; PAM sequence: TTT
atgtatagatgccaataaat

SEQ ID NO: 401075 - DNA, 20 bp, Artificial Sequence
  Description of Artificial Sequence: Synthetic oligonucleotide
  Target: LAMA2; (+) strand; PAM type: YTN; PAM sequence: TTA
tgtatagatgccaataaatt

SEQ ID NO: 401076 - DNA, 20 bp, Artificial Sequence
  Description of Artificial Sequence: Synthetic oligonucleotide
  Target: LAMA2; (+) strand; PAM type: YTN; PAM sequence: TTA
aatacattttcttgctttta

SEQ ID NO: 401077 - DNA, 20 bp, Artificial Sequence
  Description of Artificial Sequence: Synthetic oligonucleotide
  Target: LAMA2; (+) strand; PAM type: YTN; PAM sequence: TTT
tcttgcttttaattaatttt

SEQ ID NO: 401078 - DNA, 20 bp, Artificial Sequence
  Description of Artificial Sequence: Synthetic oligonucleotide
  Target: LAMA2; (+) strand; PAM type: YTN; PAM sequence: TTT
cttgcttttaattaatttta

SEQ ID NO: 401079 - DNA, 20 bp, Artificial Sequence
  Description of Artificial Sequence: Synthetic oligonucleotide
  Target: LAMA2; (+) strand; PAM type: YTN; PAM sequence: TTC
ttgcttttaattaattttat

SEQ ID NO: 401080 - DNA, 20 bp, Artificial Sequence
  Description of Artificial Sequence: Synthetic oligonucleotide
  Target: LAMA2; (+) strand; PAM type: YTN; PAM sequence: CTT
gcttttaattaattttatat

SEQ ID NO: 401081 - DNA, 20 bp, Artificial Sequence
  Description of Artificial Sequence: Synthetic oligonucleotide
  Target: LAMA2; (+) strand; PAM type: YTN; PAM sequence: TTG
cttttaattaattttatatt

SEQ ID NO: 401082 - DNA, 20 bp, Artificial Sequence
  Description of Artificial Sequence: Synthetic oligonucleotide
  Target: LAMA2; (+) strand; PAM type: YTN; PAM sequence: CTT
ttaattaattttatattaaa

SEQ ID NO: 401083 - DNA, 20 bp, Artificial Sequence
  Description of Artificial Sequence: Synthetic oligonucleotide
  Target: LAMA2; (+) strand; PAM type: YTN; PAM sequence: TTT
taattaattttatattaaaa

SEQ ID NO: 401084 - DNA, 20 bp, Artificial Sequence
  Description of Artificial Sequence: Synthetic oligonucleotide
  Target: LAMA2; (+) strand; PAM type: YTN; PAM sequence: TTT
aattaattttatattaaaat

SEQ ID NO: 401085 - DNA, 20 bp, Artificial Sequence
  Description of Artificial Sequence: Synthetic oligonucleotide
  Target: LAMA2; (+) strand; PAM type: YTN; PAM sequence: TTA
attaattttatattaaaata

SEQ ID NO: 401086 - DNA, 20 bp, Artificial Sequence
  Description of Artificial Sequence: Synthetic oligonucleotide
  Target: LAMA2; (+) strand; PAM type: YTN; PAM sequence: TTA
attttatattaaaataacct

SEQ ID NO: 401087 - DNA, 20 bp, Artificial Sequence
  Description of Artificial Sequence: Synthetic oligonucleotide
  Target: LAMA2; (+) strand; PAM type: YTN; PAM sequence: TTT
tatattaaaataacctgaaa

SEQ ID NO: 401088 - DNA, 20 bp, Artificial Sequence
  Description of Artificial Sequence: Synthetic oligonucleotide
  Target: LAMA2; (+) strand; PAM type: YTN; PAM sequence: TTT
atattaaaataacctgaaat

SEQ ID NO: 401089 - DNA, 20 bp, Artificial Sequence
  Description of Artificial Sequence: Synthetic oligonucleotide
  Target: LAMA2; (+) strand; PAM type: YTN; PAM sequence: TTA
tattaaaataacctgaaatt

SEQ ID NO: 401090 - DNA, 20 bp, Artificial Sequence
  Description of Artificial Sequence: Synthetic oligonucleotide
  Target: LAMA2; (+) strand; PAM type: YTN; PAM sequence: TTA
aaataacctgaaattgcaca

SEQ ID NO: 401091 - DNA, 20 bp, Artificial Sequence
  Description of Artificial Sequence: Synthetic oligonucleotide
  Target: LAMA2; (+) strand; PAM type: YTN; PAM sequence: CTG
aaattgcacatccaagtata

SEQ ID NO: 401092 - DNA, 20 bp, Artificial Sequence
  Description of Artificial Sequence: Synthetic oligonucleotide
  Target: LAMA2; (+) strand; PAM type: YTN; PAM sequence: TTG
cacatccaagtataagctca

SEQ ID NO: 401093 - DNA, 20 bp, Artificial Sequence
  Description of Artificial Sequence: Synthetic oligonucleotide
  Target: LAMA2; (+) strand; PAM type: YTN; PAM sequence: CTC
agggatgataaaacttattt

SEQ ID NO: 401094 - DNA, 20 bp, Artificial Sequence
  Description of Artificial Sequence: Synthetic oligonucleotide
  Target: LAMA2; (+) strand; PAM type: YTN; PAM sequence: CTT
atttaatccttttttttgtt

SEQ ID NO: 401095 - DNA, 20 bp, Artificial Sequence
  Description of Artificial Sequence: Synthetic oligonucleotide
  Target: LAMA2; (+) strand; PAM type: YTN; PAM sequence: TTA
tttaatccttttttttgttt

SEQ ID NO: 401096 - DNA, 20 bp, Artificial Sequence
  Description of Artificial Sequence: Synthetic oligonucleotide
  Target: LAMA2; (+) strand; PAM type: YTN; PAM sequence: TTT
aatccttttttttgtttttt

SEQ ID NO: 401097 - DNA, 20 bp, Artificial Sequence
  Description of Artificial Sequence: Synthetic oligonucleotide
  Target: LAMA2; (+) strand; PAM type: YTN; PAM sequence: TTA
atccttttttttgtttttta

SEQ ID NO: 401098 - DNA, 20 bp, Artificial Sequence
  Description of Artificial Sequence: Synthetic oligonucleotide
  Target: LAMA2; (+) strand; PAM type: YTN; PAM sequence: CTT
ttttttgttttttattcgca

SEQ ID NO: 401099 - DNA, 20 bp, Artificial Sequence
  Description of Artificial Sequence: Synthetic oligonucleotide
  Target: LAMA2; (+) strand; PAM type: YTN; PAM sequence: TTT
tttttgttttttattcgcag

SEQ ID NO: 401100 - DNA, 20 bp, Artificial Sequence
  Description of Artificial Sequence: Synthetic oligonucleotide
  Target: LAMA2; (+) strand; PAM type: YTN; PAM sequence: TTT
ttttgttttttattcgcaga

SEQ ID NO: 401101 - DNA, 20 bp, Artificial Sequence
  Description of Artificial Sequence: Synthetic oligonucleotide
  Target: LAMA2; (+) strand; PAM type: YTN; PAM sequence: TTT
tttgttttttattcgcagaa

SEQ ID NO: 401102 - DNA, 20 bp, Artificial Sequence
  Description of Artificial Sequence: Synthetic oligonucleotide
  Target: LAMA2; (+) strand; PAM type: YTN; PAM sequence: TTT
ttgttttttattcgcagaaa

SEQ ID NO: 401103 - DNA, 20 bp, Artificial Sequence
  Description of Artificial Sequence: Synthetic oligonucleotide
  Target: LAMA2; (+) strand; PAM type: YTN; PAM sequence: TTT
tgttttttattcgcagaaaa

SEQ ID NO: 401104 - DNA, 20 bp, Artificial Sequence
  Description of Artificial Sequence: Synthetic oligonucleotide
  Target: LAMA2; (+) strand; PAM type: YTN; PAM sequence: TTT
gttttttattcgcagaaaat

SEQ ID NO: 401105 - DNA, 20 bp, Artificial Sequence
  Description of Artificial Sequence: Synthetic oligonucleotide
  Target: LAMA2; (+) strand; PAM type: YTN; PAM sequence: TTG
ttttttattcgcagaaaatg

SEQ ID NO: 401106 - DNA, 20 bp, Artificial Sequence
  Description of Artificial Sequence: Synthetic oligonucleotide
  Target: LAMA2; (+) strand; PAM type: YTN; PAM sequence: TTT
tttattcgcagaaaatgaag

SEQ ID NO: 401107 - DNA, 20 bp, Artificial Sequence
  Description of Artificial Sequence: Synthetic oligonucleotide
  Target: LAMA2; (+) strand; PAM type: YTN; PAM sequence: TTT
ttattcgcagaaaatgaaga

SEQ ID NO: 401108 - DNA, 20 bp, Artificial Sequence
  Description of Artificial Sequence: Synthetic oligonucleotide
  Target: LAMA2; (+) strand; PAM type: YTN; PAM sequence: TTT
tattcgcagaaaatgaagac

SEQ ID NO: 401109 - DNA, 20 bp, Artificial Sequence
  Description of Artificial Sequence: Synthetic oligonucleotide
  Target: LAMA2; (+) strand; PAM type: YTN; PAM sequence: TTT
attcgcagaaaatgaagacc

SEQ ID NO: 401110 - DNA, 20 bp, Artificial Sequence
  Description of Artificial Sequence: Synthetic oligonucleotide
  Target: LAMA2; (+) strand; PAM type: YTN; PAM sequence: TTA
ttcgcagaaaatgaagacca

SEQ ID NO: 401111 - DNA, 20 bp, Artificial Sequence
  Description of Artificial Sequence: Synthetic oligonucleotide
  Target: LAMA2; (+) strand; PAM type: YTN; PAM sequence: TTC
gcagaaaatgaagaccatct

SEQ ID NO: 401112 - DNA, 20 bp, Artificial Sequence
  Description of Artificial Sequence: Synthetic oligonucleotide
  Target: LAMA2; (+) strand; PAM type: YTN; PAM sequence: CTA
aatggcttaaaaaccaggat

SEQ ID NO: 401113 - DNA, 20 bp, Artificial Sequence
  Description of Artificial Sequence: Synthetic oligonucleotide
  Target: LAMA2; (+) strand; PAM type: YTN; PAM sequence: CTT
aaaaaccaggatagaaaatg

SEQ ID NO: 401114 - DNA, 20 bp, Artificial Sequence
  Description of Artificial Sequence: Synthetic oligonucleotide
  Target: LAMA2; (+) strand; PAM type: YTN; PAM sequence: TTA
aaaaccaggatagaaaatgc

SEQ ID NO: 401115 - DNA, 20 bp, Artificial Sequence
  Description of Artificial Sequence: Synthetic oligonucleotide
  Target: LAMA2; (+) strand; PAM type: YTN; PAM sequence: CTG
atgctagaaatggggatctc

SEQ ID NO: 401116 - DNA, 20 bp, Artificial Sequence
  Description of Artificial Sequence: Synthetic oligonucleotide
  Target: LAMA2; (+) strand; PAM type: YTN; PAM sequence: CTA
gaaatggggatctcttgaga

SEQ ID NO: 401117 - DNA, 20 bp, Artificial Sequence
  Description of Artificial Sequence: Synthetic oligonucleotide
  Target: LAMA2; (+) strand; PAM type: YTN; PAM sequence: CTC
ttgagaactttgaatgacac

SEQ ID NO: 401118 - DNA, 20 bp, Artificial Sequence
  Description of Artificial Sequence: Synthetic oligonucleotide
  Target: LAMA2; (+) strand; PAM type: YTN; PAM sequence: CTT
gagaactttgaatgacactt

SEQ ID NO: 401119 - DNA, 20 bp, Artificial Sequence
  Description of Artificial Sequence: Synthetic oligonucleotide
  Target: LAMA2; (+) strand; PAM type: YTN; PAM sequence: TTG
agaactttgaatgacacttt

SEQ ID NO: 401120 - DNA, 20 bp, Artificial Sequence
  Description of Artificial Sequence: Synthetic oligonucleotide
  Target: LAMA2; (+) strand; PAM type: YTN; PAM sequence: CTT
tgaatgacactttgggaaag

SEQ ID NO: 401121 - DNA, 20 bp, Artificial Sequence
  Description of Artificial Sequence: Synthetic oligonucleotide
  Target: LAMA2; (+) strand; PAM type: YTN; PAM sequence: TTT
gaatgacactttgggaaagt

SEQ ID NO: 401122 - DNA, 20 bp, Artificial Sequence
  Description of Artificial Sequence: Synthetic oligonucleotide
  Target: LAMA2; (+) strand; PAM type: YTN; PAM sequence: TTG
aatgacactttgggaaagtt

SEQ ID NO: 401123 - DNA, 20 bp, Artificial Sequence
  Description of Artificial Sequence: Synthetic oligonucleotide
  Target: LAMA2; (+) strand; PAM type: YTN; PAM sequence: CTT
tgggaaagttatcagctatt

SEQ ID NO: 401124 - DNA, 20 bp, Artificial Sequence
  Description of Artificial Sequence: Synthetic oligonucleotide
  Target: LAMA2; (+) strand; PAM type: YTN; PAM sequence: TTT
gggaaagttatcagctattc

SEQ ID NO: 401125 - DNA, 20 bp, Artificial Sequence
  Description of Artificial Sequence: Synthetic oligonucleotide
  Target: LAMA2; (+) strand; PAM type: YTN; PAM sequence: TTG
ggaaagttatcagctattcc

SEQ ID NO: 401126 - DNA, 20 bp, Artificial Sequence
  Description of Artificial Sequence: Synthetic oligonucleotide
  Target: LAMA2; (+) strand; PAM type: YTN; PAM sequence: TTA
tcagctattccaaatggtaa

SEQ ID NO: 401127 - DNA, 20 bp, Artificial Sequence
  Description of Artificial Sequence: Synthetic oligonucleotide
  Target: LAMA2; (+) strand; PAM type: YTN; PAM sequence: CTA
ttccaaatggtaagcattca

SEQ ID NO: 401128 - DNA, 20 bp, Artificial Sequence
  Description of Artificial Sequence: Synthetic oligonucleotide
  Target: LAMA2; (+) strand; PAM type: YTN; PAM sequence: TTC
caaatggtaagcattcagga

SEQ ID NO: 401129 - DNA, 20 bp, Artificial Sequence
  Description of Artificial Sequence: Synthetic oligonucleotide
  Target: LAMA2; (+) strand; PAM type: YTN; PAM sequence: TTC
aggacactaccaactgtgtc

SEQ ID NO: 401130 - DNA, 20 bp, Artificial Sequence
  Description of Artificial Sequence: Synthetic oligonucleotide
  Target: LAMA2; (+) strand; PAM type: YTN; PAM sequence: CTA
ccaactgtgtcagttgacct

SEQ ID NO: 401131 - DNA, 20 bp, Artificial Sequence
  Description of Artificial Sequence: Synthetic oligonucleotide
  Target: LAMA2; (+) strand; PAM type: YTN; PAM sequence: CTG
tgtcagttgacctgaagttt

SEQ ID NO: 401132 - DNA, 20 bp, Artificial Sequence
  Description of Artificial Sequence: Synthetic oligonucleotide
  Target: LAMA2; (+) strand; PAM type: YTN; PAM sequence: TTG
acctgaagttttgaagactg

SEQ ID NO: 401133 - DNA, 20 bp, Artificial Sequence
  Description of Artificial Sequence: Synthetic oligonucleotide
  Target: LAMA2; (+) strand; PAM type: YTN; PAM sequence: CTG
aagttttgaagactgttgtt

SEQ ID NO: 401134 - DNA, 20 bp, Artificial Sequence
  Description of Artificial Sequence: Synthetic oligonucleotide
  Target: LAMA2; (+) strand; PAM type: YTN; PAM sequence: TTT
tgaagactgttgttaacttt

SEQ ID NO: 401135 - DNA, 20 bp, Artificial Sequence
  Description of Artificial Sequence: Synthetic oligonucleotide
  Target: LAMA2; (+) strand; PAM type: YTN; PAM sequence: TTT
gaagactgttgttaactttt

SEQ ID NO: 401136 - DNA, 20 bp, Artificial Sequence
  Description of Artificial Sequence: Synthetic oligonucleotide
  Target: LAMA2; (+) strand; PAM type: YTN; PAM sequence: TTG
aagactgttgttaactttta

SEQ ID NO: 401137 - DNA, 20 bp, Artificial Sequence
  Description of Artificial Sequence: Synthetic oligonucleotide
  Target: LAMA2; (+) strand; PAM type: YTN; PAM sequence: CTG
ttgttaacttttaccatttt

SEQ ID NO: 401138 - DNA, 20 bp, Artificial Sequence
  Description of Artificial Sequence: Synthetic oligonucleotide
  Target: LAMA2; (+) strand; PAM type: YTN; PAM sequence: TTG
ttaacttttaccattttttt

SEQ ID NO: 401139 - DNA, 20 bp, Artificial Sequence
  Description of Artificial Sequence: Synthetic oligonucleotide
  Target: LAMA2; (+) strand; PAM type: YTN; PAM sequence: TTA
acttttaccatttttttcta

SEQ ID NO: 401140 - DNA, 20 bp, Artificial Sequence
  Description of Artificial Sequence: Synthetic oligonucleotide
  Target: LAMA2; (+) strand; PAM type: YTN; PAM sequence: CTT
ttaccatttttttctaagat

SEQ ID NO: 401141 - DNA, 20 bp, Artificial Sequence
  Description of Artificial Sequence: Synthetic oligonucleotide
  Target: LAMA2; (+) strand; PAM type: YTN; PAM sequence: TTT
taccatttttttctaagatt

SEQ ID NO: 401142 - DNA, 20 bp, Artificial Sequence
  Description of Artificial Sequence: Synthetic oligonucleotide
  Target: LAMA2; (+) strand; PAM type: YTN; PAM sequence: TTT
accatttttttctaagatta

SEQ ID NO: 401143 - DNA, 20 bp, Artificial Sequence
  Description of Artificial Sequence: Synthetic oligonucleotide
  Target: LAMA2; (+) strand; PAM type: YTN; PAM sequence: TTA
ccatttttttctaagattat

SEQ ID NO: 401144 - DNA, 20 bp, Artificial Sequence
  Description of Artificial Sequence: Synthetic oligonucleotide
  Target: LAMA2; (+) strand; PAM type: YTN; PAM sequence: TTT
ttttctaagattattctggt

SEQ ID NO: 401145 - DNA, 20 bp, Artificial Sequence
  Description of Artificial Sequence: Synthetic oligonucleotide
  Target: LAMA2; (+) strand; PAM type: YTN; PAM sequence: TTT
tttctaagattattctggta

SEQ ID NO: 401146 - DNA, 20 bp, Artificial Sequence
  Description of Artificial Sequence: Synthetic oligonucleotide
  Target: LAMA2; (+) strand; PAM type: YTN; PAM sequence: TTT
ttctaagattattctggtac

SEQ ID NO: 401147 - DNA, 20 bp, Artificial Sequence
  Description of Artificial Sequence: Synthetic oligonucleotide
  Target: LAMA2; (+) strand; PAM type: YTN; PAM sequence: TTT
tctaagattattctggtact

SEQ ID NO: 401148 - DNA, 20 bp, Artificial Sequence
  Description of Artificial Sequence: Synthetic oligonucleotide
  Target: LAMA2; (+) strand; PAM type: YTN; PAM sequence: TTT
ctaagattattctggtacta

SEQ ID NO: 401149 - DNA, 20 bp, Artificial Sequence
  Description of Artificial Sequence: Synthetic oligonucleotide
  Target: LAMA2; (+) strand; PAM type: YTN; PAM sequence: TTC
taagattattctggtactat

SEQ ID NO: 401150 - DNA, 20 bp, Artificial Sequence
  Description of Artificial Sequence: Synthetic oligonucleotide
  Target: LAMA2; (+) strand; PAM type: YTN; PAM sequence: CTA
agattattctggtactatta

SEQ ID NO: 401151 - DNA, 20 bp, Artificial Sequence
  Description of Artificial Sequence: Synthetic oligonucleotide
  Target: LAMA2; (+) strand; PAM type: YTN; PAM sequence: TTA
ttctggtactattatctgga

SEQ ID NO: 401152 - DNA, 20 bp, Artificial Sequence
  Description of Artificial Sequence: Synthetic oligonucleotide
  Target: LAMA2; (+) strand; PAM type: YTN; PAM sequence: TTC
tggtactattatctggaaat

SEQ ID NO: 401153 - DNA, 20 bp, Artificial Sequence
  Description of Artificial Sequence: Synthetic oligonucleotide
  Target: LAMA2; (+) strand; PAM type: YTN; PAM sequence: CTG
gtactattatctggaaatta

SEQ ID NO: 401154 - DNA, 20 bp, Artificial Sequence
  Description of Artificial Sequence: Synthetic oligonucleotide
  Target: LAMA2; (+) strand; PAM type: YTN; PAM sequence: CTA
ttatctggaaattagatact

SEQ ID NO: 401155 - DNA, 20 bp, Artificial Sequence
  Description of Artificial Sequence: Synthetic oligonucleotide
  Target: LAMA2; (+) strand; PAM type: YTN; PAM sequence: TTA
tctggaaattagatactgtt

SEQ ID NO: 401156 - DNA, 20 bp, Artificial Sequence
  Description of Artificial Sequence: Synthetic oligonucleotide
  Target: LAMA2; (+) strand; PAM type: YTN; PAM sequence: CTG
gaaattagatactgtttttc

SEQ ID NO: 401157 - DNA, 20 bp, Artificial Sequence
  Description of Artificial Sequence: Synthetic oligonucleotide
  Target: LAMA2; (+) strand; PAM type: YTN; PAM sequence: TTA
gatactgtttttcttactca

SEQ ID NO: 401158 - DNA, 20 bp, Artificial Sequence
  Description of Artificial Sequence: Synthetic oligonucleotide
  Target: LAMA2; (+) strand; PAM type: YTN; PAM sequence: CTG
tttttcttactcatgaattc

SEQ ID NO: 401159 - DNA, 20 bp, Artificial Sequence
  Description of Artificial Sequence: Synthetic oligonucleotide
  Target: LAMA2; (+) strand; PAM type: YTN; PAM sequence: TTT
ttcttactcatgaattcttc

SEQ ID NO: 401160 - DNA, 20 bp, Artificial Sequence
  Description of Artificial Sequence: Synthetic oligonucleotide
  Target: LAMA2; (+) strand; PAM type: YTN; PAM sequence: TTT
tcttactcatgaattcttct

SEQ ID NO: 401161 - DNA, 20 bp, Artificial Sequence
  Description of Artificial Sequence: Synthetic oligonucleotide
  Target: LAMA2; (+) strand; PAM type: YTN; PAM sequence: TTT
cttactcatgaattcttctt

SEQ ID NO: 401162 - DNA, 20 bp, Artificial Sequence
  Description of Artificial Sequence: Synthetic oligonucleotide
  Target: LAMA2; (+) strand; PAM type: YTN; PAM sequence: TTC
ttactcatgaattcttcttt

SEQ ID NO: 401163 - DNA, 20 bp, Artificial Sequence
  Description of Artificial Sequence: Synthetic oligonucleotide
  Target: LAMA2; (+) strand; PAM type: YTN; PAM sequence: CTT
actcatgaattcttctttgt

SEQ ID NO: 401164 - DNA, 20 bp, Artificial Sequence
  Description of Artificial Sequence: Synthetic oligonucleotide
  Target: LAMA2; (+) strand; PAM type: YTN; PAM sequence: TTA
ctcatgaattcttctttgtg

SEQ ID NO: 401165 - DNA, 20 bp, Artificial Sequence
  Description of Artificial Sequence: Synthetic oligonucleotide
  Target: LAMA2; (+) strand; PAM type: YTN; PAM sequence: CTC
atgaattcttctttgtgaga

SEQ ID NO: 401166 - DNA, 20 bp, Artificial Sequence
  Description of Artificial Sequence: Synthetic oligonucleotide
  Target: LAMA2; (+) strand; PAM type: YTN; PAM sequence: TTC
ttctttgtgagaatgagaaa

SEQ ID NO: 401167 - DNA, 20 bp, Artificial Sequence
  Description of Artificial Sequence: Synthetic oligonucleotide
  Target: LAMA2; (+) strand; PAM type: YTN; PAM sequence: CTT
ctttgtgagaatgagaaact

SEQ ID NO: 401168 - DNA, 20 bp, Artificial Sequence
  Description of Artificial Sequence: Synthetic oligonucleotide
  Target: LAMA2; (+) strand; PAM type: YTN; PAM sequence: TTC
tttgtgagaatgagaaacta

SEQ ID NO: 401169 - DNA, 20 bp, Artificial Sequence
  Description of Artificial Sequence: Synthetic oligonucleotide
  Target: LAMA2; (+) strand; PAM type: YTN; PAM sequence: CTT
tgtgagaatgagaaactaaa

SEQ ID NO: 401170 - DNA, 20 bp, Artificial Sequence
  Description of Artificial Sequence: Synthetic oligonucleotide
  Target: LAMA2; (+) strand; PAM type: YTN; PAM sequence: TTT
gtgagaatgagaaactaaac

SEQ ID NO: 401171 - DNA, 20 bp, Artificial Sequence
  Description of Artificial Sequence: Synthetic oligonucleotide
  Target: LAMA2; (+) strand; PAM type: YTN; PAM sequence: TTG
tgagaatgagaaactaaacc

SEQ ID NO: 401172 - DNA, 20 bp, Artificial Sequence
  Description of Artificial Sequence: Synthetic oligonucleotide
  Target: LAMA2; (+) strand; PAM type: YTN; PAM sequence: CTA
aaccatactttgcattatgg

SEQ ID NO: 401173 - DNA, 20 bp, Artificial Sequence
  Description of Artificial Sequence: Synthetic oligonucleotide
  Target: LAMA2; (+) strand; PAM type: YTN; PAM sequence: CTT
tgcattatggtattttttat

SEQ ID NO: 401174 - DNA, 20 bp, Artificial Sequence
  Description of Artificial Sequence: Synthetic oligonucleotide
  Target: LAMA2; (+) strand; PAM type: YTN; PAM sequence: TTT
gcattatggtattttttatc

SEQ ID NO: 401175 - DNA, 20 bp, Artificial Sequence
  Description of Artificial Sequence: Synthetic oligonucleotide
  Target: LAMA2; (+) strand; PAM type: YTN; PAM sequence: TTG
cattatggtattttttatct

SEQ ID NO: 401176 - DNA, 20 bp, Artificial Sequence
  Description of Artificial Sequence: Synthetic oligonucleotide
  Target: LAMA2; (+) strand; PAM type: YTN; PAM sequence: TTA
tggtattttttatcttttat

SEQ ID NO: 401177 - DNA, 20 bp, Artificial Sequence
  Description of Artificial Sequence: Synthetic oligonucleotide
  Target: LAMA2; (+) strand; PAM type: YTN; PAM sequence: TTT
tttatcttttattgccttta

SEQ ID NO: 401178 - DNA, 20 bp, Artificial Sequence
  Description of Artificial Sequence: Synthetic oligonucleotide
  Target: LAMA2; (+) strand; PAM type: YTN; PAM sequence: TTT
ttatcttttattgcctttag

SEQ ID NO: 401179 - DNA, 20 bp, Artificial Sequence
  Description of Artificial Sequence: Synthetic oligonucleotide
  Target: LAMA2; (+) strand; PAM type: YTN; PAM sequence: TTT
tatcttttattgcctttagc

SEQ ID NO: 401180 - DNA, 20 bp, Artificial Sequence
  Description of Artificial Sequence: Synthetic oligonucleotide
  Target: LAMA2; (+) strand; PAM type: YTN; PAM sequence: TTT
atcttttattgcctttagcc

SEQ ID NO: 401181 - DNA, 20 bp, Artificial Sequence
  Description of Artificial Sequence: Synthetic oligonucleotide
  Target: LAMA2; (+) strand; PAM type: YTN; PAM sequence: TTA
tcttttattgcctttagcca

SEQ ID NO: 401182 - DNA, 20 bp, Artificial Sequence
  Description of Artificial Sequence: Synthetic oligonucleotide
  Target: LAMA2; (+) strand; PAM type: YTN; PAM sequence: CTT
ttattgcctttagccagtat

SEQ ID NO: 401183 - DNA, 20 bp, Artificial Sequence
  Description of Artificial Sequence: Synthetic oligonucleotide
  Target: LAMA2; (+) strand; PAM type: YTN; PAM sequence: TTT
tattgcctttagccagtatc

SEQ ID NO: 401184 - DNA, 20 bp, Artificial Sequence
  Description of Artificial Sequence: Synthetic oligonucleotide
  Target: LAMA2; (+) strand; PAM type: YTN; PAM sequence: TTT
attgcctttagccagtatcc

SEQ ID NO: 401185 - DNA, 20 bp, Artificial Sequence
  Description of Artificial Sequence: Synthetic oligonucleotide
  Target: LAMA2; (+) strand; PAM type: YTN; PAM sequence: TTA
ttgcctttagccagtatcct

SEQ ID NO: 401186 - DNA, 20 bp, Artificial Sequence
  Description of Artificial Sequence: Synthetic oligonucleotide
  Target: LAMA2; (+) strand; PAM type: YTN; PAM sequence: TTG
cctttagccagtatccttag

SEQ ID NO: 401187 - DNA, 20 bp, Artificial Sequence
  Description of Artificial Sequence: Synthetic oligonucleotide
  Target: LAMA2; (+) strand; PAM type: YTN; PAM sequence: CTT
tagccagtatccttaggaat

SEQ ID NO: 401188 - DNA, 20 bp, Artificial Sequence
  Description of Artificial Sequence: Synthetic oligonucleotide
  Target: LAMA2; (+) strand; PAM type: YTN; PAM sequence: TTT
agccagtatccttaggaatg

SEQ ID NO: 401189 - DNA, 20 bp, Artificial Sequence
  Description of Artificial Sequence: Synthetic oligonucleotide
  Target: LAMA2; (+) strand; PAM type: YTN; PAM sequence: TTA
gccagtatccttaggaatgt

SEQ ID NO: 401190 - DNA, 20 bp, Artificial Sequence
  Description of Artificial Sequence: Synthetic oligonucleotide
  Target: LAMA2; (+) strand; PAM type: YTN; PAM sequence: CTT
aggaatgtgttacagaaagg

SEQ ID NO: 401191 - DNA, 20 bp, Artificial Sequence
  Description of Artificial Sequence: Synthetic oligonucleotide
  Target: LAMA2; (+) strand; PAM type: YTN; PAM sequence: TTA
ggaatgtgttacagaaagga

SEQ ID NO: 401192 - DNA, 20 bp, Artificial Sequence
  Description of Artificial Sequence: Synthetic oligonucleotide
  Target: LAMA2; (+) strand; PAM type: YTN; PAM sequence: TTA
cagaaaggaagatatagaca

SEQ ID NO: 401193 - DNA, 20 bp, Artificial Sequence
  Description of Artificial Sequence: Synthetic oligonucleotide
  Target: LAMA2; (+) strand; PAM type: YTN; PAM sequence: CTT
attattataaaactcatcct

SEQ ID NO: 401194 - DNA, 20 bp, Artificial Sequence
  Description of Artificial Sequence: Synthetic oligonucleotide
  Target: LAMA2; (+) strand; PAM type: YTN; PAM sequence: TTA
ttattataaaactcatcctt

SEQ ID NO: 401195 - DNA, 20 bp, Artificial Sequence
  Description of Artificial Sequence: Synthetic oligonucleotide
  Target: LAMA2; (+) strand; PAM type: YTN; PAM sequence: TTA
ttataaaactcatccttcag

SEQ ID NO: 401196 - DNA, 20 bp, Artificial Sequence
  Description of Artificial Sequence: Synthetic oligonucleotide
  Target: LAMA2; (+) strand; PAM type: YTN; PAM sequence: TTA
taaaactcatccttcagtat

SEQ ID NO: 401197 - DNA, 20 bp, Artificial Sequence
  Description of Artificial Sequence: Synthetic oligonucleotide
  Target: LAMA2; (+) strand; PAM type: YTN; PAM sequence: CTC
atccttcagtattggcaggg

SEQ ID NO: 401198 - DNA, 20 bp, Artificial Sequence
  Description of Artificial Sequence: Synthetic oligonucleotide
  Target: LAMA2; (+) strand; PAM type: YTN; PAM sequence: CTT
cagtattggcaggggattgg

SEQ ID NO: 401199 - DNA, 20 bp, Artificial Sequence
  Description of Artificial Sequence: Synthetic oligonucleotide
  Target: LAMA2; (+) strand; PAM type: YTN; PAM sequence: TTC
agtattggcaggggattggt

SEQ ID NO: 401200 - DNA, 20 bp, Artificial Sequence
  Description of Artificial Sequence: Synthetic oligonucleotide
  Target: LAMA2; (+) strand; PAM type: YTN; PAM sequence: TTG
gcaggggattggttccagga

SEQ ID NO: 401201 - DNA, 20 bp, Artificial Sequence
  Description of Artificial Sequence: Synthetic oligonucleotide
  Target: LAMA2; (+) strand; PAM type: YTN; PAM sequence: TTG
gttccaggacccccccccac

SEQ ID NO: 401202 - DNA, 20 bp, Artificial Sequence
  Description of Artificial Sequence: Synthetic oligonucleotide
  Target: LAMA2; (+) strand; PAM type: YTN; PAM sequence: TTC
caggacccccccccacagat

SEQ ID NO: 401203 - DNA, 20 bp, Artificial Sequence
  Description of Artificial Sequence: Synthetic oligonucleotide
  Target: LAMA2; (+) strand; PAM type: YTN; PAM sequence: TTC
ttgaatactcaagtcccttt

SEQ ID NO: 401204 - DNA, 20 bp, Artificial Sequence
  Description of Artificial Sequence: Synthetic oligonucleotide
  Target: LAMA2; (+) strand; PAM type: YTN; PAM sequence: CTT
gaatactcaagtccctttta

SEQ ID NO: 401205 - DNA, 20 bp, Artificial Sequence
  Description of Artificial Sequence: Synthetic oligonucleotide
  Target: LAMA2; (+) strand; PAM type: YTN; PAM sequence: TTG
aatactcaagtcccttttat

SEQ ID NO: 401206 - DNA, 20 bp, Artificial Sequence
  Description of Artificial Sequence: Synthetic oligonucleotide
  Target: LAMA2; (+) strand; PAM type: YTN; PAM sequence: CTC
aagtcccttttataaaatgg

SEQ ID NO: 401207 - DNA, 20 bp, Artificial Sequence
  Description of Artificial Sequence: Synthetic oligonucleotide
  Target: LAMA2; (+) strand; PAM type: YTN; PAM sequence: CTT
ttataaaatggcatagtatt

SEQ ID NO: 401208 - DNA, 20 bp, Artificial Sequence
  Description of Artificial Sequence: Synthetic oligonucleotide
  Target: LAMA2; (+) strand; PAM type: YTN; PAM sequence: TTT
tataaaatggcatagtattt

SEQ ID NO: 401209 - DNA, 20 bp, Artificial Sequence
  Description of Artificial Sequence: Synthetic oligonucleotide
  Target: LAMA2; (+) strand; PAM type: YTN; PAM sequence: TTT
ataaaatggcatagtatttg

SEQ ID NO: 401210 - DNA, 20 bp, Artificial Sequence
  Description of Artificial Sequence: Synthetic oligonucleotide
  Target: LAMA2; (+) strand; PAM type: YTN; PAM sequence: TTA
taaaatggcatagtatttgc

SEQ ID NO: 401211 - DNA, 20 bp, Artificial Sequence
  Description of Artificial Sequence: Synthetic oligonucleotide
  Target: LAMA2; (+) strand; PAM type: YTN; PAM sequence: TTT
gcatataacctatgcatagc

SEQ ID NO: 401212 - DNA, 20 bp, Artificial Sequence
  Description of Artificial Sequence: Synthetic oligonucleotide
  Target: LAMA2; (+) strand; PAM type: YTN; PAM sequence: TTG
catataacctatgcatagcc

SEQ ID NO: 401213 - DNA, 20 bp, Artificial Sequence
  Description of Artificial Sequence: Synthetic oligonucleotide
  Target: LAMA2; (+) strand; PAM type: YTN; PAM sequence: CTA
tgcatagcctcccatatact

SEQ ID NO: 401214 - DNA, 20 bp, Artificial Sequence
  Description of Artificial Sequence: Synthetic oligonucleotide
  Target: LAMA2; (+) strand; PAM type: YTN; PAM sequence: CTC
ccatatactttaatccctag

SEQ ID NO: 401215 - DNA, 20 bp, Artificial Sequence
  Description of Artificial Sequence: Synthetic oligonucleotide
  Target: LAMA2; (+) strand; PAM type: YTN; PAM sequence: CTT
taatccctagatcatttata

SEQ ID NO: 401216 - DNA, 20 bp, Artificial Sequence
  Description of Artificial Sequence: Synthetic oligonucleotide
  Target: LAMA2; (+) strand; PAM type: YTN; PAM sequence: TTT
aatccctagatcatttataa

SEQ ID NO: 401217 - DNA, 20 bp, Artificial Sequence
  Description of Artificial Sequence: Synthetic oligonucleotide
  Target: LAMA2; (+) strand; PAM type: YTN; PAM sequence: TTA
atccctagatcatttataat

SEQ ID NO: 401218 - DNA, 20 bp, Artificial Sequence
  Description of Artificial Sequence: Synthetic oligonucleotide
  Target: LAMA2; (+) strand; PAM type: YTN; PAM sequence: CTA
gatcatttataatacctaat

SEQ ID NO: 401219 - DNA, 20 bp, Artificial Sequence
  Description of Artificial Sequence: Synthetic oligonucleotide
  Target: LAMA2; (+) strand; PAM type: YTN; PAM sequence: TTT
ataatacctaatataatgta

SEQ ID NO: 401220 - DNA, 20 bp, Artificial Sequence
  Description of Artificial Sequence: Synthetic oligonucleotide
  Target: LAMA2; (+) strand; PAM type: YTN; PAM sequence: TTA
taatacctaatataatgtaa

SEQ ID NO: 401221 - DNA, 20 bp, Artificial Sequence
  Description of Artificial Sequence: Synthetic oligonucleotide
  Target: LAMA2; (+) strand; PAM type: YTN; PAM sequence: CTA
atataatgtaaatgctatgt

SEQ ID NO: 401222 - DNA, 20 bp, Artificial Sequence
  Description of Artificial Sequence: Synthetic oligonucleotide
  Target: LAMA2; (+) strand; PAM type: YTN; PAM sequence: CTA
tgtaaattcttacagtgtat

SEQ ID NO: 401223 - DNA, 20 bp, Artificial Sequence
  Description of Artificial Sequence: Synthetic oligonucleotide
  Target: LAMA2; (+) strand; PAM type: YTN; PAM sequence: TTC
ttacagtgtattgtttatga

SEQ ID NO: 401224 - DNA, 20 bp, Artificial Sequence
  Description of Artificial Sequence: Synthetic oligonucleotide
  Target: LAMA2; (+) strand; PAM type: YTN; PAM sequence: CTT
acagtgtattgtttatgaaa

SEQ ID NO: 401225 - DNA, 20 bp, Artificial Sequence
  Description of Artificial Sequence: Synthetic oligonucleotide
  Target: LAMA2; (+) strand; PAM type: YTN; PAM sequence: TTA
cagtgtattgtttatgaaat

SEQ ID NO: 401226 - DNA, 20 bp, Artificial Sequence
  Description of Artificial Sequence: Synthetic oligonucleotide
  Target: LAMA2; (+) strand; PAM type: YTN; PAM sequence: TTG
tttatgaaataatgacaaga

SEQ ID NO: 401227 - DNA, 20 bp, Artificial Sequence
  Description of Artificial Sequence: Synthetic oligonucleotide
  Target: LAMA2; (+) strand; PAM type: YTN; PAM sequence: TTT
atgaaataatgacaagaaaa

SEQ ID NO: 401228 - DNA, 20 bp, Artificial Sequence
  Description of Artificial Sequence: Synthetic oligonucleotide
  Target: LAMA2; (+) strand; PAM type: YTN; PAM sequence: TTA
tgaaataatgacaagaaaaa

SEQ ID NO: 401229 - DNA, 20 bp, Artificial Sequence
  Description of Artificial Sequence: Synthetic oligonucleotide
  Target: LAMA2; (+) strand; PAM type: YTN; PAM sequence: TTT
gtccatgttcagtacagaca

SEQ ID NO: 401230 - DNA, 20 bp, Artificial Sequence
  Description of Artificial Sequence: Synthetic oligonucleotide
  Target: LAMA2; (+) strand; PAM type: YTN; PAM sequence: TTG
tccatgttcagtacagacac

SEQ ID NO: 401231 - DNA, 20 bp, Artificial Sequence
  Description of Artificial Sequence: Synthetic oligonucleotide
  Target: LAMA2; (+) strand; PAM type: YTN; PAM sequence: TTC
agtacagacacaaccatttt

SEQ ID NO: 401232 - DNA, 20 bp, Artificial Sequence
  Description of Artificial Sequence: Synthetic oligonucleotide
  Target: LAMA2; (+) strand; PAM type: YTN; PAM sequence: TTT
tttcccctaaatatccaaat

SEQ ID NO: 401233 - DNA, 20 bp, Artificial Sequence
  Description of Artificial Sequence: Synthetic oligonucleotide
  Target: LAMA2; (+) strand; PAM type: YTN; PAM sequence: TTT
ttcccctaaatatccaaata

SEQ ID NO: 401234 - DNA, 20 bp, Artificial Sequence
  Description of Artificial Sequence: Synthetic oligonucleotide
  Target: LAMA2; (+) strand; PAM type: YTN; PAM sequence: TTT
tcccctaaatatccaaatat

SEQ ID NO: 401235 - DNA, 20 bp, Artificial Sequence
  Description of Artificial Sequence: Synthetic oligonucleotide
  Target: LAMA2; (+) strand; PAM type: YTN; PAM sequence: TTT
cccctaaatatccaaatatc

SEQ ID NO: 401236 - DNA, 20 bp, Artificial Sequence
  Description of Artificial Sequence: Synthetic oligonucleotide
  Target: LAMA2; (+) strand; PAM type: YTN; PAM sequence: TTC
ccctaaatatccaaatatcc

SEQ ID NO: 401237 - DNA, 20 bp, Artificial Sequence
  Description of Artificial Sequence: Synthetic oligonucleotide
  Target: LAMA2; (+) strand; PAM type: YTN; PAM sequence: CTA
aatatccaaatatccaactc

SEQ ID NO: 401238 - DNA, 20 bp, Artificial Sequence
  Description of Artificial Sequence: Synthetic oligonucleotide
  Target: LAMA2; (+) strand; PAM type: YTN; PAM sequence: CTC
tccaaggttggttgaattta

SEQ ID NO: 401239 - DNA, 20 bp, Artificial Sequence
  Description of Artificial Sequence: Synthetic oligonucleotide
  Target: LAMA2; (+) strand; PAM type: YTN; PAM sequence: CTC
caaggttggttgaatttaca

SEQ ID NO: 401240 - DNA, 20 bp, Artificial Sequence
  Description of Artificial Sequence: Synthetic oligonucleotide
  Target: LAMA2; (+) strand; PAM type: YTN; PAM sequence: TTG
gttgaatttacagatacaga

SEQ ID NO: 401241 - DNA, 20 bp, Artificial Sequence
  Description of Artificial Sequence: Synthetic oligonucleotide
  Target: LAMA2; (+) strand; PAM type: YTN; PAM sequence: TTG
aatttacagatacagagccc

SEQ ID NO: 401242 - DNA, 20 bp, Artificial Sequence
  Description of Artificial Sequence: Synthetic oligonucleotide
  Target: LAMA2; (+) strand; PAM type: YTN; PAM sequence: TTT
acagatacagagcccactga

SEQ ID NO: 401243 - DNA, 20 bp, Artificial Sequence
  Description of Artificial Sequence: Synthetic oligonucleotide
  Target: LAMA2; (+) strand; PAM type: YTN; PAM sequence: TTA
cagatacagagcccactgac

SEQ ID NO: 401244 - DNA, 20 bp, Artificial Sequence
  Description of Artificial Sequence: Synthetic oligonucleotide
  Target: LAMA2; (+) strand; PAM type: YTN; PAM sequence: CTG
acacagagggacaactgtat

SEQ ID NO: 401245 - DNA, 20 bp, Artificial Sequence
  Description of Artificial Sequence: Synthetic oligonucleotide
  Target: LAMA2; (+) strand; PAM type: YTN; PAM sequence: CTG
tattgtcttctgtgtttcag

SEQ ID NO: 401246 - DNA, 20 bp, Artificial Sequence
  Description of Artificial Sequence: Synthetic oligonucleotide
  Target: LAMA2; (+) strand; PAM type: YTN; PAM sequence: TTG
tcttctgtgtttcagcccaa

SEQ ID NO: 401247 - DNA, 20 bp, Artificial Sequence
  Description of Artificial Sequence: Synthetic oligonucleotide
  Target: LAMA2; (+) strand; PAM type: YTN; PAM sequence: CTT
ctgtgtttcagcccaagaaa

SEQ ID NO: 401248 - DNA, 20 bp, Artificial Sequence
  Description of Artificial Sequence: Synthetic oligonucleotide
  Target: LAMA2; (+) strand; PAM type: YTN; PAM sequence: TTC
tgtgtttcagcccaagaaat

SEQ ID NO: 401249 - DNA, 20 bp, Artificial Sequence
  Description of Artificial Sequence: Synthetic oligonucleotide
  Target: LAMA2; (+) strand; PAM type: YTN; PAM sequence: CTG
tgtttcagcccaagaaatcg

SEQ ID NO: 401250 - DNA, 20 bp, Artificial Sequence
  Description of Artificial Sequence: Synthetic oligonucleotide
  Target: LAMA2; (+) strand; PAM type: YTN; PAM sequence: TTT
cagcccaagaaatcgtgtat

SEQ ID NO: 401251 - DNA, 20 bp, Artificial Sequence
  Description of Artificial Sequence: Synthetic oligonucleotide
  Target: LAMA2; (+) strand; PAM type: YTN; PAM sequence: TTC
agcccaagaaatcgtgtatt

SEQ ID NO: 401252 - DNA, 20 bp, Artificial Sequence
  Description of Artificial Sequence: Synthetic oligonucleotide
  Target: LAMA2; (+) strand; PAM type: YTN; PAM sequence: TTA
gtgaaatagaataaatcaca

SEQ ID NO: 401253 - DNA, 20 bp, Artificial Sequence
  Description of Artificial Sequence: Synthetic oligonucleotide
  Target: LAMA2; (+) strand; PAM type: YTN; PAM sequence: CTA
atctctaaaatactgatgta

SEQ ID NO: 401254 - DNA, 20 bp, Artificial Sequence
  Description of Artificial Sequence: Synthetic oligonucleotide
  Target: LAMA2; (+) strand; PAM type: YTN; PAM sequence: CTC
taaaatactgatgtaccacc

SEQ ID NO: 401255 - DNA, 20 bp, Artificial Sequence
  Description of Artificial Sequence: Synthetic oligonucleotide
  Target: LAMA2; (+) strand; PAM type: YTN; PAM sequence: CTA
aaatactgatgtaccaccac

SEQ ID NO: 401256 - DNA, 20 bp, Artificial Sequence
  Description of Artificial Sequence: Synthetic oligonucleotide
  Target: LAMA2; (+) strand; PAM type: YTN; PAM sequence: CTG
atgtaccaccacaaagacac

SEQ ID NO: 401257 - DNA, 20 bp, Artificial Sequence
  Description of Artificial Sequence: Synthetic oligonucleotide
  Target: LAMA2; (+) strand; PAM type: YTN; PAM sequence: TTT
attaaagtacctgcagtaat

SEQ ID NO: 401258 - DNA, 20 bp, Artificial Sequence
  Description of Artificial Sequence: Synthetic oligonucleotide
  Target: LAMA2; (+) strand; PAM type: YTN; PAM sequence: TTA
ttaaagtacctgcagtaata

SEQ ID NO: 401259 - DNA, 20 bp, Artificial Sequence
  Description of Artificial Sequence: Synthetic oligonucleotide
  Target: LAMA2; (+) strand; PAM type: YTN; PAM sequence: TTA
aagtacctgcagtaataggt

SEQ ID NO: 401260 - DNA, 20 bp, Artificial Sequence
  Description of Artificial Sequence: Synthetic oligonucleotide
  Target: LAMA2; (+) strand; PAM type: YTN; PAM sequence: CTG
cagtaataggtgatagccca

SEQ ID NO: 401261 - DNA, 20 bp, Artificial Sequence
  Description of Artificial Sequence: Synthetic oligonucleotide
  Target: LAMA2; (+) strand; PAM type: YTN; PAM sequence: CTG
cattctctcttgataaaatt

SEQ ID NO: 401262 - DNA, 20 bp, Artificial Sequence
  Description of Artificial Sequence: Synthetic oligonucleotide
  Target: LAMA2; (+) strand; PAM type: YTN; PAM sequence: TTC
tctcttgataaaattcaatt

SEQ ID NO: 401263 - DNA, 20 bp, Artificial Sequence
  Description of Artificial Sequence: Synthetic oligonucleotide
  Target: LAMA2; (+) strand; PAM type: YTN; PAM sequence: CTC
tcttgataaaattcaatttc

SEQ ID NO: 401264 - DNA, 20 bp, Artificial Sequence
  Description of Artificial Sequence: Synthetic oligonucleotide
  Target: LAMA2; (+) strand; PAM type: YTN; PAM sequence: CTC
ttgataaaattcaatttctt

SEQ ID NO: 401265 - DNA, 20 bp, Artificial Sequence
  Description of Artificial Sequence: Synthetic oligonucleotide
  Target: LAMA2; (+) strand; PAM type: YTN; PAM sequence: CTT
gataaaattcaatttcttta

SEQ ID NO: 401266 - DNA, 20 bp, Artificial Sequence
  Description of Artificial Sequence: Synthetic oligonucleotide
  Target: LAMA2; (+) strand; PAM type: YTN; PAM sequence: TTG
ataaaattcaatttctttaa

SEQ ID NO: 401267 - DNA, 20 bp, Artificial Sequence
  Description of Artificial Sequence: Synthetic oligonucleotide
  Target: LAMA2; (+) strand; PAM type: YTN; PAM sequence: TTC
aatttctttaactattccaa

SEQ ID NO: 401268 - DNA, 20 bp, Artificial Sequence
  Description of Artificial Sequence: Synthetic oligonucleotide
  Target: LAMA2; (+) strand; PAM type: YTN; PAM sequence: TTT
ctttaactattccaactttc

SEQ ID NO: 401269 - DNA, 20 bp, Artificial Sequence
  Description of Artificial Sequence: Synthetic oligonucleotide
  Target: LAMA2; (+) strand; PAM type: YTN; PAM sequence: TTC
tttaactattccaactttca

SEQ ID NO: 401270 - DNA, 20 bp, Artificial Sequence
  Description of Artificial Sequence: Synthetic oligonucleotide
  Target: LAMA2; (+) strand; PAM type: YTN; PAM sequence: CTT
taactattccaactttcaaa

SEQ ID NO: 401271 - DNA, 20 bp, Artificial Sequence
  Description of Artificial Sequence: Synthetic oligonucleotide
  Target: LAMA2; (+) strand; PAM type: YTN; PAM sequence: TTT
aactattccaactttcaaaa

SEQ ID NO: 401272 - DNA, 20 bp, Artificial Sequence
  Description of Artificial Sequence: Synthetic oligonucleotide
  Target: LAMA2; (+) strand; PAM type: YTN; PAM sequence: TTA
actattccaactttcaaaaa

SEQ ID NO: 401273 - DNA, 20 bp, Artificial Sequence
  Description of Artificial Sequence: Synthetic oligonucleotide
  Target: LAMA2; (+) strand; PAM type: YTN; PAM sequence: CTA
ttccaactttcaaaaacatt

SEQ ID NO: 401274 - DNA, 20 bp, Artificial Sequence
  Description of Artificial Sequence: Synthetic oligonucleotide
  Target: LAMA2; (+) strand; PAM type: YTN; PAM sequence: TTC
caactttcaaaaacattagt

SEQ ID NO: 401275 - DNA, 20 bp, Artificial Sequence
  Description of Artificial Sequence: Synthetic oligonucleotide
  Target: LAMA2; (+) strand; PAM type: YTN; PAM sequence: CTT
tcaaaaacattagtggtcaa

SEQ ID NO: 401276 - DNA, 20 bp, Artificial Sequence
  Description of Artificial Sequence: Synthetic oligonucleotide
  Target: LAMA2; (+) strand; PAM type: YTN; PAM sequence: TTT
caaaaacattagtggtcaaa

SEQ ID NO: 401277 - DNA, 20 bp, Artificial Sequence
  Description of Artificial Sequence: Synthetic oligonucleotide
  Target: LAMA2; (+) strand; PAM type: YTN; PAM sequence: TTC
aaaaacattagtggtcaaac

SEQ ID NO: 401278 - DNA, 20 bp, Artificial Sequence
  Description of Artificial Sequence: Synthetic oligonucleotide
  Target: LAMA2; (+) strand; PAM type: YTN; PAM sequence: TTA
gtggtcaaaccatgtctgta

SEQ ID NO: 401279 - DNA, 20 bp, Artificial Sequence
  Description of Artificial Sequence: Synthetic oligonucleotide
  Target: LAMA2; (+) strand; PAM type: YTN; PAM sequence: CTG
taatatctttctacctatta

SEQ ID NO: 401280 - DNA, 20 bp, Artificial Sequence
  Description of Artificial Sequence: Synthetic oligonucleotide
  Target: LAMA2; (+) strand; PAM type: YTN; PAM sequence: CTT
tctacctattagaactgctg

SEQ ID NO: 401281 - DNA, 20 bp, Artificial Sequence
  Description of Artificial Sequence: Synthetic oligonucleotide
  Target: LAMA2; (+) strand; PAM type: YTN; PAM sequence: TTT
ctacctattagaactgctgg

SEQ ID NO: 401282 - DNA, 20 bp, Artificial Sequence
  Description of Artificial Sequence: Synthetic oligonucleotide
  Target: LAMA2; (+) strand; PAM type: YTN; PAM sequence: TTC
tacctattagaactgctgga

SEQ ID NO: 401283 - DNA, 20 bp, Artificial Sequence
  Description of Artificial Sequence: Synthetic oligonucleotide
  Target: LAMA2; (+) strand; PAM type: YTN; PAM sequence: CTA
cctattagaactgctggaaa

SEQ ID NO: 401284 - DNA, 20 bp, Artificial Sequence
  Description of Artificial Sequence: Synthetic oligonucleotide
  Target: LAMA2; (+) strand; PAM type: YTN; PAM sequence: CTA
ttagaactgctggaaatttt

SEQ ID NO: 401285 - DNA, 20 bp, Artificial Sequence
  Description of Artificial Sequence: Synthetic oligonucleotide
  Target: LAMA2; (+) strand; PAM type: YTN; PAM sequence: TTA
gaactgctggaaatttttgc

SEQ ID NO: 401286 - DNA, 20 bp, Artificial Sequence
  Description of Artificial Sequence: Synthetic oligonucleotide
  Target: LAMA2; (+) strand; PAM type: YTN; PAM sequence: CTG
ctggaaatttttgcatggta

SEQ ID NO: 401287 - DNA, 20 bp, Artificial Sequence
  Description of Artificial Sequence: Synthetic oligonucleotide
  Target: LAMA2; (+) strand; PAM type: YTN; PAM sequence: CTG
gaaatttttgcatggtatta

SEQ ID NO: 401288 - DNA, 20 bp, Artificial Sequence
  Description of Artificial Sequence: Synthetic oligonucleotide
  Target: LAMA2; (+) strand; PAM type: YTN; PAM sequence: TTT
ttgcatggtattagttcctg

SEQ ID NO: 401289 - DNA, 20 bp, Artificial Sequence
  Description of Artificial Sequence: Synthetic oligonucleotide
  Target: LAMA2; (+) strand; PAM type: YTN; PAM sequence: TTT
tgcatggtattagttcctga

SEQ ID NO: 401290 - DNA, 20 bp, Artificial Sequence
  Description of Artificial Sequence: Synthetic oligonucleotide
  Target: LAMA2; (+) strand; PAM type: YTN; PAM sequence: TTT
gcatggtattagttcctgaa

SEQ ID NO: 401291 - DNA, 20 bp, Artificial Sequence
  Description of Artificial Sequence: Synthetic oligonucleotide
  Target: LAMA2; (+) strand; PAM type: YTN; PAM sequence: TTG
catggtattagttcctgaaa

SEQ ID NO: 401292 - DNA, 20 bp, Artificial Sequence
  Description of Artificial Sequence: Synthetic oligonucleotide
  Target: LAMA2; (+) strand; PAM type: YTN; PAM sequence: TTA
gttcctgaaagcacacgtta

SEQ ID NO: 401293 - DNA, 20 bp, Artificial Sequence
  Description of Artificial Sequence: Synthetic oligonucleotide
  Target: LAMA2; (+) strand; PAM type: YTN; PAM sequence: TTC
ctgaaagcacacgttatttt

SEQ ID NO: 401294 - DNA, 20 bp, Artificial Sequence
  Description of Artificial Sequence: Synthetic oligonucleotide
  Target: LAMA2; (+) strand; PAM type: YTN; PAM sequence: CTG
aaagcacacgttattttaaa

SEQ ID NO: 401295 - DNA, 20 bp, Artificial Sequence
  Description of Artificial Sequence: Synthetic oligonucleotide
  Target: LAMA2; (+) strand; PAM type: YTN; PAM sequence: TTA
ttttaaagatactactttta

SEQ ID NO: 401296 - DNA, 20 bp, Artificial Sequence
  Description of Artificial Sequence: Synthetic oligonucleotide
  Target: LAMA2; (+) strand; PAM type: YTN; PAM sequence: TTT
taaagatactacttttacta

SEQ ID NO: 401297 - DNA, 20 bp, Artificial Sequence
  Description of Artificial Sequence: Synthetic oligonucleotide
  Target: LAMA2; (+) strand; PAM type: YTN; PAM sequence: TTT
aaagatactacttttactat

SEQ ID NO: 401298 - DNA, 20 bp, Artificial Sequence
  Description of Artificial Sequence: Synthetic oligonucleotide
  Target: LAMA2; (+) strand; PAM type: YTN; PAM sequence: TTA
aagatactacttttactatt

SEQ ID NO: 401299 - DNA, 20 bp, Artificial Sequence
  Description of Artificial Sequence: Synthetic oligonucleotide
  Target: LAMA2; (+) strand; PAM type: YTN; PAM sequence: CTA
cttttactatttttatattg

SEQ ID NO: 401300 - DNA, 20 bp, Artificial Sequence
  Description of Artificial Sequence: Synthetic oligonucleotide
  Target: LAMA2; (+) strand; PAM type: YTN; PAM sequence: CTT
ttactatttttatattgtta

SEQ ID NO: 401301 - DNA, 20 bp, Artificial Sequence
  Description of Artificial Sequence: Synthetic oligonucleotide
  Target: LAMA2; (+) strand; PAM type: YTN; PAM sequence: TTT
tactatttttatattgttaa

SEQ ID NO: 401302 - DNA, 20 bp, Artificial Sequence
  Description of Artificial Sequence: Synthetic oligonucleotide
  Target: LAMA2; (+) strand; PAM type: YTN; PAM sequence: TTT
actatttttatattgttaaa

SEQ ID NO: 401303 - DNA, 20 bp, Artificial Sequence
  Description of Artificial Sequence: Synthetic oligonucleotide
  Target: LAMA2; (+) strand; PAM type: YTN; PAM sequence: TTA
ctatttttatattgttaaag

SEQ ID NO: 401304 - DNA, 20 bp, Artificial Sequence
  Description of Artificial Sequence: Synthetic oligonucleotide
  Target: LAMA2; (+) strand; PAM type: YTN; PAM sequence: CTA
tttttatattgttaaagcat

SEQ ID NO: 401305 - DNA, 20 bp, Artificial Sequence
  Description of Artificial Sequence: Synthetic oligonucleotide
  Target: LAMA2; (+) strand; PAM type: YTN; PAM sequence: TTT
ttatattgttaaagcatgat

SEQ ID NO: 401306 - DNA, 20 bp, Artificial Sequence
  Description of Artificial Sequence: Synthetic oligonucleotide
  Target: LAMA2; (+) strand; PAM type: YTN; PAM sequence: TTT
tatattgttaaagcatgata

SEQ ID NO: 401307 - DNA, 20 bp, Artificial Sequence
  Description of Artificial Sequence: Synthetic oligonucleotide
  Target: LAMA2; (+) strand; PAM type: YTN; PAM sequence: TTT
atattgttaaagcatgatat

SEQ ID NO: 401308 - DNA, 20 bp, Artificial Sequence
  Description of Artificial Sequence: Synthetic oligonucleotide
  Target: LAMA2; (+) strand; PAM type: YTN; PAM sequence: TTA
tattgttaaagcatgatata

SEQ ID NO: 401309 - DNA, 20 bp, Artificial Sequence
  Description of Artificial Sequence: Synthetic oligonucleotide
  Target: LAMA2; (+) strand; PAM type: YTN; PAM sequence: TTG
ttaaagcatgatataataac

SEQ ID NO: 401310 - DNA, 20 bp, Artificial Sequence
  Description of Artificial Sequence: Synthetic oligonucleotide
  Target: LAMA2; (+) strand; PAM type: YTN; PAM sequence: TTA
aagcatgatataataacaac

SEQ ID NO: 401311 - DNA, 20 bp, Artificial Sequence
  Description of Artificial Sequence: Synthetic oligonucleotide
  Target: LAMA2; (+) strand; PAM type: YTN; PAM sequence: TTA
taaacacttattgagtactt

SEQ ID NO: 401312 - DNA, 20 bp, Artificial Sequence
  Description of Artificial Sequence: Synthetic oligonucleotide
  Target: LAMA2; (+) strand; PAM type: YTN; PAM sequence: CTT
attgagtacttaatatactt

SEQ ID NO: 401313 - DNA, 20 bp, Artificial Sequence
  Description of Artificial Sequence: Synthetic oligonucleotide
  Target: LAMA2; (+) strand; PAM type: YTN; PAM sequence: TTA
ttgagtacttaatatactta

SEQ ID NO: 401314 - DNA, 20 bp, Artificial Sequence
  Description of Artificial Sequence: Synthetic oligonucleotide
  Target: LAMA2; (+) strand; PAM type: YTN; PAM sequence: TTG
agtacttaatatacttatgt

SEQ ID NO: 401315 - DNA, 20 bp, Artificial Sequence
  Description of Artificial Sequence: Synthetic oligonucleotide
  Target: LAMA2; (+) strand; PAM type: YTN; PAM sequence: CTT
aatatacttatgttaagtgt

SEQ ID NO: 401316 - DNA, 20 bp, Artificial Sequence
  Description of Artificial Sequence: Synthetic oligonucleotide
  Target: LAMA2; (+) strand; PAM type: YTN; PAM sequence: TTA
atatacttatgttaagtgta

SEQ ID NO: 401317 - DNA, 20 bp, Artificial Sequence
  Description of Artificial Sequence: Synthetic oligonucleotide
  Target: LAMA2; (+) strand; PAM type: YTN; PAM sequence: CTT
atgttaagtgtatgtaatcc

SEQ ID NO: 401318 - DNA, 20 bp, Artificial Sequence
  Description of Artificial Sequence: Synthetic oligonucleotide
  Target: LAMA2; (+) strand; PAM type: YTN; PAM sequence: TTA
tgttaagtgtatgtaatcct

SEQ ID NO: 401319 - DNA, 20 bp, Artificial Sequence
  Description of Artificial Sequence: Synthetic oligonucleotide
  Target: LAMA2; (+) strand; PAM type: YTN; PAM sequence: TTA
agtgtatgtaatcctcatac

SEQ ID NO: 401320 - DNA, 20 bp, Artificial Sequence
  Description of Artificial Sequence: Synthetic oligonucleotide
  Target: LAMA2; (+) strand; PAM type: YTN; PAM sequence: CTC
ataccaattggagcaaaaac

SEQ ID NO: 401321 - DNA, 20 bp, Artificial Sequence
  Description of Artificial Sequence: Synthetic oligonucleotide
  Target: LAMA2; (+) strand; PAM type: YTN; PAM sequence: TTG
gagcaaaaacatttgcttca

SEQ ID NO: 401322 - DNA, 20 bp, Artificial Sequence
  Description of Artificial Sequence: Synthetic oligonucleotide
  Target: LAMA2; (+) strand; PAM type: YTN; PAM sequence: TTT
gcttcatttgcttgcatcaa

SEQ ID NO: 401323 - DNA, 20 bp, Artificial Sequence
  Description of Artificial Sequence: Synthetic oligonucleotide
  Target: LAMA2; (+) strand; PAM type: YTN; PAM sequence: TTG
cttcatttgcttgcatcaat

SEQ ID NO: 401324 - DNA, 20 bp, Artificial Sequence
  Description of Artificial Sequence: Synthetic oligonucleotide
  Target: LAMA2; (+) strand; PAM type: YTN; PAM sequence: CTT
catttgcttgcatcaattgg

SEQ ID NO: 401325 - DNA, 20 bp, Artificial Sequence
  Description of Artificial Sequence: Synthetic oligonucleotide
  Target: LAMA2; (+) strand; PAM type: YTN; PAM sequence: TTC
atttgcttgcatcaattggt

SEQ ID NO: 401326 - DNA, 20 bp, Artificial Sequence
  Description of Artificial Sequence: Synthetic oligonucleotide
  Target: LAMA2; (+) strand; PAM type: YTN; PAM sequence: TTT
gcttgcatcaattggtcata

SEQ ID NO: 401327 - DNA, 20 bp, Artificial Sequence
  Description of Artificial Sequence: Synthetic oligonucleotide
  Target: LAMA2; (+) strand; PAM type: YTN; PAM sequence: TTG
cttgcatcaattggtcatat

SEQ ID NO: 401328 - DNA, 20 bp, Artificial Sequence
  Description of Artificial Sequence: Synthetic oligonucleotide
  Target: LAMA2; (+) strand; PAM type: YTN; PAM sequence: CTT
gcatcaattggtcatatata

SEQ ID NO: 401329 - DNA, 20 bp, Artificial Sequence
  Description of Artificial Sequence: Synthetic oligonucleotide
  Target: LAMA2; (+) strand; PAM type: YTN; PAM sequence: TTG
catcaattggtcatatatat

SEQ ID NO: 401330 - DNA, 20 bp, Artificial Sequence
  Description of Artificial Sequence: Synthetic oligonucleotide
  Target: LAMA2; (+) strand; PAM type: YTN; PAM sequence: TTG
gtcatatatatatatatata

SEQ ID NO: 401331 - DNA, 20 bp, Artificial Sequence
  Description of Artificial Sequence: Synthetic oligonucleotide
  Target: LAMA2; (+) strand; PAM type: YTN; PAM sequence: CTA
tctcaattggttatatagat

SEQ ID NO: 401332 - DNA, 20 bp, Artificial Sequence
  Description of Artificial Sequence: Synthetic oligonucleotide
  Target: LAMA2; (+) strand; PAM type: YTN; PAM sequence: CTC
aattggttatatagataaca

SEQ ID NO: 401333 - DNA, 20 bp, Artificial Sequence
  Description of Artificial Sequence: Synthetic oligonucleotide
  Target: LAMA2; (+) strand; PAM type: YTN; PAM sequence: TTG
gttatatagataacataagt

SEQ ID NO: 401334 - DNA, 20 bp, Artificial Sequence
  Description of Artificial Sequence: Synthetic oligonucleotide
  Target: LAMA2; (+) strand; PAM type: YTN; PAM sequence: TTA
tatagataacataagtatag

SEQ ID NO: 401335 - DNA, 20 bp, Artificial Sequence
  Description of Artificial Sequence: Synthetic oligonucleotide
  Target: LAMA2; (+) strand; PAM type: YTN; PAM sequence: TTC
agaatagtcacttcactact

SEQ ID NO: 401336 - DNA, 20 bp, Artificial Sequence
  Description of Artificial Sequence: Synthetic oligonucleotide
  Target: LAMA2; (+) strand; PAM type: YTN; PAM sequence: CTT
cactactttaagagctaatt

SEQ ID NO: 401337 - DNA, 20 bp, Artificial Sequence
  Description of Artificial Sequence: Synthetic oligonucleotide
  Target: LAMA2; (+) strand; PAM type: YTN; PAM sequence: TTC
actactttaagagctaatta

SEQ ID NO: 401338 - DNA, 20 bp, Artificial Sequence
  Description of Artificial Sequence: Synthetic oligonucleotide
  Target: LAMA2; (+) strand; PAM type: YTN; PAM sequence: CTA
ctttaagagctaattaggta

SEQ ID NO: 401339 - DNA, 20 bp, Artificial Sequence
  Description of Artificial Sequence: Synthetic oligonucleotide
  Target: LAMA2; (+) strand; PAM type: YTN; PAM sequence: CTT
taagagctaattaggtattc

SEQ ID NO: 401340 - DNA, 20 bp, Artificial Sequence
  Description of Artificial Sequence: Synthetic oligonucleotide
  Target: LAMA2; (+) strand; PAM type: YTN; PAM sequence: TTT
aagagctaattaggtattca

SEQ ID NO: 401341 - DNA, 20 bp, Artificial Sequence
  Description of Artificial Sequence: Synthetic oligonucleotide
  Target: LAMA2; (+) strand; PAM type: YTN; PAM sequence: TTA
agagctaattaggtattcat

SEQ ID NO: 401342 - DNA, 20 bp, Artificial Sequence
  Description of Artificial Sequence: Synthetic oligonucleotide
  Target: LAMA2; (+) strand; PAM type: YTN; PAM sequence: CTA
attaggtattcatacagata

SEQ ID NO: 401343 - DNA, 20 bp, Artificial Sequence
  Description of Artificial Sequence: Synthetic oligonucleotide
  Target: LAMA2; (+) strand; PAM type: YTN; PAM sequence: TTA
ggtattcatacagatacaga

SEQ ID NO: 401344 - DNA, 20 bp, Artificial Sequence
  Description of Artificial Sequence: Synthetic oligonucleotide
  Target: LAMA2; (+) strand; PAM type: YTN; PAM sequence: TTC
atacagatacagaacctact

SEQ ID NO: 401345 - DNA, 20 bp, Artificial Sequence
  Description of Artificial Sequence: Synthetic oligonucleotide
  Target: LAMA2; (+) strand; PAM type: YTN; PAM sequence: CTA
ctgacacagaaggacaactt

SEQ ID NO: 401346 - DNA, 20 bp, Artificial Sequence
  Description of Artificial Sequence: Synthetic oligonucleotide
  Target: LAMA2; (+) strand; PAM type: YTN; PAM sequence: CTG
acacagaaggacaacttgtc

SEQ ID NO: 401347 - DNA, 20 bp, Artificial Sequence
  Description of Artificial Sequence: Synthetic oligonucleotide
  Target: LAMA2; (+) strand; PAM type: YTN; PAM sequence: CTT
gtcttctgtgtataacataa

SEQ ID NO: 401348 - DNA, 20 bp, Artificial Sequence
  Description of Artificial Sequence: Synthetic oligonucleotide
  Target: LAMA2; (+) strand; PAM type: YTN; PAM sequence: TTG
tcttctgtgtataacataag

SEQ ID NO: 401349 - DNA, 20 bp, Artificial Sequence
  Description of Artificial Sequence: Synthetic oligonucleotide
  Target: LAMA2; (+) strand; PAM type: YTN; PAM sequence: CTT
ctgtgtataacataagttag

SEQ ID NO: 401350 - DNA, 20 bp, Artificial Sequence
  Description of Artificial Sequence: Synthetic oligonucleotide
  Target: LAMA2; (+) strand; PAM type: YTN; PAM sequence: TTC
tgtgtataacataagttagc

SEQ ID NO: 401351 - DNA, 20 bp, Artificial Sequence
  Description of Artificial Sequence: Synthetic oligonucleotide
  Target: LAMA2; (+) strand; PAM type: YTN; PAM sequence: CTG
tgtataacataagttagcac

SEQ ID NO: 401352 - DNA, 20 bp, Artificial Sequence
  Description of Artificial Sequence: Synthetic oligonucleotide
  Target: LAMA2; (+) strand; PAM type: YTN; PAM sequence: TTA
gcactaacacttaacatcag

SEQ ID NO: 401353 - DNA, 20 bp, Artificial Sequence
  Description of Artificial Sequence: Synthetic oligonucleotide
  Target: LAMA2; (+) strand; PAM type: YTN; PAM sequence: CTA
acacttaacatcagttaaga

SEQ ID NO: 401354 - DNA, 20 bp, Artificial Sequence
  Description of Artificial Sequence: Synthetic oligonucleotide
  Target: LAMA2; (+) strand; PAM type: YTN; PAM sequence: CTT
aacatcagttaagatactgt

SEQ ID NO: 401355 - DNA, 20 bp, Artificial Sequence
  Description of Artificial Sequence: Synthetic oligonucleotide
  Target: LAMA2; (+) strand; PAM type: YTN; PAM sequence: TTA
acatcagttaagatactgtt

SEQ ID NO: 401356 - DNA, 20 bp, Artificial Sequence
  Description of Artificial Sequence: Synthetic oligonucleotide
  Target: LAMA2; (+) strand; PAM type: YTN; PAM sequence: TTA
agatactgttattatcccca

SEQ ID NO: 401357 - DNA, 20 bp, Artificial Sequence
  Description of Artificial Sequence: Synthetic oligonucleotide
  Target: LAMA2; (+) strand; PAM type: YTN; PAM sequence: CTG
ttattatccccactttacag

SEQ ID NO: 401358 - DNA, 20 bp, Artificial Sequence
  Description of Artificial Sequence: Synthetic oligonucleotide
  Target: LAMA2; (+) strand; PAM type: YTN; PAM sequence: TTA
ttatccccactttacaggtg

SEQ ID NO: 401359 - DNA, 20 bp, Artificial Sequence
  Description of Artificial Sequence: Synthetic oligonucleotide
  Target: LAMA2; (+) strand; PAM type: YTN; PAM sequence: TTA
tccccactttacaggtgaga

SEQ ID NO: 401360 - DNA, 20 bp, Artificial Sequence
  Description of Artificial Sequence: Synthetic oligonucleotide
  Target: LAMA2; (+) strand; PAM type: YTN; PAM sequence: CTT
tacaggtgagaaacagacag

SEQ ID NO: 401361 - DNA, 20 bp, Artificial Sequence
  Description of Artificial Sequence: Synthetic oligonucleotide
  Target: LAMA2; (+) strand; PAM type: YTN; PAM sequence: TTT
acaggtgagaaacagacaga

SEQ ID NO: 401362 - DNA, 20 bp, Artificial Sequence
  Description of Artificial Sequence: Synthetic oligonucleotide
  Target: LAMA2; (+) strand; PAM type: YTN; PAM sequence: TTA
caggtgagaaacagacagag

SEQ ID NO: 401363 - DNA, 20 bp, Artificial Sequence
  Description of Artificial Sequence: Synthetic oligonucleotide
  Target: LAMA2; (+) strand; PAM type: YTN; PAM sequence: CTG
aaggccattgttaaaagtgg

SEQ ID NO: 401364 - DNA, 20 bp, Artificial Sequence
  Description of Artificial Sequence: Synthetic oligonucleotide
  Target: LAMA2; (+) strand; PAM type: YTN; PAM sequence: TTG
ttaaaagtggcacagaggaa

SEQ ID NO: 401365 - DNA, 20 bp, Artificial Sequence
  Description of Artificial Sequence: Synthetic oligonucleotide
  Target: LAMA2; (+) strand; PAM type: YTN; PAM sequence: TTA
aaagtggcacagaggaaact

SEQ ID NO: 401366 - DNA, 20 bp, Artificial Sequence
  Description of Artificial Sequence: Synthetic oligonucleotide
  Target: LAMA2; (+) strand; PAM type: YTN; PAM sequence: CTT
aaaccccacagtttgatttc

SEQ ID NO: 401367 - DNA, 20 bp, Artificial Sequence
  Description of Artificial Sequence: Synthetic oligonucleotide
  Target: LAMA2; (+) strand; PAM type: YTN; PAM sequence: TTA
aaccccacagtttgatttca

SEQ ID NO: 401368 - DNA, 20 bp, Artificial Sequence
  Description of Artificial Sequence: Synthetic oligonucleotide
  Target: LAMA2; (+) strand; PAM type: YTN; PAM sequence: TTT
gatttcagagcctatgatct

SEQ ID NO: 401369 - DNA, 20 bp, Artificial Sequence
  Description of Artificial Sequence: Synthetic oligonucleotide
  Target: LAMA2; (+) strand; PAM type: YTN; PAM sequence: TTG
atttcagagcctatgatctt

SEQ ID NO: 401370 - DNA, 20 bp, Artificial Sequence
  Description of Artificial Sequence: Synthetic oligonucleotide
  Target: LAMA2; (+) strand; PAM type: YTN; PAM sequence: TTT
cagagcctatgatcttaacc

SEQ ID NO: 401371 - DNA, 20 bp, Artificial Sequence
  Description of Artificial Sequence: Synthetic oligonucleotide
  Target: LAMA2; (+) strand; PAM type: YTN; PAM sequence: TTC
agagcctatgatcttaacca

SEQ ID NO: 401372 - DNA, 20 bp, Artificial Sequence
  Description of Artificial Sequence: Synthetic oligonucleotide
  Target: LAMA2; (+) strand; PAM type: YTN; PAM sequence: CTA
tgatcttaaccactaaccta

SEQ ID NO: 401373 - DNA, 20 bp, Artificial Sequence
  Description of Artificial Sequence: Synthetic oligonucleotide
  Target: LAMA2; (+) strand; PAM type: YTN; PAM sequence: CTT
aaccactaacctatacacac

SEQ ID NO: 401374 - DNA, 20 bp, Artificial Sequence
  Description of Artificial Sequence: Synthetic oligonucleotide
  Target: LAMA2; (+) strand; PAM type: YTN; PAM sequence: TTA
accactaacctatacacact

SEQ ID NO: 401375 - DNA, 20 bp, Artificial Sequence
  Description of Artificial Sequence: Synthetic oligonucleotide
  Target: LAMA2; (+) strand; PAM type: YTN; PAM sequence: CTA
acctatacacactagtagtc

SEQ ID NO: 401376 - DNA, 20 bp, Artificial Sequence
  Description of Artificial Sequence: Synthetic oligonucleotide
  Target: LAMA2; (+) strand; PAM type: YTN; PAM sequence: CTA
tacacactagtagtcatcta

SEQ ID NO: 401377 - DNA, 20 bp, Artificial Sequence
  Description of Artificial Sequence: Synthetic oligonucleotide
  Target: LAMA2; (+) strand; PAM type: YTN; PAM sequence: CTA
gtagtcatctataggtacaa

SEQ ID NO: 401378 - DNA, 20 bp, Artificial Sequence
  Description of Artificial Sequence: Synthetic oligonucleotide
  Target: LAMA2; (+) strand; PAM type: YTN; PAM sequence: CTA
taggtacaatatacaaatta

SEQ ID NO: 401379 - DNA, 20 bp, Artificial Sequence
  Description of Artificial Sequence: Synthetic oligonucleotide
  Target: LAMA2; (+) strand; PAM type: YTN; PAM sequence: TTA
ggatcaggagacaaatgcac

SEQ ID NO: 401380 - DNA, 20 bp, Artificial Sequence
  Description of Artificial Sequence: Synthetic oligonucleotide
  Target: LAMA2; (+) strand; PAM type: YTN; PAM sequence: TTT
atacaacacagttaatatta

SEQ ID NO: 401381 - DNA, 20 bp, Artificial Sequence
  Description of Artificial Sequence: Synthetic oligonucleotide
  Target: LAMA2; (+) strand; PAM type: YTN; PAM sequence: TTA
tacaacacagttaatattaa

SEQ ID NO: 401382 - DNA, 20 bp, Artificial Sequence
  Description of Artificial Sequence: Synthetic oligonucleotide
  Target: LAMA2; (+) strand; PAM type: YTN; PAM sequence: TTA
atattaaaatctcggtggtt

SEQ ID NO: 401383 - DNA, 20 bp, Artificial Sequence
  Description of Artificial Sequence: Synthetic oligonucleotide
  Target: LAMA2; (+) strand; PAM type: YTN; PAM sequence: TTA
aaatctcggtggtttttact

SEQ ID NO: 401384 - DNA, 20 bp, Artificial Sequence
  Description of Artificial Sequence: Synthetic oligonucleotide
  Target: LAMA2; (+) strand; PAM type: YTN; PAM sequence: CTC
ggtggtttttacttttttaa

SEQ ID NO: 401385 - DNA, 20 bp, Artificial Sequence
  Description of Artificial Sequence: Synthetic oligonucleotide
  Target: LAMA2; (+) strand; PAM type: YTN; PAM sequence: TTT
ttacttttttaacgtttaaa

SEQ ID NO: 401386 - DNA, 20 bp, Artificial Sequence
  Description of Artificial Sequence: Synthetic oligonucleotide
  Target: LAMA2; (+) strand; PAM type: YTN; PAM sequence: TTT
tacttttttaacgtttaaaa

SEQ ID NO: 401387 - DNA, 20 bp, Artificial Sequence
  Description of Artificial Sequence: Synthetic oligonucleotide
  Target: LAMA2; (+) strand; PAM type: YTN; PAM sequence: TTT
acttttttaacgtttaaaaa

SEQ ID NO: 401388 - DNA, 20 bp, Artificial Sequence
  Description of Artificial Sequence: Synthetic oligonucleotide
  Target: LAMA2; (+) strand; PAM type: YTN; PAM sequence: TTA
cttttttaacgtttaaaaac

SEQ ID NO: 401389 - DNA, 20 bp, Artificial Sequence
  Description of Artificial Sequence: Synthetic oligonucleotide
  Target: LAMA2; (+) strand; PAM type: YTN; PAM sequence: CTT
ttttaacgtttaaaaacctg

SEQ ID NO: 401390 - DNA, 20 bp, Artificial Sequence
  Description of Artificial Sequence: Synthetic oligonucleotide
  Target: LAMA2; (+) strand; PAM type: YTN; PAM sequence: TTT
tttaacgtttaaaaacctga

SEQ ID NO: 401391 - DNA, 20 bp, Artificial Sequence
  Description of Artificial Sequence: Synthetic oligonucleotide
  Target: LAMA2; (+) strand; PAM type: YTN; PAM sequence: TTT
ttaacgtttaaaaacctgag

SEQ ID NO: 401392 - DNA, 20 bp, Artificial Sequence
  Description of Artificial Sequence: Synthetic oligonucleotide
  Target: LAMA2; (+) strand; PAM type: YTN; PAM sequence: TTT
taacgtttaaaaacctgagt

SEQ ID NO: 401393 - DNA, 20 bp, Artificial Sequence
  Description of Artificial Sequence: Synthetic oligonucleotide
  Target: LAMA2; (+) strand; PAM type: YTN; PAM sequence: TTT
aacgtttaaaaacctgagta

SEQ ID NO: 401394 - DNA, 20 bp, Artificial Sequence
  Description of Artificial Sequence: Synthetic oligonucleotide
  Target: LAMA2; (+) strand; PAM type: YTN; PAM sequence: TTA
acgtttaaaaacctgagtaa

SEQ ID NO: 401395 - DNA, 20 bp, Artificial Sequence
  Description of Artificial Sequence: Synthetic oligonucleotide
  Target: LAMA2; (+) strand; PAM type: YTN; PAM sequence: TTT
aaaaacctgagtaacttttc

SEQ ID NO: 401396 - DNA, 20 bp, Artificial Sequence
  Description of Artificial Sequence: Synthetic oligonucleotide
  Target: LAMA2; (+) strand; PAM type: YTN; PAM sequence: TTA
aaaacctgagtaacttttca

SEQ ID NO: 401397 - DNA, 20 bp, Artificial Sequence
  Description of Artificial Sequence: Synthetic oligonucleotide
  Target: LAMA2; (+) strand; PAM type: YTN; PAM sequence: CTG
agtaacttttcagattttca

SEQ ID NO: 401398 - DNA, 20 bp, Artificial Sequence
  Description of Artificial Sequence: Synthetic oligonucleotide
  Target: LAMA2; (+) strand; PAM type: YTN; PAM sequence: CTT
ttcagattttcatgtccctt

SEQ ID NO: 401399 - DNA, 20 bp, Artificial Sequence
  Description of Artificial Sequence: Synthetic oligonucleotide
  Target: LAMA2; (+) strand; PAM type: YTN; PAM sequence: TTT
tcagattttcatgtcccttt

SEQ ID NO: 401400 - DNA, 20 bp, Artificial Sequence
  Description of Artificial Sequence: Synthetic oligonucleotide
  Target: LAMA2; (+) strand; PAM type: YTN; PAM sequence: TTT
cagattttcatgtccctttt

SEQ ID NO: 401401 - DNA, 20 bp, Artificial Sequence
  Description of Artificial Sequence: Synthetic oligonucleotide
  Target: LAMA2; (+) strand; PAM type: YTN; PAM sequence: TTC
agattttcatgtcccttttt

SEQ ID NO: 401402 - DNA, 20 bp, Artificial Sequence
  Description of Artificial Sequence: Synthetic oligonucleotide
  Target: LAMA2; (+) strand; PAM type: YTN; PAM sequence: TTT
tcatgtccctttttcagtag

SEQ ID NO: 401403 - DNA, 20 bp, Artificial Sequence
  Description of Artificial Sequence: Synthetic oligonucleotide
  Target: LAMA2; (+) strand; PAM type: YTN; PAM sequence: TTT
catgtccctttttcagtagt

SEQ ID NO: 401404 - DNA, 20 bp, Artificial Sequence
  Description of Artificial Sequence: Synthetic oligonucleotide
  Target: LAMA2; (+) strand; PAM type: YTN; PAM sequence: TTC
atgtccctttttcagtagta

SEQ ID NO: 401405 - DNA, 20 bp, Artificial Sequence
  Description of Artificial Sequence: Synthetic oligonucleotide
  Target: LAMA2; (+) strand; PAM type: YTN; PAM sequence: CTT
tttcagtagtaagtatatag

SEQ ID NO: 401406 - DNA, 20 bp, Artificial Sequence
  Description of Artificial Sequence: Synthetic oligonucleotide
  Target: LAMA2; (+) strand; PAM type: YTN; PAM sequence: TTT
ttcagtagtaagtatataga

SEQ ID NO: 401407 - DNA, 20 bp, Artificial Sequence
  Description of Artificial Sequence: Synthetic oligonucleotide
  Target: LAMA2; (+) strand; PAM type: YTN; PAM sequence: TTT
tcagtagtaagtatatagaa

SEQ ID NO: 401408 - DNA, 20 bp, Artificial Sequence
  Description of Artificial Sequence: Synthetic oligonucleotide
  Target: LAMA2; (+) strand; PAM type: YTN; PAM sequence: TTT
cagtagtaagtatatagaaa

SEQ ID NO: 401409 - DNA, 20 bp, Artificial Sequence
  Description of Artificial Sequence: Synthetic oligonucleotide
  Target: LAMA2; (+) strand; PAM type: YTN; PAM sequence: TTC
agtagtaagtatatagaaaa

SEQ ID NO: 401410 - DNA, 20 bp, Artificial Sequence
  Description of Artificial Sequence: Synthetic oligonucleotide
  Target: LAMA2; (+) strand; PAM type: YTN; PAM sequence: TTT
ccaatgctgaaaacaagtat

SEQ ID NO: 401411 - DNA, 20 bp, Artificial Sequence
  Description of Artificial Sequence: Synthetic oligonucleotide
  Target: LAMA2; (+) strand; PAM type: YTN; PAM sequence: TTC
caatgctgaaaacaagtata

SEQ ID NO: 401412 - DNA, 20 bp, Artificial Sequence
  Description of Artificial Sequence: Synthetic oligonucleotide
  Target: LAMA2; (+) strand; PAM type: YTN; PAM sequence: CTG
aaaacaagtataaatgcatg

SEQ ID NO: 401413 - DNA, 20 bp, Artificial Sequence
  Description of Artificial Sequence: Synthetic oligonucleotide
  Target: LAMA2; (+) strand; PAM type: YTN; PAM sequence: CTA
acatacctgaaaatgtttct

SEQ ID NO: 401414 - DNA, 20 bp, Artificial Sequence
  Description of Artificial Sequence: Synthetic oligonucleotide
  Target: LAMA2; (+) strand; PAM type: YTN; PAM sequence: CTG
aaaatgtttctctatcctaa

SEQ ID NO: 401415 - DNA, 20 bp, Artificial Sequence
  Description of Artificial Sequence: Synthetic oligonucleotide
  Target: LAMA2; (+) strand; PAM type: YTN; PAM sequence: TTT
ctctatcctaaaatgaaaat

SEQ ID NO: 401416 - DNA, 20 bp, Artificial Sequence
  Description of Artificial Sequence: Synthetic oligonucleotide
  Target: LAMA2; (+) strand; PAM type: YTN; PAM sequence: TTC
tctatcctaaaatgaaaata

SEQ ID NO: 401417 - DNA, 20 bp, Artificial Sequence
  Description of Artificial Sequence: Synthetic oligonucleotide
  Target: LAMA2; (+) strand; PAM type: YTN; PAM sequence: CTC
tatcctaaaatgaaaatacg

SEQ ID NO: 401418 - DNA, 20 bp, Artificial Sequence
  Description of Artificial Sequence: Synthetic oligonucleotide
  Target: LAMA2; (+) strand; PAM type: YTN; PAM sequence: CTA
tcctaaaatgaaaatacgtt

SEQ ID NO: 401419 - DNA, 20 bp, Artificial Sequence
  Description of Artificial Sequence: Synthetic oligonucleotide
  Target: LAMA2; (+) strand; PAM type: YTN; PAM sequence: CTA
aaatgaaaatacgttagttt

SEQ ID NO: 401420 - DNA, 20 bp, Artificial Sequence
  Description of Artificial Sequence: Synthetic oligonucleotide
  Target: LAMA2; (+) strand; PAM type: YTN; PAM sequence: TTA
gtttccctccaacccccacc

SEQ ID NO: 401421 - DNA, 20 bp, Artificial Sequence
  Description of Artificial Sequence: Synthetic oligonucleotide
  Target: LAMA2; (+) strand; PAM type: YTN; PAM sequence: TTT
ccctccaacccccaccccaa

SEQ ID NO: 401422 - DNA, 20 bp, Artificial Sequence
  Description of Artificial Sequence: Synthetic oligonucleotide
  Target: LAMA2; (+) strand; PAM type: YTN; PAM sequence: TTC
cctccaacccccaccccaac

SEQ ID NO: 401423 - DNA, 20 bp, Artificial Sequence
  Description of Artificial Sequence: Synthetic oligonucleotide
  Target: LAMA2; (+) strand; PAM type: YTN; PAM sequence: CTC
caacccccaccccaacccct

SEQ ID NO: 401424 - DNA, 20 bp, Artificial Sequence
  Description of Artificial Sequence: Synthetic oligonucleotide
  Target: LAMA2; (+) strand; PAM type: YTN; PAM sequence: CTG
ccctgctttggaaatgcaga

SEQ ID NO: 401425 - DNA, 20 bp, Artificial Sequence
  Description of Artificial Sequence: Synthetic oligonucleotide
  Target: LAMA2; (+) strand; PAM type: YTN; PAM sequence: CTG
ctttggaaatgcagattaaa

SEQ ID NO: 401426 - DNA, 20 bp, Artificial Sequence
  Description of Artificial Sequence: Synthetic oligonucleotide
  Target: LAMA2; (+) strand; PAM type: YTN; PAM sequence: CTT
tggaaatgcagattaaatct

SEQ ID NO: 401427 - DNA, 20 bp, Artificial Sequence
  Description of Artificial Sequence: Synthetic oligonucleotide
  Target: LAMA2; (+) strand; PAM type: YTN; PAM sequence: TTT
ggaaatgcagattaaatctt

SEQ ID NO: 401428 - DNA, 20 bp, Artificial Sequence
  Description of Artificial Sequence: Synthetic oligonucleotide
  Target: LAMA2; (+) strand; PAM type: YTN; PAM sequence: TTG
gaaatgcagattaaatctta

SEQ ID NO: 401429 - DNA, 20 bp, Artificial Sequence
  Description of Artificial Sequence: Synthetic oligonucleotide
  Target: LAMA2; (+) strand; PAM type: YTN; PAM sequence: TTA
aatcttaagcctcgttttca

SEQ ID NO: 401430 - DNA, 20 bp, Artificial Sequence
  Description of Artificial Sequence: Synthetic oligonucleotide
  Target: LAMA2; (+) strand; PAM type: YTN; PAM sequence: CTT
aagcctcgttttcatgaagc

SEQ ID NO: 401431 - DNA, 20 bp, Artificial Sequence
  Description of Artificial Sequence: Synthetic oligonucleotide
  Target: LAMA2; (+) strand; PAM type: YTN; PAM sequence: TTA
agcctcgttttcatgaagct

SEQ ID NO: 401432 - DNA, 20 bp, Artificial Sequence
  Description of Artificial Sequence: Synthetic oligonucleotide
  Target: LAMA2; (+) strand; PAM type: YTN; PAM sequence: CTC
gttttcatgaagctcatgtg

SEQ ID NO: 401433 - DNA, 20 bp, Artificial Sequence
  Description of Artificial Sequence: Synthetic oligonucleotide
  Target: LAMA2; (+) strand; PAM type: YTN; PAM sequence: TTT
tcatgaagctcatgtggata

SEQ ID NO: 401434 - DNA, 20 bp, Artificial Sequence
  Description of Artificial Sequence: Synthetic oligonucleotide
  Target: LAMA2; (+) strand; PAM type: YTN; PAM sequence: TTT
catgaagctcatgtggataa

SEQ ID NO: 401435 - DNA, 20 bp, Artificial Sequence
  Description of Artificial Sequence: Synthetic oligonucleotide
  Target: LAMA2; (+) strand; PAM type: YTN; PAM sequence: TTC
atgaagctcatgtggataaa

SEQ ID NO: 401436 - DNA, 20 bp, Artificial Sequence
  Description of Artificial Sequence: Synthetic oligonucleotide
  Target: LAMA2; (+) strand; PAM type: YTN; PAM sequence: CTC
atgtggataaatttatctcg

SEQ ID NO: 401437 - DNA, 20 bp, Artificial Sequence
  Description of Artificial Sequence: Synthetic oligonucleotide
  Target: LAMA2; (+) strand; PAM type: YTN; PAM sequence: TTT
atctcgtgaataagttcagc

SEQ ID NO: 401438 - DNA, 20 bp, Artificial Sequence
  Description of Artificial Sequence: Synthetic oligonucleotide
  Target: LAMA2; (+) strand; PAM type: YTN; PAM sequence: TTA
tctcgtgaataagttcagca

SEQ ID NO: 401439 - DNA, 20 bp, Artificial Sequence
  Description of Artificial Sequence: Synthetic oligonucleotide
  Target: LAMA2; (+) strand; PAM type: YTN; PAM sequence: CTC
gtgaataagttcagcagcaa

SEQ ID NO: 401440 - DNA, 20 bp, Artificial Sequence
  Description of Artificial Sequence: Synthetic oligonucleotide
  Target: LAMA2; (+) strand; PAM type: YTN; PAM sequence: TTC
agcagcaaatcacaatatga

SEQ ID NO: 401441 - DNA, 20 bp, Artificial Sequence
  Description of Artificial Sequence: Synthetic oligonucleotide
  Target: LAMA2; (+) strand; PAM type: YTN; PAM sequence: CTT
atacaatgaacatttagaat

SEQ ID NO: 401442 - DNA, 20 bp, Artificial Sequence
  Description of Artificial Sequence: Synthetic oligonucleotide
  Target: LAMA2; (+) strand; PAM type: YTN; PAM sequence: TTA
tacaatgaacatttagaata

SEQ ID NO: 401443 - DNA, 20 bp, Artificial Sequence
  Description of Artificial Sequence: Synthetic oligonucleotide
  Target: LAMA2; (+) strand; PAM type: YTN; PAM sequence: TTT
agaatagtcacgtcactact

SEQ ID NO: 401444 - DNA, 20 bp, Artificial Sequence
  Description of Artificial Sequence: Synthetic oligonucleotide
  Target: LAMA2; (+) strand; PAM type: YTN; PAM sequence: TTA
gaatagtcacgtcactactt

SEQ ID NO: 401445 - DNA, 20 bp, Artificial Sequence
  Description of Artificial Sequence: Synthetic oligonucleotide
  Target: LAMA2; (+) strand; PAM type: YTN; PAM sequence: CTA
ctttaagagctaatcaggta

SEQ ID NO: 401446 - DNA, 20 bp, Artificial Sequence
  Description of Artificial Sequence: Synthetic oligonucleotide
  Target: LAMA2; (+) strand; PAM type: YTN; PAM sequence: CTT
taagagctaatcaggtattc

SEQ ID NO: 401447 - DNA, 20 bp, Artificial Sequence
  Description of Artificial Sequence: Synthetic oligonucleotide
  Target: LAMA2; (+) strand; PAM type: YTN; PAM sequence: TTT
aagagctaatcaggtattca

SEQ ID NO: 401448 - DNA, 20 bp, Artificial Sequence
  Description of Artificial Sequence: Synthetic oligonucleotide
  Target: LAMA2; (+) strand; PAM type: YTN; PAM sequence: TTA
agagctaatcaggtattcat

SEQ ID NO: 401449 - DNA, 20 bp, Artificial Sequence
  Description of Artificial Sequence: Synthetic oligonucleotide
  Target: LAMA2; (+) strand; PAM type: YTN; PAM sequence: CTA
atcaggtattcatagcaaaa

SEQ ID NO: 401450 - DNA, 20 bp, Artificial Sequence
  Description of Artificial Sequence: Synthetic oligonucleotide
  Target: LAMA2; (+) strand; PAM type: YTN; PAM sequence: TTC
atagcaaaagtccctgagaa

SEQ ID NO: 401451 - DNA, 20 bp, Artificial Sequence
  Description of Artificial Sequence: Synthetic oligonucleotide
  Target: LAMA2; (+) strand; PAM type: YTN; PAM sequence: CTG
agaaaatttaatttacctaa

SEQ ID NO: 401452 - DNA, 20 bp, Artificial Sequence
  Description of Artificial Sequence: Synthetic oligonucleotide
  Target: LAMA2; (+) strand; PAM type: YTN; PAM sequence: TTT
aatttacctaaaaaaatttg

SEQ ID NO: 401453 - DNA, 20 bp, Artificial Sequence
  Description of Artificial Sequence: Synthetic oligonucleotide
  Target: LAMA2; (+) strand; PAM type: YTN; PAM sequence: TTA
atttacctaaaaaaatttgc

SEQ ID NO: 401454 - DNA, 20 bp, Artificial Sequence
  Description of Artificial Sequence: Synthetic oligonucleotide
  Target: LAMA2; (+) strand; PAM type: YTN; PAM sequence: TTT
acctaaaaaaatttgcttca

SEQ ID NO: 401455 - DNA, 20 bp, Artificial Sequence
  Description of Artificial Sequence: Synthetic oligonucleotide
  Target: LAMA2; (+) strand; PAM type: YTN; PAM sequence: TTA
cctaaaaaaatttgcttcat

SEQ ID NO: 401456 - DNA, 20 bp, Artificial Sequence
  Description of Artificial Sequence: Synthetic oligonucleotide
  Target: LAMA2; (+) strand; PAM type: YTN; PAM sequence: CTA
aaaaaatttgcttcatttgc

SEQ ID NO: 401457 - DNA, 20 bp, Artificial Sequence
  Description of Artificial Sequence: Synthetic oligonucleotide
  Target: LAMA2; (+) strand; PAM type: YTN; PAM sequence: TTT
gcttcatttgctacacctga

SEQ ID NO: 401458 - DNA, 20 bp, Artificial Sequence
  Description of Artificial Sequence: Synthetic oligonucleotide
  Target: LAMA2; (+) strand; PAM type: YTN; PAM sequence: TTG
cttcatttgctacacctgaa

SEQ ID NO: 401459 - DNA, 20 bp, Artificial Sequence
  Description of Artificial Sequence: Synthetic oligonucleotide
  Target: LAMA2; (+) strand; PAM type: YTN; PAM sequence: CTT
catttgctacacctgaatga

SEQ ID NO: 401460 - DNA, 20 bp, Artificial Sequence
  Description of Artificial Sequence: Synthetic oligonucleotide
  Target: LAMA2; (+) strand; PAM type: YTN; PAM sequence: TTC
atttgctacacctgaatgag

SEQ ID NO: 401461 - DNA, 20 bp, Artificial Sequence
  Description of Artificial Sequence: Synthetic oligonucleotide
  Target: LAMA2; (+) strand; PAM type: YTN; PAM sequence: TTT
gctacacctgaatgagacaa

SEQ ID NO: 401462 - DNA, 20 bp, Artificial Sequence
  Description of Artificial Sequence: Synthetic oligonucleotide
  Target: LAMA2; (+) strand; PAM type: YTN; PAM sequence: TTG
ctacacctgaatgagacaaa

SEQ ID NO: 401463 - DNA, 20 bp, Artificial Sequence
  Description of Artificial Sequence: Synthetic oligonucleotide
  Target: LAMA2; (+) strand; PAM type: YTN; PAM sequence: CTA
cacctgaatgagacaaagtt

SEQ ID NO: 401464 - DNA, 20 bp, Artificial Sequence
  Description of Artificial Sequence: Synthetic oligonucleotide
  Target: LAMA2; (+) strand; PAM type: YTN; PAM sequence: CTG
aatgagacaaagttcagcct

SEQ ID NO: 401465 - DNA, 20 bp, Artificial Sequence
  Description of Artificial Sequence: Synthetic oligonucleotide
  Target: LAMA2; (+) strand; PAM type: YTN; PAM sequence: TTC
agccttttccctttgtaaat

SEQ ID NO: 401466 - DNA, 20 bp, Artificial Sequence
  Description of Artificial Sequence: Synthetic oligonucleotide
  Target: LAMA2; (+) strand; PAM type: YTN; PAM sequence: CTT
ttccctttgtaaatgtgtcc

SEQ ID NO: 401467 - DNA, 20 bp, Artificial Sequence
  Description of Artificial Sequence: Synthetic oligonucleotide
  Target: LAMA2; (+) strand; PAM type: YTN; PAM sequence: TTT
tccctttgtaaatgtgtccg

SEQ ID NO: 401468 - DNA, 20 bp, Artificial Sequence
  Description of Artificial Sequence: Synthetic oligonucleotide
  Target: LAMA2; (+) strand; PAM type: YTN; PAM sequence: TTT
ccctttgtaaatgtgtccga

SEQ ID NO: 401469 - DNA, 20 bp, Artificial Sequence
  Description of Artificial Sequence: Synthetic oligonucleotide
  Target: LAMA2; (+) strand; PAM type: YTN; PAM sequence: TTC
cctttgtaaatgtgtccgag

SEQ ID NO: 401470 - DNA, 20 bp, Artificial Sequence
  Description of Artificial Sequence: Synthetic oligonucleotide
  Target: LAMA2; (+) strand; PAM type: YTN; PAM sequence: CTT
tgtaaatgtgtccgaggtca

SEQ ID NO: 401471 - DNA, 20 bp, Artificial Sequence
  Description of Artificial Sequence: Synthetic oligonucleotide
  Target: LAMA2; (+) strand; PAM type: YTN; PAM sequence: TTT
gtaaatgtgtccgaggtcag

SEQ ID NO: 401472 - DNA, 20 bp, Artificial Sequence
  Description of Artificial Sequence: Synthetic oligonucleotide
  Target: LAMA2; (+) strand; PAM type: YTN; PAM sequence: TTG
taaatgtgtccgaggtcagc

SEQ ID NO: 401473 - DNA, 20 bp, Artificial Sequence
  Description of Artificial Sequence: Synthetic oligonucleotide
  Target: LAMA2; (+) strand; PAM type: YTN; PAM sequence: CTC
gctttgtcaagcatggatta

SEQ ID NO: 401474 - DNA, 20 bp, Artificial Sequence
  Description of Artificial Sequence: Synthetic oligonucleotide
  Target: LAMA2; (+) strand; PAM type: YTN; PAM sequence: CTT
tgtcaagcatggattaagcc

SEQ ID NO: 401475 - DNA, 20 bp, Artificial Sequence
  Description of Artificial Sequence: Synthetic oligonucleotide
  Target: LAMA2; (+) strand; PAM type: YTN; PAM sequence: TTT
gtcaagcatggattaagcca

SEQ ID NO: 401476 - DNA, 20 bp, Artificial Sequence
  Description of Artificial Sequence: Synthetic oligonucleotide
  Target: LAMA2; (+) strand; PAM type: YTN; PAM sequence: TTG
tcaagcatggattaagccac

SEQ ID NO: 401477 - DNA, 20 bp, Artificial Sequence
  Description of Artificial Sequence: Synthetic oligonucleotide
  Target: LAMA2; (+) strand; PAM type: YTN; PAM sequence: TTA
agccactaactccacaccct

SEQ ID NO: 401478 - DNA, 20 bp, Artificial Sequence
  Description of Artificial Sequence: Synthetic oligonucleotide
  Target: LAMA2; (+) strand; PAM type: YTN; PAM sequence: CTA
actccacaccctttgttttg

SEQ ID NO: 401479 - DNA, 20 bp, Artificial Sequence
  Description of Artificial Sequence: Synthetic oligonucleotide
  Target: LAMA2; (+) strand; PAM type: YTN; PAM sequence: CTC
cacaccctttgttttgtttt

SEQ ID NO: 401480 - DNA, 20 bp, Artificial Sequence
  Description of Artificial Sequence: Synthetic oligonucleotide
  Target: LAMA2; (+) strand; PAM type: YTN; PAM sequence: CTT
tgttttgtttttcataccct

SEQ ID NO: 401481 - DNA, 20 bp, Artificial Sequence
  Description of Artificial Sequence: Synthetic oligonucleotide
  Target: LAMA2; (+) strand; PAM type: YTN; PAM sequence: TTT
gttttgtttttcataccctc

SEQ ID NO: 401482 - DNA, 20 bp, Artificial Sequence
  Description of Artificial Sequence: Synthetic oligonucleotide
  Target: LAMA2; (+) strand; PAM type: YTN; PAM sequence: TTG
ttttgtttttcataccctca

SEQ ID NO: 401483 - DNA, 20 bp, Artificial Sequence
  Description of Artificial Sequence: Synthetic oligonucleotide
  Target: LAMA2; (+) strand; PAM type: YTN; PAM sequence: TTT
tgtttttcataccctcatct

SEQ ID NO: 401484 - DNA, 20 bp, Artificial Sequence
  Description of Artificial Sequence: Synthetic oligonucleotide
  Target: LAMA2; (+) strand; PAM type: YTN; PAM sequence: TTT
gtttttcataccctcatctg

SEQ ID NO: 401485 - DNA, 20 bp, Artificial Sequence
  Description of Artificial Sequence: Synthetic oligonucleotide
  Target: LAMA2; (+) strand; PAM type: YTN; PAM sequence: TTG
tttttcataccctcatctgc

SEQ ID NO: 401486 - DNA, 20 bp, Artificial Sequence
  Description of Artificial Sequence: Synthetic oligonucleotide
  Target: LAMA2; (+) strand; PAM type: YTN; PAM sequence: TTT
ttcataccctcatctgctga

SEQ ID NO: 401487 - DNA, 20 bp, Artificial Sequence
  Description of Artificial Sequence: Synthetic oligonucleotide
  Target: LAMA2; (+) strand; PAM type: YTN; PAM sequence: TTT
tcataccctcatctgctgac

SEQ ID NO: 401488 - DNA, 20 bp, Artificial Sequence
  Description of Artificial Sequence: Synthetic oligonucleotide
  Target: LAMA2; (+) strand; PAM type: YTN; PAM sequence: TTT
cataccctcatctgctgaca

SEQ ID NO: 401489 - DNA, 20 bp, Artificial Sequence
  Description of Artificial Sequence: Synthetic oligonucleotide
  Target: LAMA2; (+) strand; PAM type: YTN; PAM sequence: TTC
ataccctcatctgctgacag

SEQ ID NO: 401490 - DNA, 20 bp, Artificial Sequence
  Description of Artificial Sequence: Synthetic oligonucleotide
  Target: LAMA2; (+) strand; PAM type: YTN; PAM sequence: CTC
atctgctgacagatacagct

SEQ ID NO: 401491 - DNA, 20 bp, Artificial Sequence
  Description of Artificial Sequence: Synthetic oligonucleotide
  Target: LAMA2; (+) strand; PAM type: YTN; PAM sequence: CTG
ctgacagatacagctgctaa

SEQ ID NO: 401492 - DNA, 20 bp, Artificial Sequence
  Description of Artificial Sequence: Synthetic oligonucleotide
  Target: LAMA2; (+) strand; PAM type: YTN; PAM sequence: CTG
acagatacagctgctaaact

SEQ ID NO: 401493 - DNA, 20 bp, Artificial Sequence
  Description of Artificial Sequence: Synthetic oligonucleotide
  Target: LAMA2; (+) strand; PAM type: YTN; PAM sequence: CTG
ctaaactgcaagctgttaag

SEQ ID NO: 401494 - DNA, 20 bp, Artificial Sequence
  Description of Artificial Sequence: Synthetic oligonucleotide
  Target: LAMA2; (+) strand; PAM type: YTN; PAM sequence: CTA
aactgcaagctgttaaggac

SEQ ID NO: 401495 - DNA, 20 bp, Artificial Sequence
  Description of Artificial Sequence: Synthetic oligonucleotide
  Target: LAMA2; (+) strand; PAM type: YTN; PAM sequence: CTG
caagctgttaaggacaaagc

SEQ ID NO: 401496 - DNA, 20 bp, Artificial Sequence
  Description of Artificial Sequence: Synthetic oligonucleotide
  Target: LAMA2; (+) strand; PAM type: YTN; PAM sequence: CTG
ttaaggacaaagccagacaa

SEQ ID NO: 401497 - DNA, 20 bp, Artificial Sequence
  Description of Artificial Sequence: Synthetic oligonucleotide
  Target: LAMA2; (+) strand; PAM type: YTN; PAM sequence: TTA
aggacaaagccagacaagcc

SEQ ID NO: 401498 - DNA, 20 bp, Artificial Sequence
  Description of Artificial Sequence: Synthetic oligonucleotide
  Target: LAMA2; (+) strand; PAM type: YTN; PAM sequence: CTA
aagatgtactggcacagatt

SEQ ID NO: 401499 - DNA, 20 bp, Artificial Sequence
  Description of Artificial Sequence: Synthetic oligonucleotide
  Target: LAMA2; (+) strand; PAM type: YTN; PAM sequence: CTG
gcacagattacagagctcca

SEQ ID NO: 401500 - DNA, 20 bp, Artificial Sequence
  Description of Artificial Sequence: Synthetic oligonucleotide
  Target: LAMA2; (+) strand; PAM type: YTN; PAM sequence: TTA
cagagctccaccagaacctc

SEQ ID NO: 401501 - DNA, 20 bp, Artificial Sequence
  Description of Artificial Sequence: Synthetic oligonucleotide
  Target: LAMA2; (+) strand; PAM type: YTN; PAM sequence: CTC
caccagaacctcgatggcct

SEQ ID NO: 401502 - DNA, 20 bp, Artificial Sequence
  Description of Artificial Sequence: Synthetic oligonucleotide
  Target: LAMA2; (+) strand; PAM type: YTN; PAM sequence: CTC
gatggcctgaagaagaatta

SEQ ID NO: 401503 - DNA, 20 bp, Artificial Sequence
  Description of Artificial Sequence: Synthetic oligonucleotide
  Target: LAMA2; (+) strand; PAM type: YTN; PAM sequence: CTG
aagaagaattacaataaact

SEQ ID NO: 401504 - DNA, 20 bp, Artificial Sequence
  Description of Artificial Sequence: Synthetic oligonucleotide
  Target: LAMA2; (+) strand; PAM type: YTN; PAM sequence: TTA
caataaactagcagacagcg

SEQ ID NO: 401505 - DNA, 20 bp, Artificial Sequence
  Description of Artificial Sequence: Synthetic oligonucleotide
  Target: LAMA2; (+) strand; PAM type: YTN; PAM sequence: CTA
gcagacagcgtcgccaaaac

SEQ ID NO: 401506 - DNA, 20 bp, Artificial Sequence
  Description of Artificial Sequence: Synthetic oligonucleotide
  Target: LAMA2; (+) strand; PAM type: YTN; PAM sequence: CTG
tggttaaagatccttccaag

SEQ ID NO: 401507 - DNA, 20 bp, Artificial Sequence
  Description of Artificial Sequence: Synthetic oligonucleotide
  Target: LAMA2; (+) strand; PAM type: YTN; PAM sequence: TTA
aagatccttccaagaacagt

SEQ ID NO: 401508 - DNA, 20 bp, Artificial Sequence
  Description of Artificial Sequence: Synthetic oligonucleotide
  Target: LAMA2; (+) strand; PAM type: YTN; PAM sequence: CTT
ccaagaacagtaagatctcc

SEQ ID NO: 401509 - DNA, 20 bp, Artificial Sequence
  Description of Artificial Sequence: Synthetic oligonucleotide
  Target: LAMA2; (+) strand; PAM type: YTN; PAM sequence: TTC
caagaacagtaagatctcct

SEQ ID NO: 401510 - DNA, 20 bp, Artificial Sequence
  Description of Artificial Sequence: Synthetic oligonucleotide
  Target: LAMA2; (+) strand; PAM type: YTN; PAM sequence: CTC
ctttttcattgtgatgatgt

SEQ ID NO: 401511 - DNA, 20 bp, Artificial Sequence
  Description of Artificial Sequence: Synthetic oligonucleotide
  Target: LAMA2; (+) strand; PAM type: YTN; PAM sequence: CTT
tttcattgtgatgatgtcat

SEQ ID NO: 401512 - DNA, 20 bp, Artificial Sequence
  Description of Artificial Sequence: Synthetic oligonucleotide
  Target: LAMA2; (+) strand; PAM type: YTN; PAM sequence: TTT
ttcattgtgatgatgtcatt

SEQ ID NO: 401513 - DNA, 20 bp, Artificial Sequence
  Description of Artificial Sequence: Synthetic oligonucleotide
  Target: LAMA2; (+) strand; PAM type: YTN; PAM sequence: TTT
tcattgtgatgatgtcattt

SEQ ID NO: 401514 - DNA, 20 bp, Artificial Sequence
  Description of Artificial Sequence: Synthetic oligonucleotide
  Target: LAMA2; (+) strand; PAM type: YTN; PAM sequence: TTT
cattgtgatgatgtcattta

SEQ ID NO: 401515 - DNA, 20 bp, Artificial Sequence
  Description of Artificial Sequence: Synthetic oligonucleotide
  Target: LAMA2; (+) strand; PAM type: YTN; PAM sequence: TTC
attgtgatgatgtcatttat

SEQ ID NO: 401516 - DNA, 20 bp, Artificial Sequence
  Description of Artificial Sequence: Synthetic oligonucleotide
  Target: LAMA2; (+) strand; PAM type: YTN; PAM sequence: TTG
tgatgatgtcatttatttcc

SEQ ID NO: 401517 - DNA, 20 bp, Artificial Sequence
  Description of Artificial Sequence: Synthetic oligonucleotide
  Target: LAMA2; (+) strand; PAM type: YTN; PAM sequence: TTT
atttcctctcactgtaaaag

SEQ ID NO: 401518 - DNA, 20 bp, Artificial Sequence
  Description of Artificial Sequence: Synthetic oligonucleotide
  Target: LAMA2; (+) strand; PAM type: YTN; PAM sequence: TTA
tttcctctcactgtaaaagt

SEQ ID NO: 401519 - DNA, 20 bp, Artificial Sequence
  Description of Artificial Sequence: Synthetic oligonucleotide
  Target: LAMA2; (+) strand; PAM type: YTN; PAM sequence: TTT
cctctcactgtaaaagtatc

SEQ ID NO: 401520 - DNA, 20 bp, Artificial Sequence
  Description of Artificial Sequence: Synthetic oligonucleotide
  Target: LAMA2; (+) strand; PAM type: YTN; PAM sequence: TTC
ctctcactgtaaaagtatcc

SEQ ID NO: 401521 - DNA, 20 bp, Artificial Sequence
  Description of Artificial Sequence: Synthetic oligonucleotide
  Target: LAMA2; (+) strand; PAM type: YTN; PAM sequence: CTC
tcactgtaaaagtatcccag

SEQ ID NO: 401522 - DNA, 20 bp, Artificial Sequence
  Description of Artificial Sequence: Synthetic oligonucleotide
  Target: LAMA2; (+) strand; PAM type: YTN; PAM sequence: CTC
actgtaaaagtatcccagac

SEQ ID NO: 401523 - DNA, 20 bp, Artificial Sequence
  Description of Artificial Sequence: Synthetic oligonucleotide
  Target: LAMA2; (+) strand; PAM type: YTN; PAM sequence: CTG
taaaagtatcccagacctgt

SEQ ID NO: 401524 - DNA, 20 bp, Artificial Sequence
  Description of Artificial Sequence: Synthetic oligonucleotide
  Target: LAMA2; (+) strand; PAM type: YTN; PAM sequence: CTG
taaatgctcgagttggaaag

SEQ ID NO: 401525 - DNA, 20 bp, Artificial Sequence
  Description of Artificial Sequence: Synthetic oligonucleotide
  Target: LAMA2; (+) strand; PAM type: YTN; PAM sequence: CTC
gagttggaaagaccctcatg

SEQ ID NO: 401526 - DNA, 20 bp, Artificial Sequence
  Description of Artificial Sequence: Synthetic oligonucleotide
  Target: LAMA2; (+) strand; PAM type: YTN; PAM sequence: TTG
gaaagaccctcatggtggtg

SEQ ID NO: 401527 - DNA, 20 bp, Artificial Sequence
  Description of Artificial Sequence: Synthetic oligonucleotide
  Target: LAMA2; (+) strand; PAM type: YTN; PAM sequence: CTC
atggtggtgtagtctgcctt

SEQ ID NO: 401528 - DNA, 20 bp, Artificial Sequence
  Description of Artificial Sequence: Synthetic oligonucleotide
  Target: LAMA2; (+) strand; PAM type: YTN; PAM sequence: CTG
ccttccttctttcatagatt

SEQ ID NO: 401529 - DNA, 20 bp, Artificial Sequence
  Description of Artificial Sequence: Synthetic oligonucleotide
  Target: LAMA2; (+) strand; PAM type: YTN; PAM sequence: CTT
ccttctttcatagattggcc

SEQ ID NO: 401530 - DNA, 20 bp, Artificial Sequence
  Description of Artificial Sequence: Synthetic oligonucleotide
  Target: LAMA2; (+) strand; PAM type: YTN; PAM sequence: TTC
cttctttcatagattggcct

SEQ ID NO: 401531 - DNA, 20 bp, Artificial Sequence
  Description of Artificial Sequence: Synthetic oligonucleotide
  Target: LAMA2; (+) strand; PAM type: YTN; PAM sequence: CTT
ctttcatagattggcctcag

SEQ ID NO: 401532 - DNA, 20 bp, Artificial Sequence
  Description of Artificial Sequence: Synthetic oligonucleotide
  Target: LAMA2; (+) strand; PAM type: YTN; PAM sequence: TTC
tttcatagattggcctcaga

SEQ ID NO: 401533 - DNA, 20 bp, Artificial Sequence
  Description of Artificial Sequence: Synthetic oligonucleotide
  Target: LAMA2; (+) strand; PAM type: YTN; PAM sequence: CTT
tcatagattggcctcagaaa

SEQ ID NO: 401534 - DNA, 20 bp, Artificial Sequence
  Description of Artificial Sequence: Synthetic oligonucleotide
  Target: LAMA2; (+) strand; PAM type: YTN; PAM sequence: TTT
catagattggcctcagaaat

SEQ ID NO: 401535 - DNA, 20 bp, Artificial Sequence
  Description of Artificial Sequence: Synthetic oligonucleotide
  Target: LAMA2; (+) strand; PAM type: YTN; PAM sequence: TTC
atagattggcctcagaaatt

SEQ ID NO: 401536 - DNA, 20 bp, Artificial Sequence
  Description of Artificial Sequence: Synthetic oligonucleotide
  Target: LAMA2; (+) strand; PAM type: YTN; PAM sequence: TTG
gcctcagaaattgagtgtca

SEQ ID NO: 401537 - DNA, 20 bp, Artificial Sequence
  Description of Artificial Sequence: Synthetic oligonucleotide
  Target: LAMA2; (+) strand; PAM type: YTN; PAM sequence: CTC
agaaattgagtgtcatgcag

SEQ ID NO: 401538 - DNA, 20 bp, Artificial Sequence
  Description of Artificial Sequence: Synthetic oligonucleotide
  Target: LAMA2; (+) strand; PAM type: YTN; PAM sequence: TTG
agtgtcatgcagttccaaag

SEQ ID NO: 401539 - DNA, 20 bp, Artificial Sequence
  Description of Artificial Sequence: Synthetic oligonucleotide
  Target: LAMA2; (+) strand; PAM type: YTN; PAM sequence: TTC
caaagctggaatccaagtct

SEQ ID NO: 401540 - DNA, 20 bp, Artificial Sequence
  Description of Artificial Sequence: Synthetic oligonucleotide
  Target: LAMA2; (+) strand; PAM type: YTN; PAM sequence: CTG
gaatccaagtcttctagctc

SEQ ID NO: 401541 - DNA, 20 bp, Artificial Sequence
  Description of Artificial Sequence: Synthetic oligonucleotide
  Target: LAMA2; (+) strand; PAM type: YTN; PAM sequence: CTT
ctagctctgccccggtgctt

SEQ ID NO: 401542 - DNA, 20 bp, Artificial Sequence
  Description of Artificial Sequence: Synthetic oligonucleotide
  Target: LAMA2; (+) strand; PAM type: YTN; PAM sequence: TTC
tagctctgccccggtgcttt

SEQ ID NO: 401543 - DNA, 20 bp, Artificial Sequence
  Description of Artificial Sequence: Synthetic oligonucleotide
  Target: LAMA2; (+) strand; PAM type: YTN; PAM sequence: CTA
gctctgccccggtgcttttt

SEQ ID NO: 401544 - DNA, 20 bp, Artificial Sequence
  Description of Artificial Sequence: Synthetic oligonucleotide
  Target: LAMA2; (+) strand; PAM type: YTN; PAM sequence: CTC
tgccccggtgcttttttcct

SEQ ID NO: 401545 - DNA, 20 bp, Artificial Sequence
  Description of Artificial Sequence: Synthetic oligonucleotide
  Target: LAMA2; (+) strand; PAM type: YTN; PAM sequence: CTG
ccccggtgcttttttcctct

SEQ ID NO: 401546 - DNA, 20 bp, Artificial Sequence
  Description of Artificial Sequence: Synthetic oligonucleotide
  Target: LAMA2; (+) strand; PAM type: YTN; PAM sequence: CTT
ttttcctctgaaatttttcc

SEQ ID NO: 401547 - DNA, 20 bp, Artificial Sequence
  Description of Artificial Sequence: Synthetic oligonucleotide
  Target: LAMA2; (+) strand; PAM type: YTN; PAM sequence: TTT
tttcctctgaaatttttcca

SEQ ID NO: 401548 - DNA, 20 bp, Artificial Sequence
  Description of Artificial Sequence: Synthetic oligonucleotide
  Target: LAMA2; (+) strand; PAM type: YTN; PAM sequence: TTT
ttcctctgaaatttttccag

SEQ ID NO: 401549 - DNA, 20 bp, Artificial Sequence
  Description of Artificial Sequence: Synthetic oligonucleotide
  Target: LAMA2; (+) strand; PAM type: YTN; PAM sequence: TTT
tcctctgaaatttttccagt

SEQ ID NO: 401550 - DNA, 20 bp, Artificial Sequence
  Description of Artificial Sequence: Synthetic oligonucleotide
  Target: LAMA2; (+) strand; PAM type: YTN; PAM sequence: TTT
cctctgaaatttttccagtt

SEQ ID NO: 401551 - DNA, 20 bp, Artificial Sequence
  Description of Artificial Sequence: Synthetic oligonucleotide
  Target: LAMA2; (+) strand; PAM type: YTN; PAM sequence: TTC
ctctgaaatttttccagttg

SEQ ID NO: 401552 - DNA, 20 bp, Artificial Sequence
  Description of Artificial Sequence: Synthetic oligonucleotide
  Target: LAMA2; (+) strand; PAM type: YTN; PAM sequence: CTC
tgaaatttttccagttgaga

SEQ ID NO: 401553 - DNA, 20 bp, Artificial Sequence
  Description of Artificial Sequence: Synthetic oligonucleotide
  Target: LAMA2; (+) strand; PAM type: YTN; PAM sequence: CTG
aaatttttccagttgagaag

SEQ ID NO: 401554 - DNA, 20 bp, Artificial Sequence
  Description of Artificial Sequence: Synthetic oligonucleotide
  Target: LAMA2; (+) strand; PAM type: YTN; PAM sequence: TTT
ttccagttgagaagagatta

SEQ ID NO: 401555 - DNA, 20 bp, Artificial Sequence
  Description of Artificial Sequence: Synthetic oligonucleotide
  Target: LAMA2; (+) strand; PAM type: YTN; PAM sequence: TTT
tccagttgagaagagattag

SEQ ID NO: 401556 - DNA, 20 bp, Artificial Sequence
  Description of Artificial Sequence: Synthetic oligonucleotide
  Target: LAMA2; (+) strand; PAM type: YTN; PAM sequence: TTT
ccagttgagaagagattagg

SEQ ID NO: 401557 - DNA, 20 bp, Artificial Sequence
  Description of Artificial Sequence: Synthetic oligonucleotide
  Target: LAMA2; (+) strand; PAM type: YTN; PAM sequence: TTC
cagttgagaagagattagga

SEQ ID NO: 401558 - DNA, 20 bp, Artificial Sequence
  Description of Artificial Sequence: Synthetic oligonucleotide
  Target: LAMA2; (+) strand; PAM type: YTN; PAM sequence: TTG
agaagagattaggaattctc

SEQ ID NO: 401559 - DNA, 20 bp, Artificial Sequence
  Description of Artificial Sequence: Synthetic oligonucleotide
  Target: LAMA2; (+) strand; PAM type: YTN; PAM sequence: TTA
ggaattctcaaggtgtgcct

SEQ ID NO: 401560 - DNA, 20 bp, Artificial Sequence
  Description of Artificial Sequence: Synthetic oligonucleotide
  Target: LAMA2; (+) strand; PAM type: YTN; PAM sequence: TTC
tcaaggtgtgcctaacattc

SEQ ID NO: 401561 - DNA, 20 bp, Artificial Sequence
  Description of Artificial Sequence: Synthetic oligonucleotide
  Target: LAMA2; (+) strand; PAM type: YTN; PAM sequence: CTC
aaggtgtgcctaacattcag

SEQ ID NO: 401562 - DNA, 20 bp, Artificial Sequence
  Description of Artificial Sequence: Synthetic oligonucleotide
  Target: LAMA2; (+) strand; PAM type: YTN; PAM sequence: CTA
acattcagcagagagatgca

SEQ ID NO: 401563 - DNA, 20 bp, Artificial Sequence
  Description of Artificial Sequence: Synthetic oligonucleotide
  Target: LAMA2; (+) strand; PAM type: YTN; PAM sequence: TTC
agcagagagatgcaaaacac

SEQ ID NO: 401564 - DNA, 20 bp, Artificial Sequence
  Description of Artificial Sequence: Synthetic oligonucleotide
  Target: LAMA2; (+) strand; PAM type: YTN; PAM sequence: CTT
tttaatccgtgtgtgtaatt

SEQ ID NO: 401565 - DNA, 20 bp, Artificial Sequence
  Description of Artificial Sequence: Synthetic oligonucleotide
  Target: LAMA2; (+) strand; PAM type: YTN; PAM sequence: TTT
ttaatccgtgtgtgtaatta

SEQ ID NO: 401566 - DNA, 20 bp, Artificial Sequence
  Description of Artificial Sequence: Synthetic oligonucleotide
  Target: LAMA2; (+) strand; PAM type: YTN; PAM sequence: TTT
taatccgtgtgtgtaattaa

SEQ ID NO: 401567 - DNA, 20 bp, Artificial Sequence
  Description of Artificial Sequence: Synthetic oligonucleotide
  Target: LAMA2; (+) strand; PAM type: YTN; PAM sequence: TTT
aatccgtgtgtgtaattaaa

SEQ ID NO: 401568 - DNA, 20 bp, Artificial Sequence
  Description of Artificial Sequence: Synthetic oligonucleotide
  Target: LAMA2; (+) strand; PAM type: YTN; PAM sequence: TTA
atccgtgtgtgtaattaaaa

SEQ ID NO: 401569 - DNA, 20 bp, Artificial Sequence
  Description of Artificial Sequence: Synthetic oligonucleotide
  Target: LAMA2; (+) strand; PAM type: YTN; PAM sequence: TTA
aaaacacagttgtacttggg

SEQ ID NO: 401570 - DNA, 20 bp, Artificial Sequence
  Description of Artificial Sequence: Synthetic oligonucleotide
  Target: LAMA2; (+) strand; PAM type: YTN; PAM sequence: TTG
tacttgggtaattatatcct

SEQ ID NO: 401571 - DNA, 20 bp, Artificial Sequence
  Description of Artificial Sequence: Synthetic oligonucleotide
  Target: LAMA2; (+) strand; PAM type: YTN; PAM sequence: CTT
gggtaattatatcctcagaa

SEQ ID NO: 401572 - DNA, 20 bp, Artificial Sequence
  Description of Artificial Sequence: Synthetic oligonucleotide
  Target: LAMA2; (+) strand; PAM type: YTN; PAM sequence: TTG
ggtaattatatcctcagaac

SEQ ID NO: 401573 - DNA, 20 bp, Artificial Sequence
  Description of Artificial Sequence: Synthetic oligonucleotide
  Target: LAMA2; (+) strand; PAM type: YTN; PAM sequence: TTA
tatcctcagaactggcgaag

SEQ ID NO: 401574 - DNA, 20 bp, Artificial Sequence
  Description of Artificial Sequence: Synthetic oligonucleotide
  Target: LAMA2; (+) strand; PAM type: YTN; PAM sequence: CTC
agaactggcgaagtgtcatg

SEQ ID NO: 401575 - DNA, 20 bp, Artificial Sequence
  Description of Artificial Sequence: Synthetic oligonucleotide
  Target: LAMA2; (+) strand; PAM type: YTN; PAM sequence: CTG
gcgaagtgtcatggaacata

SEQ ID NO: 401576 - DNA, 20 bp, Artificial Sequence
  Description of Artificial Sequence: Synthetic oligonucleotide
  Target: LAMA2; (+) strand; PAM type: YTN; PAM sequence: TTA
aggggcacgttcatgaacag

SEQ ID NO: 401577 - DNA, 20 bp, Artificial Sequence
  Description of Artificial Sequence: Synthetic oligonucleotide
  Target: LAMA2; (+) strand; PAM type: YTN; PAM sequence: TTC
atgaacagacttgttagaac

SEQ ID NO: 401578 - DNA, 20 bp, Artificial Sequence
  Description of Artificial Sequence: Synthetic oligonucleotide
  Target: LAMA2; (+) strand; PAM type: YTN; PAM sequence: CTT
gttagaacaggatatgaaaa

SEQ ID NO: 401579 - DNA, 20 bp, Artificial Sequence
  Description of Artificial Sequence: Synthetic oligonucleotide
  Target: LAMA2; (+) strand; PAM type: YTN; PAM sequence: TTG
ttagaacaggatatgaaaat

SEQ ID NO: 401580 - DNA, 20 bp, Artificial Sequence
  Description of Artificial Sequence: Synthetic oligonucleotide
  Target: LAMA2; (+) strand; PAM type: YTN; PAM sequence: TTA
gaacaggatatgaaaatgat

SEQ ID NO: 401581 - DNA, 20 bp, Artificial Sequence
  Description of Artificial Sequence: Synthetic oligonucleotide
  Target: LAMA2; (+) strand; PAM type: YTN; PAM sequence: CTT
gaaatgcattaaaatttgaa

SEQ ID NO: 401582 - DNA, 20 bp, Artificial Sequence
  Description of Artificial Sequence: Synthetic oligonucleotide
  Target: LAMA2; (+) strand; PAM type: YTN; PAM sequence: TTG
aaatgcattaaaatttgaaa

SEQ ID NO: 401583 - DNA, 20 bp, Artificial Sequence
  Description of Artificial Sequence: Synthetic oligonucleotide
  Target: LAMA2; (+) strand; PAM type: YTN; PAM sequence: TTA
aaatttgaaaatcttgatat

SEQ ID NO: 401584 - DNA, 20 bp, Artificial Sequence
  Description of Artificial Sequence: Synthetic oligonucleotide
  Target: LAMA2; (+) strand; PAM type: YTN; PAM sequence: TTT
gaaaatcttgatattttatt

SEQ ID NO: 401585 - DNA, 20 bp, Artificial Sequence
  Description of Artificial Sequence: Synthetic oligonucleotide
  Target: LAMA2; (+) strand; PAM type: YTN; PAM sequence: TTG
aaaatcttgatattttatta

SEQ ID NO: 401586 - DNA, 20 bp, Artificial Sequence
  Description of Artificial Sequence: Synthetic oligonucleotide
  Target: LAMA2; (+) strand; PAM type: YTN; PAM sequence: CTT
gatattttattatttagatt

SEQ ID NO: 401587 - DNA, 20 bp, Artificial Sequence
  Description of Artificial Sequence: Synthetic oligonucleotide
  Target: LAMA2; (+) strand; PAM type: YTN; PAM sequence: TTG
atattttattatttagattc

SEQ ID NO: 401588 - DNA, 20 bp, Artificial Sequence
  Description of Artificial Sequence: Synthetic oligonucleotide
  Target: LAMA2; (+) strand; PAM type: YTN; PAM sequence: TTT
tattatttagattccagtta

SEQ ID NO: 401589 - DNA, 20 bp, Artificial Sequence
  Description of Artificial Sequence: Synthetic oligonucleotide
  Target: LAMA2; (+) strand; PAM type: YTN; PAM sequence: TTT
attatttagattccagttac

SEQ ID NO: 401590 - DNA, 20 bp, Artificial Sequence
  Description of Artificial Sequence: Synthetic oligonucleotide
  Target: LAMA2; (+) strand; PAM type: YTN; PAM sequence: TTA
ttatttagattccagttaca

SEQ ID NO: 401591 - DNA, 20 bp, Artificial Sequence
  Description of Artificial Sequence: Synthetic oligonucleotide
  Target: LAMA2; (+) strand; PAM type: YTN; PAM sequence: TTA
tttagattccagttacatca

SEQ ID NO: 401592 - DNA, 20 bp, Artificial Sequence
  Description of Artificial Sequence: Synthetic oligonucleotide
  Target: LAMA2; (+) strand; PAM type: YTN; PAM sequence: TTT
agattccagttacatcacat

SEQ ID NO: 401593 - DNA, 20 bp, Artificial Sequence
  Description of Artificial Sequence: Synthetic oligonucleotide
  Target: LAMA2; (+) strand; PAM type: YTN; PAM sequence: TTA
gattccagttacatcacatt

SEQ ID NO: 401594 - DNA, 20 bp, Artificial Sequence
  Description of Artificial Sequence: Synthetic oligonucleotide
  Target: LAMA2; (+) strand; PAM type: YTN; PAM sequence: TTC
cagttacatcacatttctgg

SEQ ID NO: 401595 - DNA, 20 bp, Artificial Sequence
  Description of Artificial Sequence: Synthetic oligonucleotide
  Target: LAMA2; (+) strand; PAM type: YTN; PAM sequence: TTA
catcacatttctgggaaata

SEQ ID NO: 401596 - DNA, 20 bp, Artificial Sequence
  Description of Artificial Sequence: Synthetic oligonucleotide
  Target: LAMA2; (+) strand; PAM type: YTN; PAM sequence: TTT
ctgggaaataaaaataaagc

SEQ ID NO: 401597 - DNA, 20 bp, Artificial Sequence
  Description of Artificial Sequence: Synthetic oligonucleotide
  Target: LAMA2; (+) strand; PAM type: YTN; PAM sequence: TTC
tgggaaataaaaataaagca

SEQ ID NO: 401598 - DNA, 20 bp, Artificial Sequence
  Description of Artificial Sequence: Synthetic oligonucleotide
  Target: LAMA2; (+) strand; PAM type: YTN; PAM sequence: CTG
ggaaataaaaataaagcatt

SEQ ID NO: 401599 - DNA, 20 bp, Artificial Sequence
  Description of Artificial Sequence: Synthetic oligonucleotide
  Target: LAMA2; (+) strand; PAM type: YTN; PAM sequence: TTT
atctagtttctaaagactat

SEQ ID NO: 401600 - DNA, 20 bp, Artificial Sequence
  Description of Artificial Sequence: Synthetic oligonucleotide
  Target: LAMA2; (+) strand; PAM type: YTN; PAM sequence: TTA
tctagtttctaaagactatt

SEQ ID NO: 401601 - DNA, 20 bp, Artificial Sequence
  Description of Artificial Sequence: Synthetic oligonucleotide
  Target: LAMA2; (+) strand; PAM type: YTN; PAM sequence: CTA
gtttctaaagactattcaca

SEQ ID NO: 401602 - DNA, 20 bp, Artificial Sequence
  Description of Artificial Sequence: Synthetic oligonucleotide
  Target: LAMA2; (+) strand; PAM type: YTN; PAM sequence: TTT
ctaaagactattcacatctc

SEQ ID NO: 401603 - DNA, 20 bp, Artificial Sequence
  Description of Artificial Sequence: Synthetic oligonucleotide
  Target: LAMA2; (+) strand; PAM type: YTN; PAM sequence: TTC
taaagactattcacatctct

SEQ ID NO: 401604 - DNA, 20 bp, Artificial Sequence
  Description of Artificial Sequence: Synthetic oligonucleotide
  Target: LAMA2; (+) strand; PAM type: YTN; PAM sequence: CTA
aagactattcacatctctta

SEQ ID NO: 401605 - DNA, 20 bp, Artificial Sequence
  Description of Artificial Sequence: Synthetic oligonucleotide
  Target: LAMA2; (+) strand; PAM type: YTN; PAM sequence: CTA
ttcacatctcttatatatta

SEQ ID NO: 401606 - DNA, 20 bp, Artificial Sequence
  Description of Artificial Sequence: Synthetic oligonucleotide
  Target: LAMA2; (+) strand; PAM type: YTN; PAM sequence: TTC
acatctcttatatattatat

SEQ ID NO: 401607 - DNA, 20 bp, Artificial Sequence
  Description of Artificial Sequence: Synthetic oligonucleotide
  Target: LAMA2; (+) strand; PAM type: YTN; PAM sequence: CTC
ttatatattatataaaatta

SEQ ID NO: 401608 - DNA, 20 bp, Artificial Sequence
  Description of Artificial Sequence: Synthetic oligonucleotide
  Target: LAMA2; (+) strand; PAM type: YTN; PAM sequence: CTT
atatattatataaaattata

SEQ ID NO: 401609 - DNA, 20 bp, Artificial Sequence
  Description of Artificial Sequence: Synthetic oligonucleotide
  Target: LAMA2; (+) strand; PAM type: YTN; PAM sequence: TTA
tatattatataaaattatat

SEQ ID NO: 401610 - DNA, 20 bp, Artificial Sequence
  Description of Artificial Sequence: Synthetic oligonucleotide
  Target: LAMA2; (+) strand; PAM type: YTN; PAM sequence: TTA
tataaaattatattgactta

SEQ ID NO: 401611 - DNA, 20 bp, Artificial Sequence
  Description of Artificial Sequence: Synthetic oligonucleotide
  Target: LAMA2; (+) strand; PAM type: YTN; PAM sequence: TTA
tattgacttaaggatttact

SEQ ID NO: 401612 - DNA, 20 bp, Artificial Sequence
  Description of Artificial Sequence: Synthetic oligonucleotide
  Target: LAMA2; (+) strand; PAM type: YTN; PAM sequence: TTG
acttaaggatttactgagaa

SEQ ID NO: 401613 - DNA, 20 bp, Artificial Sequence
  Description of Artificial Sequence: Synthetic oligonucleotide
  Target: LAMA2; (+) strand; PAM type: YTN; PAM sequence: CTT
aaggatttactgagaaaacc

SEQ ID NO: 401614 - DNA, 20 bp, Artificial Sequence
  Description of Artificial Sequence: Synthetic oligonucleotide
  Target: LAMA2; (+) strand; PAM type: YTN; PAM sequence: TTA
aggatttactgagaaaacct

SEQ ID NO: 401615 - DNA, 20 bp, Artificial Sequence
  Description of Artificial Sequence: Synthetic oligonucleotide
  Target: LAMA2; (+) strand; PAM type: YTN; PAM sequence: TTT
actgagaaaacctgagagaa

SEQ ID NO: 401616 - DNA, 20 bp, Artificial Sequence
  Description of Artificial Sequence: Synthetic oligonucleotide
  Target: LAMA2; (+) strand; PAM type: YTN; PAM sequence: TTA
ctgagaaaacctgagagaaa

SEQ ID NO: 401617 - DNA, 20 bp, Artificial Sequence
  Description of Artificial Sequence: Synthetic oligonucleotide
  Target: LAMA2; (+) strand; PAM type: YTN; PAM sequence: CTG
agaaaacctgagagaaaata

SEQ ID NO: 401618 - DNA, 20 bp, Artificial Sequence
  Description of Artificial Sequence: Synthetic oligonucleotide
  Target: LAMA2; (+) strand; PAM type: YTN; PAM sequence: CTG
agagaaaatatcataactta

SEQ ID NO: 401619 - DNA, 20 bp, Artificial Sequence
  Description of Artificial Sequence: Synthetic oligonucleotide
  Target: LAMA2; (+) strand; PAM type: YTN; PAM sequence: CTT
atattattagttaaatatag

SEQ ID NO: 401620 - DNA, 20 bp, Artificial Sequence
  Description of Artificial Sequence: Synthetic oligonucleotide
  Target: LAMA2; (+) strand; PAM type: YTN; PAM sequence: TTA
tattattagttaaatatagt

SEQ ID NO: 401621 - DNA, 20 bp, Artificial Sequence
  Description of Artificial Sequence: Synthetic oligonucleotide
  Target: LAMA2; (+) strand; PAM type: YTN; PAM sequence: TTA
ttagttaaatatagtcaaaa

SEQ ID NO: 401622 - DNA, 20 bp, Artificial Sequence
  Description of Artificial Sequence: Synthetic oligonucleotide
  Target: LAMA2; (+) strand; PAM type: YTN; PAM sequence: TTA
gttaaatatagtcaaaatat

SEQ ID NO: 401623 - DNA, 20 bp, Artificial Sequence
  Description of Artificial Sequence: Synthetic oligonucleotide
  Target: LAMA2; (+) strand; PAM type: YTN; PAM sequence: TTA
aatatagtcaaaatattaag

SEQ ID NO: 401624 - DNA, 20 bp, Artificial Sequence
  Description of Artificial Sequence: Synthetic oligonucleotide
  Target: LAMA2; (+) strand; PAM type: YTN; PAM sequence: TTA
agattttaaaatgcattttt

SEQ ID NO: 401625 - DNA, 20 bp, Artificial Sequence
  Description of Artificial Sequence: Synthetic oligonucleotide
  Target: LAMA2; (+) strand; PAM type: YTN; PAM sequence: TTT
taaaatgcatttttcctttt

SEQ ID NO: 401626 - DNA, 20 bp, Artificial Sequence
  Description of Artificial Sequence: Synthetic oligonucleotide
  Target: LAMA2; (+) strand; PAM type: YTN; PAM sequence: TTT
aaaatgcatttttccttttc

SEQ ID NO: 401627 - DNA, 20 bp, Artificial Sequence
  Description of Artificial Sequence: Synthetic oligonucleotide
  Target: LAMA2; (+) strand; PAM type: YTN; PAM sequence: TTA
aaatgcatttttccttttcc

SEQ ID NO: 401628 - DNA, 20 bp, Artificial Sequence
  Description of Artificial Sequence: Synthetic oligonucleotide
  Target: LAMA2; (+) strand; PAM type: YTN; PAM sequence: TTT
ttccttttccgtcaaatgat

SEQ ID NO: 401629 - DNA, 20 bp, Artificial Sequence
  Description of Artificial Sequence: Synthetic oligonucleotide
  Target: LAMA2; (+) strand; PAM type: YTN; PAM sequence: TTT
tccttttccgtcaaatgata

SEQ ID NO: 401630 - DNA, 20 bp, Artificial Sequence
  Description of Artificial Sequence: Synthetic oligonucleotide
  Target: LAMA2; (+) strand; PAM type: YTN; PAM sequence: TTT
ccttttccgtcaaatgatac

SEQ ID NO: 401631 - DNA, 20 bp, Artificial Sequence
  Description of Artificial Sequence: Synthetic oligonucleotide
  Target: LAMA2; (+) strand; PAM type: YTN; PAM sequence: TTC
cttttccgtcaaatgataca

SEQ ID NO: 401632 - DNA, 20 bp, Artificial Sequence
  Description of Artificial Sequence: Synthetic oligonucleotide
  Target: LAMA2; (+) strand; PAM type: YTN; PAM sequence: CTT
ttccgtcaaatgatacaagg

SEQ ID NO: 401633 - DNA, 20 bp, Artificial Sequence
  Description of Artificial Sequence: Synthetic oligonucleotide
  Target: LAMA2; (+) strand; PAM type: YTN; PAM sequence: TTT
tccgtcaaatgatacaaggc

SEQ ID NO: 401634 - DNA, 20 bp, Artificial Sequence
  Description of Artificial Sequence: Synthetic oligonucleotide
  Target: LAMA2; (+) strand; PAM type: YTN; PAM sequence: TTT
ccgtcaaatgatacaaggct

SEQ ID NO: 401635 - DNA, 20 bp, Artificial Sequence
  Description of Artificial Sequence: Synthetic oligonucleotide
  Target: LAMA2; (+) strand; PAM type: YTN; PAM sequence: TTC
cgtcaaatgatacaaggcta

SEQ ID NO: 401636 - DNA, 20 bp, Artificial Sequence
  Description of Artificial Sequence: Synthetic oligonucleotide
  Target: LAMA2; (+) strand; PAM type: YTN; PAM sequence: CTA
tattgggccaggtacagtgg

SEQ ID NO: 401637 - DNA, 20 bp, Artificial Sequence
  Description of Artificial Sequence: Synthetic oligonucleotide
  Target: LAMA2; (+) strand; PAM type: YTN; PAM sequence: TTG
ggccaggtacagtggttaac

SEQ ID NO: 401638 - DNA, 20 bp, Artificial Sequence
  Description of Artificial Sequence: Synthetic oligonucleotide
  Target: LAMA2; (+) strand; PAM type: YTN; PAM sequence: TTA
acacctgtaatctttgcact

SEQ ID NO: 401639 - DNA, 20 bp, Artificial Sequence
  Description of Artificial Sequence: Synthetic oligonucleotide
  Target: LAMA2; (+) strand; PAM type: YTN; PAM sequence: CTG
taatctttgcactttgggag

SEQ ID NO: 401640 - DNA, 20 bp, Artificial Sequence
  Description of Artificial Sequence: Synthetic oligonucleotide
  Target: LAMA2; (+) strand; PAM type: YTN; PAM sequence: CTT
tgcactttgggagcctgagg

SEQ ID NO: 401641 - DNA, 20 bp, Artificial Sequence
  Description of Artificial Sequence: Synthetic oligonucleotide
  Target: LAMA2; (+) strand; PAM type: YTN; PAM sequence: TTT
gcactttgggagcctgaggc

SEQ ID NO: 401642 - DNA, 20 bp, Artificial Sequence
  Description of Artificial Sequence: Synthetic oligonucleotide
  Target: LAMA2; (+) strand; PAM type: YTN; PAM sequence: TTG
cactttgggagcctgaggcg

SEQ ID NO: 401643 - DNA, 20 bp, Artificial Sequence
  Description of Artificial Sequence: Synthetic oligonucleotide
  Target: LAMA2; (+) strand; PAM type: YTN; PAM sequence: CTT
tgggagcctgaggcgagagg

SEQ ID NO: 401644 - DNA, 20 bp, Artificial Sequence
  Description of Artificial Sequence: Synthetic oligonucleotide
  Target: LAMA2; (+) strand; PAM type: YTN; PAM sequence: TTT
gggagcctgaggcgagagga

SEQ ID NO: 401645 - DNA, 20 bp, Artificial Sequence
  Description of Artificial Sequence: Synthetic oligonucleotide
  Target: LAMA2; (+) strand; PAM type: YTN; PAM sequence: TTG
ggagcctgaggcgagaggat

SEQ ID NO: 401646 - DNA, 20 bp, Artificial Sequence
  Description of Artificial Sequence: Synthetic oligonucleotide
  Target: LAMA2; (+) strand; PAM type: YTN; PAM sequence: CTG
aggcgagaggatcacttgag

SEQ ID NO: 401647 - DNA, 20 bp, Artificial Sequence
  Description of Artificial Sequence: Synthetic oligonucleotide
  Target: LAMA2; (+) strand; PAM type: YTN; PAM sequence: CTT
gagcctaggaattcgagacc

SEQ ID NO: 401648 - DNA, 20 bp, Artificial Sequence
  Description of Artificial Sequence: Synthetic oligonucleotide
  Target: LAMA2; (+) strand; PAM type: YTN; PAM sequence: TTG
agcctaggaattcgagacca

SEQ ID NO: 401649 - DNA, 20 bp, Artificial Sequence
  Description of Artificial Sequence: Synthetic oligonucleotide
  Target: LAMA2; (+) strand; PAM type: YTN; PAM sequence: CTA
ggaattcgagaccagcctgg

SEQ ID NO: 401650 - DNA, 20 bp, Artificial Sequence
  Description of Artificial Sequence: Synthetic oligonucleotide
  Target: LAMA2; (+) strand; PAM type: YTN; PAM sequence: TTC
gagaccagcctgggcaccat

SEQ ID NO: 401651 - DNA, 20 bp, Artificial Sequence
  Description of Artificial Sequence: Synthetic oligonucleotide
  Target: LAMA2; (+) strand; PAM type: YTN; PAM sequence: CTG
ggcaccatagcaagacccca

SEQ ID NO: 401652 - DNA, 20 bp, Artificial Sequence
  Description of Artificial Sequence: Synthetic oligonucleotide
  Target: LAMA2; (+) strand; PAM type: YTN; PAM sequence: CTT
tacaaaaaatttaaaaaata

SEQ ID NO: 401653 - DNA, 20 bp, Artificial Sequence
  Description of Artificial Sequence: Synthetic oligonucleotide
  Target: LAMA2; (+) strand; PAM type: YTN; PAM sequence: TTT
acaaaaaatttaaaaaatag

SEQ ID NO: 401654 - DNA, 20 bp, Artificial Sequence
  Description of Artificial Sequence: Synthetic oligonucleotide
  Target: LAMA2; (+) strand; PAM type: YTN; PAM sequence: TTA
caaaaaatttaaaaaatagc

SEQ ID NO: 401655 - DNA, 20 bp, Artificial Sequence
  Description of Artificial Sequence: Synthetic oligonucleotide
  Target: LAMA2; (+) strand; PAM type: YTN; PAM sequence: TTT
aaaaaatagccaggcatggt

SEQ ID NO: 401656 - DNA, 20 bp, Artificial Sequence
  Description of Artificial Sequence: Synthetic oligonucleotide
  Target: LAMA2; (+) strand; PAM type: YTN; PAM sequence: TTA
aaaaatagccaggcatggta

SEQ ID NO: 401657 - DNA, 20 bp, Artificial Sequence
  Description of Artificial Sequence: Synthetic oligonucleotide
  Target: LAMA2; (+) strand; PAM type: YTN; PAM sequence: TTG
cacctgtgttcccagccact

SEQ ID NO: 401658 - DNA, 20 bp, Artificial Sequence
  Description of Artificial Sequence: Synthetic oligonucleotide
  Target: LAMA2; (+) strand; PAM type: YTN; PAM sequence: CTG
tgttcccagccacttgggag

SEQ ID NO: 401659 - DNA, 20 bp, Artificial Sequence
  Description of Artificial Sequence: Synthetic oligonucleotide
  Target: LAMA2; (+) strand; PAM type: YTN; PAM sequence: TTC
ccagccacttgggagtctga

SEQ ID NO: 401660 - DNA, 20 bp, Artificial Sequence
  Description of Artificial Sequence: Synthetic oligonucleotide
  Target: LAMA2; (+) strand; PAM type: YTN; PAM sequence: CTT
gggagtctgaggctggagga

SEQ ID NO: 401661 - DNA, 20 bp, Artificial Sequence
  Description of Artificial Sequence: Synthetic oligonucleotide
  Target: LAMA2; (+) strand; PAM type: YTN; PAM sequence: TTG
ggagtctgaggctggaggat

SEQ ID NO: 401662 - DNA, 20 bp, Artificial Sequence
  Description of Artificial Sequence: Synthetic oligonucleotide
  Target: LAMA2; (+) strand; PAM type: YTN; PAM sequence: CTG
aggctggaggatcccttgaa

SEQ ID NO: 401663 - DNA, 20 bp, Artificial Sequence
  Description of Artificial Sequence: Synthetic oligonucleotide
  Target: LAMA2; (+) strand; PAM type: YTN; PAM sequence: CTG
gaggatcccttgaacccaga

SEQ ID NO: 401664 - DNA, 20 bp, Artificial Sequence
  Description of Artificial Sequence: Synthetic oligonucleotide
  Target: LAMA2; (+) strand; PAM type: YTN; PAM sequence: CTT
gaacccagaagggtgaggct

SEQ ID NO: 401665 - DNA, 20 bp, Artificial Sequence
  Description of Artificial Sequence: Synthetic oligonucleotide
  Target: LAMA2; (+) strand; PAM type: YTN; PAM sequence: TTG
aacccagaagggtgaggctg

SEQ ID NO: 401666 - DNA, 20 bp, Artificial Sequence
  Description of Artificial Sequence: Synthetic oligonucleotide
  Target: LAMA2; (+) strand; PAM type: YTN; PAM sequence: CTG
cagtgagctgtgatcacgcc

SEQ ID NO: 401667 - DNA, 20 bp, Artificial Sequence
  Description of Artificial Sequence: Synthetic oligonucleotide
  Target: LAMA2; (+) strand; PAM type: YTN; PAM sequence: CTG
tgatcacgccactgcactcc

SEQ ID NO: 401668 - DNA, 20 bp, Artificial Sequence
  Description of Artificial Sequence: Synthetic oligonucleotide
  Target: LAMA2; (+) strand; PAM type: YTN; PAM sequence: CTG
cactccagcctgggtggcag

SEQ ID NO: 401669 - DNA, 20 bp, Artificial Sequence
  Description of Artificial Sequence: Synthetic oligonucleotide
  Target: LAMA2; (+) strand; PAM type: YTN; PAM sequence: CTC
cagcctgggtggcagattga

SEQ ID NO: 401670 - DNA, 20 bp, Artificial Sequence
  Description of Artificial Sequence: Synthetic oligonucleotide
  Target: LAMA2; (+) strand; PAM type: YTN; PAM sequence: CTG
ggtggcagattgagatgctg

SEQ ID NO: 401671 - DNA, 20 bp, Artificial Sequence
  Description of Artificial Sequence: Synthetic oligonucleotide
  Target: LAMA2; (+) strand; PAM type: YTN; PAM sequence: TTG
agatgctgtctcaaaaaaaa

SEQ ID NO: 401672 - DNA, 20 bp, Artificial Sequence
  Description of Artificial Sequence: Synthetic oligonucleotide
  Target: LAMA2; (+) strand; PAM type: YTN; PAM sequence: CTG
tctcaaaaaaaaaaaagggg

SEQ ID NO: 401673 - DNA, 20 bp, Artificial Sequence
  Description of Artificial Sequence: Synthetic oligonucleotide
  Target: LAMA2; (+) strand; PAM type: YTN; PAM sequence: CTC
aaaaaaaaaaaagggggtta

SEQ ID NO: 401674 - DNA, 20 bp, Artificial Sequence
  Description of Artificial Sequence: Synthetic oligonucleotide
  Target: LAMA2; (+) strand; PAM type: YTN; PAM sequence: TTA
tcttggtatccttgttacat

SEQ ID NO: 401675 - DNA, 20 bp, Artificial Sequence
  Description of Artificial Sequence: Synthetic oligonucleotide
  Target: LAMA2; (+) strand; PAM type: YTN; PAM sequence: CTT
ggtatccttgttacatggtt

SEQ ID NO: 401676 - DNA, 20 bp, Artificial Sequence
  Description of Artificial Sequence: Synthetic oligonucleotide
  Target: LAMA2; (+) strand; PAM type: YTN; PAM sequence: TTG
gtatccttgttacatggttt

SEQ ID NO: 401677 - DNA, 20 bp, Artificial Sequence
  Description of Artificial Sequence: Synthetic oligonucleotide
  Target: LAMA2; (+) strand; PAM type: YTN; PAM sequence: CTT
gttacatggtttcaccaaag

SEQ ID NO: 401678 - DNA, 20 bp, Artificial Sequence
  Description of Artificial Sequence: Synthetic oligonucleotide
  Target: LAMA2; (+) strand; PAM type: YTN; PAM sequence: TTG
ttacatggtttcaccaaagg

SEQ ID NO: 401679 - DNA, 20 bp, Artificial Sequence
  Description of Artificial Sequence: Synthetic oligonucleotide
  Target: LAMA2; (+) strand; PAM type: YTN; PAM sequence: TTA
catggtttcaccaaaggaga

SEQ ID NO: 401680 - DNA, 20 bp, Artificial Sequence
  Description of Artificial Sequence: Synthetic oligonucleotide
  Target: LAMA2; (+) strand; PAM type: YTN; PAM sequence: TTT
caccaaaggagatgcttggg

SEQ ID NO: 401681 - DNA, 20 bp, Artificial Sequence
  Description of Artificial Sequence: Synthetic oligonucleotide
  Target: LAMA2; (+) strand; PAM type: YTN; PAM sequence: TTC
accaaaggagatgcttgggt

SEQ ID NO: 401682 - DNA, 20 bp, Artificial Sequence
  Description of Artificial Sequence: Synthetic oligonucleotide
  Target: LAMA2; (+) strand; PAM type: YTN; PAM sequence: CTT
gggtaatctgtgcttttcac

SEQ ID NO: 401683 - DNA, 20 bp, Artificial Sequence
  Description of Artificial Sequence: Synthetic oligonucleotide
  Target: LAMA2; (+) strand; PAM type: YTN; PAM sequence: TTG
ggtaatctgtgcttttcact

SEQ ID NO: 401684 - DNA, 20 bp, Artificial Sequence
  Description of Artificial Sequence: Synthetic oligonucleotide
  Target: LAMA2; (+) strand; PAM type: YTN; PAM sequence: CTG
tgcttttcactttcaagaga

SEQ ID NO: 401685 - DNA, 20 bp, Artificial Sequence
  Description of Artificial Sequence: Synthetic oligonucleotide
  Target: LAMA2; (+) strand; PAM type: YTN; PAM sequence: CTT
ttcactttcaagagactagc

SEQ ID NO: 401686 - DNA, 20 bp, Artificial Sequence
  Description of Artificial Sequence: Synthetic oligonucleotide
  Target: LAMA2; (+) strand; PAM type: YTN; PAM sequence: TTT
tcactttcaagagactagcc

SEQ ID NO: 401687 - DNA, 20 bp, Artificial Sequence
  Description of Artificial Sequence: Synthetic oligonucleotide
  Target: LAMA2; (+) strand; PAM type: YTN; PAM sequence: TTT
cactttcaagagactagccc

SEQ ID NO: 401688 - DNA, 20 bp, Artificial Sequence
  Description of Artificial Sequence: Synthetic oligonucleotide
  Target: LAMA2; (+) strand; PAM type: YTN; PAM sequence: TTC
actttcaagagactagccct

SEQ ID NO: 401689 - DNA, 20 bp, Artificial Sequence
  Description of Artificial Sequence: Synthetic oligonucleotide
  Target: LAMA2; (+) strand; PAM type: YTN; PAM sequence: CTT
tcaagagactagccctcttt

SEQ ID NO: 401690 - DNA, 20 bp, Artificial Sequence
  Description of Artificial Sequence: Synthetic oligonucleotide
  Target: LAMA2; (+) strand; PAM type: YTN; PAM sequence: TTT
caagagactagccctcttta

SEQ ID NO: 401691 - DNA, 20 bp, Artificial Sequence
  Description of Artificial Sequence: Synthetic oligonucleotide
  Target: LAMA2; (+) strand; PAM type: YTN; PAM sequence: TTC
aagagactagccctctttat

SEQ ID NO: 401692 - DNA, 20 bp, Artificial Sequence
  Description of Artificial Sequence: Synthetic oligonucleotide
  Target: LAMA2; (+) strand; PAM type: YTN; PAM sequence: CTA
gccctctttatatgccaaca

SEQ ID NO: 401693 - DNA, 20 bp, Artificial Sequence
  Description of Artificial Sequence: Synthetic oligonucleotide
  Target: LAMA2; (+) strand; PAM type: YTN; PAM sequence: CTC
tttatatgccaacatttttg

SEQ ID NO: 401694 - DNA, 20 bp, Artificial Sequence
  Description of Artificial Sequence: Synthetic oligonucleotide
  Target: LAMA2; (+) strand; PAM type: YTN; PAM sequence: CTT
tatatgccaacatttttggg

SEQ ID NO: 401695 - DNA, 20 bp, Artificial Sequence
  Description of Artificial Sequence: Synthetic oligonucleotide
  Target: LAMA2; (+) strand; PAM type: YTN; PAM sequence: TTT
atatgccaacatttttgggg

SEQ ID NO: 401696 - DNA, 20 bp, Artificial Sequence
  Description of Artificial Sequence: Synthetic oligonucleotide
  Target: LAMA2; (+) strand; PAM type: YTN; PAM sequence: TTA
tatgccaacatttttggggg

SEQ ID NO: 401697 - DNA, 20 bp, Artificial Sequence
  Description of Artificial Sequence: Synthetic oligonucleotide
  Target: LAMA2; (+) strand; PAM type: YTN; PAM sequence: TTT
ttgggggggtatcaaaatat

SEQ ID NO: 401698 - DNA, 20 bp, Artificial Sequence
  Description of Artificial Sequence: Synthetic oligonucleotide
  Target: LAMA2; (+) strand; PAM type: YTN; PAM sequence: TTT
tgggggggtatcaaaatatt

SEQ ID NO: 401699 - DNA, 20 bp, Artificial Sequence
  Description of Artificial Sequence: Synthetic oligonucleotide
  Target: LAMA2; (+) strand; PAM type: YTN; PAM sequence: TTT
gggggggtatcaaaatattt

SEQ ID NO: 401700 - DNA, 20 bp, Artificial Sequence
  Description of Artificial Sequence: Synthetic oligonucleotide
  Target: LAMA2; (+) strand; PAM type: YTN; PAM sequence: TTG
ggggggtatcaaaatatttg

SEQ ID NO: 401701 - DNA, 20 bp, Artificial Sequence
  Description of Artificial Sequence: Synthetic oligonucleotide
  Target: LAMA2; (+) strand; PAM type: YTN; PAM sequence: TTT
ggagtataaaaacaaaagca

SEQ ID NO: 401702 - DNA, 20 bp, Artificial Sequence
  Description of Artificial Sequence: Synthetic oligonucleotide
  Target: LAMA2; (+) strand; PAM type: YTN; PAM sequence: TTG
gagtataaaaacaaaagcac

SEQ ID NO: 401703 - DNA, 20 bp, Artificial Sequence
  Description of Artificial Sequence: Synthetic oligonucleotide
  Target: LAMA2; (+) strand; PAM type: YTN; PAM sequence: CTG
taattggtattatatgccat

SEQ ID NO: 401704 - DNA, 20 bp, Artificial Sequence
  Description of Artificial Sequence: Synthetic oligonucleotide
  Target: LAMA2; (+) strand; PAM type: YTN; PAM sequence: TTG
gtattatatgccataaaatt

SEQ ID NO: 401705 - DNA, 20 bp, Artificial Sequence
  Description of Artificial Sequence: Synthetic oligonucleotide
  Target: LAMA2; (+) strand; PAM type: YTN; PAM sequence: TTA
tatgccataaaattcaaatg

SEQ ID NO: 401706 - DNA, 20 bp, Artificial Sequence
  Description of Artificial Sequence: Synthetic oligonucleotide
  Target: LAMA2; (+) strand; PAM type: YTN; PAM sequence: TTC
aaatgctgtttgagtgggga

SEQ ID NO: 401707 - DNA, 20 bp, Artificial Sequence
  Description of Artificial Sequence: Synthetic oligonucleotide
  Target: LAMA2; (+) strand; PAM type: YTN; PAM sequence: CTG
tttgagtggggaatggagcc

SEQ ID NO: 401708 - DNA, 20 bp, Artificial Sequence
  Description of Artificial Sequence: Synthetic oligonucleotide
  Target: LAMA2; (+) strand; PAM type: YTN; PAM sequence: TTT
gagtggggaatggagcctga

SEQ ID NO: 401709 - DNA, 20 bp, Artificial Sequence
  Description of Artificial Sequence: Synthetic oligonucleotide
  Target: LAMA2; (+) strand; PAM type: YTN; PAM sequence: TTG
agtggggaatggagcctgat

SEQ ID NO: 401710 - DNA, 20 bp, Artificial Sequence
  Description of Artificial Sequence: Synthetic oligonucleotide
  Target: LAMA2; (+) strand; PAM type: YTN; PAM sequence: CTG
atttcagcatcctagcctca

SEQ ID NO: 401711 - DNA, 20 bp, Artificial Sequence
  Description of Artificial Sequence: Synthetic oligonucleotide
  Target: LAMA2; (+) strand; PAM type: YTN; PAM sequence: TTT
cagcatcctagcctcaaatc

SEQ ID NO: 401712 - DNA, 20 bp, Artificial Sequence
  Description of Artificial Sequence: Synthetic oligonucleotide
  Target: LAMA2; (+) strand; PAM type: YTN; PAM sequence: TTC
agcatcctagcctcaaatca

SEQ ID NO: 401713 - DNA, 20 bp, Artificial Sequence
  Description of Artificial Sequence: Synthetic oligonucleotide
  Target: LAMA2; (+) strand; PAM type: YTN; PAM sequence: CTA
gcctcaaatcaaatcctatg

SEQ ID NO: 401714 - DNA, 20 bp, Artificial Sequence
  Description of Artificial Sequence: Synthetic oligonucleotide
  Target: LAMA2; (+) strand; PAM type: YTN; PAM sequence: CTC
aaatcaaatcctatggatgc

SEQ ID NO: 401715 - DNA, 20 bp, Artificial Sequence
  Description of Artificial Sequence: Synthetic oligonucleotide
  Target: LAMA2; (+) strand; PAM type: YTN; PAM sequence: CTA
tggatgctatgatataatag

SEQ ID NO: 401716 - DNA, 20 bp, Artificial Sequence
  Description of Artificial Sequence: Synthetic oligonucleotide
  Target: LAMA2; (+) strand; PAM type: YTN; PAM sequence: CTA
tgatataatagacattatta

SEQ ID NO: 401717 - DNA, 20 bp, Artificial Sequence
  Description of Artificial Sequence: Synthetic oligonucleotide
  Target: LAMA2; (+) strand; PAM type: YTN; PAM sequence: TTA
ttaatacgactccttcatga

SEQ ID NO: 401718 - DNA, 20 bp, Artificial Sequence
  Description of Artificial Sequence: Synthetic oligonucleotide
  Target: LAMA2; (+) strand; PAM type: YTN; PAM sequence: TTA
atacgactccttcatgagca

SEQ ID NO: 401719 - DNA, 20 bp, Artificial Sequence
  Description of Artificial Sequence: Synthetic oligonucleotide
  Target: LAMA2; (+) strand; PAM type: YTN; PAM sequence: CTC
cttcatgagcaaggaagagt

SEQ ID NO: 401720 - DNA, 20 bp, Artificial Sequence
  Description of Artificial Sequence: Synthetic oligonucleotide
  Target: LAMA2; (+) strand; PAM type: YTN; PAM sequence: CTT
catgagcaaggaagagtaca

SEQ ID NO: 401721 - DNA, 20 bp, Artificial Sequence
  Description of Artificial Sequence: Synthetic oligonucleotide
  Target: LAMA2; (+) strand; PAM type: YTN; PAM sequence: TTC
atgagcaaggaagagtacaa

SEQ ID NO: 401722 - DNA, 20 bp, Artificial Sequence
  Description of Artificial Sequence: Synthetic oligonucleotide
  Target: LAMA2; (+) strand; PAM type: YTN; PAM sequence: CTT
cagagccagggtgaaaaagg

SEQ ID NO: 401723 - DNA, 20 bp, Artificial Sequence
  Description of Artificial Sequence: Synthetic oligonucleotide
  Target: LAMA2; (+) strand; PAM type: YTN; PAM sequence: TTC
agagccagggtgaaaaaggg

SEQ ID NO: 401724 - DNA, 20 bp, Artificial Sequence
  Description of Artificial Sequence: Synthetic oligonucleotide
  Target: LAMA2; (+) strand; PAM type: YTN; PAM sequence: TTT
tttaaaattttttaatgtaa

SEQ ID NO: 401725 - DNA, 20 bp, Artificial Sequence
  Description of Artificial Sequence: Synthetic oligonucleotide
  Target: LAMA2; (+) strand; PAM type: YTN; PAM sequence: TTT
ttaaaattttttaatgtaag

SEQ ID NO: 401726 - DNA, 20 bp, Artificial Sequence
  Description of Artificial Sequence: Synthetic oligonucleotide
  Target: LAMA2; (+) strand; PAM type: YTN; PAM sequence: TTT
taaaattttttaatgtaagc

SEQ ID NO: 401727 - DNA, 20 bp, Artificial Sequence
  Description of Artificial Sequence: Synthetic oligonucleotide
  Target: LAMA2; (+) strand; PAM type: YTN; PAM sequence: TTT
aaaattttttaatgtaagcc

SEQ ID NO: 401728 - DNA, 20 bp, Artificial Sequence
  Description of Artificial Sequence: Synthetic oligonucleotide
  Target: LAMA2; (+) strand; PAM type: YTN; PAM sequence: TTA
aaattttttaatgtaagccc

SEQ ID NO: 401729 - DNA, 20 bp, Artificial Sequence
  Description of Artificial Sequence: Synthetic oligonucleotide
  Target: LAMA2; (+) strand; PAM type: YTN; PAM sequence: TTT
tttaatgtaagcccagaaat

SEQ ID NO: 401730 - DNA, 20 bp, Artificial Sequence
  Description of Artificial Sequence: Synthetic oligonucleotide
  Target: LAMA2; (+) strand; PAM type: YTN; PAM sequence: TTT
ttaatgtaagcccagaaatg

SEQ ID NO: 401731 - DNA, 20 bp, Artificial Sequence
  Description of Artificial Sequence: Synthetic oligonucleotide
  Target: LAMA2; (+) strand; PAM type: YTN; PAM sequence: TTT
taatgtaagcccagaaatgg

SEQ ID NO: 401732 - DNA, 20 bp, Artificial Sequence
  Description of Artificial Sequence: Synthetic oligonucleotide
  Target: LAMA2; (+) strand; PAM type: YTN; PAM sequence: TTT
aatgtaagcccagaaatggc

SEQ ID NO: 401733 - DNA, 20 bp, Artificial Sequence
  Description of Artificial Sequence: Synthetic oligonucleotide
  Target: LAMA2; (+) strand; PAM type: YTN; PAM sequence: TTA
atgtaagcccagaaatggct

SEQ ID NO: 401734 - DNA, 20 bp, Artificial Sequence
  Description of Artificial Sequence: Synthetic oligonucleotide
  Target: LAMA2; (+) strand; PAM type: YTN; PAM sequence: CTT
ctcttgtagctcaaagttta

SEQ ID NO: 401735 - DNA, 20 bp, Artificial Sequence
  Description of Artificial Sequence: Synthetic oligonucleotide
  Target: LAMA2; (+) strand; PAM type: YTN; PAM sequence: TTC
tcttgtagctcaaagtttac

SEQ ID NO: 401736 - DNA, 20 bp, Artificial Sequence
  Description of Artificial Sequence: Synthetic oligonucleotide
  Target: LAMA2; (+) strand; PAM type: YTN; PAM sequence: CTC
ttgtagctcaaagtttacat

SEQ ID NO: 401737 - DNA, 20 bp, Artificial Sequence
  Description of Artificial Sequence: Synthetic oligonucleotide
  Target: LAMA2; (+) strand; PAM type: YTN; PAM sequence: CTT
gtagctcaaagtttacataa

SEQ ID NO: 401738 - DNA, 20 bp, Artificial Sequence
  Description of Artificial Sequence: Synthetic oligonucleotide
  Target: LAMA2; (+) strand; PAM type: YTN; PAM sequence: TTG
tagctcaaagtttacataat

SEQ ID NO: 401739 - DNA, 20 bp, Artificial Sequence
  Description of Artificial Sequence: Synthetic oligonucleotide
  Target: LAMA2; (+) strand; PAM type: YTN; PAM sequence: CTC
aaagtttacataataacttc

SEQ ID NO: 401740 - DNA, 20 bp, Artificial Sequence
  Description of Artificial Sequence: Synthetic oligonucleotide
  Target: LAMA2; (+) strand; PAM type: YTN; PAM sequence: TTT
acataataacttcttatgat

SEQ ID NO: 401741 - DNA, 20 bp, Artificial Sequence
  Description of Artificial Sequence: Synthetic oligonucleotide
  Target: LAMA2; (+) strand; PAM type: YTN; PAM sequence: TTA
cataataacttcttatgatt

SEQ ID NO: 401742 - DNA, 20 bp, Artificial Sequence
  Description of Artificial Sequence: Synthetic oligonucleotide
  Target: LAMA2; (+) strand; PAM type: YTN; PAM sequence: CTT
cttatgatttatgccaaatc

SEQ ID NO: 401743 - DNA, 20 bp, Artificial Sequence
  Description of Artificial Sequence: Synthetic oligonucleotide
  Target: LAMA2; (+) strand; PAM type: YTN; PAM sequence: TTC
ttatgatttatgccaaatca

SEQ ID NO: 401744 - DNA, 20 bp, Artificial Sequence
  Description of Artificial Sequence: Synthetic oligonucleotide
  Target: LAMA2; (+) strand; PAM type: YTN; PAM sequence: CTT
atgatttatgccaaatcaca

SEQ ID NO: 401745 - DNA, 20 bp, Artificial Sequence
  Description of Artificial Sequence: Synthetic oligonucleotide
  Target: LAMA2; (+) strand; PAM type: YTN; PAM sequence: TTA
tgatttatgccaaatcacaa

SEQ ID NO: 401746 - DNA, 20 bp, Artificial Sequence
  Description of Artificial Sequence: Synthetic oligonucleotide
  Target: LAMA2; (+) strand; PAM type: YTN; PAM sequence: TTT
atgccaaatcacaatattcc

SEQ ID NO: 401747 - DNA, 20 bp, Artificial Sequence
  Description of Artificial Sequence: Synthetic oligonucleotide
  Target: LAMA2; (+) strand; PAM type: YTN; PAM sequence: TTA
tgccaaatcacaatattccc

SEQ ID NO: 401748 - DNA, 20 bp, Artificial Sequence
  Description of Artificial Sequence: Synthetic oligonucleotide
  Target: LAMA2; (+) strand; PAM type: YTN; PAM sequence: TTC
ccactaaaaatgaatgaaaa

SEQ ID NO: 401749 - DNA, 20 bp, Artificial Sequence
  Description of Artificial Sequence: Synthetic oligonucleotide
  Target: LAMA2; (+) strand; PAM type: YTN; PAM sequence: CTA
aaaatgaatgaaaacaaaat

SEQ ID NO: 401750 - DNA, 20 bp, Artificial Sequence
  Description of Artificial Sequence: Synthetic oligonucleotide
  Target: LAMA2; (+) strand; PAM type: YTN; PAM sequence: TTT
taatcaaatattactatctc

SEQ ID NO: 401751 - DNA, 20 bp, Artificial Sequence
  Description of Artificial Sequence: Synthetic oligonucleotide
  Target: LAMA2; (+) strand; PAM type: YTN; PAM sequence: TTT
aatcaaatattactatctct

SEQ ID NO: 401752 - DNA, 20 bp, Artificial Sequence
  Description of Artificial Sequence: Synthetic oligonucleotide
  Target: LAMA2; (+) strand; PAM type: YTN; PAM sequence: TTA
atcaaatattactatctctg

SEQ ID NO: 401753 - DNA, 20 bp, Artificial Sequence
  Description of Artificial Sequence: Synthetic oligonucleotide
  Target: LAMA2; (+) strand; PAM type: YTN; PAM sequence: TTA
ctatctctgctgcttacttc

SEQ ID NO: 401754 - DNA, 20 bp, Artificial Sequence
  Description of Artificial Sequence: Synthetic oligonucleotide
  Target: LAMA2; (+) strand; PAM type: YTN; PAM sequence: CTA
tctctgctgcttacttcata

SEQ ID NO: 401755 - DNA, 20 bp, Artificial Sequence
  Description of Artificial Sequence: Synthetic oligonucleotide
  Target: LAMA2; (+) strand; PAM type: YTN; PAM sequence: CTC
tgctgcttacttcataattt

SEQ ID NO: 401756 - DNA, 20 bp, Artificial Sequence
  Description of Artificial Sequence: Synthetic oligonucleotide
  Target: LAMA2; (+) strand; PAM type: YTN; PAM sequence: CTG
ctgcttacttcataatttaa

SEQ ID NO: 401757 - DNA, 20 bp, Artificial Sequence
  Description of Artificial Sequence: Synthetic oligonucleotide
  Target: LAMA2; (+) strand; PAM type: YTN; PAM sequence: CTG
cttacttcataatttaagat

SEQ ID NO: 401758 - DNA, 20 bp, Artificial Sequence
  Description of Artificial Sequence: Synthetic oligonucleotide
  Target: LAMA2; (+) strand; PAM type: YTN; PAM sequence: CTT
acttcataatttaagatata

SEQ ID NO: 401759 - DNA, 20 bp, Artificial Sequence
  Description of Artificial Sequence: Synthetic oligonucleotide
  Target: LAMA2; (+) strand; PAM type: YTN; PAM sequence: TTA
cttcataatttaagatatat

SEQ ID NO: 401760 - DNA, 20 bp, Artificial Sequence
  Description of Artificial Sequence: Synthetic oligonucleotide
  Target: LAMA2; (+) strand; PAM type: YTN; PAM sequence: CTT
cataatttaagatatatttt

SEQ ID NO: 401761 - DNA, 20 bp, Artificial Sequence
  Description of Artificial Sequence: Synthetic oligonucleotide
  Target: LAMA2; (+) strand; PAM type: YTN; PAM sequence: TTC
ataatttaagatatattttt

SEQ ID NO: 401762 - DNA, 20 bp, Artificial Sequence
  Description of Artificial Sequence: Synthetic oligonucleotide
  Target: LAMA2; (+) strand; PAM type: YTN; PAM sequence: TTT
aagatatatttttaactttt

SEQ ID NO: 401763 - DNA, 20 bp, Artificial Sequence
  Description of Artificial Sequence: Synthetic oligonucleotide
  Target: LAMA2; (+) strand; PAM type: YTN; PAM sequence: TTA
agatatatttttaactttta

SEQ ID NO: 401764 - DNA, 20 bp, Artificial Sequence
  Description of Artificial Sequence: Synthetic oligonucleotide
  Target: LAMA2; (+) strand; PAM type: YTN; PAM sequence: TTT
ttaacttttattttaagttc

SEQ ID NO: 401765 - DNA, 20 bp, Artificial Sequence
  Description of Artificial Sequence: Synthetic oligonucleotide
  Target: LAMA2; (+) strand; PAM type: YTN; PAM sequence: TTT
taacttttattttaagttca

SEQ ID NO: 401766 - DNA, 20 bp, Artificial Sequence
  Description of Artificial Sequence: Synthetic oligonucleotide
  Target: LAMA2; (+) strand; PAM type: YTN; PAM sequence: TTT
aacttttattttaagttcag

SEQ ID NO: 401767 - DNA, 20 bp, Artificial Sequence
  Description of Artificial Sequence: Synthetic oligonucleotide
  Target: LAMA2; (+) strand; PAM type: YTN; PAM sequence: TTA
acttttattttaagttcagg

SEQ ID NO: 401768 - DNA, 20 bp, Artificial Sequence
  Description of Artificial Sequence: Synthetic oligonucleotide
  Target: LAMA2; (+) strand; PAM type: YTN; PAM sequence: CTT
ttattttaagttcaggcgta

SEQ ID NO: 401769 - DNA, 20 bp, Artificial Sequence
  Description of Artificial Sequence: Synthetic oligonucleotide
  Target: LAMA2; (+) strand; PAM type: YTN; PAM sequence: TTT
tattttaagttcaggcgtat

SEQ ID NO: 401770 - DNA, 20 bp, Artificial Sequence
  Description of Artificial Sequence: Synthetic oligonucleotide
  Target: LAMA2; (+) strand; PAM type: YTN; PAM sequence: TTT
attttaagttcaggcgtata

SEQ ID NO: 401771 - DNA, 20 bp, Artificial Sequence
  Description of Artificial Sequence: Synthetic oligonucleotide
  Target: LAMA2; (+) strand; PAM type: YTN; PAM sequence: TTA
ttttaagttcaggcgtataa

SEQ ID NO: 401772 - DNA, 20 bp, Artificial Sequence
  Description of Artificial Sequence: Synthetic oligonucleotide
  Target: LAMA2; (+) strand; PAM type: YTN; PAM sequence: TTT
taagttcaggcgtataagtg

SEQ ID NO: 401773 - DNA, 20 bp, Artificial Sequence
  Description of Artificial Sequence: Synthetic oligonucleotide
  Target: LAMA2; (+) strand; PAM type: YTN; PAM sequence: TTT
aagttcaggcgtataagtgc

SEQ ID NO: 401774 - DNA, 20 bp, Artificial Sequence
  Description of Artificial Sequence: Synthetic oligonucleotide
  Target: LAMA2; (+) strand; PAM type: YTN; PAM sequence: TTA
agttcaggcgtataagtgca

SEQ ID NO: 401775 - DNA, 20 bp, Artificial Sequence
  Description of Artificial Sequence: Synthetic oligonucleotide
  Target: LAMA2; (+) strand; PAM type: YTN; PAM sequence: TTC
aggcgtataagtgcaggttt

SEQ ID NO: 401776 - DNA, 20 bp, Artificial Sequence
  Description of Artificial Sequence: Synthetic oligonucleotide
  Target: LAMA2; (+) strand; PAM type: YTN; PAM sequence: TTT
gttacataggtaaacctgtg

SEQ ID NO: 401777 - DNA, 20 bp, Artificial Sequence
  Description of Artificial Sequence: Synthetic oligonucleotide
  Target: LAMA2; (+) strand; PAM type: YTN; PAM sequence: TTG
ttacataggtaaacctgtgt

SEQ ID NO: 401778 - DNA, 20 bp, Artificial Sequence
  Description of Artificial Sequence: Synthetic oligonucleotide
  Target: LAMA2; (+) strand; PAM type: YTN; PAM sequence: TTA
cataggtaaacctgtgtcat

SEQ ID NO: 401779 - DNA, 20 bp, Artificial Sequence
  Description of Artificial Sequence: Synthetic oligonucleotide
  Target: LAMA2; (+) strand; PAM type: YTN; PAM sequence: CTG
tgtcatgggggtttgtttta

SEQ ID NO: 401780 - DNA, 20 bp, Artificial Sequence
  Description of Artificial Sequence: Synthetic oligonucleotide
  Target: LAMA2; (+) strand; PAM type: YTN; PAM sequence: TTT
gttttatgaattatttattt

SEQ ID NO: 401781 - DNA, 20 bp, Artificial Sequence
  Description of Artificial Sequence: Synthetic oligonucleotide
  Target: LAMA2; (+) strand; PAM type: YTN; PAM sequence: TTG
ttttatgaattatttatttc

SEQ ID NO: 401782 - DNA, 20 bp, Artificial Sequence
  Description of Artificial Sequence: Synthetic oligonucleotide
  Target: LAMA2; (+) strand; PAM type: YTN; PAM sequence: TTT
tatgaattatttatttcatc

SEQ ID NO: 401783 - DNA, 20 bp, Artificial Sequence
  Description of Artificial Sequence: Synthetic oligonucleotide
  Target: LAMA2; (+) strand; PAM type: YTN; PAM sequence: TTT
atgaattatttatttcatca

SEQ ID NO: 401784 - DNA, 20 bp, Artificial Sequence
  Description of Artificial Sequence: Synthetic oligonucleotide
  Target: LAMA2; (+) strand; PAM type: YTN; PAM sequence: TTA
tgaattatttatttcatcac

SEQ ID NO: 401785 - DNA, 20 bp, Artificial Sequence
  Description of Artificial Sequence: Synthetic oligonucleotide
  Target: LAMA2; (+) strand; PAM type: YTN; PAM sequence: TTA
tttatttcatcacgcatgta

SEQ ID NO: 401786 - DNA, 20 bp, Artificial Sequence
  Description of Artificial Sequence: Synthetic oligonucleotide
  Target: LAMA2; (+) strand; PAM type: YTN; PAM sequence: TTT
atttcatcacgcatgtatta

SEQ ID NO: 401787 - DNA, 20 bp, Artificial Sequence
  Description of Artificial Sequence: Synthetic oligonucleotide
  Target: LAMA2; (+) strand; PAM type: YTN; PAM sequence: TTA
tttcatcacgcatgtattaa

SEQ ID NO: 401788 - DNA, 20 bp, Artificial Sequence
  Description of Artificial Sequence: Synthetic oligonucleotide
  Target: LAMA2; (+) strand; PAM type: YTN; PAM sequence: TTT
catcacgcatgtattaagcc

SEQ ID NO: 401789 - DNA, 20 bp, Artificial Sequence
  Description of Artificial Sequence: Synthetic oligonucleotide
  Target: LAMA2; (+) strand; PAM type: YTN; PAM sequence: TTC
atcacgcatgtattaagcct

SEQ ID NO: 401790 - DNA, 20 bp, Artificial Sequence
  Description of Artificial Sequence: Synthetic oligonucleotide
  Target: LAMA2; (+) strand; PAM type: YTN; PAM sequence: TTA
agcctagtacccattagtta

SEQ ID NO: 401791 - DNA, 20 bp, Artificial Sequence
  Description of Artificial Sequence: Synthetic oligonucleotide
  Target: LAMA2; (+) strand; PAM type: YTN; PAM sequence: CTA
gtacccattagttatttttc

SEQ ID NO: 401792 - DNA, 20 bp, Artificial Sequence
  Description of Artificial Sequence: Synthetic oligonucleotide
  Target: LAMA2; (+) strand; PAM type: YTN; PAM sequence: TTA
gttatttttcctgaccctct

SEQ ID NO: 401793 - DNA, 20 bp, Artificial Sequence
  Description of Artificial Sequence: Synthetic oligonucleotide
  Target: LAMA2; (+) strand; PAM type: YTN; PAM sequence: TTA
tttttcctgaccctctccct

SEQ ID NO: 401794 - DNA, 20 bp, Artificial Sequence
  Description of Artificial Sequence: Synthetic oligonucleotide
  Target: LAMA2; (+) strand; PAM type: YTN; PAM sequence: TTT
ttcctgaccctctccctcct

SEQ ID NO: 401795 - DNA, 20 bp, Artificial Sequence
  Description of Artificial Sequence: Synthetic oligonucleotide
  Target: LAMA2; (+) strand; PAM type: YTN; PAM sequence: TTT
tcctgaccctctccctcctc

SEQ ID NO: 401796 - DNA, 20 bp, Artificial Sequence
  Description of Artificial Sequence: Synthetic oligonucleotide
  Target: LAMA2; (+) strand; PAM type: YTN; PAM sequence: TTT
cctgaccctctccctcctcc

SEQ ID NO: 401797 - DNA, 20 bp, Artificial Sequence
  Description of Artificial Sequence: Synthetic oligonucleotide
  Target: LAMA2; (+) strand; PAM type: YTN; PAM sequence: TTC
ctgaccctctccctcctcct

SEQ ID NO: 401798 - DNA, 20 bp, Artificial Sequence
  Description of Artificial Sequence: Synthetic oligonucleotide
  Target: LAMA2; (+) strand; PAM type: YTN; PAM sequence: CTG
accctctccctcctcctgct

SEQ ID NO: 401799 - DNA, 20 bp, Artificial Sequence
  Description of Artificial Sequence: Synthetic oligonucleotide
  Target: LAMA2; (+) strand; PAM type: YTN; PAM sequence: CTC
tccctcctcctgctctccac

SEQ ID NO: 401800 - DNA, 20 bp, Artificial Sequence
  Description of Artificial Sequence: Synthetic oligonucleotide
  Target: LAMA2; (+) strand; PAM type: YTN; PAM sequence: CTC
cctcctcctgctctccaccc

SEQ ID NO: 401801 - DNA, 20 bp, Artificial Sequence
  Description of Artificial Sequence: Synthetic oligonucleotide
  Target: LAMA2; (+) strand; PAM type: YTN; PAM sequence: CTC
ctcctgctctccaccctcca

SEQ ID NO: 401802 - DNA, 20 bp, Artificial Sequence
  Description of Artificial Sequence: Synthetic oligonucleotide
  Target: LAMA2; (+) strand; PAM type: YTN; PAM sequence: CTC
ctgctctccaccctccaaaa

SEQ ID NO: 401803 - DNA, 20 bp, Artificial Sequence
  Description of Artificial Sequence: Synthetic oligonucleotide
  Target: LAMA2; (+) strand; PAM type: YTN; PAM sequence: CTG
ctctccaccctccaaaagaa

SEQ ID NO: 401804 - DNA, 20 bp, Artificial Sequence
  Description of Artificial Sequence: Synthetic oligonucleotide
  Target: LAMA2; (+) strand; PAM type: YTN; PAM sequence: CTC
tccaccctccaaaagaattc

SEQ ID NO: 401805 - DNA, 20 bp, Artificial Sequence
  Description of Artificial Sequence: Synthetic oligonucleotide
  Target: LAMA2; (+) strand; PAM type: YTN; PAM sequence: CTC
caccctccaaaagaattcca

SEQ ID NO: 401806 - DNA, 20 bp, Artificial Sequence
  Description of Artificial Sequence: Synthetic oligonucleotide
  Target: LAMA2; (+) strand; PAM type: YTN; PAM sequence: CTC
caaaagaattccattctatt

SEQ ID NO: 401807 - DNA, 20 bp, Artificial Sequence
  Description of Artificial Sequence: Synthetic oligonucleotide
  Target: LAMA2; (+) strand; PAM type: YTN; PAM sequence: TTC
cattctattttagattgatt

SEQ ID NO: 401808 - DNA, 20 bp, Artificial Sequence
  Description of Artificial Sequence: Synthetic oligonucleotide
  Target: LAMA2; (+) strand; PAM type: YTN; PAM sequence: TTC
tattttagattgattctcaa

SEQ ID NO: 401809 - DNA, 20 bp, Artificial Sequence
  Description of Artificial Sequence: Synthetic oligonucleotide
  Target: LAMA2; (+) strand; PAM type: YTN; PAM sequence: CTA
ttttagattgattctcaact

SEQ ID NO: 401810 - DNA, 20 bp, Artificial Sequence
  Description of Artificial Sequence: Synthetic oligonucleotide
  Target: LAMA2; (+) strand; PAM type: YTN; PAM sequence: TTT
tagattgattctcaactggt

SEQ ID NO: 401811 - DNA, 20 bp, Artificial Sequence
  Description of Artificial Sequence: Synthetic oligonucleotide
  Target: LAMA2; (+) strand; PAM type: YTN; PAM sequence: TTT
agattgattctcaactggta

SEQ ID NO: 401812 - DNA, 20 bp, Artificial Sequence
  Description of Artificial Sequence: Synthetic oligonucleotide
  Target: LAMA2; (+) strand; PAM type: YTN; PAM sequence: TTA
gattgattctcaactggtag

SEQ ID NO: 401813 - DNA, 20 bp, Artificial Sequence
  Description of Artificial Sequence: Synthetic oligonucleotide
  Target: LAMA2; (+) strand; PAM type: YTN; PAM sequence: TTG
attctcaactggtagtggcc

SEQ ID NO: 401814 - DNA, 20 bp, Artificial Sequence
  Description of Artificial Sequence: Synthetic oligonucleotide
  Target: LAMA2; (+) strand; PAM type: YTN; PAM sequence: TTC
tcaactggtagtggcctttt

SEQ ID NO: 401815 - DNA, 20 bp, Artificial Sequence
  Description of Artificial Sequence: Synthetic oligonucleotide
  Target: LAMA2; (+) strand; PAM type: YTN; PAM sequence: CTC
aactggtagtggccttttgt

SEQ ID NO: 401816 - DNA, 20 bp, Artificial Sequence
  Description of Artificial Sequence: Synthetic oligonucleotide
  Target: LAMA2; (+) strand; PAM type: YTN; PAM sequence: CTG
gtagtggccttttgtcatat

SEQ ID NO: 401817 - DNA, 20 bp, Artificial Sequence
  Description of Artificial Sequence: Synthetic oligonucleotide
  Target: LAMA2; (+) strand; PAM type: YTN; PAM sequence: CTT
ttgtcatatctctgttttaa

SEQ ID NO: 401818 - DNA, 20 bp, Artificial Sequence
  Description of Artificial Sequence: Synthetic oligonucleotide
  Target: LAMA2; (+) strand; PAM type: YTN; PAM sequence: TTT
tgtcatatctctgttttaat

SEQ ID NO: 401819 - DNA, 20 bp, Artificial Sequence
  Description of Artificial Sequence: Synthetic oligonucleotide
  Target: LAMA2; (+) strand; PAM type: YTN; PAM sequence: TTT
gtcatatctctgttttaatc

SEQ ID NO: 401820 - DNA, 20 bp, Artificial Sequence
  Description of Artificial Sequence: Synthetic oligonucleotide
  Target: LAMA2; (+) strand; PAM type: YTN; PAM sequence: TTG
tcatatctctgttttaatcc

SEQ ID NO: 401821 - DNA, 20 bp, Artificial Sequence
  Description of Artificial Sequence: Synthetic oligonucleotide
  Target: LAMA2; (+) strand; PAM type: YTN; PAM sequence: CTC
tgttttaatcctatcctcta

SEQ ID NO: 401822 - DNA, 20 bp, Artificial Sequence
  Description of Artificial Sequence: Synthetic oligonucleotide
  Target: LAMA2; (+) strand; PAM type: YTN; PAM sequence: CTG
ttttaatcctatcctctatt

SEQ ID NO: 401823 - DNA, 20 bp, Artificial Sequence
  Description of Artificial Sequence: Synthetic oligonucleotide
  Target: LAMA2; (+) strand; PAM type: YTN; PAM sequence: TTT
taatcctatcctctattatg

SEQ ID NO: 401824 - DNA, 20 bp, Artificial Sequence
  Description of Artificial Sequence: Synthetic oligonucleotide
  Target: LAMA2; (+) strand; PAM type: YTN; PAM sequence: TTT
aatcctatcctctattatga

SEQ ID NO: 401825 - DNA, 20 bp, Artificial Sequence
  Description of Artificial Sequence: Synthetic oligonucleotide
  Target: LAMA2; (+) strand; PAM type: YTN; PAM sequence: TTA
atcctatcctctattatgag

SEQ ID NO: 401826 - DNA, 20 bp, Artificial Sequence
  Description of Artificial Sequence: Synthetic oligonucleotide
  Target: LAMA2; (+) strand; PAM type: YTN; PAM sequence: CTA
tcctctattatgagaaatag

SEQ ID NO: 401827 - DNA, 20 bp, Artificial Sequence
  Description of Artificial Sequence: Synthetic oligonucleotide
  Target: LAMA2; (+) strand; PAM type: YTN; PAM sequence: CTC
tattatgagaaatagttaat

SEQ ID NO: 401828 - DNA, 20 bp, Artificial Sequence
  Description of Artificial Sequence: Synthetic oligonucleotide
  Target: LAMA2; (+) strand; PAM type: YTN; PAM sequence: CTA
ttatgagaaatagttaatta

SEQ ID NO: 401829 - DNA, 20 bp, Artificial Sequence
  Description of Artificial Sequence: Synthetic oligonucleotide
  Target: LAMA2; (+) strand; PAM type: YTN; PAM sequence: TTA
tgagaaatagttaattatct

SEQ ID NO: 401830 - DNA, 20 bp, Artificial Sequence
  Description of Artificial Sequence: Synthetic oligonucleotide
  Target: LAMA2; (+) strand; PAM type: YTN; PAM sequence: TTA
attatctataaatattaatt

SEQ ID NO: 401831 - DNA, 20 bp, Artificial Sequence
  Description of Artificial Sequence: Synthetic oligonucleotide
  Target: LAMA2; (+) strand; PAM type: YTN; PAM sequence: TTA
tctataaatattaattaaat

SEQ ID NO: 401832 - DNA, 20 bp, Artificial Sequence
  Description of Artificial Sequence: Synthetic oligonucleotide
  Target: LAMA2; (+) strand; PAM type: YTN; PAM sequence: CTA
taaatattaattaaattggg

SEQ ID NO: 401833 - DNA, 20 bp, Artificial Sequence
  Description of Artificial Sequence: Synthetic oligonucleotide
  Target: LAMA2; (+) strand; PAM type: YTN; PAM sequence: TTA
attaaattgggtctgttttc

SEQ ID NO: 401834 - DNA, 20 bp, Artificial Sequence
  Description of Artificial Sequence: Synthetic oligonucleotide
  Target: LAMA2; (+) strand; PAM type: YTN; PAM sequence: TTA
aattgggtctgttttctatc

SEQ ID NO: 401835 - DNA, 20 bp, Artificial Sequence
  Description of Artificial Sequence: Synthetic oligonucleotide
  Target: LAMA2; (+) strand; PAM type: YTN; PAM sequence: TTG
ggtctgttttctatcttact

SEQ ID NO: 401836 - DNA, 20 bp, Artificial Sequence
  Description of Artificial Sequence: Synthetic oligonucleotide
  Target: LAMA2; (+) strand; PAM type: YTN; PAM sequence: CTG
ttttctatcttactaaaaca

SEQ ID NO: 401837 - DNA, 20 bp, Artificial Sequence
  Description of Artificial Sequence: Synthetic oligonucleotide
  Target: LAMA2; (+) strand; PAM type: YTN; PAM sequence: TTT
tctatcttactaaaacatag

SEQ ID NO: 401838 - DNA, 20 bp, Artificial Sequence
  Description of Artificial Sequence: Synthetic oligonucleotide
  Target: LAMA2; (+) strand; PAM type: YTN; PAM sequence: TTT
ctatcttactaaaacataga

SEQ ID NO: 401839 - DNA, 20 bp, Artificial Sequence
  Description of Artificial Sequence: Synthetic oligonucleotide
  Target: LAMA2; (+) strand; PAM type: YTN; PAM sequence: TTC
tatcttactaaaacatagaa

SEQ ID NO: 401840 - DNA, 20 bp, Artificial Sequence
  Description of Artificial Sequence: Synthetic oligonucleotide
  Target: LAMA2; (+) strand; PAM type: YTN; PAM sequence: CTA
tcttactaaaacatagaaat

SEQ ID NO: 401841 - DNA, 20 bp, Artificial Sequence
  Description of Artificial Sequence: Synthetic oligonucleotide
  Target: LAMA2; (+) strand; PAM type: YTN; PAM sequence: CTT
actaaaacatagaaataatt

SEQ ID NO: 401842 - DNA, 20 bp, Artificial Sequence
  Description of Artificial Sequence: Synthetic oligonucleotide
  Target: LAMA2; (+) strand; PAM type: YTN; PAM sequence: TTA
ctaaaacatagaaataattt

SEQ ID NO: 401843 - DNA, 20 bp, Artificial Sequence
  Description of Artificial Sequence: Synthetic oligonucleotide
  Target: LAMA2; (+) strand; PAM type: YTN; PAM sequence: CTA
aaacatagaaataattttta

SEQ ID NO: 401844 - DNA, 20 bp, Artificial Sequence
  Description of Artificial Sequence: Synthetic oligonucleotide
  Target: LAMA2; (+) strand; PAM type: YTN; PAM sequence: TTT
ttaaaatacaaatagtggcc

SEQ ID NO: 401845 - DNA, 20 bp, Artificial Sequence
  Description of Artificial Sequence: Synthetic oligonucleotide
  Target: LAMA2; (+) strand; PAM type: YTN; PAM sequence: TTT
taaaatacaaatagtggcca

SEQ ID NO: 401846 - DNA, 20 bp, Artificial Sequence
  Description of Artificial Sequence: Synthetic oligonucleotide
  Target: LAMA2; (+) strand; PAM type: YTN; PAM sequence: TTT
aaaatacaaatagtggccac

SEQ ID NO: 401847 - DNA, 20 bp, Artificial Sequence
  Description of Artificial Sequence: Synthetic oligonucleotide
  Target: LAMA2; (+) strand; PAM type: YTN; PAM sequence: TTA
aaatacaaatagtggccact

SEQ ID NO: 401848 - DNA, 20 bp, Artificial Sequence
  Description of Artificial Sequence: Synthetic oligonucleotide
  Target: LAMA2; (+) strand; PAM type: YTN; PAM sequence: CTA
aattatatattttgtgtact

SEQ ID NO: 401849 - DNA, 20 bp, Artificial Sequence
  Description of Artificial Sequence: Synthetic oligonucleotide
  Target: LAMA2; (+) strand; PAM type: YTN; PAM sequence: TTA
tatattttgtgtacttttat

SEQ ID NO: 401850 - DNA, 20 bp, Artificial Sequence
  Description of Artificial Sequence: Synthetic oligonucleotide
  Target: LAMA2; (+) strand; PAM type: YTN; PAM sequence: TTT
tgtgtacttttatttgataa

SEQ ID NO: 401851 - DNA, 20 bp, Artificial Sequence
  Description of Artificial Sequence: Synthetic oligonucleotide
  Target: LAMA2; (+) strand; PAM type: YTN; PAM sequence: TTT
gtgtacttttatttgataac

SEQ ID NO: 401852 - DNA, 20 bp, Artificial Sequence
  Description of Artificial Sequence: Synthetic oligonucleotide
  Target: LAMA2; (+) strand; PAM type: YTN; PAM sequence: TTG
tgtacttttatttgataaca

SEQ ID NO: 401853 - DNA, 20 bp, Artificial Sequence
  Description of Artificial Sequence: Synthetic oligonucleotide
  Target: LAMA2; (+) strand; PAM type: YTN; PAM sequence: CTT
ttatttgataacaattgctt

SEQ ID NO: 401854 - DNA, 20 bp, Artificial Sequence
  Description of Artificial Sequence: Synthetic oligonucleotide
  Target: LAMA2; (+) strand; PAM type: YTN; PAM sequence: TTT
tatttgataacaattgcttc

SEQ ID NO: 401855 - DNA, 20 bp, Artificial Sequence
  Description of Artificial Sequence: Synthetic oligonucleotide
  Target: LAMA2; (+) strand; PAM type: YTN; PAM sequence: TTT
atttgataacaattgcttca

SEQ ID NO: 401856 - DNA, 20 bp, Artificial Sequence
  Description of Artificial Sequence: Synthetic oligonucleotide
  Target: LAMA2; (+) strand; PAM type: YTN; PAM sequence: TTA
tttgataacaattgcttcag

SEQ ID NO: 401857 - DNA, 20 bp, Artificial Sequence
  Description of Artificial Sequence: Synthetic oligonucleotide
  Target: LAMA2; (+) strand; PAM type: YTN; PAM sequence: TTT
gataacaattgcttcagtta

SEQ ID NO: 401858 - DNA, 20 bp, Artificial Sequence
  Description of Artificial Sequence: Synthetic oligonucleotide
  Target: LAMA2; (+) strand; PAM type: YTN; PAM sequence: TTG
ataacaattgcttcagttaa

SEQ ID NO: 401859 - DNA, 20 bp, Artificial Sequence
  Description of Artificial Sequence: Synthetic oligonucleotide
  Target: LAMA2; (+) strand; PAM type: YTN; PAM sequence: TTG
cttcagttaaaatggggtgc

SEQ ID NO: 401860 - DNA, 20 bp, Artificial Sequence
  Description of Artificial Sequence: Synthetic oligonucleotide
  Target: LAMA2; (+) strand; PAM type: YTN; PAM sequence: CTT
cagttaaaatggggtgcatt

SEQ ID NO: 401861 - DNA, 20 bp, Artificial Sequence
  Description of Artificial Sequence: Synthetic oligonucleotide
  Target: LAMA2; (+) strand; PAM type: YTN; PAM sequence: TTC
agttaaaatggggtgcattt

SEQ ID NO: 401862 - DNA, 20 bp, Artificial Sequence
  Description of Artificial Sequence: Synthetic oligonucleotide
  Target: LAMA2; (+) strand; PAM type: YTN; PAM sequence: TTA
aaatggggtgcatttataat

SEQ ID NO: 401863 - DNA, 20 bp, Artificial Sequence
  Description of Artificial Sequence: Synthetic oligonucleotide
  Target: LAMA2; (+) strand; PAM type: YTN; PAM sequence: TTT
ataattagtacctgttatga

SEQ ID NO: 401864 - DNA, 20 bp, Artificial Sequence
  Description of Artificial Sequence: Synthetic oligonucleotide
  Target: LAMA2; (+) strand; PAM type: YTN; PAM sequence: TTA
taattagtacctgttatgaa

SEQ ID NO: 401865 - DNA, 20 bp, Artificial Sequence
  Description of Artificial Sequence: Synthetic oligonucleotide
  Target: LAMA2; (+) strand; PAM type: YTN; PAM sequence: TTA
gtacctgttatgaaaaatac

SEQ ID NO: 401866 - DNA, 20 bp, Artificial Sequence
  Description of Artificial Sequence: Synthetic oligonucleotide
  Target: LAMA2; (+) strand; PAM type: YTN; PAM sequence: CTG
ttatgaaaaataccattttt

SEQ ID NO: 401867 - DNA, 20 bp, Artificial Sequence
  Description of Artificial Sequence: Synthetic oligonucleotide
  Target: LAMA2; (+) strand; PAM type: YTN; PAM sequence: TTA
tgaaaaataccatttttagt

SEQ ID NO: 401868 - DNA, 20 bp, Artificial Sequence
  Description of Artificial Sequence: Synthetic oligonucleotide
  Target: LAMA2; (+) strand; PAM type: YTN; PAM sequence: TTT
ttagtcactactttataata

SEQ ID NO: 401869 - DNA, 20 bp, Artificial Sequence
  Description of Artificial Sequence: Synthetic oligonucleotide
  Target: LAMA2; (+) strand; PAM type: YTN; PAM sequence: TTT
tagtcactactttataatat

SEQ ID NO: 401870 - DNA, 20 bp, Artificial Sequence
  Description of Artificial Sequence: Synthetic oligonucleotide
  Target: LAMA2; (+) strand; PAM type: YTN; PAM sequence: TTT
agtcactactttataatatt

SEQ ID NO: 401871 - DNA, 20 bp, Artificial Sequence
  Description of Artificial Sequence: Synthetic oligonucleotide
  Target: LAMA2; (+) strand; PAM type: YTN; PAM sequence: TTA
gtcactactttataatattt

SEQ ID NO: 401872 - DNA, 20 bp, Artificial Sequence
  Description of Artificial Sequence: Synthetic oligonucleotide
  Target: LAMA2; (+) strand; PAM type: YTN; PAM sequence: CTA
ctttataatatttatagaaa

SEQ ID NO: 401873 - DNA, 20 bp, Artificial Sequence
  Description of Artificial Sequence: Synthetic oligonucleotide
  Target: LAMA2; (+) strand; PAM type: YTN; PAM sequence: CTT
tataatatttatagaaaata

SEQ ID NO: 401874 - DNA, 20 bp, Artificial Sequence
  Description of Artificial Sequence: Synthetic oligonucleotide
  Target: LAMA2; (+) strand; PAM type: YTN; PAM sequence: TTT
ataatatttatagaaaatac

SEQ ID NO: 401875 - DNA, 20 bp, Artificial Sequence
  Description of Artificial Sequence: Synthetic oligonucleotide
  Target: LAMA2; (+) strand; PAM type: YTN; PAM sequence: TTA
taatatttatagaaaatact

SEQ ID NO: 401876 - DNA, 20 bp, Artificial Sequence
  Description of Artificial Sequence: Synthetic oligonucleotide
  Target: LAMA2; (+) strand; PAM type: YTN; PAM sequence: TTT
atagaaaatacttcctcatg

SEQ ID NO: 401877 - DNA, 20 bp, Artificial Sequence
  Description of Artificial Sequence: Synthetic oligonucleotide
  Target: LAMA2; (+) strand; PAM type: YTN; PAM sequence: TTA
tagaaaatacttcctcatga

SEQ ID NO: 401878 - DNA, 20 bp, Artificial Sequence
  Description of Artificial Sequence: Synthetic oligonucleotide
  Target: LAMA2; (+) strand; PAM type: YTN; PAM sequence: CTT
cctcatgaatttataatttt

SEQ ID NO: 401879 - DNA, 20 bp, Artificial Sequence
  Description of Artificial Sequence: Synthetic oligonucleotide
  Target: LAMA2; (+) strand; PAM type: YTN; PAM sequence: TTC
ctcatgaatttataattttt

SEQ ID NO: 401880 - DNA, 20 bp, Artificial Sequence
  Description of Artificial Sequence: Synthetic oligonucleotide
  Target: LAMA2; (+) strand; PAM type: YTN; PAM sequence: CTC
atgaatttataatttttttt

SEQ ID NO: 401881 - DNA, 20 bp, Artificial Sequence
  Description of Artificial Sequence: Synthetic oligonucleotide
  Target: LAMA2; (+) strand; PAM type: YTN; PAM sequence: TTT
ataatttttttttgttttgc

SEQ ID NO: 401882 - DNA, 20 bp, Artificial Sequence
  Description of Artificial Sequence: Synthetic oligonucleotide
  Target: LAMA2; (+) strand; PAM type: YTN; PAM sequence: TTA
taatttttttttgttttgct

SEQ ID NO: 401883 - DNA, 20 bp, Artificial Sequence
  Description of Artificial Sequence: Synthetic oligonucleotide
  Target: LAMA2; (+) strand; PAM type: YTN; PAM sequence: TTT
ttttttgttttgcttccatg

SEQ ID NO: 401884 - DNA, 20 bp, Artificial Sequence
  Description of Artificial Sequence: Synthetic oligonucleotide
  Target: LAMA2; (+) strand; PAM type: YTN; PAM sequence: TTT
tttttgttttgcttccatgt

SEQ ID NO: 401885 - DNA, 20 bp, Artificial Sequence
  Description of Artificial Sequence: Synthetic oligonucleotide
  Target: LAMA2; (+) strand; PAM type: YTN; PAM sequence: TTT
ttttgttttgcttccatgtg

SEQ ID NO: 401886 - DNA, 20 bp, Artificial Sequence
  Description of Artificial Sequence: Synthetic oligonucleotide
  Target: LAMA2; (+) strand; PAM type: YTN; PAM sequence: TTT
tttgttttgcttccatgtga

SEQ ID NO: 401887 - DNA, 20 bp, Artificial Sequence
  Description of Artificial Sequence: Synthetic oligonucleotide
  Target: LAMA2; (+) strand; PAM type: YTN; PAM sequence: TTT
ttgttttgcttccatgtgaa

SEQ ID NO: 401888 - DNA, 20 bp, Artificial Sequence
  Description of Artificial Sequence: Synthetic oligonucleotide
  Target: LAMA2; (+) strand; PAM type: YTN; PAM sequence: TTT
tgttttgcttccatgtgaaa

SEQ ID NO: 401889 - DNA, 20 bp, Artificial Sequence
  Description of Artificial Sequence: Synthetic oligonucleotide
  Target: LAMA2; (+) strand; PAM type: YTN; PAM sequence: TTT
gttttgcttccatgtgaaat

SEQ ID NO: 401890 - DNA, 20 bp, Artificial Sequence
  Description of Artificial Sequence: Synthetic oligonucleotide
  Target: LAMA2; (+) strand; PAM type: YTN; PAM sequence: TTG
ttttgcttccatgtgaaatt

SEQ ID NO: 401891 - DNA, 20 bp, Artificial Sequence
  Description of Artificial Sequence: Synthetic oligonucleotide
  Target: LAMA2; (+) strand; PAM type: YTN; PAM sequence: TTT
tgcttccatgtgaaattgcc

SEQ ID NO: 401892 - DNA, 20 bp, Artificial Sequence
  Description of Artificial Sequence: Synthetic oligonucleotide
  Target: LAMA2; (+) strand; PAM type: YTN; PAM sequence: TTT
gcttccatgtgaaattgcct

SEQ ID NO: 401893 - DNA, 20 bp, Artificial Sequence
  Description of Artificial Sequence: Synthetic oligonucleotide
  Target: LAMA2; (+) strand; PAM type: YTN; PAM sequence: TTG
cttccatgtgaaattgcctg

SEQ ID NO: 401894 - DNA, 20 bp, Artificial Sequence
  Description of Artificial Sequence: Synthetic oligonucleotide
  Target: LAMA2; (+) strand; PAM type: YTN; PAM sequence: CTT
ccatgtgaaattgcctgcag

SEQ ID NO: 401895 - DNA, 20 bp, Artificial Sequence
  Description of Artificial Sequence: Synthetic oligonucleotide
  Target: LAMA2; (+) strand; PAM type: YTN; PAM sequence: TTC
catgtgaaattgcctgcaga

SEQ ID NO: 401896 - DNA, 20 bp, Artificial Sequence
  Description of Artificial Sequence: Synthetic oligonucleotide
  Target: LAMA2; (+) strand; PAM type: YTN; PAM sequence: TTG
cctgcagaaatcagtacgta

SEQ ID NO: 401897 - DNA, 20 bp, Artificial Sequence
  Description of Artificial Sequence: Synthetic oligonucleotide
  Target: LAMA2; (+) strand; PAM type: YTN; PAM sequence: CTG
cagaaatcagtacgtatatg

SEQ ID NO: 401898 - DNA, 20 bp, Artificial Sequence
  Description of Artificial Sequence: Synthetic oligonucleotide
  Target: LAMA2; (+) strand; PAM type: YTN; PAM sequence: TTT
acttatataccttttagtaa

SEQ ID NO: 401899 - DNA, 20 bp, Artificial Sequence
  Description of Artificial Sequence: Synthetic oligonucleotide
  Target: LAMA2; (+) strand; PAM type: YTN; PAM sequence: TTA
cttatataccttttagtaac

SEQ ID NO: 401900 - DNA, 20 bp, Artificial Sequence
  Description of Artificial Sequence: Synthetic oligonucleotide
  Target: LAMA2; (+) strand; PAM type: YTN; PAM sequence: CTT
atataccttttagtaacgct

SEQ ID NO: 401901 - DNA, 20 bp, Artificial Sequence
  Description of Artificial Sequence: Synthetic oligonucleotide
  Target: LAMA2; (+) strand; PAM type: YTN; PAM sequence: TTA
tataccttttagtaacgctc

SEQ ID NO: 401902 - DNA, 20 bp, Artificial Sequence
  Description of Artificial Sequence: Synthetic oligonucleotide
  Target: LAMA2; (+) strand; PAM type: YTN; PAM sequence: CTT
ttagtaacgctcatgcttca

SEQ ID NO: 401903 - DNA, 20 bp, Artificial Sequence
  Description of Artificial Sequence: Synthetic oligonucleotide
  Target: LAMA2; (+) strand; PAM type: YTN; PAM sequence: TTT
tagtaacgctcatgcttcat

SEQ ID NO: 401904 - DNA, 20 bp, Artificial Sequence
  Description of Artificial Sequence: Synthetic oligonucleotide
  Target: LAMA2; (+) strand; PAM type: YTN; PAM sequence: TTT
agtaacgctcatgcttcatt

SEQ ID NO: 401905 - DNA, 20 bp, Artificial Sequence
  Description of Artificial Sequence: Synthetic oligonucleotide
  Target: LAMA2; (+) strand; PAM type: YTN; PAM sequence: TTA
gtaacgctcatgcttcattg

SEQ ID NO: 401906 - DNA, 20 bp, Artificial Sequence
  Description of Artificial Sequence: Synthetic oligonucleotide
  Target: LAMA2; (+) strand; PAM type: YTN; PAM sequence: CTC
atgcttcattgcctattgca

SEQ ID NO: 401907 - DNA, 20 bp, Artificial Sequence
  Description of Artificial Sequence: Synthetic oligonucleotide
  Target: LAMA2; (+) strand; PAM type: YTN; PAM sequence: CTT
cattgcctattgcaaaaagt

SEQ ID NO: 401908 - DNA, 20 bp, Artificial Sequence
  Description of Artificial Sequence: Synthetic oligonucleotide
  Target: LAMA2; (+) strand; PAM type: YTN; PAM sequence: TTC
attgcctattgcaaaaagtt

SEQ ID NO: 401909 - DNA, 20 bp, Artificial Sequence
  Description of Artificial Sequence: Synthetic oligonucleotide
  Target: LAMA2; (+) strand; PAM type: YTN; PAM sequence: TTG
cctattgcaaaaagtttcag

SEQ ID NO: 401910 - DNA, 20 bp, Artificial Sequence
  Description of Artificial Sequence: Synthetic oligonucleotide
  Target: LAMA2; (+) strand; PAM type: YTN; PAM sequence: CTA
ttgcaaaaagtttcagcttt

SEQ ID NO: 401911 - DNA, 20 bp, Artificial Sequence
  Description of Artificial Sequence: Synthetic oligonucleotide
  Target: LAMA2; (+) strand; PAM type: YTN; PAM sequence: TTG
caaaaagtttcagctttgca

SEQ ID NO: 401912 - DNA, 20 bp, Artificial Sequence
  Description of Artificial Sequence: Synthetic oligonucleotide
  Target: LAMA2; (+) strand; PAM type: YTN; PAM sequence: TTT
cagctttgcatgtactatat

SEQ ID NO: 401913 - DNA, 20 bp, Artificial Sequence
  Description of Artificial Sequence: Synthetic oligonucleotide
  Target: LAMA2; (+) strand; PAM type: YTN; PAM sequence: TTC
agctttgcatgtactatatt

SEQ ID NO: 401914 - DNA, 20 bp, Artificial Sequence
  Description of Artificial Sequence: Synthetic oligonucleotide
  Target: LAMA2; (+) strand; PAM type: YTN; PAM sequence: CTT
tgcatgtactatattttggt

SEQ ID NO: 401915 - DNA, 20 bp, Artificial Sequence
  Description of Artificial Sequence: Synthetic oligonucleotide
  Target: LAMA2; (+) strand; PAM type: YTN; PAM sequence: TTT
gcatgtactatattttggtt

SEQ ID NO: 401916 - DNA, 20 bp, Artificial Sequence
  Description of Artificial Sequence: Synthetic oligonucleotide
  Target: LAMA2; (+) strand; PAM type: YTN; PAM sequence: TTG
catgtactatattttggttt

SEQ ID NO: 401917 - DNA, 20 bp, Artificial Sequence
  Description of Artificial Sequence: Synthetic oligonucleotide
  Target: LAMA2; (+) strand; PAM type: YTN; PAM sequence: CTA
tattttggttttgctttaaa

SEQ ID NO: 401918 - DNA, 20 bp, Artificial Sequence
  Description of Artificial Sequence: Synthetic oligonucleotide
  Target: LAMA2; (+) strand; PAM type: YTN; PAM sequence: TTT
tggttttgctttaaacattg

SEQ ID NO: 401919 - DNA, 20 bp, Artificial Sequence
  Description of Artificial Sequence: Synthetic oligonucleotide
  Target: LAMA2; (+) strand; PAM type: YTN; PAM sequence: TTT
ggttttgctttaaacattgc

SEQ ID NO: 401920 - DNA, 20 bp, Artificial Sequence
  Description of Artificial Sequence: Synthetic oligonucleotide
  Target: LAMA2; (+) strand; PAM type: YTN; PAM sequence: TTG
gttttgctttaaacattgcg

SEQ ID NO: 401921 - DNA, 20 bp, Artificial Sequence
  Description of Artificial Sequence: Synthetic oligonucleotide
  Target: LAMA2; (+) strand; PAM type: YTN; PAM sequence: TTT
tgctttaaacattgcgtagc

SEQ ID NO: 401922 - DNA, 20 bp, Artificial Sequence
  Description of Artificial Sequence: Synthetic oligonucleotide
  Target: LAMA2; (+) strand; PAM type: YTN; PAM sequence: TTT
gctttaaacattgcgtagct

SEQ ID NO: 401923 - DNA, 20 bp, Artificial Sequence
  Description of Artificial Sequence: Synthetic oligonucleotide
  Target: LAMA2; (+) strand; PAM type: YTN; PAM sequence: TTG
ctttaaacattgcgtagcta

SEQ ID NO: 401924 - DNA, 20 bp, Artificial Sequence
  Description of Artificial Sequence: Synthetic oligonucleotide
  Target: LAMA2; (+) strand; PAM type: YTN; PAM sequence: CTT
taaacattgcgtagctattc

SEQ ID NO: 401925 - DNA, 20 bp, Artificial Sequence
  Description of Artificial Sequence: Synthetic oligonucleotide
  Target: LAMA2; (+) strand; PAM type: YTN; PAM sequence: TTT
aaacattgcgtagctattct

SEQ ID NO: 401926 - DNA, 20 bp, Artificial Sequence
  Description of Artificial Sequence: Synthetic oligonucleotide
  Target: LAMA2; (+) strand; PAM type: YTN; PAM sequence: TTA
aacattgcgtagctattctt

SEQ ID NO: 401927 - DNA, 20 bp, Artificial Sequence
  Description of Artificial Sequence: Synthetic oligonucleotide
  Target: LAMA2; (+) strand; PAM type: YTN; PAM sequence: TTG
cgtagctattctttccactg

SEQ ID NO: 401928 - DNA, 20 bp, Artificial Sequence
  Description of Artificial Sequence: Synthetic oligonucleotide
  Target: LAMA2; (+) strand; PAM type: YTN; PAM sequence: CTA
ttctttccactgttacagta

SEQ ID NO: 401929 - DNA, 20 bp, Artificial Sequence
  Description of Artificial Sequence: Synthetic oligonucleotide
  Target: LAMA2; (+) strand; PAM type: YTN; PAM sequence: TTC
tttccactgttacagtatta

SEQ ID NO: 401930 - DNA, 20 bp, Artificial Sequence
  Description of Artificial Sequence: Synthetic oligonucleotide
  Target: LAMA2; (+) strand; PAM type: YTN; PAM sequence: CTT
tccactgttacagtattaat

SEQ ID NO: 401931 - DNA, 20 bp, Artificial Sequence
  Description of Artificial Sequence: Synthetic oligonucleotide
  Target: LAMA2; (+) strand; PAM type: YTN; PAM sequence: TTT
ccactgttacagtattaatg

SEQ ID NO: 401932 - DNA, 20 bp, Artificial Sequence
  Description of Artificial Sequence: Synthetic oligonucleotide
  Target: LAMA2; (+) strand; PAM type: YTN; PAM sequence: TTC
cactgttacagtattaatgg

SEQ ID NO: 401933 - DNA, 20 bp, Artificial Sequence
  Description of Artificial Sequence: Synthetic oligonucleotide
  Target: LAMA2; (+) strand; PAM type: YTN; PAM sequence: CTG
ttacagtattaatggtagat

SEQ ID NO: 401934 - DNA, 20 bp, Artificial Sequence
  Description of Artificial Sequence: Synthetic oligonucleotide
  Target: LAMA2; (+) strand; PAM type: YTN; PAM sequence: TTA
cagtattaatggtagatgcg

SEQ ID NO: 401935 - DNA, 20 bp, Artificial Sequence
  Description of Artificial Sequence: Synthetic oligonucleotide
  Target: LAMA2; (+) strand; PAM type: YTN; PAM sequence: TTA
atggtagatgcgtaaaagga

SEQ ID NO: 401936 - DNA, 20 bp, Artificial Sequence
  Description of Artificial Sequence: Synthetic oligonucleotide
  Target: LAMA2; (+) strand; PAM type: YTN; PAM sequence: CTT
cctttataaaaaggtcatat

SEQ ID NO: 401937 - DNA, 20 bp, Artificial Sequence
  Description of Artificial Sequence: Synthetic oligonucleotide
  Target: LAMA2; (+) strand; PAM type: YTN; PAM sequence: TTC
ctttataaaaaggtcatatg

SEQ ID NO: 401938 - DNA, 20 bp, Artificial Sequence
  Description of Artificial Sequence: Synthetic oligonucleotide
  Target: LAMA2; (+) strand; PAM type: YTN; PAM sequence: CTT
tataaaaaggtcatatgtgg

SEQ ID NO: 401939 - DNA, 20 bp, Artificial Sequence
  Description of Artificial Sequence: Synthetic oligonucleotide
  Target: LAMA2; (+) strand; PAM type: YTN; PAM sequence: TTT
ataaaaaggtcatatgtgga

SEQ ID NO: 401940 - DNA, 20 bp, Artificial Sequence
  Description of Artificial Sequence: Synthetic oligonucleotide
  Target: LAMA2; (+) strand; PAM type: YTN; PAM sequence: TTA
taaaaaggtcatatgtggat

SEQ ID NO: 401941 - DNA, 20 bp, Artificial Sequence
  Description of Artificial Sequence: Synthetic oligonucleotide
  Target: LAMA2; (+) strand; PAM type: YTN; PAM sequence: TTT
ttaatagtgttataaaaagt

SEQ ID NO: 401942 - DNA, 20 bp, Artificial Sequence
  Description of Artificial Sequence: Synthetic oligonucleotide
  Target: LAMA2; (+) strand; PAM type: YTN; PAM sequence: TTT
taatagtgttataaaaagtt

SEQ ID NO: 401943 - DNA, 20 bp, Artificial Sequence
  Description of Artificial Sequence: Synthetic oligonucleotide
  Target: LAMA2; (+) strand; PAM type: YTN; PAM sequence: TTT
aatagtgttataaaaagttt

SEQ ID NO: 401944 - DNA, 20 bp, Artificial Sequence
  Description of Artificial Sequence: Synthetic oligonucleotide
  Target: LAMA2; (+) strand; PAM type: YTN; PAM sequence: TTA
atagtgttataaaaagtttg

SEQ ID NO: 401945 - DNA, 20 bp, Artificial Sequence
  Description of Artificial Sequence: Synthetic oligonucleotide
  Target: LAMA2; (+) strand; PAM type: YTN; PAM sequence: TTA
taaaaagtttggtcaggcga

SEQ ID NO: 401946 - DNA, 20 bp, Artificial Sequence
  Description of Artificial Sequence: Synthetic oligonucleotide
  Target: LAMA2; (+) strand; PAM type: YTN; PAM sequence: TTT
ggtcaggcgaagtggctcat

SEQ ID NO: 401947 - DNA, 20 bp, Artificial Sequence
  Description of Artificial Sequence: Synthetic oligonucleotide
  Target: LAMA2; (+) strand; PAM type: YTN; PAM sequence: TTG
gtcaggcgaagtggctcata

SEQ ID NO: 401948 - DNA, 20 bp, Artificial Sequence
  Description of Artificial Sequence: Synthetic oligonucleotide
  Target: LAMA2; (+) strand; PAM type: YTN; PAM sequence: CTC
atactctaaccccagaaatt

SEQ ID NO: 401949 - DNA, 20 bp, Artificial Sequence
  Description of Artificial Sequence: Synthetic oligonucleotide
  Target: LAMA2; (+) strand; PAM type: YTN; PAM sequence: CTC
taaccccagaaatttgggag

SEQ ID NO: 401950 - DNA, 20 bp, Artificial Sequence
  Description of Artificial Sequence: Synthetic oligonucleotide
  Target: LAMA2; (+) strand; PAM type: YTN; PAM sequence: CTA
accccagaaatttgggaggt

SEQ ID NO: 401951 - DNA, 20 bp, Artificial Sequence
  Description of Artificial Sequence: Synthetic oligonucleotide
  Target: LAMA2; (+) strand; PAM type: YTN; PAM sequence: TTT
gggaggtcaaggtgggagga

SEQ ID NO: 401952 - DNA, 20 bp, Artificial Sequence
  Description of Artificial Sequence: Synthetic oligonucleotide
  Target: LAMA2; (+) strand; PAM type: YTN; PAM sequence: TTG
ggaggtcaaggtgggaggat

SEQ ID NO: 401953 - DNA, 20 bp, Artificial Sequence
  Description of Artificial Sequence: Synthetic oligonucleotide
  Target: LAMA2; (+) strand; PAM type: YTN; PAM sequence: CTT
gaggccagaagtttgagatc

SEQ ID NO: 401954 - DNA, 20 bp, Artificial Sequence
  Description of Artificial Sequence: Synthetic oligonucleotide
  Target: LAMA2; (+) strand; PAM type: YTN; PAM sequence: TTG
aggccagaagtttgagatca

SEQ ID NO: 401955 - DNA, 20 bp, Artificial Sequence
  Description of Artificial Sequence: Synthetic oligonucleotide
  Target: LAMA2; (+) strand; PAM type: YTN; PAM sequence: TTT
gagatcagcctgggaaacat

SEQ ID NO: 401956 - DNA, 20 bp, Artificial Sequence
  Description of Artificial Sequence: Synthetic oligonucleotide
  Target: LAMA2; (+) strand; PAM type: YTN; PAM sequence: TTG
agatcagcctgggaaacata

SEQ ID NO: 401957 - DNA, 20 bp, Artificial Sequence
  Description of Artificial Sequence: Synthetic oligonucleotide
  Target: LAMA2; (+) strand; PAM type: YTN; PAM sequence: CTG
ggaaacatagcaagactcta

SEQ ID NO: 401958 - DNA, 20 bp, Artificial Sequence
  Description of Artificial Sequence: Synthetic oligonucleotide
  Target: LAMA2; (+) strand; PAM type: YTN; PAM sequence: CTC
tatctctacaaaaaggaaaa

SEQ ID NO: 401959 - DNA, 20 bp, Artificial Sequence
  Description of Artificial Sequence: Synthetic oligonucleotide
  Target: LAMA2; (+) strand; PAM type: YTN; PAM sequence: CTA
tctctacaaaaaggaaaaat

SEQ ID NO: 401960 - DNA, 20 bp, Artificial Sequence
  Description of Artificial Sequence: Synthetic oligonucleotide
  Target: LAMA2; (+) strand; PAM type: YTN; PAM sequence: CTC
tacaaaaaggaaaaatgagt

SEQ ID NO: 401961 - DNA, 20 bp, Artificial Sequence
  Description of Artificial Sequence: Synthetic oligonucleotide
  Target: LAMA2; (+) strand; PAM type: YTN; PAM sequence: CTA
caaaaaggaaaaatgagtga

SEQ ID NO: 401962 - DNA, 20 bp, Artificial Sequence
  Description of Artificial Sequence: Synthetic oligonucleotide
  Target: LAMA2; (+) strand; PAM type: YTN; PAM sequence: CTG
tatgatagccacataaaagt

SEQ ID NO: 401963 - DNA, 20 bp, Artificial Sequence
  Description of Artificial Sequence: Synthetic oligonucleotide
  Target: LAMA2; (+) strand; PAM type: YTN; PAM sequence: CTG
aatttctctatagaattaac

SEQ ID NO: 401964 - DNA, 20 bp, Artificial Sequence
  Description of Artificial Sequence: Synthetic oligonucleotide
  Target: LAMA2; (+) strand; PAM type: YTN; PAM sequence: TTT
ctctatagaattaactagat

SEQ ID NO: 401965 - DNA, 20 bp, Artificial Sequence
  Description of Artificial Sequence: Synthetic oligonucleotide
  Target: LAMA2; (+) strand; PAM type: YTN; PAM sequence: TTC
tctatagaattaactagatt

SEQ ID NO: 401966 - DNA, 20 bp, Artificial Sequence
  Description of Artificial Sequence: Synthetic oligonucleotide
  Target: LAMA2; (+) strand; PAM type: YTN; PAM sequence: CTC
tatagaattaactagattat

SEQ ID NO: 401967 - DNA, 20 bp, Artificial Sequence
  Description of Artificial Sequence: Synthetic oligonucleotide
  Target: LAMA2; (+) strand; PAM type: YTN; PAM sequence: CTA
tagaattaactagattatgc

SEQ ID NO: 401968 - DNA, 20 bp, Artificial Sequence
  Description of Artificial Sequence: Synthetic oligonucleotide
  Target: LAMA2; (+) strand; PAM type: YTN; PAM sequence: TTA
actagattatgctgtttctg

SEQ ID NO: 401969 - DNA, 20 bp, Artificial Sequence
  Description of Artificial Sequence: Synthetic oligonucleotide
  Target: LAMA2; (+) strand; PAM type: YTN; PAM sequence: CTA
gattatgctgtttctgataa

SEQ ID NO: 401970 - DNA, 20 bp, Artificial Sequence
  Description of Artificial Sequence: Synthetic oligonucleotide
  Target: LAMA2; (+) strand; PAM type: YTN; PAM sequence: TTA
tgctgtttctgataacacaa

SEQ ID NO: 401971 - DNA, 20 bp, Artificial Sequence
  Description of Artificial Sequence: Synthetic oligonucleotide
  Target: LAMA2; (+) strand; PAM type: YTN; PAM sequence: CTG
tttctgataacacaaattca

SEQ ID NO: 401972 - DNA, 20 bp, Artificial Sequence
  Description of Artificial Sequence: Synthetic oligonucleotide
  Target: LAMA2; (+) strand; PAM type: YTN; PAM sequence: TTT
ctgataacacaaattcaccc

SEQ ID NO: 401973 - DNA, 20 bp, Artificial Sequence
  Description of Artificial Sequence: Synthetic oligonucleotide
  Target: LAMA2; (+) strand; PAM type: YTN; PAM sequence: TTC
tgataacacaaattcacccc

SEQ ID NO: 401974 - DNA, 20 bp, Artificial Sequence
  Description of Artificial Sequence: Synthetic oligonucleotide
  Target: LAMA2; (+) strand; PAM type: YTN; PAM sequence: CTG
ataacacaaattcaccccaa

SEQ ID NO: 401975 - DNA, 20 bp, Artificial Sequence
  Description of Artificial Sequence: Synthetic oligonucleotide
  Target: LAMA2; (+) strand; PAM type: YTN; PAM sequence: TTC
accccaacacacgaatgact

SEQ ID NO: 401976 - DNA, 20 bp, Artificial Sequence
  Description of Artificial Sequence: Synthetic oligonucleotide
  Target: LAMA2; (+) strand; PAM type: YTN; PAM sequence: CTT
aattgcaagaggattaaaat

SEQ ID NO: 401977 - DNA, 20 bp, Artificial Sequence
  Description of Artificial Sequence: Synthetic oligonucleotide
  Target: LAMA2; (+) strand; PAM type: YTN; PAM sequence: TTA
attgcaagaggattaaaata

SEQ ID NO: 401978 - DNA, 20 bp, Artificial Sequence
  Description of Artificial Sequence: Synthetic oligonucleotide
  Target: LAMA2; (+) strand; PAM type: YTN; PAM sequence: TTG
caagaggattaaaatagata

SEQ ID NO: 401979 - DNA, 20 bp, Artificial Sequence
  Description of Artificial Sequence: Synthetic oligonucleotide
  Target: LAMA2; (+) strand; PAM type: YTN; PAM sequence: TTA
aaatagataaggtctacact

SEQ ID NO: 401980 - DNA, 20 bp, Artificial Sequence
  Description of Artificial Sequence: Synthetic oligonucleotide
  Target: LAMA2; (+) strand; PAM type: YTN; PAM sequence: CTA
cactgttgttgtttttaccc

SEQ ID NO: 401981 - DNA, 20 bp, Artificial Sequence
  Description of Artificial Sequence: Synthetic oligonucleotide
  Target: LAMA2; (+) strand; PAM type: YTN; PAM sequence: CTG
ttgttgtttttacccactga

SEQ ID NO: 401982 - DNA, 20 bp, Artificial Sequence
  Description of Artificial Sequence: Synthetic oligonucleotide
  Target: LAMA2; (+) strand; PAM type: YTN; PAM sequence: TTG
ttgtttttacccactgaagc

SEQ ID NO: 401983 - DNA, 20 bp, Artificial Sequence
  Description of Artificial Sequence: Synthetic oligonucleotide
  Target: LAMA2; (+) strand; PAM type: YTN; PAM sequence: TTG
tttttacccactgaagctca

SEQ ID NO: 401984 - DNA, 20 bp, Artificial Sequence
  Description of Artificial Sequence: Synthetic oligonucleotide
  Target: LAMA2; (+) strand; PAM type: YTN; PAM sequence: TTT
ttacccactgaagctcactt

SEQ ID NO: 401985 - DNA, 20 bp, Artificial Sequence
  Description of Artificial Sequence: Synthetic oligonucleotide
  Target: LAMA2; (+) strand; PAM type: YTN; PAM sequence: TTT
tacccactgaagctcacttt

SEQ ID NO: 401986 - DNA, 20 bp, Artificial Sequence
  Description of Artificial Sequence: Synthetic oligonucleotide
  Target: LAMA2; (+) strand; PAM type: YTN; PAM sequence: TTT
acccactgaagctcactttt

SEQ ID NO: 401987 - DNA, 20 bp, Artificial Sequence
  Description of Artificial Sequence: Synthetic oligonucleotide
  Target: LAMA2; (+) strand; PAM type: YTN; PAM sequence: TTA
cccactgaagctcacttttt

SEQ ID NO: 401988 - DNA, 20 bp, Artificial Sequence
  Description of Artificial Sequence: Synthetic oligonucleotide
  Target: LAMA2; (+) strand; PAM type: YTN; PAM sequence: CTG
aagctcactttttcctctcc

SEQ ID NO: 401989 - DNA, 20 bp, Artificial Sequence
  Description of Artificial Sequence: Synthetic oligonucleotide
  Target: LAMA2; (+) strand; PAM type: YTN; PAM sequence: CTC
actttttcctctccttgtaa

SEQ ID NO: 401990 - DNA, 20 bp, Artificial Sequence
  Description of Artificial Sequence: Synthetic oligonucleotide
  Target: LAMA2; (+) strand; PAM type: YTN; PAM sequence: CTT
tttcctctccttgtaattat

SEQ ID NO: 401991 - DNA, 20 bp, Artificial Sequence
  Description of Artificial Sequence: Synthetic oligonucleotide
  Target: LAMA2; (+) strand; PAM type: YTN; PAM sequence: TTT
ttcctctccttgtaattatt

SEQ ID NO: 401992 - DNA, 20 bp, Artificial Sequence
  Description of Artificial Sequence: Synthetic oligonucleotide
  Target: LAMA2; (+) strand; PAM type: YTN; PAM sequence: TTT
tcctctccttgtaattattc

SEQ ID NO: 401993 - DNA, 20 bp, Artificial Sequence
  Description of Artificial Sequence: Synthetic oligonucleotide
  Target: LAMA2; (+) strand; PAM type: YTN; PAM sequence: TTT
cctctccttgtaattattct

SEQ ID NO: 401994 - DNA, 20 bp, Artificial Sequence
  Description of Artificial Sequence: Synthetic oligonucleotide
  Target: LAMA2; (+) strand; PAM type: YTN; PAM sequence: TTC
ctctccttgtaattattctc

SEQ ID NO: 401995 - DNA, 20 bp, Artificial Sequence
  Description of Artificial Sequence: Synthetic oligonucleotide
  Target: LAMA2; (+) strand; PAM type: YTN; PAM sequence: CTC
tccttgtaattattctcaac

SEQ ID NO: 401996 - DNA, 20 bp, Artificial Sequence
  Description of Artificial Sequence: Synthetic oligonucleotide
  Target: LAMA2; (+) strand; PAM type: YTN; PAM sequence: CTC
cttgtaattattctcaactt

SEQ ID NO: 401997 - DNA, 20 bp, Artificial Sequence
  Description of Artificial Sequence: Synthetic oligonucleotide
  Target: LAMA2; (+) strand; PAM type: YTN; PAM sequence: CTT
gtaattattctcaacttctg

SEQ ID NO: 401998 - DNA, 20 bp, Artificial Sequence
  Description of Artificial Sequence: Synthetic oligonucleotide
  Target: LAMA2; (+) strand; PAM type: YTN; PAM sequence: TTG
taattattctcaacttctgt

SEQ ID NO: 401999 - DNA, 20 bp, Artificial Sequence
  Description of Artificial Sequence: Synthetic oligonucleotide
  Target: LAMA2; (+) strand; PAM type: YTN; PAM sequence: TTA
ttctcaacttctgtagaatt

SEQ ID NO: 402000 - DNA, 20 bp, Artificial Sequence
  Description of Artificial Sequence: Synthetic oligonucleotide
  Target: LAMA2; (+) strand; PAM type: YTN; PAM sequence: TTC
tcaacttctgtagaattata

SEQ ID NO: 402001 - DNA, 20 bp, Artificial Sequence
  Description of Artificial Sequence: Synthetic oligonucleotide
  Target: LAMA2; (+) strand; PAM type: YTN; PAM sequence: CTC
aacttctgtagaattatatt

SEQ ID NO: 402002 - DNA, 20 bp, Artificial Sequence
  Description of Artificial Sequence: Synthetic oligonucleotide
  Target: LAMA2; (+) strand; PAM type: YTN; PAM sequence: CTT
ctgtagaattatatttggag

SEQ ID NO: 402003 - DNA, 20 bp, Artificial Sequence
  Description of Artificial Sequence: Synthetic oligonucleotide
  Target: LAMA2; (+) strand; PAM type: YTN; PAM sequence: TTC
tgtagaattatatttggaga

SEQ ID NO: 402004 - DNA, 20 bp, Artificial Sequence
  Description of Artificial Sequence: Synthetic oligonucleotide
  Target: LAMA2; (+) strand; PAM type: YTN; PAM sequence: CTG
tagaattatatttggagaaa

SEQ ID NO: 402005 - DNA, 20 bp, Artificial Sequence
  Description of Artificial Sequence: Synthetic oligonucleotide
  Target: LAMA2; (+) strand; PAM type: YTN; PAM sequence: TTA
tatttggagaaacacataat

SEQ ID NO: 402006 - DNA, 20 bp, Artificial Sequence
  Description of Artificial Sequence: Synthetic oligonucleotide
  Target: LAMA2; (+) strand; PAM type: YTN; PAM sequence: TTT
ggagaaacacataataaaac

SEQ ID NO: 402007 - DNA, 20 bp, Artificial Sequence
  Description of Artificial Sequence: Synthetic oligonucleotide
  Target: LAMA2; (+) strand; PAM type: YTN; PAM sequence: TTG
gagaaacacataataaaact

SEQ ID NO: 402008 - DNA, 20 bp, Artificial Sequence
  Description of Artificial Sequence: Synthetic oligonucleotide
  Target: LAMA2; (+) strand; PAM type: YTN; PAM sequence: CTA
ggtcttaacaaatgaacaac

SEQ ID NO: 402009 - DNA, 20 bp, Artificial Sequence
  Description of Artificial Sequence: Synthetic oligonucleotide
  Target: LAMA2; (+) strand; PAM type: YTN; PAM sequence: CTT
aacaaatgaacaactactgg

SEQ ID NO: 402010 - DNA, 20 bp, Artificial Sequence
  Description of Artificial Sequence: Synthetic oligonucleotide
  Target: LAMA2; (+) strand; PAM type: YTN; PAM sequence: TTA
acaaatgaacaactactggg

SEQ ID NO: 402011 - DNA, 20 bp, Artificial Sequence
  Description of Artificial Sequence: Synthetic oligonucleotide
  Target: LAMA2; (+) strand; PAM type: YTN; PAM sequence: CTA
ctgggatatcaaaatgttct

SEQ ID NO: 402012 - DNA, 20 bp, Artificial Sequence
  Description of Artificial Sequence: Synthetic oligonucleotide
  Target: LAMA2; (+) strand; PAM type: YTN; PAM sequence: CTG
ggatatcaaaatgttctctc

SEQ ID NO: 402013 - DNA, 20 bp, Artificial Sequence
  Description of Artificial Sequence: Synthetic oligonucleotide
  Target: LAMA2; (+) strand; PAM type: YTN; PAM sequence: TTC
tctcttaaacatcccacagt

SEQ ID NO: 402014 - DNA, 20 bp, Artificial Sequence
  Description of Artificial Sequence: Synthetic oligonucleotide
  Target: LAMA2; (+) strand; PAM type: YTN; PAM sequence: CTC
tcttaaacatcccacagttt

SEQ ID NO: 402015 - DNA, 20 bp, Artificial Sequence
  Description of Artificial Sequence: Synthetic oligonucleotide
  Target: LAMA2; (+) strand; PAM type: YTN; PAM sequence: CTC
ttaaacatcccacagtttaa

SEQ ID NO: 402016 - DNA, 20 bp, Artificial Sequence
  Description of Artificial Sequence: Synthetic oligonucleotide
  Target: LAMA2; (+) strand; PAM type: YTN; PAM sequence: CTT
aaacatcccacagtttaaat

SEQ ID NO: 402017 - DNA, 20 bp, Artificial Sequence
  Description of Artificial Sequence: Synthetic oligonucleotide
  Target: LAMA2; (+) strand; PAM type: YTN; PAM sequence: TTA
aacatcccacagtttaaatt

SEQ ID NO: 402018 - DNA, 20 bp, Artificial Sequence
  Description of Artificial Sequence: Synthetic oligonucleotide
  Target: LAMA2; (+) strand; PAM type: YTN; PAM sequence: TTT
aaattgaaagtcaagaaaaa

SEQ ID NO: 402019 - DNA, 20 bp, Artificial Sequence
  Description of Artificial Sequence: Synthetic oligonucleotide
  Target: LAMA2; (+) strand; PAM type: YTN; PAM sequence: TTA
aattgaaagtcaagaaaaac

SEQ ID NO: 402020 - DNA, 20 bp, Artificial Sequence
  Description of Artificial Sequence: Synthetic oligonucleotide
  Target: LAMA2; (+) strand; PAM type: YTN; PAM sequence: TTG
aaagtcaagaaaaactaaaa

SEQ ID NO: 402021 - DNA, 20 bp, Artificial Sequence
  Description of Artificial Sequence: Synthetic oligonucleotide
  Target: LAMA2; (+) strand; PAM type: YTN; PAM sequence: CTA
aaaaaatagctacaaaaaat

SEQ ID NO: 402022 - DNA, 20 bp, Artificial Sequence
  Description of Artificial Sequence: Synthetic oligonucleotide
  Target: LAMA2; (+) strand; PAM type: YTN; PAM sequence: CTA
caaaaaataataacaagaat

SEQ ID NO: 402023 - DNA, 20 bp, Artificial Sequence
  Description of Artificial Sequence: Synthetic oligonucleotide
  Target: LAMA2; (+) strand; PAM type: YTN; PAM sequence: TTT
aatatatcactatttgaaaa

SEQ ID NO: 402024 - DNA, 20 bp, Artificial Sequence
  Description of Artificial Sequence: Synthetic oligonucleotide
  Target: LAMA2; (+) strand; PAM type: YTN; PAM sequence: TTA
atatatcactatttgaaaaa

SEQ ID NO: 402025 - DNA, 20 bp, Artificial Sequence
  Description of Artificial Sequence: Synthetic oligonucleotide
  Target: LAMA2; (+) strand; PAM type: YTN; PAM sequence: CTA
tttgaaaaatatgaccaaga

SEQ ID NO: 402026 - DNA, 20 bp, Artificial Sequence
  Description of Artificial Sequence: Synthetic oligonucleotide
  Target: LAMA2; (+) strand; PAM type: YTN; PAM sequence: TTT
gaaaaatatgaccaagagtg

SEQ ID NO: 402027 - DNA, 20 bp, Artificial Sequence
  Description of Artificial Sequence: Synthetic oligonucleotide
  Target: LAMA2; (+) strand; PAM type: YTN; PAM sequence: TTG
aaaaatatgaccaagagtgt

SEQ ID NO: 402028 - DNA, 20 bp, Artificial Sequence
  Description of Artificial Sequence: Synthetic oligonucleotide
  Target: LAMA2; (+) strand; PAM type: YTN; PAM sequence: CTC
agcggaaaatgagagcaact

SEQ ID NO: 402029 - DNA, 20 bp, Artificial Sequence
  Description of Artificial Sequence: Synthetic oligonucleotide
  Target: LAMA2; (+) strand; PAM type: YTN; PAM sequence: CTA
cattactaaaccatcattga

SEQ ID NO: 402030 - DNA, 20 bp, Artificial Sequence
  Description of Artificial Sequence: Synthetic oligonucleotide
  Target: LAMA2; (+) strand; PAM type: YTN; PAM sequence: TTA
ctaaaccatcattgaaataa

SEQ ID NO: 402031 - DNA, 20 bp, Artificial Sequence
  Description of Artificial Sequence: Synthetic oligonucleotide
  Target: LAMA2; (+) strand; PAM type: YTN; PAM sequence: CTA
aaccatcattgaaataacaa

SEQ ID NO: 402032 - DNA, 20 bp, Artificial Sequence
  Description of Artificial Sequence: Synthetic oligonucleotide
  Target: LAMA2; (+) strand; PAM type: YTN; PAM sequence: TTG
aaataacaattctaaacaat

SEQ ID NO: 402033 - DNA, 20 bp, Artificial Sequence
  Description of Artificial Sequence: Synthetic oligonucleotide
  Target: LAMA2; (+) strand; PAM type: YTN; PAM sequence: TTC
taaacaatcaactttgctga

SEQ ID NO: 402034 - DNA, 20 bp, Artificial Sequence
  Description of Artificial Sequence: Synthetic oligonucleotide
  Target: LAMA2; (+) strand; PAM type: YTN; PAM sequence: CTA
aacaatcaactttgctgact

SEQ ID NO: 402035 - DNA, 20 bp, Artificial Sequence
  Description of Artificial Sequence: Synthetic oligonucleotide
  Target: LAMA2; (+) strand; PAM type: YTN; PAM sequence: CTT
tgctgactttagaaaaagca

SEQ ID NO: 402036 - DNA, 20 bp, Artificial Sequence
  Description of Artificial Sequence: Synthetic oligonucleotide
  Target: LAMA2; (+) strand; PAM type: YTN; PAM sequence: TTT
gctgactttagaaaaagcag

SEQ ID NO: 402037 - DNA, 20 bp, Artificial Sequence
  Description of Artificial Sequence: Synthetic oligonucleotide
  Target: LAMA2; (+) strand; PAM type: YTN; PAM sequence: TTG
ctgactttagaaaaagcaga

SEQ ID NO: 402038 - DNA, 20 bp, Artificial Sequence
  Description of Artificial Sequence: Synthetic oligonucleotide
  Target: LAMA2; (+) strand; PAM type: YTN; PAM sequence: CTG
actttagaaaaagcagagtt

SEQ ID NO: 402039 - DNA, 20 bp, Artificial Sequence
  Description of Artificial Sequence: Synthetic oligonucleotide
  Target: LAMA2; (+) strand; PAM type: YTN; PAM sequence: CTT
tagaaaaagcagagttaact

SEQ ID NO: 402040 - DNA, 20 bp, Artificial Sequence
  Description of Artificial Sequence: Synthetic oligonucleotide
  Target: LAMA2; (+) strand; PAM type: YTN; PAM sequence: TTT
agaaaaagcagagttaactt

SEQ ID NO: 402041 - DNA, 20 bp, Artificial Sequence
  Description of Artificial Sequence: Synthetic oligonucleotide
  Target: LAMA2; (+) strand; PAM type: YTN; PAM sequence: TTA
gaaaaagcagagttaactta

SEQ ID NO: 402042 - DNA, 20 bp, Artificial Sequence
  Description of Artificial Sequence: Synthetic oligonucleotide
  Target: LAMA2; (+) strand; PAM type: YTN; PAM sequence: TTA
acttaaagaatgaaaaagat

SEQ ID NO: 402043 - DNA, 20 bp, Artificial Sequence
  Description of Artificial Sequence: Synthetic oligonucleotide
  Target: LAMA2; (+) strand; PAM type: YTN; PAM sequence: CTT
aaagaatgaaaaagatggaa

SEQ ID NO: 402044 - DNA, 20 bp, Artificial Sequence
  Description of Artificial Sequence: Synthetic oligonucleotide
  Target: LAMA2; (+) strand; PAM type: YTN; PAM sequence: TTA
aagaatgaaaaagatggaaa

SEQ ID NO: 402045 - DNA, 20 bp, Artificial Sequence
  Description of Artificial Sequence: Synthetic oligonucleotide
  Target: LAMA2; (+) strand; PAM type: YTN; PAM sequence: TTA
atgaatttgaagacagaaaa

SEQ ID NO: 402046 - DNA, 20 bp, Artificial Sequence
  Description of Artificial Sequence: Synthetic oligonucleotide
  Target: LAMA2; (+) strand; PAM type: YTN; PAM sequence: TTT
gaagacagaaaatattagac

SEQ ID NO: 402047 - DNA, 20 bp, Artificial Sequence
  Description of Artificial Sequence: Synthetic oligonucleotide
  Target: LAMA2; (+) strand; PAM type: YTN; PAM sequence: TTG
aagacagaaaatattagacc

SEQ ID NO: 402048 - DNA, 20 bp, Artificial Sequence
  Description of Artificial Sequence: Synthetic oligonucleotide
  Target: LAMA2; (+) strand; PAM type: YTN; PAM sequence: TTA
gacctgataaatcaaaaagg

SEQ ID NO: 402049 - DNA, 20 bp, Artificial Sequence
  Description of Artificial Sequence: Synthetic oligonucleotide
  Target: LAMA2; (+) strand; PAM type: YTN; PAM sequence: CTG
ataaatcaaaaaggtgactc

SEQ ID NO: 402050 - DNA, 20 bp, Artificial Sequence
  Description of Artificial Sequence: Synthetic oligonucleotide
  Target: LAMA2; (+) strand; PAM type: YTN; PAM sequence: CTC
cttaggaatatagattaaaa

SEQ ID NO: 402051 - DNA, 20 bp, Artificial Sequence
  Description of Artificial Sequence: Synthetic oligonucleotide
  Target: LAMA2; (+) strand; PAM type: YTN; PAM sequence: CTT
aggaatatagattaaaaatt

SEQ ID NO: 402052 - DNA, 20 bp, Artificial Sequence
  Description of Artificial Sequence: Synthetic oligonucleotide
  Target: LAMA2; (+) strand; PAM type: YTN; PAM sequence: TTA
ggaatatagattaaaaatta

SEQ ID NO: 402053 - DNA, 20 bp, Artificial Sequence
  Description of Artificial Sequence: Synthetic oligonucleotide
  Target: LAMA2; (+) strand; PAM type: YTN; PAM sequence: TTA
aaaattaagtgattgtcaag

SEQ ID NO: 402054 - DNA, 20 bp, Artificial Sequence
  Description of Artificial Sequence: Synthetic oligonucleotide
  Target: LAMA2; (+) strand; PAM type: YTN; PAM sequence: TTA
agtgattgtcaagtttcatc

SEQ ID NO: 402055 - DNA, 20 bp, Artificial Sequence
  Description of Artificial Sequence: Synthetic oligonucleotide
  Target: LAMA2; (+) strand; PAM type: YTN; PAM sequence: TTG
tcaagtttcatcaagaaaaa

SEQ ID NO: 402056 - DNA, 20 bp, Artificial Sequence
  Description of Artificial Sequence: Synthetic oligonucleotide
  Target: LAMA2; (+) strand; PAM type: YTN; PAM sequence: TTT
catcaagaaaaataaaggac

SEQ ID NO: 402057 - DNA, 20 bp, Artificial Sequence
  Description of Artificial Sequence: Synthetic oligonucleotide
  Target: LAMA2; (+) strand; PAM type: YTN; PAM sequence: TTC
atcaagaaaaataaaggaca

SEQ ID NO: 402058 - DNA, 20 bp, Artificial Sequence
  Description of Artificial Sequence: Synthetic oligonucleotide
  Target: LAMA2; (+) strand; PAM type: YTN; PAM sequence: CTC
taaaagaggtatcactagac

SEQ ID NO: 402059 - DNA, 20 bp, Artificial Sequence
  Description of Artificial Sequence: Synthetic oligonucleotide
  Target: LAMA2; (+) strand; PAM type: YTN; PAM sequence: CTA
aaagaggtatcactagacaa

SEQ ID NO: 402060 - DNA, 20 bp, Artificial Sequence
  Description of Artificial Sequence: Synthetic oligonucleotide
  Target: LAMA2; (+) strand; PAM type: YTN; PAM sequence: CTA
gacaagggaggaaatttaac

SEQ ID NO: 402061 - DNA, 20 bp, Artificial Sequence
  Description of Artificial Sequence: Synthetic oligonucleotide
  Target: LAMA2; (+) strand; PAM type: YTN; PAM sequence: TTT
aacacataagagatcacttg

SEQ ID NO: 402062 - DNA, 20 bp, Artificial Sequence
  Description of Artificial Sequence: Synthetic oligonucleotide
  Target: LAMA2; (+) strand; PAM type: YTN; PAM sequence: TTA
acacataagagatcacttgg

SEQ ID NO: 402063 - DNA, 20 bp, Artificial Sequence
  Description of Artificial Sequence: Synthetic oligonucleotide
  Target: LAMA2; (+) strand; PAM type: YTN; PAM sequence: CTT
ggaaaaacttcaactgctcc

SEQ ID NO: 402064 - DNA, 20 bp, Artificial Sequence
  Description of Artificial Sequence: Synthetic oligonucleotide
  Target: LAMA2; (+) strand; PAM type: YTN; PAM sequence: TTG
gaaaaacttcaactgctccg

SEQ ID NO: 402065 - DNA, 20 bp, Artificial Sequence
  Description of Artificial Sequence: Synthetic oligonucleotide
  Target: LAMA2; (+) strand; PAM type: YTN; PAM sequence: CTT
caactgctccggagaataga

SEQ ID NO: 402066 - DNA, 20 bp, Artificial Sequence
  Description of Artificial Sequence: Synthetic oligonucleotide
  Target: LAMA2; (+) strand; PAM type: YTN; PAM sequence: TTC
aactgctccggagaatagag

SEQ ID NO: 402067 - DNA, 20 bp, Artificial Sequence
  Description of Artificial Sequence: Synthetic oligonucleotide
  Target: LAMA2; (+) strand; PAM type: YTN; PAM sequence: CTG
ctccggagaatagaggaaaa

SEQ ID NO: 402068 - DNA, 20 bp, Artificial Sequence
  Description of Artificial Sequence: Synthetic oligonucleotide
  Target: LAMA2; (+) strand; PAM type: YTN; PAM sequence: CTC
cggagaatagaggaaaaaga

SEQ ID NO: 402069 - DNA, 20 bp, Artificial Sequence
  Description of Artificial Sequence: Synthetic oligonucleotide
  Target: LAMA2; (+) strand; PAM type: YTN; PAM sequence: CTT
ccaagttccattttgaaaca

SEQ ID NO: 402070 - DNA, 20 bp, Artificial Sequence
  Description of Artificial Sequence: Synthetic oligonucleotide
  Target: LAMA2; (+) strand; PAM type: YTN; PAM sequence: TTC
caagttccattttgaaacat

SEQ ID NO: 402071 - DNA, 20 bp, Artificial Sequence
  Description of Artificial Sequence: Synthetic oligonucleotide
  Target: LAMA2; (+) strand; PAM type: YTN; PAM sequence: TTC
cattttgaaacatttggcaa

SEQ ID NO: 402072 - DNA, 20 bp, Artificial Sequence
  Description of Artificial Sequence: Synthetic oligonucleotide
  Target: LAMA2; (+) strand; PAM type: YTN; PAM sequence: TTT
tgaaacatttggcaaaaact

SEQ ID NO: 402073 - DNA, 20 bp, Artificial Sequence
  Description of Artificial Sequence: Synthetic oligonucleotide
  Target: LAMA2; (+) strand; PAM type: YTN; PAM sequence: TTT
gaaacatttggcaaaaactt

SEQ ID NO: 402074 - DNA, 20 bp, Artificial Sequence
  Description of Artificial Sequence: Synthetic oligonucleotide
  Target: LAMA2; (+) strand; PAM type: YTN; PAM sequence: TTG
aaacatttggcaaaaacttc

SEQ ID NO: 402075 - DNA, 20 bp, Artificial Sequence
  Description of Artificial Sequence: Synthetic oligonucleotide
  Target: LAMA2; (+) strand; PAM type: YTN; PAM sequence: TTT
ggcaaaaacttctgagaact

SEQ ID NO: 402076 - DNA, 20 bp, Artificial Sequence
  Description of Artificial Sequence: Synthetic oligonucleotide
  Target: LAMA2; (+) strand; PAM type: YTN; PAM sequence: TTG
gcaaaaacttctgagaactt

SEQ ID NO: 402077 - DNA, 20 bp, Artificial Sequence
  Description of Artificial Sequence: Synthetic oligonucleotide
  Target: LAMA2; (+) strand; PAM type: YTN; PAM sequence: CTT
ctgagaacttgtgaataaaa

SEQ ID NO: 402078 - DNA, 20 bp, Artificial Sequence
  Description of Artificial Sequence: Synthetic oligonucleotide
  Target: LAMA2; (+) strand; PAM type: YTN; PAM sequence: TTC
tgagaacttgtgaataaaag

SEQ ID NO: 402079 - DNA, 20 bp, Artificial Sequence
  Description of Artificial Sequence: Synthetic oligonucleotide
  Target: LAMA2; (+) strand; PAM type: YTN; PAM sequence: CTG
agaacttgtgaataaaaggg

SEQ ID NO: 402080 - DNA, 20 bp, Artificial Sequence
  Description of Artificial Sequence: Synthetic oligonucleotide
  Target: LAMA2; (+) strand; PAM type: YTN; PAM sequence: CTT
gtgaataaaagggtctgtaa

SEQ ID NO: 402081 - DNA, 20 bp, Artificial Sequence
  Description of Artificial Sequence: Synthetic oligonucleotide
  Target: LAMA2; (+) strand; PAM type: YTN; PAM sequence: TTG
tgaataaaagggtctgtaat

SEQ ID NO: 402082 - DNA, 20 bp, Artificial Sequence
  Description of Artificial Sequence: Synthetic oligonucleotide
  Target: LAMA2; (+) strand; PAM type: YTN; PAM sequence: CTG
taatttgcctaagtctaagt

SEQ ID NO: 402083 - DNA, 20 bp, Artificial Sequence
  Description of Artificial Sequence: Synthetic oligonucleotide
  Target: LAMA2; (+) strand; PAM type: YTN; PAM sequence: TTT
gcctaagtctaagtagtctt

SEQ ID NO: 402084 - DNA, 20 bp, Artificial Sequence
  Description of Artificial Sequence: Synthetic oligonucleotide
  Target: LAMA2; (+) strand; PAM type: YTN; PAM sequence: TTG
cctaagtctaagtagtcttt

SEQ ID NO: 402085 - DNA, 20 bp, Artificial Sequence
  Description of Artificial Sequence: Synthetic oligonucleotide
  Target: LAMA2; (+) strand; PAM type: YTN; PAM sequence: CTA
agtctaagtagtctttaact

SEQ ID NO: 402086 - DNA, 20 bp, Artificial Sequence
  Description of Artificial Sequence: Synthetic oligonucleotide
  Target: LAMA2; (+) strand; PAM type: YTN; PAM sequence: CTA
agtagtctttaactactttt

SEQ ID NO: 402087 - DNA, 20 bp, Artificial Sequence
  Description of Artificial Sequence: Synthetic oligonucleotide
  Target: LAMA2; (+) strand; PAM type: YTN; PAM sequence: CTT
taactacttttgctctttct

SEQ ID NO: 402088 - DNA, 20 bp, Artificial Sequence
  Description of Artificial Sequence: Synthetic oligonucleotide
  Target: LAMA2; (+) strand; PAM type: YTN; PAM sequence: TTT
aactacttttgctctttctc

SEQ ID NO: 402089 - DNA, 20 bp, Artificial Sequence
  Description of Artificial Sequence: Synthetic oligonucleotide
  Target: LAMA2; (+) strand; PAM type: YTN; PAM sequence: TTA
actacttttgctctttctca

SEQ ID NO: 402090 - DNA, 20 bp, Artificial Sequence
  Description of Artificial Sequence: Synthetic oligonucleotide
  Target: LAMA2; (+) strand; PAM type: YTN; PAM sequence: CTA
cttttgctctttctcattaa

SEQ ID NO: 402091 - DNA, 20 bp, Artificial Sequence
  Description of Artificial Sequence: Synthetic oligonucleotide
  Target: LAMA2; (+) strand; PAM type: YTN; PAM sequence: CTT
ttgctctttctcattaatct

SEQ ID NO: 402092 - DNA, 20 bp, Artificial Sequence
  Description of Artificial Sequence: Synthetic oligonucleotide
  Target: LAMA2; (+) strand; PAM type: YTN; PAM sequence: TTT
tgctctttctcattaatcta

SEQ ID NO: 402093 - DNA, 20 bp, Artificial Sequence
  Description of Artificial Sequence: Synthetic oligonucleotide
  Target: LAMA2; (+) strand; PAM type: YTN; PAM sequence: TTT
gctctttctcattaatctaa

SEQ ID NO: 402094 - DNA, 20 bp, Artificial Sequence
  Description of Artificial Sequence: Synthetic oligonucleotide
  Target: LAMA2; (+) strand; PAM type: YTN; PAM sequence: TTG
ctctttctcattaatctaaa

SEQ ID NO: 402095 - DNA, 20 bp, Artificial Sequence
  Description of Artificial Sequence: Synthetic oligonucleotide
  Target: LAMA2; (+) strand; PAM type: YTN; PAM sequence: CTC
tttctcattaatctaaatct

SEQ ID NO: 402096 - DNA, 20 bp, Artificial Sequence
  Description of Artificial Sequence: Synthetic oligonucleotide
  Target: LAMA2; (+) strand; PAM type: YTN; PAM sequence: CTT
tctcattaatctaaatctaa

SEQ ID NO: 402097 - DNA, 20 bp, Artificial Sequence
  Description of Artificial Sequence: Synthetic oligonucleotide
  Target: LAMA2; (+) strand; PAM type: YTN; PAM sequence: TTT
ctcattaatctaaatctaaa

SEQ ID NO: 402098 - DNA, 20 bp, Artificial Sequence
  Description of Artificial Sequence: Synthetic oligonucleotide
  Target: LAMA2; (+) strand; PAM type: YTN; PAM sequence: TTC
tcattaatctaaatctaaat

SEQ ID NO: 402099 - DNA, 20 bp, Artificial Sequence
  Description of Artificial Sequence: Synthetic oligonucleotide
  Target: LAMA2; (+) strand; PAM type: YTN; PAM sequence: CTC
attaatctaaatctaaatca

SEQ ID NO: 402100 - DNA, 20 bp, Artificial Sequence
  Description of Artificial Sequence: Synthetic oligonucleotide
  Target: LAMA2; (+) strand; PAM type: YTN; PAM sequence: TTA
atctaaatctaaatcatttt

SEQ ID NO: 402101 - DNA, 20 bp, Artificial Sequence
  Description of Artificial Sequence: Synthetic oligonucleotide
  Target: LAMA2; (+) strand; PAM type: YTN; PAM sequence: CTA
aatctaaatcattttgcctc

SEQ ID NO: 402102 - DNA, 20 bp, Artificial Sequence
  Description of Artificial Sequence: Synthetic oligonucleotide
  Target: LAMA2; (+) strand; PAM type: YTN; PAM sequence: CTA
aatcattttgcctcagtttt

SEQ ID NO: 402103 - DNA, 20 bp, Artificial Sequence
  Description of Artificial Sequence: Synthetic oligonucleotide
  Target: LAMA2; (+) strand; PAM type: YTN; PAM sequence: TTT
tgcctcagttttagaataat

SEQ ID NO: 402104 - DNA, 20 bp, Artificial Sequence
  Description of Artificial Sequence: Synthetic oligonucleotide
  Target: LAMA2; (+) strand; PAM type: YTN; PAM sequence: TTT
gcctcagttttagaataatt

SEQ ID NO: 402105 - DNA, 20 bp, Artificial Sequence
  Description of Artificial Sequence: Synthetic oligonucleotide
  Target: LAMA2; (+) strand; PAM type: YTN; PAM sequence: TTG
cctcagttttagaataattt

SEQ ID NO: 402106 - DNA, 20 bp, Artificial Sequence
  Description of Artificial Sequence: Synthetic oligonucleotide
  Target: LAMA2; (+) strand; PAM type: YTN; PAM sequence: CTC
agttttagaataatttgtag

SEQ ID NO: 402107 - DNA, 20 bp, Artificial Sequence
  Description of Artificial Sequence: Synthetic oligonucleotide
  Target: LAMA2; (+) strand; PAM type: YTN; PAM sequence: TTT
tagaataatttgtagaatgt

SEQ ID NO: 402108 - DNA, 20 bp, Artificial Sequence
  Description of Artificial Sequence: Synthetic oligonucleotide
  Target: LAMA2; (+) strand; PAM type: YTN; PAM sequence: TTT
agaataatttgtagaatgtc

SEQ ID NO: 402109 - DNA, 20 bp, Artificial Sequence
  Description of Artificial Sequence: Synthetic oligonucleotide
  Target: LAMA2; (+) strand; PAM type: YTN; PAM sequence: TTA
gaataatttgtagaatgtca

SEQ ID NO: 402110 - DNA, 20 bp, Artificial Sequence
  Description of Artificial Sequence: Synthetic oligonucleotide
  Target: LAMA2; (+) strand; PAM type: YTN; PAM sequence: TTT
gtagaatgtcagaataacaa

SEQ ID NO: 402111 - DNA, 20 bp, Artificial Sequence
  Description of Artificial Sequence: Synthetic oligonucleotide
  Target: LAMA2; (+) strand; PAM type: YTN; PAM sequence: TTG
tagaatgtcagaataacaat

SEQ ID NO: 402112 - DNA, 20 bp, Artificial Sequence
  Description of Artificial Sequence: Synthetic oligonucleotide
  Target: LAMA2; (+) strand; PAM type: YTN; PAM sequence: TTA
aaggaagggaaaaatgaaca

SEQ ID NO: 402113 - DNA, 20 bp, Artificial Sequence
  Description of Artificial Sequence: Synthetic oligonucleotide
  Target: LAMA2; (+) strand; PAM type: YTN; PAM sequence: TTT
attaaaagcatacaaaataa

SEQ ID NO: 402114 - DNA, 20 bp, Artificial Sequence
  Description of Artificial Sequence: Synthetic oligonucleotide
  Target: LAMA2; (+) strand; PAM type: YTN; PAM sequence: TTA
ttaaaagcatacaaaataaa

SEQ ID NO: 402115 - DNA, 20 bp, Artificial Sequence
  Description of Artificial Sequence: Synthetic oligonucleotide
  Target: LAMA2; (+) strand; PAM type: YTN; PAM sequence: TTA
aaagcatacaaaataaaggg

SEQ ID NO: 402116 - DNA, 20 bp, Artificial Sequence
  Description of Artificial Sequence: Synthetic oligonucleotide
  Target: LAMA2; (+) strand; PAM type: YTN; PAM sequence: CTG
tgtttatgctatctgtatga

SEQ ID NO: 402117 - DNA, 20 bp, Artificial Sequence
  Description of Artificial Sequence: Synthetic oligonucleotide
  Target: LAMA2; (+) strand; PAM type: YTN; PAM sequence: TTT
atgctatctgtatgatgata

SEQ ID NO: 402118 - DNA, 20 bp, Artificial Sequence
  Description of Artificial Sequence: Synthetic oligonucleotide
  Target: LAMA2; (+) strand; PAM type: YTN; PAM sequence: TTA
tgctatctgtatgatgatat

SEQ ID NO: 402119 - DNA, 20 bp, Artificial Sequence
  Description of Artificial Sequence: Synthetic oligonucleotide
  Target: LAMA2; (+) strand; PAM type: YTN; PAM sequence: CTA
tctgtatgatgatataacaa

SEQ ID NO: 402120 - DNA, 20 bp, Artificial Sequence
  Description of Artificial Sequence: Synthetic oligonucleotide
  Target: LAMA2; (+) strand; PAM type: YTN; PAM sequence: CTG
tatgatgatataacaaacat

SEQ ID NO: 402121 - DNA, 20 bp, Artificial Sequence
  Description of Artificial Sequence: Synthetic oligonucleotide
  Target: LAMA2; (+) strand; PAM type: YTN; PAM sequence: TTT
ctatccagataacatgcatt

SEQ ID NO: 402122 - DNA, 20 bp, Artificial Sequence
  Description of Artificial Sequence: Synthetic oligonucleotide
  Target: LAMA2; (+) strand; PAM type: YTN; PAM sequence: TTC
tatccagataacatgcattt

SEQ ID NO: 402123 - DNA, 20 bp, Artificial Sequence
  Description of Artificial Sequence: Synthetic oligonucleotide
  Target: LAMA2; (+) strand; PAM type: YTN; PAM sequence: CTA
tccagataacatgcatttca

SEQ ID NO: 402124 - DNA, 20 bp, Artificial Sequence
  Description of Artificial Sequence: Synthetic oligonucleotide
  Target: LAMA2; (+) strand; PAM type: YTN; PAM sequence: TTT
caggaagaaaatactgcact

SEQ ID NO: 402125 - DNA, 20 bp, Artificial Sequence
  Description of Artificial Sequence: Synthetic oligonucleotide
  Target: LAMA2; (+) strand; PAM type: YTN; PAM sequence: TTC
aggaagaaaatactgcactc

SEQ ID NO: 402126 - DNA, 20 bp, Artificial Sequence
  Description of Artificial Sequence: Synthetic oligonucleotide
  Target: LAMA2; (+) strand; PAM type: YTN; PAM sequence: CTG
cactcagttcttgatatagc

SEQ ID NO: 402127 - DNA, 20 bp, Artificial Sequence
  Description of Artificial Sequence: Synthetic oligonucleotide
  Target: LAMA2; (+) strand; PAM type: YTN; PAM sequence: CTC
agttcttgatatagcaaatc

SEQ ID NO: 402128 - DNA, 20 bp, Artificial Sequence
  Description of Artificial Sequence: Synthetic oligonucleotide
  Target: LAMA2; (+) strand; PAM type: YTN; PAM sequence: TTC
ttgatatagcaaatctatta

SEQ ID NO: 402129 - DNA, 20 bp, Artificial Sequence
  Description of Artificial Sequence: Synthetic oligonucleotide
  Target: LAMA2; (+) strand; PAM type: YTN; PAM sequence: CTT
gatatagcaaatctattagt

SEQ ID NO: 402130 - DNA, 20 bp, Artificial Sequence
  Description of Artificial Sequence: Synthetic oligonucleotide
  Target: LAMA2; (+) strand; PAM type: YTN; PAM sequence: TTG
atatagcaaatctattagtt

SEQ ID NO: 402131 - DNA, 20 bp, Artificial Sequence
  Description of Artificial Sequence: Synthetic oligonucleotide
  Target: LAMA2; (+) strand; PAM type: YTN; PAM sequence: CTA
ttagttaaatttaataatag

SEQ ID NO: 402132 - DNA, 20 bp, Artificial Sequence
  Description of Artificial Sequence: Synthetic oligonucleotide
  Target: LAMA2; (+) strand; PAM type: YTN; PAM sequence: TTA
gttaaatttaataatagacc

SEQ ID NO: 402133 - DNA, 20 bp, Artificial Sequence
  Description of Artificial Sequence: Synthetic oligonucleotide
  Target: LAMA2; (+) strand; PAM type: YTN; PAM sequence: TTA
aatttaataatagacctatg

SEQ ID NO: 402134 - DNA, 20 bp, Artificial Sequence
  Description of Artificial Sequence: Synthetic oligonucleotide
  Target: LAMA2; (+) strand; PAM type: YTN; PAM sequence: TTT
aataatagacctatgttctt

SEQ ID NO: 402135 - DNA, 20 bp, Artificial Sequence
  Description of Artificial Sequence: Synthetic oligonucleotide
  Target: LAMA2; (+) strand; PAM type: YTN; PAM sequence: TTA
ataatagacctatgttcttt

SEQ ID NO: 402136 - DNA, 20 bp, Artificial Sequence
  Description of Artificial Sequence: Synthetic oligonucleotide
  Target: LAMA2; (+) strand; PAM type: YTN; PAM sequence: CTA
tgttctttttaaatgccgct

SEQ ID NO: 402137 - DNA, 20 bp, Artificial Sequence
  Description of Artificial Sequence: Synthetic oligonucleotide
  Target: LAMA2; (+) strand; PAM type: YTN; PAM sequence: TTC
tttttaaatgccgctaacag

SEQ ID NO: 402138 - DNA, 20 bp, Artificial Sequence
  Description of Artificial Sequence: Synthetic oligonucleotide
  Target: LAMA2; (+) strand; PAM type: YTN; PAM sequence: CTT
tttaaatgccgctaacagca

SEQ ID NO: 402139 - DNA, 20 bp, Artificial Sequence
  Description of Artificial Sequence: Synthetic oligonucleotide
  Target: LAMA2; (+) strand; PAM type: YTN; PAM sequence: TTT
ttaaatgccgctaacagcat

SEQ ID NO: 402140 - DNA, 20 bp, Artificial Sequence
  Description of Artificial Sequence: Synthetic oligonucleotide
  Target: LAMA2; (+) strand; PAM type: YTN; PAM sequence: TTT
taaatgccgctaacagcata

SEQ ID NO: 402141 - DNA, 20 bp, Artificial Sequence
  Description of Artificial Sequence: Synthetic oligonucleotide
  Target: LAMA2; (+) strand; PAM type: YTN; PAM sequence: TTT
aaatgccgctaacagcataa

SEQ ID NO: 402142 - DNA, 20 bp, Artificial Sequence
  Description of Artificial Sequence: Synthetic oligonucleotide
  Target: LAMA2; (+) strand; PAM type: YTN; PAM sequence: TTA
aatgccgctaacagcataag

SEQ ID NO: 402143 - DNA, 20 bp, Artificial Sequence
  Description of Artificial Sequence: Synthetic oligonucleotide
  Target: LAMA2; (+) strand; PAM type: YTN; PAM sequence: CTA
acagcataagtcatacttat

SEQ ID NO: 402144 - DNA, 20 bp, Artificial Sequence
  Description of Artificial Sequence: Synthetic oligonucleotide
  Target: LAMA2; (+) strand; PAM type: YTN; PAM sequence: CTT
atgagttcaaaatacctact

SEQ ID NO: 402145 - DNA, 20 bp, Artificial Sequence
  Description of Artificial Sequence: Synthetic oligonucleotide
  Target: LAMA2; (+) strand; PAM type: YTN; PAM sequence: TTA
tgagttcaaaatacctactt

SEQ ID NO: 402146 - DNA, 20 bp, Artificial Sequence
  Description of Artificial Sequence: Synthetic oligonucleotide
  Target: LAMA2; (+) strand; PAM type: YTN; PAM sequence: TTC
aaaatacctactttaaaacc

SEQ ID NO: 402147 - DNA, 20 bp, Artificial Sequence
  Description of Artificial Sequence: Synthetic oligonucleotide
  Target: LAMA2; (+) strand; PAM type: YTN; PAM sequence: CTA
ctttaaaacctaattttaaa

SEQ ID NO: 402148 - DNA, 20 bp, Artificial Sequence
  Description of Artificial Sequence: Synthetic oligonucleotide
  Target: LAMA2; (+) strand; PAM type: YTN; PAM sequence: CTT
taaaacctaattttaaaaaa

SEQ ID NO: 402149 - DNA, 20 bp, Artificial Sequence
  Description of Artificial Sequence: Synthetic oligonucleotide
  Target: LAMA2; (+) strand; PAM type: YTN; PAM sequence: TTT
aaaacctaattttaaaaaaa

SEQ ID NO: 402150 - DNA, 20 bp, Artificial Sequence
  Description of Artificial Sequence: Synthetic oligonucleotide
  Target: LAMA2; (+) strand; PAM type: YTN; PAM sequence: TTA
aaacctaattttaaaaaaat

SEQ ID NO: 402151 - DNA, 20 bp, Artificial Sequence
  Description of Artificial Sequence: Synthetic oligonucleotide
  Target: LAMA2; (+) strand; PAM type: YTN; PAM sequence: CTA
attttaaaaaaatgataatt

SEQ ID NO: 402152 - DNA, 20 bp, Artificial Sequence
  Description of Artificial Sequence: Synthetic oligonucleotide
  Target: LAMA2; (+) strand; PAM type: YTN; PAM sequence: TTT
taaaaaaatgataatttact

SEQ ID NO: 402153 - DNA, 20 bp, Artificial Sequence
  Description of Artificial Sequence: Synthetic oligonucleotide
  Target: LAMA2; (+) strand; PAM type: YTN; PAM sequence: TTT
aaaaaaatgataatttactt

SEQ ID NO: 402154 - DNA, 20 bp, Artificial Sequence
  Description of Artificial Sequence: Synthetic oligonucleotide
  Target: LAMA2; (+) strand; PAM type: YTN; PAM sequence: TTA
aaaaaatgataatttacttc

SEQ ID NO: 402155 - DNA, 20 bp, Artificial Sequence
  Description of Artificial Sequence: Synthetic oligonucleotide
  Target: LAMA2; (+) strand; PAM type: YTN; PAM sequence: TTT
acttccctttgagcacatgt

SEQ ID NO: 402156 - DNA, 20 bp, Artificial Sequence
  Description of Artificial Sequence: Synthetic oligonucleotide
  Target: LAMA2; (+) strand; PAM type: YTN; PAM sequence: TTA
cttccctttgagcacatgtg

SEQ ID NO: 402157 - DNA, 20 bp, Artificial Sequence
  Description of Artificial Sequence: Synthetic oligonucleotide
  Target: LAMA2; (+) strand; PAM type: YTN; PAM sequence: CTT
ccctttgagcacatgtgatt

SEQ ID NO: 402158 - DNA, 20 bp, Artificial Sequence
  Description of Artificial Sequence: Synthetic oligonucleotide
  Target: LAMA2; (+) strand; PAM type: YTN; PAM sequence: TTC
cctttgagcacatgtgattc

SEQ ID NO: 402159 - DNA, 20 bp, Artificial Sequence
  Description of Artificial Sequence: Synthetic oligonucleotide
  Target: LAMA2; (+) strand; PAM type: YTN; PAM sequence: CTT
tgagcacatgtgattcgttc

SEQ ID NO: 402160 - DNA, 20 bp, Artificial Sequence
  Description of Artificial Sequence: Synthetic oligonucleotide
  Target: LAMA2; (+) strand; PAM type: YTN; PAM sequence: TTT
gagcacatgtgattcgttcc

SEQ ID NO: 402161 - DNA, 20 bp, Artificial Sequence
  Description of Artificial Sequence: Synthetic oligonucleotide
  Target: LAMA2; (+) strand; PAM type: YTN; PAM sequence: TTG
agcacatgtgattcgttcct

SEQ ID NO: 402162 - DNA, 20 bp, Artificial Sequence
  Description of Artificial Sequence: Synthetic oligonucleotide
  Target: LAMA2; (+) strand; PAM type: YTN; PAM sequence: TTC
gttcctgagggttagttctc

SEQ ID NO: 402163 - DNA, 20 bp, Artificial Sequence
  Description of Artificial Sequence: Synthetic oligonucleotide
  Target: LAMA2; (+) strand; PAM type: YTN; PAM sequence: TTC
ctgagggttagttctcagtg

SEQ ID NO: 402164 - DNA, 20 bp, Artificial Sequence
  Description of Artificial Sequence: Synthetic oligonucleotide
  Target: LAMA2; (+) strand; PAM type: YTN; PAM sequence: CTG
agggttagttctcagtggtt

SEQ ID NO: 402165 - DNA, 20 bp, Artificial Sequence
  Description of Artificial Sequence: Synthetic oligonucleotide
  Target: LAMA2; (+) strand; PAM type: YTN; PAM sequence: TTA
gttctcagtggttgtatgtc

SEQ ID NO: 402166 - DNA, 20 bp, Artificial Sequence
  Description of Artificial Sequence: Synthetic oligonucleotide
  Target: LAMA2; (+) strand; PAM type: YTN; PAM sequence: TTC
tcagtggttgtatgtcagcc

SEQ ID NO: 402167 - DNA, 20 bp, Artificial Sequence
  Description of Artificial Sequence: Synthetic oligonucleotide
  Target: LAMA2; (+) strand; PAM type: YTN; PAM sequence: CTC
agtggttgtatgtcagccgc

SEQ ID NO: 402168 - DNA, 20 bp, Artificial Sequence
  Description of Artificial Sequence: Synthetic oligonucleotide
  Target: LAMA2; (+) strand; PAM type: YTN; PAM sequence: TTG
tatgtcagccgcaaagcaga

SEQ ID NO: 402169 - DNA, 20 bp, Artificial Sequence
  Description of Artificial Sequence: Synthetic oligonucleotide
  Target: LAMA2; (+) strand; PAM type: YTN; PAM sequence: TTC
agagtctaacacagcatgta

SEQ ID NO: 402170 - DNA, 20 bp, Artificial Sequence
  Description of Artificial Sequence: Synthetic oligonucleotide
  Target: LAMA2; (+) strand; PAM type: YTN; PAM sequence: CTA
acacagcatgtagccttgaa

SEQ ID NO: 402171 - DNA, 20 bp, Artificial Sequence
  Description of Artificial Sequence: Synthetic oligonucleotide
  Target: LAMA2; (+) strand; PAM type: YTN; PAM sequence: CTT
gaaccttaagcagtttaact

SEQ ID NO: 402172 - DNA, 20 bp, Artificial Sequence
  Description of Artificial Sequence: Synthetic oligonucleotide
  Target: LAMA2; (+) strand; PAM type: YTN; PAM sequence: TTG
aaccttaagcagtttaactt

SEQ ID NO: 402173 - DNA, 20 bp, Artificial Sequence
  Description of Artificial Sequence: Synthetic oligonucleotide
  Target: LAMA2; (+) strand; PAM type: YTN; PAM sequence: CTT
aagcagtttaactttttcat

SEQ ID NO: 402174 - DNA, 20 bp, Artificial Sequence
  Description of Artificial Sequence: Synthetic oligonucleotide
  Target: LAMA2; (+) strand; PAM type: YTN; PAM sequence: TTA
agcagtttaactttttcatc

SEQ ID NO: 402175 - DNA, 20 bp, Artificial Sequence
  Description of Artificial Sequence: Synthetic oligonucleotide
  Target: LAMA2; (+) strand; PAM type: YTN; PAM sequence: TTT
aactttttcatcagagtcac

SEQ ID NO: 402176 - DNA, 20 bp, Artificial Sequence
  Description of Artificial Sequence: Synthetic oligonucleotide
  Target: LAMA2; (+) strand; PAM type: YTN; PAM sequence: TTA
actttttcatcagagtcaca

SEQ ID NO: 402177 - DNA, 20 bp, Artificial Sequence
  Description of Artificial Sequence: Synthetic oligonucleotide
  Target: LAMA2; (+) strand; PAM type: YTN; PAM sequence: CTT
tttcatcagagtcacagtga

SEQ ID NO: 402178 - DNA, 20 bp, Artificial Sequence
  Description of Artificial Sequence: Synthetic oligonucleotide
  Target: LAMA2; (+) strand; PAM type: YTN; PAM sequence: TTT
ttcatcagagtcacagtgac

SEQ ID NO: 402179 - DNA, 20 bp, Artificial Sequence
  Description of Artificial Sequence: Synthetic oligonucleotide
  Target: LAMA2; (+) strand; PAM type: YTN; PAM sequence: TTT
tcatcagagtcacagtgaca

SEQ ID NO: 402180 - DNA, 20 bp, Artificial Sequence
  Description of Artificial Sequence: Synthetic oligonucleotide
  Target: LAMA2; (+) strand; PAM type: YTN; PAM sequence: TTT
catcagagtcacagtgacag

SEQ ID NO: 402181 - DNA, 20 bp, Artificial Sequence
  Description of Artificial Sequence: Synthetic oligonucleotide
  Target: LAMA2; (+) strand; PAM type: YTN; PAM sequence: TTC
atcagagtcacagtgacaga

SEQ ID NO: 402182 - DNA, 20 bp, Artificial Sequence
  Description of Artificial Sequence: Synthetic oligonucleotide
  Target: LAMA2; (+) strand; PAM type: YTN; PAM sequence: TTG
aacaatacacacttaatcag

SEQ ID NO: 402183 - DNA, 20 bp, Artificial Sequence
  Description of Artificial Sequence: Synthetic oligonucleotide
  Target: LAMA2; (+) strand; PAM type: YTN; PAM sequence: CTT
aatcagataataaatgacat

SEQ ID NO: 402184 - DNA, 20 bp, Artificial Sequence
  Description of Artificial Sequence: Synthetic oligonucleotide
  Target: LAMA2; (+) strand; PAM type: YTN; PAM sequence: TTA
atcagataataaatgacata

SEQ ID NO: 402185 - DNA, 20 bp, Artificial Sequence
  Description of Artificial Sequence: Synthetic oligonucleotide
  Target: LAMA2; (+) strand; PAM type: YTN; PAM sequence: CTG
ccagcatcccagcaatagaa

SEQ ID NO: 402186 - DNA, 20 bp, Artificial Sequence
  Description of Artificial Sequence: Synthetic oligonucleotide
  Target: LAMA2; (+) strand; PAM type: YTN; PAM sequence: TTT
accacgtggcataggccctc

SEQ ID NO: 402187 - DNA, 20 bp, Artificial Sequence
  Description of Artificial Sequence: Synthetic oligonucleotide
  Target: LAMA2; (+) strand; PAM type: YTN; PAM sequence: TTA
ccacgtggcataggccctcc

SEQ ID NO: 402188 - DNA, 20 bp, Artificial Sequence
  Description of Artificial Sequence: Synthetic oligonucleotide
  Target: LAMA2; (+) strand; PAM type: YTN; PAM sequence: CTC
ccttgaaaagcacatactga

SEQ ID NO: 402189 - DNA, 20 bp, Artificial Sequence
  Description of Artificial Sequence: Synthetic oligonucleotide
  Target: LAMA2; (+) strand; PAM type: YTN; PAM sequence: CTT
gaaaagcacatactgaaagt

SEQ ID NO: 402190 - DNA, 20 bp, Artificial Sequence
  Description of Artificial Sequence: Synthetic oligonucleotide
  Target: LAMA2; (+) strand; PAM type: YTN; PAM sequence: TTG
aaaagcacatactgaaagtc

SEQ ID NO: 402191 - DNA, 20 bp, Artificial Sequence
  Description of Artificial Sequence: Synthetic oligonucleotide
  Target: LAMA2; (+) strand; PAM type: YTN; PAM sequence: CTG
aaagtctatggatcagtgat

SEQ ID NO: 402192 - DNA, 20 bp, Artificial Sequence
  Description of Artificial Sequence: Synthetic oligonucleotide
  Target: LAMA2; (+) strand; PAM type: YTN; PAM sequence: CTA
tggatcagtgatgaccttca

SEQ ID NO: 402193 - DNA, 20 bp, Artificial Sequence
  Description of Artificial Sequence: Synthetic oligonucleotide
  Target: LAMA2; (+) strand; PAM type: YTN; PAM sequence: CTT
caactattttagggttgaaa

SEQ ID NO: 402194 - DNA, 20 bp, Artificial Sequence
  Description of Artificial Sequence: Synthetic oligonucleotide
  Target: LAMA2; (+) strand; PAM type: YTN; PAM sequence: TTC
aactattttagggttgaaac

SEQ ID NO: 402195 - DNA, 20 bp, Artificial Sequence
  Description of Artificial Sequence: Synthetic oligonucleotide
  Target: LAMA2; (+) strand; PAM type: YTN; PAM sequence: CTA
ttttagggttgaaactttga

SEQ ID NO: 402196 - DNA, 20 bp, Artificial Sequence
  Description of Artificial Sequence: Synthetic oligonucleotide
  Target: LAMA2; (+) strand; PAM type: YTN; PAM sequence: TTT
tagggttgaaactttgaaat

SEQ ID NO: 402197 - DNA, 20 bp, Artificial Sequence
  Description of Artificial Sequence: Synthetic oligonucleotide
  Target: LAMA2; (+) strand; PAM type: YTN; PAM sequence: TTT
agggttgaaactttgaaatt

SEQ ID NO: 402198 - DNA, 20 bp, Artificial Sequence
  Description of Artificial Sequence: Synthetic oligonucleotide
  Target: LAMA2; (+) strand; PAM type: YTN; PAM sequence: TTA
gggttgaaactttgaaattg

SEQ ID NO: 402199 - DNA, 20 bp, Artificial Sequence
  Description of Artificial Sequence: Synthetic oligonucleotide
  Target: LAMA2; (+) strand; PAM type: YTN; PAM sequence: TTG
aaactttgaaattgccaata

SEQ ID NO: 402200 - DNA, 20 bp, Artificial Sequence
  Description of Artificial Sequence: Synthetic oligonucleotide
  Target: LAMA2; (+) strand; PAM type: YTN; PAM sequence: CTT
tgaaattgccaatatgtaac

SEQ ID NO: 402201 - DNA, 20 bp, Artificial Sequence
  Description of Artificial Sequence: Synthetic oligonucleotide
  Target: LAMA2; (+) strand; PAM type: YTN; PAM sequence: TTT
gaaattgccaatatgtaacc

SEQ ID NO: 402202 - DNA, 20 bp, Artificial Sequence
  Description of Artificial Sequence: Synthetic oligonucleotide
  Target: LAMA2; (+) strand; PAM type: YTN; PAM sequence: TTG
aaattgccaatatgtaaccc

SEQ ID NO: 402203 - DNA, 20 bp, Artificial Sequence
  Description of Artificial Sequence: Synthetic oligonucleotide
  Target: LAMA2; (+) strand; PAM type: YTN; PAM sequence: TTG
ccaatatgtaaccctttatt

SEQ ID NO: 402204 - DNA, 20 bp, Artificial Sequence
  Description of Artificial Sequence: Synthetic oligonucleotide
  Target: LAMA2; (+) strand; PAM type: YTN; PAM sequence: CTT
tattttttttaacctacaaa

SEQ ID NO: 402205 - DNA, 20 bp, Artificial Sequence
  Description of Artificial Sequence: Synthetic oligonucleotide
  Target: LAMA2; (+) strand; PAM type: YTN; PAM sequence: TTT
attttttttaacctacaaaa

SEQ ID NO: 402206 - DNA, 20 bp, Artificial Sequence
  Description of Artificial Sequence: Synthetic oligonucleotide
  Target: LAMA2; (+) strand; PAM type: YTN; PAM sequence: TTA
ttttttttaacctacaaaaa

SEQ ID NO: 402207 - DNA, 20 bp, Artificial Sequence
  Description of Artificial Sequence: Synthetic oligonucleotide
  Target: LAMA2; (+) strand; PAM type: YTN; PAM sequence: TTT
tttttaacctacaaaaacag

SEQ ID NO: 402208 - DNA, 20 bp, Artificial Sequence
  Description of Artificial Sequence: Synthetic oligonucleotide
  Target: LAMA2; (+) strand; PAM type: YTN; PAM sequence: TTT
ttttaacctacaaaaacagc

SEQ ID NO: 402209 - DNA, 20 bp, Artificial Sequence
  Description of Artificial Sequence: Synthetic oligonucleotide
  Target: LAMA2; (+) strand; PAM type: YTN; PAM sequence: TTT
tttaacctacaaaaacagct

SEQ ID NO: 402210 - DNA, 20 bp, Artificial Sequence
  Description of Artificial Sequence: Synthetic oligonucleotide
  Target: LAMA2; (+) strand; PAM type: YTN; PAM sequence: TTT
ttaacctacaaaaacagctg

SEQ ID NO: 402211 - DNA, 20 bp, Artificial Sequence
  Description of Artificial Sequence: Synthetic oligonucleotide
  Target: LAMA2; (+) strand; PAM type: YTN; PAM sequence: TTT
taacctacaaaaacagctgt

SEQ ID NO: 402212 - DNA, 20 bp, Artificial Sequence
  Description of Artificial Sequence: Synthetic oligonucleotide
  Target: LAMA2; (+) strand; PAM type: YTN; PAM sequence: TTT
aacctacaaaaacagctgtt

SEQ ID NO: 402213 - DNA, 20 bp, Artificial Sequence
  Description of Artificial Sequence: Synthetic oligonucleotide
  Target: LAMA2; (+) strand; PAM type: YTN; PAM sequence: TTA
acctacaaaaacagctgttt

SEQ ID NO: 402214 - DNA, 20 bp, Artificial Sequence
  Description of Artificial Sequence: Synthetic oligonucleotide
  Target: LAMA2; (+) strand; PAM type: YTN; PAM sequence: CTA
caaaaacagctgtttaatat

SEQ ID NO: 402215 - DNA, 20 bp, Artificial Sequence
  Description of Artificial Sequence: Synthetic oligonucleotide
  Target: LAMA2; (+) strand; PAM type: YTN; PAM sequence: CTG
tttaatataggtcaacctaa

SEQ ID NO: 402216 - DNA, 20 bp, Artificial Sequence
  Description of Artificial Sequence: Synthetic oligonucleotide
  Target: LAMA2; (+) strand; PAM type: YTN; PAM sequence: TTT
aatataggtcaacctaatat

SEQ ID NO: 402217 - DNA, 20 bp, Artificial Sequence
  Description of Artificial Sequence: Synthetic oligonucleotide
  Target: LAMA2; (+) strand; PAM type: YTN; PAM sequence: TTA
atataggtcaacctaatatg

SEQ ID NO: 402218 - DNA, 20 bp, Artificial Sequence
  Description of Artificial Sequence: Synthetic oligonucleotide
  Target: LAMA2; (+) strand; PAM type: YTN; PAM sequence: CTA
atatgtaacacagggtaatc

SEQ ID NO: 402219 - DNA, 20 bp, Artificial Sequence
  Description of Artificial Sequence: Synthetic oligonucleotide
  Target: LAMA2; (+) strand; PAM type: YTN; PAM sequence: CTA
ttcttcaaaatgaaattgaa

SEQ ID NO: 402220 - DNA, 20 bp, Artificial Sequence
  Description of Artificial Sequence: Synthetic oligonucleotide
  Target: LAMA2; (+) strand; PAM type: YTN; PAM sequence: TTC
ttcaaaatgaaattgaactg

SEQ ID NO: 402221 - DNA, 20 bp, Artificial Sequence
  Description of Artificial Sequence: Synthetic oligonucleotide
  Target: LAMA2; (+) strand; PAM type: YTN; PAM sequence: CTT
caaaatgaaattgaactgca

SEQ ID NO: 402222 - DNA, 20 bp, Artificial Sequence
  Description of Artificial Sequence: Synthetic oligonucleotide
  Target: LAMA2; (+) strand; PAM type: YTN; PAM sequence: TTC
aaaatgaaattgaactgcac

SEQ ID NO: 402223 - DNA, 20 bp, Artificial Sequence
  Description of Artificial Sequence: Synthetic oligonucleotide
  Target: LAMA2; (+) strand; PAM type: YTN; PAM sequence: TTG
aactgcaccatgaaagattt

SEQ ID NO: 402224 - DNA, 20 bp, Artificial Sequence
  Description of Artificial Sequence: Synthetic oligonucleotide
  Target: LAMA2; (+) strand; PAM type: YTN; PAM sequence: CTG
caccatgaaagatttaatta

SEQ ID NO: 402225 - DNA, 20 bp, Artificial Sequence
  Description of Artificial Sequence: Synthetic oligonucleotide
  Target: LAMA2; (+) strand; PAM type: YTN; PAM sequence: TTT
aattaaatgtaggcctttag

SEQ ID NO: 402226 - DNA, 20 bp, Artificial Sequence
  Description of Artificial Sequence: Synthetic oligonucleotide
  Target: LAMA2; (+) strand; PAM type: YTN; PAM sequence: TTA
attaaatgtaggcctttagt

SEQ ID NO: 402227 - DNA, 20 bp, Artificial Sequence
  Description of Artificial Sequence: Synthetic oligonucleotide
  Target: LAMA2; (+) strand; PAM type: YTN; PAM sequence: TTA
aatgtaggcctttagtctaa

SEQ ID NO: 402228 - DNA, 20 bp, Artificial Sequence
  Description of Artificial Sequence: Synthetic oligonucleotide
  Target: LAMA2; (+) strand; PAM type: YTN; PAM sequence: CTT
tagtctaagggtttttcaac

SEQ ID NO: 402229 - DNA, 20 bp, Artificial Sequence
  Description of Artificial Sequence: Synthetic oligonucleotide
  Target: LAMA2; (+) strand; PAM type: YTN; PAM sequence: TTT
agtctaagggtttttcaaca

SEQ ID NO: 402230 - DNA, 20 bp, Artificial Sequence
  Description of Artificial Sequence: Synthetic oligonucleotide
  Target: LAMA2; (+) strand; PAM type: YTN; PAM sequence: TTA
gtctaagggtttttcaacat

SEQ ID NO: 402231 - DNA, 20 bp, Artificial Sequence
  Description of Artificial Sequence: Synthetic oligonucleotide
  Target: LAMA2; (+) strand; PAM type: YTN; PAM sequence: CTA
agggtttttcaacatcaaaa

SEQ ID NO: 402232 - DNA, 20 bp, Artificial Sequence
  Description of Artificial Sequence: Synthetic oligonucleotide
  Target: LAMA2; (+) strand; PAM type: YTN; PAM sequence: TTT
ttcaacatcaaaatgttctt

SEQ ID NO: 402233 - DNA, 20 bp, Artificial Sequence
  Description of Artificial Sequence: Synthetic oligonucleotide
  Target: LAMA2; (+) strand; PAM type: YTN; PAM sequence: TTT
tcaacatcaaaatgttcttc

SEQ ID NO: 402234 - DNA, 20 bp, Artificial Sequence
  Description of Artificial Sequence: Synthetic oligonucleotide
  Target: LAMA2; (+) strand; PAM type: YTN; PAM sequence: TTT
caacatcaaaatgttcttca

SEQ ID NO: 402235 - DNA, 20 bp, Artificial Sequence
  Description of Artificial Sequence: Synthetic oligonucleotide
  Target: LAMA2; (+) strand; PAM type: YTN; PAM sequence: TTC
aacatcaaaatgttcttcaa

SEQ ID NO: 402236 - DNA, 20 bp, Artificial Sequence
  Description of Artificial Sequence: Synthetic oligonucleotide
  Target: LAMA2; (+) strand; PAM type: YTN; PAM sequence: TTC
ttcaaaagacattttgatag

SEQ ID NO: 402237 - DNA, 20 bp, Artificial Sequence
  Description of Artificial Sequence: Synthetic oligonucleotide
  Target: LAMA2; (+) strand; PAM type: YTN; PAM sequence: CTT
caaaagacattttgatagct

SEQ ID NO: 402238 - DNA, 20 bp, Artificial Sequence
  Description of Artificial Sequence: Synthetic oligonucleotide
  Target: LAMA2; (+) strand; PAM type: YTN; PAM sequence: TTC
aaaagacattttgatagctt

SEQ ID NO: 402239 - DNA, 20 bp, Artificial Sequence
  Description of Artificial Sequence: Synthetic oligonucleotide
  Target: LAMA2; (+) strand; PAM type: YTN; PAM sequence: TTT
tgatagcttctctctttaag

SEQ ID NO: 402240 - DNA, 20 bp, Artificial Sequence
  Description of Artificial Sequence: Synthetic oligonucleotide
  Target: LAMA2; (+) strand; PAM type: YTN; PAM sequence: TTT
gatagcttctctctttaaga

SEQ ID NO: 402241 - DNA, 20 bp, Artificial Sequence
  Description of Artificial Sequence: Synthetic oligonucleotide
  Target: LAMA2; (+) strand; PAM type: YTN; PAM sequence: TTG
atagcttctctctttaagat

SEQ ID NO: 402242 - DNA, 20 bp, Artificial Sequence
  Description of Artificial Sequence: Synthetic oligonucleotide
  Target: LAMA2; (+) strand; PAM type: YTN; PAM sequence: CTT
ctctctttaagatgtgcaaa

SEQ ID NO: 402243 - DNA, 20 bp, Artificial Sequence
  Description of Artificial Sequence: Synthetic oligonucleotide
  Target: LAMA2; (+) strand; PAM type: YTN; PAM sequence: TTC
tctctttaagatgtgcaaaa

SEQ ID NO: 402244 - DNA, 20 bp, Artificial Sequence
  Description of Artificial Sequence: Synthetic oligonucleotide
  Target: LAMA2; (+) strand; PAM type: YTN; PAM sequence: CTC
tctttaagatgtgcaaaaaa

SEQ ID NO: 402245 - DNA, 20 bp, Artificial Sequence
  Description of Artificial Sequence: Synthetic oligonucleotide
  Target: LAMA2; (+) strand; PAM type: YTN; PAM sequence: CTC
tttaagatgtgcaaaaaaag

SEQ ID NO: 402246 - DNA, 20 bp, Artificial Sequence
  Description of Artificial Sequence: Synthetic oligonucleotide
  Target: LAMA2; (+) strand; PAM type: YTN; PAM sequence: CTT
taagatgtgcaaaaaaagac

SEQ ID NO: 402247 - DNA, 20 bp, Artificial Sequence
  Description of Artificial Sequence: Synthetic oligonucleotide
  Target: LAMA2; (+) strand; PAM type: YTN; PAM sequence: TTT
aagatgtgcaaaaaaagacg

SEQ ID NO: 402248 - DNA, 20 bp, Artificial Sequence
  Description of Artificial Sequence: Synthetic oligonucleotide
  Target: LAMA2; (+) strand; PAM type: YTN; PAM sequence: TTA
agatgtgcaaaaaaagacgg

SEQ ID NO: 402249 - DNA, 20 bp, Artificial Sequence
  Description of Artificial Sequence: Synthetic oligonucleotide
  Target: LAMA2; (+) strand; PAM type: YTN; PAM sequence: TTT
tgtgtaaaaaccctgattta

SEQ ID NO: 402250 - DNA, 20 bp, Artificial Sequence
  Description of Artificial Sequence: Synthetic oligonucleotide
  Target: LAMA2; (+) strand; PAM type: YTN; PAM sequence: TTT
gtgtaaaaaccctgatttaa

SEQ ID NO: 402251 - DNA, 20 bp, Artificial Sequence
  Description of Artificial Sequence: Synthetic oligonucleotide
  Target: LAMA2; (+) strand; PAM type: YTN; PAM sequence: TTG
tgtaaaaaccctgatttaaa

SEQ ID NO: 402252 - DNA, 20 bp, Artificial Sequence
  Description of Artificial Sequence: Synthetic oligonucleotide
  Target: LAMA2; (+) strand; PAM type: YTN; PAM sequence: CTG
atttaaatacagttctggct

SEQ ID NO: 402253 - DNA, 20 bp, Artificial Sequence
  Description of Artificial Sequence: Synthetic oligonucleotide
  Target: LAMA2; (+) strand; PAM type: YTN; PAM sequence: TTT
aaatacagttctggcttgga

SEQ ID NO: 402254 - DNA, 20 bp, Artificial Sequence
  Description of Artificial Sequence: Synthetic oligonucleotide
  Target: LAMA2; (+) strand; PAM type: YTN; PAM sequence: TTA
aatacagttctggcttggac

SEQ ID NO: 402255 - DNA, 20 bp, Artificial Sequence
  Description of Artificial Sequence: Synthetic oligonucleotide
  Target: LAMA2; (+) strand; PAM type: YTN; PAM sequence: TTC
tggcttggacagactaggtg

SEQ ID NO: 402256 - DNA, 20 bp, Artificial Sequence
  Description of Artificial Sequence: Synthetic oligonucleotide
  Target: LAMA2; (+) strand; PAM type: YTN; PAM sequence: CTG
gcttggacagactaggtgac

SEQ ID NO: 402257 - DNA, 20 bp, Artificial Sequence
  Description of Artificial Sequence: Synthetic oligonucleotide
  Target: LAMA2; (+) strand; PAM type: YTN; PAM sequence: CTT
ggacagactaggtgacattt

SEQ ID NO: 402258 - DNA, 20 bp, Artificial Sequence
  Description of Artificial Sequence: Synthetic oligonucleotide
  Target: LAMA2; (+) strand; PAM type: YTN; PAM sequence: TTG
gacagactaggtgacatttt

SEQ ID NO: 402259 - DNA, 20 bp, Artificial Sequence
  Description of Artificial Sequence: Synthetic oligonucleotide
  Target: LAMA2; (+) strand; PAM type: YTN; PAM sequence: CTA
ggtgacattttaaagatgct

SEQ ID NO: 402260 - DNA, 20 bp, Artificial Sequence
  Description of Artificial Sequence: Synthetic oligonucleotide
  Target: LAMA2; (+) strand; PAM type: YTN; PAM sequence: TTT
taaagatgctttcatttcct

SEQ ID NO: 402261 - DNA, 20 bp, Artificial Sequence
  Description of Artificial Sequence: Synthetic oligonucleotide
  Target: LAMA2; (+) strand; PAM type: YTN; PAM sequence: TTT
aaagatgctttcatttcctt

SEQ ID NO: 402262 - DNA, 20 bp, Artificial Sequence
  Description of Artificial Sequence: Synthetic oligonucleotide
  Target: LAMA2; (+) strand; PAM type: YTN; PAM sequence: TTA
aagatgctttcatttccttg

SEQ ID NO: 402263 - DNA, 20 bp, Artificial Sequence
  Description of Artificial Sequence: Synthetic oligonucleotide
  Target: LAMA2; (+) strand; PAM type: YTN; PAM sequence: CTT
tcatttccttgcttctgtga

SEQ ID NO: 402264 - DNA, 20 bp, Artificial Sequence
  Description of Artificial Sequence: Synthetic oligonucleotide
  Target: LAMA2; (+) strand; PAM type: YTN; PAM sequence: TTT
catttccttgcttctgtgac

SEQ ID NO: 402265 - DNA, 20 bp, Artificial Sequence
  Description of Artificial Sequence: Synthetic oligonucleotide
  Target: LAMA2; (+) strand; PAM type: YTN; PAM sequence: TTC
atttccttgcttctgtgact

SEQ ID NO: 402266 - DNA, 20 bp, Artificial Sequence
  Description of Artificial Sequence: Synthetic oligonucleotide
  Target: LAMA2; (+) strand; PAM type: YTN; PAM sequence: TTT
ccttgcttctgtgactaaag

SEQ ID NO: 402267 - DNA, 20 bp, Artificial Sequence
  Description of Artificial Sequence: Synthetic oligonucleotide
  Target: LAMA2; (+) strand; PAM type: YTN; PAM sequence: TTC
cttgcttctgtgactaaagt

SEQ ID NO: 402268 - DNA, 20 bp, Artificial Sequence
  Description of Artificial Sequence: Synthetic oligonucleotide
  Target: LAMA2; (+) strand; PAM type: YTN; PAM sequence: CTT
gcttctgtgactaaagttct

SEQ ID NO: 402269 - DNA, 20 bp, Artificial Sequence
  Description of Artificial Sequence: Synthetic oligonucleotide
  Target: LAMA2; (+) strand; PAM type: YTN; PAM sequence: TTG
cttctgtgactaaagttcta

SEQ ID NO: 402270 - DNA, 20 bp, Artificial Sequence
  Description of Artificial Sequence: Synthetic oligonucleotide
  Target: LAMA2; (+) strand; PAM type: YTN; PAM sequence: CTT
ctgtgactaaagttctattc

SEQ ID NO: 402271 - DNA, 20 bp, Artificial Sequence
  Description of Artificial Sequence: Synthetic oligonucleotide
  Target: LAMA2; (+) strand; PAM type: YTN; PAM sequence: TTC
tgtgactaaagttctattct

SEQ ID NO: 402272 - DNA, 20 bp, Artificial Sequence
  Description of Artificial Sequence: Synthetic oligonucleotide
  Target: LAMA2; (+) strand; PAM type: YTN; PAM sequence: CTG
tgactaaagttctattctgt

SEQ ID NO: 402273 - DNA, 20 bp, Artificial Sequence
  Description of Artificial Sequence: Synthetic oligonucleotide
  Target: LAMA2; (+) strand; PAM type: YTN; PAM sequence: CTA
aagttctattctgtaaaggt

SEQ ID NO: 402274 - DNA, 20 bp, Artificial Sequence
  Description of Artificial Sequence: Synthetic oligonucleotide
  Target: LAMA2; (+) strand; PAM type: YTN; PAM sequence: TTC
tattctgtaaaggttaactt

SEQ ID NO: 402275 - DNA, 20 bp, Artificial Sequence
  Description of Artificial Sequence: Synthetic oligonucleotide
  Target: LAMA2; (+) strand; PAM type: YTN; PAM sequence: CTA
ttctgtaaaggttaactttt

SEQ ID NO: 402276 - DNA, 20 bp, Artificial Sequence
  Description of Artificial Sequence: Synthetic oligonucleotide
  Target: LAMA2; (+) strand; PAM type: YTN; PAM sequence: TTC
tgtaaaggttaactttttgg

SEQ ID NO: 402277 - DNA, 20 bp, Artificial Sequence
  Description of Artificial Sequence: Synthetic oligonucleotide
  Target: LAMA2; (+) strand; PAM type: YTN; PAM sequence: CTG
taaaggttaactttttggct

SEQ ID NO: 402278 - DNA, 20 bp, Artificial Sequence
  Description of Artificial Sequence: Synthetic oligonucleotide
  Target: LAMA2; (+) strand; PAM type: YTN; PAM sequence: TTA
actttttggctgaagttaga

SEQ ID NO: 402279 - DNA, 20 bp, Artificial Sequence
  Description of Artificial Sequence: Synthetic oligonucleotide
  Target: LAMA2; (+) strand; PAM type: YTN; PAM sequence: CTT
tttggctgaagttagaaatt

SEQ ID NO: 402280 - DNA, 20 bp, Artificial Sequence
  Description of Artificial Sequence: Synthetic oligonucleotide
  Target: LAMA2; (+) strand; PAM type: YTN; PAM sequence: TTT
ttggctgaagttagaaatta

SEQ ID NO: 402281 - DNA, 20 bp, Artificial Sequence
  Description of Artificial Sequence: Synthetic oligonucleotide
  Target: LAMA2; (+) strand; PAM type: YTN; PAM sequence: TTT
tggctgaagttagaaattaa

SEQ ID NO: 402282 - DNA, 20 bp, Artificial Sequence
  Description of Artificial Sequence: Synthetic oligonucleotide
  Target: LAMA2; (+) strand; PAM type: YTN; PAM sequence: TTT
ggctgaagttagaaattaag

SEQ ID NO: 402283 - DNA, 20 bp, Artificial Sequence
  Description of Artificial Sequence: Synthetic oligonucleotide
  Target: LAMA2; (+) strand; PAM type: YTN; PAM sequence: TTG
gctgaagttagaaattaagc

SEQ ID NO: 402284 - DNA, 20 bp, Artificial Sequence
  Description of Artificial Sequence: Synthetic oligonucleotide
  Target: LAMA2; (+) strand; PAM type: YTN; PAM sequence: CTG
aagttagaaattaagcattg

SEQ ID NO: 402285 - DNA, 20 bp, Artificial Sequence
  Description of Artificial Sequence: Synthetic oligonucleotide
  Target: LAMA2; (+) strand; PAM type: YTN; PAM sequence: TTA
gaaattaagcattgaattaa

SEQ ID NO: 402286 - DNA, 20 bp, Artificial Sequence
  Description of Artificial Sequence: Synthetic oligonucleotide
  Target: LAMA2; (+) strand; PAM type: YTN; PAM sequence: TTA
agcattgaattaagttcttc

SEQ ID NO: 402287 - DNA, 20 bp, Artificial Sequence
  Description of Artificial Sequence: Synthetic oligonucleotide
  Target: LAMA2; (+) strand; PAM type: YTN; PAM sequence: TTG
aattaagttcttcatattct

SEQ ID NO: 402288 - DNA, 20 bp, Artificial Sequence
  Description of Artificial Sequence: Synthetic oligonucleotide
  Target: LAMA2; (+) strand; PAM type: YTN; PAM sequence: TTA
agttcttcatattctctacc

SEQ ID NO: 402289 - DNA, 20 bp, Artificial Sequence
  Description of Artificial Sequence: Synthetic oligonucleotide
  Target: LAMA2; (+) strand; PAM type: YTN; PAM sequence: TTC
ttcatattctctaccttcaa

SEQ ID NO: 402290 - DNA, 20 bp, Artificial Sequence
  Description of Artificial Sequence: Synthetic oligonucleotide
  Target: LAMA2; (+) strand; PAM type: YTN; PAM sequence: CTT
catattctctaccttcaatg

SEQ ID NO: 402291 - DNA, 20 bp, Artificial Sequence
  Description of Artificial Sequence: Synthetic oligonucleotide
  Target: LAMA2; (+) strand; PAM type: YTN; PAM sequence: TTC
atattctctaccttcaatgc

SEQ ID NO: 402292 - DNA, 20 bp, Artificial Sequence
  Description of Artificial Sequence: Synthetic oligonucleotide
  Target: LAMA2; (+) strand; PAM type: YTN; PAM sequence: TTC
tctaccttcaatgctaattt

SEQ ID NO: 402293 - DNA, 20 bp, Artificial Sequence
  Description of Artificial Sequence: Synthetic oligonucleotide
  Target: LAMA2; (+) strand; PAM type: YTN; PAM sequence: CTC
taccttcaatgctaattttt

SEQ ID NO: 402294 - DNA, 20 bp, Artificial Sequence
  Description of Artificial Sequence: Synthetic oligonucleotide
  Target: LAMA2; (+) strand; PAM type: YTN; PAM sequence: CTA
ccttcaatgctaatttttac

SEQ ID NO: 402295 - DNA, 20 bp, Artificial Sequence
  Description of Artificial Sequence: Synthetic oligonucleotide
  Target: LAMA2; (+) strand; PAM type: YTN; PAM sequence: CTT
caatgctaatttttacctta

SEQ ID NO: 402296 - DNA, 20 bp, Artificial Sequence
  Description of Artificial Sequence: Synthetic oligonucleotide
  Target: LAMA2; (+) strand; PAM type: YTN; PAM sequence: TTC
aatgctaatttttaccttaa

SEQ ID NO: 402297 - DNA, 20 bp, Artificial Sequence
  Description of Artificial Sequence: Synthetic oligonucleotide
  Target: LAMA2; (+) strand; PAM type: YTN; PAM sequence: CTA
atttttaccttaatcaaaaa

SEQ ID NO: 402298 - DNA, 20 bp, Artificial Sequence
  Description of Artificial Sequence: Synthetic oligonucleotide
  Target: LAMA2; (+) strand; PAM type: YTN; PAM sequence: TTT
ttaccttaatcaaaaagaaa

SEQ ID NO: 402299 - DNA, 20 bp, Artificial Sequence
  Description of Artificial Sequence: Synthetic oligonucleotide
  Target: LAMA2; (+) strand; PAM type: YTN; PAM sequence: TTT
taccttaatcaaaaagaaaa

SEQ ID NO: 402300 - DNA, 20 bp, Artificial Sequence
  Description of Artificial Sequence: Synthetic oligonucleotide
  Target: LAMA2; (+) strand; PAM type: YTN; PAM sequence: TTT
accttaatcaaaaagaaaaa

SEQ ID NO: 402301 - DNA, 20 bp, Artificial Sequence
  Description of Artificial Sequence: Synthetic oligonucleotide
  Target: LAMA2; (+) strand; PAM type: YTN; PAM sequence: TTA
ccttaatcaaaaagaaaaag

SEQ ID NO: 402302 - DNA, 20 bp, Artificial Sequence
  Description of Artificial Sequence: Synthetic oligonucleotide
  Target: LAMA2; (+) strand; PAM type: YTN; PAM sequence: CTT
aatcaaaaagaaaaagtggt

SEQ ID NO: 402303 - DNA, 20 bp, Artificial Sequence
  Description of Artificial Sequence: Synthetic oligonucleotide
  Target: LAMA2; (+) strand; PAM type: YTN; PAM sequence: TTA
atcaaaaagaaaaagtggtg

SEQ ID NO: 402304 - DNA, 20 bp, Artificial Sequence
  Description of Artificial Sequence: Synthetic oligonucleotide
  Target: LAMA2; (+) strand; PAM type: YTN; PAM sequence: CTC
tgtcctaacatctactcccc

SEQ ID NO: 402305 - DNA, 20 bp, Artificial Sequence
  Description of Artificial Sequence: Synthetic oligonucleotide
  Target: LAMA2; (+) strand; PAM type: YTN; PAM sequence: CTG
tcctaacatctactcccctg

SEQ ID NO: 402306 - DNA, 20 bp, Artificial Sequence
  Description of Artificial Sequence: Synthetic oligonucleotide
  Target: LAMA2; (+) strand; PAM type: YTN; PAM sequence: CTA
acatctactcccctggcctg

SEQ ID NO: 402307 - DNA, 20 bp, Artificial Sequence
  Description of Artificial Sequence: Synthetic oligonucleotide
  Target: LAMA2; (+) strand; PAM type: YTN; PAM sequence: CTA
ctcccctggcctgcttgagt

SEQ ID NO: 402308 - DNA, 20 bp, Artificial Sequence
  Description of Artificial Sequence: Synthetic oligonucleotide
  Target: LAMA2; (+) strand; PAM type: YTN; PAM sequence: CTC
ccctggcctgcttgagtctc

SEQ ID NO: 402309 - DNA, 20 bp, Artificial Sequence
  Description of Artificial Sequence: Synthetic oligonucleotide
  Target: LAMA2; (+) strand; PAM type: YTN; PAM sequence: CTG
gcctgcttgagtctcaacta

SEQ ID NO: 402310 - DNA, 20 bp, Artificial Sequence
  Description of Artificial Sequence: Synthetic oligonucleotide
  Target: LAMA2; (+) strand; PAM type: YTN; PAM sequence: CTG
cttgagtctcaactaaaata

SEQ ID NO: 402311 - DNA, 20 bp, Artificial Sequence
  Description of Artificial Sequence: Synthetic oligonucleotide
  Target: LAMA2; (+) strand; PAM type: YTN; PAM sequence: CTT
gagtctcaactaaaatattg

SEQ ID NO: 402312 - DNA, 20 bp, Artificial Sequence
  Description of Artificial Sequence: Synthetic oligonucleotide
  Target: LAMA2; (+) strand; PAM type: YTN; PAM sequence: TTG
agtctcaactaaaatattga

SEQ ID NO: 402313 - DNA, 20 bp, Artificial Sequence
  Description of Artificial Sequence: Synthetic oligonucleotide
  Target: LAMA2; (+) strand; PAM type: YTN; PAM sequence: CTC
aactaaaatattgacatttg

SEQ ID NO: 402314 - DNA, 20 bp, Artificial Sequence
  Description of Artificial Sequence: Synthetic oligonucleotide
  Target: LAMA2; (+) strand; PAM type: YTN; PAM sequence: CTA
aaatattgacatttgccatc

SEQ ID NO: 402315 - DNA, 20 bp, Artificial Sequence
  Description of Artificial Sequence: Synthetic oligonucleotide
  Target: LAMA2; (+) strand; PAM type: YTN; PAM sequence: TTG
acatttgccatcacacattt

SEQ ID NO: 402316 - DNA, 20 bp, Artificial Sequence
  Description of Artificial Sequence: Synthetic oligonucleotide
  Target: LAMA2; (+) strand; PAM type: YTN; PAM sequence: TTT
gccatcacacattttgcttt

SEQ ID NO: 402317 - DNA, 20 bp, Artificial Sequence
  Description of Artificial Sequence: Synthetic oligonucleotide
  Target: LAMA2; (+) strand; PAM type: YTN; PAM sequence: TTG
ccatcacacattttgcttta

SEQ ID NO: 402318 - DNA, 20 bp, Artificial Sequence
  Description of Artificial Sequence: Synthetic oligonucleotide
  Target: LAMA2; (+) strand; PAM type: YTN; PAM sequence: TTT
tgctttagctgttatggcca

SEQ ID NO: 402319 - DNA, 20 bp, Artificial Sequence
  Description of Artificial Sequence: Synthetic oligonucleotide
  Target: LAMA2; (+) strand; PAM type: YTN; PAM sequence: TTT
gctttagctgttatggccat

SEQ ID NO: 402320 - DNA, 20 bp, Artificial Sequence
  Description of Artificial Sequence: Synthetic oligonucleotide
  Target: LAMA2; (+) strand; PAM type: YTN; PAM sequence: TTG
ctttagctgttatggccatg

SEQ ID NO: 402321 - DNA, 20 bp, Artificial Sequence
  Description of Artificial Sequence: Synthetic oligonucleotide
  Target: LAMA2; (+) strand; PAM type: YTN; PAM sequence: CTT
tagctgttatggccatgctt

SEQ ID NO: 402322 - DNA, 20 bp, Artificial Sequence
  Description of Artificial Sequence: Synthetic oligonucleotide
  Target: LAMA2; (+) strand; PAM type: YTN; PAM sequence: TTT
agctgttatggccatgcttt

SEQ ID NO: 402323 - DNA, 20 bp, Artificial Sequence
  Description of Artificial Sequence: Synthetic oligonucleotide
  Target: LAMA2; (+) strand; PAM type: YTN; PAM sequence: TTA
gctgttatggccatgctttg

SEQ ID NO: 402324 - DNA, 20 bp, Artificial Sequence
  Description of Artificial Sequence: Synthetic oligonucleotide
  Target: LAMA2; (+) strand; PAM type: YTN; PAM sequence: CTG
ttatggccatgctttgtcac

SEQ ID NO: 402325 - DNA, 20 bp, Artificial Sequence
  Description of Artificial Sequence: Synthetic oligonucleotide
  Target: LAMA2; (+) strand; PAM type: YTN; PAM sequence: TTA
tggccatgctttgtcacatt

SEQ ID NO: 402326 - DNA, 20 bp, Artificial Sequence
  Description of Artificial Sequence: Synthetic oligonucleotide
  Target: LAMA2; (+) strand; PAM type: YTN; PAM sequence: CTT
tgtcacattaataagatgaa

SEQ ID NO: 402327 - DNA, 20 bp, Artificial Sequence
  Description of Artificial Sequence: Synthetic oligonucleotide
  Target: LAMA2; (+) strand; PAM type: YTN; PAM sequence: TTT
gtcacattaataagatgaaa

SEQ ID NO: 402328 - DNA, 20 bp, Artificial Sequence
  Description of Artificial Sequence: Synthetic oligonucleotide
  Target: LAMA2; (+) strand; PAM type: YTN; PAM sequence: TTG
tcacattaataagatgaaat

SEQ ID NO: 402329 - DNA, 20 bp, Artificial Sequence
  Description of Artificial Sequence: Synthetic oligonucleotide
  Target: LAMA2; (+) strand; PAM type: YTN; PAM sequence: TTA
ataagatgaaattgtttggt

SEQ ID NO: 402330 - DNA, 20 bp, Artificial Sequence
  Description of Artificial Sequence: Synthetic oligonucleotide
  Target: LAMA2; (+) strand; PAM type: YTN; PAM sequence: TTG
tttggttaagcatactgcta

SEQ ID NO: 402331 - DNA, 20 bp, Artificial Sequence
  Description of Artificial Sequence: Synthetic oligonucleotide
  Target: LAMA2; (+) strand; PAM type: YTN; PAM sequence: TTT
ggttaagcatactgctattc

SEQ ID NO: 402332 - DNA, 20 bp, Artificial Sequence
  Description of Artificial Sequence: Synthetic oligonucleotide
  Target: LAMA2; (+) strand; PAM type: YTN; PAM sequence: TTG
gttaagcatactgctattct

SEQ ID NO: 402333 - DNA, 20 bp, Artificial Sequence
  Description of Artificial Sequence: Synthetic oligonucleotide
  Target: LAMA2; (+) strand; PAM type: YTN; PAM sequence: TTA
agcatactgctattctaatt

SEQ ID NO: 402334 - DNA, 20 bp, Artificial Sequence
  Description of Artificial Sequence: Synthetic oligonucleotide
  Target: LAMA2; (+) strand; PAM type: YTN; PAM sequence: CTG
ctattctaattctgtgtgtg

SEQ ID NO: 402335 - DNA, 20 bp, Artificial Sequence
  Description of Artificial Sequence: Synthetic oligonucleotide
  Target: LAMA2; (+) strand; PAM type: YTN; PAM sequence: CTA
ttctaattctgtgtgtgcac

SEQ ID NO: 402336 - DNA, 20 bp, Artificial Sequence
  Description of Artificial Sequence: Synthetic oligonucleotide
  Target: LAMA2; (+) strand; PAM type: YTN; PAM sequence: TTC
taattctgtgtgtgcacgtg

SEQ ID NO: 402337 - DNA, 20 bp, Artificial Sequence
  Description of Artificial Sequence: Synthetic oligonucleotide
  Target: LAMA2; (+) strand; PAM type: YTN; PAM sequence: CTA
attctgtgtgtgcacgtgtg

SEQ ID NO: 402338 - DNA, 20 bp, Artificial Sequence
  Description of Artificial Sequence: Synthetic oligonucleotide
  Target: LAMA2; (+) strand; PAM type: YTN; PAM sequence: TTC
tgtgtgtgcacgtgtgtgca

SEQ ID NO: 402339 - DNA, 20 bp, Artificial Sequence
  Description of Artificial Sequence: Synthetic oligonucleotide
  Target: LAMA2; (+) strand; PAM type: YTN; PAM sequence: CTG
tgtgtgcacgtgtgtgcatg

SEQ ID NO: 402340 - DNA, 20 bp, Artificial Sequence
  Description of Artificial Sequence: Synthetic oligonucleotide
  Target: LAMA2; (+) strand; PAM type: YTN; PAM sequence: CTA
attttgttctatgcagttgc

SEQ ID NO: 402341 - DNA, 20 bp, Artificial Sequence
  Description of Artificial Sequence: Synthetic oligonucleotide
  Target: LAMA2; (+) strand; PAM type: YTN; PAM sequence: TTT
tgttctatgcagttgccgat

SEQ ID NO: 402342 - DNA, 20 bp, Artificial Sequence
  Description of Artificial Sequence: Synthetic oligonucleotide
  Target: LAMA2; (+) strand; PAM type: YTN; PAM sequence: TTT
gttctatgcagttgccgatg

SEQ ID NO: 402343 - DNA, 20 bp, Artificial Sequence
  Description of Artificial Sequence: Synthetic oligonucleotide
  Target: LAMA2; (+) strand; PAM type: YTN; PAM sequence: TTG
ttctatgcagttgccgatgc

SEQ ID NO: 402344 - DNA, 20 bp, Artificial Sequence
  Description of Artificial Sequence: Synthetic oligonucleotide
  Target: LAMA2; (+) strand; PAM type: YTN; PAM sequence: TTC
tatgcagttgccgatgcaga

SEQ ID NO: 402345 - DNA, 20 bp, Artificial Sequence
  Description of Artificial Sequence: Synthetic oligonucleotide
  Target: LAMA2; (+) strand; PAM type: YTN; PAM sequence: CTA
tgcagttgccgatgcagatg

SEQ ID NO: 402346 - DNA, 20 bp, Artificial Sequence
  Description of Artificial Sequence: Synthetic oligonucleotide
  Target: LAMA2; (+) strand; PAM type: YTN; PAM sequence: TTG
ccgatgcagatgccactgtc

SEQ ID NO: 402347 - DNA, 20 bp, Artificial Sequence
  Description of Artificial Sequence: Synthetic oligonucleotide
  Target: LAMA2; (+) strand; PAM type: YTN; PAM sequence: CTG
tcaaaaatttagaacaggaa

SEQ ID NO: 402348 - DNA, 20 bp, Artificial Sequence
  Description of Artificial Sequence: Synthetic oligonucleotide
  Target: LAMA2; (+) strand; PAM type: YTN; PAM sequence: TTT
agaacaggaagctgaccggc

SEQ ID NO: 402349 - DNA, 20 bp, Artificial Sequence
  Description of Artificial Sequence: Synthetic oligonucleotide
  Target: LAMA2; (+) strand; PAM type: YTN; PAM sequence: TTA
gaacaggaagctgaccggct

SEQ ID NO: 402350 - DNA, 20 bp, Artificial Sequence
  Description of Artificial Sequence: Synthetic oligonucleotide
  Target: LAMA2; (+) strand; PAM type: YTN; PAM sequence: CTG
accggctaatagataaactc

SEQ ID NO: 402351 - DNA, 20 bp, Artificial Sequence
  Description of Artificial Sequence: Synthetic oligonucleotide
  Target: LAMA2; (+) strand; PAM type: YTN; PAM sequence: CTA
atagataaactcaaacccat

SEQ ID NO: 402352 - DNA, 20 bp, Artificial Sequence
  Description of Artificial Sequence: Synthetic oligonucleotide
  Target: LAMA2; (+) strand; PAM type: YTN; PAM sequence: CTC
aaacccatcaaggaacttga

SEQ ID NO: 402353 - DNA, 20 bp, Artificial Sequence
  Description of Artificial Sequence: Synthetic oligonucleotide
  Target: LAMA2; (+) strand; PAM type: YTN; PAM sequence: CTT
gaggataacctaaagaaaaa

SEQ ID NO: 402354 - DNA, 20 bp, Artificial Sequence
  Description of Artificial Sequence: Synthetic oligonucleotide
  Target: LAMA2; (+) strand; PAM type: YTN; PAM sequence: TTG
aggataacctaaagaaaaac

SEQ ID NO: 402355 - DNA, 20 bp, Artificial Sequence
  Description of Artificial Sequence: Synthetic oligonucleotide
  Target: LAMA2; (+) strand; PAM type: YTN; PAM sequence: CTA
aagaaaaacatctctgagat

SEQ ID NO: 402356 - DNA, 20 bp, Artificial Sequence
  Description of Artificial Sequence: Synthetic oligonucleotide
  Target: LAMA2; (+) strand; PAM type: YTN; PAM sequence: CTC
tgagataaaggaattgataa

SEQ ID NO: 402357 - DNA, 20 bp, Artificial Sequence
  Description of Artificial Sequence: Synthetic oligonucleotide
  Target: LAMA2; (+) strand; PAM type: YTN; PAM sequence: CTG
agataaaggaattgataaac

SEQ ID NO: 402358 - DNA, 20 bp, Artificial Sequence
  Description of Artificial Sequence: Synthetic oligonucleotide
  Target: LAMA2; (+) strand; PAM type: YTN; PAM sequence: TTG
ataaaccaagctcggaaaca

SEQ ID NO: 402359 - DNA, 20 bp, Artificial Sequence
  Description of Artificial Sequence: Synthetic oligonucleotide
  Target: LAMA2; (+) strand; PAM type: YTN; PAM sequence: CTC
ggaaacaagccaattctgta

SEQ ID NO: 402360 - DNA, 20 bp, Artificial Sequence
  Description of Artificial Sequence: Synthetic oligonucleotide
  Target: LAMA2; (+) strand; PAM type: YTN; PAM sequence: TTC
tgtaagttctttttatcgtc

SEQ ID NO: 402361 - DNA, 20 bp, Artificial Sequence
  Description of Artificial Sequence: Synthetic oligonucleotide
  Target: LAMA2; (+) strand; PAM type: YTN; PAM sequence: CTG
taagttctttttatcgtcag

SEQ ID NO: 402362 - DNA, 20 bp, Artificial Sequence
  Description of Artificial Sequence: Synthetic oligonucleotide
  Target: LAMA2; (+) strand; PAM type: YTN; PAM sequence: TTC
tttttatcgtcagtatcagt

SEQ ID NO: 402363 - DNA, 20 bp, Artificial Sequence
  Description of Artificial Sequence: Synthetic oligonucleotide
  Target: LAMA2; (+) strand; PAM type: YTN; PAM sequence: CTT
tttatcgtcagtatcagtaa

SEQ ID NO: 402364 - DNA, 20 bp, Artificial Sequence
  Description of Artificial Sequence: Synthetic oligonucleotide
  Target: LAMA2; (+) strand; PAM type: YTN; PAM sequence: TTT
ttatcgtcagtatcagtaac

SEQ ID NO: 402365 - DNA, 20 bp, Artificial Sequence
  Description of Artificial Sequence: Synthetic oligonucleotide
  Target: LAMA2; (+) strand; PAM type: YTN; PAM sequence: TTT
tatcgtcagtatcagtaact

SEQ ID NO: 402366 - DNA, 20 bp, Artificial Sequence
  Description of Artificial Sequence: Synthetic oligonucleotide
  Target: LAMA2; (+) strand; PAM type: YTN; PAM sequence: TTT
atcgtcagtatcagtaactg

SEQ ID NO: 402367 - DNA, 20 bp, Artificial Sequence
  Description of Artificial Sequence: Synthetic oligonucleotide
  Target: LAMA2; (+) strand; PAM type: YTN; PAM sequence: TTA
tcgtcagtatcagtaactga

SEQ ID NO: 402368 - DNA, 20 bp, Artificial Sequence
  Description of Artificial Sequence: Synthetic oligonucleotide
  Target: LAMA2; (+) strand; PAM type: YTN; PAM sequence: CTG
attgtaattgttggattatt

SEQ ID NO: 402369 - DNA, 20 bp, Artificial Sequence
  Description of Artificial Sequence: Synthetic oligonucleotide
  Target: LAMA2; (+) strand; PAM type: YTN; PAM sequence: TTG
taattgttggattattcata

SEQ ID NO: 402370 - DNA, 20 bp, Artificial Sequence
  Description of Artificial Sequence: Synthetic oligonucleotide
  Target: LAMA2; (+) strand; PAM type: YTN; PAM sequence: TTG
ttggattattcatagaggga

SEQ ID NO: 402371 - DNA, 20 bp, Artificial Sequence
  Description of Artificial Sequence: Synthetic oligonucleotide
  Target: LAMA2; (+) strand; PAM type: YTN; PAM sequence: TTG
gattattcatagagggaatg

SEQ ID NO: 402372 - DNA, 20 bp, Artificial Sequence
  Description of Artificial Sequence: Synthetic oligonucleotide
  Target: LAMA2; (+) strand; PAM type: YTN; PAM sequence: TTA
ttcatagagggaatgtcttt

SEQ ID NO: 402373 - DNA, 20 bp, Artificial Sequence
  Description of Artificial Sequence: Synthetic oligonucleotide
  Target: LAMA2; (+) strand; PAM type: YTN; PAM sequence: TTC
atagagggaatgtctttccc

SEQ ID NO: 402374 - DNA, 20 bp, Artificial Sequence
  Description of Artificial Sequence: Synthetic oligonucleotide
  Target: LAMA2; (+) strand; PAM type: YTN; PAM sequence: CTT
tccccaggattccccgttga

SEQ ID NO: 402375 - DNA, 20 bp, Artificial Sequence
  Description of Artificial Sequence: Synthetic oligonucleotide
  Target: LAMA2; (+) strand; PAM type: YTN; PAM sequence: TTT
ccccaggattccccgttgaa

SEQ ID NO: 402376 - DNA, 20 bp, Artificial Sequence
  Description of Artificial Sequence: Synthetic oligonucleotide
  Target: LAMA2; (+) strand; PAM type: YTN; PAM sequence: TTC
cccaggattccccgttgaat

SEQ ID NO: 402377 - DNA, 20 bp, Artificial Sequence
  Description of Artificial Sequence: Synthetic oligonucleotide
  Target: LAMA2; (+) strand; PAM type: YTN; PAM sequence: TTC
cccgttgaatgatcttgggt

SEQ ID NO: 402378 - DNA, 20 bp, Artificial Sequence
  Description of Artificial Sequence: Synthetic oligonucleotide
  Target: LAMA2; (+) strand; PAM type: YTN; PAM sequence: TTG
aatgatcttgggtccttttc

SEQ ID NO: 402379 - DNA, 20 bp, Artificial Sequence
  Description of Artificial Sequence: Synthetic oligonucleotide
  Target: LAMA2; (+) strand; PAM type: YTN; PAM sequence: CTT
gggtccttttcctttaactc

SEQ ID NO: 402380 - DNA, 20 bp, Artificial Sequence
  Description of Artificial Sequence: Synthetic oligonucleotide
  Target: LAMA2; (+) strand; PAM type: YTN; PAM sequence: TTG
ggtccttttcctttaactcg

SEQ ID NO: 402381 - DNA, 20 bp, Artificial Sequence
  Description of Artificial Sequence: Synthetic oligonucleotide
  Target: LAMA2; (+) strand; PAM type: YTN; PAM sequence: CTT
ttcctttaactcgaagcgat

SEQ ID NO: 402382 - DNA, 20 bp, Artificial Sequence
  Description of Artificial Sequence: Synthetic oligonucleotide
  Target: LAMA2; (+) strand; PAM type: YTN; PAM sequence: TTT
tcctttaactcgaagcgatt

SEQ ID NO: 402383 - DNA, 20 bp, Artificial Sequence
  Description of Artificial Sequence: Synthetic oligonucleotide
  Target: LAMA2; (+) strand; PAM type: YTN; PAM sequence: TTT
cctttaactcgaagcgattt

SEQ ID NO: 402384 - DNA, 20 bp, Artificial Sequence
  Description of Artificial Sequence: Synthetic oligonucleotide
  Target: LAMA2; (+) strand; PAM type: YTN; PAM sequence: TTC
ctttaactcgaagcgatttg

SEQ ID NO: 402385 - DNA, 20 bp, Artificial Sequence
  Description of Artificial Sequence: Synthetic oligonucleotide
  Target: LAMA2; (+) strand; PAM type: YTN; PAM sequence: CTT
taactcgaagcgatttgggg

SEQ ID NO: 402386 - DNA, 20 bp, Artificial Sequence
  Description of Artificial Sequence: Synthetic oligonucleotide
  Target: LAMA2; (+) strand; PAM type: YTN; PAM sequence: TTT
aactcgaagcgatttggggt

SEQ ID NO: 402387 - DNA, 20 bp, Artificial Sequence
  Description of Artificial Sequence: Synthetic oligonucleotide
  Target: LAMA2; (+) strand; PAM type: YTN; PAM sequence: TTA
actcgaagcgatttggggta

SEQ ID NO: 402388 - DNA, 20 bp, Artificial Sequence
  Description of Artificial Sequence: Synthetic oligonucleotide
  Target: LAMA2; (+) strand; PAM type: YTN; PAM sequence: CTC
gaagcgatttggggtaggag

SEQ ID NO: 402389 - DNA, 20 bp, Artificial Sequence
  Description of Artificial Sequence: Synthetic oligonucleotide
  Target: LAMA2; (+) strand; PAM type: YTN; PAM sequence: TTT
ggggtaggaggggttggagt

SEQ ID NO: 402390 - DNA, 20 bp, Artificial Sequence
  Description of Artificial Sequence: Synthetic oligonucleotide
  Target: LAMA2; (+) strand; PAM type: YTN; PAM sequence: TTG
gggtaggaggggttggagtg

SEQ ID NO: 402391 - DNA, 20 bp, Artificial Sequence
  Description of Artificial Sequence: Synthetic oligonucleotide
  Target: LAMA2; (+) strand; PAM type: YTN; PAM sequence: TTG
gagtgggggagaggttagtt

SEQ ID NO: 402392 - DNA, 20 bp, Artificial Sequence
  Description of Artificial Sequence: Synthetic oligonucleotide
  Target: LAMA2; (+) strand; PAM type: YTN; PAM sequence: TTA
gttttgttttgtttgtaaat

SEQ ID NO: 402393 - DNA, 20 bp, Artificial Sequence
  Description of Artificial Sequence: Synthetic oligonucleotide
  Target: LAMA2; (+) strand; PAM type: YTN; PAM sequence: TTT
tgttttgtttgtaaatttca

SEQ ID NO: 402394 - DNA, 20 bp, Artificial Sequence
  Description of Artificial Sequence: Synthetic oligonucleotide
  Target: LAMA2; (+) strand; PAM type: YTN; PAM sequence: TTT
gttttgtttgtaaatttcaa

SEQ ID NO: 402395 - DNA, 20 bp, Artificial Sequence
  Description of Artificial Sequence: Synthetic oligonucleotide
  Target: LAMA2; (+) strand; PAM type: YTN; PAM sequence: TTG
ttttgtttgtaaatttcaaa

SEQ ID NO: 402396 - DNA, 20 bp, Artificial Sequence
  Description of Artificial Sequence: Synthetic oligonucleotide
  Target: LAMA2; (+) strand; PAM type: YTN; PAM sequence: TTT
tgtttgtaaatttcaaaaga

SEQ ID NO: 402397 - DNA, 20 bp, Artificial Sequence
  Description of Artificial Sequence: Synthetic oligonucleotide
  Target: LAMA2; (+) strand; PAM type: YTN; PAM sequence: TTT
gtttgtaaatttcaaaagac

SEQ ID NO: 402398 - DNA, 20 bp, Artificial Sequence
  Description of Artificial Sequence: Synthetic oligonucleotide
  Target: LAMA2; (+) strand; PAM type: YTN; PAM sequence: TTG
tttgtaaatttcaaaagaca

SEQ ID NO: 402399 - DNA, 20 bp, Artificial Sequence
  Description of Artificial Sequence: Synthetic oligonucleotide
  Target: LAMA2; (+) strand; PAM type: YTN; PAM sequence: TTT
gtaaatttcaaaagacattt

SEQ ID NO: 402400 - DNA, 20 bp, Artificial Sequence
  Description of Artificial Sequence: Synthetic oligonucleotide
  Target: LAMA2; (+) strand; PAM type: YTN; PAM sequence: TTG
taaatttcaaaagacatttc

SEQ ID NO: 402401 - DNA, 20 bp, Artificial Sequence
  Description of Artificial Sequence: Synthetic oligonucleotide
  Target: LAMA2; (+) strand; PAM type: YTN; PAM sequence: TTT
caaaagacatttcatgagaa

SEQ ID NO: 402402 - DNA, 20 bp, Artificial Sequence
  Description of Artificial Sequence: Synthetic oligonucleotide
  Target: LAMA2; (+) strand; PAM type: YTN; PAM sequence: TTC
aaaagacatttcatgagaat

SEQ ID NO: 402403 - DNA, 20 bp, Artificial Sequence
  Description of Artificial Sequence: Synthetic oligonucleotide
  Target: LAMA2; (+) strand; PAM type: YTN; PAM sequence: TTT
catgagaatgataatcacca

SEQ ID NO: 402404 - DNA, 20 bp, Artificial Sequence
  Description of Artificial Sequence: Synthetic oligonucleotide
  Target: LAMA2; (+) strand; PAM type: YTN; PAM sequence: TTC
atgagaatgataatcaccac

SEQ ID NO: 402405 - DNA, 20 bp, Artificial Sequence
  Description of Artificial Sequence: Synthetic oligonucleotide
  Target: LAMA2; (+) strand; PAM type: YTN; PAM sequence: CTT
attgttttaaaactgggaat

SEQ ID NO: 402406 - DNA, 20 bp, Artificial Sequence
  Description of Artificial Sequence: Synthetic oligonucleotide
  Target: LAMA2; (+) strand; PAM type: YTN; PAM sequence: TTA
ttgttttaaaactgggaatt

SEQ ID NO: 402407 - DNA, 20 bp, Artificial Sequence
  Description of Artificial Sequence: Synthetic oligonucleotide
  Target: LAMA2; (+) strand; PAM type: YTN; PAM sequence: TTG
ttttaaaactgggaattctg

SEQ ID NO: 402408 - DNA, 20 bp, Artificial Sequence
  Description of Artificial Sequence: Synthetic oligonucleotide
  Target: LAMA2; (+) strand; PAM type: YTN; PAM sequence: TTT
taaaactgggaattctggta

SEQ ID NO: 402409 - DNA, 20 bp, Artificial Sequence
  Description of Artificial Sequence: Synthetic oligonucleotide
  Target: LAMA2; (+) strand; PAM type: YTN; PAM sequence: TTT
aaaactgggaattctggtat

SEQ ID NO: 402410 - DNA, 20 bp, Artificial Sequence
  Description of Artificial Sequence: Synthetic oligonucleotide
  Target: LAMA2; (+) strand; PAM type: YTN; PAM sequence: TTA
aaactgggaattctggtata

SEQ ID NO: 402411 - DNA, 20 bp, Artificial Sequence
  Description of Artificial Sequence: Synthetic oligonucleotide
  Target: LAMA2; (+) strand; PAM type: YTN; PAM sequence: CTG
ggaattctggtatattctat

SEQ ID NO: 402412 - DNA, 20 bp, Artificial Sequence
  Description of Artificial Sequence: Synthetic oligonucleotide
  Target: LAMA2; (+) strand; PAM type: YTN; PAM sequence: TTC
tggtatattctattactatt

SEQ ID NO: 402413 - DNA, 20 bp, Artificial Sequence
  Description of Artificial Sequence: Synthetic oligonucleotide
  Target: LAMA2; (+) strand; PAM type: YTN; PAM sequence: CTG
gtatattctattactatttg

SEQ ID NO: 402414 - DNA, 20 bp, Artificial Sequence
  Description of Artificial Sequence: Synthetic oligonucleotide
  Target: LAMA2; (+) strand; PAM type: YTN; PAM sequence: TTC
tattactatttgcatagaat

SEQ ID NO: 402415 - DNA, 20 bp, Artificial Sequence
  Description of Artificial Sequence: Synthetic oligonucleotide
  Target: LAMA2; (+) strand; PAM type: YTN; PAM sequence: CTA
ttactatttgcatagaataa

SEQ ID NO: 402416 - DNA, 20 bp, Artificial Sequence
  Description of Artificial Sequence: Synthetic oligonucleotide
  Target: LAMA2; (+) strand; PAM type: YTN; PAM sequence: TTA
ctatttgcatagaataatac

SEQ ID NO: 402417 - DNA, 20 bp, Artificial Sequence
  Description of Artificial Sequence: Synthetic oligonucleotide
  Target: LAMA2; (+) strand; PAM type: YTN; PAM sequence: CTA
tttgcatagaataatacaaa

SEQ ID NO: 402418 - DNA, 20 bp, Artificial Sequence
  Description of Artificial Sequence: Synthetic oligonucleotide
  Target: LAMA2; (+) strand; PAM type: YTN; PAM sequence: TTT
gcatagaataatacaaatag

SEQ ID NO: 402419 - DNA, 20 bp, Artificial Sequence
  Description of Artificial Sequence: Synthetic oligonucleotide
  Target: LAMA2; (+) strand; PAM type: YTN; PAM sequence: TTG
catagaataatacaaatagc

SEQ ID NO: 402420 - DNA, 20 bp, Artificial Sequence
  Description of Artificial Sequence: Synthetic oligonucleotide
  Target: LAMA2; (+) strand; PAM type: YTN; PAM sequence: CTT
attattgtatactaaaaagc

SEQ ID NO: 402421 - DNA, 20 bp, Artificial Sequence
  Description of Artificial Sequence: Synthetic oligonucleotide
  Target: LAMA2; (+) strand; PAM type: YTN; PAM sequence: TTA
ttattgtatactaaaaagcc

SEQ ID NO: 402422 - DNA, 20 bp, Artificial Sequence
  Description of Artificial Sequence: Synthetic oligonucleotide
  Target: LAMA2; (+) strand; PAM type: YTN; PAM sequence: TTA
ttgtatactaaaaagccatg

SEQ ID NO: 402423 - DNA, 20 bp, Artificial Sequence
  Description of Artificial Sequence: Synthetic oligonucleotide
  Target: LAMA2; (+) strand; PAM type: YTN; PAM sequence: TTG
tatactaaaaagccatggat

SEQ ID NO: 402424 - DNA, 20 bp, Artificial Sequence
  Description of Artificial Sequence: Synthetic oligonucleotide
  Target: LAMA2; (+) strand; PAM type: YTN; PAM sequence: CTA
aaaagccatggatgagagta

SEQ ID NO: 402425 - DNA, 20 bp, Artificial Sequence
  Description of Artificial Sequence: Synthetic oligonucleotide
  Target: LAMA2; (+) strand; PAM type: YTN; PAM sequence: CTT
cctcttgctaaaaacaaacc

SEQ ID NO: 402426 - DNA, 20 bp, Artificial Sequence
  Description of Artificial Sequence: Synthetic oligonucleotide
  Target: LAMA2; (+) strand; PAM type: YTN; PAM sequence: TTC
ctcttgctaaaaacaaacca

SEQ ID NO: 402427 - DNA, 20 bp, Artificial Sequence
  Description of Artificial Sequence: Synthetic oligonucleotide
  Target: LAMA2; (+) strand; PAM type: YTN; PAM sequence: CTC
ttgctaaaaacaaaccaaaa

SEQ ID NO: 402428 - DNA, 20 bp, Artificial Sequence
  Description of Artificial Sequence: Synthetic oligonucleotide
  Target: LAMA2; (+) strand; PAM type: YTN; PAM sequence: CTT
gctaaaaacaaaccaaaaaa

SEQ ID NO: 402429 - DNA, 20 bp, Artificial Sequence
  Description of Artificial Sequence: Synthetic oligonucleotide
  Target: LAMA2; (+) strand; PAM type: YTN; PAM sequence: TTG
ctaaaaacaaaccaaaaaaa

SEQ ID NO: 402430 - DNA, 20 bp, Artificial Sequence
  Description of Artificial Sequence: Synthetic oligonucleotide
  Target: LAMA2; (+) strand; PAM type: YTN; PAM sequence: CTA
aaaacaaaccaaaaaaaaag

SEQ ID NO: 402431 - DNA, 20 bp, Artificial Sequence
  Description of Artificial Sequence: Synthetic oligonucleotide
  Target: LAMA2; (+) strand; PAM type: YTN; PAM sequence: CTA
atggggttatggcaggaatg

SEQ ID NO: 402432 - DNA, 20 bp, Artificial Sequence
  Description of Artificial Sequence: Synthetic oligonucleotide
  Target: LAMA2; (+) strand; PAM type: YTN; PAM sequence: TTA
tggcaggaatgaaggaacaa

SEQ ID NO: 402433 - DNA, 20 bp, Artificial Sequence
  Description of Artificial Sequence: Synthetic oligonucleotide
  Target: LAMA2; (+) strand; PAM type: YTN; PAM sequence: TTT
tacatatatattcttttgtc

SEQ ID NO: 402434 - DNA, 20 bp, Artificial Sequence
  Description of Artificial Sequence: Synthetic oligonucleotide
  Target: LAMA2; (+) strand; PAM type: YTN; PAM sequence: TTT
acatatatattcttttgtct

SEQ ID NO: 402435 - DNA, 20 bp, Artificial Sequence
  Description of Artificial Sequence: Synthetic oligonucleotide
  Target: LAMA2; (+) strand; PAM type: YTN; PAM sequence: TTA
catatatattcttttgtctg

SEQ ID NO: 402436 - DNA, 20 bp, Artificial Sequence
  Description of Artificial Sequence: Synthetic oligonucleotide
  Target: LAMA2; (+) strand; PAM type: YTN; PAM sequence: TTC
ttttgtctggtataaacaac

SEQ ID NO: 402437 - DNA, 20 bp, Artificial Sequence
  Description of Artificial Sequence: Synthetic oligonucleotide
  Target: LAMA2; (+) strand; PAM type: YTN; PAM sequence: CTT
ttgtctggtataaacaacaa

SEQ ID NO: 402438 - DNA, 20 bp, Artificial Sequence
  Description of Artificial Sequence: Synthetic oligonucleotide
  Target: LAMA2; (+) strand; PAM type: YTN; PAM sequence: TTT
tgtctggtataaacaacaat

SEQ ID NO: 402439 - DNA, 20 bp, Artificial Sequence
  Description of Artificial Sequence: Synthetic oligonucleotide
  Target: LAMA2; (+) strand; PAM type: YTN; PAM sequence: TTT
gtctggtataaacaacaata

SEQ ID NO: 402440 - DNA, 20 bp, Artificial Sequence
  Description of Artificial Sequence: Synthetic oligonucleotide
  Target: LAMA2; (+) strand; PAM type: YTN; PAM sequence: TTG
tctggtataaacaacaataa

SEQ ID NO: 402441 - DNA, 20 bp, Artificial Sequence
  Description of Artificial Sequence: Synthetic oligonucleotide
  Target: LAMA2; (+) strand; PAM type: YTN; PAM sequence: CTG
gtataaacaacaataaaaat

SEQ ID NO: 402442 - DNA, 20 bp, Artificial Sequence
  Description of Artificial Sequence: Synthetic oligonucleotide
  Target: LAMA2; (+) strand; PAM type: YTN; PAM sequence: CTT
tggttatactttttacattt

SEQ ID NO: 402443 - DNA, 20 bp, Artificial Sequence
  Description of Artificial Sequence: Synthetic oligonucleotide
  Target: LAMA2; (+) strand; PAM type: YTN; PAM sequence: TTT
ggttatactttttacattta

SEQ ID NO: 402444 - DNA, 20 bp, Artificial Sequence
  Description of Artificial Sequence: Synthetic oligonucleotide
  Target: LAMA2; (+) strand; PAM type: YTN; PAM sequence: TTG
gttatactttttacatttat

SEQ ID NO: 402445 - DNA, 20 bp, Artificial Sequence
  Description of Artificial Sequence: Synthetic oligonucleotide
  Target: LAMA2; (+) strand; PAM type: YTN; PAM sequence: TTA
tactttttacatttattttt

SEQ ID NO: 402446 - DNA, 20 bp, Artificial Sequence
  Description of Artificial Sequence: Synthetic oligonucleotide
  Target: LAMA2; (+) strand; PAM type: YTN; PAM sequence: CTT
tttacatttattttttgttt

SEQ ID NO: 402447 - DNA, 20 bp, Artificial Sequence
  Description of Artificial Sequence: Synthetic oligonucleotide
  Target: LAMA2; (+) strand; PAM type: YTN; PAM sequence: TTT
ttacatttattttttgtttt

SEQ ID NO: 402448 - DNA, 20 bp, Artificial Sequence
  Description of Artificial Sequence: Synthetic oligonucleotide
  Target: LAMA2; (+) strand; PAM type: YTN; PAM sequence: TTT
tacatttattttttgttttg

SEQ ID NO: 402449 - DNA, 20 bp, Artificial Sequence
  Description of Artificial Sequence: Synthetic oligonucleotide
  Target: LAMA2; (+) strand; PAM type: YTN; PAM sequence: TTT
acatttattttttgttttgg

SEQ ID NO: 402450 - DNA, 20 bp, Artificial Sequence
  Description of Artificial Sequence: Synthetic oligonucleotide
  Target: LAMA2; (+) strand; PAM type: YTN; PAM sequence: TTA
catttattttttgttttgga

SEQ ID NO: 402451 - DNA, 20 bp, Artificial Sequence
  Description of Artificial Sequence: Synthetic oligonucleotide
  Target: LAMA2; (+) strand; PAM type: YTN; PAM sequence: TTT
attttttgttttggagtaga

SEQ ID NO: 402452 - DNA, 20 bp, Artificial Sequence
  Description of Artificial Sequence: Synthetic oligonucleotide
  Target: LAMA2; (+) strand; PAM type: YTN; PAM sequence: TTA
ttttttgttttggagtagat

SEQ ID NO: 402453 - DNA, 20 bp, Artificial Sequence
  Description of Artificial Sequence: Synthetic oligonucleotide
  Target: LAMA2; (+) strand; PAM type: YTN; PAM sequence: TTT
tttgttttggagtagatagg

SEQ ID NO: 402454 - DNA, 20 bp, Artificial Sequence
  Description of Artificial Sequence: Synthetic oligonucleotide
  Target: LAMA2; (+) strand; PAM type: YTN; PAM sequence: TTT
ttgttttggagtagatagga

SEQ ID NO: 402455 - DNA, 20 bp, Artificial Sequence
  Description of Artificial Sequence: Synthetic oligonucleotide
  Target: LAMA2; (+) strand; PAM type: YTN; PAM sequence: TTT
tgttttggagtagataggaa

SEQ ID NO: 402456 - DNA, 20 bp, Artificial Sequence
  Description of Artificial Sequence: Synthetic oligonucleotide
  Target: LAMA2; (+) strand; PAM type: YTN; PAM sequence: TTT
gttttggagtagataggaaa

SEQ ID NO: 402457 - DNA, 20 bp, Artificial Sequence
  Description of Artificial Sequence: Synthetic oligonucleotide
  Target: LAMA2; (+) strand; PAM type: YTN; PAM sequence: TTG
ttttggagtagataggaaat

SEQ ID NO: 402458 - DNA, 20 bp, Artificial Sequence
  Description of Artificial Sequence: Synthetic oligonucleotide
  Target: LAMA2; (+) strand; PAM type: YTN; PAM sequence: TTT
tggagtagataggaaatagc

SEQ ID NO: 402459 - DNA, 20 bp, Artificial Sequence
  Description of Artificial Sequence: Synthetic oligonucleotide
  Target: LAMA2; (+) strand; PAM type: YTN; PAM sequence: TTT
ggagtagataggaaatagct

SEQ ID NO: 402460 - DNA, 20 bp, Artificial Sequence
  Description of Artificial Sequence: Synthetic oligonucleotide
  Target: LAMA2; (+) strand; PAM type: YTN; PAM sequence: TTG
gagtagataggaaatagctg

SEQ ID NO: 402461 - DNA, 20 bp, Artificial Sequence
  Description of Artificial Sequence: Synthetic oligonucleotide
  Target: LAMA2; (+) strand; PAM type: YTN; PAM sequence: CTG
atttgtctcaaaattttgct

SEQ ID NO: 402462 - DNA, 20 bp, Artificial Sequence
  Description of Artificial Sequence: Synthetic oligonucleotide
  Target: LAMA2; (+) strand; PAM type: YTN; PAM sequence: TTT
gtctcaaaattttgctcttt

SEQ ID NO: 402463 - DNA, 20 bp, Artificial Sequence
  Description of Artificial Sequence: Synthetic oligonucleotide
  Target: LAMA2; (+) strand; PAM type: YTN; PAM sequence: TTG
tctcaaaattttgctcttta

SEQ ID NO: 402464 - DNA, 20 bp, Artificial Sequence
  Description of Artificial Sequence: Synthetic oligonucleotide
  Target: LAMA2; (+) strand; PAM type: YTN; PAM sequence: CTC
aaaattttgctctttactta

SEQ ID NO: 402465 - DNA, 20 bp, Artificial Sequence
  Description of Artificial Sequence: Synthetic oligonucleotide
  Target: LAMA2; (+) strand; PAM type: YTN; PAM sequence: TTT
tgctctttacttacccaatt

SEQ ID NO: 402466 - DNA, 20 bp, Artificial Sequence
  Description of Artificial Sequence: Synthetic oligonucleotide
  Target: LAMA2; (+) strand; PAM type: YTN; PAM sequence: TTT
gctctttacttacccaatta

SEQ ID NO: 402467 - DNA, 20 bp, Artificial Sequence
  Description of Artificial Sequence: Synthetic oligonucleotide
  Target: LAMA2; (+) strand; PAM type: YTN; PAM sequence: TTG
ctctttacttacccaattag

SEQ ID NO: 402468 - DNA, 20 bp, Artificial Sequence
  Description of Artificial Sequence: Synthetic oligonucleotide
  Target: LAMA2; (+) strand; PAM type: YTN; PAM sequence: CTC
tttacttacccaattagaag

SEQ ID NO: 402469 - DNA, 20 bp, Artificial Sequence
  Description of Artificial Sequence: Synthetic oligonucleotide
  Target: LAMA2; (+) strand; PAM type: YTN; PAM sequence: CTT
tacttacccaattagaagtt

SEQ ID NO: 402470 - DNA, 20 bp, Artificial Sequence
  Description of Artificial Sequence: Synthetic oligonucleotide
  Target: LAMA2; (+) strand; PAM type: YTN; PAM sequence: TTT
acttacccaattagaagttt

SEQ ID NO: 402471 - DNA, 20 bp, Artificial Sequence
  Description of Artificial Sequence: Synthetic oligonucleotide
  Target: LAMA2; (+) strand; PAM type: YTN; PAM sequence: TTA
cttacccaattagaagttta

SEQ ID NO: 402472 - DNA, 20 bp, Artificial Sequence
  Description of Artificial Sequence: Synthetic oligonucleotide
  Target: LAMA2; (+) strand; PAM type: YTN; PAM sequence: CTT
acccaattagaagtttacta

SEQ ID NO: 402473 - DNA, 20 bp, Artificial Sequence
  Description of Artificial Sequence: Synthetic oligonucleotide
  Target: LAMA2; (+) strand; PAM type: YTN; PAM sequence: TTA
cccaattagaagtttactag

SEQ ID NO: 402474 - DNA, 20 bp, Artificial Sequence
  Description of Artificial Sequence: Synthetic oligonucleotide
  Target: LAMA2; (+) strand; PAM type: YTN; PAM sequence: TTA
gaagtttactaggatagaaa

SEQ ID NO: 402475 - DNA, 20 bp, Artificial Sequence
  Description of Artificial Sequence: Synthetic oligonucleotide
  Target: LAMA2; (+) strand; PAM type: YTN; PAM sequence: TTT
actaggatagaaacagagct

SEQ ID NO: 402476 - DNA, 20 bp, Artificial Sequence
  Description of Artificial Sequence: Synthetic oligonucleotide
  Target: LAMA2; (+) strand; PAM type: YTN; PAM sequence: TTA
ctaggatagaaacagagctt

SEQ ID NO: 402477 - DNA, 20 bp, Artificial Sequence
  Description of Artificial Sequence: Synthetic oligonucleotide
  Target: LAMA2; (+) strand; PAM type: YTN; PAM sequence: CTA
ggatagaaacagagctttct

SEQ ID NO: 402478 - DNA, 20 bp, Artificial Sequence
  Description of Artificial Sequence: Synthetic oligonucleotide
  Target: LAMA2; (+) strand; PAM type: YTN; PAM sequence: CTT
tctagaaggtagcatgctaa

SEQ ID NO: 402479 - DNA, 20 bp, Artificial Sequence
  Description of Artificial Sequence: Synthetic oligonucleotide
  Target: LAMA2; (+) strand; PAM type: YTN; PAM sequence: TTT
ctagaaggtagcatgctaat

SEQ ID NO: 402480 - DNA, 20 bp, Artificial Sequence
  Description of Artificial Sequence: Synthetic oligonucleotide
  Target: LAMA2; (+) strand; PAM type: YTN; PAM sequence: TTC
tagaaggtagcatgctaatg

SEQ ID NO: 402481 - DNA, 20 bp, Artificial Sequence
  Description of Artificial Sequence: Synthetic oligonucleotide
  Target: LAMA2; (+) strand; PAM type: YTN; PAM sequence: CTA
gaaggtagcatgctaatgag

SEQ ID NO: 402482 - DNA, 20 bp, Artificial Sequence
  Description of Artificial Sequence: Synthetic oligonucleotide
  Target: LAMA2; (+) strand; PAM type: YTN; PAM sequence: CTA
atgagccagggcagagttgc

SEQ ID NO: 402483 - DNA, 20 bp, Artificial Sequence
  Description of Artificial Sequence: Synthetic oligonucleotide
  Target: LAMA2; (+) strand; PAM type: YTN; PAM sequence: TTG
ctaagtggcaacgtgaaact

SEQ ID NO: 402484 - DNA, 20 bp, Artificial Sequence
  Description of Artificial Sequence: Synthetic oligonucleotide
  Target: LAMA2; (+) strand; PAM type: YTN; PAM sequence: CTA
agtggcaacgtgaaacttta

SEQ ID NO: 402485 - DNA, 20 bp, Artificial Sequence
  Description of Artificial Sequence: Synthetic oligonucleotide
  Target: LAMA2; (+) strand; PAM type: YTN; PAM sequence: CTT
tagtcaaaggaaggaagtaa

SEQ ID NO: 402486 - DNA, 20 bp, Artificial Sequence
  Description of Artificial Sequence: Synthetic oligonucleotide
  Target: LAMA2; (+) strand; PAM type: YTN; PAM sequence: TTT
agtcaaaggaaggaagtaag

SEQ ID NO: 402487 - DNA, 20 bp, Artificial Sequence
  Description of Artificial Sequence: Synthetic oligonucleotide
  Target: LAMA2; (+) strand; PAM type: YTN; PAM sequence: TTA
gtcaaaggaaggaagtaagg

SEQ ID NO: 402488 - DNA, 20 bp, Artificial Sequence
  Description of Artificial Sequence: Synthetic oligonucleotide
  Target: LAMA2; (+) strand; PAM type: YTN; PAM sequence: TTT
tcttgtttgaacaagaaagg

SEQ ID NO: 402489 - DNA, 20 bp, Artificial Sequence
  Description of Artificial Sequence: Synthetic oligonucleotide
  Target: LAMA2; (+) strand; PAM type: YTN; PAM sequence: TTT
cttgtttgaacaagaaaggc

SEQ ID NO: 402490 - DNA, 20 bp, Artificial Sequence
  Description of Artificial Sequence: Synthetic oligonucleotide
  Target: LAMA2; (+) strand; PAM type: YTN; PAM sequence: TTC
ttgtttgaacaagaaaggct

SEQ ID NO: 402491 - DNA, 20 bp, Artificial Sequence
  Description of Artificial Sequence: Synthetic oligonucleotide
  Target: LAMA2; (+) strand; PAM type: YTN; PAM sequence: CTT
gtttgaacaagaaaggcttg

SEQ ID NO: 402492 - DNA, 20 bp, Artificial Sequence
  Description of Artificial Sequence: Synthetic oligonucleotide
  Target: LAMA2; (+) strand; PAM type: YTN; PAM sequence: TTG
tttgaacaagaaaggcttga

SEQ ID NO: 402493 - DNA, 20 bp, Artificial Sequence
  Description of Artificial Sequence: Synthetic oligonucleotide
  Target: LAMA2; (+) strand; PAM type: YTN; PAM sequence: TTT
gaacaagaaaggcttgaact

SEQ ID NO: 402494 - DNA, 20 bp, Artificial Sequence
  Description of Artificial Sequence: Synthetic oligonucleotide
  Target: LAMA2; (+) strand; PAM type: YTN; PAM sequence: TTG
aacaagaaaggcttgaactc

SEQ ID NO: 402495 - DNA, 20 bp, Artificial Sequence
  Description of Artificial Sequence: Synthetic oligonucleotide
  Target: LAMA2; (+) strand; PAM type: YTN; PAM sequence: CTT
gaactcaaacctttttagat

SEQ ID NO: 402496 - DNA, 20 bp, Artificial Sequence
  Description of Artificial Sequence: Synthetic oligonucleotide
  Target: LAMA2; (+) strand; PAM type: YTN; PAM sequence: TTG
aactcaaacctttttagata

SEQ ID NO: 402497 - DNA, 20 bp, Artificial Sequence
  Description of Artificial Sequence: Synthetic oligonucleotide
  Target: LAMA2; (+) strand; PAM type: YTN; PAM sequence: CTC
aaacctttttagatacctca

SEQ ID NO: 402498 - DNA, 20 bp, Artificial Sequence
  Description of Artificial Sequence: Synthetic oligonucleotide
  Target: LAMA2; (+) strand; PAM type: YTN; PAM sequence: CTT
tttagatacctcagttttcc

SEQ ID NO: 402499 - DNA, 20 bp, Artificial Sequence
  Description of Artificial Sequence: Synthetic oligonucleotide
  Target: LAMA2; (+) strand; PAM type: YTN; PAM sequence: TTT
ttagatacctcagttttcca

SEQ ID NO: 402500 - DNA, 20 bp, Artificial Sequence
  Description of Artificial Sequence: Synthetic oligonucleotide
  Target: LAMA2; (+) strand; PAM type: YTN; PAM sequence: TTT
tagatacctcagttttccat

SEQ ID NO: 402501 - DNA, 20 bp, Artificial Sequence
  Description of Artificial Sequence: Synthetic oligonucleotide
  Target: LAMA2; (+) strand; PAM type: YTN; PAM sequence: TTT
agatacctcagttttccatg

SEQ ID NO: 402502 - DNA, 20 bp, Artificial Sequence
  Description of Artificial Sequence: Synthetic oligonucleotide
  Target: LAMA2; (+) strand; PAM type: YTN; PAM sequence: TTA
gatacctcagttttccatgt

SEQ ID NO: 402503 - DNA, 20 bp, Artificial Sequence
  Description of Artificial Sequence: Synthetic oligonucleotide
  Target: LAMA2; (+) strand; PAM type: YTN; PAM sequence: CTC
agttttccatgtcaaaaatt

SEQ ID NO: 402504 - DNA, 20 bp, Artificial Sequence
  Description of Artificial Sequence: Synthetic oligonucleotide
  Target: LAMA2; (+) strand; PAM type: YTN; PAM sequence: TTT
tccatgtcaaaaattctgtt

SEQ ID NO: 402505 - DNA, 20 bp, Artificial Sequence
  Description of Artificial Sequence: Synthetic oligonucleotide
  Target: LAMA2; (+) strand; PAM type: YTN; PAM sequence: TTT
ccatgtcaaaaattctgttt

SEQ ID NO: 402506 - DNA, 20 bp, Artificial Sequence
  Description of Artificial Sequence: Synthetic oligonucleotide
  Target: LAMA2; (+) strand; PAM type: YTN; PAM sequence: TTC
catgtcaaaaattctgtttt

SEQ ID NO: 402507 - DNA, 20 bp, Artificial Sequence
  Description of Artificial Sequence: Synthetic oligonucleotide
  Target: LAMA2; (+) strand; PAM type: YTN; PAM sequence: TTC
tgttttttgaacaactttgg

SEQ ID NO: 402508 - DNA, 20 bp, Artificial Sequence
  Description of Artificial Sequence: Synthetic oligonucleotide
  Target: LAMA2; (+) strand; PAM type: YTN; PAM sequence: CTG
ttttttgaacaactttggaa

SEQ ID NO: 402509 - DNA, 20 bp, Artificial Sequence
  Description of Artificial Sequence: Synthetic oligonucleotide
  Target: LAMA2; (+) strand; PAM type: YTN; PAM sequence: TTT
tttgaacaactttggaacta

SEQ ID NO: 402510 - DNA, 20 bp, Artificial Sequence
  Description of Artificial Sequence: Synthetic oligonucleotide
  Target: LAMA2; (+) strand; PAM type: YTN; PAM sequence: TTT
ttgaacaactttggaactag

SEQ ID NO: 402511 - DNA, 20 bp, Artificial Sequence
  Description of Artificial Sequence: Synthetic oligonucleotide
  Target: LAMA2; (+) strand; PAM type: YTN; PAM sequence: TTT
tgaacaactttggaactagg

SEQ ID NO: 402512 - DNA, 20 bp, Artificial Sequence
  Description of Artificial Sequence: Synthetic oligonucleotide
  Target: LAMA2; (+) strand; PAM type: YTN; PAM sequence: TTT
gaacaactttggaactagga

SEQ ID NO: 402513 - DNA, 20 bp, Artificial Sequence
  Description of Artificial Sequence: Synthetic oligonucleotide
  Target: LAMA2; (+) strand; PAM type: YTN; PAM sequence: TTG
aacaactttggaactaggat

SEQ ID NO: 402514 - DNA, 20 bp, Artificial Sequence
  Description of Artificial Sequence: Synthetic oligonucleotide
  Target: LAMA2; (+) strand; PAM type: YTN; PAM sequence: CTT
tggaactaggatgatcagaa

SEQ ID NO: 402515 - DNA, 20 bp, Artificial Sequence
  Description of Artificial Sequence: Synthetic oligonucleotide
  Target: LAMA2; (+) strand; PAM type: YTN; PAM sequence: TTT
ggaactaggatgatcagaaa

SEQ ID NO: 402516 - DNA, 20 bp, Artificial Sequence
  Description of Artificial Sequence: Synthetic oligonucleotide
  Target: LAMA2; (+) strand; PAM type: YTN; PAM sequence: TTG
gaactaggatgatcagaaaa

SEQ ID NO: 402517 - DNA, 20 bp, Artificial Sequence
  Description of Artificial Sequence: Synthetic oligonucleotide
  Target: LAMA2; (+) strand; PAM type: YTN; PAM sequence: CTA
ggatgatcagaaaagccctt

SEQ ID NO: 402518 - DNA, 20 bp, Artificial Sequence
  Description of Artificial Sequence: Synthetic oligonucleotide
  Target: LAMA2; (+) strand; PAM type: YTN; PAM sequence: CTT
tcttagttcatcagtttata

SEQ ID NO: 402519 - DNA, 20 bp, Artificial Sequence
  Description of Artificial Sequence: Synthetic oligonucleotide
  Target: LAMA2; (+) strand; PAM type: YTN; PAM sequence: TTT
cttagttcatcagtttatat

SEQ ID NO: 402520 - DNA, 20 bp, Artificial Sequence
  Description of Artificial Sequence: Synthetic oligonucleotide
  Target: LAMA2; (+) strand; PAM type: YTN; PAM sequence: TTC
ttagttcatcagtttatatt

SEQ ID NO: 402521 - DNA, 20 bp, Artificial Sequence
  Description of Artificial Sequence: Synthetic oligonucleotide
  Target: LAMA2; (+) strand; PAM type: YTN; PAM sequence: CTT
agttcatcagtttatatttt

SEQ ID NO: 402522 - DNA, 20 bp, Artificial Sequence
  Description of Artificial Sequence: Synthetic oligonucleotide
  Target: LAMA2; (+) strand; PAM type: YTN; PAM sequence: TTA
gttcatcagtttatattttt

SEQ ID NO: 402523 - DNA, 20 bp, Artificial Sequence
  Description of Artificial Sequence: Synthetic oligonucleotide
  Target: LAMA2; (+) strand; PAM type: YTN; PAM sequence: TTC
atcagtttatatttttagta

SEQ ID NO: 402524 - DNA, 20 bp, Artificial Sequence
  Description of Artificial Sequence: Synthetic oligonucleotide
  Target: LAMA2; (+) strand; PAM type: YTN; PAM sequence: TTT
atatttttagtagtatttaa

SEQ ID NO: 402525 - DNA, 20 bp, Artificial Sequence
  Description of Artificial Sequence: Synthetic oligonucleotide
  Target: LAMA2; (+) strand; PAM type: YTN; PAM sequence: TTA
tatttttagtagtatttaag

SEQ ID NO: 402526 - DNA, 20 bp, Artificial Sequence
  Description of Artificial Sequence: Synthetic oligonucleotide
  Target: LAMA2; (+) strand; PAM type: YTN; PAM sequence: TTT
ttagtagtatttaagaatac

SEQ ID NO: 402527 - DNA, 20 bp, Artificial Sequence
  Description of Artificial Sequence: Synthetic oligonucleotide
  Target: LAMA2; (+) strand; PAM type: YTN; PAM sequence: TTT
tagtagtatttaagaatacg

SEQ ID NO: 402528 - DNA, 20 bp, Artificial Sequence
  Description of Artificial Sequence: Synthetic oligonucleotide
  Target: LAMA2; (+) strand; PAM type: YTN; PAM sequence: TTT
agtagtatttaagaatacga

SEQ ID NO: 402529 - DNA, 20 bp, Artificial Sequence
  Description of Artificial Sequence: Synthetic oligonucleotide
  Target: LAMA2; (+) strand; PAM type: YTN; PAM sequence: TTA
gtagtatttaagaatacgat

SEQ ID NO: 402530 - DNA, 20 bp, Artificial Sequence
  Description of Artificial Sequence: Synthetic oligonucleotide
  Target: LAMA2; (+) strand; PAM type: YTN; PAM sequence: TTT
aagaatacgatgctccagta

SEQ ID NO: 402531 - DNA, 20 bp, Artificial Sequence
  Description of Artificial Sequence: Synthetic oligonucleotide
  Target: LAMA2; (+) strand; PAM type: YTN; PAM sequence: TTA
agaatacgatgctccagtaa

SEQ ID NO: 402532 - DNA, 20 bp, Artificial Sequence
  Description of Artificial Sequence: Synthetic oligonucleotide
  Target: LAMA2; (+) strand; PAM type: YTN; PAM sequence: CTC
cagtaacagcatattctttt

SEQ ID NO: 402533 - DNA, 20 bp, Artificial Sequence
  Description of Artificial Sequence: Synthetic oligonucleotide
  Target: LAMA2; (+) strand; PAM type: YTN; PAM sequence: TTC
tttttcctccttattcacat

SEQ ID NO: 402534 - DNA, 20 bp, Artificial Sequence
  Description of Artificial Sequence: Synthetic oligonucleotide
  Target: LAMA2; (+) strand; PAM type: YTN; PAM sequence: CTT
tttcctccttattcacatct

SEQ ID NO: 402535 - DNA, 20 bp, Artificial Sequence
  Description of Artificial Sequence: Synthetic oligonucleotide
  Target: LAMA2; (+) strand; PAM type: YTN; PAM sequence: TTT
ttcctccttattcacatcta

SEQ ID NO: 402536 - DNA, 20 bp, Artificial Sequence
  Description of Artificial Sequence: Synthetic oligonucleotide
  Target: LAMA2; (+) strand; PAM type: YTN; PAM sequence: TTT
tcctccttattcacatctaa

SEQ ID NO: 402537 - DNA, 20 bp, Artificial Sequence
  Description of Artificial Sequence: Synthetic oligonucleotide
  Target: LAMA2; (+) strand; PAM type: YTN; PAM sequence: TTT
cctccttattcacatctaac

SEQ ID NO: 402538 - DNA, 20 bp, Artificial Sequence
  Description of Artificial Sequence: Synthetic oligonucleotide
  Target: LAMA2; (+) strand; PAM type: YTN; PAM sequence: TTC
ctccttattcacatctaaca

SEQ ID NO: 402539 - DNA, 20 bp, Artificial Sequence
  Description of Artificial Sequence: Synthetic oligonucleotide
  Target: LAMA2; (+) strand; PAM type: YTN; PAM sequence: CTC
cttattcacatctaacactt

SEQ ID NO: 402540 - DNA, 20 bp, Artificial Sequence
  Description of Artificial Sequence: Synthetic oligonucleotide
  Target: LAMA2; (+) strand; PAM type: YTN; PAM sequence: CTT
attcacatctaacacttcta

SEQ ID NO: 402541 - DNA, 20 bp, Artificial Sequence
  Description of Artificial Sequence: Synthetic oligonucleotide
  Target: LAMA2; (+) strand; PAM type: YTN; PAM sequence: TTA
ttcacatctaacacttctaa

SEQ ID NO: 402542 - DNA, 20 bp, Artificial Sequence
  Description of Artificial Sequence: Synthetic oligonucleotide
  Target: LAMA2; (+) strand; PAM type: YTN; PAM sequence: TTC
acatctaacacttctaaaca

SEQ ID NO: 402543 - DNA, 20 bp, Artificial Sequence
  Description of Artificial Sequence: Synthetic oligonucleotide
  Target: LAMA2; (+) strand; PAM type: YTN; PAM sequence: CTA
acacttctaaacaactccaa

SEQ ID NO: 402544 - DNA, 20 bp, Artificial Sequence
  Description of Artificial Sequence: Synthetic oligonucleotide
  Target: LAMA2; (+) strand; PAM type: YTN; PAM sequence: CTT
ctaaacaactccaagacagt

SEQ ID NO: 402545 - DNA, 20 bp, Artificial Sequence
  Description of Artificial Sequence: Synthetic oligonucleotide
  Target: LAMA2; (+) strand; PAM type: YTN; PAM sequence: TTC
taaacaactccaagacagta

SEQ ID NO: 402546 - DNA, 20 bp, Artificial Sequence
  Description of Artificial Sequence: Synthetic oligonucleotide
  Target: LAMA2; (+) strand; PAM type: YTN; PAM sequence: CTA
aacaactccaagacagtaag

SEQ ID NO: 402547 - DNA, 20 bp, Artificial Sequence
  Description of Artificial Sequence: Synthetic oligonucleotide
  Target: LAMA2; (+) strand; PAM type: YTN; PAM sequence: CTC
caagacagtaagttcaaggt

SEQ ID NO: 402548 - DNA, 20 bp, Artificial Sequence
  Description of Artificial Sequence: Synthetic oligonucleotide
  Target: LAMA2; (+) strand; PAM type: YTN; PAM sequence: TTC
aaggtgaacattgaaaagga

SEQ ID NO: 402549 - DNA, 20 bp, Artificial Sequence
  Description of Artificial Sequence: Synthetic oligonucleotide
  Target: LAMA2; (+) strand; PAM type: YTN; PAM sequence: TTG
aaaaggaattcacgactgac

SEQ ID NO: 402550 - DNA, 20 bp, Artificial Sequence
  Description of Artificial Sequence: Synthetic oligonucleotide
  Target: LAMA2; (+) strand; PAM type: YTN; PAM sequence: TTC
acgactgactgaaaaaaaac

SEQ ID NO: 402551 - DNA, 20 bp, Artificial Sequence
  Description of Artificial Sequence: Synthetic oligonucleotide
  Target: LAMA2; (+) strand; PAM type: YTN; PAM sequence: CTG
actgaaaaaaaacctagaaa

SEQ ID NO: 402552 - DNA, 20 bp, Artificial Sequence
  Description of Artificial Sequence: Synthetic oligonucleotide
  Target: LAMA2; (+) strand; PAM type: YTN; PAM sequence: CTG
aaaaaaaacctagaaaacaa

SEQ ID NO: 402553 - DNA, 20 bp, Artificial Sequence
  Description of Artificial Sequence: Synthetic oligonucleotide
  Target: LAMA2; (+) strand; PAM type: YTN; PAM sequence: CTA
gaaaacaacaaaaagattag

SEQ ID NO: 402554 - DNA, 20 bp, Artificial Sequence
  Description of Artificial Sequence: Synthetic oligonucleotide
  Target: LAMA2; (+) strand; PAM type: YTN; PAM sequence: TTA
gtgaagatgatgttacataa

SEQ ID NO: 402555 - DNA, 20 bp, Artificial Sequence
  Description of Artificial Sequence: Synthetic oligonucleotide
  Target: LAMA2; (+) strand; PAM type: YTN; PAM sequence: TTA
cataagatcagagtagtaaa

SEQ ID NO: 402556 - DNA, 20 bp, Artificial Sequence
  Description of Artificial Sequence: Synthetic oligonucleotide
  Target: LAMA2; (+) strand; PAM type: YTN; PAM sequence: CTG
agaaaacatatattcagcta

SEQ ID NO: 402557 - DNA, 20 bp, Artificial Sequence
  Description of Artificial Sequence: Synthetic oligonucleotide
  Target: LAMA2; (+) strand; PAM type: YTN; PAM sequence: TTC
agctagaatatgaaagccag

SEQ ID NO: 402558 - DNA, 20 bp, Artificial Sequence
  Description of Artificial Sequence: Synthetic oligonucleotide
  Target: LAMA2; (+) strand; PAM type: YTN; PAM sequence: CTA
gaatatgaaagccaggcagt

SEQ ID NO: 402559 - DNA, 20 bp, Artificial Sequence
  Description of Artificial Sequence: Synthetic oligonucleotide
  Target: LAMA2; (+) strand; PAM type: YTN; PAM sequence: TTG
acatgtgatcattatgtatg

SEQ ID NO: 402560 - DNA, 20 bp, Artificial Sequence
  Description of Artificial Sequence: Synthetic oligonucleotide
  Target: LAMA2; (+) strand; PAM type: YTN; PAM sequence: TTA
tgtatgtaaagcacaagatt

SEQ ID NO: 402561 - DNA, 20 bp, Artificial Sequence
  Description of Artificial Sequence: Synthetic oligonucleotide
  Target: LAMA2; (+) strand; PAM type: YTN; PAM sequence: TTA
aaagaaaccagatgttactt

SEQ ID NO: 402562 - DNA, 20 bp, Artificial Sequence
  Description of Artificial Sequence: Synthetic oligonucleotide
  Target: LAMA2; (+) strand; PAM type: YTN; PAM sequence: TTA
cttcaaggtttgaagtttta

SEQ ID NO: 402563 - DNA, 20 bp, Artificial Sequence
  Description of Artificial Sequence: Synthetic oligonucleotide
  Target: LAMA2; (+) strand; PAM type: YTN; PAM sequence: CTT
caaggtttgaagttttatgt

SEQ ID NO: 402564 - DNA, 20 bp, Artificial Sequence
  Description of Artificial Sequence: Synthetic oligonucleotide
  Target: LAMA2; (+) strand; PAM type: YTN; PAM sequence: TTC
aaggtttgaagttttatgta

SEQ ID NO: 402565 - DNA, 20 bp, Artificial Sequence
  Description of Artificial Sequence: Synthetic oligonucleotide
  Target: LAMA2; (+) strand; PAM type: YTN; PAM sequence: TTT
gaagttttatgtaagattta

SEQ ID NO: 402566 - DNA, 20 bp, Artificial Sequence
  Description of Artificial Sequence: Synthetic oligonucleotide
  Target: LAMA2; (+) strand; PAM type: YTN; PAM sequence: TTG
aagttttatgtaagatttag

SEQ ID NO: 402567 - DNA, 20 bp, Artificial Sequence
  Description of Artificial Sequence: Synthetic oligonucleotide
  Target: LAMA2; (+) strand; PAM type: YTN; PAM sequence: TTT
tatgtaagatttagccaaca

SEQ ID NO: 402568 - DNA, 20 bp, Artificial Sequence
  Description of Artificial Sequence: Synthetic oligonucleotide
  Target: LAMA2; (+) strand; PAM type: YTN; PAM sequence: TTT
atgtaagatttagccaacat

SEQ ID NO: 402569 - DNA, 20 bp, Artificial Sequence
  Description of Artificial Sequence: Synthetic oligonucleotide
  Target: LAMA2; (+) strand; PAM type: YTN; PAM sequence: TTA
tgtaagatttagccaacatg

SEQ ID NO: 402570 - DNA, 20 bp, Artificial Sequence
  Description of Artificial Sequence: Synthetic oligonucleotide
  Target: LAMA2; (+) strand; PAM type: YTN; PAM sequence: TTT
agccaacatggaaaaagcct

SEQ ID NO: 402571 - DNA, 20 bp, Artificial Sequence
  Description of Artificial Sequence: Synthetic oligonucleotide
  Target: LAMA2; (+) strand; PAM type: YTN; PAM sequence: TTA
gccaacatggaaaaagcctc

SEQ ID NO: 402572 - DNA, 20 bp, Artificial Sequence
  Description of Artificial Sequence: Synthetic oligonucleotide
  Target: LAMA2; (+) strand; PAM type: YTN; PAM sequence: CTC
tactatgttcagtgttactt

SEQ ID NO: 402573 - DNA, 20 bp, Artificial Sequence
  Description of Artificial Sequence: Synthetic oligonucleotide
  Target: LAMA2; (+) strand; PAM type: YTN; PAM sequence: CTA
ctatgttcagtgttactttc

SEQ ID NO: 402574 - DNA, 20 bp, Artificial Sequence
  Description of Artificial Sequence: Synthetic oligonucleotide
  Target: LAMA2; (+) strand; PAM type: YTN; PAM sequence: CTA
tgttcagtgttactttccgt

SEQ ID NO: 402575 - DNA, 20 bp, Artificial Sequence
  Description of Artificial Sequence: Synthetic oligonucleotide
  Target: LAMA2; (+) strand; PAM type: YTN; PAM sequence: TTC
agtgttactttccgtaaggt

SEQ ID NO: 402576 - DNA, 20 bp, Artificial Sequence
  Description of Artificial Sequence: Synthetic oligonucleotide
  Target: LAMA2; (+) strand; PAM type: YTN; PAM sequence: TTA
ctttccgtaaggtacacaaa

SEQ ID NO: 402577 - DNA, 20 bp, Artificial Sequence
  Description of Artificial Sequence: Synthetic oligonucleotide
  Target: LAMA2; (+) strand; PAM type: YTN; PAM sequence: CTT
tccgtaaggtacacaaagac

SEQ ID NO: 402578 - DNA, 20 bp, Artificial Sequence
  Description of Artificial Sequence: Synthetic oligonucleotide
  Target: LAMA2; (+) strand; PAM type: YTN; PAM sequence: TTT
ccgtaaggtacacaaagacg

SEQ ID NO: 402579 - DNA, 20 bp, Artificial Sequence
  Description of Artificial Sequence: Synthetic oligonucleotide
  Target: LAMA2; (+) strand; PAM type: YTN; PAM sequence: TTC
cgtaaggtacacaaagacga

SEQ ID NO: 402580 - DNA, 20 bp, Artificial Sequence
  Description of Artificial Sequence: Synthetic oligonucleotide
  Target: LAMA2; (+) strand; PAM type: YTN; PAM sequence: TTC
tttcactcacaaagtttata

SEQ ID NO: 402581 - DNA, 20 bp, Artificial Sequence
  Description of Artificial Sequence: Synthetic oligonucleotide
  Target: LAMA2; (+) strand; PAM type: YTN; PAM sequence: CTT
tcactcacaaagtttataaa

SEQ ID NO: 402582 - DNA, 20 bp, Artificial Sequence
  Description of Artificial Sequence: Synthetic oligonucleotide
  Target: LAMA2; (+) strand; PAM type: YTN; PAM sequence: TTT
cactcacaaagtttataaaa

SEQ ID NO: 402583 - DNA, 20 bp, Artificial Sequence
  Description of Artificial Sequence: Synthetic oligonucleotide
  Target: LAMA2; (+) strand; PAM type: YTN; PAM sequence: TTC
actcacaaagtttataaaat

SEQ ID NO: 402584 - DNA, 20 bp, Artificial Sequence
  Description of Artificial Sequence: Synthetic oligonucleotide
  Target: LAMA2; (+) strand; PAM type: YTN; PAM sequence: CTC
acaaagtttataaaatagta

SEQ ID NO: 402585 - DNA, 20 bp, Artificial Sequence
  Description of Artificial Sequence: Synthetic oligonucleotide
  Target: LAMA2; (+) strand; PAM type: YTN; PAM sequence: TTT
ataaaatagtagggaaaata

SEQ ID NO: 402586 - DNA, 20 bp, Artificial Sequence
  Description of Artificial Sequence: Synthetic oligonucleotide
  Target: LAMA2; (+) strand; PAM type: YTN; PAM sequence: TTA
taaaatagtagggaaaataa

SEQ ID NO: 402587 - DNA, 20 bp, Artificial Sequence
  Description of Artificial Sequence: Synthetic oligonucleotide
  Target: LAMA2; (+) strand; PAM type: YTN; PAM sequence: CTT
gtcacacaatgcagaatgtt

SEQ ID NO: 402588 - DNA, 20 bp, Artificial Sequence
  Description of Artificial Sequence: Synthetic oligonucleotide
  Target: LAMA2; (+) strand; PAM type: YTN; PAM sequence: TTG
tcacacaatgcagaatgtta

SEQ ID NO: 402589 - DNA, 20 bp, Artificial Sequence
  Description of Artificial Sequence: Synthetic oligonucleotide
  Target: LAMA2; (+) strand; PAM type: YTN; PAM sequence: TTA
tgccacattatagaagccgt

SEQ ID NO: 402590 - DNA, 20 bp, Artificial Sequence
  Description of Artificial Sequence: Synthetic oligonucleotide
  Target: LAMA2; (+) strand; PAM type: YTN; PAM sequence: TTA
tagaagccgtgagaagtgac

SEQ ID NO: 402591 - DNA, 20 bp, Artificial Sequence
  Description of Artificial Sequence: Synthetic oligonucleotide
  Target: LAMA2; (+) strand; PAM type: YTN; PAM sequence: TTC
tagaaagaacaatcacctct

SEQ ID NO: 402592 - DNA, 20 bp, Artificial Sequence
  Description of Artificial Sequence: Synthetic oligonucleotide
  Target: LAMA2; (+) strand; PAM type: YTN; PAM sequence: CTA
gaaagaacaatcacctctag

SEQ ID NO: 402593 - DNA, 20 bp, Artificial Sequence
  Description of Artificial Sequence: Synthetic oligonucleotide
  Target: LAMA2; (+) strand; PAM type: YTN; PAM sequence: CTC
tagtagggcctgaagatttc

SEQ ID NO: 402594 - DNA, 20 bp, Artificial Sequence
  Description of Artificial Sequence: Synthetic oligonucleotide
  Target: LAMA2; (+) strand; PAM type: YTN; PAM sequence: CTA
gtagggcctgaagatttcct

SEQ ID NO: 402595 - DNA, 20 bp, Artificial Sequence
  Description of Artificial Sequence: Synthetic oligonucleotide
  Target: LAMA2; (+) strand; PAM type: YTN; PAM sequence: CTG
aagatttcctgaagggaagg

SEQ ID NO: 402596 - DNA, 20 bp, Artificial Sequence
  Description of Artificial Sequence: Synthetic oligonucleotide
  Target: LAMA2; (+) strand; PAM type: YTN; PAM sequence: TTT
cctgaagggaaggatttgag

SEQ ID NO: 402597 - DNA, 20 bp, Artificial Sequence
  Description of Artificial Sequence: Synthetic oligonucleotide
  Target: LAMA2; (+) strand; PAM type: YTN; PAM sequence: TTC
ctgaagggaaggatttgagc

SEQ ID NO: 402598 - DNA, 20 bp, Artificial Sequence
  Description of Artificial Sequence: Synthetic oligonucleotide
  Target: LAMA2; (+) strand; PAM type: YTN; PAM sequence: CTG
aagggaaggatttgagccag

SEQ ID NO: 402599 - DNA, 20 bp, Artificial Sequence
  Description of Artificial Sequence: Synthetic oligonucleotide
  Target: LAMA2; (+) strand; PAM type: YTN; PAM sequence: TTT
gagccaggcattgaggtggg

SEQ ID NO: 402600 - DNA, 20 bp, Artificial Sequence
  Description of Artificial Sequence: Synthetic oligonucleotide
  Target: LAMA2; (+) strand; PAM type: YTN; PAM sequence: TTG
agccaggcattgaggtggga

SEQ ID NO: 402601 - DNA, 20 bp, Artificial Sequence
  Description of Artificial Sequence: Synthetic oligonucleotide
  Target: LAMA2; (+) strand; PAM type: YTN; PAM sequence: TTG
aggtgggatagtgctgggga

SEQ ID NO: 402602 - DNA, 20 bp, Artificial Sequence
  Description of Artificial Sequence: Synthetic oligonucleotide
  Target: LAMA2; (+) strand; PAM type: YTN; PAM sequence: CTG
gggagttgggggtggagtca

SEQ ID NO: 402603 - DNA, 20 bp, Artificial Sequence
  Description of Artificial Sequence: Synthetic oligonucleotide
  Target: LAMA2; (+) strand; PAM type: YTN; PAM sequence: TTG
ggggtggagtcaggtaacag

SEQ ID NO: 402604 - DNA, 20 bp, Artificial Sequence
  Description of Artificial Sequence: Synthetic oligonucleotide
  Target: LAMA2; (+) strand; PAM type: YTN; PAM sequence: TTC
tgagaagagggaatgactta

SEQ ID NO: 402605 - DNA, 20 bp, Artificial Sequence
  Description of Artificial Sequence: Synthetic oligonucleotide
  Target: LAMA2; (+) strand; PAM type: YTN; PAM sequence: CTG
agaagagggaatgacttaaa

SEQ ID NO: 402606 - DNA, 20 bp, Artificial Sequence
  Description of Artificial Sequence: Synthetic oligonucleotide
  Target: LAMA2; (+) strand; PAM type: YTN; PAM sequence: CTT
aaaccaaggcagtgggagaa

SEQ ID NO: 402607 - DNA, 20 bp, Artificial Sequence
  Description of Artificial Sequence: Synthetic oligonucleotide
  Target: LAMA2; (+) strand; PAM type: YTN; PAM sequence: TTA
aaccaaggcagtgggagaag

SEQ ID NO: 402608 - DNA, 20 bp, Artificial Sequence
  Description of Artificial Sequence: Synthetic oligonucleotide
  Target: LAMA2; (+) strand; PAM type: YTN; PAM sequence: TTT
tagggtccatttaggaaaaa

SEQ ID NO: 402609 - DNA, 20 bp, Artificial Sequence
  Description of Artificial Sequence: Synthetic oligonucleotide
  Target: LAMA2; (+) strand; PAM type: YTN; PAM sequence: TTT
agggtccatttaggaaaaag

SEQ ID NO: 402610 - DNA, 20 bp, Artificial Sequence
  Description of Artificial Sequence: Synthetic oligonucleotide
  Target: LAMA2; (+) strand; PAM type: YTN; PAM sequence: TTA
gggtccatttaggaaaaaga

SEQ ID NO: 402611 - DNA, 20 bp, Artificial Sequence
  Description of Artificial Sequence: Synthetic oligonucleotide
  Target: LAMA2; (+) strand; PAM type: YTN; PAM sequence: TTT
aggaaaaagaagtccagttt

SEQ ID NO: 402612 - DNA, 20 bp, Artificial Sequence
  Description of Artificial Sequence: Synthetic oligonucleotide
  Target: LAMA2; (+) strand; PAM type: YTN; PAM sequence: TTA
ggaaaaagaagtccagtttg

SEQ ID NO: 402613 - DNA, 20 bp, Artificial Sequence
  Description of Artificial Sequence: Synthetic oligonucleotide
  Target: LAMA2; (+) strand; PAM type: YTN; PAM sequence: TTT
gcccagagtaattgataaag

SEQ ID NO: 402614 - DNA, 20 bp, Artificial Sequence
  Description of Artificial Sequence: Synthetic oligonucleotide
  Target: LAMA2; (+) strand; PAM type: YTN; PAM sequence: TTG
cccagagtaattgataaagg

SEQ ID NO: 402615 - DNA, 20 bp, Artificial Sequence
  Description of Artificial Sequence: Synthetic oligonucleotide
  Target: LAMA2; (+) strand; PAM type: YTN; PAM sequence: TTG
ataaaggaaacacataacca

SEQ ID NO: 402616 - DNA, 20 bp, Artificial Sequence
  Description of Artificial Sequence: Synthetic oligonucleotide
  Target: LAMA2; (+) strand; PAM type: YTN; PAM sequence: CTC
gtcaggccttcaataatcag

SEQ ID NO: 402617 - DNA, 20 bp, Artificial Sequence
  Description of Artificial Sequence: Synthetic oligonucleotide
  Target: LAMA2; (+) strand; PAM type: YTN; PAM sequence: CTT
caataatcagttaagcaatt

SEQ ID NO: 402618 - DNA, 20 bp, Artificial Sequence
  Description of Artificial Sequence: Synthetic oligonucleotide
  Target: LAMA2; (+) strand; PAM type: YTN; PAM sequence: TTC
aataatcagttaagcaattt

SEQ ID NO: 402619 - DNA, 20 bp, Artificial Sequence
  Description of Artificial Sequence: Synthetic oligonucleotide
  Target: LAMA2; (+) strand; PAM type: YTN; PAM sequence: TTA
agcaatttcatttaacaaca

SEQ ID NO: 402620 - DNA, 20 bp, Artificial Sequence
  Description of Artificial Sequence: Synthetic oligonucleotide
  Target: LAMA2; (+) strand; PAM type: YTN; PAM sequence: TTT
catttaacaacactggtact

SEQ ID NO: 402621 - DNA, 20 bp, Artificial Sequence
  Description of Artificial Sequence: Synthetic oligonucleotide
  Target: LAMA2; (+) strand; PAM type: YTN; PAM sequence: TTC
atttaacaacactggtactt

SEQ ID NO: 402622 - DNA, 20 bp, Artificial Sequence
  Description of Artificial Sequence: Synthetic oligonucleotide
  Target: LAMA2; (+) strand; PAM type: YTN; PAM sequence: TTT
aacaacactggtacttggga

SEQ ID NO: 402623 - DNA, 20 bp, Artificial Sequence
  Description of Artificial Sequence: Synthetic oligonucleotide
  Target: LAMA2; (+) strand; PAM type: YTN; PAM sequence: TTA
acaacactggtacttgggat

SEQ ID NO: 402624 - DNA, 20 bp, Artificial Sequence
  Description of Artificial Sequence: Synthetic oligonucleotide
  Target: LAMA2; (+) strand; PAM type: YTN; PAM sequence: CTG
gtacttgggataagcctcac

SEQ ID NO: 402625 - DNA, 20 bp, Artificial Sequence
  Description of Artificial Sequence: Synthetic oligonucleotide
  Target: LAMA2; (+) strand; PAM type: YTN; PAM sequence: CTT
gggataagcctcactggtta

SEQ ID NO: 402626 - DNA, 20 bp, Artificial Sequence
  Description of Artificial Sequence: Synthetic oligonucleotide
  Target: LAMA2; (+) strand; PAM type: YTN; PAM sequence: TTG
ggataagcctcactggttag

SEQ ID NO: 402627 - DNA, 20 bp, Artificial Sequence
  Description of Artificial Sequence: Synthetic oligonucleotide
  Target: LAMA2; (+) strand; PAM type: YTN; PAM sequence: CTC
actggttaggataagctgaa

SEQ ID NO: 402628 - DNA, 20 bp, Artificial Sequence
  Description of Artificial Sequence: Synthetic oligonucleotide
  Target: LAMA2; (+) strand; PAM type: YTN; PAM sequence: CTG
gttaggataagctgaaagct

SEQ ID NO: 402629 - DNA, 20 bp, Artificial Sequence
  Description of Artificial Sequence: Synthetic oligonucleotide
  Target: LAMA2; (+) strand; PAM type: YTN; PAM sequence: TTA
ggataagctgaaagctttga

SEQ ID NO: 402630 - DNA, 20 bp, Artificial Sequence
  Description of Artificial Sequence: Synthetic oligonucleotide
  Target: LAMA2; (+) strand; PAM type: YTN; PAM sequence: CTG
aaagctttgagcatggaaca

SEQ ID NO: 402631 - DNA, 20 bp, Artificial Sequence
  Description of Artificial Sequence: Synthetic oligonucleotide
  Target: LAMA2; (+) strand; PAM type: YTN; PAM sequence: CTT
tgagcatggaacacagtata

SEQ ID NO: 402632 - DNA, 20 bp, Artificial Sequence
  Description of Artificial Sequence: Synthetic oligonucleotide
  Target: LAMA2; (+) strand; PAM type: YTN; PAM sequence: TTT
gagcatggaacacagtataa

SEQ ID NO: 402633 - DNA, 20 bp, Artificial Sequence
  Description of Artificial Sequence: Synthetic oligonucleotide
  Target: LAMA2; (+) strand; PAM type: YTN; PAM sequence: TTG
agcatggaacacagtataat

SEQ ID NO: 402634 - DNA, 20 bp, Artificial Sequence
  Description of Artificial Sequence: Synthetic oligonucleotide
  Target: LAMA2; (+) strand; PAM type: YTN; PAM sequence: CTG
tgctttttaaatataaatcc

SEQ ID NO: 402635 - DNA, 20 bp, Artificial Sequence
  Description of Artificial Sequence: Synthetic oligonucleotide
  Target: LAMA2; (+) strand; PAM type: YTN; PAM sequence: CTT
tttaaatataaatccagaag

SEQ ID NO: 402636 - DNA, 20 bp, Artificial Sequence
  Description of Artificial Sequence: Synthetic oligonucleotide
  Target: LAMA2; (+) strand; PAM type: YTN; PAM sequence: TTT
ttaaatataaatccagaagc

SEQ ID NO: 402637 - DNA, 20 bp, Artificial Sequence
  Description of Artificial Sequence: Synthetic oligonucleotide
  Target: LAMA2; (+) strand; PAM type: YTN; PAM sequence: TTT
taaatataaatccagaagca

SEQ ID NO: 402638 - DNA, 20 bp, Artificial Sequence
  Description of Artificial Sequence: Synthetic oligonucleotide
  Target: LAMA2; (+) strand; PAM type: YTN; PAM sequence: TTT
aaatataaatccagaagcag

SEQ ID NO: 402639 - DNA, 20 bp, Artificial Sequence
  Description of Artificial Sequence: Synthetic oligonucleotide
  Target: LAMA2; (+) strand; PAM type: YTN; PAM sequence: TTA
aatataaatccagaagcagt

SEQ ID NO: 402640 - DNA, 20 bp, Artificial Sequence
  Description of Artificial Sequence: Synthetic oligonucleotide
  Target: LAMA2; (+) strand; PAM type: YTN; PAM sequence: CTA
tagctgtggcaagagaaaag

SEQ ID NO: 402641 - DNA, 20 bp, Artificial Sequence
  Description of Artificial Sequence: Synthetic oligonucleotide
  Target: LAMA2; (+) strand; PAM type: YTN; PAM sequence: CTG
tggcaagagaaaagaagaac

SEQ ID NO: 402642 - DNA, 20 bp, Artificial Sequence
  Description of Artificial Sequence: Synthetic oligonucleotide
  Target: LAMA2; (+) strand; PAM type: YTN; PAM sequence: CTC
ctatattttgcaatgttaac

SEQ ID NO: 402643 - DNA, 20 bp, Artificial Sequence
  Description of Artificial Sequence: Synthetic oligonucleotide
  Target: LAMA2; (+) strand; PAM type: YTN; PAM sequence: CTA
tattttgcaatgttaacttg

SEQ ID NO: 402644 - DNA, 20 bp, Artificial Sequence
  Description of Artificial Sequence: Synthetic oligonucleotide
  Target: LAMA2; (+) strand; PAM type: YTN; PAM sequence: TTT
tgcaatgttaacttggaaga

SEQ ID NO: 402645 - DNA, 20 bp, Artificial Sequence
  Description of Artificial Sequence: Synthetic oligonucleotide
  Target: LAMA2; (+) strand; PAM type: YTN; PAM sequence: TTT
gcaatgttaacttggaagaa

SEQ ID NO: 402646 - DNA, 20 bp, Artificial Sequence
  Description of Artificial Sequence: Synthetic oligonucleotide
  Target: LAMA2; (+) strand; PAM type: YTN; PAM sequence: TTG
caatgttaacttggaagaag

SEQ ID NO: 402647 - DNA, 20 bp, Artificial Sequence
  Description of Artificial Sequence: Synthetic oligonucleotide
  Target: LAMA2; (+) strand; PAM type: YTN; PAM sequence: TTA
acttggaagaagcaataaga

SEQ ID NO: 402648 - DNA, 20 bp, Artificial Sequence
  Description of Artificial Sequence: Synthetic oligonucleotide
  Target: LAMA2; (+) strand; PAM type: YTN; PAM sequence: CTT
ggaagaagcaataagagtaa

SEQ ID NO: 402649 - DNA, 20 bp, Artificial Sequence
  Description of Artificial Sequence: Synthetic oligonucleotide
  Target: LAMA2; (+) strand; PAM type: YTN; PAM sequence: TTG
gaagaagcaataagagtaaa

SEQ ID NO: 402650 - DNA, 20 bp, Artificial Sequence
  Description of Artificial Sequence: Synthetic oligonucleotide
  Target: LAMA2; (+) strand; PAM type: YTN; PAM sequence: TTA
ttttgtgaatctcacattta

SEQ ID NO: 402651 - DNA, 20 bp, Artificial Sequence
  Description of Artificial Sequence: Synthetic oligonucleotide
  Target: LAMA2; (+) strand; PAM type: YTN; PAM sequence: TTT
tgtgaatctcacatttagcc

SEQ ID NO: 402652 - DNA, 20 bp, Artificial Sequence
  Description of Artificial Sequence: Synthetic oligonucleotide
  Target: LAMA2; (+) strand; PAM type: YTN; PAM sequence: TTT
gtgaatctcacatttagcca

SEQ ID NO: 402653 - DNA, 20 bp, Artificial Sequence
  Description of Artificial Sequence: Synthetic oligonucleotide
  Target: LAMA2; (+) strand; PAM type: YTN; PAM sequence: TTG
tgaatctcacatttagccac

SEQ ID NO: 402654 - DNA, 20 bp, Artificial Sequence
  Description of Artificial Sequence: Synthetic oligonucleotide
  Target: LAMA2; (+) strand; PAM type: YTN; PAM sequence: CTC
acatttagccacattttctg

SEQ ID NO: 402655 - DNA, 20 bp, Artificial Sequence
  Description of Artificial Sequence: Synthetic oligonucleotide
  Target: LAMA2; (+) strand; PAM type: YTN; PAM sequence: TTT
agccacattttctgacttag

SEQ ID NO: 402656 - DNA, 20 bp, Artificial Sequence
  Description of Artificial Sequence: Synthetic oligonucleotide
  Target: LAMA2; (+) strand; PAM type: YTN; PAM sequence: TTA
gccacattttctgacttagt

SEQ ID NO: 402657 - DNA, 20 bp, Artificial Sequence
  Description of Artificial Sequence: Synthetic oligonucleotide
  Target: LAMA2; (+) strand; PAM type: YTN; PAM sequence: TTT
tctgacttagtcatcaagtg

SEQ ID NO: 402658 - DNA, 20 bp, Artificial Sequence
  Description of Artificial Sequence: Synthetic oligonucleotide
  Target: LAMA2; (+) strand; PAM type: YTN; PAM sequence: TTT
ctgacttagtcatcaagtgg

SEQ ID NO: 402659 - DNA, 20 bp, Artificial Sequence
  Description of Artificial Sequence: Synthetic oligonucleotide
  Target: LAMA2; (+) strand; PAM type: YTN; PAM sequence: TTC
tgacttagtcatcaagtgga

SEQ ID NO: 402660 - DNA, 20 bp, Artificial Sequence
  Description of Artificial Sequence: Synthetic oligonucleotide
  Target: LAMA2; (+) strand; PAM type: YTN; PAM sequence: CTG
acttagtcatcaagtggaga

SEQ ID NO: 402661 - DNA, 20 bp, Artificial Sequence
  Description of Artificial Sequence: Synthetic oligonucleotide
  Target: LAMA2; (+) strand; PAM type: YTN; PAM sequence: CTT
agtcatcaagtggagaaatc

SEQ ID NO: 402662 - DNA, 20 bp, Artificial Sequence
  Description of Artificial Sequence: Synthetic oligonucleotide
  Target: LAMA2; (+) strand; PAM type: YTN; PAM sequence: TTA
gtcatcaagtggagaaatct

SEQ ID NO: 402663 - DNA, 20 bp, Artificial Sequence
  Description of Artificial Sequence: Synthetic oligonucleotide
  Target: LAMA2; (+) strand; PAM type: YTN; PAM sequence: CTA
gacatttttattatttcttc

SEQ ID NO: 402664 - DNA, 20 bp, Artificial Sequence
  Description of Artificial Sequence: Synthetic oligonucleotide
  Target: LAMA2; (+) strand; PAM type: YTN; PAM sequence: TTT
ttattatttcttcattgtaa

SEQ ID NO: 402665 - DNA, 20 bp, Artificial Sequence
  Description of Artificial Sequence: Synthetic oligonucleotide
  Target: LAMA2; (+) strand; PAM type: YTN; PAM sequence: TTT
tattatttcttcattgtaaa

SEQ ID NO: 402666 - DNA, 20 bp, Artificial Sequence
  Description of Artificial Sequence: Synthetic oligonucleotide
  Target: LAMA2; (+) strand; PAM type: YTN; PAM sequence: TTT
attatttcttcattgtaaag

SEQ ID NO: 402667 - DNA, 20 bp, Artificial Sequence
  Description of Artificial Sequence: Synthetic oligonucleotide
  Target: LAMA2; (+) strand; PAM type: YTN; PAM sequence: TTA
ttatttcttcattgtaaaga

SEQ ID NO: 402668 - DNA, 20 bp, Artificial Sequence
  Description of Artificial Sequence: Synthetic oligonucleotide
  Target: LAMA2; (+) strand; PAM type: YTN; PAM sequence: TTA
tttcttcattgtaaagattt

SEQ ID NO: 402669 - DNA, 20 bp, Artificial Sequence
  Description of Artificial Sequence: Synthetic oligonucleotide
  Target: LAMA2; (+) strand; PAM type: YTN; PAM sequence: TTT
cttcattgtaaagatttctg

SEQ ID NO: 402670 - DNA, 20 bp, Artificial Sequence
  Description of Artificial Sequence: Synthetic oligonucleotide
  Target: LAMA2; (+) strand; PAM type: YTN; PAM sequence: TTC
ttcattgtaaagatttctga

SEQ ID NO: 402671 - DNA, 20 bp, Artificial Sequence
  Description of Artificial Sequence: Synthetic oligonucleotide
  Target: LAMA2; (+) strand; PAM type: YTN; PAM sequence: CTT
cattgtaaagatttctgagt

SEQ ID NO: 402672 - DNA, 20 bp, Artificial Sequence
  Description of Artificial Sequence: Synthetic oligonucleotide
  Target: LAMA2; (+) strand; PAM type: YTN; PAM sequence: TTC
attgtaaagatttctgagtg

SEQ ID NO: 402673 - DNA, 20 bp, Artificial Sequence
  Description of Artificial Sequence: Synthetic oligonucleotide
  Target: LAMA2; (+) strand; PAM type: YTN; PAM sequence: TTG
taaagatttctgagtgcttt

SEQ ID NO: 402674 - DNA, 20 bp, Artificial Sequence
  Description of Artificial Sequence: Synthetic oligonucleotide
  Target: LAMA2; (+) strand; PAM type: YTN; PAM sequence: TTT
ctgagtgcttttcccctcct

SEQ ID NO: 402675 - DNA, 20 bp, Artificial Sequence
  Description of Artificial Sequence: Synthetic oligonucleotide
  Target: LAMA2; (+) strand; PAM type: YTN; PAM sequence: TTC
tgagtgcttttcccctcctc

SEQ ID NO: 402676 - DNA, 20 bp, Artificial Sequence
  Description of Artificial Sequence: Synthetic oligonucleotide
  Target: LAMA2; (+) strand; PAM type: YTN; PAM sequence: CTG
agtgcttttcccctcctcac

SEQ ID NO: 402677 - DNA, 20 bp, Artificial Sequence
  Description of Artificial Sequence: Synthetic oligonucleotide
  Target: LAMA2; (+) strand; PAM type: YTN; PAM sequence: CTT
ttcccctcctcacaaaacgg

SEQ ID NO: 402678 - DNA, 20 bp, Artificial Sequence
  Description of Artificial Sequence: Synthetic oligonucleotide
  Target: LAMA2; (+) strand; PAM type: YTN; PAM sequence: TTT
tcccctcctcacaaaacggt

SEQ ID NO: 402679 - DNA, 20 bp, Artificial Sequence
  Description of Artificial Sequence: Synthetic oligonucleotide
  Target: LAMA2; (+) strand; PAM type: YTN; PAM sequence: TTT
cccctcctcacaaaacggtg

SEQ ID NO: 402680 - DNA, 20 bp, Artificial Sequence
  Description of Artificial Sequence: Synthetic oligonucleotide
  Target: LAMA2; (+) strand; PAM type: YTN; PAM sequence: TTC
ccctcctcacaaaacggtga

SEQ ID NO: 402681 - DNA, 20 bp, Artificial Sequence
  Description of Artificial Sequence: Synthetic oligonucleotide
  Target: LAMA2; (+) strand; PAM type: YTN; PAM sequence: CTC
ctcacaaaacggtgaaattc

SEQ ID NO: 402682 - DNA, 20 bp, Artificial Sequence
  Description of Artificial Sequence: Synthetic oligonucleotide
  Target: LAMA2; (+) strand; PAM type: YTN; PAM sequence: CTC
acaaaacggtgaaattcaga

SEQ ID NO: 402683 - DNA, 20 bp, Artificial Sequence
  Description of Artificial Sequence: Synthetic oligonucleotide
  Target: LAMA2; (+) strand; PAM type: YTN; PAM sequence: TTC
agacatgtaagcatataaaa

SEQ ID NO: 402684 - DNA, 20 bp, Artificial Sequence
  Description of Artificial Sequence: Synthetic oligonucleotide
  Target: LAMA2; (+) strand; PAM type: YTN; PAM sequence: CTG
tcttaaagtacaaaataaaa

SEQ ID NO: 402685 - DNA, 20 bp, Artificial Sequence
  Description of Artificial Sequence: Synthetic oligonucleotide
  Target: LAMA2; (+) strand; PAM type: YTN; PAM sequence: CTT
aaagtacaaaataaaagaaa

SEQ ID NO: 402686 - DNA, 20 bp, Artificial Sequence
  Description of Artificial Sequence: Synthetic oligonucleotide
  Target: LAMA2; (+) strand; PAM type: YTN; PAM sequence: TTA
aagtacaaaataaaagaaaa

SEQ ID NO: 402687 - DNA, 20 bp, Artificial Sequence
  Description of Artificial Sequence: Synthetic oligonucleotide
  Target: LAMA2; (+) strand; PAM type: YTN; PAM sequence: CTG
ggcatggtggctcaagcctg

SEQ ID NO: 402688 - DNA, 20 bp, Artificial Sequence
  Description of Artificial Sequence: Synthetic oligonucleotide
  Target: LAMA2; (+) strand; PAM type: YTN; PAM sequence: CTC
aagcctgtcatcccaacact

SEQ ID NO: 402689 - DNA, 20 bp, Artificial Sequence
  Description of Artificial Sequence: Synthetic oligonucleotide
  Target: LAMA2; (+) strand; PAM type: YTN; PAM sequence: CTG
tcatcccaacactttgggag

SEQ ID NO: 402690 - DNA, 20 bp, Artificial Sequence
  Description of Artificial Sequence: Synthetic oligonucleotide
  Target: LAMA2; (+) strand; PAM type: YTN; PAM sequence: CTT
tgggaggctgaggcaggcag

SEQ ID NO: 402691 - DNA, 20 bp, Artificial Sequence
  Description of Artificial Sequence: Synthetic oligonucleotide
  Target: LAMA2; (+) strand; PAM type: YTN; PAM sequence: TTT
gggaggctgaggcaggcaga

SEQ ID NO: 402692 - DNA, 20 bp, Artificial Sequence
  Description of Artificial Sequence: Synthetic oligonucleotide
  Target: LAMA2; (+) strand; PAM type: YTN; PAM sequence: TTG
ggaggctgaggcaggcagat

SEQ ID NO: 402693 - DNA, 20 bp, Artificial Sequence
  Description of Artificial Sequence: Synthetic oligonucleotide
  Target: LAMA2; (+) strand; PAM type: YTN; PAM sequence: CTG
aggcaggcagattgcatgaa

SEQ ID NO: 402694 - DNA, 20 bp, Artificial Sequence
  Description of Artificial Sequence: Synthetic oligonucleotide
  Target: LAMA2; (+) strand; PAM type: YTN; PAM sequence: TTG
catgaactcaggagtttgag

SEQ ID NO: 402695 - DNA, 20 bp, Artificial Sequence
  Description of Artificial Sequence: Synthetic oligonucleotide
  Target: LAMA2; (+) strand; PAM type: YTN; PAM sequence: CTC
aggagtttgagaccagcctg

SEQ ID NO: 402696 - DNA, 20 bp, Artificial Sequence
  Description of Artificial Sequence: Synthetic oligonucleotide
  Target: LAMA2; (+) strand; PAM type: YTN; PAM sequence: TTT
gagaccagcctgggccatgt

SEQ ID NO: 402697 - DNA, 20 bp, Artificial Sequence
  Description of Artificial Sequence: Synthetic oligonucleotide
  Target: LAMA2; (+) strand; PAM type: YTN; PAM sequence: TTG
agaccagcctgggccatgtc

SEQ ID NO: 402698 - DNA, 20 bp, Artificial Sequence
  Description of Artificial Sequence: Synthetic oligonucleotide
  Target: LAMA2; (+) strand; PAM type: YTN; PAM sequence: CTG
ggccatgtcacaaaaccaca

SEQ ID NO: 402699 - DNA, 20 bp, Artificial Sequence
  Description of Artificial Sequence: Synthetic oligonucleotide
  Target: LAMA2; (+) strand; PAM type: YTN; PAM sequence: CTC
tacaaaaaattgaaaaatta

SEQ ID NO: 402700 - DNA, 20 bp, Artificial Sequence
  Description of Artificial Sequence: Synthetic oligonucleotide
  Target: LAMA2; (+) strand; PAM type: YTN; PAM sequence: CTA
caaaaaattgaaaaattacc

SEQ ID NO: 402701 - DNA, 20 bp, Artificial Sequence
  Description of Artificial Sequence: Synthetic oligonucleotide
  Target: LAMA2; (+) strand; PAM type: YTN; PAM sequence: TTG
aaaaattacctgggcatggt

SEQ ID NO: 402702 - DNA, 20 bp, Artificial Sequence
  Description of Artificial Sequence: Synthetic oligonucleotide
  Target: LAMA2; (+) strand; PAM type: YTN; PAM sequence: TTA
cctgggcatggtacatgcct

SEQ ID NO: 402703 - DNA, 20 bp, Artificial Sequence
  Description of Artificial Sequence: Synthetic oligonucleotide
  Target: LAMA2; (+) strand; PAM type: YTN; PAM sequence: CTG
ggcatggtacatgcctatag

SEQ ID NO: 402704 - DNA, 20 bp, Artificial Sequence
  Description of Artificial Sequence: Synthetic oligonucleotide
  Target: LAMA2; (+) strand; PAM type: YTN; PAM sequence: CTA
tagtcccagctacttgggga

SEQ ID NO: 402705 - DNA, 20 bp, Artificial Sequence
  Description of Artificial Sequence: Synthetic oligonucleotide
  Target: LAMA2; (+) strand; PAM type: YTN; PAM sequence: CTA
cttggggagatgaggtggga

SEQ ID NO: 402706 - DNA, 20 bp, Artificial Sequence
  Description of Artificial Sequence: Synthetic oligonucleotide
  Target: LAMA2; (+) strand; PAM type: YTN; PAM sequence: CTT
ggggagatgaggtgggagga

SEQ ID NO: 402707 - DNA, 20 bp, Artificial Sequence
  Description of Artificial Sequence: Synthetic oligonucleotide
  Target: LAMA2; (+) strand; PAM type: YTN; PAM sequence: TTG
gggagatgaggtgggaggat

SEQ ID NO: 402708 - DNA, 20 bp, Artificial Sequence
  Description of Artificial Sequence: Synthetic oligonucleotide
  Target: LAMA2; (+) strand; PAM type: YTN; PAM sequence: CTT
gctctggaggatgaggctgc

SEQ ID NO: 402709 - DNA, 20 bp, Artificial Sequence
  Description of Artificial Sequence: Synthetic oligonucleotide
  Target: LAMA2; (+) strand; PAM type: YTN; PAM sequence: TTG
ctctggaggatgaggctgca

SEQ ID NO: 402710 - DNA, 20 bp, Artificial Sequence
  Description of Artificial Sequence: Synthetic oligonucleotide
  Target: LAMA2; (+) strand; PAM type: YTN; PAM sequence: CTC
tggaggatgaggctgcagtg

SEQ ID NO: 402711 - DNA, 20 bp, Artificial Sequence
  Description of Artificial Sequence: Synthetic oligonucleotide
  Target: LAMA2; (+) strand; PAM type: YTN; PAM sequence: CTG
gaggatgaggctgcagtgag

SEQ ID NO: 402712 - DNA, 20 bp, Artificial Sequence
  Description of Artificial Sequence: Synthetic oligonucleotide
  Target: LAMA2; (+) strand; PAM type: YTN; PAM sequence: CTG
cagtgagccatgtttgcacc

SEQ ID NO: 402713 - DNA, 20 bp, Artificial Sequence
  Description of Artificial Sequence: Synthetic oligonucleotide
  Target: LAMA2; (+) strand; PAM type: YTN; PAM sequence: TTT
gcaccatggcactccagcct

SEQ ID NO: 402714 - DNA, 20 bp, Artificial Sequence
  Description of Artificial Sequence: Synthetic oligonucleotide
  Target: LAMA2; (+) strand; PAM type: YTN; PAM sequence: TTG
caccatggcactccagcctg

SEQ ID NO: 402715 - DNA, 20 bp, Artificial Sequence
  Description of Artificial Sequence: Synthetic oligonucleotide
  Target: LAMA2; (+) strand; PAM type: YTN; PAM sequence: CTC
cagcctgggtggcaaataga

SEQ ID NO: 402716 - DNA, 20 bp, Artificial Sequence
  Description of Artificial Sequence: Synthetic oligonucleotide
  Target: LAMA2; (+) strand; PAM type: YTN; PAM sequence: CTG
ggtggcaaatagaaaccctg

SEQ ID NO: 402717 - DNA, 20 bp, Artificial Sequence
  Description of Artificial Sequence: Synthetic oligonucleotide
  Target: LAMA2; (+) strand; PAM type: YTN; PAM sequence: CTG
tccccccccaaaaaaaaaga

SEQ ID NO: 402718 - DNA, 20 bp, Artificial Sequence
  Description of Artificial Sequence: Synthetic oligonucleotide
  Target: LAMA2; (+) strand; PAM type: YTN; PAM sequence: TTA
agaaaaagtaatcattgtcc

SEQ ID NO: 402719 - DNA, 20 bp, Artificial Sequence
  Description of Artificial Sequence: Synthetic oligonucleotide
  Target: LAMA2; (+) strand; PAM type: YTN; PAM sequence: TTG
tccatgcatttcaaagaaat

SEQ ID NO: 402720 - DNA, 20 bp, Artificial Sequence
  Description of Artificial Sequence: Synthetic oligonucleotide
  Target: LAMA2; (+) strand; PAM type: YTN; PAM sequence: TTT
caaagaaattcccaatcagt

SEQ ID NO: 402721 - DNA, 20 bp, Artificial Sequence
  Description of Artificial Sequence: Synthetic oligonucleotide
  Target: LAMA2; (+) strand; PAM type: YTN; PAM sequence: TTC
aaagaaattcccaatcagtt

SEQ ID NO: 402722 - DNA, 20 bp, Artificial Sequence
  Description of Artificial Sequence: Synthetic oligonucleotide
  Target: LAMA2; (+) strand; PAM type: YTN; PAM sequence: TTC
ccaatcagttttggaaatgg

SEQ ID NO: 402723 - DNA, 20 bp, Artificial Sequence
  Description of Artificial Sequence: Synthetic oligonucleotide
  Target: LAMA2; (+) strand; PAM type: YTN; PAM sequence: TTT
tggaaatggaattacaacac

SEQ ID NO: 402724 - DNA, 20 bp, Artificial Sequence
  Description of Artificial Sequence: Synthetic oligonucleotide
  Target: LAMA2; (+) strand; PAM type: YTN; PAM sequence: TTT
ggaaatggaattacaacaca

SEQ ID NO: 402725 - DNA, 20 bp, Artificial Sequence
  Description of Artificial Sequence: Synthetic oligonucleotide
  Target: LAMA2; (+) strand; PAM type: YTN; PAM sequence: TTG
gaaatggaattacaacacaa

SEQ ID NO: 402726 - DNA, 20 bp, Artificial Sequence
  Description of Artificial Sequence: Synthetic oligonucleotide
  Target: LAMA2; (+) strand; PAM type: YTN; PAM sequence: TTA
caacacaatgccttattttt

SEQ ID NO: 402727 - DNA, 20 bp, Artificial Sequence
  Description of Artificial Sequence: Synthetic oligonucleotide
  Target: LAMA2; (+) strand; PAM type: YTN; PAM sequence: CTT
attttttgtaagacgttaga

SEQ ID NO: 402728 - DNA, 20 bp, Artificial Sequence
  Description of Artificial Sequence: Synthetic oligonucleotide
  Target: LAMA2; (+) strand; PAM type: YTN; PAM sequence: TTA
ttttttgtaagacgttagaa

SEQ ID NO: 402729 - DNA, 20 bp, Artificial Sequence
  Description of Artificial Sequence: Synthetic oligonucleotide
  Target: LAMA2; (+) strand; PAM type: YTN; PAM sequence: TTT
tttgtaagacgttagaaata

SEQ ID NO: 402730 - DNA, 20 bp, Artificial Sequence
  Description of Artificial Sequence: Synthetic oligonucleotide
  Target: LAMA2; (+) strand; PAM type: YTN; PAM sequence: TTT
ttgtaagacgttagaaatat

SEQ ID NO: 402731 - DNA, 20 bp, Artificial Sequence
  Description of Artificial Sequence: Synthetic oligonucleotide
  Target: LAMA2; (+) strand; PAM type: YTN; PAM sequence: TTT
tgtaagacgttagaaatatg

SEQ ID NO: 402732 - DNA, 20 bp, Artificial Sequence
  Description of Artificial Sequence: Synthetic oligonucleotide
  Target: LAMA2; (+) strand; PAM type: YTN; PAM sequence: TTT
gtaagacgttagaaatatgc

SEQ ID NO: 402733 - DNA, 20 bp, Artificial Sequence
  Description of Artificial Sequence: Synthetic oligonucleotide
  Target: LAMA2; (+) strand; PAM type: YTN; PAM sequence: TTG
taagacgttagaaatatgca

SEQ ID NO: 402734 - DNA, 20 bp, Artificial Sequence
  Description of Artificial Sequence: Synthetic oligonucleotide
  Target: LAMA2; (+) strand; PAM type: YTN; PAM sequence: TTA
gaaatatgcaagtagccaat

SEQ ID NO: 402735 - DNA, 20 bp, Artificial Sequence
  Description of Artificial Sequence: Synthetic oligonucleotide
  Target: LAMA2; (+) strand; PAM type: YTN; PAM sequence: TTT
ttttccaaatgagttttgta

SEQ ID NO: 402736 - DNA, 20 bp, Artificial Sequence
  Description of Artificial Sequence: Synthetic oligonucleotide
  Target: LAMA2; (+) strand; PAM type: YTN; PAM sequence: TTT
tttccaaatgagttttgtac

SEQ ID NO: 402737 - DNA, 20 bp, Artificial Sequence
  Description of Artificial Sequence: Synthetic oligonucleotide
  Target: LAMA2; (+) strand; PAM type: YTN; PAM sequence: TTT
ttccaaatgagttttgtact

SEQ ID NO: 402738 - DNA, 20 bp, Artificial Sequence
  Description of Artificial Sequence: Synthetic oligonucleotide
  Target: LAMA2; (+) strand; PAM type: YTN; PAM sequence: TTT
tccaaatgagttttgtacta

SEQ ID NO: 402739 - DNA, 20 bp, Artificial Sequence
  Description of Artificial Sequence: Synthetic oligonucleotide
  Target: LAMA2; (+) strand; PAM type: YTN; PAM sequence: TTT
ccaaatgagttttgtactaa

SEQ ID NO: 402740 - DNA, 20 bp, Artificial Sequence
  Description of Artificial Sequence: Synthetic oligonucleotide
  Target: LAMA2; (+) strand; PAM type: YTN; PAM sequence: TTC
caaatgagttttgtactaaa

SEQ ID NO: 402741 - DNA, 20 bp, Artificial Sequence
  Description of Artificial Sequence: Synthetic oligonucleotide
  Target: LAMA2; (+) strand; PAM type: YTN; PAM sequence: TTT
tgtactaaatgaatattaca

SEQ ID NO: 402742 - DNA, 20 bp, Artificial Sequence
  Description of Artificial Sequence: Synthetic oligonucleotide
  Target: LAMA2; (+) strand; PAM type: YTN; PAM sequence: TTT
gtactaaatgaatattacat

SEQ ID NO: 402743 - DNA, 20 bp, Artificial Sequence
  Description of Artificial Sequence: Synthetic oligonucleotide
  Target: LAMA2; (+) strand; PAM type: YTN; PAM sequence: TTG
tactaaatgaatattacatt

SEQ ID NO: 402744 - DNA, 20 bp, Artificial Sequence
  Description of Artificial Sequence: Synthetic oligonucleotide
  Target: LAMA2; (+) strand; PAM type: YTN; PAM sequence: CTA
aatgaatattacattttctg

SEQ ID NO: 402745 - DNA, 20 bp, Artificial Sequence
  Description of Artificial Sequence: Synthetic oligonucleotide
  Target: LAMA2; (+) strand; PAM type: YTN; PAM sequence: TTA
cattttctgatttgtaaata

SEQ ID NO: 402746 - DNA, 20 bp, Artificial Sequence
  Description of Artificial Sequence: Synthetic oligonucleotide
  Target: LAMA2; (+) strand; PAM type: YTN; PAM sequence: TTT
tctgatttgtaaatatggat

SEQ ID NO: 402747 - DNA, 20 bp, Artificial Sequence
  Description of Artificial Sequence: Synthetic oligonucleotide
  Target: LAMA2; (+) strand; PAM type: YTN; PAM sequence: TTT
ctgatttgtaaatatggata

SEQ ID NO: 402748 - DNA, 20 bp, Artificial Sequence
  Description of Artificial Sequence: Synthetic oligonucleotide
  Target: LAMA2; (+) strand; PAM type: YTN; PAM sequence: TTC
tgatttgtaaatatggatat

SEQ ID NO: 402749 - DNA, 20 bp, Artificial Sequence
  Description of Artificial Sequence: Synthetic oligonucleotide
  Target: LAMA2; (+) strand; PAM type: YTN; PAM sequence: CTG
atttgtaaatatggatatct

SEQ ID NO: 402750 - DNA, 20 bp, Artificial Sequence
  Description of Artificial Sequence: Synthetic oligonucleotide
  Target: LAMA2; (+) strand; PAM type: YTN; PAM sequence: TTT
gtaaatatggatatctggat

SEQ ID NO: 402751 - DNA, 20 bp, Artificial Sequence
  Description of Artificial Sequence: Synthetic oligonucleotide
  Target: LAMA2; (+) strand; PAM type: YTN; PAM sequence: TTG
taaatatggatatctggata

SEQ ID NO: 402752 - DNA, 20 bp, Artificial Sequence
  Description of Artificial Sequence: Synthetic oligonucleotide
  Target: LAMA2; (+) strand; PAM type: YTN; PAM sequence: CTG
gatatgaccttaacacatac

SEQ ID NO: 402753 - DNA, 20 bp, Artificial Sequence
  Description of Artificial Sequence: Synthetic oligonucleotide
  Target: LAMA2; (+) strand; PAM type: YTN; PAM sequence: CTT
aacacatacttgacatgacc

SEQ ID NO: 402754 - DNA, 20 bp, Artificial Sequence
  Description of Artificial Sequence: Synthetic oligonucleotide
  Target: LAMA2; (+) strand; PAM type: YTN; PAM sequence: TTA
acacatacttgacatgacca

SEQ ID NO: 402755 - DNA, 20 bp, Artificial Sequence
  Description of Artificial Sequence: Synthetic oligonucleotide
  Target: LAMA2; (+) strand; PAM type: YTN; PAM sequence: CTT
gacatgaccaaaacattaaa

SEQ ID NO: 402756 - DNA, 20 bp, Artificial Sequence
  Description of Artificial Sequence: Synthetic oligonucleotide
  Target: LAMA2; (+) strand; PAM type: YTN; PAM sequence: TTG
acatgaccaaaacattaaag

SEQ ID NO: 402757 - DNA, 20 bp, Artificial Sequence
  Description of Artificial Sequence: Synthetic oligonucleotide
  Target: LAMA2; (+) strand; PAM type: YTN; PAM sequence: TTA
aagacatttattttaaagta

SEQ ID NO: 402758 - DNA, 20 bp, Artificial Sequence
  Description of Artificial Sequence: Synthetic oligonucleotide
  Target: LAMA2; (+) strand; PAM type: YTN; PAM sequence: TTT
attttaaagtagctttctct

SEQ ID NO: 402759 - DNA, 20 bp, Artificial Sequence
  Description of Artificial Sequence: Synthetic oligonucleotide
  Target: LAMA2; (+) strand; PAM type: YTN; PAM sequence: TTA
ttttaaagtagctttctctg

SEQ ID NO: 402760 - DNA, 20 bp, Artificial Sequence
  Description of Artificial Sequence: Synthetic oligonucleotide
  Target: LAMA2; (+) strand; PAM type: YTN; PAM sequence: TTT
taaagtagctttctctgggt

SEQ ID NO: 402761 - DNA, 20 bp, Artificial Sequence
  Description of Artificial Sequence: Synthetic oligonucleotide
  Target: LAMA2; (+) strand; PAM type: YTN; PAM sequence: TTT
aaagtagctttctctgggtt

SEQ ID NO: 402762 - DNA, 20 bp, Artificial Sequence
  Description of Artificial Sequence: Synthetic oligonucleotide
  Target: LAMA2; (+) strand; PAM type: YTN; PAM sequence: TTA
aagtagctttctctgggttt

SEQ ID NO: 402763 - DNA, 20 bp, Artificial Sequence
  Description of Artificial Sequence: Synthetic oligonucleotide
  Target: LAMA2; (+) strand; PAM type: YTN; PAM sequence: CTT
tctctgggtttgttgattct

SEQ ID NO: 402764 - DNA, 20 bp, Artificial Sequence
  Description of Artificial Sequence: Synthetic oligonucleotide
  Target: LAMA2; (+) strand; PAM type: YTN; PAM sequence: TTT
ctctgggtttgttgattctg

SEQ ID NO: 402765 - DNA, 20 bp, Artificial Sequence
  Description of Artificial Sequence: Synthetic oligonucleotide
  Target: LAMA2; (+) strand; PAM type: YTN; PAM sequence: TTC
tctgggtttgttgattctga

SEQ ID NO: 402766 - DNA, 20 bp, Artificial Sequence
  Description of Artificial Sequence: Synthetic oligonucleotide
  Target: LAMA2; (+) strand; PAM type: YTN; PAM sequence: CTC
tgggtttgttgattctgaaa

SEQ ID NO: 402767 - DNA, 20 bp, Artificial Sequence
  Description of Artificial Sequence: Synthetic oligonucleotide
  Target: LAMA2; (+) strand; PAM type: YTN; PAM sequence: CTG
ggtttgttgattctgaaatt

SEQ ID NO: 402768 - DNA, 20 bp, Artificial Sequence
  Description of Artificial Sequence: Synthetic oligonucleotide
  Target: LAMA2; (+) strand; PAM type: YTN; PAM sequence: TTT
gttgattctgaaattgagtg

SEQ ID NO: 402769 - DNA, 20 bp, Artificial Sequence
  Description of Artificial Sequence: Synthetic oligonucleotide
  Target: LAMA2; (+) strand; PAM type: YTN; PAM sequence: TTG
ttgattctgaaattgagtgg

SEQ ID NO: 402770 - DNA, 20 bp, Artificial Sequence
  Description of Artificial Sequence: Synthetic oligonucleotide
  Target: LAMA2; (+) strand; PAM type: YTN; PAM sequence: TTG
attctgaaattgagtggctg

SEQ ID NO: 402771 - DNA, 20 bp, Artificial Sequence
  Description of Artificial Sequence: Synthetic oligonucleotide
  Target: LAMA2; (+) strand; PAM type: YTN; PAM sequence: TTC
tgaaattgagtggctgatac

SEQ ID NO: 402772 - DNA, 20 bp, Artificial Sequence
  Description of Artificial Sequence: Synthetic oligonucleotide
  Target: LAMA2; (+) strand; PAM type: YTN; PAM sequence: CTG
aaattgagtggctgatactc

SEQ ID NO: 402773 - DNA, 20 bp, Artificial Sequence
  Description of Artificial Sequence: Synthetic oligonucleotide
  Target: LAMA2; (+) strand; PAM type: YTN; PAM sequence: TTG
agtggctgatactcctttaa

SEQ ID NO: 402774 - DNA, 20 bp, Artificial Sequence
  Description of Artificial Sequence: Synthetic oligonucleotide
  Target: LAMA2; (+) strand; PAM type: YTN; PAM sequence: CTG
atactcctttaaatgaatga

SEQ ID NO: 402775 - DNA, 20 bp, Artificial Sequence
  Description of Artificial Sequence: Synthetic oligonucleotide
  Target: LAMA2; (+) strand; PAM type: YTN; PAM sequence: CTC
ctttaaatgaatgacctact

SEQ ID NO: 402776 - DNA, 20 bp, Artificial Sequence
  Description of Artificial Sequence: Synthetic oligonucleotide
  Target: LAMA2; (+) strand; PAM type: YTN; PAM sequence: CTT
taaatgaatgacctacttac

SEQ ID NO: 402777 - DNA, 20 bp, Artificial Sequence
  Description of Artificial Sequence: Synthetic oligonucleotide
  Target: LAMA2; (+) strand; PAM type: YTN; PAM sequence: TTT
aaatgaatgacctacttact

SEQ ID NO: 402778 - DNA, 20 bp, Artificial Sequence
  Description of Artificial Sequence: Synthetic oligonucleotide
  Target: LAMA2; (+) strand; PAM type: YTN; PAM sequence: TTA
aatgaatgacctacttactg

SEQ ID NO: 402779 - DNA, 20 bp, Artificial Sequence
  Description of Artificial Sequence: Synthetic oligonucleotide
  Target: LAMA2; (+) strand; PAM type: YTN; PAM sequence: CTA
cttactggatgaaaaatgca

SEQ ID NO: 402780 - DNA, 20 bp, Artificial Sequence
  Description of Artificial Sequence: Synthetic oligonucleotide
  Target: LAMA2; (+) strand; PAM type: YTN; PAM sequence: CTT
actggatgaaaaatgcagtg

SEQ ID NO: 402781 - DNA, 20 bp, Artificial Sequence
  Description of Artificial Sequence: Synthetic oligonucleotide
  Target: LAMA2; (+) strand; PAM type: YTN; PAM sequence: TTA
ctggatgaaaaatgcagtga

SEQ ID NO: 402782 - DNA, 20 bp, Artificial Sequence
  Description of Artificial Sequence: Synthetic oligonucleotide
  Target: LAMA2; (+) strand; PAM type: YTN; PAM sequence: CTG
gatgaaaaatgcagtgaaaa

SEQ ID NO: 402783 - DNA, 20 bp, Artificial Sequence
  Description of Artificial Sequence: Synthetic oligonucleotide
  Target: LAMA2; (+) strand; PAM type: YTN; PAM sequence: CTC
aataatgtttgagttcatca

SEQ ID NO: 402784 - DNA, 20 bp, Artificial Sequence
  Description of Artificial Sequence: Synthetic oligonucleotide
  Target: LAMA2; (+) strand; PAM type: YTN; PAM sequence: TTT
gagttcatcatgattaactg

SEQ ID NO: 402785 - DNA, 20 bp, Artificial Sequence
  Description of Artificial Sequence: Synthetic oligonucleotide
  Target: LAMA2; (+) strand; PAM type: YTN; PAM sequence: TTG
agttcatcatgattaactgg

SEQ ID NO: 402786 - DNA, 20 bp, Artificial Sequence
  Description of Artificial Sequence: Synthetic oligonucleotide
  Target: LAMA2; (+) strand; PAM type: YTN; PAM sequence: TTC
atcatgattaactggtaaat

SEQ ID NO: 402787 - DNA, 20 bp, Artificial Sequence
  Description of Artificial Sequence: Synthetic oligonucleotide
  Target: LAMA2; (+) strand; PAM type: YTN; PAM sequence: TTA
actggtaaataatgttgcag

SEQ ID NO: 402788 - DNA, 20 bp, Artificial Sequence
  Description of Artificial Sequence: Synthetic oligonucleotide
  Target: LAMA2; (+) strand; PAM type: YTN; PAM sequence: CTG
gtaaataatgttgcagtatt

SEQ ID NO: 402789 - DNA, 20 bp, Artificial Sequence
  Description of Artificial Sequence: Synthetic oligonucleotide
  Target: LAMA2; (+) strand; PAM type: YTN; PAM sequence: TTG
cagtattgaaatgccttaaa

SEQ ID NO: 402790 - DNA, 20 bp, Artificial Sequence
  Description of Artificial Sequence: Synthetic oligonucleotide
  Target: LAMA2; (+) strand; PAM type: YTN; PAM sequence: TTG
aaatgccttaaagatactta

SEQ ID NO: 402791 - DNA, 20 bp, Artificial Sequence
  Description of Artificial Sequence: Synthetic oligonucleotide
  Target: LAMA2; (+) strand; PAM type: YTN; PAM sequence: CTT
aaagatacttaatgcttagt

SEQ ID NO: 402792 - DNA, 20 bp, Artificial Sequence
  Description of Artificial Sequence: Synthetic oligonucleotide
  Target: LAMA2; (+) strand; PAM type: YTN; PAM sequence: TTA
aagatacttaatgcttagtg

SEQ ID NO: 402793 - DNA, 20 bp, Artificial Sequence
  Description of Artificial Sequence: Synthetic oligonucleotide
  Target: LAMA2; (+) strand; PAM type: YTN; PAM sequence: CTT
aatgcttagtgatttttctt

SEQ ID NO: 402794 - DNA, 20 bp, Artificial Sequence
  Description of Artificial Sequence: Synthetic oligonucleotide
  Target: LAMA2; (+) strand; PAM type: YTN; PAM sequence: TTA
atgcttagtgatttttcttt

SEQ ID NO: 402795 - DNA, 20 bp, Artificial Sequence
  Description of Artificial Sequence: Synthetic oligonucleotide
  Target: LAMA2; (+) strand; PAM type: YTN; PAM sequence: CTT
agtgatttttctttagatgt

SEQ ID NO: 402796 - DNA, 20 bp, Artificial Sequence
  Description of Artificial Sequence: Synthetic oligonucleotide
  Target: LAMA2; (+) strand; PAM type: YTN; PAM sequence: TTA
gtgatttttctttagatgtc

SEQ ID NO: 402797 - DNA, 20 bp, Artificial Sequence
  Description of Artificial Sequence: Synthetic oligonucleotide
  Target: LAMA2; (+) strand; PAM type: YTN; PAM sequence: TTT
ttctttagatgtcttactaa

SEQ ID NO: 402798 - DNA, 20 bp, Artificial Sequence
  Description of Artificial Sequence: Synthetic oligonucleotide
  Target: LAMA2; (+) strand; PAM type: YTN; PAM sequence: TTT
tctttagatgtcttactaag

SEQ ID NO: 402799 - DNA, 20 bp, Artificial Sequence
  Description of Artificial Sequence: Synthetic oligonucleotide
  Target: LAMA2; (+) strand; PAM type: YTN; PAM sequence: TTT
ctttagatgtcttactaagg

SEQ ID NO: 402800 - DNA, 20 bp, Artificial Sequence
  Description of Artificial Sequence: Synthetic oligonucleotide
  Target: LAMA2; (+) strand; PAM type: YTN; PAM sequence: TTC
tttagatgtcttactaagga

SEQ ID NO: 402801 - DNA, 20 bp, Artificial Sequence
  Description of Artificial Sequence: Synthetic oligonucleotide
  Target: LAMA2; (+) strand; PAM type: YTN; PAM sequence: CTT
tagatgtcttactaaggatc

SEQ ID NO: 402802 - DNA, 20 bp, Artificial Sequence
  Description of Artificial Sequence: Synthetic oligonucleotide
  Target: LAMA2; (+) strand; PAM type: YTN; PAM sequence: TTT
agatgtcttactaaggatct

SEQ ID NO: 402803 - DNA, 20 bp, Artificial Sequence
  Description of Artificial Sequence: Synthetic oligonucleotide
  Target: LAMA2; (+) strand; PAM type: YTN; PAM sequence: TTA
gatgtcttactaaggatctg

SEQ ID NO: 402804 - DNA, 20 bp, Artificial Sequence
  Description of Artificial Sequence: Synthetic oligonucleotide
  Target: LAMA2; (+) strand; PAM type: YTN; PAM sequence: CTT
actaaggatctgcattagaa

SEQ ID NO: 402805 - DNA, 20 bp, Artificial Sequence
  Description of Artificial Sequence: Synthetic oligonucleotide
  Target: LAMA2; (+) strand; PAM type: YTN; PAM sequence: TTA
ctaaggatctgcattagaaa

SEQ ID NO: 402806 - DNA, 20 bp, Artificial Sequence
  Description of Artificial Sequence: Synthetic oligonucleotide
  Target: LAMA2; (+) strand; PAM type: YTN; PAM sequence: CTA
aggatctgcattagaaataa

SEQ ID NO: 402807 - DNA, 20 bp, Artificial Sequence
  Description of Artificial Sequence: Synthetic oligonucleotide
  Target: LAMA2; (+) strand; PAM type: YTN; PAM sequence: CTG
cattagaaataacaataatt

SEQ ID NO: 402808 - DNA, 20 bp, Artificial Sequence
  Description of Artificial Sequence: Synthetic oligonucleotide
  Target: LAMA2; (+) strand; PAM type: YTN; PAM sequence: TTA
gaaataacaataattgatag

SEQ ID NO: 402809 - DNA, 20 bp, Artificial Sequence
  Description of Artificial Sequence: Synthetic oligonucleotide
  Target: LAMA2; (+) strand; PAM type: YTN; PAM sequence: TTG
atagagccaaacattctaaa

SEQ ID NO: 402810 - DNA, 20 bp, Artificial Sequence
  Description of Artificial Sequence: Synthetic oligonucleotide
  Target: LAMA2; (+) strand; PAM type: YTN; PAM sequence: TTC
taaaaggatgtttgaatttc

SEQ ID NO: 402811 - DNA, 20 bp, Artificial Sequence
  Description of Artificial Sequence: Synthetic oligonucleotide
  Target: LAMA2; (+) strand; PAM type: YTN; PAM sequence: CTA
aaaggatgtttgaatttcag

SEQ ID NO: 402812 - DNA, 20 bp, Artificial Sequence
  Description of Artificial Sequence: Synthetic oligonucleotide
  Target: LAMA2; (+) strand; PAM type: YTN; PAM sequence: TTT
gaatttcagaaatttctttc

SEQ ID NO: 402813 - DNA, 20 bp, Artificial Sequence
  Description of Artificial Sequence: Synthetic oligonucleotide
  Target: LAMA2; (+) strand; PAM type: YTN; PAM sequence: TTG
aatttcagaaatttctttcc

SEQ ID NO: 402814 - DNA, 20 bp, Artificial Sequence
  Description of Artificial Sequence: Synthetic oligonucleotide
  Target: LAMA2; (+) strand; PAM type: YTN; PAM sequence: TTT
cagaaatttctttcctctta

SEQ ID NO: 402815 - DNA, 20 bp, Artificial Sequence
  Description of Artificial Sequence: Synthetic oligonucleotide
  Target: LAMA2; (+) strand; PAM type: YTN; PAM sequence: TTC
agaaatttctttcctcttac

SEQ ID NO: 402816 - DNA, 20 bp, Artificial Sequence
  Description of Artificial Sequence: Synthetic oligonucleotide
  Target: LAMA2; (+) strand; PAM type: YTN; PAM sequence: TTT
ctttcctcttacaagagtga

SEQ ID NO: 402817 - DNA, 20 bp, Artificial Sequence
  Description of Artificial Sequence: Synthetic oligonucleotide
  Target: LAMA2; (+) strand; PAM type: YTN; PAM sequence: TTC
tttcctcttacaagagtgac

SEQ ID NO: 402818 - DNA, 20 bp, Artificial Sequence
  Description of Artificial Sequence: Synthetic oligonucleotide
  Target: LAMA2; (+) strand; PAM type: YTN; PAM sequence: CTT
tcctcttacaagagtgacat

SEQ ID NO: 402819 - DNA, 20 bp, Artificial Sequence
  Description of Artificial Sequence: Synthetic oligonucleotide
  Target: LAMA2; (+) strand; PAM type: YTN; PAM sequence: TTT
cctcttacaagagtgacata

SEQ ID NO: 402820 - DNA, 20 bp, Artificial Sequence
  Description of Artificial Sequence: Synthetic oligonucleotide
  Target: LAMA2; (+) strand; PAM type: YTN; PAM sequence: TTC
ctcttacaagagtgacatat

SEQ ID NO: 402821 - DNA, 20 bp, Artificial Sequence
  Description of Artificial Sequence: Synthetic oligonucleotide
  Target: LAMA2; (+) strand; PAM type: YTN; PAM sequence: CTC
ttacaagagtgacatatcct

SEQ ID NO: 402822 - DNA, 20 bp, Artificial Sequence
  Description of Artificial Sequence: Synthetic oligonucleotide
  Target: LAMA2; (+) strand; PAM type: YTN; PAM sequence: CTT
acaagagtgacatatcctaa

SEQ ID NO: 402823 - DNA, 20 bp, Artificial Sequence
  Description of Artificial Sequence: Synthetic oligonucleotide
  Target: LAMA2; (+) strand; PAM type: YTN; PAM sequence: TTA
caagagtgacatatcctaaa

SEQ ID NO: 402824 - DNA, 20 bp, Artificial Sequence
  Description of Artificial Sequence: Synthetic oligonucleotide
  Target: LAMA2; (+) strand; PAM type: YTN; PAM sequence: CTA
aagatttcttctagagatac

SEQ ID NO: 402825 - DNA, 20 bp, Artificial Sequence
  Description of Artificial Sequence: Synthetic oligonucleotide
  Target: LAMA2; (+) strand; PAM type: YTN; PAM sequence: TTT
cttctagagatacagtattt

SEQ ID NO: 402826 - DNA, 20 bp, Artificial Sequence
  Description of Artificial Sequence: Synthetic oligonucleotide
  Target: LAMA2; (+) strand; PAM type: YTN; PAM sequence: TTC
ttctagagatacagtatttt
